United States Patent Application Publication US 2018/0305689 A1 - sequence listing, part 138

SEQ ID NO: 1890820 - RNA, 19 nt, Artificial Sequence
  Description of Artificial Sequence: Synthetic oligonucleotide
  Sense strand starting at position 1394 of SEQ ID NO: 1879207
cuuauaagaaucggugcua

SEQ ID NO: 1890821 - RNA, 19 nt, Artificial Sequence
  Description of Artificial Sequence: Synthetic oligonucleotide
  Antisense strand to SEQ ID NO: 1890820
uagcaccgauucuuauaag

SEQ ID NO: 1890822 - RNA, 19 nt, Artificial Sequence
  Description of Artificial Sequence: Synthetic oligonucleotide
  Sense strand starting at position 1395 of SEQ ID NO: 1879207
uuauaagaaucggugcuaa

SEQ ID NO: 1890823 - RNA, 19 nt, Artificial Sequence
  Description of Artificial Sequence: Synthetic oligonucleotide
  Antisense strand to SEQ ID NO: 1890822
uuagcaccgauucuuauaa

SEQ ID NO: 1890824 - RNA, 19 nt, Artificial Sequence
  Description of Artificial Sequence: Synthetic oligonucleotide
  Sense strand starting at position 1413 of SEQ ID NO: 1879207
aggguaugugccuaccaca

SEQ ID NO: 1890825 - RNA, 19 nt, Artificial Sequence
  Description of Artificial Sequence: Synthetic oligonucleotide
  Antisense strand to SEQ ID NO: 1890824
ugugguaggcacauacccu

SEQ ID NO: 1890826 - RNA, 19 nt, Artificial Sequence
  Description of Artificial Sequence: Synthetic oligonucleotide
  Sense strand starting at position 1435 of SEQ ID NO: 1879207
cagcuuguagauuaaugaa

SEQ ID NO: 1890827 - RNA, 19 nt, Artificial Sequence
  Description of Artificial Sequence: Synthetic oligonucleotide
  Antisense strand to SEQ ID NO: 1890826
uucauuaaucuacaagcug

SEQ ID NO: 1890828 - RNA, 19 nt, Artificial Sequence
  Description of Artificial Sequence: Synthetic oligonucleotide
  Sense strand starting at position 1638 of SEQ ID NO: 1879207
cugugcuaaucccuuuaga

SEQ ID NO: 1890829 - RNA, 19 nt, Artificial Sequence
  Description of Artificial Sequence: Synthetic oligonucleotide
  Antisense strand to SEQ ID NO: 1890828
ucuaaagggauuagcacag

SEQ ID NO: 1890830 - RNA, 19 nt, Artificial Sequence
  Description of Artificial Sequence: Synthetic oligonucleotide
  Sense strand starting at position 1868 of SEQ ID NO: 1879207
aggacugggcaccgugaua

SEQ ID NO: 1890831 - RNA, 19 nt, Artificial Sequence
  Description of Artificial Sequence: Synthetic oligonucleotide
  Antisense strand to SEQ ID NO: 1890830
uaucacggugcccaguccu

SEQ ID NO: 1890832 - RNA, 19 nt, Artificial Sequence
  Description of Artificial Sequence: Synthetic oligonucleotide
  Sense strand starting at position 2325 of SEQ ID NO: 1879207
aaguauugcggccaucaca

SEQ ID NO: 1890833 - RNA, 19 nt, Artificial Sequence
  Description of Artificial Sequence: Synthetic oligonucleotide
  Antisense strand to SEQ ID NO: 1890832
ugugauggccgcaauacuu

SEQ ID NO: 1890834 - RNA, 19 nt, Artificial Sequence
  Description of Artificial Sequence: Synthetic oligonucleotide
  Sense strand starting at position 2443 of SEQ ID NO: 1879207
auucgauuuccauguguau

SEQ ID NO: 1890835 - RNA, 19 nt, Artificial Sequence
  Description of Artificial Sequence: Synthetic oligonucleotide
  Antisense strand to SEQ ID NO: 1890834
auacacauggaaaucgaau

SEQ ID NO: 1890836 - RNA, 19 nt, Artificial Sequence
  Description of Artificial Sequence: Synthetic oligonucleotide
  Sense strand starting at position 2461 of SEQ ID NO: 1879207
uggauuuguuucuacauag

SEQ ID NO: 1890837 - RNA, 19 nt, Artificial Sequence
  Description of Artificial Sequence: Synthetic oligonucleotide
  Antisense strand to SEQ ID NO: 1890836
cuauguagaaacaaaucca

SEQ ID NO: 1890838 - RNA, 19 nt, Artificial Sequence
  Description of Artificial Sequence: Synthetic oligonucleotide
  Sense strand starting at position 2471 of SEQ ID NO: 1879207
ucuacauagcugugguaaa

SEQ ID NO: 1890839 - RNA, 19 nt, Artificial Sequence
  Description of Artificial Sequence: Synthetic oligonucleotide
  Antisense strand to SEQ ID NO: 1890838
uuuaccacagcuauguaga

SEQ ID NO: 1890840 - RNA, 19 nt, Artificial Sequence
  Description of Artificial Sequence: Synthetic oligonucleotide
  Sense strand starting at position 2502 of SEQ ID NO: 1879207
aacugaauccaggguuguu

SEQ ID NO: 1890841 - RNA, 19 nt, Artificial Sequence
  Description of Artificial Sequence: Synthetic oligonucleotide
  Antisense strand to SEQ ID NO: 1890840
aacaacccuggauucaguu

SEQ ID NO: 1890842 - RNA, 19 nt, Artificial Sequence
  Description of Artificial Sequence: Synthetic oligonucleotide
  Sense strand starting at position 3026 of SEQ ID NO: 1879207
cccauucuuguguauaaag

SEQ ID NO: 1890843 - RNA, 19 nt, Artificial Sequence
  Description of Artificial Sequence: Synthetic oligonucleotide
  Antisense strand to SEQ ID NO: 1890842
cuuuauacacaagaauggg

SEQ ID NO: 1890844 - RNA, 19 nt, Artificial Sequence
  Description of Artificial Sequence: Synthetic oligonucleotide
  Sense strand starting at position 3058 of SEQ ID NO: 1879207
gagaucaguuuccuuaggu

SEQ ID NO: 1890845 - RNA, 19 nt, Artificial Sequence
  Description of Artificial Sequence: Synthetic oligonucleotide
  Antisense strand to SEQ ID NO: 1890844
accuaaggaaacugaucuc

SEQ ID NO: 1890846 - RNA, 19 nt, Artificial Sequence
  Description of Artificial Sequence: Synthetic oligonucleotide
  Sense strand starting at position 3059 of SEQ ID NO: 1879207
agaucaguuuccuuagguu

SEQ ID NO: 1890847 - RNA, 19 nt, Artificial Sequence
  Description of Artificial Sequence: Synthetic oligonucleotide
  Antisense strand to SEQ ID NO: 1890846
aaccuaaggaaacugaucu

SEQ ID NO: 1890848 - RNA, 19 nt, Artificial Sequence
  Description of Artificial Sequence: Synthetic oligonucleotide
  Sense strand starting at position 3091 of SEQ ID NO: 1879207
ugaaacugcuaagucagaa

SEQ ID NO: 1890849 - RNA, 19 nt, Artificial Sequence
  Description of Artificial Sequence: Synthetic oligonucleotide
  Antisense strand to SEQ ID NO: 1890848
uucugacuuagcaguuuca

SEQ ID NO: 1890850 - RNA, 19 nt, Artificial Sequence
  Description of Artificial Sequence: Synthetic oligonucleotide
  Sense strand starting at position 3129 of SEQ ID NO: 1879207
ucaguauuauugccaaaug

SEQ ID NO: 1890851 - RNA, 19 nt, Artificial Sequence
  Description of Artificial Sequence: Synthetic oligonucleotide
  Antisense strand to SEQ ID NO: 1890850
cauuuggcaauaauacuga

SEQ ID NO: 1890852 - RNA, 19 nt, Artificial Sequence
  Description of Artificial Sequence: Synthetic oligonucleotide
  Sense strand starting at position 3584 of SEQ ID NO: 1879207
uucugagagugucuacauu

SEQ ID NO: 1890853 - RNA, 19 nt, Artificial Sequence
  Description of Artificial Sequence: Synthetic oligonucleotide
  Antisense strand to SEQ ID NO: 1890852
aauguagacacucucagaa

SEQ ID NO: 1890854 - RNA, 19 nt, Artificial Sequence
  Description of Artificial Sequence: Synthetic oligonucleotide
  Sense strand starting at position 3608 of SEQ ID NO: 1879207
gggaucagagcuugaaguu

SEQ ID NO: 1890855 - RNA, 19 nt, Artificial Sequence
  Description of Artificial Sequence: Synthetic oligonucleotide
  Antisense strand to SEQ ID NO: 1890854
aacuucaagcucugauccc

SEQ ID NO: 1890856 - RNA, 19 nt, Artificial Sequence
  Description of Artificial Sequence: Synthetic oligonucleotide
  Sense strand starting at position 3609 of SEQ ID NO: 1879207
ggaucagagcuugaaguug

SEQ ID NO: 1890857 - RNA, 19 nt, Artificial Sequence
  Description of Artificial Sequence: Synthetic oligonucleotide
  Antisense strand to SEQ ID NO: 1890856
caacuucaagcucugaucc

SEQ ID NO: 1890858 - RNA, 19 nt, Artificial Sequence
  Description of Artificial Sequence: Synthetic oligonucleotide
  Sense strand starting at position 3672 of SEQ ID NO: 1879207
gaagauucucacggguuag

SEQ ID NO: 1890859 - RNA, 19 nt, Artificial Sequence
  Description of Artificial Sequence: Synthetic oligonucleotide
  Antisense strand to SEQ ID NO: 1890858
cuaacccgugagaaucuuc

SEQ ID NO: 1890860 - RNA, 19 nt, Artificial Sequence
  Description of Artificial Sequence: Synthetic oligonucleotide
  Sense strand starting at position 3797 of SEQ ID NO: 1879207
aggcuagugagacagaguu

SEQ ID NO: 1890861 - RNA, 19 nt, Artificial Sequence
  Description of Artificial Sequence: Synthetic oligonucleotide
  Antisense strand to SEQ ID NO: 1890860
aacucugucucacuagccu

SEQ ID NO: 1890862 - RNA, 19 nt, Artificial Sequence
  Description of Artificial Sequence: Synthetic oligonucleotide
  Sense strand starting at position 3883 of SEQ ID NO: 1879207
augacaagguaauaaagaa

SEQ ID NO: 1890863 - RNA, 19 nt, Artificial Sequence
  Description of Artificial Sequence: Synthetic oligonucleotide
  Antisense strand to SEQ ID NO: 1890862
uucuuuauuaccuugucau

SEQ ID NO: 1890864 - RNA, 19 nt, Artificial Sequence
  Description of Artificial Sequence: Synthetic oligonucleotide
  Sense strand starting at position 3896 of SEQ ID NO: 1879207
aaagaauaaugagauguga

SEQ ID NO: 1890865 - RNA, 19 nt, Artificial Sequence
  Description of Artificial Sequence: Synthetic oligonucleotide
  Antisense strand to SEQ ID NO: 1890864
ucacaucucauuauucuuu

SEQ ID NO: 1890866 - RNA, 19 nt, Artificial Sequence
  Description of Artificial Sequence: Synthetic oligonucleotide
  Sense strand starting at position 3967 of SEQ ID NO: 1879207
ggaauugacucugcuguca

SEQ ID NO: 1890867 - RNA, 19 nt, Artificial Sequence
  Description of Artificial Sequence: Synthetic oligonucleotide
  Antisense strand to SEQ ID NO: 1890866
ugacagcagagucaauucc

SEQ ID NO: 1890868 - RNA, 19 nt, Artificial Sequence
  Description of Artificial Sequence: Synthetic oligonucleotide
  Sense strand starting at position 164 of SEQ ID NO: 1879210
auguguuugcaaugacuaa

SEQ ID NO: 1890869 - RNA, 19 nt, Artificial Sequence
  Description of Artificial Sequence: Synthetic oligonucleotide
  Antisense strand to SEQ ID NO: 1890868
uuagucauugcaaacacau

SEQ ID NO: 1890870 - RNA, 19 nt, Artificial Sequence
  Description of Artificial Sequence: Synthetic oligonucleotide
  Sense strand starting at position 308 of SEQ ID NO: 1879210
ggguaaauauguucaaagg

SEQ ID NO: 1890871 - RNA, 19 nt, Artificial Sequence
  Description of Artificial Sequence: Synthetic oligonucleotide
  Antisense strand to SEQ ID NO: 1890870
ccuuugaacauauuuaccc

SEQ ID NO: 1890872 - RNA, 19 nt, Artificial Sequence
  Description of Artificial Sequence: Synthetic oligonucleotide
  Sense strand starting at position 340 of SEQ ID NO: 1879210
aaagcaaacuguuuagagu

SEQ ID NO: 1890873 - RNA, 19 nt, Artificial Sequence
  Description of Artificial Sequence: Synthetic oligonucleotide
  Antisense strand to SEQ ID NO: 1890872
acucuaaacaguuugcuuu

SEQ ID NO: 1890874 - RNA, 19 nt, Artificial Sequence
  Description of Artificial Sequence: Synthetic oligonucleotide
  Sense strand starting at position 424 of SEQ ID NO: 1879210
cucuuaaccugagucuuag

SEQ ID NO: 1890875 - RNA, 19 nt, Artificial Sequence
  Description of Artificial Sequence: Synthetic oligonucleotide
  Antisense strand to SEQ ID NO: 1890874
cuaagacucagguuaagag

SEQ ID NO: 1890876 - RNA, 19 nt, Artificial Sequence
  Description of Artificial Sequence: Synthetic oligonucleotide
  Sense strand starting at position 543 of SEQ ID NO: 1879210
acaaauguagcugguacua

SEQ ID NO: 1890877 - RNA, 19 nt, Artificial Sequence
  Description of Artificial Sequence: Synthetic oligonucleotide
  Antisense strand to SEQ ID NO: 1890876
uaguaccagcuacauuugu

SEQ ID NO: 1890878 - RNA, 19 nt, Artificial Sequence
  Description of Artificial Sequence: Synthetic oligonucleotide
  Sense strand starting at position 827 of SEQ ID NO: 1879210
uugggauuauaggcaaaug

SEQ ID NO: 1890879 - RNA, 19 nt, Artificial Sequence
  Description of Artificial Sequence: Synthetic oligonucleotide
  Antisense strand to SEQ ID NO: 1890878
cauuugccuauaaucccaa

SEQ ID NO: 1890880 - RNA, 19 nt, Artificial Sequence
  Description of Artificial Sequence: Synthetic oligonucleotide
  Sense strand starting at position 985 of SEQ ID NO: 1879210
cuaaucaggcccugaguua

SEQ ID NO: 1890881 - RNA, 19 nt, Artificial Sequence
  Description of Artificial Sequence: Synthetic oligonucleotide
  Antisense strand to SEQ ID NO: 1890880
uaacucagggccugauuag

SEQ ID NO: 1890882 - RNA, 19 nt, Artificial Sequence
  Description of Artificial Sequence: Synthetic oligonucleotide
  Sense strand starting at position 1003 of SEQ ID NO: 1879210
agcuguuuccaagaagcuu

SEQ ID NO: 1890883 - RNA, 19 nt, Artificial Sequence
  Description of Artificial Sequence: Synthetic oligonucleotide
  Antisense strand to SEQ ID NO: 1890882
aagcuucuuggaaacagcu

SEQ ID NO: 1890884 - RNA, 19 nt, Artificial Sequence
  Description of Artificial Sequence: Synthetic oligonucleotide
  Sense strand starting at position 1125 of SEQ ID NO: 1879210
ggacaagcuuccuugagcu

SEQ ID NO: 1890885 - RNA, 19 nt, Artificial Sequence
  Description of Artificial Sequence: Synthetic oligonucleotide
  Antisense strand to SEQ ID NO: 1890884
agcucaaggaagcuugucc

SEQ ID NO: 1890886 - RNA, 19 nt, Artificial Sequence
  Description of Artificial Sequence: Synthetic oligonucleotide
  Sense strand starting at position 1135 of SEQ ID NO: 1879210
ccuugagcuccugacuuua

SEQ ID NO: 1890887 - RNA, 19 nt, Artificial Sequence
  Description of Artificial Sequence: Synthetic oligonucleotide
  Antisense strand to SEQ ID NO: 1890886
uaaagucaggagcucaagg

SEQ ID NO: 1890888 - RNA, 19 nt, Artificial Sequence
  Description of Artificial Sequence: Synthetic oligonucleotide
  Sense strand starting at position 1137 of SEQ ID NO: 1879210
uugagcuccugacuuuaga

SEQ ID NO: 1890889 - RNA, 19 nt, Artificial Sequence
  Description of Artificial Sequence: Synthetic oligonucleotide
  Antisense strand to SEQ ID NO: 1890888
ucuaaagucaggagcucaa

SEQ ID NO: 1890890 - RNA, 19 nt, Artificial Sequence
  Description of Artificial Sequence: Synthetic oligonucleotide
  Sense strand starting at position 1245 of SEQ ID NO: 1879210
uacaguacugucgagguuu

SEQ ID NO: 1890891 - RNA, 19 nt, Artificial Sequence
  Description of Artificial Sequence: Synthetic oligonucleotide
  Antisense strand to SEQ ID NO: 1890890
aaaccucgacaguacugua

SEQ ID NO: 1890892 - RNA, 19 nt, Artificial Sequence
  Description of Artificial Sequence: Synthetic oligonucleotide
  Sense strand starting at position 1331 of SEQ ID NO: 1879210
cuuauaagaaucggugcua

SEQ ID NO: 1890893 - RNA, 19 nt, Artificial Sequence
  Description of Artificial Sequence: Synthetic oligonucleotide
  Antisense strand to SEQ ID NO: 1890892
uagcaccgauucuuauaag

SEQ ID NO: 1890894 - RNA, 19 nt, Artificial Sequence
  Description of Artificial Sequence: Synthetic oligonucleotide
  Sense strand starting at position 1332 of SEQ ID NO: 1879210
uuauaagaaucggugcuaa

SEQ ID NO: 1890895 - RNA, 19 nt, Artificial Sequence
  Description of Artificial Sequence: Synthetic oligonucleotide
  Antisense strand to SEQ ID NO: 1890894
uuagcaccgauucuuauaa

SEQ ID NO: 1890896 - RNA, 19 nt, Artificial Sequence
  Description of Artificial Sequence: Synthetic oligonucleotide
  Sense strand starting at position 1350 of SEQ ID NO: 1879210
aggguaugugccuaccaca

SEQ ID NO: 1890897 - RNA, 19 nt, Artificial Sequence
  Description of Artificial Sequence: Synthetic oligonucleotide
  Antisense strand to SEQ ID NO: 1890896
ugugguaggcacauacccu

SEQ ID NO: 1890898 - RNA, 19 nt, Artificial Sequence
  Description of Artificial Sequence: Synthetic oligonucleotide
  Sense strand starting at position 1372 of SEQ ID NO: 1879210
cagcuuguagauuaaugaa

SEQ ID NO: 1890899 - RNA, 19 nt, Artificial Sequence
  Description of Artificial Sequence: Synthetic oligonucleotide
  Antisense strand to SEQ ID NO: 1890898
uucauuaaucuacaagcug

SEQ ID NO: 1890900 - RNA, 19 nt, Artificial Sequence
  Description of Artificial Sequence: Synthetic oligonucleotide
  Sense strand starting at position 1575 of SEQ ID NO: 1879210
cugugcuaaucccuuuaga

SEQ ID NO: 1890901 - RNA, 19 nt, Artificial Sequence
  Description of Artificial Sequence: Synthetic oligonucleotide
  Antisense strand to SEQ ID NO: 1890900
ucuaaagggauuagcacag

SEQ ID NO: 1890902 - RNA, 19 nt, Artificial Sequence
  Description of Artificial Sequence: Synthetic oligonucleotide
  Sense strand starting at position 1805 of SEQ ID NO: 1879210
aggacugggcaccgugaua

SEQ ID NO: 1890903 - RNA, 19 nt, Artificial Sequence
  Description of Artificial Sequence: Synthetic oligonucleotide
  Antisense strand to SEQ ID NO: 1890902
uaucacggugcccaguccu

SEQ ID NO: 1890904 - RNA, 19 nt, Artificial Sequence
  Description of Artificial Sequence: Synthetic oligonucleotide
  Sense strand starting at position 2262 of SEQ ID NO: 1879210
aaguauugcggccaucaca

SEQ ID NO: 1890905 - RNA, 19 nt, Artificial Sequence
  Description of Artificial Sequence: Synthetic oligonucleotide
  Antisense strand to SEQ ID NO: 1890904
ugugauggccgcaauacuu

SEQ ID NO: 1890906 - RNA, 19 nt, Artificial Sequence
  Description of Artificial Sequence: Synthetic oligonucleotide
  Sense strand starting at position 2380 of SEQ ID NO: 1879210
auucgauuuccauguguau

SEQ ID NO: 1890907 - RNA, 19 nt, Artificial Sequence
  Description of Artificial Sequence: Synthetic oligonucleotide
  Antisense strand to SEQ ID NO: 1890906
auacacauggaaaucgaau

SEQ ID NO: 1890908 - RNA, 19 nt, Artificial Sequence
  Description of Artificial Sequence: Synthetic oligonucleotide
  Sense strand starting at position 2398 of SEQ ID NO: 1879210
uggauuuguuucuacauag

SEQ ID NO: 1890909 - RNA, 19 nt, Artificial Sequence
  Description of Artificial Sequence: Synthetic oligonucleotide
  Antisense strand to SEQ ID NO: 1890908
cuauguagaaacaaaucca

SEQ ID NO: 1890910 - RNA, 19 nt, Artificial Sequence
  Description of Artificial Sequence: Synthetic oligonucleotide
  Sense strand starting at position 2408 of SEQ ID NO: 1879210
ucuacauagcugugguaaa

SEQ ID NO: 1890911 - RNA, 19 nt, Artificial Sequence
  Description of Artificial Sequence: Synthetic oligonucleotide
  Antisense strand to SEQ ID NO: 1890910
uuuaccacagcuauguaga

SEQ ID NO: 1890912 - RNA, 19 nt, Artificial Sequence
  Description of Artificial Sequence: Synthetic oligonucleotide
  Sense strand starting at position 2439 of SEQ ID NO: 1879210
aacugaauccaggguuguu

SEQ ID NO: 1890913 - RNA, 19 nt, Artificial Sequence
  Description of Artificial Sequence: Synthetic oligonucleotide
  Antisense strand to SEQ ID NO: 1890912
aacaacccuggauucaguu

SEQ ID NO: 1890914 - RNA, 19 nt, Artificial Sequence
  Description of Artificial Sequence: Synthetic oligonucleotide
  Sense strand starting at position 2963 of SEQ ID NO: 1879210
cccauucuuguguauaaag

SEQ ID NO: 1890915 - RNA, 19 nt, Artificial Sequence
  Description of Artificial Sequence: Synthetic oligonucleotide
  Antisense strand to SEQ ID NO: 1890914
cuuuauacacaagaauggg

SEQ ID NO: 1890916 - RNA, 19 nt, Artificial Sequence
  Description of Artificial Sequence: Synthetic oligonucleotide
  Sense strand starting at position 2995 of SEQ ID NO: 1879210
gagaucaguuuccuuaggu

SEQ ID NO: 1890917 - RNA, 19 nt, Artificial Sequence
  Description of Artificial Sequence: Synthetic oligonucleotide
  Antisense strand to SEQ ID NO: 1890916
accuaaggaaacugaucuc

SEQ ID NO: 1890918 - RNA, 19 nt, Artificial Sequence
  Description of Artificial Sequence: Synthetic oligonucleotide
  Sense strand starting at position 2996 of SEQ ID NO: 1879210
agaucaguuuccuuagguu

SEQ ID NO: 1890919 - RNA, 19 nt, Artificial Sequence
  Description of Artificial Sequence: Synthetic oligonucleotide
  Antisense strand to SEQ ID NO: 1890918
aaccuaaggaaacugaucu

SEQ ID NO: 1890920 - RNA, 19 nt, Artificial Sequence
  Description of Artificial Sequence: Synthetic oligonucleotide
  Sense strand starting at position 3028 of SEQ ID NO: 1879210
ugaaacugcuaagucagaa

SEQ ID NO: 1890921 - RNA, 19 nt, Artificial Sequence
  Description of Artificial Sequence: Synthetic oligonucleotide
  Antisense strand to SEQ ID NO: 1890920
uucugacuuagcaguuuca

SEQ ID NO: 1890922 - RNA, 19 nt, Artificial Sequence
  Description of Artificial Sequence: Synthetic oligonucleotide
  Sense strand starting at position 3066 of SEQ ID NO: 1879210
ucaguauuauugccaaaug

SEQ ID NO: 1890923 - RNA, 19 nt, Artificial Sequence
  Description of Artificial Sequence: Synthetic oligonucleotide
  Antisense strand to SEQ ID NO: 1890922
cauuuggcaauaauacuga

SEQ ID NO: 1890924 - RNA, 19 nt, Artificial Sequence
  Description of Artificial Sequence: Synthetic oligonucleotide
  Sense strand starting at position 3521 of SEQ ID NO: 1879210
uucugagagugucuacauu

SEQ ID NO: 1890925 - RNA, 19 nt, Artificial Sequence
  Description of Artificial Sequence: Synthetic oligonucleotide
  Antisense strand to SEQ ID NO: 1890924
aauguagacacucucagaa

SEQ ID NO: 1890926 - RNA, 19 nt, Artificial Sequence
  Description of Artificial Sequence: Synthetic oligonucleotide
  Sense strand starting at position 3545 of SEQ ID NO: 1879210
gggaucagagcuugaaguu

SEQ ID NO: 1890927 - RNA, 19 nt, Artificial Sequence
  Description of Artificial Sequence: Synthetic oligonucleotide
  Antisense strand to SEQ ID NO: 1890926
aacuucaagcucugauccc

SEQ ID NO: 1890928 - RNA, 19 nt, Artificial Sequence
  Description of Artificial Sequence: Synthetic oligonucleotide
  Sense strand starting at position 3546 of SEQ ID NO: 1879210
ggaucagagcuugaaguug

SEQ ID NO: 1890929 - RNA, 19 nt, Artificial Sequence
  Description of Artificial Sequence: Synthetic oligonucleotide
  Antisense strand to SEQ ID NO: 1890928
caacuucaagcucugaucc

SEQ ID NO: 1890930 - RNA, 19 nt, Artificial Sequence
  Description of Artificial Sequence: Synthetic oligonucleotide
  Sense strand starting at position 3609 of SEQ ID NO: 1879210
gaagauucucacggguuag

SEQ ID NO: 1890931 - RNA, 19 nt, Artificial Sequence
  Description of Artificial Sequence: Synthetic oligonucleotide
  Antisense strand to SEQ ID NO: 1890930
cuaacccgugagaaucuuc

SEQ ID NO: 1890932 - RNA, 19 nt, Artificial Sequence
  Description of Artificial Sequence: Synthetic oligonucleotide
  Sense strand starting at position 3734 of SEQ ID NO: 1879210
aggcuagugagacagaguu

SEQ ID NO: 1890933 - RNA, 19 nt, Artificial Sequence
  Description of Artificial Sequence: Synthetic oligonucleotide
  Antisense strand to SEQ ID NO: 1890932
aacucugucucacuagccu

SEQ ID NO: 1890934 - RNA, 19 nt, Artificial Sequence
  Description of Artificial Sequence: Synthetic oligonucleotide
  Sense strand starting at position 3820 of SEQ ID NO: 1879210
augacaagguaauaaagaa

SEQ ID NO: 1890935 - RNA, 19 nt, Artificial Sequence
  Description of Artificial Sequence: Synthetic oligonucleotide
  Antisense strand to SEQ ID NO: 1890934
uucuuuauuaccuugucau

SEQ ID NO: 1890936 - RNA, 19 nt, Artificial Sequence
  Description of Artificial Sequence: Synthetic oligonucleotide
  Sense strand starting at position 3833 of SEQ ID NO: 1879210
aaagaauaaugagauguga

SEQ ID NO: 1890937 - RNA, 19 nt, Artificial Sequence
  Description of Artificial Sequence: Synthetic oligonucleotide
  Antisense strand to SEQ ID NO: 1890936
ucacaucucauuauucuuu

SEQ ID NO: 1890938 - RNA, 19 nt, Artificial Sequence
  Description of Artificial Sequence: Synthetic oligonucleotide
  Sense strand starting at position 3904 of SEQ ID NO: 1879210
ggaauugacucugcuguca

SEQ ID NO: 1890939 - RNA, 19 nt, Artificial Sequence
  Description of Artificial Sequence: Synthetic oligonucleotide
  Antisense strand to SEQ ID NO: 1890938
ugacagcagagucaauucc

SEQ ID NO: 1890940 - RNA, 19 nt, Artificial Sequence
  Description of Artificial Sequence: Synthetic oligonucleotide
  Sense strand starting at position 3929 of SEQ ID NO: 1879210
ggguuucuggagugacaga

SEQ ID NO: 1890941 - RNA, 19 nt, Artificial Sequence
  Description of Artificial Sequence: Synthetic oligonucleotide
  Antisense strand to SEQ ID NO: 1890940
ucugucacuccagaaaccc

SEQ ID NO: 1890942 - RNA, 19 nt, Artificial Sequence
  Description of Artificial Sequence: Synthetic oligonucleotide
  Sense strand starting at position 3930 of SEQ ID NO: 1879210
gguuucuggagugacagau

SEQ ID NO: 1890943 - RNA, 19 nt, Artificial Sequence
  Description of Artificial Sequence: Synthetic oligonucleotide
  Antisense strand to SEQ ID NO: 1890942
aucugucacuccagaaacc

SEQ ID NO: 1890944 - RNA, 19 nt, Artificial Sequence
  Description of Artificial Sequence: Synthetic oligonucleotide
  Sense strand starting at position 3974 of SEQ ID NO: 1879210
guuuacucuguguaaaucu

SEQ ID NO: 1890945 - RNA, 19 nt, Artificial Sequence
  Description of Artificial Sequence: Synthetic oligonucleotide
  Antisense strand to SEQ ID NO: 1890944
agauuuacacagaguaaac

SEQ ID NO: 1890946 - RNA, 19 nt, Artificial Sequence
  Description of Artificial Sequence: Synthetic oligonucleotide
  Sense strand starting at position 3983 of SEQ ID NO: 1879210
guguaaaucuacucacugu

SEQ ID NO: 1890947 - RNA, 19 nt, Artificial Sequence
  Description of Artificial Sequence: Synthetic oligonucleotide
  Antisense strand to SEQ ID NO: 1890946
acagugaguagauuuacac

SEQ ID NO: 1890948 - RNA, 19 nt, Artificial Sequence
  Description of Artificial Sequence: Synthetic oligonucleotide
  Sense strand starting at position 265 of SEQ ID NO: 1879211
augucuuaaguagauagua

SEQ ID NO: 1890949 - RNA, 19 nt, Artificial Sequence
  Description of Artificial Sequence: Synthetic oligonucleotide
  Antisense strand to SEQ ID NO: 1890948
uacuaucuacuuaagacau

SEQ ID NO: 1890950 - RNA, 19 nt, Artificial Sequence
  Description of Artificial Sequence: Synthetic oligonucleotide
  Sense strand starting at position 267 of SEQ ID NO: 1879211
gucuuaaguagauaguauu

SEQ ID NO: 1890951 - RNA, 19 nt, Artificial Sequence
  Description of Artificial Sequence: Synthetic oligonucleotide
  Antisense strand to SEQ ID NO: 1890950
aauacuaucuacuuaagac

SEQ ID NO: 1890952 - RNA, 19 nt, Artificial Sequence
  Description of Artificial Sequence: Synthetic oligonucleotide
  Sense strand starting at position 444 of SEQ ID NO: 1879211
gugguaucacuauaucucu

SEQ ID NO: 1890953 - RNA, 19 nt, Artificial Sequence
  Description of Artificial Sequence: Synthetic oligonucleotide
  Antisense strand to SEQ ID NO: 1890952
agagauauagugauaccac

SEQ ID NO: 1890954 - RNA, 19 nt, Artificial Sequence
  Description of Artificial Sequence: Synthetic oligonucleotide
  Sense strand starting at position 598 of SEQ ID NO: 1879211
agguacuuggaagguuauu

SEQ ID NO: 1890955 - RNA, 19 nt, Artificial Sequence
  Description of Artificial Sequence: Synthetic oligonucleotide
  Antisense strand to SEQ ID NO: 1890954
aauaaccuuccaaguaccu

SEQ ID NO: 1890956 - RNA, 19 nt, Artificial Sequence
  Description of Artificial Sequence: Synthetic oligonucleotide
  Sense strand starting at position 603 of SEQ ID NO: 1879211
cuuggaagguuauuggaca

SEQ ID NO: 1890957 - RNA, 19 nt, Artificial Sequence
  Description of Artificial Sequence: Synthetic oligonucleotide
  Antisense strand to SEQ ID NO: 1890956
uguccaauaaccuuccaag

SEQ ID NO: 1890958 - RNA, 19 nt, Artificial Sequence
  Description of Artificial Sequence: Synthetic oligonucleotide
  Sense strand starting at position 821 of SEQ ID NO: 1879211
ggagcuuucugaguaggga

SEQ ID NO: 1890959 - RNA, 19 nt, Artificial Sequence
  Description of Artificial Sequence: Synthetic oligonucleotide
  Antisense strand to SEQ ID NO: 1890958
ucccuacucagaaagcucc

SEQ ID NO: 1890960 - RNA, 19 nt, Artificial Sequence
  Description of Artificial Sequence: Synthetic oligonucleotide
  Sense strand starting at position 822 of SEQ ID NO: 1879211
gagcuuucugaguagggag

SEQ ID NO: 1890961 - RNA, 19 nt, Artificial Sequence
  Description of Artificial Sequence: Synthetic oligonucleotide
  Antisense strand to SEQ ID NO: 1890960
cucccuacucagaaagcuc

SEQ ID NO: 1890962 - RNA, 19 nt, Artificial Sequence
  Description of Artificial Sequence: Synthetic oligonucleotide
  Sense strand starting at position 846 of SEQ ID NO: 1879211
ggcacaccugcucaguaaa

SEQ ID NO: 1890963 - RNA, 19 nt, Artificial Sequence
  Description of Artificial Sequence: Synthetic oligonucleotide
  Antisense strand to SEQ ID NO: 1890962
uuuacugagcaggugugcc

SEQ ID NO: 1890964 - RNA, 19 nt, Artificial Sequence
  Description of Artificial Sequence: Synthetic oligonucleotide
  Sense strand starting at position 877 of SEQ ID NO: 1879211
uuuaguguucuagauugag

SEQ ID NO: 1890965 - RNA, 19 nt, Artificial Sequence
  Description of Artificial Sequence: Synthetic oligonucleotide
  Antisense strand to SEQ ID NO: 1890964
cucaaucuagaacacuaaa

SEQ ID NO: 1890966 - RNA, 19 nt, Artificial Sequence
  Description of Artificial Sequence: Synthetic oligonucleotide
  Sense strand starting at position 926 of SEQ ID NO: 1879211
uagcauguuccugagaggu

SEQ ID NO: 1890967 - RNA, 19 nt, Artificial Sequence
  Description of Artificial Sequence: Synthetic oligonucleotide
  Antisense strand to SEQ ID NO: 1890966
accucucaggaacaugcua

SEQ ID NO: 1890968 - RNA, 19 nt, Artificial Sequence
  Description of Artificial Sequence: Synthetic oligonucleotide
  Sense strand starting at position 930 of SEQ ID NO: 1879211
auguuccugagagguuaua

SEQ ID NO: 1890969 - RNA, 19 nt, Artificial Sequence
  Description of Artificial Sequence: Synthetic oligonucleotide
  Antisense strand to SEQ ID NO: 1890968
uauaaccucucaggaacau

SEQ ID NO: 1890970 - RNA, 19 nt, Artificial Sequence
  Description of Artificial Sequence: Synthetic oligonucleotide
  Sense strand starting at position 990 of SEQ ID NO: 1879211
uaagaauacuugcuaguug

SEQ ID NO: 1890971 - RNA, 19 nt, Artificial Sequence
  Description of Artificial Sequence: Synthetic oligonucleotide
  Antisense strand to SEQ ID NO: 1890970
caacuagcaaguauucuua

SEQ ID NO: 1890972 - RNA, 19 nt, Artificial Sequence
  Description of Artificial Sequence: Synthetic oligonucleotide
  Sense strand starting at position 1166 of SEQ ID NO: 1879211
uucucaacccgugauauuc

SEQ ID NO: 1890973 - RNA, 19 nt, Artificial Sequence
  Description of Artificial Sequence: Synthetic oligonucleotide
  Antisense strand to SEQ ID NO: 1890972
gaauaucacggguugagaa

SEQ ID NO: 1890974 - RNA, 19 nt, Artificial Sequence
  Description of Artificial Sequence: Synthetic oligonucleotide
  Sense strand starting at position 1192 of SEQ ID NO: 1879211
ggucucuugguauguauuu

SEQ ID NO: 1890975 - RNA, 19 nt, Artificial Sequence
  Description of Artificial Sequence: Synthetic oligonucleotide
  Antisense strand to SEQ ID NO: 1890974
aaauacauaccaagagacc

SEQ ID NO: 1890976 - RNA, 19 nt, Artificial Sequence
  Description of Artificial Sequence: Synthetic oligonucleotide
  Sense strand starting at position 1199 of SEQ ID NO: 1879211
ugguauguauuugccucaa

SEQ ID NO: 1890977 - RNA, 19 nt, Artificial Sequence
  Description of Artificial Sequence: Synthetic oligonucleotide
  Antisense strand to SEQ ID NO: 1890976
uugaggcaaauacauacca

SEQ ID NO: 1890978 - RNA, 19 nt, Artificial Sequence
  Description of Artificial Sequence: Synthetic oligonucleotide
  Sense strand starting at position 1361 of SEQ ID NO: 1879211
gcauguucugaccacccaa

SEQ ID NO: 1890979 - RNA, 19 nt, Artificial Sequence
  Description of Artificial Sequence: Synthetic oligonucleotide
  Antisense strand to SEQ ID NO: 1890978
uuggguggucagaacaugc

SEQ ID NO: 1890980 - RNA, 19 nt, Artificial Sequence
  Description of Artificial Sequence: Synthetic oligonucleotide
  Sense strand starting at position 1533 of SEQ ID NO: 1879211
ucugaaguucuguauugac

SEQ ID NO: 1890981 - RNA, 19 nt, Artificial Sequence
  Description of Artificial Sequence: Synthetic oligonucleotide
  Antisense strand to SEQ ID NO: 1890980
gucaauacagaacuucaga

SEQ ID NO: 1890982 - RNA, 19 nt, Artificial Sequence
  Description of Artificial Sequence: Synthetic oligonucleotide
  Sense strand starting at position 1563 of SEQ ID NO: 1879211
guguauauuccagaauuag

SEQ ID NO: 1890983 - RNA, 19 nt, Artificial Sequence
  Description of Artificial Sequence: Synthetic oligonucleotide
  Antisense strand to SEQ ID NO: 1890982
cuaauucuggaauauacac

SEQ ID NO: 1890984 - RNA, 19 nt, Artificial Sequence
  Description of Artificial Sequence: Synthetic oligonucleotide
  Sense strand starting at position 1622 of SEQ ID NO: 1879211
auuauauuaggauguugga

SEQ ID NO: 1890985 - RNA, 19 nt, Artificial Sequence
  Description of Artificial Sequence: Synthetic oligonucleotide
  Antisense strand to SEQ ID NO: 1890984
uccaacauccuaauauaau

SEQ ID NO: 1890986 - RNA, 19 nt, Artificial Sequence
  Description of Artificial Sequence: Synthetic oligonucleotide
  Sense strand starting at position 1992 of SEQ ID NO: 1879211
uggcuugugacuggagaca

SEQ ID NO: 1890987 - RNA, 19 nt, Artificial Sequence
  Description of Artificial Sequence: Synthetic oligonucleotide
  Antisense strand to SEQ ID NO: 1890986
ugucuccagucacaagcca

SEQ ID NO: 1890988 - RNA, 19 nt, Artificial Sequence
  Description of Artificial Sequence: Synthetic oligonucleotide
  Sense strand starting at position 2218 of SEQ ID NO: 1879211
ggaccugagucuuccaaga

SEQ ID NO: 1890989 - RNA, 19 nt, Artificial Sequence
  Description of Artificial Sequence: Synthetic oligonucleotide
  Antisense strand to SEQ ID NO: 1890988
ucuuggaagacucaggucc

SEQ ID NO: 1890990 - RNA, 19 nt, Artificial Sequence
  Description of Artificial Sequence: Synthetic oligonucleotide
  Sense strand starting at position 2223 of SEQ ID NO: 1879211
ugagucuuccaagagcuca

SEQ ID NO: 1890991 - RNA, 19 nt, Artificial Sequence
  Description of Artificial Sequence: Synthetic oligonucleotide
  Antisense strand to SEQ ID NO: 1890990
ugagcucuuggaagacuca

SEQ ID NO: 1890992 - RNA, 19 nt, Artificial Sequence
  Description of Artificial Sequence: Synthetic oligonucleotide
  Sense strand starting at position 2327 of SEQ ID NO: 1879211
agagaugagcuagguuaag

SEQ ID NO: 1890993 - RNA, 19 nt, Artificial Sequence
  Description of Artificial Sequence: Synthetic oligonucleotide
  Antisense strand to SEQ ID NO: 1890992
cuuaaccuagcucaucucu

SEQ ID NO: 1890994 - RNA, 19 nt, Artificial Sequence
  Description of Artificial Sequence: Synthetic oligonucleotide
  Sense strand starting at position 2447 of SEQ ID NO: 1879211
ggcaaauaccaucagcagu

SEQ ID NO: 1890995 - RNA, 19 nt, Artificial Sequence
  Description of Artificial Sequence: Synthetic oligonucleotide
  Antisense strand to SEQ ID NO: 1890994
acugcugaugguauuugcc

SEQ ID NO: 1890996 - RNA, 19 nt, Artificial Sequence
  Description of Artificial Sequence: Synthetic oligonucleotide
  Sense strand starting at position 2644 of SEQ ID NO: 1879211
uuuaucaugaaggguugaa

SEQ ID NO: 1890997 - RNA, 19 nt, Artificial Sequence
  Description of Artificial Sequence: Synthetic oligonucleotide
  Antisense strand to SEQ ID NO: 1890996
uucaacccuucaugauaaa

SEQ ID NO: 1890998 - RNA, 19 nt, Artificial Sequence
  Description of Artificial Sequence: Synthetic oligonucleotide
  Sense strand starting at position 2695 of SEQ ID NO: 1879211
ucuugaauaccguagagua

SEQ ID NO: 1890999 - RNA, 19 nt, Artificial Sequence
  Description of Artificial Sequence: Synthetic oligonucleotide
  Antisense strand to SEQ ID NO: 1890998
uacucuacgguauucaaga

SEQ ID NO: 1891000 - RNA, 19 nt, Artificial Sequence
  Description of Artificial Sequence: Synthetic oligonucleotide
  Sense strand starting at position 2708 of SEQ ID NO: 1879211
agaguacagucucucauau

SEQ ID NO: 1891001 - RNA, 19 nt, Artificial Sequence
  Description of Artificial Sequence: Synthetic oligonucleotide
  Antisense strand to SEQ ID NO: 1891000
auaugagagacuguacucu

SEQ ID NO: 1891002 - RNA, 19 nt, Artificial Sequence
  Description of Artificial Sequence: Synthetic oligonucleotide
  Sense strand starting at position 2876 of SEQ ID NO: 1879211
ccaucauaagucugagauc

SEQ ID NO: 1891003 - RNA, 19 nt, Artificial Sequence
  Description of Artificial Sequence: Synthetic oligonucleotide
  Antisense strand to SEQ ID NO: 1891002
gaucucagacuuaugaugg

SEQ ID NO: 1891004 - RNA, 19 nt, Artificial Sequence
  Description of Artificial Sequence: Synthetic oligonucleotide
  Sense strand starting at position 2888 of SEQ ID NO: 1879211
ugagaucaucuguacaggu

SEQ ID NO: 1891005 - RNA, 19 nt, Artificial Sequence
  Description of Artificial Sequence: Synthetic oligonucleotide
  Antisense strand to SEQ ID NO: 1891004
accuguacagaugaucuca

SEQ ID NO: 1891006 - RNA, 19 nt, Artificial Sequence
  Description of Artificial Sequence: Synthetic oligonucleotide
  Sense strand starting at position 2890 of SEQ ID NO: 1879211
agaucaucuguacagguuu

SEQ ID NO: 1891007 - RNA, 19 nt, Artificial Sequence
  Description of Artificial Sequence: Synthetic oligonucleotide
  Antisense strand to SEQ ID NO: 1891006
aaaccuguacagaugaucu

SEQ ID NO: 1891008 - RNA, 19 nt, Artificial Sequence
  Description of Artificial Sequence: Synthetic oligonucleotide
  Sense strand starting at position 3047 of SEQ ID NO: 1879211
auagguauagugcaaauua

SEQ ID NO: 1891009 - RNA, 19 nt, Artificial Sequence
  Description of Artificial Sequence: Synthetic oligonucleotide
  Antisense strand to SEQ ID NO: 1891008
uaauuugcacuauaccuau

SEQ ID NO: 1891010 - RNA, 19 nt, Artificial Sequence
  Description of Artificial Sequence: Synthetic oligonucleotide
  Sense strand starting at position 3055 of SEQ ID NO: 1879211
agugcaaauuaaucuagau

SEQ ID NO: 1891011 - RNA, 19 nt, Artificial Sequence
  Description of Artificial Sequence: Synthetic oligonucleotide
  Antisense strand to SEQ ID NO: 1891010
aucuagauuaauuugcacu

SEQ ID NO: 1891012 - RNA, 19 nt, Artificial Sequence
  Description of Artificial Sequence: Synthetic oligonucleotide
  Sense strand starting at position 3160 of SEQ ID NO: 1879211
ugugccauacuauauuaua

SEQ ID NO: 1891013 - RNA, 19 nt, Artificial Sequence
  Description of Artificial Sequence: Synthetic oligonucleotide
  Antisense strand to SEQ ID NO: 1891012
uauaauauaguauggcaca

SEQ ID NO: 1891014 - RNA, 19 nt, Artificial Sequence
  Description of Artificial Sequence: Synthetic oligonucleotide
  Sense strand starting at position 3290 of SEQ ID NO: 1879211
gugccuagagguuaccaua

SEQ ID NO: 1891015 - RNA, 19 nt, Artificial Sequence
  Description of Artificial Sequence: Synthetic oligonucleotide
  Antisense strand to SEQ ID NO: 1891014
uaugguaaccucuaggcac

SEQ ID NO: 1891016 - RNA, 19 nt, Artificial Sequence
  Description of Artificial Sequence: Synthetic oligonucleotide
  Sense strand starting at position 3380 of SEQ ID NO: 1879211
gguuguauugacuacuuua

SEQ ID NO: 1891017 - RNA, 19 nt, Artificial Sequence
  Description of Artificial Sequence: Synthetic oligonucleotide
  Antisense strand to SEQ ID NO: 1891016
uaaaguagucaauacaacc

SEQ ID NO: 1891018 - RNA, 19 nt, Artificial Sequence
  Description of Artificial Sequence: Synthetic oligonucleotide
  Sense strand starting at position 3383 of SEQ ID NO: 1879211
uguauugacuacuuuagau

SEQ ID NO: 1891019 - RNA, 19 nt, Artificial Sequence
  Description of Artificial Sequence: Synthetic oligonucleotide
  Antisense strand to SEQ ID NO: 1891018
aucuaaaguagucaauaca

SEQ ID NO: 1891020 - RNA, 19 nt, Artificial Sequence
  Description of Artificial Sequence: Synthetic oligonucleotide
  Sense strand starting at position 3401 of SEQ ID NO: 1879211
ucuagaucagguggucaga

SEQ ID NO: 1891021 - RNA, 19 nt, Artificial Sequence
  Description of Artificial Sequence: Synthetic oligonucleotide
  Antisense strand to SEQ ID NO: 1891020
ucugaccaccugaucuaga

SEQ ID NO: 1891022 - RNA, 19 nt, Artificial Sequence
  Description of Artificial Sequence: Synthetic oligonucleotide
  Sense strand starting at position 3403 of SEQ ID NO: 1879211
uagaucagguggucagaaa

SEQ ID NO: 1891023 - RNA, 19 nt, Artificial Sequence
  Description of Artificial Sequence: Synthetic oligonucleotide
  Antisense strand to SEQ ID NO: 1891022
uuucugaccaccugaucua

SEQ ID NO: 1891024 - RNA, 19 nt, Artificial Sequence
  Description of Artificial Sequence: Synthetic oligonucleotide
  Sense strand starting at position 3571 of SEQ ID NO: 1879211
gagcgucugaagcauaaga

SEQ ID NO: 1891025 - RNA, 19 nt, Artificial Sequence
  Description of Artificial Sequence: Synthetic oligonucleotide
  Antisense strand to SEQ ID NO: 1891024
ucuuaugcuucagacgcuc

SEQ ID NO: 1891026 - RNA, 19 nt, Artificial Sequence
  Description of Artificial Sequence: Synthetic oligonucleotide
  Sense strand starting at position 3573 of SEQ ID NO: 1879211
gcgucugaagcauaagaaa

SEQ ID NO: 1891027 - RNA, 19 nt, Artificial Sequence
  Description of Artificial Sequence: Synthetic oligonucleotide
  Antisense strand to SEQ ID NO: 1891026
uuucuuaugcuucagacgc

SEQ ID NO: 1891028 - RNA, 19 nt, Artificial Sequence
  Description of Artificial Sequence: Synthetic oligonucleotide
  Sense strand starting at position 82 of SEQ ID NO: 1879212
agcugacucuaguacagau

SEQ ID NO: 1891029 - RNA, 19 nt, Artificial Sequence
  Description of Artificial Sequence: Synthetic oligonucleotide
  Antisense strand to SEQ ID NO: 1891028
aucuguacuagagucagcu

SEQ ID NO: 1891030 - RNA, 19 nt, Artificial Sequence
  Description of Artificial Sequence: Synthetic oligonucleotide
  Sense strand starting at position 92 of SEQ ID NO: 1879212
aguacagauccgcauauga

SEQ ID NO: 1891031 - RNA, 19 nt, Artificial Sequence
  Description of Artificial Sequence: Synthetic oligonucleotide
  Antisense strand to SEQ ID NO: 1891030
ucauaugcggaucuguacu

SEQ ID NO: 1891032 - RNA, 19 nt, Artificial Sequence
  Description of Artificial Sequence: Synthetic oligonucleotide
  Sense strand starting at position 123 of SEQ ID NO: 1879212
aggaauugcucucauuuag

SEQ ID NO: 1891033 - RNA, 19 nt, Artificial Sequence
  Description of Artificial Sequence: Synthetic oligonucleotide
  Antisense strand to SEQ ID NO: 1891032
cuaaaugagagcaauuccu

SEQ ID NO: 1891034 - RNA, 19 nt, Artificial Sequence
  Description of Artificial Sequence: Synthetic oligonucleotide
  Sense strand starting at position 169 of SEQ ID NO: 1879212
ggcacauuguacuaaauug

SEQ ID NO: 1891035 - RNA, 19 nt, Artificial Sequence
  Description of Artificial Sequence: Synthetic oligonucleotide
  Antisense strand to SEQ ID NO: 1891034
caauuuaguacaaugugcc

SEQ ID NO: 1891036 - RNA, 19 nt, Artificial Sequence
  Description of Artificial Sequence: Synthetic oligonucleotide
  Sense strand starting at position 185 of SEQ ID NO: 1879212
uugaguuucucuuaucucu

SEQ ID NO: 1891037 - RNA, 19 nt, Artificial Sequence
  Description of Artificial Sequence: Synthetic oligonucleotide
  Antisense strand to SEQ ID NO: 1891036
agagauaagagaaacucaa

SEQ ID NO: 1891038 - RNA, 19 nt, Artificial Sequence
  Description of Artificial Sequence: Synthetic oligonucleotide
  Sense strand starting at position 449 of SEQ ID NO: 1879212
ccucgugauuugagacgga

SEQ ID NO: 1891039 - RNA, 19 nt, Artificial Sequence
  Description of Artificial Sequence: Synthetic oligonucleotide
  Antisense strand to SEQ ID NO: 1891038
uccgucucaaaucacgagg

SEQ ID NO: 1891040 - RNA, 19 nt, Artificial Sequence
  Description of Artificial Sequence: Synthetic oligonucleotide
  Sense strand starting at position 1175 of SEQ ID NO: 1879212
ggaguagugaaacaguacu

SEQ ID NO: 1891041 - RNA, 19 nt, Artificial Sequence
  Description of Artificial Sequence: Synthetic oligonucleotide
  Antisense strand to SEQ ID NO: 1891040
aguacuguuucacuacucc

SEQ ID NO: 1891042 - RNA, 19 nt, Artificial Sequence
  Description of Artificial Sequence: Synthetic oligonucleotide
  Sense strand starting at position 1181 of SEQ ID NO: 1879212
gugaaacaguacucugacu

SEQ ID NO: 1891043 - RNA, 19 nt, Artificial Sequence
  Description of Artificial Sequence: Synthetic oligonucleotide
  Antisense strand to SEQ ID NO: 1891042
agucagaguacuguuucac

SEQ ID NO: 1891044 - RNA, 19 nt, Artificial Sequence
  Description of Artificial Sequence: Synthetic oligonucleotide
  Sense strand starting at position 1214 of SEQ ID NO: 1879212
aggaaugacuucuugcuuu

SEQ ID NO: 1891045 - RNA, 19 nt, Artificial Sequence
  Description of Artificial Sequence: Synthetic oligonucleotide
  Antisense strand to SEQ ID NO: 1891044
aaagcaagaagucauuccu

SEQ ID NO: 1891046 - RNA, 19 nt, Artificial Sequence
  Description of Artificial Sequence: Synthetic oligonucleotide
  Sense strand starting at position 1235 of SEQ ID NO: 1879212
uuaagcaaguguguuagaa

SEQ ID NO: 1891047 - RNA, 19 nt, Artificial Sequence
  Description of Artificial Sequence: Synthetic oligonucleotide
  Antisense strand to SEQ ID NO: 1891046
uucuaacacacuugcuuaa

SEQ ID NO: 1891048 - RNA, 19 nt, Artificial Sequence
  Description of Artificial Sequence: Synthetic oligonucleotide
  Sense strand starting at position 1298 of SEQ ID NO: 1879212
cggugaauggaaggugauu

SEQ ID NO: 1891049 - RNA, 19 nt, Artificial Sequence
  Description of Artificial Sequence: Synthetic oligonucleotide
  Antisense strand to SEQ ID NO: 1891048
aaucaccuuccauucaccg

SEQ ID NO: 1891050 - RNA, 19 nt, Artificial Sequence
  Description of Artificial Sequence: Synthetic oligonucleotide
  Sense strand starting at position 1307 of SEQ ID NO: 1879212
gaaggugauuucugucuua

SEQ ID NO: 1891051 - RNA, 19 nt, Artificial Sequence
  Description of Artificial Sequence: Synthetic oligonucleotide
  Antisense strand to SEQ ID NO: 1891050
uaagacagaaaucaccuuc

SEQ ID NO: 1891052 - RNA, 19 nt, Artificial Sequence
  Description of Artificial Sequence: Synthetic oligonucleotide
  Sense strand starting at position 1318 of SEQ ID NO: 1879212
cugucuuacggccaugacu

SEQ ID NO: 1891053 - RNA, 19 nt, Artificial Sequence
  Description of Artificial Sequence: Synthetic oligonucleotide
  Antisense strand to SEQ ID NO: 1891052
agucauggccguaagacag

SEQ ID NO: 1891054 - RNA, 19 nt, Artificial Sequence
  Description of Artificial Sequence: Synthetic oligonucleotide
  Sense strand starting at position 1327 of SEQ ID NO: 1879212
ggccaugacuguuuaugac

SEQ ID NO: 1891055 - RNA, 19 nt, Artificial Sequence
  Description of Artificial Sequence: Synthetic oligonucleotide
  Antisense strand to SEQ ID NO: 1891054
gucauaaacagucauggcc

SEQ ID NO: 1891056 - RNA, 19 nt, Artificial Sequence
  Description of Artificial Sequence: Synthetic oligonucleotide
  Sense strand starting at position 1616 of SEQ ID NO: 1879212
acuauugaguacuuagguu

SEQ ID NO: 1891057 - RNA, 19 nt, Artificial Sequence
  Description of Artificial Sequence: Synthetic oligonucleotide
  Antisense strand to SEQ ID NO: 1891056
aaccuaaguacucaauagu

SEQ ID NO: 1891058 - RNA, 19 nt, Artificial Sequence
  Description of Artificial Sequence: Synthetic oligonucleotide
  Sense strand starting at position 1630 of SEQ ID NO: 1879212
agguucagaucgcaguuua

SEQ ID NO: 1891059 - RNA, 19 nt, Artificial Sequence
  Description of Artificial Sequence: Synthetic oligonucleotide
  Antisense strand to SEQ ID NO: 1891058
uaaacugcgaucugaaccu

SEQ ID NO: 1891060 - RNA, 19 nt, Artificial Sequence
  Description of Artificial Sequence: Synthetic oligonucleotide
  Sense strand starting at position 1635 of SEQ ID NO: 1879212
cagaucgcaguuuagaauu

SEQ ID NO: 1891061 - RNA, 19 nt, Artificial Sequence
  Description of Artificial Sequence: Synthetic oligonucleotide
  Antisense strand to SEQ ID NO: 1891060
aauucuaaacugcgaucug

SEQ ID NO: 1891062 - RNA, 19 nt, Artificial Sequence
  Description of Artificial Sequence: Synthetic oligonucleotide
  Sense strand starting at position 2318 of SEQ ID NO: 1879212
aagcaagggucuucugagu

SEQ ID NO: 1891063 - RNA, 19 nt, Artificial Sequence
  Description of Artificial Sequence: Synthetic oligonucleotide
  Antisense strand to SEQ ID NO: 1891062
acucagaagacccuugcuu

SEQ ID NO: 1891064 - RNA, 19 nt, Artificial Sequence
  Description of Artificial Sequence: Synthetic oligonucleotide
  Sense strand starting at position 2323 of SEQ ID NO: 1879212
agggucuucugaguuguuu

SEQ ID NO: 1891065 - RNA, 19 nt, Artificial Sequence
  Description of Artificial Sequence: Synthetic oligonucleotide
  Antisense strand to SEQ ID NO: 1891064
aaacaacucagaagacccu

SEQ ID NO: 1891066 - RNA, 19 nt, Artificial Sequence
  Description of Artificial Sequence: Synthetic oligonucleotide
  Sense strand starting at position 2327 of SEQ ID NO: 1879212
ucuucugaguuguuuccau

SEQ ID NO: 1891067 - RNA, 19 nt, Artificial Sequence
  Description of Artificial Sequence: Synthetic oligonucleotide
  Antisense strand to SEQ ID NO: 1891066
auggaaacaacucagaaga

SEQ ID NO: 1891068 - RNA, 19 nt, Artificial Sequence
  Description of Artificial Sequence: Synthetic oligonucleotide
  Sense strand starting at position 2461 of SEQ ID NO: 1879212
aguuuaauggugcgaucuc

SEQ ID NO: 1891069 - RNA, 19 nt, Artificial Sequence
  Description of Artificial Sequence: Synthetic oligonucleotide
  Antisense strand to SEQ ID NO: 1891068
gagaucgcaccauuaaacu

SEQ ID NO: 1891070 - RNA, 19 nt, Artificial Sequence
  Description of Artificial Sequence: Synthetic oligonucleotide
  Sense strand starting at position 2870 of SEQ ID NO: 1879212
cccggacgcuuugcauauu

SEQ ID NO: 1891071 - RNA, 19 nt, Artificial Sequence
  Description of Artificial Sequence: Synthetic oligonucleotide
  Antisense strand to SEQ ID NO: 1891070
aauaugcaaagcguccggg

SEQ ID NO: 1891072 - RNA, 19 nt, Artificial Sequence
  Description of Artificial Sequence: Synthetic oligonucleotide
  Sense strand starting at position 2912 of SEQ ID NO: 1879212
gauguuggguaauaagaaa

SEQ ID NO: 1891073 - RNA, 19 nt, Artificial Sequence
  Description of Artificial Sequence: Synthetic oligonucleotide
  Antisense strand to SEQ ID NO: 1891072
uuucuuauuacccaacauc

SEQ ID NO: 1891074 - RNA, 19 nt, Artificial Sequence
  Description of Artificial Sequence: Synthetic oligonucleotide
  Sense strand starting at position 2953 of SEQ ID NO: 1879212
gccguccagugcuuuacau

SEQ ID NO: 1891075 - RNA, 19 nt, Artificial Sequence
  Description of Artificial Sequence: Synthetic oligonucleotide
  Antisense strand to SEQ ID NO: 1891074
auguaaagcacuggacggc

SEQ ID NO: 1891076 - RNA, 19 nt, Artificial Sequence
  Description of Artificial Sequence: Synthetic oligonucleotide
  Sense strand starting at position 2955 of SEQ ID NO: 1879212
cguccagugcuuuacauuu

SEQ ID NO: 1891077 - RNA, 19 nt, Artificial Sequence
  Description of Artificial Sequence: Synthetic oligonucleotide
  Antisense strand to SEQ ID NO: 1891076
aaauguaaagcacuggacg

SEQ ID NO: 1891078 - RNA, 19 nt, Artificial Sequence
  Description of Artificial Sequence: Synthetic oligonucleotide
  Sense strand starting at position 3085 of SEQ ID NO: 1879212
ggaaccagcucagguauaa

SEQ ID NO: 1891079 - RNA, 19 nt, Artificial Sequence
  Description of Artificial Sequence: Synthetic oligonucleotide
  Antisense strand to SEQ ID NO: 1891078
uuauaccugagcugguucc

SEQ ID NO: 1891080 - RNA, 19 nt, Artificial Sequence
  Description of Artificial Sequence: Synthetic oligonucleotide
  Sense strand starting at position 3440 of SEQ ID NO: 1879212
agaguaucaucagagccuu

SEQ ID NO: 1891081 - RNA, 19 nt, Artificial Sequence
  Description of Artificial Sequence: Synthetic oligonucleotide
  Antisense strand to SEQ ID NO: 1891080
aaggcucugaugauacucu

SEQ ID NO: 1891082 - RNA, 19 nt, Artificial Sequence
  Description of Artificial Sequence: Synthetic oligonucleotide
  Sense strand starting at position 3473 of SEQ ID NO: 1879212
gcucgguucggugagggau

SEQ ID NO: 1891083 - RNA, 19 nt, Artificial Sequence
  Description of Artificial Sequence: Synthetic oligonucleotide
  Antisense strand to SEQ ID NO: 1891082
aucccucaccgaaccgagc

SEQ ID NO: 1891084 - RNA, 19 nt, Artificial Sequence
  Description of Artificial Sequence: Synthetic oligonucleotide
  Sense strand starting at position 3777 of SEQ ID NO: 1879212
ugagccggaucguuucaua

SEQ ID NO: 1891085 - RNA, 19 nt, Artificial Sequence
  Description of Artificial Sequence: Synthetic oligonucleotide
  Antisense strand to SEQ ID NO: 1891084
uaugaaacgauccggcuca

SEQ ID NO: 1891086 - RNA, 19 nt, Artificial Sequence
  Description of Artificial Sequence: Synthetic oligonucleotide
  Sense strand starting at position 3780 of SEQ ID NO: 1879212
gccggaucguuucauauua

SEQ ID NO: 1891087 - RNA, 19 nt, Artificial Sequence
  Description of Artificial Sequence: Synthetic oligonucleotide
  Antisense strand to SEQ ID NO: 1891086
uaauaugaaacgauccggc

SEQ ID NO: 1891088 - RNA, 19 nt, Artificial Sequence
  Description of Artificial Sequence: Synthetic oligonucleotide
  Sense strand starting at position 3782 of SEQ ID NO: 1879212
cggaucguuucauauuaag

SEQ ID NO: 1891089 - RNA, 19 nt, Artificial Sequence
  Description of Artificial Sequence: Synthetic oligonucleotide
  Antisense strand to SEQ ID NO: 1891088
cuuaauaugaaacgauccg

SEQ ID NO: 1891090 - RNA, 19 nt, Artificial Sequence
  Description of Artificial Sequence: Synthetic oligonucleotide
  Sense strand starting at position 3804 of SEQ ID NO: 1879212
gagauuuagugccaaauaa

SEQ ID NO: 1891091 - RNA, 19 nt, Artificial Sequence
  Description of Artificial Sequence: Synthetic oligonucleotide
  Antisense strand to SEQ ID NO: 1891090
uuauuuggcacuaaaucuc

SEQ ID NO: 1891092 - RNA, 19 nt, Artificial Sequence
  Description of Artificial Sequence: Synthetic oligonucleotide
  Sense strand starting at position 3820 of SEQ ID NO: 1879212
uaaugaaucgcugggagaa

SEQ ID NO: 1891093 - RNA, 19 nt, Artificial Sequence
  Description of Artificial Sequence: Synthetic oligonucleotide
  Antisense strand to SEQ ID NO: 1891092
uucucccagcgauucauua

SEQ ID NO: 1891094 - RNA, 19 nt, Artificial Sequence
  Description of Artificial Sequence: Synthetic oligonucleotide
  Sense strand starting at position 3821 of SEQ ID NO: 1879212
aaugaaucgcugggagaag

SEQ ID NO: 1891095 - RNA, 19 nt, Artificial Sequence
  Description of Artificial Sequence: Synthetic oligonucleotide
  Antisense strand to SEQ ID NO: 1891094
cuucucccagcgauucauu

SEQ ID NO: 1891096 - RNA, 19 nt, Artificial Sequence
  Description of Artificial Sequence: Synthetic oligonucleotide
  Sense strand starting at position 3844 of SEQ ID NO: 1879212
gcgucuaguugcuuccaga

SEQ ID NO: 1891097 - RNA, 19 nt, Artificial Sequence
  Description of Artificial Sequence: Synthetic oligonucleotide
  Antisense strand to SEQ ID NO: 1891096
ucuggaagcaacuagacgc

SEQ ID NO: 1891098 - RNA, 19 nt, Artificial Sequence
  Description of Artificial Sequence: Synthetic oligonucleotide
  Sense strand starting at position 3910 of SEQ ID NO: 1879212
aguagagugccuggacaaa

SEQ ID NO: 1891099 - RNA, 19 nt, Artificial Sequence
  Description of Artificial Sequence: Synthetic oligonucleotide
  Antisense strand to SEQ ID NO: 1891098
uuuguccaggcacucuacu

SEQ ID NO: 1891100 - RNA, 19 nt, Artificial Sequence
  Description of Artificial Sequence: Synthetic oligonucleotide
  Sense strand starting at position 3946 of SEQ ID NO: 1879212
caguucucuucuguguuga

SEQ ID NO: 1891101 - RNA, 19 nt, Artificial Sequence
  Description of Artificial Sequence: Synthetic oligonucleotide
  Antisense strand to SEQ ID NO: 1891100
ucaacacagaagagaacug

SEQ ID NO: 1891102 - RNA, 19 nt, Artificial Sequence
  Description of Artificial Sequence: Synthetic oligonucleotide
  Sense strand starting at position 3948 of SEQ ID NO: 1879212
guucucuucuguguugaca

SEQ ID NO: 1891103 - RNA, 19 nt, Artificial Sequence
  Description of Artificial Sequence: Synthetic oligonucleotide
  Antisense strand to SEQ ID NO: 1891102
ugucaacacagaagagaac

SEQ ID NO: 1891104 - RNA, 19 nt, Artificial Sequence
  Description of Artificial Sequence: Synthetic oligonucleotide
  Sense strand starting at position 3950 of SEQ ID NO: 1879212
ucucuucuguguugacaga

SEQ ID NO: 1891105 - RNA, 19 nt, Artificial Sequence
  Description of Artificial Sequence: Synthetic oligonucleotide
  Antisense strand to SEQ ID NO: 1891104
ucugucaacacagaagaga

SEQ ID NO: 1891106 - RNA, 19 nt, Artificial Sequence
  Description of Artificial Sequence: Synthetic oligonucleotide
  Sense strand starting at position 3951 of SEQ ID NO: 1879212
cucuucuguguugacagaa

SEQ ID NO: 1891107 - RNA, 19 nt, Artificial Sequence
  Description of Artificial Sequence: Synthetic oligonucleotide
  Antisense strand to SEQ ID NO: 1891106
uucugucaacacagaagag

SEQ ID NO: 1891108 - RNA, 19 nt, Artificial Sequence
  Description of Artificial Sequence: Synthetic oligonucleotide
  Sense strand starting at position 275 of SEQ ID NO: 1879213
ugugcaugccauccgugau

SEQ ID NO: 1891109 - RNA, 19 nt, Artificial Sequence
  Description of Artificial Sequence: Synthetic oligonucleotide
  Antisense strand to SEQ ID NO: 1891108
aucacggauggcaugcaca

SEQ ID NO: 1891110 - RNA, 19 nt, Artificial Sequence
  Description of Artificial Sequence: Synthetic oligonucleotide
  Sense strand starting at position 457 of SEQ ID NO: 1879213
agcuguaggcuggaucauu

SEQ ID NO: 1891111 - RNA, 19 nt, Artificial Sequence
  Description of Artificial Sequence: Synthetic oligonucleotide
  Antisense strand to SEQ ID NO: 1891110
aaugauccagccuacagcu

SEQ ID NO: 1891112 - RNA, 19 nt, Artificial Sequence
  Description of Artificial Sequence: Synthetic oligonucleotide
  Sense strand starting at position 526 of SEQ ID NO: 1879213
cacuccugugucuggcaaa

SEQ ID NO: 1891113 - RNA, 19 nt, Artificial Sequence
  Description of Artificial Sequence: Synthetic oligonucleotide
  Antisense strand to SEQ ID NO: 1891112
uuugccagacacaggagug

SEQ ID NO: 1891114 - RNA, 19 nt, Artificial Sequence
  Description of Artificial Sequence: Synthetic oligonucleotide
  Sense strand starting at position 625 of SEQ ID NO: 1879213
auaugcuuccaagguauca

SEQ ID NO: 1891115 - RNA, 19 nt, Artificial Sequence
  Description of Artificial Sequence: Synthetic oligonucleotide
  Antisense strand to SEQ ID NO: 1891114
ugauaccuuggaagcauau

SEQ ID NO: 1891116 - RNA, 19 nt, Artificial Sequence
  Description of Artificial Sequence: Synthetic oligonucleotide
  Sense strand starting at position 640 of SEQ ID NO: 1879213
aucagaacugcauaugcau

SEQ ID NO: 1891117 - RNA, 19 nt, Artificial Sequence
  Description of Artificial Sequence: Synthetic oligonucleotide
  Antisense strand to SEQ ID NO: 1891116
augcauaugcaguucugau

SEQ ID NO: 1891118 - RNA, 19 nt, Artificial Sequence
  Description of Artificial Sequence: Synthetic oligonucleotide
  Sense strand starting at position 649 of SEQ ID NO: 1879213
gcauaugcaucuguccauu

SEQ ID NO: 1891119 - RNA, 19 nt, Artificial Sequence
  Description of Artificial Sequence: Synthetic oligonucleotide
  Antisense strand to SEQ ID NO: 1891118
aauggacagaugcauaugc

SEQ ID NO: 1891120 - RNA, 19 nt, Artificial Sequence
  Description of Artificial Sequence: Synthetic oligonucleotide
  Sense strand starting at position 939 of SEQ ID NO: 1879213
ggugccaaacguuaugcua

SEQ ID NO: 1891121 - RNA, 19 nt, Artificial Sequence
  Description of Artificial Sequence: Synthetic oligonucleotide
  Antisense strand to SEQ ID NO: 1891120
uagcauaacguuuggcacc

SEQ ID NO: 1891122 - RNA, 19 nt, Artificial Sequence
  Description of Artificial Sequence: Synthetic oligonucleotide
  Sense strand starting at position 948 of SEQ ID NO: 1879213
cguuaugcuaagggacaga

SEQ ID NO: 1891123 - RNA, 19 nt, Artificial Sequence
  Description of Artificial Sequence: Synthetic oligonucleotide
  Antisense strand to SEQ ID NO: 1891122
ucugucccuuagcauaacg

SEQ ID NO: 1891124 - RNA, 19 nt, Artificial Sequence
  Description of Artificial Sequence: Synthetic oligonucleotide
  Sense strand starting at position 976 of SEQ ID NO: 1879213
acaguacuguuguucugaa

SEQ ID NO: 1891125 - RNA, 19 nt, Artificial Sequence
  Description of Artificial Sequence: Synthetic oligonucleotide
  Antisense strand to SEQ ID NO: 1891124
uucagaacaacaguacugu

SEQ ID NO: 1891126 - RNA, 19 nt, Artificial Sequence
  Description of Artificial Sequence: Synthetic oligonucleotide
  Sense strand starting at position 983 of SEQ ID NO: 1879213
uguuguucugaaggagcuu

SEQ ID NO: 1891127 - RNA, 19 nt, Artificial Sequence
  Description of Artificial Sequence: Synthetic oligonucleotide
  Antisense strand to SEQ ID NO: 1891126
aagcuccuucagaacaaca

SEQ ID NO: 1891128 - RNA, 19 nt, Artificial Sequence
  Description of Artificial Sequence: Synthetic oligonucleotide
  Sense strand starting at position 995 of SEQ ID NO: 1879213
ggagcuugggucuggaaga

SEQ ID NO: 1891129 - RNA, 19 nt, Artificial Sequence
  Description of Artificial Sequence: Synthetic oligonucleotide
  Antisense strand to SEQ ID NO: 1891128
ucuuccagacccaagcucc

SEQ ID NO: 1891130 - RNA, 19 nt, Artificial Sequence
  Description of Artificial Sequence: Synthetic oligonucleotide
  Sense strand starting at position 1048 of SEQ ID NO: 1879213
gcagauguuagauggcagu

SEQ ID NO: 1891131 - RNA, 19 nt, Artificial Sequence
  Description of Artificial Sequence: Synthetic oligonucleotide
  Antisense strand to SEQ ID NO: 1891130
acugccaucuaacaucugc

SEQ ID NO: 1891132 - RNA, 19 nt, Artificial Sequence
  Description of Artificial Sequence: Synthetic oligonucleotide
  Sense strand starting at position 1133 of SEQ ID NO: 1879213
aggcaacacugaugagaag

SEQ ID NO: 1891133 - RNA, 19 nt, Artificial Sequence
  Description of Artificial Sequence: Synthetic oligonucleotide
  Antisense strand to SEQ ID NO: 1891132
cuucucaucaguguugccu

SEQ ID NO: 1891134 - RNA, 19 nt, Artificial Sequence
  Description of Artificial Sequence: Synthetic oligonucleotide
  Sense strand starting at position 1223 of SEQ ID NO: 1879213
ugggcaaaggcaugguaau

SEQ ID NO: 1891135 - RNA, 19 nt, Artificial Sequence
  Description of Artificial Sequence: Synthetic oligonucleotide
  Antisense strand to SEQ ID NO: 1891134
auuaccaugccuuugccca

SEQ ID NO: 1891136 - RNA, 19 nt, Artificial Sequence
  Description of Artificial Sequence: Synthetic oligonucleotide
  Sense strand starting at position 1224 of SEQ ID NO: 1879213
gggcaaaggcaugguaaua

SEQ ID NO: 1891137 - RNA, 19 nt, Artificial Sequence
  Description of Artificial Sequence: Synthetic oligonucleotide
  Antisense strand to SEQ ID NO: 1891136
uauuaccaugccuuugccc

SEQ ID NO: 1891138 - RNA, 19 nt, Artificial Sequence
  Description of Artificial Sequence: Synthetic oligonucleotide
  Sense strand starting at position 1284 of SEQ ID NO: 1879213
gucauucagcuccgaagga

SEQ ID NO: 1891139 - RNA, 19 nt, Artificial Sequence
  Description of Artificial Sequence: Synthetic oligonucleotide
  Antisense strand to SEQ ID NO: 1891138
uccuucggagcugaaugac

SEQ ID NO: 1891140 - RNA, 19 nt, Artificial Sequence
  Description of Artificial Sequence: Synthetic oligonucleotide
  Sense strand starting at position 1368 of SEQ ID NO: 1879213
ccuguaggcaguggagaau

SEQ ID NO: 1891141 - RNA, 19 nt, Artificial Sequence
  Description of Artificial Sequence: Synthetic oligonucleotide
  Antisense strand to SEQ ID NO: 1891140
auucuccacugccuacagg

SEQ ID NO: 1891142 - RNA, 19 nt, Artificial Sequence
  Description of Artificial Sequence: Synthetic oligonucleotide
  Sense strand starting at position 1377 of SEQ ID NO: 1879213
aguggagaauugccaaauu

SEQ ID NO: 1891143 - RNA, 19 nt, Artificial Sequence
  Description of Artificial Sequence: Synthetic oligonucleotide
  Antisense strand to SEQ ID NO: 1891142
aauuuggcaauucuccacu

SEQ ID NO: 1891144 - RNA, 19 nt, Artificial Sequence
  Description of Artificial Sequence: Synthetic oligonucleotide
  Sense strand starting at position 1514 of SEQ ID NO: 1879213
aggcuuauuuaaggaggca

SEQ ID NO: 1891145 - RNA, 19 nt, Artificial Sequence
  Description of Artificial Sequence: Synthetic oligonucleotide
  Antisense strand to SEQ ID NO: 1891144
ugccuccuuaaauaagccu

SEQ ID NO: 1891146 - RNA, 19 nt, Artificial Sequence
  Description of Artificial Sequence: Synthetic oligonucleotide
  Sense strand starting at position 1545 of SEQ ID NO: 1879213
cuugguaaugccuagaugu

SEQ ID NO: 1891147 - RNA, 19 nt, Artificial Sequence
  Description of Artificial Sequence: Synthetic oligonucleotide
  Antisense strand to SEQ ID NO: 1891146
acaucuaggcauuaccaag

SEQ ID NO: 1891148 - RNA, 19 nt, Artificial Sequence
  Description of Artificial Sequence: Synthetic oligonucleotide
  Sense strand starting at position 2141 of SEQ ID NO: 1879213
agucaagaaucccggauuu

SEQ ID NO: 1891149 - RNA, 19 nt, Artificial Sequence
  Description of Artificial Sequence: Synthetic oligonucleotide
  Antisense strand to SEQ ID NO: 1891148
aaauccgggauucuugacu

SEQ ID NO: 1891150 - RNA, 19 nt, Artificial Sequence
  Description of Artificial Sequence: Synthetic oligonucleotide
  Sense strand starting at position 2259 of SEQ ID NO: 1879213
uucugaaauucuggauuuc

SEQ ID NO: 1891151 - RNA, 19 nt, Artificial Sequence
  Description of Artificial Sequence: Synthetic oligonucleotide
  Antisense strand to SEQ ID NO: 1891150
gaaauccagaauuucagaa

SEQ ID NO: 1891152 - RNA, 19 nt, Artificial Sequence
  Description of Artificial Sequence: Synthetic oligonucleotide
  Sense strand starting at position 2615 of SEQ ID NO: 1879213
gagugacuccuacagagug

SEQ ID NO: 1891153 - RNA, 19 nt, Artificial Sequence
  Description of Artificial Sequence: Synthetic oligonucleotide
  Antisense strand to SEQ ID NO: 1891152
cacucuguaggagucacuc

SEQ ID NO: 1891154 - RNA, 19 nt, Artificial Sequence
  Description of Artificial Sequence: Synthetic oligonucleotide
  Sense strand starting at position 3140 of SEQ ID NO: 1879213
ggucgauuccgacauaaag

SEQ ID NO: 1891155 - RNA, 19 nt, Artificial Sequence
  Description of Artificial Sequence: Synthetic oligonucleotide
  Antisense strand to SEQ ID NO: 1891154
cuuuaugucggaaucgacc

SEQ ID NO: 1891156 - RNA, 19 nt, Artificial Sequence
  Description of Artificial Sequence: Synthetic oligonucleotide
  Sense strand starting at position 3142 of SEQ ID NO: 1879213
ucgauuccgacauaaagca

SEQ ID NO: 1891157 - RNA, 19 nt, Artificial Sequence
  Description of Artificial Sequence: Synthetic oligonucleotide
  Antisense strand to SEQ ID NO: 1891156
ugcuuuaugucggaaucga

SEQ ID NO: 1891158 - RNA, 19 nt, Artificial Sequence
  Description of Artificial Sequence: Synthetic oligonucleotide
  Sense strand starting at position 3278 of SEQ ID NO: 1879213
caucuuaggucuuagagag

SEQ ID NO: 1891159 - RNA, 19 nt, Artificial Sequence
  Description of Artificial Sequence: Synthetic oligonucleotide
  Antisense strand to SEQ ID NO: 1891158
cucucuaagaccuaagaug

SEQ ID NO: 1891160 - RNA, 19 nt, Artificial Sequence
  Description of Artificial Sequence: Synthetic oligonucleotide
  Sense strand starting at position 3364 of SEQ ID NO: 1879213
ucaggaacugcucacucau

SEQ ID NO: 1891161 - RNA, 19 nt, Artificial Sequence
  Description of Artificial Sequence: Synthetic oligonucleotide
  Antisense strand to SEQ ID NO: 1891160
augagugagcaguuccuga

SEQ ID NO: 1891162 - RNA, 19 nt, Artificial Sequence
  Description of Artificial Sequence: Synthetic oligonucleotide
  Sense strand starting at position 3373 of SEQ ID NO: 1879213
gcucacucaucucucgaaa

SEQ ID NO: 1891163 - RNA, 19 nt, Artificial Sequence
  Description of Artificial Sequence: Synthetic oligonucleotide
  Antisense strand to SEQ ID NO: 1891162
uuucgagagaugagugagc

SEQ ID NO: 1891164 - RNA, 19 nt, Artificial Sequence
  Description of Artificial Sequence: Synthetic oligonucleotide
  Sense strand starting at position 3402 of SEQ ID NO: 1879213
augacauguccuuguauua

SEQ ID NO: 1891165 - RNA, 19 nt, Artificial Sequence
  Description of Artificial Sequence: Synthetic oligonucleotide
  Antisense strand to SEQ ID NO: 1891164
uaauacaaggacaugucau

SEQ ID NO: 1891166 - RNA, 19 nt, Artificial Sequence
  Description of Artificial Sequence: Synthetic oligonucleotide
  Sense strand starting at position 3601 of SEQ ID NO: 1879213
ugugucuccuucuccaaga

SEQ ID NO: 1891167 - RNA, 19 nt, Artificial Sequence
  Description of Artificial Sequence: Synthetic oligonucleotide
  Antisense strand to SEQ ID NO: 1891166
ucuuggagaaggagacaca

SEQ ID NO: 1891168 - RNA, 19 nt, Artificial Sequence
  Description of Artificial Sequence: Synthetic oligonucleotide
  Sense strand starting at position 3602 of SEQ ID NO: 1879213
gugucuccuucuccaagaa

SEQ ID NO: 1891169 - RNA, 19 nt, Artificial Sequence
  Description of Artificial Sequence: Synthetic oligonucleotide
  Antisense strand to SEQ ID NO: 1891168
uucuuggagaaggagacac

SEQ ID NO: 1891170 - RNA, 19 nt, Artificial Sequence
  Description of Artificial Sequence: Synthetic oligonucleotide
  Sense strand starting at position 3681 of SEQ ID NO: 1879213
aucaaaguccuguauaaug

SEQ ID NO: 1891171 - RNA, 19 nt, Artificial Sequence
  Description of Artificial Sequence: Synthetic oligonucleotide
  Antisense strand to SEQ ID NO: 1891170
cauuauacaggacuuugau

SEQ ID NO: 1891172 - RNA, 19 nt, Artificial Sequence
  Description of Artificial Sequence: Synthetic oligonucleotide
  Sense strand starting at position 3691 of SEQ ID NO: 1879213
uguauaaugucaccucugu

SEQ ID NO: 1891173 - RNA, 19 nt, Artificial Sequence
  Description of Artificial Sequence: Synthetic oligonucleotide
  Antisense strand to SEQ ID NO: 1891172
acagaggugacauuauaca

SEQ ID NO: 1891174 - RNA, 19 nt, Artificial Sequence
  Description of Artificial Sequence: Synthetic oligonucleotide
  Sense strand starting at position 3746 of SEQ ID NO: 1879213
agcauuuagucugucugga

SEQ ID NO: 1891175 - RNA, 19 nt, Artificial Sequence
  Description of Artificial Sequence: Synthetic oligonucleotide
  Antisense strand to SEQ ID NO: 1891174
uccagacagacuaaaugcu

SEQ ID NO: 1891176 - RNA, 19 nt, Artificial Sequence
  Description of Artificial Sequence: Synthetic oligonucleotide
  Sense strand starting at position 3787 of SEQ ID NO: 1879213
uuacccauagcgugagauu

SEQ ID NO: 1891177 - RNA, 19 nt, Artificial Sequence
  Description of Artificial Sequence: Synthetic oligonucleotide
  Antisense strand to SEQ ID NO: 1891176
aaucucacgcuauggguaa

SEQ ID NO: 1891178 - RNA, 19 nt, Artificial Sequence
  Description of Artificial Sequence: Synthetic oligonucleotide
  Sense strand starting at position 3832 of SEQ ID NO: 1879213
ugguuacacuuugcaucua

SEQ ID NO: 1891179 - RNA, 19 nt, Artificial Sequence
  Description of Artificial Sequence: Synthetic oligonucleotide
  Antisense strand to SEQ ID NO: 1891178
uagaugcaaaguguaacca

SEQ ID NO: 1891180 - RNA, 19 nt, Artificial Sequence
  Description of Artificial Sequence: Synthetic oligonucleotide
  Sense strand starting at position 3847 of SEQ ID NO: 1879213
ucuaguuugugauuuccca

SEQ ID NO: 1891181 - RNA, 19 nt, Artificial Sequence
  Description of Artificial Sequence: Synthetic oligonucleotide
  Antisense strand to SEQ ID NO: 1891180
ugggaaaucacaaacuaga

SEQ ID NO: 1891182 - RNA, 19 nt, Artificial Sequence
  Description of Artificial Sequence: Synthetic oligonucleotide
  Sense strand starting at position 3911 of SEQ ID NO: 1879213
agacaagaaugcugaggaa

SEQ ID NO: 1891183 - RNA, 19 nt, Artificial Sequence
  Description of Artificial Sequence: Synthetic oligonucleotide
  Antisense strand to SEQ ID NO: 1891182
uuccucagcauucuugucu

SEQ ID NO: 1891184 - RNA, 19 nt, Artificial Sequence
  Description of Artificial Sequence: Synthetic oligonucleotide
  Sense strand starting at position 3914 of SEQ ID NO: 1879213
caagaaugcugaggaagau

SEQ ID NO: 1891185 - RNA, 19 nt, Artificial Sequence
  Description of Artificial Sequence: Synthetic oligonucleotide
  Antisense strand to SEQ ID NO: 1891184
aucuuccucagcauucuug

SEQ ID NO: 1891186 - RNA, 19 nt, Artificial Sequence
  Description of Artificial Sequence: Synthetic oligonucleotide
  Sense strand starting at position 3981 of SEQ ID NO: 1879213
guaaguguacaagaacagu

SEQ ID NO: 1891187 - RNA, 19 nt, Artificial Sequence
  Description of Artificial Sequence: Synthetic oligonucleotide
  Antisense strand to SEQ ID NO: 1891186
acuguucuuguacacuuac

SEQ ID NO: 1891188 - RNA, 19 nt, Artificial Sequence
  Description of Artificial Sequence: Synthetic oligonucleotide
  Sense strand starting at position 135 of SEQ ID NO: 1879214
ggcccauaugcauaugacu

SEQ ID NO: 1891189 - RNA, 19 nt, Artificial Sequence
  Description of Artificial Sequence: Synthetic oligonucleotide
  Antisense strand to SEQ ID NO: 1891188
agucauaugcauaugggcc

SEQ ID NO: 1891190 - RNA, 19 nt, Artificial Sequence
  Description of Artificial Sequence: Synthetic oligonucleotide
  Sense strand starting at position 238 of SEQ ID NO: 1879214
uuugauccucccuaguuga

SEQ ID NO: 1891191 - RNA, 19 nt, Artificial Sequence
  Description of Artificial Sequence: Synthetic oligonucleotide
  Antisense strand to SEQ ID NO: 1891190
ucaacuagggaggaucaaa

SEQ ID NO: 1891192 - RNA, 19 nt, Artificial Sequence
  Description of Artificial Sequence: Synthetic oligonucleotide
  Sense strand starting at position 303 of SEQ ID NO: 1879214
cugagacuccuggauguuc

SEQ ID NO: 1891193 - RNA, 19 nt, Artificial Sequence
  Description of Artificial Sequence: Synthetic oligonucleotide
  Antisense strand to SEQ ID NO: 1891192
gaacauccaggagucucag

SEQ ID NO: 1891194 - RNA, 19 nt, Artificial Sequence
  Description of Artificial Sequence: Synthetic oligonucleotide
  Sense strand starting at position 314 of SEQ ID NO: 1879214
ggauguucucuuugugugu

SEQ ID NO: 1891195 - RNA, 19 nt, Artificial Sequence
  Description of Artificial Sequence: Synthetic oligonucleotide
  Antisense strand to SEQ ID NO: 1891194
acacacaaagagaacaucc

SEQ ID NO: 1891196 - RNA, 19 nt, Artificial Sequence
  Description of Artificial Sequence: Synthetic oligonucleotide
  Sense strand starting at position 399 of SEQ ID NO: 1879214
gagagugcccaauacuacu

SEQ ID NO: 1891197 - RNA, 19 nt, Artificial Sequence
  Description of Artificial Sequence: Synthetic oligonucleotide
  Antisense strand to SEQ ID NO: 1891196
aguaguauugggcacucuc

SEQ ID NO: 1891198 - RNA, 19 nt, Artificial Sequence
  Description of Artificial Sequence: Synthetic oligonucleotide
  Sense strand starting at position 420 of SEQ ID NO: 1879214
gaggaaguguuaucuggug

SEQ ID NO: 1891199 - RNA, 19 nt, Artificial Sequence
  Description of Artificial Sequence: Synthetic oligonucleotide
  Antisense strand to SEQ ID NO: 1891198
caccagauaacacuuccuc

SEQ ID NO: 1891200 - RNA, 19 nt, Artificial Sequence
  Description of Artificial Sequence: Synthetic oligonucleotide
  Sense strand starting at position 422 of SEQ ID NO: 1879214
ggaaguguuaucuggugug

SEQ ID NO: 1891201 - RNA, 19 nt, Artificial Sequence
  Description of Artificial Sequence: Synthetic oligonucleotide
  Antisense strand to SEQ ID NO: 1891200
cacaccagauaacacuucc

SEQ ID NO: 1891202 - RNA, 19 nt, Artificial Sequence
  Description of Artificial Sequence: Synthetic oligonucleotide
  Sense strand starting at position 520 of SEQ ID NO: 1879214
auggaaagccggcauugaa

SEQ ID NO: 1891203 - RNA, 19 nt, Artificial Sequence
  Description of Artificial Sequence: Synthetic oligonucleotide
  Antisense strand to SEQ ID NO: 1891202
uucaaugccggcuuuccau

SEQ ID NO: 1891204 - RNA, 19 nt, Artificial Sequence
  Description of Artificial Sequence: Synthetic oligonucleotide
  Sense strand starting at position 534 of SEQ ID NO: 1879214
uugaaugacugagagauag

SEQ ID NO: 1891205 - RNA, 19 nt, Artificial Sequence
  Description of Artificial Sequence: Synthetic oligonucleotide
  Antisense strand to SEQ ID NO: 1891204
cuaucucucagucauucaa

SEQ ID NO: 1891206 - RNA, 19 nt, Artificial Sequence
  Description of Artificial Sequence: Synthetic oligonucleotide
  Sense strand starting at position 625 of SEQ ID NO: 1879214
ggguuucuuagaggacaau

SEQ ID NO: 1891207 - RNA, 19 nt, Artificial Sequence
  Description of Artificial Sequence: Synthetic oligonucleotide
  Antisense strand to SEQ ID NO: 1891206
auuguccucuaagaaaccc

SEQ ID NO: 1891208 - RNA, 19 nt, Artificial Sequence
  Description of Artificial Sequence: Synthetic oligonucleotide
  Sense strand starting at position 762 of SEQ ID NO: 1879214
ggcagauuaagguauguaa

SEQ ID NO: 1891209 - RNA, 19 nt, Artificial Sequence
  Description of Artificial Sequence: Synthetic oligonucleotide
  Antisense strand to SEQ ID NO: 1891208
uuacauaccuuaaucugcc

SEQ ID NO: 1891210 - RNA, 19 nt, Artificial Sequence
  Description of Artificial Sequence: Synthetic oligonucleotide
  Sense strand starting at position 823 of SEQ ID NO: 1879214
agaauuuguuaaugagggu

SEQ ID NO: 1891211 - RNA, 19 nt, Artificial Sequence
  Description of Artificial Sequence: Synthetic oligonucleotide
  Antisense strand to SEQ ID NO: 1891210
acccucauuaacaaauucu

SEQ ID NO: 1891212 - RNA, 19 nt, Artificial Sequence
  Description of Artificial Sequence: Synthetic oligonucleotide
  Sense strand starting at position 826 of SEQ ID NO: 1879214
auuuguuaaugaggguuga

SEQ ID NO: 1891213 - RNA, 19 nt, Artificial Sequence
  Description of Artificial Sequence: Synthetic oligonucleotide
  Antisense strand to SEQ ID NO: 1891212
ucaacccucauuaacaaau

SEQ ID NO: 1891214 - RNA, 19 nt, Artificial Sequence
  Description of Artificial Sequence: Synthetic oligonucleotide
  Sense strand starting at position 884 of SEQ ID NO: 1879214
uguggaauguuggucggaa

SEQ ID NO: 1891215 - RNA, 19 nt, Artificial Sequence
  Description of Artificial Sequence: Synthetic oligonucleotide
  Antisense strand to SEQ ID NO: 1891214
uuccgaccaacauuccaca

SEQ ID NO: 1891216 - RNA, 19 nt, Artificial Sequence
  Description of Artificial Sequence: Synthetic oligonucleotide
  Sense strand starting at position 885 of SEQ ID NO: 1879214
guggaauguuggucggaag

SEQ ID NO: 1891217 - RNA, 19 nt, Artificial Sequence
  Description of Artificial Sequence: Synthetic oligonucleotide
  Antisense strand to SEQ ID NO: 1891216
cuuccgaccaacauuccac

SEQ ID NO: 1891218 - RNA, 19 nt, Artificial Sequence
  Description of Artificial Sequence: Synthetic oligonucleotide
  Sense strand starting at position 1097 of SEQ ID NO: 1879214
ggccuuucuuaggcaugca

SEQ ID NO: 1891219 - RNA, 19 nt, Artificial Sequence
  Description of Artificial Sequence: Synthetic oligonucleotide
  Antisense strand to SEQ ID NO: 1891218
ugcaugccuaagaaaggcc

SEQ ID NO: 1891220 - RNA, 19 nt, Artificial Sequence
  Description of Artificial Sequence: Synthetic oligonucleotide
  Sense strand starting at position 1945 of SEQ ID NO: 1879214
uguagcuuccaguggagaa

SEQ ID NO: 1891221 - RNA, 19 nt, Artificial Sequence
  Description of Artificial Sequence: Synthetic oligonucleotide
  Antisense strand to SEQ ID NO: 1891220
uucuccacuggaagcuaca

SEQ ID NO: 1891222 - RNA, 19 nt, Artificial Sequence
  Description of Artificial Sequence: Synthetic oligonucleotide
  Sense strand starting at position 1946 of SEQ ID NO: 1879214
guagcuuccaguggagaaa

SEQ ID NO: 1891223 - RNA, 19 nt, Artificial Sequence
  Description of Artificial Sequence: Synthetic oligonucleotide
  Antisense strand to SEQ ID NO: 1891222
uuucuccacuggaagcuac

SEQ ID NO: 1891224 - RNA, 19 nt, Artificial Sequence
  Description of Artificial Sequence: Synthetic oligonucleotide
  Sense strand starting at position 2064 of SEQ ID NO: 1879214
cccuuuaaccucugcggau

SEQ ID NO: 1891225 - RNA, 19 nt, Artificial Sequence
  Description of Artificial Sequence: Synthetic oligonucleotide
  Antisense strand to SEQ ID NO: 1891224
auccgcagagguuaaaggg

SEQ ID NO: 1891226 - RNA, 19 nt, Artificial Sequence
  Description of Artificial Sequence: Synthetic oligonucleotide
  Sense strand starting at position 2106 of SEQ ID NO: 1879214
ccuauuucggcgcggcaua

SEQ ID NO: 1891227 - RNA, 19 nt, Artificial Sequence
  Description of Artificial Sequence: Synthetic oligonucleotide
  Antisense strand to SEQ ID NO: 1891226
uaugccgcgccgaaauagg

SEQ ID NO: 1891228 - RNA, 19 nt, Artificial Sequence
  Description of Artificial Sequence: Synthetic oligonucleotide
  Sense strand starting at position 2117 of SEQ ID NO: 1879214
gcggcauaaauaugcauua

SEQ ID NO: 1891229 - RNA, 19 nt, Artificial Sequence
  Description of Artificial Sequence: Synthetic oligonucleotide
  Antisense strand to SEQ ID NO: 1891228
uaaugcauauuuaugccgc

SEQ ID NO: 1891230 - RNA, 19 nt, Artificial Sequence
  Description of Artificial Sequence: Synthetic oligonucleotide
  Sense strand starting at position 2118 of SEQ ID NO: 1879214
cggcauaaauaugcauuaa

SEQ ID NO: 1891231 - RNA, 19 nt, Artificial Sequence
  Description of Artificial Sequence: Synthetic oligonucleotide
  Antisense strand to SEQ ID NO: 1891230
uuaaugcauauuuaugccg

SEQ ID NO: 1891232 - RNA, 19 nt, Artificial Sequence
  Description of Artificial Sequence: Synthetic oligonucleotide
  Sense strand starting at position 2129 of SEQ ID NO: 1879214
ugcauuaagguaggaaaua

SEQ ID NO: 1891233 - RNA, 19 nt, Artificial Sequence
  Description of Artificial Sequence: Synthetic oligonucleotide
  Antisense strand to SEQ ID NO: 1891232
uauuuccuaccuuaaugca

SEQ ID NO: 1891234 - RNA, 19 nt, Artificial Sequence
  Description of Artificial Sequence: Synthetic oligonucleotide
  Sense strand starting at position 2130 of SEQ ID NO: 1879214
gcauuaagguaggaaauaa

SEQ ID NO: 1891235 - RNA, 19 nt, Artificial Sequence
  Description of Artificial Sequence: Synthetic oligonucleotide
  Antisense strand to SEQ ID NO: 1891234
uuauuuccuaccuuaaugc

SEQ ID NO: 1891236 - RNA, 19 nt, Artificial Sequence
  Description of Artificial Sequence: Synthetic oligonucleotide
  Sense strand starting at position 2141 of SEQ ID NO: 1879214
ggaaauaaucgauacgcug

SEQ ID NO: 1891237 - RNA, 19 nt, Artificial Sequence
  Description of Artificial Sequence: Synthetic oligonucleotide
  Antisense strand to SEQ ID NO: 1891236
cagcguaucgauuauuucc

SEQ ID NO: 1891238 - RNA, 19 nt, Artificial Sequence
  Description of Artificial Sequence: Synthetic oligonucleotide
  Sense strand starting at position 2438 of SEQ ID NO: 1879214
gggcucagccugugaacaa

SEQ ID NO: 1891239 - RNA, 19 nt, Artificial Sequence
  Description of Artificial Sequence: Synthetic oligonucleotide
  Antisense strand to SEQ ID NO: 1891238
uuguucacaggcugagccc

SEQ ID NO: 1891240 - RNA, 19 nt, Artificial Sequence
  Description of Artificial Sequence: Synthetic oligonucleotide
  Sense strand starting at position 2463 of SEQ ID NO: 1879214
agcucaguacucggaggaa

SEQ ID NO: 1891241 - RNA, 19 nt, Artificial Sequence
  Description of Artificial Sequence: Synthetic oligonucleotide
  Antisense strand to SEQ ID NO: 1891240
uuccuccgaguacugagcu

SEQ ID NO: 1891242 - RNA, 19 nt, Artificial Sequence
  Description of Artificial Sequence: Synthetic oligonucleotide
  Sense strand starting at position 2731 of SEQ ID NO: 1879214
gcacacacucaggguuaua

SEQ ID NO: 1891243 - RNA, 19 nt, Artificial Sequence
  Description of Artificial Sequence: Synthetic oligonucleotide
  Antisense strand to SEQ ID NO: 1891242
uauaacccugagugugugc

SEQ ID NO: 1891244 - RNA, 19 nt, Artificial Sequence
  Description of Artificial Sequence: Synthetic oligonucleotide
  Sense strand starting at position 2985 of SEQ ID NO: 1879214
ggccaagguguguucgcua

SEQ ID NO: 1891245 - RNA, 19 nt, Artificial Sequence
  Description of Artificial Sequence: Synthetic oligonucleotide
  Antisense strand to SEQ ID NO: 1891244
uagcgaacacaccuuggcc

SEQ ID NO: 1891246 - RNA, 19 nt, Artificial Sequence
  Description of Artificial Sequence: Synthetic oligonucleotide
  Sense strand starting at position 2990 of SEQ ID NO: 1879214
agguguguucgcuaauugu

SEQ ID NO: 1891247 - RNA, 19 nt, Artificial Sequence
  Description of Artificial Sequence: Synthetic oligonucleotide
  Antisense strand to SEQ ID NO: 1891246
acaauuagcgaacacaccu

SEQ ID NO: 1891248 - RNA, 19 nt, Artificial Sequence
  Description of Artificial Sequence: Synthetic oligonucleotide
  Sense strand starting at position 2996 of SEQ ID NO: 1879214
guucgcuaauugucaggaa

SEQ ID NO: 1891249 - RNA, 19 nt, Artificial Sequence
  Description of Artificial Sequence: Synthetic oligonucleotide
  Antisense strand to SEQ ID NO: 1891248
uuccugacaauuagcgaac

SEQ ID NO: 1891250 - RNA, 19 nt, Artificial Sequence
  Description of Artificial Sequence: Synthetic oligonucleotide
  Sense strand starting at position 3000 of SEQ ID NO: 1879214
gcuaauugucaggaaaugu

SEQ ID NO: 1891251 - RNA, 19 nt, Artificial Sequence
  Description of Artificial Sequence: Synthetic oligonucleotide
  Antisense strand to SEQ ID NO: 1891250
acauuuccugacaauuagc

SEQ ID NO: 1891252 - RNA, 19 nt, Artificial Sequence
  Description of Artificial Sequence: Synthetic oligonucleotide
  Sense strand starting at position 3422 of SEQ ID NO: 1879214
cgaagaucccaguaucuuu

SEQ ID NO: 1891253 - RNA, 19 nt, Artificial Sequence
  Description of Artificial Sequence: Synthetic oligonucleotide
  Antisense strand to SEQ ID NO: 1891252
aaagauacugggaucuucg

SEQ ID NO: 1891254 - RNA, 19 nt, Artificial Sequence
  Description of Artificial Sequence: Synthetic oligonucleotide
  Sense strand starting at position 3554 of SEQ ID NO: 1879214
ucgagaggaucccuucagu

SEQ ID NO: 1891255 - RNA, 19 nt, Artificial Sequence
  Description of Artificial Sequence: Synthetic oligonucleotide
  Antisense strand to SEQ ID NO: 1891254
acugaagggauccucucga

SEQ ID NO: 1891256 - RNA, 19 nt, Artificial Sequence
  Description of Artificial Sequence: Synthetic oligonucleotide
  Sense strand starting at position 3662 of SEQ ID NO: 1879214
acugcaguccaauauuguu

SEQ ID NO: 1891257 - RNA, 19 nt, Artificial Sequence
  Description of Artificial Sequence: Synthetic oligonucleotide
  Antisense strand to SEQ ID NO: 1891256
aacaauauuggacugcagu

SEQ ID NO: 1891258 - RNA, 19 nt, Artificial Sequence
  Description of Artificial Sequence: Synthetic oligonucleotide
  Sense strand starting at position 3667 of SEQ ID NO: 1879214
aguccaauauuguuacuaa

SEQ ID NO: 1891259 - RNA, 19 nt, Artificial Sequence
  Description of Artificial Sequence: Synthetic oligonucleotide
  Antisense strand to SEQ ID NO: 1891258
uuaguaacaauauuggacu

SEQ ID NO: 1891260 - RNA, 19 nt, Artificial Sequence
  Description of Artificial Sequence: Synthetic oligonucleotide
  Sense strand starting at position 3912 of SEQ ID NO: 1879214
acuggagucagagguguua

SEQ ID NO: 1891261 - RNA, 19 nt, Artificial Sequence
  Description of Artificial Sequence: Synthetic oligonucleotide
  Antisense strand to SEQ ID NO: 1891260
uaacaccucugacuccagu

SEQ ID NO: 1891262 - RNA, 19 nt, Artificial Sequence
  Description of Artificial Sequence: Synthetic oligonucleotide
  Sense strand starting at position 3914 of SEQ ID NO: 1879214
uggagucagagguguuauc

SEQ ID NO: 1891263 - RNA, 19 nt, Artificial Sequence
  Description of Artificial Sequence: Synthetic oligonucleotide
  Antisense strand to SEQ ID NO: 1891262
gauaacaccucugacucca

SEQ ID NO: 1891264 - RNA, 19 nt, Artificial Sequence
  Description of Artificial Sequence: Synthetic oligonucleotide
  Sense strand starting at position 3925 of SEQ ID NO: 1879214
guguuaucccagugugaga

SEQ ID NO: 1891265 - RNA, 19 nt, Artificial Sequence
  Description of Artificial Sequence: Synthetic oligonucleotide
  Antisense strand to SEQ ID NO: 1891264
ucucacacugggauaacac

SEQ ID NO: 1891266 - RNA, 19 nt, Artificial Sequence
  Description of Artificial Sequence: Synthetic oligonucleotide
  Sense strand starting at position 3934 of SEQ ID NO: 1879214
cagugugagaggugcuaaa

SEQ ID NO: 1891267 - RNA, 19 nt, Artificial Sequence
  Description of Artificial Sequence: Synthetic oligonucleotide
  Antisense strand to SEQ ID NO: 1891266
uuuagcaccucucacacug

SEQ ID NO: 1891268 - RNA, 19 nt, Artificial Sequence
  Description of Artificial Sequence: Synthetic oligonucleotide
  Sense strand starting at position 358 of SEQ ID NO: 1879215
ucuaaauguccuuggguag

SEQ ID NO: 1891269 - RNA, 19 nt, Artificial Sequence
  Description of Artificial Sequence: Synthetic oligonucleotide
  Antisense strand to SEQ ID NO: 1891268
cuacccaaggacauuuaga

SEQ ID NO: 1891270 - RNA, 19 nt, Artificial Sequence
  Description of Artificial Sequence: Synthetic oligonucleotide
  Sense strand starting at position 361 of SEQ ID NO: 1879215
aaauguccuuggguaggua

SEQ ID NO: 1891271 - RNA, 19 nt, Artificial Sequence
  Description of Artificial Sequence: Synthetic oligonucleotide
  Antisense strand to SEQ ID NO: 1891270
uaccuacccaaggacauuu

SEQ ID NO: 1891272 - RNA, 19 nt, Artificial Sequence
  Description of Artificial Sequence: Synthetic oligonucleotide
  Sense strand starting at position 376 of SEQ ID NO: 1879215
gguagugcagcagauaaua

SEQ ID NO: 1891273 - RNA, 19 nt, Artificial Sequence
  Description of Artificial Sequence: Synthetic oligonucleotide
  Antisense strand to SEQ ID NO: 1891272
uauuaucugcugcacuacc

SEQ ID NO: 1891274 - RNA, 19 nt, Artificial Sequence
  Description of Artificial Sequence: Synthetic oligonucleotide
  Sense strand starting at position 537 of SEQ ID NO: 1879215
ggcuguacaguguaugaaa

SEQ ID NO: 1891275 - RNA, 19 nt, Artificial Sequence
  Description of Artificial Sequence: Synthetic oligonucleotide
  Antisense strand to SEQ ID NO: 1891274
uuucauacacuguacagcc

SEQ ID NO: 1891276 - RNA, 19 nt, Artificial Sequence
  Description of Artificial Sequence: Synthetic oligonucleotide
  Sense strand starting at position 548 of SEQ ID NO: 1879215
guaugaaaugccuacauua

SEQ ID NO: 1891277 - RNA, 19 nt, Artificial Sequence
  Description of Artificial Sequence: Synthetic oligonucleotide
  Antisense strand to SEQ ID NO: 1891276
uaauguaggcauuucauac

SEQ ID NO: 1891278 - RNA, 19 nt, Artificial Sequence
  Description of Artificial Sequence: Synthetic oligonucleotide
  Sense strand starting at position 961 of SEQ ID NO: 1879215
gaguuccuagggugggaua

SEQ ID NO: 1891279 - RNA, 19 nt, Artificial Sequence
  Description of Artificial Sequence: Synthetic oligonucleotide
  Antisense strand to SEQ ID NO: 1891278
uaucccacccuaggaacuc

SEQ ID NO: 1891280 - RNA, 19 nt, Artificial Sequence
  Description of Artificial Sequence: Synthetic oligonucleotide
  Sense strand starting at position 1004 of SEQ ID NO: 1879215
ggacaagggugccuuuaga

SEQ ID NO: 1891281 - RNA, 19 nt, Artificial Sequence
  Description of Artificial Sequence: Synthetic oligonucleotide
  Antisense strand to SEQ ID NO: 1891280
ucuaaaggcacccuugucc

SEQ ID NO: 1891282 - RNA, 19 nt, Artificial Sequence
  Description of Artificial Sequence: Synthetic oligonucleotide
  Sense strand starting at position 1432 of SEQ ID NO: 1879215
uguggugaccaauauggau

SEQ ID NO: 1891283 - RNA, 19 nt, Artificial Sequence
  Description of Artificial Sequence: Synthetic oligonucleotide
  Antisense strand to SEQ ID NO: 1891282
auccauauuggucaccaca

SEQ ID NO: 1891284 - RNA, 19 nt, Artificial Sequence
  Description of Artificial Sequence: Synthetic oligonucleotide
  Sense strand starting at position 1536 of SEQ ID NO: 1879215
gugauccuauugcuugaga

SEQ ID NO: 1891285 - RNA, 19 nt, Artificial Sequence
  Description of Artificial Sequence: Synthetic oligonucleotide
  Antisense strand to SEQ ID NO: 1891284
ucucaagcaauaggaucac

SEQ ID NO: 1891286 - RNA, 19 nt, Artificial Sequence
  Description of Artificial Sequence: Synthetic oligonucleotide
  Sense strand starting at position 1538 of SEQ ID NO: 1879215
gauccuauugcuugagacu

SEQ ID NO: 1891287 - RNA, 19 nt, Artificial Sequence
  Description of Artificial Sequence: Synthetic oligonucleotide
  Antisense strand to SEQ ID NO: 1891286
agucucaagcaauaggauc

SEQ ID NO: 1891288 - RNA, 19 nt, Artificial Sequence
  Description of Artificial Sequence: Synthetic oligonucleotide
  Sense strand starting at position 1539 of SEQ ID NO: 1879215
auccuauugcuugagacuc

SEQ ID NO: 1891289 - RNA, 19 nt, Artificial Sequence
  Description of Artificial Sequence: Synthetic oligonucleotide
  Antisense strand to SEQ ID NO: 1891288
gagucucaagcaauaggau

SEQ ID NO: 1891290 - RNA, 19 nt, Artificial Sequence
  Description of Artificial Sequence: Synthetic oligonucleotide
  Sense strand starting at position 2336 of SEQ ID NO: 1879215
gaguaucagaugugaguga

SEQ ID NO: 1891291 - RNA, 19 nt, Artificial Sequence
  Description of Artificial Sequence: Synthetic oligonucleotide
  Antisense strand to SEQ ID NO: 1891290
ucacucacaucugauacuc

SEQ ID NO: 1891292 - RNA, 19 nt, Artificial Sequence
  Description of Artificial Sequence: Synthetic oligonucleotide
  Sense strand starting at position 2340 of SEQ ID NO: 1879215
aucagaugugagugacuaa

SEQ ID NO: 1891293 - RNA, 19 nt, Artificial Sequence
  Description of Artificial Sequence: Synthetic oligonucleotide
  Antisense strand to SEQ ID NO: 1891292
uuagucacucacaucugau

SEQ ID NO: 1891294 - RNA, 19 nt, Artificial Sequence
  Description of Artificial Sequence: Synthetic oligonucleotide
  Sense strand starting at position 2623 of SEQ ID NO: 1879215
gcaggcuaucugcuuaguu

SEQ ID NO: 1891295 - RNA, 19 nt, Artificial Sequence
  Description of Artificial Sequence: Synthetic oligonucleotide
  Antisense strand to SEQ ID NO: 1891294
aacuaagcagauagccugc

SEQ ID NO: 1891296 - RNA, 19 nt, Artificial Sequence
  Description of Artificial Sequence: Synthetic oligonucleotide
  Sense strand starting at position 2763 of SEQ ID NO: 1879215
ccacguuccaaggaugagu

SEQ ID NO: 1891297 - RNA, 19 nt, Artificial Sequence
  Description of Artificial Sequence: Synthetic oligonucleotide
  Antisense strand to SEQ ID NO: 1891296
acucauccuuggaacgugg

SEQ ID NO: 1891298 - RNA, 19 nt, Artificial Sequence
  Description of Artificial Sequence: Synthetic oligonucleotide
  Sense strand starting at position 2806 of SEQ ID NO: 1879215
uucuuccaugcguaggaaa

SEQ ID NO: 1891299 - RNA, 19 nt, Artificial Sequence
  Description of Artificial Sequence: Synthetic oligonucleotide
  Antisense strand to SEQ ID NO: 1891298
uuuccuacgcauggaagaa

SEQ ID NO: 1891300 - RNA, 19 nt, Artificial Sequence
  Description of Artificial Sequence: Synthetic oligonucleotide
  Sense strand starting at position 2882 of SEQ ID NO: 1879215
agggauaccucuucugcca

SEQ ID NO: 1891301 - RNA, 19 nt, Artificial Sequence
  Description of Artificial Sequence: Synthetic oligonucleotide
  Antisense strand to SEQ ID NO: 1891300
uggcagaagagguaucccu

SEQ ID NO: 1891302 - RNA, 19 nt, Artificial Sequence
  Description of Artificial Sequence: Synthetic oligonucleotide
  Sense strand starting at position 2993 of SEQ ID NO: 1879215
gacuguuauuugguaggcu

SEQ ID NO: 1891303 - RNA, 19 nt, Artificial Sequence
  Description of Artificial Sequence: Synthetic oligonucleotide
  Antisense strand to SEQ ID NO: 1891302
agccuaccaaauaacaguc

SEQ ID NO: 1891304 - RNA, 19 nt, Artificial Sequence
  Description of Artificial Sequence: Synthetic oligonucleotide
  Sense strand starting at position 2997 of SEQ ID NO: 1879215
guuauuugguaggcuguga

SEQ ID NO: 1891305 - RNA, 19 nt, Artificial Sequence
  Description of Artificial Sequence: Synthetic oligonucleotide
  Antisense strand to SEQ ID NO: 1891304
ucacagccuaccaaauaac

SEQ ID NO: 1891306 - RNA, 19 nt, Artificial Sequence
  Description of Artificial Sequence: Synthetic oligonucleotide
  Sense strand starting at position 3047 of SEQ ID NO: 1879215
gguggaguccgcgcaggau

SEQ ID NO: 1891307 - RNA, 19 nt, Artificial Sequence
  Description of Artificial Sequence: Synthetic oligonucleotide
  Antisense strand to SEQ ID NO: 1891306
auccugcgcggacuccacc

SEQ ID NO: 1891308 - RNA, 19 nt, Artificial Sequence
  Description of Artificial Sequence: Synthetic oligonucleotide
  Sense strand starting at position 3182 of SEQ ID NO: 1879215
accaguuuccuugagcaac

SEQ ID NO: 1891309 - RNA, 19 nt, Artificial Sequence
  Description of Artificial Sequence: Synthetic oligonucleotide
  Antisense strand to SEQ ID NO: 1891308
guugcucaaggaaacuggu

SEQ ID NO: 1891310 - RNA, 19 nt, Artificial Sequence
  Description of Artificial Sequence: Synthetic oligonucleotide
  Sense strand starting at position 3219 of SEQ ID NO: 1879215
ccuuucugguuuccacaga

SEQ ID NO: 1891311 - RNA, 19 nt, Artificial Sequence
  Description of Artificial Sequence: Synthetic oligonucleotide
  Antisense strand to SEQ ID NO: 1891310
ucuguggaaaccagaaagg

SEQ ID NO: 1891312 - RNA, 19 nt, Artificial Sequence
  Description of Artificial Sequence: Synthetic oligonucleotide
  Sense strand starting at position 3323 of SEQ ID NO: 1879215
uuaagaacugucugccaaa

SEQ ID NO: 1891313 - RNA, 19 nt, Artificial Sequence
  Description of Artificial Sequence: Synthetic oligonucleotide
  Antisense strand to SEQ ID NO: 1891312
uuuggcagacaguucuuaa

SEQ ID NO: 1891314 - RNA, 19 nt, Artificial Sequence
  Description of Artificial Sequence: Synthetic oligonucleotide
  Sense strand starting at position 3352 of SEQ ID NO: 1879215
uugcaaacucgccauuaau

SEQ ID NO: 1891315 - RNA, 19 nt, Artificial Sequence
  Description of Artificial Sequence: Synthetic oligonucleotide
  Antisense strand to SEQ ID NO: 1891314
auuaauggcgaguuugcaa

SEQ ID NO: 1891316 - RNA, 19 nt, Artificial Sequence
  Description of Artificial Sequence: Synthetic oligonucleotide
  Sense strand starting at position 3387 of SEQ ID NO: 1879215
caaguuauuguuugagauu

SEQ ID NO: 1891317 - RNA, 19 nt, Artificial Sequence
  Description of Artificial Sequence: Synthetic oligonucleotide
  Antisense strand to SEQ ID NO: 1891316
aaucucaaacaauaacuug

SEQ ID NO: 1891318 - RNA, 19 nt, Artificial Sequence
  Description of Artificial Sequence: Synthetic oligonucleotide
  Sense strand starting at position 3410 of SEQ ID NO: 1879215
ugaguaugaaaccacguau

SEQ ID NO: 1891319 - RNA, 19 nt, Artificial Sequence
  Description of Artificial Sequence: Synthetic oligonucleotide
  Antisense strand to SEQ ID NO: 1891318
auacgugguuucauacuca

SEQ ID NO: 1891320 - RNA, 19 nt, Artificial Sequence
  Description of Artificial Sequence: Synthetic oligonucleotide
  Sense strand starting at position 3419 of SEQ ID NO: 1879215
aaccacguaugaguagaau

SEQ ID NO: 1891321 - RNA, 19 nt, Artificial Sequence
  Description of Artificial Sequence: Synthetic oligonucleotide
  Antisense strand to SEQ ID NO: 1891320
auucuacucauacgugguu

SEQ ID NO: 1891322 - RNA, 19 nt, Artificial Sequence
  Description of Artificial Sequence: Synthetic oligonucleotide
  Sense strand starting at position 3478 of SEQ ID NO: 1879215
aacgauuucuggcaagaau

SEQ ID NO: 1891323 - RNA, 19 nt, Artificial Sequence
  Description of Artificial Sequence: Synthetic oligonucleotide
  Antisense strand to SEQ ID NO: 1891322
auucuugccagaaaucguu

SEQ ID NO: 1891324 - RNA, 19 nt, Artificial Sequence
  Description of Artificial Sequence: Synthetic oligonucleotide
  Sense strand starting at position 3499 of SEQ ID NO: 1879215
acgcuugguacuuggaaga

SEQ ID NO: 1891325 - RNA, 19 nt, Artificial Sequence
  Description of Artificial Sequence: Synthetic oligonucleotide
  Antisense strand to SEQ ID NO: 1891324
ucuuccaaguaccaagcgu

SEQ ID NO: 1891326 - RNA, 19 nt, Artificial Sequence
  Description of Artificial Sequence: Synthetic oligonucleotide
  Sense strand starting at position 3538 of SEQ ID NO: 1879215
ccgcaauaguuauuuguuu

SEQ ID NO: 1891327 - RNA, 19 nt, Artificial Sequence
  Description of Artificial Sequence: Synthetic oligonucleotide
  Antisense strand to SEQ ID NO: 1891326
aaacaaauaacuauugcgg

SEQ ID NO: 1891328 - RNA, 19 nt, Artificial Sequence
  Description of Artificial Sequence: Synthetic oligonucleotide
  Sense strand starting at position 3594 of SEQ ID NO: 1879215
uuugaaucgccuguagcuu

SEQ ID NO: 1891329 - RNA, 19 nt, Artificial Sequence
  Description of Artificial Sequence: Synthetic oligonucleotide
  Antisense strand to SEQ ID NO: 1891328
aagcuacaggcgauucaaa

SEQ ID NO: 1891330 - RNA, 19 nt, Artificial Sequence
  Description of Artificial Sequence: Synthetic oligonucleotide
  Sense strand starting at position 3711 of SEQ ID NO: 1879215
gcaauaacccagugagaau

SEQ ID NO: 1891331 - RNA, 19 nt, Artificial Sequence
  Description of Artificial Sequence: Synthetic oligonucleotide
  Antisense strand to SEQ ID NO: 1891330
auucucacuggguuauugc

SEQ ID NO: 1891332 - RNA, 19 nt, Artificial Sequence
  Description of Artificial Sequence: Synthetic oligonucleotide
  Sense strand starting at position 3797 of SEQ ID NO: 1879215
agcugauaccacugaaauc

SEQ ID NO: 1891333 - RNA, 19 nt, Artificial Sequence
  Description of Artificial Sequence: Synthetic oligonucleotide
  Antisense strand to SEQ ID NO: 1891332
gauuucagugguaucagcu

SEQ ID NO: 1891334 - RNA, 19 nt, Artificial Sequence
  Description of Artificial Sequence: Synthetic oligonucleotide
  Sense strand starting at position 3807 of SEQ ID NO: 1879215
acugaaaucugggauuuaa

SEQ ID NO: 1891335 - RNA, 19 nt, Artificial Sequence
  Description of Artificial Sequence: Synthetic oligonucleotide
  Antisense strand to SEQ ID NO: 1891334
uuaaaucccagauuucagu

SEQ ID NO: 1891336 - RNA, 19 nt, Artificial Sequence
  Description of Artificial Sequence: Synthetic oligonucleotide
  Sense strand starting at position 3848 of SEQ ID NO: 1879215
ucuacuacagagugcuuaa

SEQ ID NO: 1891337 - RNA, 19 nt, Artificial Sequence
  Description of Artificial Sequence: Synthetic oligonucleotide
  Antisense strand to SEQ ID NO: 1891336
uuaagcacucuguaguaga

SEQ ID NO: 1891338 - RNA, 19 nt, Artificial Sequence
  Description of Artificial Sequence: Synthetic oligonucleotide
  Sense strand starting at position 3851 of SEQ ID NO: 1879215
acuacagagugcuuaagau

SEQ ID NO: 1891339 - RNA, 19 nt, Artificial Sequence
  Description of Artificial Sequence: Synthetic oligonucleotide
  Antisense strand to SEQ ID NO: 1891338
aucuuaagcacucuguagu

SEQ ID NO: 1891340 - RNA, 19 nt, Artificial Sequence
  Description of Artificial Sequence: Synthetic oligonucleotide
  Sense strand starting at position 3873 of SEQ ID NO: 1879215
cugagagaguaauucugua

SEQ ID NO: 1891341 - RNA, 19 nt, Artificial Sequence
  Description of Artificial Sequence: Synthetic oligonucleotide
  Antisense strand to SEQ ID NO: 1891340
uacagaauuacucucucag

SEQ ID NO: 1891342 - RNA, 19 nt, Artificial Sequence
  Description of Artificial Sequence: Synthetic oligonucleotide
  Sense strand starting at position 3877 of SEQ ID NO: 1879215
gagaguaauucuguaagug

SEQ ID NO: 1891343 - RNA, 19 nt, Artificial Sequence
  Description of Artificial Sequence: Synthetic oligonucleotide
  Antisense strand to SEQ ID NO: 1891342
cacuuacagaauuacucuc

SEQ ID NO: 1891344 - RNA, 19 nt, Artificial Sequence
  Description of Artificial Sequence: Synthetic oligonucleotide
  Sense strand starting at position 3878 of SEQ ID NO: 1879215
agaguaauucuguaaguga

SEQ ID NO: 1891345 - RNA, 19 nt, Artificial Sequence
  Description of Artificial Sequence: Synthetic oligonucleotide
  Antisense strand to SEQ ID NO: 1891344
ucacuuacagaauuacucu

SEQ ID NO: 1891346 - RNA, 19 nt, Artificial Sequence
  Description of Artificial Sequence: Synthetic oligonucleotide
  Sense strand starting at position 3881 of SEQ ID NO: 1879215
guaauucuguaagugaauu

SEQ ID NO: 1891347 - RNA, 19 nt, Artificial Sequence
  Description of Artificial Sequence: Synthetic oligonucleotide
  Antisense strand to SEQ ID NO: 1891346
aauucacuuacagaauuac

SEQ ID NO: 1891348 - RNA, 19 nt, Artificial Sequence
  Description of Artificial Sequence: Synthetic oligonucleotide
  Sense strand starting at position 103 of SEQ ID NO: 1879216
gcaacaucugcugaaugaa

SEQ ID NO: 1891349 - RNA, 19 nt, Artificial Sequence
  Description of Artificial Sequence: Synthetic oligonucleotide
  Antisense strand to SEQ ID NO: 1891348
uucauucagcagauguugc

SEQ ID NO: 1891350 - RNA, 19 nt, Artificial Sequence
  Description of Artificial Sequence: Synthetic oligonucleotide
  Sense strand starting at position 128 of SEQ ID NO: 1879216
acuuuccugccaggaaauu

SEQ ID NO: 1891351 - RNA, 19 nt, Artificial Sequence
  Description of Artificial Sequence: Synthetic oligonucleotide
  Antisense strand to SEQ ID NO: 1891350
aauuuccuggcaggaaagu

SEQ ID NO: 1891352 - RNA, 19 nt, Artificial Sequence
  Description of Artificial Sequence: Synthetic oligonucleotide
  Sense strand starting at position 129 of SEQ ID NO: 1879216
cuuuccugccaggaaauua

SEQ ID NO: 1891353 - RNA, 19 nt, Artificial Sequence
  Description of Artificial Sequence: Synthetic oligonucleotide
  Antisense strand to SEQ ID NO: 1891352
uaauuuccuggcaggaaag

SEQ ID NO: 1891354 - RNA, 19 nt, Artificial Sequence
  Description of Artificial Sequence: Synthetic oligonucleotide
  Sense strand starting at position 244 of SEQ ID NO: 1879216
cucagauuugcugggcuau

SEQ ID NO: 1891355 - RNA, 19 nt, Artificial Sequence
  Description of Artificial Sequence: Synthetic oligonucleotide
  Antisense strand to SEQ ID NO: 1891354
auagcccagcaaaucugag

SEQ ID NO: 1891356 - RNA, 19 nt, Artificial Sequence
  Description of Artificial Sequence: Synthetic oligonucleotide
  Sense strand starting at position 245 of SEQ ID NO: 1879216
ucagauuugcugggcuauu

SEQ ID NO: 1891357 - RNA, 19 nt, Artificial Sequence
  Description of Artificial Sequence: Synthetic oligonucleotide
  Antisense strand to SEQ ID NO: 1891356
aauagcccagcaaaucuga

SEQ ID NO: 1891358 - RNA, 19 nt, Artificial Sequence
  Description of Artificial Sequence: Synthetic oligonucleotide
  Sense strand starting at position 637 of SEQ ID NO: 1879216
uuauuuaggugaggucaga

SEQ ID NO: 1891359 - RNA, 19 nt, Artificial Sequence
  Description of Artificial Sequence: Synthetic oligonucleotide
  Antisense strand to SEQ ID NO: 1891358
ucugaccucaccuaaauaa

SEQ ID NO: 1891360 - RNA, 19 nt, Artificial Sequence
  Description of Artificial Sequence: Synthetic oligonucleotide
  Sense strand starting at position 650 of SEQ ID NO: 1879216
gucagaagcuuccuggagu

SEQ ID NO: 1891361 - RNA, 19 nt, Artificial Sequence
  Description of Artificial Sequence: Synthetic oligonucleotide
  Antisense strand to SEQ ID NO: 1891360
acuccaggaagcuucugac

SEQ ID NO: 1891362 - RNA, 19 nt, Artificial Sequence
  Description of Artificial Sequence: Synthetic oligonucleotide
  Sense strand starting at position 663 of SEQ ID NO: 1879216
uggaguuggcccugaagca

SEQ ID NO: 1891363 - RNA, 19 nt, Artificial Sequence
  Description of Artificial Sequence: Synthetic oligonucleotide
  Antisense strand to SEQ ID NO: 1891362
ugcuucagggccaacucca

SEQ ID NO: 1891364 - RNA, 19 nt, Artificial Sequence
  Description of Artificial Sequence: Synthetic oligonucleotide
  Sense strand starting at position 688 of SEQ ID NO: 1879216
aucccaauugcuugaggua

SEQ ID NO: 1891365 - RNA, 19 nt, Artificial Sequence
  Description of Artificial Sequence: Synthetic oligonucleotide
  Antisense strand to SEQ ID NO: 1891364
uaccucaagcaauugggau

SEQ ID NO: 1891366 - RNA, 19 nt, Artificial Sequence
  Description of Artificial Sequence: Synthetic oligonucleotide
  Sense strand starting at position 689 of SEQ ID NO: 1879216
ucccaauugcuugagguaa

SEQ ID NO: 1891367 - RNA, 19 nt, Artificial Sequence
  Description of Artificial Sequence: Synthetic oligonucleotide
  Antisense strand to SEQ ID NO: 1891366
uuaccucaagcaauuggga

SEQ ID NO: 1891368 - RNA, 19 nt, Artificial Sequence
  Description of Artificial Sequence: Synthetic oligonucleotide
  Sense strand starting at position 697 of SEQ ID NO: 1879216
gcuugagguaaauaguaau

SEQ ID NO: 1891369 - RNA, 19 nt, Artificial Sequence
  Description of Artificial Sequence: Synthetic oligonucleotide
  Antisense strand to SEQ ID NO: 1891368
auuacuauuuaccucaagc

SEQ ID NO: 1891370 - RNA, 19 nt, Artificial Sequence
  Description of Artificial Sequence: Synthetic oligonucleotide
  Sense strand starting at position 700 of SEQ ID NO: 1879216
ugagguaaauaguaaucaa

SEQ ID NO: 1891371 - RNA, 19 nt, Artificial Sequence
  Description of Artificial Sequence: Synthetic oligonucleotide
  Antisense strand to SEQ ID NO: 1891370
uugauuacuauuuaccuca

SEQ ID NO: 1891372 - RNA, 19 nt, Artificial Sequence
  Description of Artificial Sequence: Synthetic oligonucleotide
  Sense strand starting at position 703 of SEQ ID NO: 1879216
gguaaauaguaaucaacuu

SEQ ID NO: 1891373 - RNA, 19 nt, Artificial Sequence
  Description of Artificial Sequence: Synthetic oligonucleotide
  Antisense strand to SEQ ID NO: 1891372
aaguugauuacuauuuacc

SEQ ID NO: 1891374 - RNA, 19 nt, Artificial Sequence
  Description of Artificial Sequence: Synthetic oligonucleotide
  Sense strand starting at position 852 of SEQ ID NO: 1879216
ccacucucuggugauuaau

SEQ ID NO: 1891375 - RNA, 19 nt, Artificial Sequence
  Description of Artificial Sequence: Synthetic oligonucleotide
  Antisense strand to SEQ ID NO: 1891374
auuaaucaccagagagugg

SEQ ID NO: 1891376 - RNA, 19 nt, Artificial Sequence
  Description of Artificial Sequence: Synthetic oligonucleotide
  Sense strand starting at position 854 of SEQ ID NO: 1879216
acucucuggugauuaaucu

SEQ ID NO: 1891377 - RNA, 19 nt, Artificial Sequence
  Description of Artificial Sequence: Synthetic oligonucleotide
  Antisense strand to SEQ ID NO: 1891376
agauuaaucaccagagagu

SEQ ID NO: 1891378 - RNA, 19 nt, Artificial Sequence
  Description of Artificial Sequence: Synthetic oligonucleotide
  Sense strand starting at position 983 of SEQ ID NO: 1879216
caggguugcccuugaugag

SEQ ID NO: 1891379 - RNA, 19 nt, Artificial Sequence
  Description of Artificial Sequence: Synthetic oligonucleotide
  Antisense strand to SEQ ID NO: 1891378
cucaucaagggcaacccug

SEQ ID NO: 1891380 - RNA, 19 nt, Artificial Sequence
  Description of Artificial Sequence: Synthetic oligonucleotide
  Sense strand starting at position 1025 of SEQ ID NO: 1879216
ccuggugaguuacugacua

SEQ ID NO: 1891381 - RNA, 19 nt, Artificial Sequence
  Description of Artificial Sequence: Synthetic oligonucleotide
  Antisense strand to SEQ ID NO: 1891380
uagucaguaacucaccagg

SEQ ID NO: 1891382 - RNA, 19 nt, Artificial Sequence
  Description of Artificial Sequence: Synthetic oligonucleotide
  Sense strand starting at position 1027 of SEQ ID NO: 1879216
uggugaguuacugacuaac

SEQ ID NO: 1891383 - RNA, 19 nt, Artificial Sequence
  Description of Artificial Sequence: Synthetic oligonucleotide
  Antisense strand to SEQ ID NO: 1891382
guuagucaguaacucacca

SEQ ID NO: 1891384 - RNA, 19 nt, Artificial Sequence
  Description of Artificial Sequence: Synthetic oligonucleotide
  Sense strand starting at position 1029 of SEQ ID NO: 1879216
gugaguuacugacuaacca

SEQ ID NO: 1891385 - RNA, 19 nt, Artificial Sequence
  Description of Artificial Sequence: Synthetic oligonucleotide
  Antisense strand to SEQ ID NO: 1891384
ugguuagucaguaacucac

SEQ ID NO: 1891386 - RNA, 19 nt, Artificial Sequence
  Description of Artificial Sequence: Synthetic oligonucleotide
  Sense strand starting at position 1160 of SEQ ID NO: 1879216
cuuuguaaggcccaggauu

SEQ ID NO: 1891387 - RNA, 19 nt, Artificial Sequence
  Description of Artificial Sequence: Synthetic oligonucleotide
  Antisense strand to SEQ ID NO: 1891386
aauccugggccuuacaaag

SEQ ID NO: 1891388 - RNA, 19 nt, Artificial Sequence
  Description of Artificial Sequence: Synthetic oligonucleotide
  Sense strand starting at position 1179 of SEQ ID NO: 1879216
acaucuguuuggcugaagu

SEQ ID NO: 1891389 - RNA, 19 nt, Artificial Sequence
  Description of Artificial Sequence: Synthetic oligonucleotide
  Antisense strand to SEQ ID NO: 1891388
acuucagccaaacagaugu

SEQ ID NO: 1891390 - RNA, 19 nt, Artificial Sequence
  Description of Artificial Sequence: Synthetic oligonucleotide
  Sense strand starting at position 1210 of SEQ ID NO: 1879216
gaccuaucagagugcuggu

SEQ ID NO: 1891391 - RNA, 19 nt, Artificial Sequence
  Description of Artificial Sequence: Synthetic oligonucleotide
  Antisense strand to SEQ ID NO: 1891390
accagcacucugauagguc

SEQ ID NO: 1891392 - RNA, 19 nt, Artificial Sequence
  Description of Artificial Sequence: Synthetic oligonucleotide
  Sense strand starting at position 1226 of SEQ ID NO: 1879216
gguugucgcauauacucua

SEQ ID NO: 1891393 - RNA, 19 nt, Artificial Sequence
  Description of Artificial Sequence: Synthetic oligonucleotide
  Antisense strand to SEQ ID NO: 1891392
uagaguauaugcgacaacc

SEQ ID NO: 1891394 - RNA, 19 nt, Artificial Sequence
  Description of Artificial Sequence: Synthetic oligonucleotide
  Sense strand starting at position 1229 of SEQ ID NO: 1879216
ugucgcauauacucuaaua

SEQ ID NO: 1891395 - RNA, 19 nt, Artificial Sequence
  Description of Artificial Sequence: Synthetic oligonucleotide
  Antisense strand to SEQ ID NO: 1891394
uauuagaguauaugcgaca

SEQ ID NO: 1891396 - RNA, 19 nt, Artificial Sequence
  Description of Artificial Sequence: Synthetic oligonucleotide
  Sense strand starting at position 1248 of SEQ ID NO: 1879216
uuugaaugacuauacgagu

SEQ ID NO: 1891397 - RNA, 19 nt, Artificial Sequence
  Description of Artificial Sequence: Synthetic oligonucleotide
  Antisense strand to SEQ ID NO: 1891396
acucguauagucauucaaa

SEQ ID NO: 1891398 - RNA, 19 nt, Artificial Sequence
  Description of Artificial Sequence: Synthetic oligonucleotide
  Sense strand starting at position 1254 of SEQ ID NO: 1879216
ugacuauacgaguaaguuu

SEQ ID NO: 1891399 - RNA, 19 nt, Artificial Sequence
  Description of Artificial Sequence: Synthetic oligonucleotide
  Antisense strand to SEQ ID NO: 1891398
aaacuuacucguauaguca

SEQ ID NO: 1891400 - RNA, 19 nt, Artificial Sequence
  Description of Artificial Sequence: Synthetic oligonucleotide
  Sense strand starting at position 1505 of SEQ ID NO: 1879216
agccucauccuugagacuu

SEQ ID NO: 1891401 - RNA, 19 nt, Artificial Sequence
  Description of Artificial Sequence: Synthetic oligonucleotide
  Antisense strand to SEQ ID NO: 1891400
aagucucaaggaugaggcu

SEQ ID NO: 1891402 - RNA, 19 nt, Artificial Sequence
  Description of Artificial Sequence: Synthetic oligonucleotide
  Sense strand starting at position 1611 of SEQ ID NO: 1879216
cggcuuaccuucucuuuga

SEQ ID NO: 1891403 - RNA, 19 nt, Artificial Sequence
  Description of Artificial Sequence: Synthetic oligonucleotide
  Antisense strand to SEQ ID NO: 1891402
ucaaagagaagguaagccg

SEQ ID NO: 1891404 - RNA, 19 nt, Artificial Sequence
  Description of Artificial Sequence: Synthetic oligonucleotide
  Sense strand starting at position 1950 of SEQ ID NO: 1879216
ccaucuugccugcaugaca

SEQ ID NO: 1891405 - RNA, 19 nt, Artificial Sequence
  Description of Artificial Sequence: Synthetic oligonucleotide
  Antisense strand to SEQ ID NO: 1891404
ugucaugcaggcaagaugg

SEQ ID NO: 1891406 - RNA, 19 nt, Artificial Sequence
  Description of Artificial Sequence: Synthetic oligonucleotide
  Sense strand starting at position 2312 of SEQ ID NO: 1879216
gagagauagcucgaacguc

SEQ ID NO: 1891407 - RNA, 19 nt, Artificial Sequence
  Description of Artificial Sequence: Synthetic oligonucleotide
  Antisense strand to SEQ ID NO: 1891406
gacguucgagcuaucucuc

SEQ ID NO: 1891408 - RNA, 19 nt, Artificial Sequence
  Description of Artificial Sequence: Synthetic oligonucleotide
  Sense strand starting at position 2573 of SEQ ID NO: 1879216
guggagguggucuggagaa

SEQ ID NO: 1891409 - RNA, 19 nt, Artificial Sequence
  Description of Artificial Sequence: Synthetic oligonucleotide
  Antisense strand to SEQ ID NO: 1891408
uucuccagaccaccuccac

SEQ ID NO: 1891410 - RNA, 19 nt, Artificial Sequence
  Description of Artificial Sequence: Synthetic oligonucleotide
  Sense strand starting at position 2621 of SEQ ID NO: 1879216
ugcgauuggaagggagauu

SEQ ID NO: 1891411 - RNA, 19 nt, Artificial Sequence
  Description of Artificial Sequence: Synthetic oligonucleotide
  Antisense strand to SEQ ID NO: 1891410
aaucucccuuccaaucgca

SEQ ID NO: 1891412 - RNA, 19 nt, Artificial Sequence
  Description of Artificial Sequence: Synthetic oligonucleotide
  Sense strand starting at position 2706 of SEQ ID NO: 1879216
ccucuuguuugcuuaagga

SEQ ID NO: 1891413 - RNA, 19 nt, Artificial Sequence
  Description of Artificial Sequence: Synthetic oligonucleotide
  Antisense strand to SEQ ID NO: 1891412
uccuuaagcaaacaagagg

SEQ ID NO: 1891414 - RNA, 19 nt, Artificial Sequence
  Description of Artificial Sequence: Synthetic oligonucleotide
  Sense strand starting at position 2769 of SEQ ID NO: 1879216
cugcauuuauccuugucau

SEQ ID NO: 1891415 - RNA, 19 nt, Artificial Sequence
  Description of Artificial Sequence: Synthetic oligonucleotide
  Antisense strand to SEQ ID NO: 1891414
augacaaggauaaaugcag

SEQ ID NO: 1891416 - RNA, 19 nt, Artificial Sequence
  Description of Artificial Sequence: Synthetic oligonucleotide
  Sense strand starting at position 2770 of SEQ ID NO: 1879216
ugcauuuauccuugucauc

SEQ ID NO: 1891417 - RNA, 19 nt, Artificial Sequence
  Description of Artificial Sequence: Synthetic oligonucleotide
  Antisense strand to SEQ ID NO: 1891416
gaugacaaggauaaaugca

SEQ ID NO: 1891418 - RNA, 19 nt, Artificial Sequence
  Description of Artificial Sequence: Synthetic oligonucleotide
  Sense strand starting at position 3115 of SEQ ID NO: 1879216
uuugguccucccuguggaa

SEQ ID NO: 1891419 - RNA, 19 nt, Artificial Sequence
  Description of Artificial Sequence: Synthetic oligonucleotide
  Antisense strand to SEQ ID NO: 1891418
uuccacagggaggaccaaa

SEQ ID NO: 1891420 - RNA, 19 nt, Artificial Sequence
  Description of Artificial Sequence: Synthetic oligonucleotide
  Sense strand starting at position 3117 of SEQ ID NO: 1879216
ugguccucccuguggaaga

SEQ ID NO: 1891421 - RNA, 19 nt, Artificial Sequence
  Description of Artificial Sequence: Synthetic oligonucleotide
  Antisense strand to SEQ ID NO: 1891420
ucuuccacagggaggacca

SEQ ID NO: 1891422 - RNA, 19 nt, Artificial Sequence
  Description of Artificial Sequence: Synthetic oligonucleotide
  Sense strand starting at position 3465 of SEQ ID NO: 1879216
uaaggucgccaagaggaau

SEQ ID NO: 1891423 - RNA, 19 nt, Artificial Sequence
  Description of Artificial Sequence: Synthetic oligonucleotide
  Antisense strand to SEQ ID NO: 1891422
auuccucuuggcgaccuua

SEQ ID NO: 1891424 - RNA, 19 nt, Artificial Sequence
  Description of Artificial Sequence: Synthetic oligonucleotide
  Sense strand starting at position 3593 of SEQ ID NO: 1879216
uuggcaucucaguauucuu

SEQ ID NO: 1891425 - RNA, 19 nt, Artificial Sequence
  Description of Artificial Sequence: Synthetic oligonucleotide
  Antisense strand to SEQ ID NO: 1891424
aagaauacugagaugccaa

SEQ ID NO: 1891426 - RNA, 19 nt, Artificial Sequence
  Description of Artificial Sequence: Synthetic oligonucleotide
  Sense strand starting at position 3635 of SEQ ID NO: 1879216
guugcuggaaugggauauu

SEQ ID NO: 1891427 - RNA, 19 nt, Artificial Sequence
  Description of Artificial Sequence: Synthetic oligonucleotide
  Antisense strand to SEQ ID NO: 1891426
aauaucccauuccagcaac

SEQ ID NO: 1891428 - RNA, 19 nt, Artificial Sequence
  Description of Artificial Sequence: Synthetic oligonucleotide
  Sense strand starting at position 199 of SEQ ID NO: 1879217
ggaacauugucaucacccu

SEQ ID NO: 1891429 - RNA, 19 nt, Artificial Sequence
  Description of Artificial Sequence: Synthetic oligonucleotide
  Antisense strand to SEQ ID NO: 1891428
agggugaugacaauguucc

SEQ ID NO: 1891430 - RNA, 19 nt, Artificial Sequence
  Description of Artificial Sequence: Synthetic oligonucleotide
  Sense strand starting at position 242 of SEQ ID NO: 1879217
agggcacucagguaguuua

SEQ ID NO: 1891431 - RNA, 19 nt, Artificial Sequence
  Description of Artificial Sequence: Synthetic oligonucleotide
  Antisense strand to SEQ ID NO: 1891430
uaaacuaccugagugcccu

SEQ ID NO: 1891432 - RNA, 19 nt, Artificial Sequence
  Description of Artificial Sequence: Synthetic oligonucleotide
  Sense strand starting at position 674 of SEQ ID NO: 1879217
ugcuuuaagccauagggua

SEQ ID NO: 1891433 - RNA, 19 nt, Artificial Sequence
  Description of Artificial Sequence: Synthetic oligonucleotide
  Antisense strand to SEQ ID NO: 1891432
uacccuauggcuuaaagca

SEQ ID NO: 1891434 - RNA, 19 nt, Artificial Sequence
  Description of Artificial Sequence: Synthetic oligonucleotide
  Sense strand starting at position 732 of SEQ ID NO: 1879217
aagggaugguuguugcaaa

SEQ ID NO: 1891435 - RNA, 19 nt, Artificial Sequence
  Description of Artificial Sequence: Synthetic oligonucleotide
  Antisense strand to SEQ ID NO: 1891434
uuugcaacaaccaucccuu

SEQ ID NO: 1891436 - RNA, 19 nt, Artificial Sequence
  Description of Artificial Sequence: Synthetic oligonucleotide
  Sense strand starting at position 919 of SEQ ID NO: 1879217
agcucaugcccugggaaga

SEQ ID NO: 1891437 - RNA, 19 nt, Artificial Sequence
  Description of Artificial Sequence: Synthetic oligonucleotide
  Antisense strand to SEQ ID NO: 1891436
ucuucccagggcaugagcu

SEQ ID NO: 1891438 - RNA, 19 nt, Artificial Sequence
  Description of Artificial Sequence: Synthetic oligonucleotide
  Sense strand starting at position 1013 of SEQ ID NO: 1879217
gagaccuuuggugguggaa

SEQ ID NO: 1891439 - RNA, 19 nt, Artificial Sequence
  Description of Artificial Sequence: Synthetic oligonucleotide
  Antisense strand to SEQ ID NO: 1891438
uuccaccaccaaaggucuc

SEQ ID NO: 1891440 - RNA, 19 nt, Artificial Sequence
  Description of Artificial Sequence: Synthetic oligonucleotide
  Sense strand starting at position 1110 of SEQ ID NO: 1879217
cuaaucagccaguagugau

SEQ ID NO: 1891441 - RNA, 19 nt, Artificial Sequence
  Description of Artificial Sequence: Synthetic oligonucleotide
  Antisense strand to SEQ ID NO: 1891440
aucacuacuggcugauuag

SEQ ID NO: 1891442 - RNA, 19 nt, Artificial Sequence
  Description of Artificial Sequence: Synthetic oligonucleotide
  Sense strand starting at position 1134 of SEQ ID NO: 1879217
ggagaaagccuuugaacca

SEQ ID NO: 1891443 - RNA, 19 nt, Artificial Sequence
  Description of Artificial Sequence: Synthetic oligonucleotide
  Antisense strand to SEQ ID NO: 1891442
ugguucaaaggcuuucucc

SEQ ID NO: 1891444 - RNA, 19 nt, Artificial Sequence
  Description of Artificial Sequence: Synthetic oligonucleotide
  Sense strand starting at position 1141 of SEQ ID NO: 1879217
gccuuugaaccagaucuca

SEQ ID NO: 1891445 - RNA, 19 nt, Artificial Sequence
  Description of Artificial Sequence: Synthetic oligonucleotide
  Antisense strand to SEQ ID NO: 1891444
ugagaucugguucaaaggc

SEQ ID NO: 1891446 - RNA, 19 nt, Artificial Sequence
  Description of Artificial Sequence: Synthetic oligonucleotide
  Sense strand starting at position 1205 of SEQ ID NO: 1879217
ucacuauggugaguauuga

SEQ ID NO: 1891447 - RNA, 19 nt, Artificial Sequence
  Description of Artificial Sequence: Synthetic oligonucleotide
  Antisense strand to SEQ ID NO: 1891446
ucaauacucaccauaguga

SEQ ID NO: 1891448 - RNA, 19 nt, Artificial Sequence
  Description of Artificial Sequence: Synthetic oligonucleotide
  Sense strand starting at position 1234 of SEQ ID NO: 1879217
cagcucagucuggagaauu

SEQ ID NO: 1891449 - RNA, 19 nt, Artificial Sequence
  Description of Artificial Sequence: Synthetic oligonucleotide
  Antisense strand to SEQ ID NO: 1891448
aauucuccagacugagcug

SEQ ID NO: 1891450 - RNA, 19 nt, Artificial Sequence
  Description of Artificial Sequence: Synthetic oligonucleotide
  Sense strand starting at position 1253 of SEQ ID NO: 1879217
gaaggcuccuuccugaaag

SEQ ID NO: 1891451 - RNA, 19 nt, Artificial Sequence
  Description of Artificial Sequence: Synthetic oligonucleotide
  Antisense strand to SEQ ID NO: 1891450
cuuucaggaaggagccuuc

SEQ ID NO: 1891452 - RNA, 19 nt, Artificial Sequence
  Description of Artificial Sequence: Synthetic oligonucleotide
  Sense strand starting at position 1325 of SEQ ID NO: 1879217
ugcgguuagauggagauua

SEQ ID NO: 1891453 - RNA, 19 nt, Artificial Sequence
  Description of Artificial Sequence: Synthetic oligonucleotide
  Antisense strand to SEQ ID NO: 1891452
uaaucuccaucuaaccgca

SEQ ID NO: 1891454 - RNA, 19 nt, Artificial Sequence
  Description of Artificial Sequence: Synthetic oligonucleotide
  Sense strand starting at position 1526 of SEQ ID NO: 1879217
guuauaaaccgugagucca

SEQ ID NO: 1891455 - RNA, 19 nt, Artificial Sequence
  Description of Artificial Sequence: Synthetic oligonucleotide
  Antisense strand to SEQ ID NO: 1891454
uggacucacgguuuauaac

SEQ ID NO: 1891456 - RNA, 19 nt, Artificial Sequence
  Description of Artificial Sequence: Synthetic oligonucleotide
  Sense strand starting at position 1740 of SEQ ID NO: 1879217
guguauaaggaguaaugau

SEQ ID NO: 1891457 - RNA, 19 nt, Artificial Sequence
  Description of Artificial Sequence: Synthetic oligonucleotide
  Antisense strand to SEQ ID NO: 1891456
aucauuacuccuuauacac

SEQ ID NO: 1891458 - RNA, 19 nt, Artificial Sequence
  Description of Artificial Sequence: Synthetic oligonucleotide
  Sense strand starting at position 1774 of SEQ ID NO: 1879217
ggaugaauucugggucauu

SEQ ID NO: 1891459 - RNA, 19 nt, Artificial Sequence
  Description of Artificial Sequence: Synthetic oligonucleotide
  Antisense strand to SEQ ID NO: 1891458
aaugacccagaauucaucc

SEQ ID NO: 1891460 - RNA, 19 nt, Artificial Sequence
  Description of Artificial Sequence: Synthetic oligonucleotide
  Sense strand starting at position 1796 of SEQ ID NO: 1879217
ugaacugucuuccuuagaa

SEQ ID NO: 1891461 - RNA, 19 nt, Artificial Sequence
  Description of Artificial Sequence: Synthetic oligonucleotide
  Antisense strand to SEQ ID NO: 1891460
uucuaaggaagacaguuca

SEQ ID NO: 1891462 - RNA, 19 nt, Artificial Sequence
  Description of Artificial Sequence: Synthetic oligonucleotide
  Sense strand starting at position 2117 of SEQ ID NO: 1879217
uccugauacggucaauacu

SEQ ID NO: 1891463 - RNA, 19 nt, Artificial Sequence
  Description of Artificial Sequence: Synthetic oligonucleotide
  Antisense strand to SEQ ID NO: 1891462
aguauugaccguaucagga

SEQ ID NO: 1891464 - RNA, 19 nt, Artificial Sequence
  Description of Artificial Sequence: Synthetic oligonucleotide
  Sense strand starting at position 2376 of SEQ ID NO: 1879217
gcagaaacaucuucuguca

SEQ ID NO: 1891465 - RNA, 19 nt, Artificial Sequence
  Description of Artificial Sequence: Synthetic oligonucleotide
  Antisense strand to SEQ ID NO: 1891464
ugacagaagauguuucugc

SEQ ID NO: 1891466 - RNA, 19 nt, Artificial Sequence
  Description of Artificial Sequence: Synthetic oligonucleotide
  Sense strand starting at position 2384 of SEQ ID NO: 1879217
aucuucugucaccaagagu

SEQ ID NO: 1891467 - RNA, 19 nt, Artificial Sequence
  Description of Artificial Sequence: Synthetic oligonucleotide
  Antisense strand to SEQ ID NO: 1891466
acucuuggugacagaagau

SEQ ID NO: 1891468 - RNA, 19 nt, Artificial Sequence
  Description of Artificial Sequence: Synthetic oligonucleotide
  Sense strand starting at position 2397 of SEQ ID NO: 1879217
aagaguuucggagacaguu

SEQ ID NO: 1891469 - RNA, 19 nt, Artificial Sequence
  Description of Artificial Sequence: Synthetic oligonucleotide
  Antisense strand to SEQ ID NO: 1891468
aacugucuccgaaacucuu

SEQ ID NO: 1891470 - RNA, 19 nt, Artificial Sequence
  Description of Artificial Sequence: Synthetic oligonucleotide
  Sense strand starting at position 2445 of SEQ ID NO: 1879217
cucuguugcagggaaauaa

SEQ ID NO: 1891471 - RNA, 19 nt, Artificial Sequence
  Description of Artificial Sequence: Synthetic oligonucleotide
  Antisense strand to SEQ ID NO: 1891470
uuauuucccugcaacagag

SEQ ID NO: 1891472 - RNA, 19 nt, Artificial Sequence
  Description of Artificial Sequence: Synthetic oligonucleotide
  Sense strand starting at position 2537 of SEQ ID NO: 1879217
cuauccuuauaugugauua

SEQ ID NO: 1891473 - RNA, 19 nt, Artificial Sequence
  Description of Artificial Sequence: Synthetic oligonucleotide
  Antisense strand to SEQ ID NO: 1891472
uaaucacauauaaggauag

SEQ ID NO: 1891474 - RNA, 19 nt, Artificial Sequence
  Description of Artificial Sequence: Synthetic oligonucleotide
  Sense strand starting at position 2542 of SEQ ID NO: 1879217
cuuauaugugauuacguau

SEQ ID NO: 1891475 - RNA, 19 nt, Artificial Sequence
  Description of Artificial Sequence: Synthetic oligonucleotide
  Antisense strand to SEQ ID NO: 1891474
auacguaaucacauauaag

SEQ ID NO: 1891476 - RNA, 19 nt, Artificial Sequence
  Description of Artificial Sequence: Synthetic oligonucleotide
  Sense strand starting at position 2576 of SEQ ID NO: 1879217
uuucuuacaucugcagaga

SEQ ID NO: 1891477 - RNA, 19 nt, Artificial Sequence
  Description of Artificial Sequence: Synthetic oligonucleotide
  Antisense strand to SEQ ID NO: 1891476
ucucugcagauguaagaaa

SEQ ID NO: 1891478 - RNA, 19 nt, Artificial Sequence
  Description of Artificial Sequence: Synthetic oligonucleotide
  Sense strand starting at position 2619 of SEQ ID NO: 1879217
agaauucuggguuacguuu

SEQ ID NO: 1891479 - RNA, 19 nt, Artificial Sequence
  Description of Artificial Sequence: Synthetic oligonucleotide
  Antisense strand to SEQ ID NO: 1891478
aaacguaacccagaauucu

SEQ ID NO: 1891480 - RNA, 19 nt, Artificial Sequence
  Description of Artificial Sequence: Synthetic oligonucleotide
  Sense strand starting at position 2879 of SEQ ID NO: 1879217
ugugccugugccucaauau

SEQ ID NO: 1891481 - RNA, 19 nt, Artificial Sequence
  Description of Artificial Sequence: Synthetic oligonucleotide
  Antisense strand to SEQ ID NO: 1891480
auauugaggcacaggcaca

SEQ ID NO: 1891482 - RNA, 19 nt, Artificial Sequence
  Description of Artificial Sequence: Synthetic oligonucleotide
  Sense strand starting at position 2925 of SEQ ID NO: 1879217
gaugcaguacaaugaugau

SEQ ID NO: 1891483 - RNA, 19 nt, Artificial Sequence
  Description of Artificial Sequence: Synthetic oligonucleotide
  Antisense strand to SEQ ID NO: 1891482
aucaucauuguacugcauc

SEQ ID NO: 1891484 - RNA, 19 nt, Artificial Sequence
  Description of Artificial Sequence: Synthetic oligonucleotide
  Sense strand starting at position 3041 of SEQ ID NO: 1879217
auacaagcuugagauauuu

SEQ ID NO: 1891485 - RNA, 19 nt, Artificial Sequence
  Description of Artificial Sequence: Synthetic oligonucleotide
  Antisense strand to SEQ ID NO: 1891484
aaauaucucaagcuuguau

SEQ ID NO: 1891486 - RNA, 19 nt, Artificial Sequence
  Description of Artificial Sequence: Synthetic oligonucleotide
  Sense strand starting at position 3221 of SEQ ID NO: 1879217
gcuugcugggaucaauaca

SEQ ID NO: 1891487 - RNA, 19 nt, Artificial Sequence
  Description of Artificial Sequence: Synthetic oligonucleotide
  Antisense strand to SEQ ID NO: 1891486
uguauugaucccagcaagc

SEQ ID NO: 1891488 - RNA, 19 nt, Artificial Sequence
  Description of Artificial Sequence: Synthetic oligonucleotide
  Sense strand starting at position 3271 of SEQ ID NO: 1879217
ggacaagcaucaucagagu

SEQ ID NO: 1891489 - RNA, 19 nt, Artificial Sequence
  Description of Artificial Sequence: Synthetic oligonucleotide
  Antisense strand to SEQ ID NO: 1891488
acucugaugaugcuugucc

SEQ ID NO: 1891490 - RNA, 19 nt, Artificial Sequence
  Description of Artificial Sequence: Synthetic oligonucleotide
  Sense strand starting at position 3303 of SEQ ID NO: 1879217
gagugcucaguggaaguaa

SEQ ID NO: 1891491 - RNA, 19 nt, Artificial Sequence
  Description of Artificial Sequence: Synthetic oligonucleotide
  Antisense strand to SEQ ID NO: 1891490
uuacuuccacugagcacuc

SEQ ID NO: 1891492 - RNA, 19 nt, Artificial Sequence
  Description of Artificial Sequence: Synthetic oligonucleotide
  Sense strand starting at position 3575 of SEQ ID NO: 1879217
guauguuauguacaauuga

SEQ ID NO: 1891493 - RNA, 19 nt, Artificial Sequence
  Description of Artificial Sequence: Synthetic oligonucleotide
  Antisense strand to SEQ ID NO: 1891492
ucaauuguacauaacauac

SEQ ID NO: 1891494 - RNA, 19 nt, Artificial Sequence
  Description of Artificial Sequence: Synthetic oligonucleotide
  Sense strand starting at position 3593 of SEQ ID NO: 1879217
acuguaagucauuagcaaa

SEQ ID NO: 1891495 - RNA, 19 nt, Artificial Sequence
  Description of Artificial Sequence: Synthetic oligonucleotide
  Antisense strand to SEQ ID NO: 1891494
uuugcuaaugacuuacagu

SEQ ID NO: 1891496 - RNA, 19 nt, Artificial Sequence
  Description of Artificial Sequence: Synthetic oligonucleotide
  Sense strand starting at position 3625 of SEQ ID NO: 1879217
ggaaccauguaguauuuaa

SEQ ID NO: 1891497 - RNA, 19 nt, Artificial Sequence
  Description of Artificial Sequence: Synthetic oligonucleotide
  Antisense strand to SEQ ID NO: 1891496
uuaaauacuacaugguucc

SEQ ID NO: 1891498 - RNA, 19 nt, Artificial Sequence
  Description of Artificial Sequence: Synthetic oligonucleotide
  Sense strand starting at position 3644 of SEQ ID NO: 1879217
gaacauaggcuuugagguu

SEQ ID NO: 1891499 - RNA, 19 nt, Artificial Sequence
  Description of Artificial Sequence: Synthetic oligonucleotide
  Antisense strand to SEQ ID NO: 1891498
aaccucaaagccuauguuc

SEQ ID NO: 1891500 - RNA, 19 nt, Artificial Sequence
  Description of Artificial Sequence: Synthetic oligonucleotide
  Sense strand starting at position 3827 of SEQ ID NO: 1879217
gcaugauauuuggagaauu

SEQ ID NO: 1891501 - RNA, 19 nt, Artificial Sequence
  Description of Artificial Sequence: Synthetic oligonucleotide
  Antisense strand to SEQ ID NO: 1891500
aauucuccaaauaucaugc

SEQ ID NO: 1891502 - RNA, 19 nt, Artificial Sequence
  Description of Artificial Sequence: Synthetic oligonucleotide
  Sense strand starting at position 3908 of SEQ ID NO: 1879217
guauuagauuuagaaggug

SEQ ID NO: 1891503 - RNA, 19 nt, Artificial Sequence
  Description of Artificial Sequence: Synthetic oligonucleotide
  Antisense strand to SEQ ID NO: 1891502
caccuucuaaaucuaauac

SEQ ID NO: 1891504 - RNA, 19 nt, Artificial Sequence
  Description of Artificial Sequence: Synthetic oligonucleotide
  Sense strand starting at position 3925 of SEQ ID NO: 1879217
uguuccagcccauaugaua

SEQ ID NO: 1891505 - RNA, 19 nt, Artificial Sequence
  Description of Artificial Sequence: Synthetic oligonucleotide
  Antisense strand to SEQ ID NO: 1891504
uaucauaugggcuggaaca

SEQ ID NO: 1891506 - RNA, 19 nt, Artificial Sequence
  Description of Artificial Sequence: Synthetic oligonucleotide
  Sense strand starting at position 3958 of SEQ ID NO: 1879217
uuugucugaggcugagaaa

SEQ ID NO: 1891507 - RNA, 19 nt, Artificial Sequence
  Description of Artificial Sequence: Synthetic oligonucleotide
  Antisense strand to SEQ ID NO: 1891506
uuucucagccucagacaaa

SEQ ID NO: 1891508 - RNA, 19 nt, Artificial Sequence
  Description of Artificial Sequence: Synthetic oligonucleotide
  Sense strand starting at position 56 of SEQ ID NO: 1879218
aggucaauauuauuagcau

SEQ ID NO: 1891509 - RNA, 19 nt, Artificial Sequence
  Description of Artificial Sequence: Synthetic oligonucleotide
  Antisense strand to SEQ ID NO: 1891508
augcuaauaauauugaccu

SEQ ID NO: 1891510 - RNA, 19 nt, Artificial Sequence
  Description of Artificial Sequence: Synthetic oligonucleotide
  Sense strand starting at position 188 of SEQ ID NO: 1879218
cagugucgucaauauaaua

SEQ ID NO: 1891511 - RNA, 19 nt, Artificial Sequence
  Description of Artificial Sequence: Synthetic oligonucleotide
  Antisense strand to SEQ ID NO: 1891510
uauuauauugacgacacug

SEQ ID NO: 1891512 - RNA, 19 nt, Artificial Sequence
  Description of Artificial Sequence: Synthetic oligonucleotide
  Sense strand starting at position 357 of SEQ ID NO: 1879218
augcuuacuccuugaggac

SEQ ID NO: 1891513 - RNA, 19 nt, Artificial Sequence
  Description of Artificial Sequence: Synthetic oligonucleotide
  Antisense strand to SEQ ID NO: 1891512
guccucaaggaguaagcau

SEQ ID NO: 1891514 - RNA, 19 nt, Artificial Sequence
  Description of Artificial Sequence: Synthetic oligonucleotide
  Sense strand starting at position 472 of SEQ ID NO: 1879218
uuagauaacuggcugaguu

SEQ ID NO: 1891515 - RNA, 19 nt, Artificial Sequence
  Description of Artificial Sequence: Synthetic oligonucleotide
  Antisense strand to SEQ ID NO: 1891514
aacucagccaguuaucuaa

SEQ ID NO: 1891516 - RNA, 19 nt, Artificial Sequence
  Description of Artificial Sequence: Synthetic oligonucleotide
  Sense strand starting at position 473 of SEQ ID NO: 1879218
uagauaacuggcugaguua

SEQ ID NO: 1891517 - RNA, 19 nt, Artificial Sequence
  Description of Artificial Sequence: Synthetic oligonucleotide
  Antisense strand to SEQ ID NO: 1891516
uaacucagccaguuaucua

SEQ ID NO: 1891518 - RNA, 19 nt, Artificial Sequence
  Description of Artificial Sequence: Synthetic oligonucleotide
  Sense strand starting at position 474 of SEQ ID NO: 1879218
agauaacuggcugaguuau

SEQ ID NO: 1891519 - RNA, 19 nt, Artificial Sequence
  Description of Artificial Sequence: Synthetic oligonucleotide
  Antisense strand to SEQ ID NO: 1891518
auaacucagccaguuaucu

SEQ ID NO: 1891520 - RNA, 19 nt, Artificial Sequence
  Description of Artificial Sequence: Synthetic oligonucleotide
  Sense strand starting at position 484 of SEQ ID NO: 1879218
cugaguuaucuccaucuca

SEQ ID NO: 1891521 - RNA, 19 nt, Artificial Sequence
  Description of Artificial Sequence: Synthetic oligonucleotide
  Antisense strand to SEQ ID NO: 1891520
ugagauggagauaacucag

SEQ ID NO: 1891522 - RNA, 19 nt, Artificial Sequence
  Description of Artificial Sequence: Synthetic oligonucleotide
  Sense strand starting at position 551 of SEQ ID NO: 1879218
guugauaaauggcccauau

SEQ ID NO: 1891523 - RNA, 19 nt, Artificial Sequence
  Description of Artificial Sequence: Synthetic oligonucleotide
  Antisense strand to SEQ ID NO: 1891522
auaugggccauuuaucaac

SEQ ID NO: 1891524 - RNA, 19 nt, Artificial Sequence
  Description of Artificial Sequence: Synthetic oligonucleotide
  Sense strand starting at position 563 of SEQ ID NO: 1879218
cccauauuauaggcugaau

SEQ ID NO: 1891525 - RNA, 19 nt, Artificial Sequence
  Description of Artificial Sequence: Synthetic oligonucleotide
  Antisense strand to SEQ ID NO: 1891524
auucagccuauaauauggg

SEQ ID NO: 1891526 - RNA, 19 nt, Artificial Sequence
  Description of Artificial Sequence: Synthetic oligonucleotide
  Sense strand starting at position 622 of SEQ ID NO: 1879218
aggaucucagacugugauu

SEQ ID NO: 1891527 - RNA, 19 nt, Artificial Sequence
  Description of Artificial Sequence: Synthetic oligonucleotide
  Antisense strand to SEQ ID NO: 1891526
aaucacagucugagauccu

SEQ ID NO: 1891528 - RNA, 19 nt, Artificial Sequence
  Description of Artificial Sequence: Synthetic oligonucleotide
  Sense strand starting at position 757 of SEQ ID NO: 1879218
agaggaaagucguugugaa

SEQ ID NO: 1891529 - RNA, 19 nt, Artificial Sequence
  Description of Artificial Sequence: Synthetic oligonucleotide
  Antisense strand to SEQ ID NO: 1891528
uucacaacgacuuuccucu

SEQ ID NO: 1891530 - RNA, 19 nt, Artificial Sequence
  Description of Artificial Sequence: Synthetic oligonucleotide
  Sense strand starting at position 758 of SEQ ID NO: 1879218
gaggaaagucguugugaag

SEQ ID NO: 1891531 - RNA, 19 nt, Artificial Sequence
  Description of Artificial Sequence: Synthetic oligonucleotide
  Antisense strand to SEQ ID NO: 1891530
cuucacaacgacuuuccuc

SEQ ID NO: 1891532 - RNA, 19 nt, Artificial Sequence
  Description of Artificial Sequence: Synthetic oligonucleotide
  Sense strand starting at position 770 of SEQ ID NO: 1879218
ugugaagauucagugagaa

SEQ ID NO: 1891533 - RNA, 19 nt, Artificial Sequence
  Description of Artificial Sequence: Synthetic oligonucleotide
  Antisense strand to SEQ ID NO: 1891532
uucucacugaaucuucaca

SEQ ID NO: 1891534 - RNA, 19 nt, Artificial Sequence
  Description of Artificial Sequence: Synthetic oligonucleotide
  Sense strand starting at position 1387 of SEQ ID NO: 1879218
uggauuguggaguauuauu

SEQ ID NO: 1891535 - RNA, 19 nt, Artificial Sequence
  Description of Artificial Sequence: Synthetic oligonucleotide
  Antisense strand to SEQ ID NO: 1891534
aauaauacuccacaaucca

SEQ ID NO: 1891536 - RNA, 19 nt, Artificial Sequence
  Description of Artificial Sequence: Synthetic oligonucleotide
  Sense strand starting at position 1400 of SEQ ID NO: 1879218
auuauugugggcgacuaau

SEQ ID NO: 1891537 - RNA, 19 nt, Artificial Sequence
  Description of Artificial Sequence: Synthetic oligonucleotide
  Antisense strand to SEQ ID NO: 1891536
auuagucgcccacaauaau

SEQ ID NO: 1891538 - RNA, 19 nt, Artificial Sequence
  Description of Artificial Sequence: Synthetic oligonucleotide
  Sense strand starting at position 1406 of SEQ ID NO: 1879218
gugggcgacuaaucagaua

SEQ ID NO: 1891539 - RNA, 19 nt, Artificial Sequence
  Description of Artificial Sequence: Synthetic oligonucleotide
  Antisense strand to SEQ ID NO: 1891538
uaucugauuagucgcccac

SEQ ID NO: 1891540 - RNA, 19 nt, Artificial Sequence
  Description of Artificial Sequence: Synthetic oligonucleotide
  Sense strand starting at position 1418 of SEQ ID NO: 1879218
ucagauaaugauugcaaga

SEQ ID NO: 1891541 - RNA, 19 nt, Artificial Sequence
  Description of Artificial Sequence: Synthetic oligonucleotide
  Antisense strand to SEQ ID NO: 1891540
ucuugcaaucauuaucuga

SEQ ID NO: 1891542 - RNA, 19 nt, Artificial Sequence
  Description of Artificial Sequence: Synthetic oligonucleotide
  Sense strand starting at position 1431 of SEQ ID NO: 1879218
gcaagaauugauuagccag

SEQ ID NO: 1891543 - RNA, 19 nt, Artificial Sequence
  Description of Artificial Sequence: Synthetic oligonucleotide
  Antisense strand to SEQ ID NO: 1891542
cuggcuaaucaauucuugc

SEQ ID NO: 1891544 - RNA, 19 nt, Artificial Sequence
  Description of Artificial Sequence: Synthetic oligonucleotide
  Sense strand starting at position 1493 of SEQ ID NO: 1879218
ccauccauuccaggauguu

SEQ ID NO: 1891545 - RNA, 19 nt, Artificial Sequence
  Description of Artificial Sequence: Synthetic oligonucleotide
  Antisense strand to SEQ ID NO: 1891544
aacauccuggaauggaugg

SEQ ID NO: 1891546 - RNA, 19 nt, Artificial Sequence
  Description of Artificial Sequence: Synthetic oligonucleotide
  Sense strand starting at position 1604 of SEQ ID NO: 1879218
uccaucucgcuggaaacau

SEQ ID NO: 1891547 - RNA, 19 nt, Artificial Sequence
  Description of Artificial Sequence: Synthetic oligonucleotide
  Antisense strand to SEQ ID NO: 1891546
auguuuccagcgagaugga

SEQ ID NO: 1891548 - RNA, 19 nt, Artificial Sequence
  Description of Artificial Sequence: Synthetic oligonucleotide
  Sense strand starting at position 1690 of SEQ ID NO: 1879218
ugaggaagcucauuaauau

SEQ ID NO: 1891549 - RNA, 19 nt, Artificial Sequence
  Description of Artificial Sequence: Synthetic oligonucleotide
  Antisense strand to SEQ ID NO: 1891548
auauuaaugagcuuccuca

SEQ ID NO: 1891550 - RNA, 19 nt, Artificial Sequence
  Description of Artificial Sequence: Synthetic oligonucleotide
  Sense strand starting at position 1708 of SEQ ID NO: 1879218
uuuaguuuagaagaugcaa

SEQ ID NO: 1891551 - RNA, 19 nt, Artificial Sequence
  Description of Artificial Sequence: Synthetic oligonucleotide
  Antisense strand to SEQ ID NO: 1891550
uugcaucuucuaaacuaaa

SEQ ID NO: 1891552 - RNA, 19 nt, Artificial Sequence
  Description of Artificial Sequence: Synthetic oligonucleotide
  Sense strand starting at position 2094 of SEQ ID NO: 1879218
agaguucucuucucagagg

SEQ ID NO: 1891553 - RNA, 19 nt, Artificial Sequence
  Description of Artificial Sequence: Synthetic oligonucleotide
  Antisense strand to SEQ ID NO: 1891552
ccucugagaagagaacucu

SEQ ID NO: 1891554 - RNA, 19 nt, Artificial Sequence
  Description of Artificial Sequence: Synthetic oligonucleotide
  Sense strand starting at position 2160 of SEQ ID NO: 1879218
gaugcuuacggauauuaaa

SEQ ID NO: 1891555 - RNA, 19 nt, Artificial Sequence
  Description of Artificial Sequence: Synthetic oligonucleotide
  Antisense strand to SEQ ID NO: 1891554
uuuaauauccguaagcauc

SEQ ID NO: 1891556 - RNA, 19 nt, Artificial Sequence
  Description of Artificial Sequence: Synthetic oligonucleotide
  Sense strand starting at position 2290 of SEQ ID NO: 1879218
ugugcuuuccuggaaacau

SEQ ID NO: 1891557 - RNA, 19 nt, Artificial Sequence
  Description of Artificial Sequence: Synthetic oligonucleotide
  Antisense strand to SEQ ID NO: 1891556
auguuuccaggaaagcaca

SEQ ID NO: 1891558 - RNA, 19 nt, Artificial Sequence
  Description of Artificial Sequence: Synthetic oligonucleotide
  Sense strand starting at position 2381 of SEQ ID NO: 1879218
uugaauauuugauggaaga

SEQ ID NO: 1891559 - RNA, 19 nt, Artificial Sequence
  Description of Artificial Sequence: Synthetic oligonucleotide
  Antisense strand to SEQ ID NO: 1891558
ucuuccaucaaauauucaa

SEQ ID NO: 1891560 - RNA, 19 nt, Artificial Sequence
  Description of Artificial Sequence: Synthetic oligonucleotide
  Sense strand starting at position 2499 of SEQ ID NO: 1879218
guauuacgcaaguugugua

SEQ ID NO: 1891561 - RNA, 19 nt, Artificial Sequence
  Description of Artificial Sequence: Synthetic oligonucleotide
  Antisense strand to SEQ ID NO: 1891560
uacacaacuugcguaauac

SEQ ID NO: 1891562 - RNA, 19 nt, Artificial Sequence
  Description of Artificial Sequence: Synthetic oligonucleotide
  Sense strand starting at position 2656 of SEQ ID NO: 1879218
gcacuaaggccaugggaau

SEQ ID NO: 1891563 - RNA, 19 nt, Artificial Sequence
  Description of Artificial Sequence: Synthetic oligonucleotide
  Antisense strand to SEQ ID NO: 1891562
auucccauggccuuagugc

SEQ ID NO: 1891564 - RNA, 19 nt, Artificial Sequence
  Description of Artificial Sequence: Synthetic oligonucleotide
  Sense strand starting at position 2799 of SEQ ID NO: 1879218
gaauguaccuuaucugaug

SEQ ID NO: 1891565 - RNA, 19 nt, Artificial Sequence
  Description of Artificial Sequence: Synthetic oligonucleotide
  Antisense strand to SEQ ID NO: 1891564
caucagauaagguacauuc

SEQ ID NO: 1891566 - RNA, 19 nt, Artificial Sequence
  Description of Artificial Sequence: Synthetic oligonucleotide
  Sense strand starting at position 2956 of SEQ ID NO: 1879218
aguauaguuauguagcaau

SEQ ID NO: 1891567 - RNA, 19 nt, Artificial Sequence
  Description of Artificial Sequence: Synthetic oligonucleotide
  Antisense strand to SEQ ID NO: 1891566
auugcuacauaacuauacu

SEQ ID NO: 1891568 - RNA, 19 nt, Artificial Sequence
  Description of Artificial Sequence: Synthetic oligonucleotide
  Sense strand starting at position 2997 of SEQ ID NO: 1879218
auuaauagucaaugcauga

SEQ ID NO: 1891569 - RNA, 19 nt, Artificial Sequence
  Description of Artificial Sequence: Synthetic oligonucleotide
  Antisense strand to SEQ ID NO: 1891568
ucaugcauugacuauuaau

SEQ ID NO: 1891570 - RNA, 19 nt, Artificial Sequence
  Description of Artificial Sequence: Synthetic oligonucleotide
  Sense strand starting at position 3072 of SEQ ID NO: 1879218
aguagaagguaguuugauu

SEQ ID NO: 1891571 - RNA, 19 nt, Artificial Sequence
  Description of Artificial Sequence: Synthetic oligonucleotide
  Antisense strand to SEQ ID NO: 1891570
aaucaaacuaccuucuacu

SEQ ID NO: 1891572 - RNA, 19 nt, Artificial Sequence
  Description of Artificial Sequence: Synthetic oligonucleotide
  Sense strand starting at position 3339 of SEQ ID NO: 1879218
ggauuacagaugugaguag

SEQ ID NO: 1891573 - RNA, 19 nt, Artificial Sequence
  Description of Artificial Sequence: Synthetic oligonucleotide
  Antisense strand to SEQ ID NO: 1891572
cuacucacaucuguaaucc

SEQ ID NO: 1891574 - RNA, 19 nt, Artificial Sequence
  Description of Artificial Sequence: Synthetic oligonucleotide
  Sense strand starting at position 3415 of SEQ ID NO: 1879218
caggaacaaugguuuguau

SEQ ID NO: 1891575 - RNA, 19 nt, Artificial Sequence
  Description of Artificial Sequence: Synthetic oligonucleotide
  Antisense strand to SEQ ID NO: 1891574
auacaaaccauuguuccug

SEQ ID NO: 1891576 - RNA, 19 nt, Artificial Sequence
  Description of Artificial Sequence: Synthetic oligonucleotide
  Sense strand starting at position 3418 of SEQ ID NO: 1879218
gaacaaugguuuguaugga

SEQ ID NO: 1891577 - RNA, 19 nt, Artificial Sequence
  Description of Artificial Sequence: Synthetic oligonucleotide
  Antisense strand to SEQ ID NO: 1891576
uccauacaaaccauuguuc

SEQ ID NO: 1891578 - RNA, 19 nt, Artificial Sequence
  Description of Artificial Sequence: Synthetic oligonucleotide
  Sense strand starting at position 3423 of SEQ ID NO: 1879218
augguuuguauggaauuga

SEQ ID NO: 1891579 - RNA, 19 nt, Artificial Sequence
  Description of Artificial Sequence: Synthetic oligonucleotide
  Antisense strand to SEQ ID NO: 1891578
ucaauuccauacaaaccau

SEQ ID NO: 1891580 - RNA, 19 nt, Artificial Sequence
  Description of Artificial Sequence: Synthetic oligonucleotide
  Sense strand starting at position 3444 of SEQ ID NO: 1879218
acuggaaucuaguugauag

SEQ ID NO: 1891581 - RNA, 19 nt, Artificial Sequence
  Description of Artificial Sequence: Synthetic oligonucleotide
  Antisense strand to SEQ ID NO: 1891580
cuaucaacuagauuccagu

SEQ ID NO: 1891582 - RNA, 19 nt, Artificial Sequence
  Description of Artificial Sequence: Synthetic oligonucleotide
  Sense strand starting at position 3445 of SEQ ID NO: 1879218
cuggaaucuaguugauagu

SEQ ID NO: 1891583 - RNA, 19 nt, Artificial Sequence
  Description of Artificial Sequence: Synthetic oligonucleotide
  Antisense strand to SEQ ID NO: 1891582
acuaucaacuagauuccag

SEQ ID NO: 1891584 - RNA, 19 nt, Artificial Sequence
  Description of Artificial Sequence: Synthetic oligonucleotide
  Sense strand starting at position 3585 of SEQ ID NO: 1879218
uuuguaaagcaugaaucuu

SEQ ID NO: 1891585 - RNA, 19 nt, Artificial Sequence
  Description of Artificial Sequence: Synthetic oligonucleotide
  Antisense strand to SEQ ID NO: 1891584
aagauucaugcuuuacaaa

SEQ ID NO: 1891586 - RNA, 19 nt, Artificial Sequence
  Description of Artificial Sequence: Synthetic oligonucleotide
  Sense strand starting at position 3796 of SEQ ID NO: 1879218
cuaugugauuugcccagca

SEQ ID NO: 1891587 - RNA, 19 nt, Artificial Sequence
  Description of Artificial Sequence: Synthetic oligonucleotide
  Antisense strand to SEQ ID NO: 1891586
ugcugggcaaaucacauag

SEQ ID NO: 1891588 - RNA, 19 nt, Artificial Sequence
  Description of Artificial Sequence: Synthetic oligonucleotide
  Sense strand starting at position 1203 of SEQ ID NO: 1879220
gucuguccggucguggaau

SEQ ID NO: 1891589 - RNA, 19 nt, Artificial Sequence
  Description of Artificial Sequence: Synthetic oligonucleotide
  Antisense strand to SEQ ID NO: 1891588
auuccacgaccggacagac

SEQ ID NO: 1891590 - RNA, 19 nt, Artificial Sequence
  Description of Artificial Sequence: Synthetic oligonucleotide
  Sense strand starting at position 1214 of SEQ ID NO: 1879220
cguggaauccaggguugca

SEQ ID NO: 1891591 - RNA, 19 nt, Artificial Sequence
  Description of Artificial Sequence: Synthetic oligonucleotide
  Antisense strand to SEQ ID NO: 1891590
ugcaacccuggauuccacg

SEQ ID NO: 1891592 - RNA, 19 nt, Artificial Sequence
  Description of Artificial Sequence: Synthetic oligonucleotide
  Sense strand starting at position 1759 of SEQ ID NO: 1879220
agucuucucuccuggcaga

SEQ ID NO: 1891593 - RNA, 19 nt, Artificial Sequence
  Description of Artificial Sequence: Synthetic oligonucleotide
  Antisense strand to SEQ ID NO: 1891592
ucugccaggagagaagacu

SEQ ID NO: 1891594 - RNA, 19 nt, Artificial Sequence
  Description of Artificial Sequence: Synthetic oligonucleotide
  Sense strand starting at position 2400 of SEQ ID NO: 1879220
gagugaaucggaggcaguu

SEQ ID NO: 1891595 - RNA, 19 nt, Artificial Sequence
  Description of Artificial Sequence: Synthetic oligonucleotide
  Antisense strand to SEQ ID NO: 1891594
aacugccuccgauucacuc

SEQ ID NO: 1891596 - RNA, 19 nt, Artificial Sequence
  Description of Artificial Sequence: Synthetic oligonucleotide
  Sense strand starting at position 3082 of SEQ ID NO: 1879220
ggaagaggcucccaguagu

SEQ ID NO: 1891597 - RNA, 19 nt, Artificial Sequence
  Description of Artificial Sequence: Synthetic oligonucleotide
  Antisense strand to SEQ ID NO: 1891596
acuacugggagccucuucc

SEQ ID NO: 1891598 - RNA, 19 nt, Artificial Sequence
  Description of Artificial Sequence: Synthetic oligonucleotide
  Sense strand starting at position 3439 of SEQ ID NO: 1879220
gugggaccucccuguuaca

SEQ ID NO: 1891599 - RNA, 19 nt, Artificial Sequence
  Description of Artificial Sequence: Synthetic oligonucleotide
  Antisense strand to SEQ ID NO: 1891598
uguaacagggaggucccac

SEQ ID NO: 1891600 - RNA, 19 nt, Artificial Sequence
  Description of Artificial Sequence: Synthetic oligonucleotide
  Sense strand starting at position 3741 of SEQ ID NO: 1879220
gagccugacucaugcuaug

SEQ ID NO: 1891601 - RNA, 19 nt, Artificial Sequence
  Description of Artificial Sequence: Synthetic oligonucleotide
  Antisense strand to SEQ ID NO: 1891600
cauagcaugagucaggcuc

SEQ ID NO: 1891602 - RNA, 19 nt, Artificial Sequence
  Description of Artificial Sequence: Synthetic oligonucleotide
  Sense strand starting at position 3804 of SEQ ID NO: 1879220
ggucuaggcucuguaggaa

SEQ ID NO: 1891603 - RNA, 19 nt, Artificial Sequence
  Description of Artificial Sequence: Synthetic oligonucleotide
  Antisense strand to SEQ ID NO: 1891602
uuccuacagagccuagacc

SEQ ID NO: 1891604 - RNA, 19 nt, Artificial Sequence
  Description of Artificial Sequence: Synthetic oligonucleotide
  Sense strand starting at position 1212 of SEQ ID NO: 1879219
gucuguccggucguggaau

SEQ ID NO: 1891605 - RNA, 19 nt, Artificial Sequence
  Description of Artificial Sequence: Synthetic oligonucleotide
  Antisense strand to SEQ ID NO: 1891604
auuccacgaccggacagac

SEQ ID NO: 1891606 - RNA, 19 nt, Artificial Sequence
  Description of Artificial Sequence: Synthetic oligonucleotide
  Sense strand starting at position 1223 of SEQ ID NO: 1879219
cguggaauccaggguugca

SEQ ID NO: 1891607 - RNA, 19 nt, Artificial Sequence
  Description of Artificial Sequence: Synthetic oligonucleotide
  Antisense strand to SEQ ID NO: 1891606
ugcaacccuggauuccacg

SEQ ID NO: 1891608 - RNA, 19 nt, Artificial Sequence
  Description of Artificial Sequence: Synthetic oligonucleotide
  Sense strand starting at position 1768 of SEQ ID NO: 1879219
agucuucucuccuggcaga

SEQ ID NO: 1891609 - RNA, 19 nt, Artificial Sequence
  Description of Artificial Sequence: Synthetic oligonucleotide
  Antisense strand to SEQ ID NO: 1891608
ucugccaggagagaagacu

SEQ ID NO: 1891610 - RNA, 19 nt, Artificial Sequence
  Description of Artificial Sequence: Synthetic oligonucleotide
  Sense strand starting at position 2409 of SEQ ID NO: 1879219
gagugaaucggaggcaguu

SEQ ID NO: 1891611 - RNA, 19 nt, Artificial Sequence
  Description of Artificial Sequence: Synthetic oligonucleotide
  Antisense strand to SEQ ID NO: 1891610
aacugccuccgauucacuc

SEQ ID NO: 1891612 - RNA, 19 nt, Artificial Sequence
  Description of Artificial Sequence: Synthetic oligonucleotide
  Sense strand starting at position 3091 of SEQ ID NO: 1879219
ggaagaggcucccaguagu

SEQ ID NO: 1891613 - RNA, 19 nt, Artificial Sequence
  Description of Artificial Sequence: Synthetic oligonucleotide
  Antisense strand to SEQ ID NO: 1891612
acuacugggagccucuucc

SEQ ID NO: 1891614 - RNA, 19 nt, Artificial Sequence
  Description of Artificial Sequence: Synthetic oligonucleotide
  Sense strand starting at position 3448 of SEQ ID NO: 1879219
gugggaccucccuguuaca

SEQ ID NO: 1891615 - RNA, 19 nt, Artificial Sequence
  Description of Artificial Sequence: Synthetic oligonucleotide
  Antisense strand to SEQ ID NO: 1891614
uguaacagggaggucccac

SEQ ID NO: 1891616 - RNA, 19 nt, Artificial Sequence
  Description of Artificial Sequence: Synthetic oligonucleotide
  Sense strand starting at position 3750 of SEQ ID NO: 1879219
gagccugacucaugcuaug

SEQ ID NO: 1891617 - RNA, 19 nt, Artificial Sequence
  Description of Artificial Sequence: Synthetic oligonucleotide
  Antisense strand to SEQ ID NO: 1891616
cauagcaugagucaggcuc

SEQ ID NO: 1891618 - RNA, 19 nt, Artificial Sequence
  Description of Artificial Sequence: Synthetic oligonucleotide
  Sense strand starting at position 3813 of SEQ ID NO: 1879219
ggucuaggcucuguaggaa

SEQ ID NO: 1891619 - RNA, 19 nt, Artificial Sequence
  Description of Artificial Sequence: Synthetic oligonucleotide
  Antisense strand to SEQ ID NO: 1891618
uuccuacagagccuagacc

SEQ ID NO: 1891620 - RNA, 19 nt, Artificial Sequence
  Description of Artificial Sequence: Synthetic oligonucleotide
  Sense strand starting at position 2 of SEQ ID NO: 1879221
acugcuuucugucucugaa

SEQ ID NO: 1891621 - RNA, 19 nt, Artificial Sequence
  Description of Artificial Sequence: Synthetic oligonucleotide
  Antisense strand to SEQ ID NO: 1891620
uucagagacagaaagcagu

SEQ ID NO: 1891622 - RNA, 19 nt, Artificial Sequence
  Description of Artificial Sequence: Synthetic oligonucleotide
  Sense strand starting at position 54 of SEQ ID NO: 1879221
auuaacguuccaugaugau

SEQ ID NO: 1891623 - RNA, 19 nt, Artificial Sequence
  Description of Artificial Sequence: Synthetic oligonucleotide
  Antisense strand to SEQ ID NO: 1891622
aucaucauggaacguuaau

SEQ ID NO: 1891624 - RNA, 19 nt, Artificial Sequence
  Description of Artificial Sequence: Synthetic oligonucleotide
  Sense strand starting at position 168 of SEQ ID NO: 1879221
uuacauugucagggcaauu

SEQ ID NO: 1891625 - RNA, 19 nt, Artificial Sequence
  Description of Artificial Sequence: Synthetic oligonucleotide
  Antisense strand to SEQ ID NO: 1891624
aauugcccugacaauguaa

SEQ ID NO: 1891626 - RNA, 19 nt, Artificial Sequence
  Description of Artificial Sequence: Synthetic oligonucleotide
  Sense strand starting at position 274 of SEQ ID NO: 1879221
gguugagagccgugaggga

SEQ ID NO: 1891627 - RNA, 19 nt, Artificial Sequence
  Description of Artificial Sequence: Synthetic oligonucleotide
  Antisense strand to SEQ ID NO: 1891626
ucccucacggcucucaacc

SEQ ID NO: 1891628 - RNA, 19 nt, Artificial Sequence
  Description of Artificial Sequence: Synthetic oligonucleotide
  Sense strand starting at position 460 of SEQ ID NO: 1879221
agcucagaggauugggaau

SEQ ID NO: 1891629 - RNA, 19 nt, Artificial Sequence
  Description of Artificial Sequence: Synthetic oligonucleotide
  Antisense strand to SEQ ID NO: 1891628
auucccaauccucugagcu

SEQ ID NO: 1891630 - RNA, 19 nt, Artificial Sequence
  Description of Artificial Sequence: Synthetic oligonucleotide
  Sense strand starting at position 487 of SEQ ID NO: 1879221
cagguuuaggcuugaauca

SEQ ID NO: 1891631 - RNA, 19 nt, Artificial Sequence
  Description of Artificial Sequence: Synthetic oligonucleotide
  Antisense strand to SEQ ID NO: 1891630
ugauucaagccuaaaccug

SEQ ID NO: 1891632 - RNA, 19 nt, Artificial Sequence
  Description of Artificial Sequence: Synthetic oligonucleotide
  Sense strand starting at position 502 of SEQ ID NO: 1879221
aucagaacuucuggauuua

SEQ ID NO: 1891633 - RNA, 19 nt, Artificial Sequence
  Description of Artificial Sequence: Synthetic oligonucleotide
  Antisense strand to SEQ ID NO: 1891632
uaaauccagaaguucugau

SEQ ID NO: 1891634 - RNA, 19 nt, Artificial Sequence
  Description of Artificial Sequence: Synthetic oligonucleotide
  Sense strand starting at position 1163 of SEQ ID NO: 1879221
aucuucgccuuucugaauu

SEQ ID NO: 1891635 - RNA, 19 nt, Artificial Sequence
  Description of Artificial Sequence: Synthetic oligonucleotide
  Antisense strand to SEQ ID NO: 1891634
aauucagaaaggcgaagau

SEQ ID NO: 1891636 - RNA, 19 nt, Artificial Sequence
  Description of Artificial Sequence: Synthetic oligonucleotide
  Sense strand starting at position 1209 of SEQ ID NO: 1879221
gggugaaaucugcacguca

SEQ ID NO: 1891637 - RNA, 19 nt, Artificial Sequence
  Description of Artificial Sequence: Synthetic oligonucleotide
  Antisense strand to SEQ ID NO: 1891636
ugacgugcagauuucaccc

SEQ ID NO: 1891638 - RNA, 19 nt, Artificial Sequence
  Description of Artificial Sequence: Synthetic oligonucleotide
  Sense strand starting at position 1211 of SEQ ID NO: 1879221
gugaaaucugcacgucaua

SEQ ID NO: 1891639 - RNA, 19 nt, Artificial Sequence
  Description of Artificial Sequence: Synthetic oligonucleotide
  Antisense strand to SEQ ID NO: 1891638
uaugacgugcagauuucac

SEQ ID NO: 1891640 - RNA, 19 nt, Artificial Sequence
  Description of Artificial Sequence: Synthetic oligonucleotide
  Sense strand starting at position 1242 of SEQ ID NO: 1879221
gggcuauuaaucugauguu

SEQ ID NO: 1891641 - RNA, 19 nt, Artificial Sequence
  Description of Artificial Sequence: Synthetic oligonucleotide
  Antisense strand to SEQ ID NO: 1891640
aacaucagauuaauagccc

SEQ ID NO: 1891642 - RNA, 19 nt, Artificial Sequence
  Description of Artificial Sequence: Synthetic oligonucleotide
  Sense strand starting at position 1368 of SEQ ID NO: 1879221
gguggugugccuuaagaug

SEQ ID NO: 1891643 - RNA, 19 nt, Artificial Sequence
  Description of Artificial Sequence: Synthetic oligonucleotide
  Antisense strand to SEQ ID NO: 1891642
caucuuaaggcacaccacc

SEQ ID NO: 1891644 - RNA, 19 nt, Artificial Sequence
  Description of Artificial Sequence: Synthetic oligonucleotide
  Sense strand starting at position 1463 of SEQ ID NO: 1879221
gcgacacugucaccaguuu

SEQ ID NO: 1891645 - RNA, 19 nt, Artificial Sequence
  Description of Artificial Sequence: Synthetic oligonucleotide
  Antisense strand to SEQ ID NO: 1891644
aaacuggugacagugucgc

SEQ ID NO: 1891646 - RNA, 19 nt, Artificial Sequence
  Description of Artificial Sequence: Synthetic oligonucleotide
  Sense strand starting at position 2436 of SEQ ID NO: 1879221
cucggagucguggguuaaa

SEQ ID NO: 1891647 - RNA, 19 nt, Artificial Sequence
  Description of Artificial Sequence: Synthetic oligonucleotide
  Antisense strand to SEQ ID NO: 1891646
uuuaacccacgacuccgag

SEQ ID NO: 1891648 - RNA, 19 nt, Artificial Sequence
  Description of Artificial Sequence: Synthetic oligonucleotide
  Sense strand starting at position 2439 of SEQ ID NO: 1879221
ggagucguggguuaaacau

SEQ ID NO: 1891649 - RNA, 19 nt, Artificial Sequence
  Description of Artificial Sequence: Synthetic oligonucleotide
  Antisense strand to SEQ ID NO: 1891648
auguuuaacccacgacucc

SEQ ID NO: 1891650 - RNA, 19 nt, Artificial Sequence
  Description of Artificial Sequence: Synthetic oligonucleotide
  Sense strand starting at position 2453 of SEQ ID NO: 1879221
aacauuagucgggagcacu

SEQ ID NO: 1891651 - RNA, 19 nt, Artificial Sequence
  Description of Artificial Sequence: Synthetic oligonucleotide
  Antisense strand to SEQ ID NO: 1891650
agugcucccgacuaauguu

SEQ ID NO: 1891652 - RNA, 19 nt, Artificial Sequence
  Description of Artificial Sequence: Synthetic oligonucleotide
  Sense strand starting at position 2612 of SEQ ID NO: 1879221
ggguuguuuccgcugguga

SEQ ID NO: 1891653 - RNA, 19 nt, Artificial Sequence
  Description of Artificial Sequence: Synthetic oligonucleotide
  Antisense strand to SEQ ID NO: 1891652
ucaccagcggaaacaaccc

SEQ ID NO: 1891654 - RNA, 19 nt, Artificial Sequence
  Description of Artificial Sequence: Synthetic oligonucleotide
  Sense strand starting at position 2627 of SEQ ID NO: 1879221
gugacuuccaccuguggga

SEQ ID NO: 1891655 - RNA, 19 nt, Artificial Sequence
  Description of Artificial Sequence: Synthetic oligonucleotide
  Antisense strand to SEQ ID NO: 1891654
ucccacagguggaagucac

SEQ ID NO: 1891656 - RNA, 19 nt, Artificial Sequence
  Description of Artificial Sequence: Synthetic oligonucleotide
  Sense strand starting at position 2882 of SEQ ID NO: 1879221
uggagcagcacuuguagaa

SEQ ID NO: 1891657 - RNA, 19 nt, Artificial Sequence
  Description of Artificial Sequence: Synthetic oligonucleotide
  Antisense strand to SEQ ID NO: 1891656
uucuacaagugcugcucca

SEQ ID NO: 1891658 - RNA, 19 nt, Artificial Sequence
  Description of Artificial Sequence: Synthetic oligonucleotide
  Sense strand starting at position 2931 of SEQ ID NO: 1879221
uccguuuguuucucuauuu

SEQ ID NO: 1891659 - RNA, 19 nt, Artificial Sequence
  Description of Artificial Sequence: Synthetic oligonucleotide
  Antisense strand to SEQ ID NO: 1891658
aaauagagaaacaaacgga

SEQ ID NO: 1891660 - RNA, 19 nt, Artificial Sequence
  Description of Artificial Sequence: Synthetic oligonucleotide
  Sense strand starting at position 2932 of SEQ ID NO: 1879221
ccguuuguuucucuauuua

SEQ ID NO: 1891661 - RNA, 19 nt, Artificial Sequence
  Description of Artificial Sequence: Synthetic oligonucleotide
  Antisense strand to SEQ ID NO: 1891660
uaaauagagaaacaaacgg

SEQ ID NO: 1891662 - RNA, 19 nt, Artificial Sequence
  Description of Artificial Sequence: Synthetic oligonucleotide
  Sense strand starting at position 3076 of SEQ ID NO: 1879221
ggcauuacucugggcagag

SEQ ID NO: 1891663 - RNA, 19 nt, Artificial Sequence
  Description of Artificial Sequence: Synthetic oligonucleotide
  Antisense strand to SEQ ID NO: 1891662
cucugcccagaguaaugcc

SEQ ID NO: 1891664 - RNA, 19 nt, Artificial Sequence
  Description of Artificial Sequence: Synthetic oligonucleotide
  Sense strand starting at position 3263 of SEQ ID NO: 1879221
cugugaugggcuugagucu

SEQ ID NO: 1891665 - RNA, 19 nt, Artificial Sequence
  Description of Artificial Sequence: Synthetic oligonucleotide
  Antisense strand to SEQ ID NO: 1891664
agacucaagcccaucacag

SEQ ID NO: 1891666 - RNA, 19 nt, Artificial Sequence
  Description of Artificial Sequence: Synthetic oligonucleotide
  Sense strand starting at position 3352 of SEQ ID NO: 1879221
ggaugauggccaugguaga

SEQ ID NO: 1891667 - RNA, 19 nt, Artificial Sequence
  Description of Artificial Sequence: Synthetic oligonucleotide
  Antisense strand to SEQ ID NO: 1891666
ucuaccauggccaucaucc

SEQ ID NO: 1891668 - RNA, 19 nt, Artificial Sequence
  Description of Artificial Sequence: Synthetic oligonucleotide
  Sense strand starting at position 3451 of SEQ ID NO: 1879221
aggucagauuugugaucug

SEQ ID NO: 1891669 - RNA, 19 nt, Artificial Sequence
  Description of Artificial Sequence: Synthetic oligonucleotide
  Antisense strand to SEQ ID NO: 1891668
cagaucacaaaucugaccu

SEQ ID NO: 1891670 - RNA, 19 nt, Artificial Sequence
  Description of Artificial Sequence: Synthetic oligonucleotide
  Sense strand starting at position 3462 of SEQ ID NO: 1879221
gugaucuguaucugaaggu

SEQ ID NO: 1891671 - RNA, 19 nt, Artificial Sequence
  Description of Artificial Sequence: Synthetic oligonucleotide
  Antisense strand to SEQ ID NO: 1891670
accuucagauacagaucac

SEQ ID NO: 1891672 - RNA, 19 nt, Artificial Sequence
  Description of Artificial Sequence: Synthetic oligonucleotide
  Sense strand starting at position 3466 of SEQ ID NO: 1879221
ucuguaucugaagguggaa

SEQ ID NO: 1891673 - RNA, 19 nt, Artificial Sequence
  Description of Artificial Sequence: Synthetic oligonucleotide
  Antisense strand to SEQ ID NO: 1891672
uuccaccuucagauacaga

SEQ ID NO: 1891674 - RNA, 19 nt, Artificial Sequence
  Description of Artificial Sequence: Synthetic oligonucleotide
  Sense strand starting at position 3541 of SEQ ID NO: 1879221
gcaucauucuuaggauuug

SEQ ID NO: 1891675 - RNA, 19 nt, Artificial Sequence
  Description of Artificial Sequence: Synthetic oligonucleotide
  Antisense strand to SEQ ID NO: 1891674
caaauccuaagaaugaugc

SEQ ID NO: 1891676 - RNA, 19 nt, Artificial Sequence
  Description of Artificial Sequence: Synthetic oligonucleotide
  Sense strand starting at position 3551 of SEQ ID NO: 1879221
uaggauuuguccugagcaa

SEQ ID NO: 1891677 - RNA, 19 nt, Artificial Sequence
  Description of Artificial Sequence: Synthetic oligonucleotide
  Antisense strand to SEQ ID NO: 1891676
uugcucaggacaaauccua

SEQ ID NO: 1891678 - RNA, 19 nt, Artificial Sequence
  Description of Artificial Sequence: Synthetic oligonucleotide
  Sense strand starting at position 3579 of SEQ ID NO: 1879221
aaagaaugacaguggcuaa

SEQ ID NO: 1891679 - RNA, 19 nt, Artificial Sequence
  Description of Artificial Sequence: Synthetic oligonucleotide
  Antisense strand to SEQ ID NO: 1891678
uuagccacugucauucuuu

SEQ ID NO: 1891680 - RNA, 19 nt, Artificial Sequence
  Description of Artificial Sequence: Synthetic oligonucleotide
  Sense strand starting at position 3634 of SEQ ID NO: 1879221
aguuuaaccugucuagauu

SEQ ID NO: 1891681 - RNA, 19 nt, Artificial Sequence
  Description of Artificial Sequence: Synthetic oligonucleotide
  Antisense strand to SEQ ID NO: 1891680
aaucuagacagguuaaacu

SEQ ID NO: 1891682 - RNA, 19 nt, Artificial Sequence
  Description of Artificial Sequence: Synthetic oligonucleotide
  Sense strand starting at position 3674 of SEQ ID NO: 1879221
ggaauuaguucuucccaca

SEQ ID NO: 1891683 - RNA, 19 nt, Artificial Sequence
  Description of Artificial Sequence: Synthetic oligonucleotide
  Antisense strand to SEQ ID NO: 1891682
ugugggaagaacuaauucc

SEQ ID NO: 1891684 - RNA, 19 nt, Artificial Sequence
  Description of Artificial Sequence: Synthetic oligonucleotide
  Sense strand starting at position 3714 of SEQ ID NO: 1879221
ggcccagagaguugaauca

SEQ ID NO: 1891685 - RNA, 19 nt, Artificial Sequence
  Description of Artificial Sequence: Synthetic oligonucleotide
  Antisense strand to SEQ ID NO: 1891684
ugauucaacucucugggcc

SEQ ID NO: 1891686 - RNA, 19 nt, Artificial Sequence
  Description of Artificial Sequence: Synthetic oligonucleotide
  Sense strand starting at position 3721 of SEQ ID NO: 1879221
agaguugaaucaguuugca

SEQ ID NO: 1891687 - RNA, 19 nt, Artificial Sequence
  Description of Artificial Sequence: Synthetic oligonucleotide
  Antisense strand to SEQ ID NO: 1891686
ugcaaacugauucaacucu

SEQ ID NO: 1891688 - RNA, 19 nt, Artificial Sequence
  Description of Artificial Sequence: Synthetic oligonucleotide
  Sense strand starting at position 3724 of SEQ ID NO: 1879221
guugaaucaguuugcauaa

SEQ ID NO: 1891689 - RNA, 19 nt, Artificial Sequence
  Description of Artificial Sequence: Synthetic oligonucleotide
  Antisense strand to SEQ ID NO: 1891688
uuaugcaaacugauucaac

SEQ ID NO: 1891690 - RNA, 19 nt, Artificial Sequence
  Description of Artificial Sequence: Synthetic oligonucleotide
  Sense strand starting at position 3725 of SEQ ID NO: 1879221
uugaaucaguuugcauaaa

SEQ ID NO: 1891691 - RNA, 19 nt, Artificial Sequence
  Description of Artificial Sequence: Synthetic oligonucleotide
  Antisense strand to SEQ ID NO: 1891690
uuuaugcaaacugauucaa

SEQ ID NO: 1891692 - RNA, 19 nt, Artificial Sequence
  Description of Artificial Sequence: Synthetic oligonucleotide
  Sense strand starting at position 3822 of SEQ ID NO: 1879221
agagaaaugccgugaacug

SEQ ID NO: 1891693 - RNA, 19 nt, Artificial Sequence
  Description of Artificial Sequence: Synthetic oligonucleotide
  Antisense strand to SEQ ID NO: 1891692
caguucacggcauuucucu

SEQ ID NO: 1891694 - RNA, 19 nt, Artificial Sequence
  Description of Artificial Sequence: Synthetic oligonucleotide
  Sense strand starting at position 3823 of SEQ ID NO: 1879221
gagaaaugccgugaacuga

SEQ ID NO: 1891695 - RNA, 19 nt, Artificial Sequence
  Description of Artificial Sequence: Synthetic oligonucleotide
  Antisense strand to SEQ ID NO: 1891694
ucaguucacggcauuucuc

SEQ ID NO: 1891696 - RNA, 19 nt, Artificial Sequence
  Description of Artificial Sequence: Synthetic oligonucleotide
  Sense strand starting at position 3832 of SEQ ID NO: 1879221
cgugaacugagcuagauga

SEQ ID NO: 1891697 - RNA, 19 nt, Artificial Sequence
  Description of Artificial Sequence: Synthetic oligonucleotide
  Antisense strand to SEQ ID NO: 1891696
ucaucuagcucaguucacg

SEQ ID NO: 1891698 - RNA, 19 nt, Artificial Sequence
  Description of Artificial Sequence: Synthetic oligonucleotide
  Sense strand starting at position 3893 of SEQ ID NO: 1879221
agaguucuaguuggaauga

SEQ ID NO: 1891699 - RNA, 19 nt, Artificial Sequence
  Description of Artificial Sequence: Synthetic oligonucleotide
  Antisense strand to SEQ ID NO: 1891698
ucauuccaacuagaacucu

SEQ ID NO: 1891700 - RNA, 19 nt, Artificial Sequence
  Description of Artificial Sequence: Synthetic oligonucleotide
  Sense strand starting at position 302 of SEQ ID NO: 1879222
auuuguuugucucuaaagu

SEQ ID NO: 1891701 - RNA, 19 nt, Artificial Sequence
  Description of Artificial Sequence: Synthetic oligonucleotide
  Antisense strand to SEQ ID NO: 1891700
acuuuagagacaaacaaau

SEQ ID NO: 1891702 - RNA, 19 nt, Artificial Sequence
  Description of Artificial Sequence: Synthetic oligonucleotide
  Sense strand starting at position 547 of SEQ ID NO: 1879222
ucugauuaacuagaugcau

SEQ ID NO: 1891703 - RNA, 19 nt, Artificial Sequence
  Description of Artificial Sequence: Synthetic oligonucleotide
  Antisense strand to SEQ ID NO: 1891702
augcaucuaguuaaucaga

SEQ ID NO: 1891704 - RNA, 19 nt, Artificial Sequence
  Description of Artificial Sequence: Synthetic oligonucleotide
  Sense strand starting at position 643 of SEQ ID NO: 1879222
gcuuucugcguaucugaau

SEQ ID NO: 1891705 - RNA, 19 nt, Artificial Sequence
  Description of Artificial Sequence: Synthetic oligonucleotide
  Antisense strand to SEQ ID NO: 1891704
auucagauacgcagaaagc

SEQ ID NO: 1891706 - RNA, 19 nt, Artificial Sequence
  Description of Artificial Sequence: Synthetic oligonucleotide
  Sense strand starting at position 800 of SEQ ID NO: 1879222
uaguguauacagggauaag

SEQ ID NO: 1891707 - RNA, 19 nt, Artificial Sequence
  Description of Artificial Sequence: Synthetic oligonucleotide
  Antisense strand to SEQ ID NO: 1891706
cuuaucccuguauacacua

SEQ ID NO: 1891708 - RNA, 19 nt, Artificial Sequence
  Description of Artificial Sequence: Synthetic oligonucleotide
  Sense strand starting at position 819 of SEQ ID NO: 1879222
gggccaugauaaucuuuaa

SEQ ID NO: 1891709 - RNA, 19 nt, Artificial Sequence
  Description of Artificial Sequence: Synthetic oligonucleotide
  Antisense strand to SEQ ID NO: 1891708
uuaaagauuaucauggccc

SEQ ID NO: 1891710 - RNA, 19 nt, Artificial Sequence
  Description of Artificial Sequence: Synthetic oligonucleotide
  Sense strand starting at position 1008 of SEQ ID NO: 1879222
gaaguaaucugccuuaagu

SEQ ID NO: 1891711 - RNA, 19 nt, Artificial Sequence
  Description of Artificial Sequence: Synthetic oligonucleotide
  Antisense strand to SEQ ID NO: 1891710
acuuaaggcagauuacuuc

SEQ ID NO: 1891712 - RNA, 19 nt, Artificial Sequence
  Description of Artificial Sequence: Synthetic oligonucleotide
  Sense strand starting at position 1052 of SEQ ID NO: 1879222
gggauuaauacucaugugu

SEQ ID NO: 1891713 - RNA, 19 nt, Artificial Sequence
  Description of Artificial Sequence: Synthetic oligonucleotide
  Antisense strand to SEQ ID NO: 1891712
acacaugaguauuaauccc

SEQ ID NO: 1891714 - RNA, 19 nt, Artificial Sequence
  Description of Artificial Sequence: Synthetic oligonucleotide
  Sense strand starting at position 1059 of SEQ ID NO: 1879222
auacucauguguccaaacu

SEQ ID NO: 1891715 - RNA, 19 nt, Artificial Sequence
  Description of Artificial Sequence: Synthetic oligonucleotide
  Antisense strand to SEQ ID NO: 1891714
aguuuggacacaugaguau

SEQ ID NO: 1891716 - RNA, 19 nt, Artificial Sequence
  Description of Artificial Sequence: Synthetic oligonucleotide
  Sense strand starting at position 1143 of SEQ ID NO: 1879222
aacacugggcuugggaaua

SEQ ID NO: 1891717 - RNA, 19 nt, Artificial Sequence
  Description of Artificial Sequence: Synthetic oligonucleotide
  Antisense strand to SEQ ID NO: 1891716
uauucccaagcccaguguu

SEQ ID NO: 1891718 - RNA, 19 nt, Artificial Sequence
  Description of Artificial Sequence: Synthetic oligonucleotide
  Sense strand starting at position 1153 of SEQ ID NO: 1879222
uugggaauacuguguuuaa

SEQ ID NO: 1891719 - RNA, 19 nt, Artificial Sequence
  Description of Artificial Sequence: Synthetic oligonucleotide
  Antisense strand to SEQ ID NO: 1891718
uuaaacacaguauucccaa

SEQ ID NO: 1891720 - RNA, 19 nt, Artificial Sequence
  Description of Artificial Sequence: Synthetic oligonucleotide
  Sense strand starting at position 1154 of SEQ ID NO: 1879222
ugggaauacuguguuuaau

SEQ ID NO: 1891721 - RNA, 19 nt, Artificial Sequence
  Description of Artificial Sequence: Synthetic oligonucleotide
  Antisense strand to SEQ ID NO: 1891720
auuaaacacaguauuccca

SEQ ID NO: 1891722 - RNA, 19 nt, Artificial Sequence
  Description of Artificial Sequence: Synthetic oligonucleotide
  Sense strand starting at position 1156 of SEQ ID NO: 1879222
ggaauacuguguuuaauga

SEQ ID NO: 1891723 - RNA, 19 nt, Artificial Sequence
  Description of Artificial Sequence: Synthetic oligonucleotide
  Antisense strand to SEQ ID NO: 1891722
ucauuaaacacaguauucc

SEQ ID NO: 1891724 - RNA, 19 nt, Artificial Sequence
  Description of Artificial Sequence: Synthetic oligonucleotide
  Sense strand starting at position 1200 of SEQ ID NO: 1879222
gcuagaagauguuuaaacu

SEQ ID NO: 1891725 - RNA, 19 nt, Artificial Sequence
  Description of Artificial Sequence: Synthetic oligonucleotide
  Antisense strand to SEQ ID NO: 1891724
aguuuaaacaucuucuagc

SEQ ID NO: 1891726 - RNA, 19 nt, Artificial Sequence
  Description of Artificial Sequence: Synthetic oligonucleotide
  Sense strand starting at position 1264 of SEQ ID NO: 1879222
ccuugaaacuucccgaaga

SEQ ID NO: 1891727 - RNA, 19 nt, Artificial Sequence
  Description of Artificial Sequence: Synthetic oligonucleotide
  Antisense strand to SEQ ID NO: 1891726
ucuucgggaaguuucaagg

SEQ ID NO: 1891728 - RNA, 19 nt, Artificial Sequence
  Description of Artificial Sequence: Synthetic oligonucleotide
  Sense strand starting at position 1289 of SEQ ID NO: 1879222
cuuugugucaaaugggaag

SEQ ID NO: 1891729 - RNA, 19 nt, Artificial Sequence
  Description of Artificial Sequence: Synthetic oligonucleotide
  Antisense strand to SEQ ID NO: 1891728
cuucccauuugacacaaag

SEQ ID NO: 1891730 - RNA, 19 nt, Artificial Sequence
  Description of Artificial Sequence: Synthetic oligonucleotide
  Sense strand starting at position 1291 of SEQ ID NO: 1879222
uugugucaaaugggaagaa

SEQ ID NO: 1891731 - RNA, 19 nt, Artificial Sequence
  Description of Artificial Sequence: Synthetic oligonucleotide
  Antisense strand to SEQ ID NO: 1891730
uucuucccauuugacacaa

SEQ ID NO: 1891732 - RNA, 19 nt, Artificial Sequence
  Description of Artificial Sequence: Synthetic oligonucleotide
  Sense strand starting at position 1369 of SEQ ID NO: 1879222
uaaaguguuguguaaaccu

SEQ ID NO: 1891733 - RNA, 19 nt, Artificial Sequence
  Description of Artificial Sequence: Synthetic oligonucleotide
  Antisense strand to SEQ ID NO: 1891732
agguuuacacaacacuuua

SEQ ID NO: 1891734 - RNA, 19 nt, Artificial Sequence
  Description of Artificial Sequence: Synthetic oligonucleotide
  Sense strand starting at position 1378 of SEQ ID NO: 1879222
guguaaaccuucccacgaa

SEQ ID NO: 1891735 - RNA, 19 nt, Artificial Sequence
  Description of Artificial Sequence: Synthetic oligonucleotide
  Antisense strand to SEQ ID NO: 1891734
uucgugggaagguuuacac

SEQ ID NO: 1891736 - RNA, 19 nt, Artificial Sequence
  Description of Artificial Sequence: Synthetic oligonucleotide
  Sense strand starting at position 1397 of SEQ ID NO: 1879222
ggaagauuaugggcacuca

SEQ ID NO: 1891737 - RNA, 19 nt, Artificial Sequence
  Description of Artificial Sequence: Synthetic oligonucleotide
  Antisense strand to SEQ ID NO: 1891736
ugagugcccauaaucuucc

SEQ ID NO: 1891738 - RNA, 19 nt, Artificial Sequence
  Description of Artificial Sequence: Synthetic oligonucleotide
  Sense strand starting at position 1413 of SEQ ID NO: 1879222
ucaaguugcaguuagagga

SEQ ID NO: 1891739 - RNA, 19 nt, Artificial Sequence
  Description of Artificial Sequence: Synthetic oligonucleotide
  Antisense strand to SEQ ID NO: 1891738
uccucuaacugcaacuuga

SEQ ID NO: 1891740 - RNA, 19 nt, Artificial Sequence
  Description of Artificial Sequence: Synthetic oligonucleotide
  Sense strand starting at position 1441 of SEQ ID NO: 1879222
cccagaaggucauucgaau

SEQ ID NO: 1891741 - RNA, 19 nt, Artificial Sequence
  Description of Artificial Sequence: Synthetic oligonucleotide
  Antisense strand to SEQ ID NO: 1891740
auucgaaugaccuucuggg

SEQ ID NO: 1891742 - RNA, 19 nt, Artificial Sequence
  Description of Artificial Sequence: Synthetic oligonucleotide
  Sense strand starting at position 1484 of SEQ ID NO: 1879222
ucggcuuuacucgucugua

SEQ ID NO: 1891743 - RNA, 19 nt, Artificial Sequence
  Description of Artificial Sequence: Synthetic oligonucleotide
  Antisense strand to SEQ ID NO: 1891742
uacagacgaguaaagccga

SEQ ID NO: 1891744 - RNA, 19 nt, Artificial Sequence
  Description of Artificial Sequence: Synthetic oligonucleotide
  Sense strand starting at position 1546 of SEQ ID NO: 1879222
ugaggucugagccgaaaga

SEQ ID NO: 1891745 - RNA, 19 nt, Artificial Sequence
  Description of Artificial Sequence: Synthetic oligonucleotide
  Antisense strand to SEQ ID NO: 1891744
ucuuucggcucagaccuca

SEQ ID NO: 1891746 - RNA, 19 nt, Artificial Sequence
  Description of Artificial Sequence: Synthetic oligonucleotide
  Sense strand starting at position 1577 of SEQ ID NO: 1879222
cgugaacgaagaugguuau

SEQ ID NO: 1891747 - RNA, 19 nt, Artificial Sequence
  Description of Artificial Sequence: Synthetic oligonucleotide
  Antisense strand to SEQ ID NO: 1891746
auaaccaucuucguucacg

SEQ ID NO: 1891748 - RNA, 19 nt, Artificial Sequence
  Description of Artificial Sequence: Synthetic oligonucleotide
  Sense strand starting at position 2033 of SEQ ID NO: 1879222
gcgucaguucgacugagca

SEQ ID NO: 1891749 - RNA, 19 nt, Artificial Sequence
  Description of Artificial Sequence: Synthetic oligonucleotide
  Antisense strand to SEQ ID NO: 1891748
ugcucagucgaacugacgc

SEQ ID NO: 1891750 - RNA, 19 nt, Artificial Sequence
  Description of Artificial Sequence: Synthetic oligonucleotide
  Sense strand starting at position 2035 of SEQ ID NO: 1879222
gucaguucgacugagcaag

SEQ ID NO: 1891751 - RNA, 19 nt, Artificial Sequence
  Description of Artificial Sequence: Synthetic oligonucleotide
  Antisense strand to SEQ ID NO: 1891750
cuugcucagucgaacugac

SEQ ID NO: 1891752 - RNA, 19 nt, Artificial Sequence
  Description of Artificial Sequence: Synthetic oligonucleotide
  Sense strand starting at position 2675 of SEQ ID NO: 1879222
aagagauggagcuggaguu

SEQ ID NO: 1891753 - RNA, 19 nt, Artificial Sequence
  Description of Artificial Sequence: Synthetic oligonucleotide
  Antisense strand to SEQ ID NO: 1891752
aacuccagcuccaucucuu

SEQ ID NO: 1891754 - RNA, 19 nt, Artificial Sequence
  Description of Artificial Sequence: Synthetic oligonucleotide
  Sense strand starting at position 3084 of SEQ ID NO: 1879222
cuaguagcggucuacaaua

SEQ ID NO: 1891755 - RNA, 19 nt, Artificial Sequence
  Description of Artificial Sequence: Synthetic oligonucleotide
  Antisense strand to SEQ ID NO: 1891754
uauuguagaccgcuacuag

SEQ ID NO: 1891756 - RNA, 19 nt, Artificial Sequence
  Description of Artificial Sequence: Synthetic oligonucleotide
  Sense strand starting at position 3432 of SEQ ID NO: 1879222
acgcauuugcccuaaucuu

SEQ ID NO: 1891757 - RNA, 19 nt, Artificial Sequence
  Description of Artificial Sequence: Synthetic oligonucleotide
  Antisense strand to SEQ ID NO: 1891756
aagauuagggcaaaugcgu

SEQ ID NO: 1891758 - RNA, 19 nt, Artificial Sequence
  Description of Artificial Sequence: Synthetic oligonucleotide
  Sense strand starting at position 3505 of SEQ ID NO: 1879222
gggagaaagaguugugcau

SEQ ID NO: 1891759 - RNA, 19 nt, Artificial Sequence
  Description of Artificial Sequence: Synthetic oligonucleotide
  Antisense strand to SEQ ID NO: 1891758
augcacaacucuuucuccc

SEQ ID NO: 1891760 - RNA, 19 nt, Artificial Sequence
  Description of Artificial Sequence: Synthetic oligonucleotide
  Sense strand starting at position 3509 of SEQ ID NO: 1879222
gaaagaguugugcauuaua

SEQ ID NO: 1891761 - RNA, 19 nt, Artificial Sequence
  Description of Artificial Sequence: Synthetic oligonucleotide
  Antisense strand to SEQ ID NO: 1891760
uauaaugcacaacucuuuc

SEQ ID NO: 1891762 - RNA, 19 nt, Artificial Sequence
  Description of Artificial Sequence: Synthetic oligonucleotide
  Sense strand starting at position 3512 of SEQ ID NO: 1879222
agaguugugcauuauaucu

SEQ ID NO: 1891763 - RNA, 19 nt, Artificial Sequence
  Description of Artificial Sequence: Synthetic oligonucleotide
  Antisense strand to SEQ ID NO: 1891762
agauauaaugcacaacucu

SEQ ID NO: 1891764 - RNA, 19 nt, Artificial Sequence
  Description of Artificial Sequence: Synthetic oligonucleotide
  Sense strand starting at position 3550 of SEQ ID NO: 1879222
agaccuucgauucgaucua

SEQ ID NO: 1891765 - RNA, 19 nt, Artificial Sequence
  Description of Artificial Sequence: Synthetic oligonucleotide
  Antisense strand to SEQ ID NO: 1891764
uagaucgaaucgaaggucu

SEQ ID NO: 1891766 - RNA, 19 nt, Artificial Sequence
  Description of Artificial Sequence: Synthetic oligonucleotide
  Sense strand starting at position 3555 of SEQ ID NO: 1879222
uucgauucgaucuaaagag

SEQ ID NO: 1891767 - RNA, 19 nt, Artificial Sequence
  Description of Artificial Sequence: Synthetic oligonucleotide
  Antisense strand to SEQ ID NO: 1891766
cucuuuagaucgaaucgaa

SEQ ID NO: 1891768 - RNA, 19 nt, Artificial Sequence
  Description of Artificial Sequence: Synthetic oligonucleotide
  Sense strand starting at position 3647 of SEQ ID NO: 1879222
uuccuaguuacucggaaga

SEQ ID NO: 1891769 - RNA, 19 nt, Artificial Sequence
  Description of Artificial Sequence: Synthetic oligonucleotide
  Antisense strand to SEQ ID NO: 1891768
ucuuccgaguaacuaggaa

SEQ ID NO: 1891770 - RNA, 19 nt, Artificial Sequence
  Description of Artificial Sequence: Synthetic oligonucleotide
  Sense strand starting at position 3690 of SEQ ID NO: 1879222
uugcguuaugucuuugguu

SEQ ID NO: 1891771 - RNA, 19 nt, Artificial Sequence
  Description of Artificial Sequence: Synthetic oligonucleotide
  Antisense strand to SEQ ID NO: 1891770
aaccaaagacauaacgcaa

SEQ ID NO: 1891772 - RNA, 19 nt, Artificial Sequence
  Description of Artificial Sequence: Synthetic oligonucleotide
  Sense strand starting at position 3774 of SEQ ID NO: 1879222
ccaguucuuguacaaguaa

SEQ ID NO: 1891773 - RNA, 19 nt, Artificial Sequence
  Description of Artificial Sequence: Synthetic oligonucleotide
  Antisense strand to SEQ ID NO: 1891772
uuacuuguacaagaacugg

SEQ ID NO: 1891774 - RNA, 19 nt, Artificial Sequence
  Description of Artificial Sequence: Synthetic oligonucleotide
  Sense strand starting at position 3789 of SEQ ID NO: 1879222
guaauuaaaugcucgacua

SEQ ID NO: 1891775 - RNA, 19 nt, Artificial Sequence
  Description of Artificial Sequence: Synthetic oligonucleotide
  Antisense strand to SEQ ID NO: 1891774
uagucgagcauuuaauuac

SEQ ID NO: 1891776 - RNA, 19 nt, Artificial Sequence
  Description of Artificial Sequence: Synthetic oligonucleotide
  Sense strand starting at position 3900 of SEQ ID NO: 1879222
gggagacucuagcuuuauc

SEQ ID NO: 1891777 - RNA, 19 nt, Artificial Sequence
  Description of Artificial Sequence: Synthetic oligonucleotide
  Antisense strand to SEQ ID NO: 1891776
gauaaagcuagagucuccc

SEQ ID NO: 1891778 - RNA, 19 nt, Artificial Sequence
  Description of Artificial Sequence: Synthetic oligonucleotide
  Sense strand starting at position 3953 of SEQ ID NO: 1879222
ugaagccugcccuaaguau

SEQ ID NO: 1891779 - RNA, 19 nt, Artificial Sequence
  Description of Artificial Sequence: Synthetic oligonucleotide
  Antisense strand to SEQ ID NO: 1891778
auacuuagggcaggcuuca

SEQ ID NO: 1891780 - RNA, 19 nt, Artificial Sequence
  Description of Artificial Sequence: Synthetic oligonucleotide
  Sense strand starting at position 6 of SEQ ID NO: 1879223
agacgaaauuaugcuauua

SEQ ID NO: 1891781 - RNA, 19 nt, Artificial Sequence
  Description of Artificial Sequence: Synthetic oligonucleotide
  Antisense strand to SEQ ID NO: 1891780
uaauagcauaauuucgucu

SEQ ID NO: 1891782 - RNA, 19 nt, Artificial Sequence
  Description of Artificial Sequence: Synthetic oligonucleotide
  Sense strand starting at position 57 of SEQ ID NO: 1879223
uccuauuacuauguaguaa

SEQ ID NO: 1891783 - RNA, 19 nt, Artificial Sequence
  Description of Artificial Sequence: Synthetic oligonucleotide
  Antisense strand to SEQ ID NO: 1891782
uuacuacauaguaauagga

SEQ ID NO: 1891784 - RNA, 19 nt, Artificial Sequence
  Description of Artificial Sequence: Synthetic oligonucleotide
  Sense strand starting at position 68 of SEQ ID NO: 1879223
uguaguaaugcucaguuaa

SEQ ID NO: 1891785 - RNA, 19 nt, Artificial Sequence
  Description of Artificial Sequence: Synthetic oligonucleotide
  Antisense strand to SEQ ID NO: 1891784
uuaacugagcauuacuaca

SEQ ID NO: 1891786 - RNA, 19 nt, Artificial Sequence
  Description of Artificial Sequence: Synthetic oligonucleotide
  Sense strand starting at position 119 of SEQ ID NO: 1879223
gcacaacugcuuuaauaga

SEQ ID NO: 1891787 - RNA, 19 nt, Artificial Sequence
  Description of Artificial Sequence: Synthetic oligonucleotide
  Antisense strand to SEQ ID NO: 1891786
ucuauuaaagcaguugugc

SEQ ID NO: 1891788 - RNA, 19 nt, Artificial Sequence
  Description of Artificial Sequence: Synthetic oligonucleotide
  Sense strand starting at position 648 of SEQ ID NO: 1879223
cuacuacuagcugagcuau

SEQ ID NO: 1891789 - RNA, 19 nt, Artificial Sequence
  Description of Artificial Sequence: Synthetic oligonucleotide
  Antisense strand to SEQ ID NO: 1891788
auagcucagcuaguaguag

SEQ ID NO: 1891790 - RNA, 19 nt, Artificial Sequence
  Description of Artificial Sequence: Synthetic oligonucleotide
  Sense strand starting at position 685 of SEQ ID NO: 1879223
gccaaauauguaugaucuu

SEQ ID NO: 1891791 - RNA, 19 nt, Artificial Sequence
  Description of Artificial Sequence: Synthetic oligonucleotide
  Antisense strand to SEQ ID NO: 1891790
aagaucauacauauuuggc

SEQ ID NO: 1891792 - RNA, 19 nt, Artificial Sequence
  Description of Artificial Sequence: Synthetic oligonucleotide
  Sense strand starting at position 709 of SEQ ID NO: 1879223
aaagcagagcaguaaguau

SEQ ID NO: 1891793 - RNA, 19 nt, Artificial Sequence
  Description of Artificial Sequence: Synthetic oligonucleotide
  Antisense strand to SEQ ID NO: 1891792
auacuuacugcucugcuuu

SEQ ID NO: 1891794 - RNA, 19 nt, Artificial Sequence
  Description of Artificial Sequence: Synthetic oligonucleotide
  Sense strand starting at position 716 of SEQ ID NO: 1879223
agcaguaaguauccaaaga

SEQ ID NO: 1891795 - RNA, 19 nt, Artificial Sequence
  Description of Artificial Sequence: Synthetic oligonucleotide
  Antisense strand to SEQ ID NO: 1891794
ucuuuggauacuuacugcu

SEQ ID NO: 1891796 - RNA, 19 nt, Artificial Sequence
  Description of Artificial Sequence: Synthetic oligonucleotide
  Sense strand starting at position 735 of SEQ ID NO: 1879223
ccaucaaauuaguuuguca

SEQ ID NO: 1891797 - RNA, 19 nt, Artificial Sequence
  Description of Artificial Sequence: Synthetic oligonucleotide
  Antisense strand to SEQ ID NO: 1891796
ugacaaacuaauuugaugg

SEQ ID NO: 1891798 - RNA, 19 nt, Artificial Sequence
  Description of Artificial Sequence: Synthetic oligonucleotide
  Sense strand starting at position 908 of SEQ ID NO: 1879223
ggagcaucaucaccauugu

SEQ ID NO: 1891799 - RNA, 19 nt, Artificial Sequence
  Description of Artificial Sequence: Synthetic oligonucleotide
  Antisense strand to SEQ ID NO: 1891798
acaauggugaugaugcucc

SEQ ID NO: 1891800 - RNA, 19 nt, Artificial Sequence
  Description of Artificial Sequence: Synthetic oligonucleotide
  Sense strand starting at position 1218 of SEQ ID NO: 1879223
gccaaaggguucccuauau

SEQ ID NO: 1891801 - RNA, 19 nt, Artificial Sequence
  Description of Artificial Sequence: Synthetic oligonucleotide
  Antisense strand to SEQ ID NO: 1891800
auauagggaacccuuuggc

SEQ ID NO: 1891802 - RNA, 19 nt, Artificial Sequence
  Description of Artificial Sequence: Synthetic oligonucleotide
  Sense strand starting at position 1460 of SEQ ID NO: 1879223
agguuugggucuccucaca

SEQ ID NO: 1891803 - RNA, 19 nt, Artificial Sequence
  Description of Artificial Sequence: Synthetic oligonucleotide
  Antisense strand to SEQ ID NO: 1891802
ugugaggagacccaaaccu

SEQ ID NO: 1891804 - RNA, 19 nt, Artificial Sequence
  Description of Artificial Sequence: Synthetic oligonucleotide
  Sense strand starting at position 1758 of SEQ ID NO: 1879223
gcgagucacgcuccuaaac

SEQ ID NO: 1891805 - RNA, 19 nt, Artificial Sequence
  Description of Artificial Sequence: Synthetic oligonucleotide
  Antisense strand to SEQ ID NO: 1891804
guuuaggagcgugacucgc

SEQ ID NO: 1891806 - RNA, 19 nt, Artificial Sequence
  Description of Artificial Sequence: Synthetic oligonucleotide
  Sense strand starting at position 2212 of SEQ ID NO: 1879223
gaaguucugagccagggau

SEQ ID NO: 1891807 - RNA, 19 nt, Artificial Sequence
  Description of Artificial Sequence: Synthetic oligonucleotide
  Antisense strand to SEQ ID NO: 1891806
aucccuggcucagaacuuc

SEQ ID NO: 1891808 - RNA, 19 nt, Artificial Sequence
  Description of Artificial Sequence: Synthetic oligonucleotide
  Sense strand starting at position 2236 of SEQ ID NO: 1879223
ccaaacuuccugcauucga

SEQ ID NO: 1891809 - RNA, 19 nt, Artificial Sequence
  Description of Artificial Sequence: Synthetic oligonucleotide
  Antisense strand to SEQ ID NO: 1891808
ucgaaugcaggaaguuugg

SEQ ID NO: 1891810 - RNA, 19 nt, Artificial Sequence
  Description of Artificial Sequence: Synthetic oligonucleotide
  Sense strand starting at position 2399 of SEQ ID NO: 1879223
cuagguugucauggaagac

SEQ ID NO: 1891811 - RNA, 19 nt, Artificial Sequence
  Description of Artificial Sequence: Synthetic oligonucleotide
  Antisense strand to SEQ ID NO: 1891810
gucuuccaugacaaccuag

SEQ ID NO: 1891812 - RNA, 19 nt, Artificial Sequence
  Description of Artificial Sequence: Synthetic oligonucleotide
  Sense strand starting at position 2486 of SEQ ID NO: 1879223
ucugaauagcuuugacaaa

SEQ ID NO: 1891813 - RNA, 19 nt, Artificial Sequence
  Description of Artificial Sequence: Synthetic oligonucleotide
  Antisense strand to SEQ ID NO: 1891812
uuugucaaagcuauucaga

SEQ ID NO: 1891814 - RNA, 19 nt, Artificial Sequence
  Description of Artificial Sequence: Synthetic oligonucleotide
  Sense strand starting at position 2589 of SEQ ID NO: 1879223
ccauauggcccuuaaaugu

SEQ ID NO: 1891815 - RNA, 19 nt, Artificial Sequence
  Description of Artificial Sequence: Synthetic oligonucleotide
  Antisense strand to SEQ ID NO: 1891814
acauuuaagggccauaugg

SEQ ID NO: 1891816 - RNA, 19 nt, Artificial Sequence
  Description of Artificial Sequence: Synthetic oligonucleotide
  Sense strand starting at position 2609 of SEQ ID NO: 1879223
gguguuucccaacauauug

SEQ ID NO: 1891817 - RNA, 19 nt, Artificial Sequence
  Description of Artificial Sequence: Synthetic oligonucleotide
  Antisense strand to SEQ ID NO: 1891816
caauauguugggaaacacc

SEQ ID NO: 1891818 - RNA, 19 nt, Artificial Sequence
  Description of Artificial Sequence: Synthetic oligonucleotide
  Sense strand starting at position 2726 of SEQ ID NO: 1879223
ucccaaaucugggugucua

SEQ ID NO: 1891819 - RNA, 19 nt, Artificial Sequence
  Description of Artificial Sequence: Synthetic oligonucleotide
  Antisense strand to SEQ ID NO: 1891818
uagacacccagauuuggga

SEQ ID NO: 1891820 - RNA, 19 nt, Artificial Sequence
  Description of Artificial Sequence: Synthetic oligonucleotide
  Sense strand starting at position 2727 of SEQ ID NO: 1879223
cccaaaucugggugucuaa

SEQ ID NO: 1891821 - RNA, 19 nt, Artificial Sequence
  Description of Artificial Sequence: Synthetic oligonucleotide
  Antisense strand to SEQ ID NO: 1891820
uuagacacccagauuuggg

SEQ ID NO: 1891822 - RNA, 19 nt, Artificial Sequence
  Description of Artificial Sequence: Synthetic oligonucleotide
  Sense strand starting at position 2734 of SEQ ID NO: 1879223
cugggugucuaaucccaau

SEQ ID NO: 1891823 - RNA, 19 nt, Artificial Sequence
  Description of Artificial Sequence: Synthetic oligonucleotide
  Antisense strand to SEQ ID NO: 1891822
auugggauuagacacccag

SEQ ID NO: 1891824 - RNA, 19 nt, Artificial Sequence
  Description of Artificial Sequence: Synthetic oligonucleotide
  Sense strand starting at position 2896 of SEQ ID NO: 1879223
ugguaaaugguguaaccau

SEQ ID NO: 1891825 - RNA, 19 nt, Artificial Sequence
  Description of Artificial Sequence: Synthetic oligonucleotide
  Antisense strand to SEQ ID NO: 1891824
augguuacaccauuuacca

SEQ ID NO: 1891826 - RNA, 19 nt, Artificial Sequence
  Description of Artificial Sequence: Synthetic oligonucleotide
  Sense strand starting at position 2948 of SEQ ID NO: 1879223
auuccuucuggugaacuaa

SEQ ID NO: 1891827 - RNA, 19 nt, Artificial Sequence
  Description of Artificial Sequence: Synthetic oligonucleotide
  Antisense strand to SEQ ID NO: 1891826
uuaguucaccagaaggaau

SEQ ID NO: 1891828 - RNA, 19 nt, Artificial Sequence
  Description of Artificial Sequence: Synthetic oligonucleotide
  Sense strand starting at position 2988 of SEQ ID NO: 1879223
aguuguuaucaguguauuu

SEQ ID NO: 1891829 - RNA, 19 nt, Artificial Sequence
  Description of Artificial Sequence: Synthetic oligonucleotide
  Antisense strand to SEQ ID NO: 1891828
aaauacacugauaacaacu

SEQ ID NO: 1891830 - RNA, 19 nt, Artificial Sequence
  Description of Artificial Sequence: Synthetic oligonucleotide
  Sense strand starting at position 3065 of SEQ ID NO: 1879223
ccauuccucccuggaagua

SEQ ID NO: 1891831 - RNA, 19 nt, Artificial Sequence
  Description of Artificial Sequence: Synthetic oligonucleotide
  Antisense strand to SEQ ID NO: 1891830
uacuuccagggaggaaugg

SEQ ID NO: 1891832 - RNA, 19 nt, Artificial Sequence
  Description of Artificial Sequence: Synthetic oligonucleotide
  Sense strand starting at position 3171 of SEQ ID NO: 1879223
gacugugcuuugcucauuu

SEQ ID NO: 1891833 - RNA, 19 nt, Artificial Sequence
  Description of Artificial Sequence: Synthetic oligonucleotide
  Antisense strand to SEQ ID NO: 1891832
aaaugagcaaagcacaguc

SEQ ID NO: 1891834 - RNA, 19 nt, Artificial Sequence
  Description of Artificial Sequence: Synthetic oligonucleotide
  Sense strand starting at position 3221 of SEQ ID NO: 1879223
cacagagcagaugguuaau

SEQ ID NO: 1891835 - RNA, 19 nt, Artificial Sequence
  Description of Artificial Sequence: Synthetic oligonucleotide
  Antisense strand to SEQ ID NO: 1891834
auuaaccaucugcucugug

SEQ ID NO: 1891836 - RNA, 19 nt, Artificial Sequence
  Description of Artificial Sequence: Synthetic oligonucleotide
  Sense strand starting at position 3223 of SEQ ID NO: 1879223
cagagcagaugguuaauaa

SEQ ID NO: 1891837 - RNA, 19 nt, Artificial Sequence
  Description of Artificial Sequence: Synthetic oligonucleotide
  Antisense strand to SEQ ID NO: 1891836
uuauuaaccaucugcucug

SEQ ID NO: 1891838 - RNA, 19 nt, Artificial Sequence
  Description of Artificial Sequence: Synthetic oligonucleotide
  Sense strand starting at position 3421 of SEQ ID NO: 1879223
cccucagguugguuugaua

SEQ ID NO: 1891839 - RNA, 19 nt, Artificial Sequence
  Description of Artificial Sequence: Synthetic oligonucleotide
  Antisense strand to SEQ ID NO: 1891838
uaucaaaccaaccugaggg

SEQ ID NO: 1891840 - RNA, 19 nt, Artificial Sequence
  Description of Artificial Sequence: Synthetic oligonucleotide
  Sense strand starting at position 3607 of SEQ ID NO: 1879223
uugugaacaguaugaacuu

SEQ ID NO: 1891841 - RNA, 19 nt, Artificial Sequence
  Description of Artificial Sequence: Synthetic oligonucleotide
  Antisense strand to SEQ ID NO: 1891840
aaguucauacuguucacaa

SEQ ID NO: 1891842 - RNA, 19 nt, Artificial Sequence
  Description of Artificial Sequence: Synthetic oligonucleotide
  Sense strand starting at position 3644 of SEQ ID NO: 1879223
gacaguaugcauggaauac

SEQ ID NO: 1891843 - RNA, 19 nt, Artificial Sequence
  Description of Artificial Sequence: Synthetic oligonucleotide
  Antisense strand to SEQ ID NO: 1891842
guauuccaugcauacuguc

SEQ ID NO: 1891844 - RNA, 19 nt, Artificial Sequence
  Description of Artificial Sequence: Synthetic oligonucleotide
  Sense strand starting at position 3719 of SEQ ID NO: 1879223
gccauauaggcacaguuaa

SEQ ID NO: 1891845 - RNA, 19 nt, Artificial Sequence
  Description of Artificial Sequence: Synthetic oligonucleotide
  Antisense strand to SEQ ID NO: 1891844
uuaacugugccuauauggc

SEQ ID NO: 1891846 - RNA, 19 nt, Artificial Sequence
  Description of Artificial Sequence: Synthetic oligonucleotide
  Sense strand starting at position 3769 of SEQ ID NO: 1879223
uccagaagcugagcugaua

SEQ ID NO: 1891847 - RNA, 19 nt, Artificial Sequence
  Description of Artificial Sequence: Synthetic oligonucleotide
  Antisense strand to SEQ ID NO: 1891846
uaucagcucagcuucugga

SEQ ID NO: 1891848 - RNA, 19 nt, Artificial Sequence
  Description of Artificial Sequence: Synthetic oligonucleotide
  Sense strand starting at position 3772 of SEQ ID NO: 1879223
agaagcugagcugauacau

SEQ ID NO: 1891849 - RNA, 19 nt, Artificial Sequence
  Description of Artificial Sequence: Synthetic oligonucleotide
  Antisense strand to SEQ ID NO: 1891848
auguaucagcucagcuucu

SEQ ID NO: 1891850 - RNA, 19 nt, Artificial Sequence
  Description of Artificial Sequence: Synthetic oligonucleotide
  Sense strand starting at position 3784 of SEQ ID NO: 1879223
gauacauugugacccaaag

SEQ ID NO: 1891851 - RNA, 19 nt, Artificial Sequence
  Description of Artificial Sequence: Synthetic oligonucleotide
  Antisense strand to SEQ ID NO: 1891850
cuuugggucacaauguauc

SEQ ID NO: 1891852 - RNA, 19 nt, Artificial Sequence
  Description of Artificial Sequence: Synthetic oligonucleotide
  Sense strand starting at position 3802 of SEQ ID NO: 1879223
gucccaugggcauacauau

SEQ ID NO: 1891853 - RNA, 19 nt, Artificial Sequence
  Description of Artificial Sequence: Synthetic oligonucleotide
  Antisense strand to SEQ ID NO: 1891852
auauguaugcccaugggac

SEQ ID NO: 1891854 - RNA, 19 nt, Artificial Sequence
  Description of Artificial Sequence: Synthetic oligonucleotide
  Sense strand starting at position 3911 of SEQ ID NO: 1879223
acuuacuuauuacugagua

SEQ ID NO: 1891855 - RNA, 19 nt, Artificial Sequence
  Description of Artificial Sequence: Synthetic oligonucleotide
  Antisense strand to SEQ ID NO: 1891854
uacucaguaauaaguaagu

SEQ ID NO: 1891856 - RNA, 19 nt, Artificial Sequence
  Description of Artificial Sequence: Synthetic oligonucleotide
  Sense strand starting at position 3933 of SEQ ID NO: 1879223
cugacacucugagugacuu

SEQ ID NO: 1891857 - RNA, 19 nt, Artificial Sequence
  Description of Artificial Sequence: Synthetic oligonucleotide
  Antisense strand to SEQ ID NO: 1891856
aagucacucagagugucag

SEQ ID NO: 1891858 - RNA, 19 nt, Artificial Sequence
  Description of Artificial Sequence: Synthetic oligonucleotide
  Sense strand starting at position 3934 of SEQ ID NO: 1879223
ugacacucugagugacuuu

SEQ ID NO: 1891859 - RNA, 19 nt, Artificial Sequence
  Description of Artificial Sequence: Synthetic oligonucleotide
  Antisense strand to SEQ ID NO: 1891858
aaagucacucagaguguca

SEQ ID NO: 1891860 - RNA, 19 nt, Artificial Sequence
  Description of Artificial Sequence: Synthetic oligonucleotide
  Sense strand starting at position 176 of SEQ ID NO: 1879224
ucgcauucccgagcuguuu

SEQ ID NO: 1891861 - RNA, 19 nt, Artificial Sequence
  Description of Artificial Sequence: Synthetic oligonucleotide
  Antisense strand to SEQ ID NO: 1891860
aaacagcucgggaaugcga

SEQ ID NO: 1891862 - RNA, 19 nt, Artificial Sequence
  Description of Artificial Sequence: Synthetic oligonucleotide
  Sense strand starting at position 380 of SEQ ID NO: 1879224
caguuuggguuaucuuguu

SEQ ID NO: 1891863 - RNA, 19 nt, Artificial Sequence
  Description of Artificial Sequence: Synthetic oligonucleotide
  Antisense strand to SEQ ID NO: 1891862
aacaagauaacccaaacug

SEQ ID NO: 1891864 - RNA, 19 nt, Artificial Sequence
  Description of Artificial Sequence: Synthetic oligonucleotide
  Sense strand starting at position 385 of SEQ ID NO: 1879224
uggguuaucuuguuagcaa

SEQ ID NO: 1891865 - RNA, 19 nt, Artificial Sequence
  Description of Artificial Sequence: Synthetic oligonucleotide
  Antisense strand to SEQ ID NO: 1891864
uugcuaacaagauaaccca

SEQ ID NO: 1891866 - RNA, 19 nt, Artificial Sequence
  Description of Artificial Sequence: Synthetic oligonucleotide
  Sense strand starting at position 386 of SEQ ID NO: 1879224
ggguuaucuuguuagcaaa

SEQ ID NO: 1891867 - RNA, 19 nt, Artificial Sequence
  Description of Artificial Sequence: Synthetic oligonucleotide
  Antisense strand to SEQ ID NO: 1891866
uuugcuaacaagauaaccc

SEQ ID NO: 1891868 - RNA, 19 nt, Artificial Sequence
  Description of Artificial Sequence: Synthetic oligonucleotide
  Sense strand starting at position 735 of SEQ ID NO: 1879224
ccaccuuuccagugugaaa

SEQ ID NO: 1891869 - RNA, 19 nt, Artificial Sequence
  Description of Artificial Sequence: Synthetic oligonucleotide
  Antisense strand to SEQ ID NO: 1891868
uuucacacuggaaaggugg

SEQ ID NO: 1891870 - RNA, 19 nt, Artificial Sequence
  Description of Artificial Sequence: Synthetic oligonucleotide
  Sense strand starting at position 737 of SEQ ID NO: 1879224
accuuuccagugugaaaca

SEQ ID NO: 1891871 - RNA, 19 nt, Artificial Sequence
  Description of Artificial Sequence: Synthetic oligonucleotide
  Antisense strand to SEQ ID NO: 1891870
uguuucacacuggaaaggu

SEQ ID NO: 1891872 - RNA, 19 nt, Artificial Sequence
  Description of Artificial Sequence: Synthetic oligonucleotide
  Sense strand starting at position 870 of SEQ ID NO: 1879224
gcgaacuccuucuggcaca

SEQ ID NO: 1891873 - RNA, 19 nt, Artificial Sequence
  Description of Artificial Sequence: Synthetic oligonucleotide
  Antisense strand to SEQ ID NO: 1891872
ugugccagaaggaguucgc

SEQ ID NO: 1891874 - RNA, 19 nt, Artificial Sequence
  Description of Artificial Sequence: Synthetic oligonucleotide
  Sense strand starting at position 1567 of SEQ ID NO: 1879224
gguggguggguggaaauau

SEQ ID NO: 1891875 - RNA, 19 nt, Artificial Sequence
  Description of Artificial Sequence: Synthetic oligonucleotide
  Antisense strand to SEQ ID NO: 1891874
auauuuccacccacccacc

SEQ ID NO: 1891876 - RNA, 19 nt, Artificial Sequence
  Description of Artificial Sequence: Synthetic oligonucleotide
  Sense strand starting at position 2376 of SEQ ID NO: 1879224
guaaauaaagcuugaaauc

SEQ ID NO: 1891877 - RNA, 19 nt, Artificial Sequence
  Description of Artificial Sequence: Synthetic oligonucleotide
  Antisense strand to SEQ ID NO: 1891876
gauuucaagcuuuauuuac

SEQ ID NO: 1891878 - RNA, 19 nt, Artificial Sequence
  Description of Artificial Sequence: Synthetic oligonucleotide
  Sense strand starting at position 2987 of SEQ ID NO: 1879224
auagguugguguucaggga

SEQ ID NO: 1891879 - RNA, 19 nt, Artificial Sequence
  Description of Artificial Sequence: Synthetic oligonucleotide
  Antisense strand to SEQ ID NO: 1891878
ucccugaacaccaaccuau

SEQ ID NO: 1891880 - RNA, 19 nt, Artificial Sequence
  Description of Artificial Sequence: Synthetic oligonucleotide
  Sense strand starting at position 2988 of SEQ ID NO: 1879224
uagguugguguucagggaa

SEQ ID NO: 1891881 - RNA, 19 nt, Artificial Sequence
  Description of Artificial Sequence: Synthetic oligonucleotide
  Antisense strand to SEQ ID NO: 1891880
uucccugaacaccaaccua

SEQ ID NO: 1891882 - RNA, 19 nt, Artificial Sequence
  Description of Artificial Sequence: Synthetic oligonucleotide
  Sense strand starting at position 3133 of SEQ ID NO: 1879224
ggcccuucgacuugaguga

SEQ ID NO: 1891883 - RNA, 19 nt, Artificial Sequence
  Description of Artificial Sequence: Synthetic oligonucleotide
  Antisense strand to SEQ ID NO: 1891882
ucacucaagucgaagggcc

SEQ ID NO: 1891884 - RNA, 19 nt, Artificial Sequence
  Description of Artificial Sequence: Synthetic oligonucleotide
  Sense strand starting at position 3413 of SEQ ID NO: 1879224
cugggucuuuccuggaaau

SEQ ID NO: 1891885 - RNA, 19 nt, Artificial Sequence
  Description of Artificial Sequence: Synthetic oligonucleotide
  Antisense strand to SEQ ID NO: 1891884
auuuccaggaaagacccag

SEQ ID NO: 1891886 - RNA, 19 nt, Artificial Sequence
  Description of Artificial Sequence: Synthetic oligonucleotide
  Sense strand starting at position 3414 of SEQ ID NO: 1879224
ugggucuuuccuggaaaug

SEQ ID NO: 1891887 - RNA, 19 nt, Artificial Sequence
  Description of Artificial Sequence: Synthetic oligonucleotide
  Antisense strand to SEQ ID NO: 1891886
cauuuccaggaaagaccca

SEQ ID NO: 1891888 - RNA, 19 nt, Artificial Sequence
  Description of Artificial Sequence: Synthetic oligonucleotide
  Sense strand starting at position 3415 of SEQ ID NO: 1879224
gggucuuuccuggaaaugu

SEQ ID NO: 1891889 - RNA, 19 nt, Artificial Sequence
  Description of Artificial Sequence: Synthetic oligonucleotide
  Antisense strand to SEQ ID NO: 1891888
acauuuccaggaaagaccc

SEQ ID NO: 1891890 - RNA, 19 nt, Artificial Sequence
  Description of Artificial Sequence: Synthetic oligonucleotide
  Sense strand starting at position 3424 of SEQ ID NO: 1879224
cuggaaaugucaccauggu

SEQ ID NO: 1891891 - RNA, 19 nt, Artificial Sequence
  Description of Artificial Sequence: Synthetic oligonucleotide
  Antisense strand to SEQ ID NO: 1891890
accauggugacauuuccag

SEQ ID NO: 1891892 - RNA, 19 nt, Artificial Sequence
  Description of Artificial Sequence: Synthetic oligonucleotide
  Sense strand starting at position 3425 of SEQ ID NO: 1879224
uggaaaugucaccaugguc

SEQ ID NO: 1891893 - RNA, 19 nt, Artificial Sequence
  Description of Artificial Sequence: Synthetic oligonucleotide
  Antisense strand to SEQ ID NO: 1891892
gaccauggugacauuucca

SEQ ID NO: 1891894 - RNA, 19 nt, Artificial Sequence
  Description of Artificial Sequence: Synthetic oligonucleotide
  Sense strand starting at position 3 of SEQ ID NO: 1879225
ucaauugcuuugcucauga

SEQ ID NO: 1891895 - RNA, 19 nt, Artificial Sequence
  Description of Artificial Sequence: Synthetic oligonucleotide
  Antisense strand to SEQ ID NO: 1891894
ucaugagcaaagcaauuga

SEQ ID NO: 1891896 - RNA, 19 nt, Artificial Sequence
  Description of Artificial Sequence: Synthetic oligonucleotide
  Sense strand starting at position 7 of SEQ ID NO: 1879225
uugcuuugcucaugaagcu

SEQ ID NO: 1891897 - RNA, 19 nt, Artificial Sequence
  Description of Artificial Sequence: Synthetic oligonucleotide
  Antisense strand to SEQ ID NO: 1891896
agcuucaugagcaaagcaa

SEQ ID NO: 1891898 - RNA, 19 nt, Artificial Sequence
  Description of Artificial Sequence: Synthetic oligonucleotide
  Sense strand starting at position 135 of SEQ ID NO: 1879225
ucucuuucuugcuuuguau

SEQ ID NO: 1891899 - RNA, 19 nt, Artificial Sequence
  Description of Artificial Sequence: Synthetic oligonucleotide
  Antisense strand to SEQ ID NO: 1891898
auacaaagcaagaaagaga

SEQ ID NO: 1891900 - RNA, 19 nt, Artificial Sequence
  Description of Artificial Sequence: Synthetic oligonucleotide
  Sense strand starting at position 137 of SEQ ID NO: 1879225
ucuuucuugcuuuguauua

SEQ ID NO: 1891901 - RNA, 19 nt, Artificial Sequence
  Description of Artificial Sequence: Synthetic oligonucleotide
  Antisense strand to SEQ ID NO: 1891900
uaauacaaagcaagaaaga

SEQ ID NO: 1891902 - RNA, 19 nt, Artificial Sequence
  Description of Artificial Sequence: Synthetic oligonucleotide
  Sense strand starting at position 138 of SEQ ID NO: 1879225
cuuucuugcuuuguauuau

SEQ ID NO: 1891903 - RNA, 19 nt, Artificial Sequence
  Description of Artificial Sequence: Synthetic oligonucleotide
  Antisense strand to SEQ ID NO: 1891902
auaauacaaagcaagaaag

SEQ ID NO: 1891904 - RNA, 19 nt, Artificial Sequence
  Description of Artificial Sequence: Synthetic oligonucleotide
  Sense strand starting at position 142 of SEQ ID NO: 1879225
cuugcuuuguauuauagau

SEQ ID NO: 1891905 - RNA, 19 nt, Artificial Sequence
  Description of Artificial Sequence: Synthetic oligonucleotide
  Antisense strand to SEQ ID NO: 1891904
aucuauaauacaaagcaag

SEQ ID NO: 1891906 - RNA, 19 nt, Artificial Sequence
  Description of Artificial Sequence: Synthetic oligonucleotide
  Sense strand starting at position 144 of SEQ ID NO: 1879225
ugcuuuguauuauagauga

SEQ ID NO: 1891907 - RNA, 19 nt, Artificial Sequence
  Description of Artificial Sequence: Synthetic oligonucleotide
  Antisense strand to SEQ ID NO: 1891906
ucaucuauaauacaaagca

SEQ ID NO: 1891908 - RNA, 19 nt, Artificial Sequence
  Description of Artificial Sequence: Synthetic oligonucleotide
  Sense strand starting at position 258 of SEQ ID NO: 1879225
gagagcuauuggcaagaga

SEQ ID NO: 1891909 - RNA, 19 nt, Artificial Sequence
  Description of Artificial Sequence: Synthetic oligonucleotide
  Antisense strand to SEQ ID NO: 1891908
ucucuugccaauagcucuc

SEQ ID NO: 1891910 - RNA, 19 nt, Artificial Sequence
  Description of Artificial Sequence: Synthetic oligonucleotide
  Sense strand starting at position 281 of SEQ ID NO: 1879225
uuacuugagcaguguguga

SEQ ID NO: 1891911 - RNA, 19 nt, Artificial Sequence
  Description of Artificial Sequence: Synthetic oligonucleotide
  Antisense strand to SEQ ID NO: 1891910
ucacacacugcucaaguaa

SEQ ID NO: 1891912 - RNA, 19 nt, Artificial Sequence
  Description of Artificial Sequence: Synthetic oligonucleotide
  Sense strand starting at position 342 of SEQ ID NO: 1879225
gaagcugcuccugagagga

SEQ ID NO: 1891913 - RNA, 19 nt, Artificial Sequence
  Description of Artificial Sequence: Synthetic oligonucleotide
  Antisense strand to SEQ ID NO: 1891912
uccucucaggagcagcuuc

SEQ ID NO: 1891914 - RNA, 19 nt, Artificial Sequence
  Description of Artificial Sequence: Synthetic oligonucleotide
  Sense strand starting at position 357 of SEQ ID NO: 1879225
aggagaagccucugucucu

SEQ ID NO: 1891915 - RNA, 19 nt, Artificial Sequence
  Description of Artificial Sequence: Synthetic oligonucleotide
  Antisense strand to SEQ ID NO: 1891914
agagacagaggcuucuccu

SEQ ID NO: 1891916 - RNA, 19 nt, Artificial Sequence
  Description of Artificial Sequence: Synthetic oligonucleotide
  Sense strand starting at position 358 of SEQ ID NO: 1879225
ggagaagccucugucucua

SEQ ID NO: 1891917 - RNA, 19 nt, Artificial Sequence
  Description of Artificial Sequence: Synthetic oligonucleotide
  Antisense strand to SEQ ID NO: 1891916
uagagacagaggcuucucc

SEQ ID NO: 1891918 - RNA, 19 nt, Artificial Sequence
  Description of Artificial Sequence: Synthetic oligonucleotide
  Sense strand starting at position 2704 of SEQ ID NO: 1879225
ucuggauuauccgugucau

SEQ ID NO: 1891919 - RNA, 19 nt, Artificial Sequence
  Description of Artificial Sequence: Synthetic oligonucleotide
  Antisense strand to SEQ ID NO: 1891918
augacacggauaauccaga

SEQ ID NO: 1891920 - RNA, 19 nt, Artificial Sequence
  Description of Artificial Sequence: Synthetic oligonucleotide
  Sense strand starting at position 2705 of SEQ ID NO: 1879225
cuggauuauccgugucauu

SEQ ID NO: 1891921 - RNA, 19 nt, Artificial Sequence
  Description of Artificial Sequence: Synthetic oligonucleotide
  Antisense strand to SEQ ID NO: 1891920
aaugacacggauaauccag

SEQ ID NO: 1891922 - RNA, 19 nt, Artificial Sequence
  Description of Artificial Sequence: Synthetic oligonucleotide
  Sense strand starting at position 2756 of SEQ ID NO: 1879225
cugggauguguguauguga

SEQ ID NO: 1891923 - RNA, 19 nt, Artificial Sequence
  Description of Artificial Sequence: Synthetic oligonucleotide
  Antisense strand to SEQ ID NO: 1891922
ucacauacacacaucccag

SEQ ID NO: 1891924 - RNA, 19 nt, Artificial Sequence
  Description of Artificial Sequence: Synthetic oligonucleotide
  Sense strand starting at position 2838 of SEQ ID NO: 1879225
ccaggccacucucaagaau

SEQ ID NO: 1891925 - RNA, 19 nt, Artificial Sequence
  Description of Artificial Sequence: Synthetic oligonucleotide
  Antisense strand to SEQ ID NO: 1891924
auucuugagaguggccugg

SEQ ID NO: 1891926 - RNA, 19 nt, Artificial Sequence
  Description of Artificial Sequence: Synthetic oligonucleotide
  Sense strand starting at position 2841 of SEQ ID NO: 1879225
ggccacucucaagaauauc

SEQ ID NO: 1891927 - RNA, 19 nt, Artificial Sequence
  Description of Artificial Sequence: Synthetic oligonucleotide
  Antisense strand to SEQ ID NO: 1891926
gauauucuugagaguggcc

SEQ ID NO: 1891928 - RNA, 19 nt, Artificial Sequence
  Description of Artificial Sequence: Synthetic oligonucleotide
  Sense strand starting at position 2919 of SEQ ID NO: 1879225
agcccuuccuuuccagaga

SEQ ID NO: 1891929 - RNA, 19 nt, Artificial Sequence
  Description of Artificial Sequence: Synthetic oligonucleotide
  Antisense strand to SEQ ID NO: 1891928
ucucuggaaaggaagggcu

SEQ ID NO: 1891930 - RNA, 19 nt, Artificial Sequence
  Description of Artificial Sequence: Synthetic oligonucleotide
  Sense strand starting at position 2978 of SEQ ID NO: 1879225
ccaggcauugcuggagaau

SEQ ID NO: 1891931 - RNA, 19 nt, Artificial Sequence
  Description of Artificial Sequence: Synthetic oligonucleotide
  Antisense strand to SEQ ID NO: 1891930
auucuccagcaaugccugg

SEQ ID NO: 1891932 - RNA, 19 nt, Artificial Sequence
  Description of Artificial Sequence: Synthetic oligonucleotide
  Sense strand starting at position 2979 of SEQ ID NO: 1879225
caggcauugcuggagaaug

SEQ ID NO: 1891933 - RNA, 19 nt, Artificial Sequence
  Description of Artificial Sequence: Synthetic oligonucleotide
  Antisense strand to SEQ ID NO: 1891932
cauucuccagcaaugccug

SEQ ID NO: 1891934 - RNA, 19 nt, Artificial Sequence
  Description of Artificial Sequence: Synthetic oligonucleotide
  Sense strand starting at position 2981 of SEQ ID NO: 1879225
ggcauugcuggagaauguu

SEQ ID NO: 1891935 - RNA, 19 nt, Artificial Sequence
  Description of Artificial Sequence: Synthetic oligonucleotide
  Antisense strand to SEQ ID NO: 1891934
aacauucuccagcaaugcc

SEQ ID NO: 1891936 - RNA, 19 nt, Artificial Sequence
  Description of Artificial Sequence: Synthetic oligonucleotide
  Sense strand starting at position 3102 of SEQ ID NO: 1879225
gagcuagugucuugggaga

SEQ ID NO: 1891937 - RNA, 19 nt, Artificial Sequence
  Description of Artificial Sequence: Synthetic oligonucleotide
  Antisense strand to SEQ ID NO: 1891936
ucucccaagacacuagcuc

SEQ ID NO: 1891938 - RNA, 19 nt, Artificial Sequence
  Description of Artificial Sequence: Synthetic oligonucleotide
  Sense strand starting at position 3104 of SEQ ID NO: 1879225
gcuagugucuugggagaaa

SEQ ID NO: 1891939 - RNA, 19 nt, Artificial Sequence
  Description of Artificial Sequence: Synthetic oligonucleotide
  Antisense strand to SEQ ID NO: 1891938
uuucucccaagacacuagc

SEQ ID NO: 1891940 - RNA, 19 nt, Artificial Sequence
  Description of Artificial Sequence: Synthetic oligonucleotide
  Sense strand starting at position 3126 of SEQ ID NO: 1879225
gggaaaucucuacgaggua

SEQ ID NO: 1891941 - RNA, 19 nt, Artificial Sequence
  Description of Artificial Sequence: Synthetic oligonucleotide
  Antisense strand to SEQ ID NO: 1891940
uaccucguagagauuuccc

SEQ ID NO: 1891942 - RNA, 19 nt, Artificial Sequence
  Description of Artificial Sequence: Synthetic oligonucleotide
  Sense strand starting at position 3127 of SEQ ID NO: 1879225
ggaaaucucuacgagguac

SEQ ID NO: 1891943 - RNA, 19 nt, Artificial Sequence
  Description of Artificial Sequence: Synthetic oligonucleotide
  Antisense strand to SEQ ID NO: 1891942
guaccucguagagauuucc

SEQ ID NO: 1891944 - RNA, 19 nt, Artificial Sequence
  Description of Artificial Sequence: Synthetic oligonucleotide
  Sense strand starting at position 3194 of SEQ ID NO: 1879225
cuacaugaaugggacagaa

SEQ ID NO: 1891945 - RNA, 19 nt, Artificial Sequence
  Description of Artificial Sequence: Synthetic oligonucleotide
  Antisense strand to SEQ ID NO: 1891944
uucugucccauucauguag

SEQ ID NO: 1891946 - RNA, 19 nt, Artificial Sequence
  Description of Artificial Sequence: Synthetic oligonucleotide
  Sense strand starting at position 3290 of SEQ ID NO: 1879225
cuaucucauuguucugacu

SEQ ID NO: 1891947 - RNA, 19 nt, Artificial Sequence
  Description of Artificial Sequence: Synthetic oligonucleotide
  Antisense strand to SEQ ID NO: 1891946
agucagaacaaugagauag

SEQ ID NO: 1891948 - RNA, 19 nt, Artificial Sequence
  Description of Artificial Sequence: Synthetic oligonucleotide
  Sense strand starting at position 3351 of SEQ ID NO: 1879225
cucccuagcugaggaaaua

SEQ ID NO: 1891949 - RNA, 19 nt, Artificial Sequence
  Description of Artificial Sequence: Synthetic oligonucleotide
  Antisense strand to SEQ ID NO: 1891948
uauuuccucagcuagggag

SEQ ID NO: 1891950 - RNA, 19 nt, Artificial Sequence
  Description of Artificial Sequence: Synthetic oligonucleotide
  Sense strand starting at position 3452 of SEQ ID NO: 1879225
agugaaaugugcuugggag

SEQ ID NO: 1891951 - RNA, 19 nt, Artificial Sequence
  Description of Artificial Sequence: Synthetic oligonucleotide
  Antisense strand to SEQ ID NO: 1891950
cucccaagcacauuucacu

SEQ ID NO: 1891952 - RNA, 19 nt, Artificial Sequence
  Description of Artificial Sequence: Synthetic oligonucleotide
  Sense strand starting at position 3453 of SEQ ID NO: 1879225
gugaaaugugcuugggaga

SEQ ID NO: 1891953 - RNA, 19 nt, Artificial Sequence
  Description of Artificial Sequence: Synthetic oligonucleotide
  Antisense strand to SEQ ID NO: 1891952
ucucccaagcacauuucac

SEQ ID NO: 1891954 - RNA, 19 nt, Artificial Sequence
  Description of Artificial Sequence: Synthetic oligonucleotide
  Sense strand starting at position 3454 of SEQ ID NO: 1879225
ugaaaugugcuugggagaa

SEQ ID NO: 1891955 - RNA, 19 nt, Artificial Sequence
  Description of Artificial Sequence: Synthetic oligonucleotide
  Antisense strand to SEQ ID NO: 1891954
uucucccaagcacauuuca

SEQ ID NO: 1891956 - RNA, 19 nt, Artificial Sequence
  Description of Artificial Sequence: Synthetic oligonucleotide
  Sense strand starting at position 3456 of SEQ ID NO: 1879225
aaaugugcuugggagaauc

SEQ ID NO: 1891957 - RNA, 19 nt, Artificial Sequence
  Description of Artificial Sequence: Synthetic oligonucleotide
  Antisense strand to SEQ ID NO: 1891956
gauucucccaagcacauuu

SEQ ID NO: 1891958 - RNA, 19 nt, Artificial Sequence
  Description of Artificial Sequence: Synthetic oligonucleotide
  Sense strand starting at position 3530 of SEQ ID NO: 1879225
ugagaaacuuuacauauug

SEQ ID NO: 1891959 - RNA, 19 nt, Artificial Sequence
  Description of Artificial Sequence: Synthetic oligonucleotide
  Antisense strand to SEQ ID NO: 1891958
caauauguaaaguuucuca

SEQ ID NO: 1891960 - RNA, 19 nt, Artificial Sequence
  Description of Artificial Sequence: Synthetic oligonucleotide
  Sense strand starting at position 3538 of SEQ ID NO: 1879225
uuuacauauugcuaagaug

SEQ ID NO: 1891961 - RNA, 19 nt, Artificial Sequence
  Description of Artificial Sequence: Synthetic oligonucleotide
  Antisense strand to SEQ ID NO: 1891960
caucuuagcaauauguaaa

SEQ ID NO: 1891962 - RNA, 19 nt, Artificial Sequence
  Description of Artificial Sequence: Synthetic oligonucleotide
  Sense strand starting at position 3547 of SEQ ID NO: 1879225
ugcuaagaugccuggccaa

SEQ ID NO: 1891963 - RNA, 19 nt, Artificial Sequence
  Description of Artificial Sequence: Synthetic oligonucleotide
  Antisense strand to SEQ ID NO: 1891962
uuggccaggcaucuuagca

SEQ ID NO: 1891964 - RNA, 19 nt, Artificial Sequence
  Description of Artificial Sequence: Synthetic oligonucleotide
  Sense strand starting at position 3554 of SEQ ID NO: 1879225
augccuggccaaugaaaca

SEQ ID NO: 1891965 - RNA, 19 nt, Artificial Sequence
  Description of Artificial Sequence: Synthetic oligonucleotide
  Antisense strand to SEQ ID NO: 1891964
uguuucauuggccaggcau

SEQ ID NO: 1891966 - RNA, 19 nt, Artificial Sequence
  Description of Artificial Sequence: Synthetic oligonucleotide
  Sense strand starting at position 162 of SEQ ID NO: 1879226
guaacaggcucacuaaaua

SEQ ID NO: 1891967 - RNA, 19 nt, Artificial Sequence
  Description of Artificial Sequence: Synthetic oligonucleotide
  Antisense strand to SEQ ID NO: 1891966
uauuuagugagccuguuac

SEQ ID NO: 1891968 - RNA, 19 nt, Artificial Sequence
  Description of Artificial Sequence: Synthetic oligonucleotide
  Sense strand starting at position 212 of SEQ ID NO: 1879226
ggauaugaguucucucaaa

SEQ ID NO: 1891969 - RNA, 19 nt, Artificial Sequence
  Description of Artificial Sequence: Synthetic oligonucleotide
  Antisense strand to SEQ ID NO: 1891968
uuugagagaacucauaucc

SEQ ID NO: 1891970 - RNA, 19 nt, Artificial Sequence
  Description of Artificial Sequence: Synthetic oligonucleotide
  Sense strand starting at position 266 of SEQ ID NO: 1879226
aggacucuugaguguggga

SEQ ID NO: 1891971 - RNA, 19 nt, Artificial Sequence
  Description of Artificial Sequence: Synthetic oligonucleotide
  Antisense strand to SEQ ID NO: 1891970
ucccacacucaagaguccu

SEQ ID NO: 1891972 - RNA, 19 nt, Artificial Sequence
  Description of Artificial Sequence: Synthetic oligonucleotide
  Sense strand starting at position 287 of SEQ ID NO: 1879226
gacaaagucugguucucac

SEQ ID NO: 1891973 - RNA, 19 nt, Artificial Sequence
  Description of Artificial Sequence: Synthetic oligonucleotide
  Antisense strand to SEQ ID NO: 1891972
gugagaaccagacuuuguc

SEQ ID NO: 1891974 - RNA, 19 nt, Artificial Sequence
  Description of Artificial Sequence: Synthetic oligonucleotide
  Sense strand starting at position 367 of SEQ ID NO: 1879226
gguagugucaacugaugaa

SEQ ID NO: 1891975 - RNA, 19 nt, Artificial Sequence
  Description of Artificial Sequence: Synthetic oligonucleotide
  Antisense strand to SEQ ID NO: 1891974
uucaucaguugacacuacc

SEQ ID NO: 1891976 - RNA, 19 nt, Artificial Sequence
  Description of Artificial Sequence: Synthetic oligonucleotide
  Sense strand starting at position 371 of SEQ ID NO: 1879226
gugucaacugaugaagguu

SEQ ID NO: 1891977 - RNA, 19 nt, Artificial Sequence
  Description of Artificial Sequence: Synthetic oligonucleotide
  Antisense strand to SEQ ID NO: 1891976
aaccuucaucaguugacac

SEQ ID NO: 1891978 - RNA, 19 nt, Artificial Sequence
  Description of Artificial Sequence: Synthetic oligonucleotide
  Sense strand starting at position 563 of SEQ ID NO: 1879226
gagaacaagucaguguaga

SEQ ID NO: 1891979 - RNA, 19 nt, Artificial Sequence
  Description of Artificial Sequence: Synthetic oligonucleotide
  Antisense strand to SEQ ID NO: 1891978
ucuacacugacuuguucuc

SEQ ID NO: 1891980 - RNA, 19 nt, Artificial Sequence
  Description of Artificial Sequence: Synthetic oligonucleotide
  Sense strand starting at position 564 of SEQ ID NO: 1879226
agaacaagucaguguagac

SEQ ID NO: 1891981 - RNA, 19 nt, Artificial Sequence
  Description of Artificial Sequence: Synthetic oligonucleotide
  Antisense strand to SEQ ID NO: 1891980
gucuacacugacuuguucu

SEQ ID NO: 1891982 - RNA, 19 nt, Artificial Sequence
  Description of Artificial Sequence: Synthetic oligonucleotide
  Sense strand starting at position 613 of SEQ ID NO: 1879226
uccaguugucuccauaaga

SEQ ID NO: 1891983 - RNA, 19 nt, Artificial Sequence
  Description of Artificial Sequence: Synthetic oligonucleotide
  Antisense strand to SEQ ID NO: 1891982
ucuuauggagacaacugga

SEQ ID NO: 1891984 - RNA, 19 nt, Artificial Sequence
  Description of Artificial Sequence: Synthetic oligonucleotide
  Sense strand starting at position 638 of SEQ ID NO: 1879226
gggcaacucaaaggguauu

SEQ ID NO: 1891985 - RNA, 19 nt, Artificial Sequence
  Description of Artificial Sequence: Synthetic oligonucleotide
  Antisense strand to SEQ ID NO: 1891984
aauacccuuugaguugccc

SEQ ID NO: 1891986 - RNA, 19 nt, Artificial Sequence
  Description of Artificial Sequence: Synthetic oligonucleotide
  Sense strand starting at position 648 of SEQ ID NO: 1879226
aaggguauuuaggaaauga

SEQ ID NO: 1891987 - RNA, 19 nt, Artificial Sequence
  Description of Artificial Sequence: Synthetic oligonucleotide
  Antisense strand to SEQ ID NO: 1891986
ucauuuccuaaauacccuu

SEQ ID NO: 1891988 - RNA, 19 nt, Artificial Sequence
  Description of Artificial Sequence: Synthetic oligonucleotide
  Sense strand starting at position 686 of SEQ ID NO: 1879226
aguguaagaguaugcauga

SEQ ID NO: 1891989 - RNA, 19 nt, Artificial Sequence
  Description of Artificial Sequence: Synthetic oligonucleotide
  Antisense strand to SEQ ID NO: 1891988
ucaugcauacucuuacacu

SEQ ID NO: 1891990 - RNA, 19 nt, Artificial Sequence
  Description of Artificial Sequence: Synthetic oligonucleotide
  Sense strand starting at position 693 of SEQ ID NO: 1879226
gaguaugcaugaucuggaa

SEQ ID NO: 1891991 - RNA, 19 nt, Artificial Sequence
  Description of Artificial Sequence: Synthetic oligonucleotide
  Antisense strand to SEQ ID NO: 1891990
uuccagaucaugcauacuc

SEQ ID NO: 1891992 - RNA, 19 nt, Artificial Sequence
  Description of Artificial Sequence: Synthetic oligonucleotide
  Sense strand starting at position 695 of SEQ ID NO: 1879226
guaugcaugaucuggaaga

SEQ ID NO: 1891993 - RNA, 19 nt, Artificial Sequence
  Description of Artificial Sequence: Synthetic oligonucleotide
  Antisense strand to SEQ ID NO: 1891992
ucuuccagaucaugcauac

SEQ ID NO: 1891994 - RNA, 19 nt, Artificial Sequence
  Description of Artificial Sequence: Synthetic oligonucleotide
  Sense strand starting at position 714 of SEQ ID NO: 1879226
agugucugcuuuccuauuu

SEQ ID NO: 1891995 - RNA, 19 nt, Artificial Sequence
  Description of Artificial Sequence: Synthetic oligonucleotide
  Antisense strand to SEQ ID NO: 1891994
aaauaggaaagcagacacu

SEQ ID NO: 1891996 - RNA, 19 nt, Artificial Sequence
  Description of Artificial Sequence: Synthetic oligonucleotide
  Sense strand starting at position 715 of SEQ ID NO: 1879226
gugucugcuuuccuauuua

SEQ ID NO: 1891997 - RNA, 19 nt, Artificial Sequence
  Description of Artificial Sequence: Synthetic oligonucleotide
  Antisense strand to SEQ ID NO: 1891996
uaaauaggaaagcagacac

SEQ ID NO: 1891998 - RNA, 19 nt, Artificial Sequence
  Description of Artificial Sequence: Synthetic oligonucleotide
  Sense strand starting at position 940 of SEQ ID NO: 1879226
uggagauccucacuugcca

SEQ ID NO: 1891999 - RNA, 19 nt, Artificial Sequence
  Description of Artificial Sequence: Synthetic oligonucleotide
  Antisense strand to SEQ ID NO: 1891998
uggcaagugaggaucucca

SEQ ID NO: 1892000 - RNA, 19 nt, Artificial Sequence
  Description of Artificial Sequence: Synthetic oligonucleotide
  Sense strand starting at position 1001 of SEQ ID NO: 1879226
gcaagaguaggaugugaac

SEQ ID NO: 1892001 - RNA, 19 nt, Artificial Sequence
  Description of Artificial Sequence: Synthetic oligonucleotide
  Antisense strand to SEQ ID NO: 1892000
guucacauccuacucuugc

SEQ ID NO: 1892002 - RNA, 19 nt, Artificial Sequence
  Description of Artificial Sequence: Synthetic oligonucleotide
  Sense strand starting at position 2203 of SEQ ID NO: 1879226
uugauugggcgucacuaca

SEQ ID NO: 1892003 - RNA, 19 nt, Artificial Sequence
  Description of Artificial Sequence: Synthetic oligonucleotide
  Antisense strand to SEQ ID NO: 1892002
uguagugacgcccaaucaa

SEQ ID NO: 1892004 - RNA, 19 nt, Artificial Sequence
  Description of Artificial Sequence: Synthetic oligonucleotide
  Sense strand starting at position 3062 of SEQ ID NO: 1879226
ccucucuccggagaaagua

SEQ ID NO: 1892005 - RNA, 19 nt, Artificial Sequence
  Description of Artificial Sequence: Synthetic oligonucleotide
  Antisense strand to SEQ ID NO: 1892004
uacuuucuccggagagagg

SEQ ID NO: 1892006 - RNA, 19 nt, Artificial Sequence
  Description of Artificial Sequence: Synthetic oligonucleotide
  Sense strand starting at position 3098 of SEQ ID NO: 1879226
gcagguaauaccggaaaca

SEQ ID NO: 1892007 - RNA, 19 nt, Artificial Sequence
  Description of Artificial Sequence: Synthetic oligonucleotide
  Antisense strand to SEQ ID NO: 1892006
uguuuccgguauuaccugc

SEQ ID NO: 1892008 - RNA, 19 nt, Artificial Sequence
  Description of Artificial Sequence: Synthetic oligonucleotide
  Sense strand starting at position 3191 of SEQ ID NO: 1879226
cccucaaugugaucuugua

SEQ ID NO: 1892009 - RNA, 19 nt, Artificial Sequence
  Description of Artificial Sequence: Synthetic oligonucleotide
  Antisense strand to SEQ ID NO: 1892008
uacaagaucacauugaggg

SEQ ID NO: 1892010 - RNA, 19 nt, Artificial Sequence
  Description of Artificial Sequence: Synthetic oligonucleotide
  Sense strand starting at position 3208 of SEQ ID NO: 1879226
uacgguuugcaguaagaac

SEQ ID NO: 1892011 - RNA, 19 nt, Artificial Sequence
  Description of Artificial Sequence: Synthetic oligonucleotide
  Antisense strand to SEQ ID NO: 1892010
guucuuacugcaaaccgua

SEQ ID NO: 1892012 - RNA, 19 nt, Artificial Sequence
  Description of Artificial Sequence: Synthetic oligonucleotide
  Sense strand starting at position 3259 of SEQ ID NO: 1879226
gcuacuguuggugacaacu

SEQ ID NO: 1892013 - RNA, 19 nt, Artificial Sequence
  Description of Artificial Sequence: Synthetic oligonucleotide
  Antisense strand to SEQ ID NO: 1892012
aguugucaccaacaguagc

SEQ ID NO: 1892014 - RNA, 19 nt, Artificial Sequence
  Description of Artificial Sequence: Synthetic oligonucleotide
  Sense strand starting at position 3265 of SEQ ID NO: 1879226
guuggugacaacuagcaaa

SEQ ID NO: 1892015 - RNA, 19 nt, Artificial Sequence
  Description of Artificial Sequence: Synthetic oligonucleotide
  Antisense strand to SEQ ID NO: 1892014
uuugcuaguugucaccaac

SEQ ID NO: 1892016 - RNA, 19 nt, Artificial Sequence
  Description of Artificial Sequence: Synthetic oligonucleotide
  Sense strand starting at position 3300 of SEQ ID NO: 1879226
cguucaaguguucuggcau

SEQ ID NO: 1892017 - RNA, 19 nt, Artificial Sequence
  Description of Artificial Sequence: Synthetic oligonucleotide
  Antisense strand to SEQ ID NO: 1892016
augccagaacacuugaacg

SEQ ID NO: 1892018 - RNA, 19 nt, Artificial Sequence
  Description of Artificial Sequence: Synthetic oligonucleotide
  Sense strand starting at position 3307 of SEQ ID NO: 1879226
guguucuggcauuaagauu

SEQ ID NO: 1892019 - RNA, 19 nt, Artificial Sequence
  Description of Artificial Sequence: Synthetic oligonucleotide
  Antisense strand to SEQ ID NO: 1892018
aaucuuaaugccagaacac

SEQ ID NO: 1892020 - RNA, 19 nt, Artificial Sequence
  Description of Artificial Sequence: Synthetic oligonucleotide
  Sense strand starting at position 3313 of SEQ ID NO: 1879226
uggcauuaagauugacugu

SEQ ID NO: 1892021 - RNA, 19 nt, Artificial Sequence
  Description of Artificial Sequence: Synthetic oligonucleotide
  Antisense strand to SEQ ID NO: 1892020
acagucaaucuuaaugcca

SEQ ID NO: 1892022 - RNA, 19 nt, Artificial Sequence
  Description of Artificial Sequence: Synthetic oligonucleotide
  Sense strand starting at position 3335 of SEQ ID NO: 1879226
acugaauucugugccaauc

SEQ ID NO: 1892023 - RNA, 19 nt, Artificial Sequence
  Description of Artificial Sequence: Synthetic oligonucleotide
  Antisense strand to SEQ ID NO: 1892022
gauuggcacagaauucagu

SEQ ID NO: 1892024 - RNA, 19 nt, Artificial Sequence
  Description of Artificial Sequence: Synthetic oligonucleotide
  Sense strand starting at position 3386 of SEQ ID NO: 1879226
aaguaagaaugucuuaggu

SEQ ID NO: 1892025 - RNA, 19 nt, Artificial Sequence
  Description of Artificial Sequence: Synthetic oligonucleotide
  Antisense strand to SEQ ID NO: 1892024
accuaagacauucuuacuu

SEQ ID NO: 1892026 - RNA, 19 nt, Artificial Sequence
  Description of Artificial Sequence: Synthetic oligonucleotide
  Sense strand starting at position 3526 of SEQ ID NO: 1879226
cgauuagcauucuuaauag

SEQ ID NO: 1892027 - RNA, 19 nt, Artificial Sequence
  Description of Artificial Sequence: Synthetic oligonucleotide
  Antisense strand to SEQ ID NO: 1892026
cuauuaagaaugcuaaucg

SEQ ID NO: 1892028 - RNA, 19 nt, Artificial Sequence
  Description of Artificial Sequence: Synthetic oligonucleotide
  Sense strand starting at position 3557 of SEQ ID NO: 1879226
cgauuuguguggagaaacg

SEQ ID NO: 1892029 - RNA, 19 nt, Artificial Sequence
  Description of Artificial Sequence: Synthetic oligonucleotide
  Antisense strand to SEQ ID NO: 1892028
cguuucuccacacaaaucg

SEQ ID NO: 1892030 - RNA, 19 nt, Artificial Sequence
  Description of Artificial Sequence: Synthetic oligonucleotide
  Sense strand starting at position 3564 of SEQ ID NO: 1879226
uguggagaaacggauucuu

SEQ ID NO: 1892031 - RNA, 19 nt, Artificial Sequence
  Description of Artificial Sequence: Synthetic oligonucleotide
  Antisense strand to SEQ ID NO: 1892030
aagaauccguuucuccaca

SEQ ID NO: 1892032 - RNA, 19 nt, Artificial Sequence
  Description of Artificial Sequence: Synthetic oligonucleotide
  Sense strand starting at position 3608 of SEQ ID NO: 1879226
auuaguauauuccuuucga

SEQ ID NO: 1892033 - RNA, 19 nt, Artificial Sequence
  Description of Artificial Sequence: Synthetic oligonucleotide
  Antisense strand to SEQ ID NO: 1892032
ucgaaaggaauauacuaau

SEQ ID NO: 1892034 - RNA, 19 nt, Artificial Sequence
  Description of Artificial Sequence: Synthetic oligonucleotide
  Sense strand starting at position 3609 of SEQ ID NO: 1879226
uuaguauauuccuuucgaa

SEQ ID NO: 1892035 - RNA, 19 nt, Artificial Sequence
  Description of Artificial Sequence: Synthetic oligonucleotide
  Antisense strand to SEQ ID NO: 1892034
uucgaaaggaauauacuaa

SEQ ID NO: 1892036 - RNA, 19 nt, Artificial Sequence
  Description of Artificial Sequence: Synthetic oligonucleotide
  Sense strand starting at position 3696 of SEQ ID NO: 1879226
cugggaaucuguucuaagg

SEQ ID NO: 1892037 - RNA, 19 nt, Artificial Sequence
  Description of Artificial Sequence: Synthetic oligonucleotide
  Antisense strand to SEQ ID NO: 1892036
ccuuagaacagauucccag

SEQ ID NO: 1892038 - RNA, 19 nt, Artificial Sequence
  Description of Artificial Sequence: Synthetic oligonucleotide
  Sense strand starting at position 3765 of SEQ ID NO: 1879226
ggaucacuguacuuaacua

SEQ ID NO: 1892039 - RNA, 19 nt, Artificial Sequence
  Description of Artificial Sequence: Synthetic oligonucleotide
  Antisense strand to SEQ ID NO: 1892038
uaguuaaguacagugaucc

SEQ ID NO: 1892040 - RNA, 19 nt, Artificial Sequence
  Description of Artificial Sequence: Synthetic oligonucleotide
  Sense strand starting at position 3820 of SEQ ID NO: 1879226
uuggguauuuaguaaauug

SEQ ID NO: 1892041 - RNA, 19 nt, Artificial Sequence
  Description of Artificial Sequence: Synthetic oligonucleotide
  Antisense strand to SEQ ID NO: 1892040
caauuuacuaaauacccaa

SEQ ID NO: 1892042 - RNA, 19 nt, Artificial Sequence
  Description of Artificial Sequence: Synthetic oligonucleotide
  Sense strand starting at position 3859 of SEQ ID NO: 1879226
acauuaugguaguuguaga

SEQ ID NO: 1892043 - RNA, 19 nt, Artificial Sequence
  Description of Artificial Sequence: Synthetic oligonucleotide
  Antisense strand to SEQ ID NO: 1892042
ucuacaacuaccauaaugu

SEQ ID NO: 1892044 - RNA, 19 nt, Artificial Sequence
  Description of Artificial Sequence: Synthetic oligonucleotide
  Sense strand starting at position 3866 of SEQ ID NO: 1879226
gguaguuguagacaucaga

SEQ ID NO: 1892045 - RNA, 19 nt, Artificial Sequence
  Description of Artificial Sequence: Synthetic oligonucleotide
  Antisense strand to SEQ ID NO: 1892044
ucugaugucuacaacuacc

SEQ ID NO: 1892046 - RNA, 19 nt, Artificial Sequence
  Description of Artificial Sequence: Synthetic oligonucleotide
  Sense strand starting at position 62 of SEQ ID NO: 1879227
agacucaucuaggcaacau

SEQ ID NO: 1892047 - RNA, 19 nt, Artificial Sequence
  Description of Artificial Sequence: Synthetic oligonucleotide
  Antisense strand to SEQ ID NO: 1892046
auguugccuagaugagucu

SEQ ID NO: 1892048 - RNA, 19 nt, Artificial Sequence
  Description of Artificial Sequence: Synthetic oligonucleotide
  Sense strand starting at position 273 of SEQ ID NO: 1879227
aaguguaagauguggcaau

SEQ ID NO: 1892049 - RNA, 19 nt, Artificial Sequence
  Description of Artificial Sequence: Synthetic oligonucleotide
  Antisense strand to SEQ ID NO: 1892048
auugccacaucuuacacuu

SEQ ID NO: 1892050 - RNA, 19 nt, Artificial Sequence
  Description of Artificial Sequence: Synthetic oligonucleotide
  Sense strand starting at position 554 of SEQ ID NO: 1879227
gggcacuggccagggauau

SEQ ID NO: 1892051 - RNA, 19 nt, Artificial Sequence
  Description of Artificial Sequence: Synthetic oligonucleotide
  Antisense strand to SEQ ID NO: 1892050
auaucccuggccagugccc

SEQ ID NO: 1892052 - RNA, 19 nt, Artificial Sequence
  Description of Artificial Sequence: Synthetic oligonucleotide
  Sense strand starting at position 597 of SEQ ID NO: 1879227
caccucaugguaggaaaua

SEQ ID NO: 1892053 - RNA, 19 nt, Artificial Sequence
  Description of Artificial Sequence: Synthetic oligonucleotide
  Antisense strand to SEQ ID NO: 1892052
uauuuccuaccaugaggug

SEQ ID NO: 1892054 - RNA, 19 nt, Artificial Sequence
  Description of Artificial Sequence: Synthetic oligonucleotide
  Sense strand starting at position 598 of SEQ ID NO: 1879227
accucaugguaggaaauau

SEQ ID NO: 1892055 - RNA, 19 nt, Artificial Sequence
  Description of Artificial Sequence: Synthetic oligonucleotide
  Antisense strand to SEQ ID NO: 1892054
auauuuccuaccaugaggu

SEQ ID NO: 1892056 - RNA, 19 nt, Artificial Sequence
  Description of Artificial Sequence: Synthetic oligonucleotide
  Sense strand starting at position 634 of SEQ ID NO: 1879227
gccugugaugagggucaaa

SEQ ID NO: 1892057 - RNA, 19 nt, Artificial Sequence
  Description of Artificial Sequence: Synthetic oligonucleotide
  Antisense strand to SEQ ID NO: 1892056
uuugacccucaucacaggc

SEQ ID NO: 1892058 - RNA, 19 nt, Artificial Sequence
  Description of Artificial Sequence: Synthetic oligonucleotide
  Sense strand starting at position 858 of SEQ ID NO: 1879227
uccuuaugacaguauuauu

SEQ ID NO: 1892059 - RNA, 19 nt, Artificial Sequence
  Description of Artificial Sequence: Synthetic oligonucleotide
  Antisense strand to SEQ ID NO: 1892058
aauaauacugucauaagga

SEQ ID NO: 1892060 - RNA, 19 nt, Artificial Sequence
  Description of Artificial Sequence: Synthetic oligonucleotide
  Sense strand starting at position 972 of SEQ ID NO: 1879227
ucccgaaaccucuaugcua

SEQ ID NO: 1892061 - RNA, 19 nt, Artificial Sequence
  Description of Artificial Sequence: Synthetic oligonucleotide
  Antisense strand to SEQ ID NO: 1892060
uagcauagagguuucggga

SEQ ID NO: 1892062 - RNA, 19 nt, Artificial Sequence
  Description of Artificial Sequence: Synthetic oligonucleotide
  Sense strand starting at position 974 of SEQ ID NO: 1879227
ccgaaaccucuaugcuaga

SEQ ID NO: 1892063 - RNA, 19 nt, Artificial Sequence
  Description of Artificial Sequence: Synthetic oligonucleotide
  Antisense strand to SEQ ID NO: 1892062
ucuagcauagagguuucgg

SEQ ID NO: 1892064 - RNA, 19 nt, Artificial Sequence
  Description of Artificial Sequence: Synthetic oligonucleotide
  Sense strand starting at position 975 of SEQ ID NO: 1879227
cgaaaccucuaugcuagaa

SEQ ID NO: 1892065 - RNA, 19 nt, Artificial Sequence
  Description of Artificial Sequence: Synthetic oligonucleotide
  Antisense strand to SEQ ID NO: 1892064
uucuagcauagagguuucg

SEQ ID NO: 1892066 - RNA, 19 nt, Artificial Sequence
  Description of Artificial Sequence: Synthetic oligonucleotide
  Sense strand starting at position 1010 of SEQ ID NO: 1879227
gccuccuuccucgcaagua

SEQ ID NO: 1892067 - RNA, 19 nt, Artificial Sequence
  Description of Artificial Sequence: Synthetic oligonucleotide
  Antisense strand to SEQ ID NO: 1892066
uacuugcgaggaaggaggc

SEQ ID NO: 1892068 - RNA, 19 nt, Artificial Sequence
  Description of Artificial Sequence: Synthetic oligonucleotide
  Sense strand starting at position 1298 of SEQ ID NO: 1879227
aauacuugccucugacguu

SEQ ID NO: 1892069 - RNA, 19 nt, Artificial Sequence
  Description of Artificial Sequence: Synthetic oligonucleotide
  Antisense strand to SEQ ID NO: 1892068
aacgucagaggcaaguauu

SEQ ID NO: 1892070 - RNA, 19 nt, Artificial Sequence
  Description of Artificial Sequence: Synthetic oligonucleotide
  Sense strand starting at position 1342 of SEQ ID NO: 1879227
ucagucugauguucuccaa

SEQ ID NO: 1892071 - RNA, 19 nt, Artificial Sequence
  Description of Artificial Sequence: Synthetic oligonucleotide
  Antisense strand to SEQ ID NO: 1892070
uuggagaacaucagacuga

SEQ ID NO: 1892072 - RNA, 19 nt, Artificial Sequence
  Description of Artificial Sequence: Synthetic oligonucleotide
  Sense strand starting at position 1345 of SEQ ID NO: 1879227
gucugauguucuccaauuc

SEQ ID NO: 1892073 - RNA, 19 nt, Artificial Sequence
  Description of Artificial Sequence: Synthetic oligonucleotide
  Antisense strand to SEQ ID NO: 1892072
gaauuggagaacaucagac

SEQ ID NO: 1892074 - RNA, 19 nt, Artificial Sequence
  Description of Artificial Sequence: Synthetic oligonucleotide
  Sense strand starting at position 1381 of SEQ ID NO: 1879227
caaaguucucaagaugugu

SEQ ID NO: 1892075 - RNA, 19 nt, Artificial Sequence
  Description of Artificial Sequence: Synthetic oligonucleotide
  Antisense strand to SEQ ID NO: 1892074
acacaucuugagaacuuug

SEQ ID NO: 1892076 - RNA, 19 nt, Artificial Sequence
  Description of Artificial Sequence: Synthetic oligonucleotide
  Sense strand starting at position 1385 of SEQ ID NO: 1879227
guucucaagaugugucuca

SEQ ID NO: 1892077 - RNA, 19 nt, Artificial Sequence
  Description of Artificial Sequence: Synthetic oligonucleotide
  Antisense strand to SEQ ID NO: 1892076
ugagacacaucuugagaac

SEQ ID NO: 1892078 - RNA, 19 nt, Artificial Sequence
  Description of Artificial Sequence: Synthetic oligonucleotide
  Sense strand starting at position 1451 of SEQ ID NO: 1879227
cugaguauggcauggaauc

SEQ ID NO: 1892079 - RNA, 19 nt, Artificial Sequence
  Description of Artificial Sequence: Synthetic oligonucleotide
  Antisense strand to SEQ ID NO: 1892078
gauuccaugccauacucag

SEQ ID NO: 1892080 - RNA, 19 nt, Artificial Sequence
  Description of Artificial Sequence: Synthetic oligonucleotide
  Sense strand starting at position 1462 of SEQ ID NO: 1879227
auggaaucgcuuuagcgaa

SEQ ID NO: 1892081 - RNA, 19 nt, Artificial Sequence
  Description of Artificial Sequence: Synthetic oligonucleotide
  Antisense strand to SEQ ID NO: 1892080
uucgcuaaagcgauuccau

SEQ ID NO: 1892082 - RNA, 19 nt, Artificial Sequence
  Description of Artificial Sequence: Synthetic oligonucleotide
  Sense strand starting at position 1488 of SEQ ID NO: 1879227
cuaagagguguuugggauu

SEQ ID NO: 1892083 - RNA, 19 nt, Artificial Sequence
  Description of Artificial Sequence: Synthetic oligonucleotide
  Antisense strand to SEQ ID NO: 1892082
aaucccaaacaccucuuag

SEQ ID NO: 1892084 - RNA, 19 nt, Artificial Sequence
  Description of Artificial Sequence: Synthetic oligonucleotide
  Sense strand starting at position 1623 of SEQ ID NO: 1879227
ccuggauguccucgaucau

SEQ ID NO: 1892085 - RNA, 19 nt, Artificial Sequence
  Description of Artificial Sequence: Synthetic oligonucleotide
  Antisense strand to SEQ ID NO: 1892084
augaucgaggacauccagg

SEQ ID NO: 1892086 - RNA, 19 nt, Artificial Sequence
  Description of Artificial Sequence: Synthetic oligonucleotide
  Sense strand starting at position 1624 of SEQ ID NO: 1879227
cuggauguccucgaucaua

SEQ ID NO: 1892087 - RNA, 19 nt, Artificial Sequence
  Description of Artificial Sequence: Synthetic oligonucleotide
  Antisense strand to SEQ ID NO: 1892086
uaugaucgaggacauccag

SEQ ID NO: 1892088 - RNA, 19 nt, Artificial Sequence
  Description of Artificial Sequence: Synthetic oligonucleotide
  Sense strand starting at position 1758 of SEQ ID NO: 1879227
cgaguagccaacuaagacu

SEQ ID NO: 1892089 - RNA, 19 nt, Artificial Sequence
  Description of Artificial Sequence: Synthetic oligonucleotide
  Antisense strand to SEQ ID NO: 1892088
agucuuaguuggcuacucg

SEQ ID NO: 1892090 - RNA, 19 nt, Artificial Sequence
  Description of Artificial Sequence: Synthetic oligonucleotide
  Sense strand starting at position 2209 of SEQ ID NO: 1879227
caaggauucgcucuugcgu

SEQ ID NO: 1892091 - RNA, 19 nt, Artificial Sequence
  Description of Artificial Sequence: Synthetic oligonucleotide
  Antisense strand to SEQ ID NO: 1892090
acgcaagagcgaauccuug

SEQ ID NO: 1892092 - RNA, 19 nt, Artificial Sequence
  Description of Artificial Sequence: Synthetic oligonucleotide
  Sense strand starting at position 2583 of SEQ ID NO: 1879227
cucagaaucguccuugcgu

SEQ ID NO: 1892093 - RNA, 19 nt, Artificial Sequence
  Description of Artificial Sequence: Synthetic oligonucleotide
  Antisense strand to SEQ ID NO: 1892092
acgcaaggacgauucugag

SEQ ID NO: 1892094 - RNA, 19 nt, Artificial Sequence
  Description of Artificial Sequence: Synthetic oligonucleotide
  Sense strand starting at position 2814 of SEQ ID NO: 1879227
cgggcccuucgccagaauu

SEQ ID NO: 1892095 - RNA, 19 nt, Artificial Sequence
  Description of Artificial Sequence: Synthetic oligonucleotide
  Antisense strand to SEQ ID NO: 1892094
aauucuggcgaagggcccg

SEQ ID NO: 1892096 - RNA, 19 nt, Artificial Sequence
  Description of Artificial Sequence: Synthetic oligonucleotide
  Sense strand starting at position 2909 of SEQ ID NO: 1879227
gugaucugucccgcccauu

SEQ ID NO: 1892097 - RNA, 19 nt, Artificial Sequence
  Description of Artificial Sequence: Synthetic oligonucleotide
  Antisense strand to SEQ ID NO: 1892096
aaugggcgggacagaucac

SEQ ID NO: 1892098 - RNA, 19 nt, Artificial Sequence
  Description of Artificial Sequence: Synthetic oligonucleotide
  Sense strand starting at position 3018 of SEQ ID NO: 1879227
gcaguugacuguuccaaac

SEQ ID NO: 1892099 - RNA, 19 nt, Artificial Sequence
  Description of Artificial Sequence: Synthetic oligonucleotide
  Antisense strand to SEQ ID NO: 1892098
guuuggaacagucaacugc

SEQ ID NO: 1892100 - RNA, 19 nt, Artificial Sequence
  Description of Artificial Sequence: Synthetic oligonucleotide
  Sense strand starting at position 3136 of SEQ ID NO: 1879227
gcagaaaucuaguccugua

SEQ ID NO: 1892101 - RNA, 19 nt, Artificial Sequence
  Description of Artificial Sequence: Synthetic oligonucleotide
  Antisense strand to SEQ ID NO: 1892100
uacaggacuagauuucugc

SEQ ID NO: 1892102 - RNA, 19 nt, Artificial Sequence
  Description of Artificial Sequence: Synthetic oligonucleotide
  Sense strand starting at position 3198 of SEQ ID NO: 1879227
aaucguuucuguuuacuga

SEQ ID NO: 1892103 - RNA, 19 nt, Artificial Sequence
  Description of Artificial Sequence: Synthetic oligonucleotide
  Antisense strand to SEQ ID NO: 1892102
ucaguaaacagaaacgauu

SEQ ID NO: 1892104 - RNA, 19 nt, Artificial Sequence
  Description of Artificial Sequence: Synthetic oligonucleotide
  Sense strand starting at position 3211 of SEQ ID NO: 1879227
uacugagcauuugcuaagu

SEQ ID NO: 1892105 - RNA, 19 nt, Artificial Sequence
  Description of Artificial Sequence: Synthetic oligonucleotide
  Antisense strand to SEQ ID NO: 1892104
acuuagcaaaugcucagua

SEQ ID NO: 1892106 - RNA, 19 nt, Artificial Sequence
  Description of Artificial Sequence: Synthetic oligonucleotide
  Sense strand starting at position 3343 of SEQ ID NO: 1879227
cagggaaacgaauguuuaa

SEQ ID NO: 1892107 - RNA, 19 nt, Artificial Sequence
  Description of Artificial Sequence: Synthetic oligonucleotide
  Antisense strand to SEQ ID NO: 1892106
uuaaacauucguuucccug

SEQ ID NO: 1892108 - RNA, 19 nt, Artificial Sequence
  Description of Artificial Sequence: Synthetic oligonucleotide
  Sense strand starting at position 3572 of SEQ ID NO: 1879227
uuacauuccaguggaagga

SEQ ID NO: 1892109 - RNA, 19 nt, Artificial Sequence
  Description of Artificial Sequence: Synthetic oligonucleotide
  Antisense strand to SEQ ID NO: 1892108
uccuuccacuggaauguaa

SEQ ID NO: 1892110 - RNA, 19 nt, Artificial Sequence
  Description of Artificial Sequence: Synthetic oligonucleotide
  Sense strand starting at position 3587 of SEQ ID NO: 1879227
aggaucaggugauaaacua

SEQ ID NO: 1892111 - RNA, 19 nt, Artificial Sequence
  Description of Artificial Sequence: Synthetic oligonucleotide
  Antisense strand to SEQ ID NO: 1892110
uaguuuaucaccugauccu

SEQ ID NO: 1892112 - RNA, 19 nt, Artificial Sequence
  Description of Artificial Sequence: Synthetic oligonucleotide
  Sense strand starting at position 3689 of SEQ ID NO: 1879227
ucuuuauauccgcaaggga

SEQ ID NO: 1892113 - RNA, 19 nt, Artificial Sequence
  Description of Artificial Sequence: Synthetic oligonucleotide
  Antisense strand to SEQ ID NO: 1892112
ucccuugcggauauaaaga

SEQ ID NO: 1892114 - RNA, 19 nt, Artificial Sequence
  Description of Artificial Sequence: Synthetic oligonucleotide
  Sense strand starting at position 3698 of SEQ ID NO: 1879227
ccgcaagggaucuaucuca

SEQ ID NO: 1892115 - RNA, 19 nt, Artificial Sequence
  Description of Artificial Sequence: Synthetic oligonucleotide
  Antisense strand to SEQ ID NO: 1892114
ugagauagaucccuugcgg

SEQ ID NO: 1892116 - RNA, 19 nt, Artificial Sequence
  Description of Artificial Sequence: Synthetic oligonucleotide
  Sense strand starting at position 3831 of SEQ ID NO: 1879227
uucgguaaacgggauuaaa

SEQ ID NO: 1892117 - RNA, 19 nt, Artificial Sequence
  Description of Artificial Sequence: Synthetic oligonucleotide
  Antisense strand to SEQ ID NO: 1892116
uuuaaucccguuuaccgaa

SEQ ID NO: 1892118 - RNA, 19 nt, Artificial Sequence
  Description of Artificial Sequence: Synthetic oligonucleotide
  Sense strand starting at position 3850 of SEQ ID NO: 1879227
aguccuggauucucucaaa

SEQ ID NO: 1892119 - RNA, 19 nt, Artificial Sequence
  Description of Artificial Sequence: Synthetic oligonucleotide
  Antisense strand to SEQ ID NO: 1892118
uuugagagaauccaggacu

SEQ ID NO: 1892120 - RNA, 19 nt, Artificial Sequence
  Description of Artificial Sequence: Synthetic oligonucleotide
  Sense strand starting at position 3908 of SEQ ID NO: 1879227
gauucuaggccuugggcaa

SEQ ID NO: 1892121 - RNA, 19 nt, Artificial Sequence
  Description of Artificial Sequence: Synthetic oligonucleotide
  Antisense strand to SEQ ID NO: 1892120
uugcccaaggccuagaauc

SEQ ID NO: 1892122 - RNA, 19 nt, Artificial Sequence
  Description of Artificial Sequence: Synthetic oligonucleotide
  Sense strand starting at position 3968 of SEQ ID NO: 1879227
gcaggaguuggagaguuaa

SEQ ID NO: 1892123 - RNA, 19 nt, Artificial Sequence
  Description of Artificial Sequence: Synthetic oligonucleotide
  Antisense strand to SEQ ID NO: 1892122
uuaacucuccaacuccugc

SEQ ID NO: 1892124 - RNA, 19 nt, Artificial Sequence
  Description of Artificial Sequence: Synthetic oligonucleotide
  Sense strand starting at position 3982 of SEQ ID NO: 1879227
guuaaagaaucccuaaggu

SEQ ID NO: 1892125 - RNA, 19 nt, Artificial Sequence
  Description of Artificial Sequence: Synthetic oligonucleotide
  Antisense strand to SEQ ID NO: 1892124
accuuagggauucuuuaac

SEQ ID NO: 1892126 - RNA, 19 nt, Artificial Sequence
  Description of Artificial Sequence: Synthetic oligonucleotide
  Sense strand starting at position 101 of SEQ ID NO: 1879228
caguaugcucauuaagagu

SEQ ID NO: 1892127 - RNA, 19 nt, Artificial Sequence
  Description of Artificial Sequence: Synthetic oligonucleotide
  Antisense strand to SEQ ID NO: 1892126
acucuuaaugagcauacug

SEQ ID NO: 1892128 - RNA, 19 nt, Artificial Sequence
  Description of Artificial Sequence: Synthetic oligonucleotide
  Sense strand starting at position 380 of SEQ ID NO: 1879228
gaggaaggccauugguagu

SEQ ID NO: 1892129 - RNA, 19 nt, Artificial Sequence
  Description of Artificial Sequence: Synthetic oligonucleotide
  Antisense strand to SEQ ID NO: 1892128
acuaccaauggccuuccuc

SEQ ID NO: 1892130 - RNA, 19 nt, Artificial Sequence
  Description of Artificial Sequence: Synthetic oligonucleotide
  Sense strand starting at position 501 of SEQ ID NO: 1879228
caggcauugcuccaggaga

SEQ ID NO: 1892131 - RNA, 19 nt, Artificial Sequence
  Description of Artificial Sequence: Synthetic oligonucleotide
  Antisense strand to SEQ ID NO: 1892130
ucuccuggagcaaugccug

SEQ ID NO: 1892132 - RNA, 19 nt, Artificial Sequence
  Description of Artificial Sequence: Synthetic oligonucleotide
  Sense strand starting at position 503 of SEQ ID NO: 1879228
ggcauugcuccaggagaaa

SEQ ID NO: 1892133 - RNA, 19 nt, Artificial Sequence
  Description of Artificial Sequence: Synthetic oligonucleotide
  Antisense strand to SEQ ID NO: 1892132
uuucuccuggagcaaugcc

SEQ ID NO: 1892134 - RNA, 19 nt, Artificial Sequence
  Description of Artificial Sequence: Synthetic oligonucleotide
  Sense strand starting at position 562 of SEQ ID NO: 1879228
gcuguagugggacaaguua

SEQ ID NO: 1892135 - RNA, 19 nt, Artificial Sequence
  Description of Artificial Sequence: Synthetic oligonucleotide
  Antisense strand to SEQ ID NO: 1892134
uaacuugucccacuacagc

SEQ ID NO: 1892136 - RNA, 19 nt, Artificial Sequence
  Description of Artificial Sequence: Synthetic oligonucleotide
  Sense strand starting at position 582 of SEQ ID NO: 1879228
ggaucauccucucuaagag

SEQ ID NO: 1892137 - RNA, 19 nt, Artificial Sequence
  Description of Artificial Sequence: Synthetic oligonucleotide
  Antisense strand to SEQ ID NO: 1892136
cucuuagagaggaugaucc

SEQ ID NO: 1892138 - RNA, 19 nt, Artificial Sequence
  Description of Artificial Sequence: Synthetic oligonucleotide
  Sense strand starting at position 685 of SEQ ID NO: 1879228
uaugaagcuguguauauga

SEQ ID NO: 1892139 - RNA, 19 nt, Artificial Sequence
  Description of Artificial Sequence: Synthetic oligonucleotide
  Antisense strand to SEQ ID NO: 1892138
ucauauacacagcuucaua

SEQ ID NO: 1892140 - RNA, 19 nt, Artificial Sequence
  Description of Artificial Sequence: Synthetic oligonucleotide
  Sense strand starting at position 728 of SEQ ID NO: 1879228
ccaggacacugaucuggua

SEQ ID NO: 1892141 - RNA, 19 nt, Artificial Sequence
  Description of Artificial Sequence: Synthetic oligonucleotide
  Antisense strand to SEQ ID NO: 1892140
uaccagaucaguguccugg

SEQ ID NO: 1892142 - RNA, 19 nt, Artificial Sequence
  Description of Artificial Sequence: Synthetic oligonucleotide
  Sense strand starting at position 918 of SEQ ID NO: 1879228
ugagccugacauugaaauu

SEQ ID NO: 1892143 - RNA, 19 nt, Artificial Sequence
  Description of Artificial Sequence: Synthetic oligonucleotide
  Antisense strand to SEQ ID NO: 1892142
aauuucaaugucaggcuca

SEQ ID NO: 1892144 - RNA, 19 nt, Artificial Sequence
  Description of Artificial Sequence: Synthetic oligonucleotide
  Sense strand starting at position 997 of SEQ ID NO: 1879228
ucagccuuuguggaacuau

SEQ ID NO: 1892145 - RNA, 19 nt, Artificial Sequence
  Description of Artificial Sequence: Synthetic oligonucleotide
  Antisense strand to SEQ ID NO: 1892144
auaguuccacaaaggcuga

SEQ ID NO: 1892146 - RNA, 19 nt, Artificial Sequence
  Description of Artificial Sequence: Synthetic oligonucleotide
  Sense strand starting at position 1229 of SEQ ID NO: 1879228
gagaaagggcuuggaagua

SEQ ID NO: 1892147 - RNA, 19 nt, Artificial Sequence
  Description of Artificial Sequence: Synthetic oligonucleotide
  Antisense strand to SEQ ID NO: 1892146
uacuuccaagcccuuucuc

SEQ ID NO: 1892148 - RNA, 19 nt, Artificial Sequence
  Description of Artificial Sequence: Synthetic oligonucleotide
  Sense strand starting at position 1325 of SEQ ID NO: 1879228
caaugagcucuguggagac

SEQ ID NO: 1892149 - RNA, 19 nt, Artificial Sequence
  Description of Artificial Sequence: Synthetic oligonucleotide
  Antisense strand to SEQ ID NO: 1892148
gucuccacagagcucauug

SEQ ID NO: 1892150 - RNA, 19 nt, Artificial Sequence
  Description of Artificial Sequence: Synthetic oligonucleotide
  Sense strand starting at position 1388 of SEQ ID NO: 1879228
gccaaugaacucugagagu

SEQ ID NO: 1892151 - RNA, 19 nt, Artificial Sequence
  Description of Artificial Sequence: Synthetic oligonucleotide
  Antisense strand to SEQ ID NO: 1892150
acucucagaguucauuggc

SEQ ID NO: 1892152 - RNA, 19 nt, Artificial Sequence
  Description of Artificial Sequence: Synthetic oligonucleotide
  Sense strand starting at position 1461 of SEQ ID NO: 1879228
ggaccacauuuccaucagu

SEQ ID NO: 1892153 - RNA, 19 nt, Artificial Sequence
  Description of Artificial Sequence: Synthetic oligonucleotide
  Antisense strand to SEQ ID NO: 1892152
acugauggaaauguggucc

SEQ ID NO: 1892154 - RNA, 19 nt, Artificial Sequence
  Description of Artificial Sequence: Synthetic oligonucleotide
  Sense strand starting at position 1749 of SEQ ID NO: 1879228
gcgggauaccgugaugaua

SEQ ID NO: 1892155 - RNA, 19 nt, Artificial Sequence
  Description of Artificial Sequence: Synthetic oligonucleotide
  Antisense strand to SEQ ID NO: 1892154
uaucaucacgguaucccgc

SEQ ID NO: 1892156 - RNA, 19 nt, Artificial Sequence
  Description of Artificial Sequence: Synthetic oligonucleotide
  Sense strand starting at position 1758 of SEQ ID NO: 1879228
cgugaugauacgcagauau

SEQ ID NO: 1892157 - RNA, 19 nt, Artificial Sequence
  Description of Artificial Sequence: Synthetic oligonucleotide
  Antisense strand to SEQ ID NO: 1892156
auaucugcguaucaucacg

SEQ ID NO: 1892158 - RNA, 19 nt, Artificial Sequence
  Description of Artificial Sequence: Synthetic oligonucleotide
  Sense strand starting at position 1760 of SEQ ID NO: 1879228
ugaugauacgcagauauca

SEQ ID NO: 1892159 - RNA, 19 nt, Artificial Sequence
  Description of Artificial Sequence: Synthetic oligonucleotide
  Antisense strand to SEQ ID NO: 1892158
ugauaucugcguaucauca

SEQ ID NO: 1892160 - RNA, 19 nt, Artificial Sequence
  Description of Artificial Sequence: Synthetic oligonucleotide
  Sense strand starting at position 1948 of SEQ ID NO: 1879228
ugaggucgccucuugcgaa

SEQ ID NO: 1892161 - RNA, 19 nt, Artificial Sequence
  Description of Artificial Sequence: Synthetic oligonucleotide
  Antisense strand to SEQ ID NO: 1892160
uucgcaagaggcgaccuca

SEQ ID NO: 1892162 - RNA, 19 nt, Artificial Sequence
  Description of Artificial Sequence: Synthetic oligonucleotide
  Sense strand starting at position 1989 of SEQ ID NO: 1879228
ggaacuaccuuucucuaga

SEQ ID NO: 1892163 - RNA, 19 nt, Artificial Sequence
  Description of Artificial Sequence: Synthetic oligonucleotide
  Antisense strand to SEQ ID NO: 1892162
ucuagagaaagguaguucc

SEQ ID NO: 1892164 - RNA, 19 nt, Artificial Sequence
  Description of Artificial Sequence: Synthetic oligonucleotide
  Sense strand starting at position 2049 of SEQ ID NO: 1879228
gaaacugagucuuccugau

SEQ ID NO: 1892165 - RNA, 19 nt, Artificial Sequence
  Description of Artificial Sequence: Synthetic oligonucleotide
  Antisense strand to SEQ ID NO: 1892164
aucaggaagacucaguuuc

SEQ ID NO: 1892166 - RNA, 19 nt, Artificial Sequence
  Description of Artificial Sequence: Synthetic oligonucleotide
  Sense strand starting at position 2055 of SEQ ID NO: 1879228
gagucuuccugauuucgug

SEQ ID NO: 1892167 - RNA, 19 nt, Artificial Sequence
  Description of Artificial Sequence: Synthetic oligonucleotide
  Antisense strand to SEQ ID NO: 1892166
cacgaaaucaggaagacuc

SEQ ID NO: 1892168 - RNA, 19 nt, Artificial Sequence
  Description of Artificial Sequence: Synthetic oligonucleotide
  Sense strand starting at position 2075 of SEQ ID NO: 1879228
ggcugucuccaaggaggaa

SEQ ID NO: 1892169 - RNA, 19 nt, Artificial Sequence
  Description of Artificial Sequence: Synthetic oligonucleotide
  Antisense strand to SEQ ID NO: 1892168
uuccuccuuggagacagcc

SEQ ID NO: 1892170 - RNA, 19 nt, Artificial Sequence
  Description of Artificial Sequence: Synthetic oligonucleotide
  Sense strand starting at position 2353 of SEQ ID NO: 1879228
cuguucuagggcgaaauau

SEQ ID NO: 1892171 - RNA, 19 nt, Artificial Sequence
  Description of Artificial Sequence: Synthetic oligonucleotide
  Antisense strand to SEQ ID NO: 1892170
auauuucgcccuagaacag

SEQ ID NO: 1892172 - RNA, 19 nt, Artificial Sequence
  Description of Artificial Sequence: Synthetic oligonucleotide
  Sense strand starting at position 2364 of SEQ ID NO: 1879228
cgaaauauaugauuggcuu

SEQ ID NO: 1892173 - RNA, 19 nt, Artificial Sequence
  Description of Artificial Sequence: Synthetic oligonucleotide
  Antisense strand to SEQ ID NO: 1892172
aagccaaucauauauuucg

SEQ ID NO: 1892174 - RNA, 19 nt, Artificial Sequence
  Description of Artificial Sequence: Synthetic oligonucleotide
  Sense strand starting at position 2891 of SEQ ID NO: 1879228
cucagauugucaccuauau

SEQ ID NO: 1892175 - RNA, 19 nt, Artificial Sequence
  Description of Artificial Sequence: Synthetic oligonucleotide
  Antisense strand to SEQ ID NO: 1892174
auauaggugacaaucugag

SEQ ID NO: 1892176 - RNA, 19 nt, Artificial Sequence
  Description of Artificial Sequence: Synthetic oligonucleotide
  Sense strand starting at position 2976 of SEQ ID NO: 1879228
gggcaaagccuagaagguu

SEQ ID NO: 1892177 - RNA, 19 nt, Artificial Sequence
  Description of Artificial Sequence: Synthetic oligonucleotide
  Antisense strand to SEQ ID NO: 1892176
aaccuucuaggcuuugccc

SEQ ID NO: 1892178 - RNA, 19 nt, Artificial Sequence
  Description of Artificial Sequence: Synthetic oligonucleotide
  Sense strand starting at position 3031 of SEQ ID NO: 1879228
ggcauuccuggugaugaac

SEQ ID NO: 1892179 - RNA, 19 nt, Artificial Sequence
  Description of Artificial Sequence: Synthetic oligonucleotide
  Antisense strand to SEQ ID NO: 1892178
guucaucaccaggaaugcc

SEQ ID NO: 1892180 - RNA, 19 nt, Artificial Sequence
  Description of Artificial Sequence: Synthetic oligonucleotide
  Sense strand starting at position 3067 of SEQ ID NO: 1879228
guuuguucccucuaccaac

SEQ ID NO: 1892181 - RNA, 19 nt, Artificial Sequence
  Description of Artificial Sequence: Synthetic oligonucleotide
  Antisense strand to SEQ ID NO: 1892180
guugguagagggaacaaac

SEQ ID NO: 1892182 - RNA, 19 nt, Artificial Sequence
  Description of Artificial Sequence: Synthetic oligonucleotide
  Sense strand starting at position 3229 of SEQ ID NO: 1879228
cugagcaguuaaguuacaa

SEQ ID NO: 1892183 - RNA, 19 nt, Artificial Sequence
  Description of Artificial Sequence: Synthetic oligonucleotide
  Antisense strand to SEQ ID NO: 1892182
uuguaacuuaacugcucag

SEQ ID NO: 1892184 - RNA, 19 nt, Artificial Sequence
  Description of Artificial Sequence: Synthetic oligonucleotide
  Sense strand starting at position 3274 of SEQ ID NO: 1879228
uugccugaugcuuaagaga

SEQ ID NO: 1892185 - RNA, 19 nt, Artificial Sequence
  Description of Artificial Sequence: Synthetic oligonucleotide
  Antisense strand to SEQ ID NO: 1892184
ucucuuaagcaucaggcaa

SEQ ID NO: 1892186 - RNA, 19 nt, Artificial Sequence
  Description of Artificial Sequence: Synthetic oligonucleotide
  Sense strand starting at position 3441 of SEQ ID NO: 1879228
gaggguuauguacauccca

SEQ ID NO: 1892187 - RNA, 19 nt, Artificial Sequence
  Description of Artificial Sequence: Synthetic oligonucleotide
  Antisense strand to SEQ ID NO: 1892186
ugggauguacauaacccuc

SEQ ID NO: 1892188 - RNA, 19 nt, Artificial Sequence
  Description of Artificial Sequence: Synthetic oligonucleotide
  Sense strand starting at position 3476 of SEQ ID NO: 1879228
ugaguaaagguguggagau

SEQ ID NO: 1892189 - RNA, 19 nt, Artificial Sequence
  Description of Artificial Sequence: Synthetic oligonucleotide
  Antisense strand to SEQ ID NO: 1892188
aucuccacaccuuuacuca

SEQ ID NO: 1892190 - RNA, 19 nt, Artificial Sequence
  Description of Artificial Sequence: Synthetic oligonucleotide
  Sense strand starting at position 3530 of SEQ ID NO: 1879228
ccugaugugcuggaagcua

SEQ ID NO: 1892191 - RNA, 19 nt, Artificial Sequence
  Description of Artificial Sequence: Synthetic oligonucleotide
  Antisense strand to SEQ ID NO: 1892190
uagcuuccagcacaucagg

SEQ ID NO: 1892192 - RNA, 19 nt, Artificial Sequence
  Description of Artificial Sequence: Synthetic oligonucleotide
  Sense strand starting at position 3535 of SEQ ID NO: 1879228
ugugcuggaagcuaauauu

SEQ ID NO: 1892193 - RNA, 19 nt, Artificial Sequence
  Description of Artificial Sequence: Synthetic oligonucleotide
  Antisense strand to SEQ ID NO: 1892192
aauauuagcuuccagcaca

SEQ ID NO: 1892194 - RNA, 19 nt, Artificial Sequence
  Description of Artificial Sequence: Synthetic oligonucleotide
  Sense strand starting at position 3549 of SEQ ID NO: 1879228
auauuaugacacuggguuu

SEQ ID NO: 1892195 - RNA, 19 nt, Artificial Sequence
  Description of Artificial Sequence: Synthetic oligonucleotide
  Antisense strand to SEQ ID NO: 1892194
aaacccagugucauaauau

SEQ ID NO: 1892196 - RNA, 19 nt, Artificial Sequence
  Description of Artificial Sequence: Synthetic oligonucleotide
  Sense strand starting at position 3653 of SEQ ID NO: 1879228
gagaaugccuaucuggcaa

SEQ ID NO: 1892197 - RNA, 19 nt, Artificial Sequence
  Description of Artificial Sequence: Synthetic oligonucleotide
  Antisense strand to SEQ ID NO: 1892196
uugccagauaggcauucuc

SEQ ID NO: 1892198 - RNA, 19 nt, Artificial Sequence
  Description of Artificial Sequence: Synthetic oligonucleotide
  Sense strand starting at position 3673 of SEQ ID NO: 1879228
uugaguagaccuggguauu

SEQ ID NO: 1892199 - RNA, 19 nt, Artificial Sequence
  Description of Artificial Sequence: Synthetic oligonucleotide
  Antisense strand to SEQ ID NO: 1892198
aauacccaggucuacucaa

SEQ ID NO: 1892200 - RNA, 19 nt, Artificial Sequence
  Description of Artificial Sequence: Synthetic oligonucleotide
  Sense strand starting at position 3674 of SEQ ID NO: 1879228
ugaguagaccuggguauua

SEQ ID NO: 1892201 - RNA, 19 nt, Artificial Sequence
  Description of Artificial Sequence: Synthetic oligonucleotide
  Antisense strand to SEQ ID NO: 1892200
uaauacccaggucuacuca

SEQ ID NO: 1892202 - RNA, 19 nt, Artificial Sequence
  Description of Artificial Sequence: Synthetic oligonucleotide
  Sense strand starting at position 3792 of SEQ ID NO: 1879228
cuauaagacugucuacuga

SEQ ID NO: 1892203 - RNA, 19 nt, Artificial Sequence
  Description of Artificial Sequence: Synthetic oligonucleotide
  Antisense strand to SEQ ID NO: 1892202
ucaguagacagucuuauag

SEQ ID NO: 1892204 - RNA, 19 nt, Artificial Sequence
  Description of Artificial Sequence: Synthetic oligonucleotide
  Sense strand starting at position 3872 of SEQ ID NO: 1879228
ucacuuggauuacuguaau

SEQ ID NO: 1892205 - RNA, 19 nt, Artificial Sequence
  Description of Artificial Sequence: Synthetic oligonucleotide
  Antisense strand to SEQ ID NO: 1892204
auuacaguaauccaaguga

SEQ ID NO: 1892206 - RNA, 19 nt, Artificial Sequence
  Description of Artificial Sequence: Synthetic oligonucleotide
  Sense strand starting at position 49 of SEQ ID NO: 1879229
acagcauacuguuuagaac

SEQ ID NO: 1892207 - RNA, 19 nt, Artificial Sequence
  Description of Artificial Sequence: Synthetic oligonucleotide
  Antisense strand to SEQ ID NO: 1892206
guucuaaacaguaugcugu

SEQ ID NO: 1892208 - RNA, 19 nt, Artificial Sequence
  Description of Artificial Sequence: Synthetic oligonucleotide
  Sense strand starting at position 70 of SEQ ID NO: 1879229
acucaacaguuugcaagau

SEQ ID NO: 1892209 - RNA, 19 nt, Artificial Sequence
  Description of Artificial Sequence: Synthetic oligonucleotide
  Antisense strand to SEQ ID NO: 1892208
aucuugcaaacuguugagu

SEQ ID NO: 1892210 - RNA, 19 nt, Artificial Sequence
  Description of Artificial Sequence: Synthetic oligonucleotide
  Sense strand starting at position 104 of SEQ ID NO: 1879229
cucauaauuggauguaaua

SEQ ID NO: 1892211 - RNA, 19 nt, Artificial Sequence
  Description of Artificial Sequence: Synthetic oligonucleotide
  Antisense strand to SEQ ID NO: 1892210
uauuacauccaauuaugag

SEQ ID NO: 1892212 - RNA, 19 nt, Artificial Sequence
  Description of Artificial Sequence: Synthetic oligonucleotide
  Sense strand starting at position 275 of SEQ ID NO: 1879229
gagacaagccagugguuau

SEQ ID NO: 1892213 - RNA, 19 nt, Artificial Sequence
  Description of Artificial Sequence: Synthetic oligonucleotide
  Antisense strand to SEQ ID NO: 1892212
auaaccacuggcuugucuc

SEQ ID NO: 1892214 - RNA, 19 nt, Artificial Sequence
  Description of Artificial Sequence: Synthetic oligonucleotide
  Sense strand starting at position 276 of SEQ ID NO: 1879229
agacaagccagugguuaua

SEQ ID NO: 1892215 - RNA, 19 nt, Artificial Sequence
  Description of Artificial Sequence: Synthetic oligonucleotide
  Antisense strand to SEQ ID NO: 1892214
uauaaccacuggcuugucu

SEQ ID NO: 1892216 - RNA, 19 nt, Artificial Sequence
  Description of Artificial Sequence: Synthetic oligonucleotide
  Sense strand starting at position 395 of SEQ ID NO: 1879229
acccacaaugcuuaggauu

SEQ ID NO: 1892217 - RNA, 19 nt, Artificial Sequence
  Description of Artificial Sequence: Synthetic oligonucleotide
  Antisense strand to SEQ ID NO: 1892216
aauccuaagcauugugggu

SEQ ID NO: 1892218 - RNA, 19 nt, Artificial Sequence
  Description of Artificial Sequence: Synthetic oligonucleotide
  Sense strand starting at position 571 of SEQ ID NO: 1879229
gcagucaguauacagaaga

SEQ ID NO: 1892219 - RNA, 19 nt, Artificial Sequence
  Description of Artificial Sequence: Synthetic oligonucleotide
  Antisense strand to SEQ ID NO: 1892218
ucuucuguauacugacugc

SEQ ID NO: 1892220 - RNA, 19 nt, Artificial Sequence
  Description of Artificial Sequence: Synthetic oligonucleotide
  Sense strand starting at position 678 of SEQ ID NO: 1879229
ggagguggugcucaucaga

SEQ ID NO: 1892221 - RNA, 19 nt, Artificial Sequence
  Description of Artificial Sequence: Synthetic oligonucleotide
  Antisense strand to SEQ ID NO: 1892220
ucugaugagcaccaccucc

SEQ ID NO: 1892222 - RNA, 19 nt, Artificial Sequence
  Description of Artificial Sequence: Synthetic oligonucleotide
  Sense strand starting at position 1119 of SEQ ID NO: 1879229
aucuaagaucagugaggca

SEQ ID NO: 1892223 - RNA, 19 nt, Artificial Sequence
  Description of Artificial Sequence: Synthetic oligonucleotide
  Antisense strand to SEQ ID NO: 1892222
ugccucacugaucuuagau

SEQ ID NO: 1892224 - RNA, 19 nt, Artificial Sequence
  Description of Artificial Sequence: Synthetic oligonucleotide
  Sense strand starting at position 1158 of SEQ ID NO: 1879229
agggauugcuguucaagag

SEQ ID NO: 1892225 - RNA, 19 nt, Artificial Sequence
  Description of Artificial Sequence: Synthetic oligonucleotide
  Antisense strand to SEQ ID NO: 1892224
cucuugaacagcaaucccu

SEQ ID NO: 1892226 - RNA, 19 nt, Artificial Sequence
  Description of Artificial Sequence: Synthetic oligonucleotide
  Sense strand starting at position 1159 of SEQ ID NO: 1879229
gggauugcuguucaagaga

SEQ ID NO: 1892227 - RNA, 19 nt, Artificial Sequence
  Description of Artificial Sequence: Synthetic oligonucleotide
  Antisense strand to SEQ ID NO: 1892226
ucucuugaacagcaauccc

SEQ ID NO: 1892228 - RNA, 19 nt, Artificial Sequence
  Description of Artificial Sequence: Synthetic oligonucleotide
  Sense strand starting at position 1295 of SEQ ID NO: 1879229
cuguuaacuccguaauaca

SEQ ID NO: 1892229 - RNA, 19 nt, Artificial Sequence
  Description of Artificial Sequence: Synthetic oligonucleotide
  Antisense strand to SEQ ID NO: 1892228
uguauuacggaguuaacag

SEQ ID NO: 1892230 - RNA, 19 nt, Artificial Sequence
  Description of Artificial Sequence: Synthetic oligonucleotide
  Sense strand starting at position 1305 of SEQ ID NO: 1879229
cguaauacagauugaaaca

SEQ ID NO: 1892231 - RNA, 19 nt, Artificial Sequence
  Description of Artificial Sequence: Synthetic oligonucleotide
  Antisense strand to SEQ ID NO: 1892230
uguuucaaucuguauuacg

SEQ ID NO: 1892232 - RNA, 19 nt, Artificial Sequence
  Description of Artificial Sequence: Synthetic oligonucleotide
  Sense strand starting at position 1325 of SEQ ID NO: 1879229
uuaaauuaccgcuacuaag

SEQ ID NO: 1892233 - RNA, 19 nt, Artificial Sequence
  Description of Artificial Sequence: Synthetic oligonucleotide
  Antisense strand to SEQ ID NO: 1892232
cuuaguagcgguaauuuaa

SEQ ID NO: 1892234 - RNA, 19 nt, Artificial Sequence
  Description of Artificial Sequence: Synthetic oligonucleotide
  Sense strand starting at position 1395 of SEQ ID NO: 1879229
aacguuauucgugcagcua

SEQ ID NO: 1892235 - RNA, 19 nt, Artificial Sequence
  Description of Artificial Sequence: Synthetic oligonucleotide
  Antisense strand to SEQ ID NO: 1892234
uagcugcacgaauaacguu

SEQ ID NO: 1892236 - RNA, 19 nt, Artificial Sequence
  Description of Artificial Sequence: Synthetic oligonucleotide
  Sense strand starting at position 1398 of SEQ ID NO: 1879229
guuauucgugcagcuacau

SEQ ID NO: 1892237 - RNA, 19 nt, Artificial Sequence
  Description of Artificial Sequence: Synthetic oligonucleotide
  Antisense strand to SEQ ID NO: 1892236
auguagcugcacgaauaac

SEQ ID NO: 1892238 - RNA, 19 nt, Artificial Sequence
  Description of Artificial Sequence: Synthetic oligonucleotide
  Sense strand starting at position 1543 of SEQ ID NO: 1879229
gccaguuugaguuugugca

SEQ ID NO: 1892239 - RNA, 19 nt, Artificial Sequence
  Description of Artificial Sequence: Synthetic oligonucleotide
  Antisense strand to SEQ ID NO: 1892238
ugcacaaacucaaacuggc

SEQ ID NO: 1892240 - RNA, 19 nt, Artificial Sequence
  Description of Artificial Sequence: Synthetic oligonucleotide
  Sense strand starting at position 1923 of SEQ ID NO: 1879229
ucucauugaucggcacaaa

SEQ ID NO: 1892241 - RNA, 19 nt, Artificial Sequence
  Description of Artificial Sequence: Synthetic oligonucleotide
  Antisense strand to SEQ ID NO: 1892240
uuugugccgaucaaugaga

SEQ ID NO: 1892242 - RNA, 19 nt, Artificial Sequence
  Description of Artificial Sequence: Synthetic oligonucleotide
  Sense strand starting at position 2189 of SEQ ID NO: 1879229
aggugaggucguuaaacug

SEQ ID NO: 1892243 - RNA, 19 nt, Artificial Sequence
  Description of Artificial Sequence: Synthetic oligonucleotide
  Antisense strand to SEQ ID NO: 1892242
caguuuaacgaccucaccu

SEQ ID NO: 1892244 - RNA, 19 nt, Artificial Sequence
  Description of Artificial Sequence: Synthetic oligonucleotide
  Sense strand starting at position 2513 of SEQ ID NO: 1879229
gauggcuugcguuuccuua

SEQ ID NO: 1892245 - RNA, 19 nt, Artificial Sequence
  Description of Artificial Sequence: Synthetic oligonucleotide
  Antisense strand to SEQ ID NO: 1892244
uaaggaaacgcaagccauc

SEQ ID NO: 1892246 - RNA, 19 nt, Artificial Sequence
  Description of Artificial Sequence: Synthetic oligonucleotide
  Sense strand starting at position 2514 of SEQ ID NO: 1879229
auggcuugcguuuccuuaa

SEQ ID NO: 1892247 - RNA, 19 nt, Artificial Sequence
  Description of Artificial Sequence: Synthetic oligonucleotide
  Antisense strand to SEQ ID NO: 1892246
uuaaggaaacgcaagccau

SEQ ID NO: 1892248 - RNA, 19 nt, Artificial Sequence
  Description of Artificial Sequence: Synthetic oligonucleotide
  Sense strand starting at position 2915 of SEQ ID NO: 1879229
cgcuguccugagucuuagu

SEQ ID NO: 1892249 - RNA, 19 nt, Artificial Sequence
  Description of Artificial Sequence: Synthetic oligonucleotide
  Antisense strand to SEQ ID NO: 1892248
acuaagacucaggacagcg

SEQ ID NO: 1892250 - RNA, 19 nt, Artificial Sequence
  Description of Artificial Sequence: Synthetic oligonucleotide
  Sense strand starting at position 2920 of SEQ ID NO: 1879229
uccugagucuuaguuagag

SEQ ID NO: 1892251 - RNA, 19 nt, Artificial Sequence
  Description of Artificial Sequence: Synthetic oligonucleotide
  Antisense strand to SEQ ID NO: 1892250
cucuaacuaagacucagga

SEQ ID NO: 1892252 - RNA, 19 nt, Artificial Sequence
  Description of Artificial Sequence: Synthetic oligonucleotide
  Sense strand starting at position 2922 of SEQ ID NO: 1879229
cugagucuuaguuagagau

SEQ ID NO: 1892253 - RNA, 19 nt, Artificial Sequence
  Description of Artificial Sequence: Synthetic oligonucleotide
  Antisense strand to SEQ ID NO: 1892252
aucucuaacuaagacucag

SEQ ID NO: 1892254 - RNA, 19 nt, Artificial Sequence
  Description of Artificial Sequence: Synthetic oligonucleotide
  Sense strand starting at position 2926 of SEQ ID NO: 1879229
gucuuaguuagagaugaug

SEQ ID NO: 1892255 - RNA, 19 nt, Artificial Sequence
  Description of Artificial Sequence: Synthetic oligonucleotide
  Antisense strand to SEQ ID NO: 1892254
caucaucucuaacuaagac

SEQ ID NO: 1892256 - RNA, 19 nt, Artificial Sequence
  Description of Artificial Sequence: Synthetic oligonucleotide
  Sense strand starting at position 2988 of SEQ ID NO: 1879229
cuuaucauaccguggaaau

SEQ ID NO: 1892257 - RNA, 19 nt, Artificial Sequence
  Description of Artificial Sequence: Synthetic oligonucleotide
  Antisense strand to SEQ ID NO: 1892256
auuuccacgguaugauaag

SEQ ID NO: 1892258 - RNA, 19 nt, Artificial Sequence
  Description of Artificial Sequence: Synthetic oligonucleotide
  Sense strand starting at position 2989 of SEQ ID NO: 1879229
uuaucauaccguggaaauu

SEQ ID NO: 1892259 - RNA, 19 nt, Artificial Sequence
  Description of Artificial Sequence: Synthetic oligonucleotide
  Antisense strand to SEQ ID NO: 1892258
aauuuccacgguaugauaa

SEQ ID NO: 1892260 - RNA, 19 nt, Artificial Sequence
  Description of Artificial Sequence: Synthetic oligonucleotide
  Sense strand starting at position 2990 of SEQ ID NO: 1879229
uaucauaccguggaaauua

SEQ ID NO: 1892261 - RNA, 19 nt, Artificial Sequence
  Description of Artificial Sequence: Synthetic oligonucleotide
  Antisense strand to SEQ ID NO: 1892260
uaauuuccacgguaugaua

SEQ ID NO: 1892262 - RNA, 19 nt, Artificial Sequence
  Description of Artificial Sequence: Synthetic oligonucleotide
  Sense strand starting at position 3037 of SEQ ID NO: 1879229
ccuguucgucagagacguu

SEQ ID NO: 1892263 - RNA, 19 nt, Artificial Sequence
  Description of Artificial Sequence: Synthetic oligonucleotide
  Antisense strand to SEQ ID NO: 1892262
aacgucucugacgaacagg

SEQ ID NO: 1892264 - RNA, 19 nt, Artificial Sequence
  Description of Artificial Sequence: Synthetic oligonucleotide
  Sense strand starting at position 3044 of SEQ ID NO: 1879229
gucagagacguuuaagguu

SEQ ID NO: 1892265 - RNA, 19 nt, Artificial Sequence
  Description of Artificial Sequence: Synthetic oligonucleotide
  Antisense strand to SEQ ID NO: 1892264
aaccuuaaacgucucugac

SEQ ID NO: 1892266 - RNA, 19 nt, Artificial Sequence
  Description of Artificial Sequence: Synthetic oligonucleotide
  Sense strand starting at position 3176 of SEQ ID NO: 1879229
cuguuuggccaugaaauag

SEQ ID NO: 1892267 - RNA, 19 nt, Artificial Sequence
  Description of Artificial Sequence: Synthetic oligonucleotide
  Antisense strand to SEQ ID NO: 1892266
cuauuucauggccaaacag

SEQ ID NO: 1892268 - RNA, 19 nt, Artificial Sequence
  Description of Artificial Sequence: Synthetic oligonucleotide
  Sense strand starting at position 3471 of SEQ ID NO: 1879229
agaacuggaucuguuaaau

SEQ ID NO: 1892269 - RNA, 19 nt, Artificial Sequence
  Description of Artificial Sequence: Synthetic oligonucleotide
  Antisense strand to SEQ ID NO: 1892268
auuuaacagauccaguucu

SEQ ID NO: 1892270 - RNA, 19 nt, Artificial Sequence
  Description of Artificial Sequence: Synthetic oligonucleotide
  Sense strand starting at position 3580 of SEQ ID NO: 1879229
cuuagaagacaugguguua

SEQ ID NO: 1892271 - RNA, 19 nt, Artificial Sequence
  Description of Artificial Sequence: Synthetic oligonucleotide
  Antisense strand to SEQ ID NO: 1892270
uaacaccaugucuucuaag

SEQ ID NO: 1892272 - RNA, 19 nt, Artificial Sequence
  Description of Artificial Sequence: Synthetic oligonucleotide
  Sense strand starting at position 3591 of SEQ ID NO: 1879229
ugguguuaacuagagugaa

SEQ ID NO: 1892273 - RNA, 19 nt, Artificial Sequence
  Description of Artificial Sequence: Synthetic oligonucleotide
  Antisense strand to SEQ ID NO: 1892272
uucacucuaguuaacacca

SEQ ID NO: 1892274 - RNA, 19 nt, Artificial Sequence
  Description of Artificial Sequence: Synthetic oligonucleotide
  Sense strand starting at position 3608 of SEQ ID NO: 1879229
aagagauacugaguuguag

SEQ ID NO: 1892275 - RNA, 19 nt, Artificial Sequence
  Description of Artificial Sequence: Synthetic oligonucleotide
  Antisense strand to SEQ ID NO: 1892274
cuacaacucaguaucucuu

SEQ ID NO: 1892276 - RNA, 19 nt, Artificial Sequence
  Description of Artificial Sequence: Synthetic oligonucleotide
  Sense strand starting at position 3610 of SEQ ID NO: 1879229
gagauacugaguuguagug

SEQ ID NO: 1892277 - RNA, 19 nt, Artificial Sequence
  Description of Artificial Sequence: Synthetic oligonucleotide
  Antisense strand to SEQ ID NO: 1892276
cacuacaacucaguaucuc

SEQ ID NO: 1892278 - RNA, 19 nt, Artificial Sequence
  Description of Artificial Sequence: Synthetic oligonucleotide
  Sense strand starting at position 3639 of SEQ ID NO: 1879229
auuggugggccagggaaau

SEQ ID NO: 1892279 - RNA, 19 nt, Artificial Sequence
  Description of Artificial Sequence: Synthetic oligonucleotide
  Antisense strand to SEQ ID NO: 1892278
auuucccuggcccaccaau

SEQ ID NO: 1892280 - RNA, 19 nt, Artificial Sequence
  Description of Artificial Sequence: Synthetic oligonucleotide
  Sense strand starting at position 3662 of SEQ ID NO: 1879229
gaggccuucugacuccaga

SEQ ID NO: 1892281 - RNA, 19 nt, Artificial Sequence
  Description of Artificial Sequence: Synthetic oligonucleotide
  Antisense strand to SEQ ID NO: 1892280
ucuggagucagaaggccuc

SEQ ID NO: 1892282 - RNA, 19 nt, Artificial Sequence
  Description of Artificial Sequence: Synthetic oligonucleotide
  Sense strand starting at position 3729 of SEQ ID NO: 1879229
auuccauagccuggacaua

SEQ ID NO: 1892283 - RNA, 19 nt, Artificial Sequence
  Description of Artificial Sequence: Synthetic oligonucleotide
  Antisense strand to SEQ ID NO: 1892282
uauguccaggcuauggaau

SEQ ID NO: 1892284 - RNA, 19 nt, Artificial Sequence
  Description of Artificial Sequence: Synthetic oligonucleotide
  Sense strand starting at position 3730 of SEQ ID NO: 1879229
uuccauagccuggacauaa

SEQ ID NO: 1892285 - RNA, 19 nt, Artificial Sequence
  Description of Artificial Sequence: Synthetic oligonucleotide
  Antisense strand to SEQ ID NO: 1892284
uuauguccaggcuauggaa

SEQ ID NO: 1892286 - RNA, 19 nt, Artificial Sequence
  Description of Artificial Sequence: Synthetic oligonucleotide
  Sense strand starting at position 336 of SEQ ID NO: 1879230
ucgugagaagucugggaau

SEQ ID NO: 1892287 - RNA, 19 nt, Artificial Sequence
  Description of Artificial Sequence: Synthetic oligonucleotide
  Antisense strand to SEQ ID NO: 1892286
auucccagacuucucacga

SEQ ID NO: 1892288 - RNA, 19 nt, Artificial Sequence
  Description of Artificial Sequence: Synthetic oligonucleotide
  Sense strand starting at position 444 of SEQ ID NO: 1879230
uuggcauccucaucuuuga

SEQ ID NO: 1892289 - RNA, 19 nt, Artificial Sequence
  Description of Artificial Sequence: Synthetic oligonucleotide
  Antisense strand to SEQ ID NO: 1892288
ucaaagaugaggaugccaa

SEQ ID NO: 1892290 - RNA, 19 nt, Artificial Sequence
  Description of Artificial Sequence: Synthetic oligonucleotide
  Sense strand starting at position 584 of SEQ ID NO: 1879230
uguggacuccuggguucaa

SEQ ID NO: 1892291 - RNA, 19 nt, Artificial Sequence
  Description of Artificial Sequence: Synthetic oligonucleotide
  Antisense strand to SEQ ID NO: 1892290
uugaacccaggaguccaca

SEQ ID NO: 1892292 - RNA, 19 nt, Artificial Sequence
  Description of Artificial Sequence: Synthetic oligonucleotide
  Sense strand starting at position 585 of SEQ ID NO: 1879230
guggacuccuggguucaaa

SEQ ID NO: 1892293 - RNA, 19 nt, Artificial Sequence
  Description of Artificial Sequence: Synthetic oligonucleotide
  Antisense strand to SEQ ID NO: 1892292
uuugaacccaggaguccac

SEQ ID NO: 1892294 - RNA, 19 nt, Artificial Sequence
  Description of Artificial Sequence: Synthetic oligonucleotide
  Sense strand starting at position 682 of SEQ ID NO: 1879230
gaauguggugacgguuaga

SEQ ID NO: 1892295 - RNA, 19 nt, Artificial Sequence
  Description of Artificial Sequence: Synthetic oligonucleotide
  Antisense strand to SEQ ID NO: 1892294
ucuaaccgucaccacauuc

SEQ ID NO: 1892296 - RNA, 19 nt, Artificial Sequence
  Description of Artificial Sequence: Synthetic oligonucleotide
  Sense strand starting at position 685 of SEQ ID NO: 1879230
uguggugacgguuagauga

SEQ ID NO: 1892297 - RNA, 19 nt, Artificial Sequence
  Description of Artificial Sequence: Synthetic oligonucleotide
  Antisense strand to SEQ ID NO: 1892296
ucaucuaaccgucaccaca

SEQ ID NO: 1892298 - RNA, 19 nt, Artificial Sequence
  Description of Artificial Sequence: Synthetic oligonucleotide
  Sense strand starting at position 709 of SEQ ID NO: 1879230
aaagcuuugccagagguuu

SEQ ID NO: 1892299 - RNA, 19 nt, Artificial Sequence
  Description of Artificial Sequence: Synthetic oligonucleotide
  Antisense strand to SEQ ID NO: 1892298
aaaccucuggcaaagcuuu

SEQ ID NO: 1892300 - RNA, 19 nt, Artificial Sequence
  Description of Artificial Sequence: Synthetic oligonucleotide
  Sense strand starting at position 821 of SEQ ID NO: 1879230
agcucugagcuccacaaau

SEQ ID NO: 1892301 - RNA, 19 nt, Artificial Sequence
  Description of Artificial Sequence: Synthetic oligonucleotide
  Antisense strand to SEQ ID NO: 1892300
auuuguggagcucagagcu

SEQ ID NO: 1892302 - RNA, 19 nt, Artificial Sequence
  Description of Artificial Sequence: Synthetic oligonucleotide
  Sense strand starting at position 850 of SEQ ID NO: 1879230
acagaucucccacgacacu

SEQ ID NO: 1892303 - RNA, 19 nt, Artificial Sequence
  Description of Artificial Sequence: Synthetic oligonucleotide
  Antisense strand to SEQ ID NO: 1892302
agugucgugggagaucugu

SEQ ID NO: 1892304 - RNA, 19 nt, Artificial Sequence
  Description of Artificial Sequence: Synthetic oligonucleotide
  Sense strand starting at position 890 of SEQ ID NO: 1879230
cucauuugcagcugugaag

SEQ ID NO: 1892305 - RNA, 19 nt, Artificial Sequence
  Description of Artificial Sequence: Synthetic oligonucleotide
  Antisense strand to SEQ ID NO: 1892304
cuucacagcugcaaaugag

SEQ ID NO: 1892306 - RNA, 19 nt, Artificial Sequence
  Description of Artificial Sequence: Synthetic oligonucleotide
  Sense strand starting at position 952 of SEQ ID NO: 1879230
gaaccagacuuguuaguag

SEQ ID NO: 1892307 - RNA, 19 nt, Artificial Sequence
  Description of Artificial Sequence: Synthetic oligonucleotide
  Antisense strand to SEQ ID NO: 1892306
cuacuaacaagucugguuc

SEQ ID NO: 1892308 - RNA, 19 nt, Artificial Sequence
  Description of Artificial Sequence: Synthetic oligonucleotide
  Sense strand starting at position 955 of SEQ ID NO: 1879230
ccagacuuguuaguagaca

SEQ ID NO: 1892309 - RNA, 19 nt, Artificial Sequence
  Description of Artificial Sequence: Synthetic oligonucleotide
  Antisense strand to SEQ ID NO: 1892308
ugucuacuaacaagucugg

SEQ ID NO: 1892310 - RNA, 19 nt, Artificial Sequence
  Description of Artificial Sequence: Synthetic oligonucleotide
  Sense strand starting at position 996 of SEQ ID NO: 1879230
ugaagcucuugucugagau

SEQ ID NO: 1892311 - RNA, 19 nt, Artificial Sequence
  Description of Artificial Sequence: Synthetic oligonucleotide
  Antisense strand to SEQ ID NO: 1892310
aucucagacaagagcuuca

SEQ ID NO: 1892312 - RNA, 19 nt, Artificial Sequence
  Description of Artificial Sequence: Synthetic oligonucleotide
  Sense strand starting at position 997 of SEQ ID NO: 1879230
gaagcucuugucugagauc

SEQ ID NO: 1892313 - RNA, 19 nt, Artificial Sequence
  Description of Artificial Sequence: Synthetic oligonucleotide
  Antisense strand to SEQ ID NO: 1892312
gaucucagacaagagcuuc

SEQ ID NO: 1892314 - RNA, 19 nt, Artificial Sequence
  Description of Artificial Sequence: Synthetic oligonucleotide
  Sense strand starting at position 1154 of SEQ ID NO: 1879230
ggaacaaauuaugacaaga

SEQ ID NO: 1892315 - RNA, 19 nt, Artificial Sequence
  Description of Artificial Sequence: Synthetic oligonucleotide
  Antisense strand to SEQ ID NO: 1892314
ucuugucauaauuuguucc

SEQ ID NO: 1892316 - RNA, 19 nt, Artificial Sequence
  Description of Artificial Sequence: Synthetic oligonucleotide
  Sense strand starting at position 1186 of SEQ ID NO: 1879230
auuagaagaauguguggua

SEQ ID NO: 1892317 - RNA, 19 nt, Artificial Sequence
  Description of Artificial Sequence: Synthetic oligonucleotide
  Antisense strand to SEQ ID NO: 1892316
uaccacacauucuucuaau

SEQ ID NO: 1892318 - RNA, 19 nt, Artificial Sequence
  Description of Artificial Sequence: Synthetic oligonucleotide
  Sense strand starting at position 1193 of SEQ ID NO: 1879230
gaaugugugguagagcagu

SEQ ID NO: 1892319 - RNA, 19 nt, Artificial Sequence
  Description of Artificial Sequence: Synthetic oligonucleotide
  Antisense strand to SEQ ID NO: 1892318
acugcucuaccacacauuc

SEQ ID NO: 1892320 - RNA, 19 nt, Artificial Sequence
  Description of Artificial Sequence: Synthetic oligonucleotide
  Sense strand starting at position 1199 of SEQ ID NO: 1879230
gugguagagcaguacacau

SEQ ID NO: 1892321 - RNA, 19 nt, Artificial Sequence
  Description of Artificial Sequence: Synthetic oligonucleotide
  Antisense strand to SEQ ID NO: 1892320
auguguacugcucuaccac

SEQ ID NO: 1892322 - RNA, 19 nt, Artificial Sequence
  Description of Artificial Sequence: Synthetic oligonucleotide
  Sense strand starting at position 1578 of SEQ ID NO: 1879230
ucaggccaauccuugaaga

SEQ ID NO: 1892323 - RNA, 19 nt, Artificial Sequence
  Description of Artificial Sequence: Synthetic oligonucleotide
  Antisense strand to SEQ ID NO: 1892322
ucuucaaggauuggccuga

SEQ ID NO: 1892324 - RNA, 19 nt, Artificial Sequence
  Description of Artificial Sequence: Synthetic oligonucleotide
  Sense strand starting at position 1605 of SEQ ID NO: 1879230
agaucuaaacuuugguaac

SEQ ID NO: 1892325 - RNA, 19 nt, Artificial Sequence
  Description of Artificial Sequence: Synthetic oligonucleotide
  Antisense strand to SEQ ID NO: 1892324
guuaccaaaguuuagaucu

SEQ ID NO: 1892326 - RNA, 19 nt, Artificial Sequence
  Description of Artificial Sequence: Synthetic oligonucleotide
  Sense strand starting at position 1645 of SEQ ID NO: 1879230
auuccuccauuugaggaau

SEQ ID NO: 1892327 - RNA, 19 nt, Artificial Sequence
  Description of Artificial Sequence: Synthetic oligonucleotide
  Antisense strand to SEQ ID NO: 1892326
auuccucaaauggaggaau

SEQ ID NO: 1892328 - RNA, 19 nt, Artificial Sequence
  Description of Artificial Sequence: Synthetic oligonucleotide
  Sense strand starting at position 1684 of SEQ ID NO: 1879230
ccugaaugcccauggaaga

SEQ ID NO: 1892329 - RNA, 19 nt, Artificial Sequence
  Description of Artificial Sequence: Synthetic oligonucleotide
  Antisense strand to SEQ ID NO: 1892328
ucuuccaugggcauucagg

SEQ ID NO: 1892330 - RNA, 19 nt, Artificial Sequence
  Description of Artificial Sequence: Synthetic oligonucleotide
  Sense strand starting at position 1685 of SEQ ID NO: 1879230
cugaaugcccauggaagaa

SEQ ID NO: 1892331 - RNA, 19 nt, Artificial Sequence
  Description of Artificial Sequence: Synthetic oligonucleotide
  Antisense strand to SEQ ID NO: 1892330
uucuuccaugggcauucag

SEQ ID NO: 1892332 - RNA, 19 nt, Artificial Sequence
  Description of Artificial Sequence: Synthetic oligonucleotide
  Sense strand starting at position 1716 of SEQ ID NO: 1879230
uggucuggcgggcagaaau

SEQ ID NO: 1892333 - RNA, 19 nt, Artificial Sequence
  Description of Artificial Sequence: Synthetic oligonucleotide
  Antisense strand to SEQ ID NO: 1892332
auuucugcccgccagacca

SEQ ID NO: 1892334 - RNA, 19 nt, Artificial Sequence
  Description of Artificial Sequence: Synthetic oligonucleotide
  Sense strand starting at position 1780 of SEQ ID NO: 1879230
aaggcaaguuucucaggga

SEQ ID NO: 1892335 - RNA, 19 nt, Artificial Sequence
  Description of Artificial Sequence: Synthetic oligonucleotide
  Antisense strand to SEQ ID NO: 1892334
ucccugagaaacuugccuu

SEQ ID NO: 1892336 - RNA, 19 nt, Artificial Sequence
  Description of Artificial Sequence: Synthetic oligonucleotide
  Sense strand starting at position 2048 of SEQ ID NO: 1879230
cacagaauggguuguuaga

SEQ ID NO: 1892337 - RNA, 19 nt, Artificial Sequence
  Description of Artificial Sequence: Synthetic oligonucleotide
  Antisense strand to SEQ ID NO: 1892336
ucuaacaacccauucugug

SEQ ID NO: 1892338 - RNA, 19 nt, Artificial Sequence
  Description of Artificial Sequence: Synthetic oligonucleotide
  Sense strand starting at position 2050 of SEQ ID NO: 1879230
cagaauggguuguuagaag

SEQ ID NO: 1892339 - RNA, 19 nt, Artificial Sequence
  Description of Artificial Sequence: Synthetic oligonucleotide
  Antisense strand to SEQ ID NO: 1892338
cuucuaacaacccauucug

SEQ ID NO: 1892340 - RNA, 19 nt, Artificial Sequence
  Description of Artificial Sequence: Synthetic oligonucleotide
  Sense strand starting at position 2058 of SEQ ID NO: 1879230
guuguuagaagucauagau

SEQ ID NO: 1892341 - RNA, 19 nt, Artificial Sequence
  Description of Artificial Sequence: Synthetic oligonucleotide
  Antisense strand to SEQ ID NO: 1892340
aucuaugacuucuaacaac

SEQ ID NO: 1892342 - RNA, 19 nt, Artificial Sequence
  Description of Artificial Sequence: Synthetic oligonucleotide
  Sense strand starting at position 2283 of SEQ ID NO: 1879230
aaggacugaugauagaaua

SEQ ID NO: 1892343 - RNA, 19 nt, Artificial Sequence
  Description of Artificial Sequence: Synthetic oligonucleotide
  Antisense strand to SEQ ID NO: 1892342
uauucuaucaucaguccuu

SEQ ID NO: 1892344 - RNA, 19 nt, Artificial Sequence
  Description of Artificial Sequence: Synthetic oligonucleotide
  Sense strand starting at position 2317 of SEQ ID NO: 1879230
gacagaauguccucucaag

SEQ ID NO: 1892345 - RNA, 19 nt, Artificial Sequence
  Description of Artificial Sequence: Synthetic oligonucleotide
  Antisense strand to SEQ ID NO: 1892344
cuugagaggacauucuguc

SEQ ID NO: 1892346 - RNA, 19 nt, Artificial Sequence
  Description of Artificial Sequence: Synthetic oligonucleotide
  Sense strand starting at position 2352 of SEQ ID NO: 1879230
aagucuucuccugagagua

SEQ ID NO: 1892347 - RNA, 19 nt, Artificial Sequence
  Description of Artificial Sequence: Synthetic oligonucleotide
  Antisense strand to SEQ ID NO: 1892346
uacucucaggagaagacuu

SEQ ID NO: 1892348 - RNA, 19 nt, Artificial Sequence
  Description of Artificial Sequence: Synthetic oligonucleotide
  Sense strand starting at position 2955 of SEQ ID NO: 1879230
cuggacuaauucuuguauu

SEQ ID NO: 1892349 - RNA, 19 nt, Artificial Sequence
  Description of Artificial Sequence: Synthetic oligonucleotide
  Antisense strand to SEQ ID NO: 1892348
aauacaagaauuaguccag

SEQ ID NO: 1892350 - RNA, 19 nt, Artificial Sequence
  Description of Artificial Sequence: Synthetic oligonucleotide
  Sense strand starting at position 3107 of SEQ ID NO: 1879230
aaugauuuguauggaugag

SEQ ID NO: 1892351 - RNA, 19 nt, Artificial Sequence
  Description of Artificial Sequence: Synthetic oligonucleotide
  Antisense strand to SEQ ID NO: 1892350
cucauccauacaaaucauu

SEQ ID NO: 1892352 - RNA, 19 nt, Artificial Sequence
  Description of Artificial Sequence: Synthetic oligonucleotide
  Sense strand starting at position 3271 of SEQ ID NO: 1879230
cagugauggcuugggagau

SEQ ID NO: 1892353 - RNA, 19 nt, Artificial Sequence
  Description of Artificial Sequence: Synthetic oligonucleotide
  Antisense strand to SEQ ID NO: 1892352
aucucccaagccaucacug

SEQ ID NO: 1892354 - RNA, 19 nt, Artificial Sequence
  Description of Artificial Sequence: Synthetic oligonucleotide
  Sense strand starting at position 3564 of SEQ ID NO: 1879230
aguacucugugguccuaaa

SEQ ID NO: 1892355 - RNA, 19 nt, Artificial Sequence
  Description of Artificial Sequence: Synthetic oligonucleotide
  Antisense strand to SEQ ID NO: 1892354
uuuaggaccacagaguacu

SEQ ID NO: 1892356 - RNA, 19 nt, Artificial Sequence
  Description of Artificial Sequence: Synthetic oligonucleotide
  Sense strand starting at position 3613 of SEQ ID NO: 1879230
cccagauggcuccacugaa

SEQ ID NO: 1892357 - RNA, 19 nt, Artificial Sequence
  Description of Artificial Sequence: Synthetic oligonucleotide
  Antisense strand to SEQ ID NO: 1892356
uucaguggagccaucuggg

SEQ ID NO: 1892358 - RNA, 19 nt, Artificial Sequence
  Description of Artificial Sequence: Synthetic oligonucleotide
  Sense strand starting at position 3625 of SEQ ID NO: 1879230
cacugaagccaucgucaaa

SEQ ID NO: 1892359 - RNA, 19 nt, Artificial Sequence
  Description of Artificial Sequence: Synthetic oligonucleotide
  Antisense strand to SEQ ID NO: 1892358
uuugacgauggcuucagug

SEQ ID NO: 1892360 - RNA, 19 nt, Artificial Sequence
  Description of Artificial Sequence: Synthetic oligonucleotide
  Sense strand starting at position 3628 of SEQ ID NO: 1879230
ugaagccaucgucaaauga

SEQ ID NO: 1892361 - RNA, 19 nt, Artificial Sequence
  Description of Artificial Sequence: Synthetic oligonucleotide
  Antisense strand to SEQ ID NO: 1892360
ucauuugacgauggcuuca

SEQ ID NO: 1892362 - RNA, 19 nt, Artificial Sequence
  Description of Artificial Sequence: Synthetic oligonucleotide
  Sense strand starting at position 3632 of SEQ ID NO: 1879230
gccaucgucaaaugagaca

SEQ ID NO: 1892363 - RNA, 19 nt, Artificial Sequence
  Description of Artificial Sequence: Synthetic oligonucleotide
  Antisense strand to SEQ ID NO: 1892362
ugucucauuugacgauggc

SEQ ID NO: 1892364 - RNA, 19 nt, Artificial Sequence
  Description of Artificial Sequence: Synthetic oligonucleotide
  Sense strand starting at position 3644 of SEQ ID NO: 1879230
ugagacagauauuagaaau

SEQ ID NO: 1892365 - RNA, 19 nt, Artificial Sequence
  Description of Artificial Sequence: Synthetic oligonucleotide
  Antisense strand to SEQ ID NO: 1892364
auuucuaauaucugucuca

SEQ ID NO: 1892366 - RNA, 19 nt, Artificial Sequence
  Description of Artificial Sequence: Synthetic oligonucleotide
  Sense strand starting at position 386 of SEQ ID NO: 1879231
acaccaaguguuugaggua

SEQ ID NO: 1892367 - RNA, 19 nt, Artificial Sequence
  Description of Artificial Sequence: Synthetic oligonucleotide
  Antisense strand to SEQ ID NO: 1892366
uaccucaaacacuuggugu

SEQ ID NO: 1892368 - RNA, 19 nt, Artificial Sequence
  Description of Artificial Sequence: Synthetic oligonucleotide
  Sense strand starting at position 398 of SEQ ID NO: 1879231
ugagguacuggcuauccaa

SEQ ID NO: 1892369 - RNA, 19 nt, Artificial Sequence
  Description of Artificial Sequence: Synthetic oligonucleotide
  Antisense strand to SEQ ID NO: 1892368
uuggauagccaguaccuca

SEQ ID NO: 1892370 - RNA, 19 nt, Artificial Sequence
  Description of Artificial Sequence: Synthetic oligonucleotide
  Sense strand starting at position 401 of SEQ ID NO: 1879231
gguacuggcuauccaauua

SEQ ID NO: 1892371 - RNA, 19 nt, Artificial Sequence
  Description of Artificial Sequence: Synthetic oligonucleotide
  Antisense strand to SEQ ID NO: 1892370
uaauuggauagccaguacc

SEQ ID NO: 1892372 - RNA, 19 nt, Artificial Sequence
  Description of Artificial Sequence: Synthetic oligonucleotide
  Sense strand starting at position 439 of SEQ ID NO: 1879231
acuguaugcaugugccaga

SEQ ID NO: 1892373 - RNA, 19 nt, Artificial Sequence
  Description of Artificial Sequence: Synthetic oligonucleotide
  Antisense strand to SEQ ID NO: 1892372
ucuggcacaugcauacagu

SEQ ID NO: 1892374 - RNA, 19 nt, Artificial Sequence
  Description of Artificial Sequence: Synthetic oligonucleotide
  Sense strand starting at position 444 of SEQ ID NO: 1879231
augcaugugccagaauauc

SEQ ID NO: 1892375 - RNA, 19 nt, Artificial Sequence
  Description of Artificial Sequence: Synthetic oligonucleotide
  Antisense strand to SEQ ID NO: 1892374
gauauucuggcacaugcau

SEQ ID NO: 1892376 - RNA, 19 nt, Artificial Sequence
  Description of Artificial Sequence: Synthetic oligonucleotide
  Sense strand starting at position 482 of SEQ ID NO: 1879231
guacaaguauaacagauuu

SEQ ID NO: 1892377 - RNA, 19 nt, Artificial Sequence
  Description of Artificial Sequence: Synthetic oligonucleotide
  Antisense strand to SEQ ID NO: 1892376
aaaucuguuauacuuguac

SEQ ID NO: 1892378 - RNA, 19 nt, Artificial Sequence
  Description of Artificial Sequence: Synthetic oligonucleotide
  Sense strand starting at position 585 of SEQ ID NO: 1879231
uaucauuuacgcuaugugu

SEQ ID NO: 1892379 - RNA, 19 nt, Artificial Sequence
  Description of Artificial Sequence: Synthetic oligonucleotide
  Antisense strand to SEQ ID NO: 1892378
acacauagcguaaaugaua

SEQ ID NO: 1892380 - RNA, 19 nt, Artificial Sequence
  Description of Artificial Sequence: Synthetic oligonucleotide
  Sense strand starting at position 680 of SEQ ID NO: 1879231
guucaagagguacaguguu

SEQ ID NO: 1892381 - RNA, 19 nt, Artificial Sequence
  Description of Artificial Sequence: Synthetic oligonucleotide
  Antisense strand to SEQ ID NO: 1892380
aacacuguaccucuugaac

SEQ ID NO: 1892382 - RNA, 19 nt, Artificial Sequence
  Description of Artificial Sequence: Synthetic oligonucleotide
  Sense strand starting at position 727 of SEQ ID NO: 1879231
ggaccuacucaggguggua

SEQ ID NO: 1892383 - RNA, 19 nt, Artificial Sequence
  Description of Artificial Sequence: Synthetic oligonucleotide
  Antisense strand to SEQ ID NO: 1892382
uaccacccugaguaggucc

SEQ ID NO: 1892384 - RNA, 19 nt, Artificial Sequence
  Description of Artificial Sequence: Synthetic oligonucleotide
  Sense strand starting at position 729 of SEQ ID NO: 1879231
accuacucagggugguaaa

SEQ ID NO: 1892385 - RNA, 19 nt, Artificial Sequence
  Description of Artificial Sequence: Synthetic oligonucleotide
  Antisense strand to SEQ ID NO: 1892384
uuuaccacccugaguaggu

SEQ ID NO: 1892386 - RNA, 19 nt, Artificial Sequence
  Description of Artificial Sequence: Synthetic oligonucleotide
  Sense strand starting at position 730 of SEQ ID NO: 1879231
ccuacucagggugguaaau

SEQ ID NO: 1892387 - RNA, 19 nt, Artificial Sequence
  Description of Artificial Sequence: Synthetic oligonucleotide
  Antisense strand to SEQ ID NO: 1892386
auuuaccacccugaguagg

SEQ ID NO: 1892388 - RNA, 19 nt, Artificial Sequence
  Description of Artificial Sequence: Synthetic oligonucleotide
  Sense strand starting at position 798 of SEQ ID NO: 1879231
uuaguaacgcuagagaacu

SEQ ID NO: 1892389 - RNA, 19 nt, Artificial Sequence
  Description of Artificial Sequence: Synthetic oligonucleotide
  Antisense strand to SEQ ID NO: 1892388
aguucucuagcguuacuaa

SEQ ID NO: 1892390 - RNA, 19 nt, Artificial Sequence
  Description of Artificial Sequence: Synthetic oligonucleotide
  Sense strand starting at position 897 of SEQ ID NO: 1879231
agaacuuacgauugcagaa

SEQ ID NO: 1892391 - RNA, 19 nt, Artificial Sequence
  Description of Artificial Sequence: Synthetic oligonucleotide
  Antisense strand to SEQ ID NO: 1892390
uucugcaaucguaaguucu

SEQ ID NO: 1892392 - RNA, 19 nt, Artificial Sequence
  Description of Artificial Sequence: Synthetic oligonucleotide
  Sense strand starting at position 2074 of SEQ ID NO: 1879231
aauaucuccucgcuacgua

SEQ ID NO: 1892393 - RNA, 19 nt, Artificial Sequence
  Description of Artificial Sequence: Synthetic oligonucleotide
  Antisense strand to SEQ ID NO: 1892392
uacguagcgaggagauauu

SEQ ID NO: 1892394 - RNA, 19 nt, Artificial Sequence
  Description of Artificial Sequence: Synthetic oligonucleotide
  Sense strand starting at position 2075 of SEQ ID NO: 1879231
auaucuccucgcuacguaa

SEQ ID NO: 1892395 - RNA, 19 nt, Artificial Sequence
  Description of Artificial Sequence: Synthetic oligonucleotide
  Antisense strand to SEQ ID NO: 1892394
uuacguagcgaggagauau

SEQ ID NO: 1892396 - RNA, 19 nt, Artificial Sequence
  Description of Artificial Sequence: Synthetic oligonucleotide
  Sense strand starting at position 2323 of SEQ ID NO: 1879231
ggaaauaacuaaggaggaa

SEQ ID NO: 1892397 - RNA, 19 nt, Artificial Sequence
  Description of Artificial Sequence: Synthetic oligonucleotide
  Antisense strand to SEQ ID NO: 1892396
uuccuccuuaguuauuucc

SEQ ID NO: 1892398 - RNA, 19 nt, Artificial Sequence
  Description of Artificial Sequence: Synthetic oligonucleotide
  Sense strand starting at position 2345 of SEQ ID NO: 1879231
cgucaucuccuagaacacu

SEQ ID NO: 1892399 - RNA, 19 nt, Artificial Sequence
  Description of Artificial Sequence: Synthetic oligonucleotide
  Antisense strand to SEQ ID NO: 1892398
aguguucuaggagaugacg

SEQ ID NO: 1892400 - RNA, 19 nt, Artificial Sequence
  Description of Artificial Sequence: Synthetic oligonucleotide
  Sense strand starting at position 2413 of SEQ ID NO: 1879231
gggagugaacauuguucau

SEQ ID NO: 1892401 - RNA, 19 nt, Artificial Sequence
  Description of Artificial Sequence: Synthetic oligonucleotide
  Antisense strand to SEQ ID NO: 1892400
augaacaauguucacuccc

SEQ ID NO: 1892402 - RNA, 19 nt, Artificial Sequence
  Description of Artificial Sequence: Synthetic oligonucleotide
  Sense strand starting at position 2469 of SEQ ID NO: 1879231
ucuccuuauuuacgaaaga

SEQ ID NO: 1892403 - RNA, 19 nt, Artificial Sequence
  Description of Artificial Sequence: Synthetic oligonucleotide
  Antisense strand to SEQ ID NO: 1892402
ucuuucguaaauaaggaga

SEQ ID NO: 1892404 - RNA, 19 nt, Artificial Sequence
  Description of Artificial Sequence: Synthetic oligonucleotide
  Sense strand starting at position 2675 of SEQ ID NO: 1879231
gaggaaggcuuguuacaaa

SEQ ID NO: 1892405 - RNA, 19 nt, Artificial Sequence
  Description of Artificial Sequence: Synthetic oligonucleotide
  Antisense strand to SEQ ID NO: 1892404
uuuguaacaagccuuccuc

SEQ ID NO: 1892406 - RNA, 19 nt, Artificial Sequence
  Description of Artificial Sequence: Synthetic oligonucleotide
  Sense strand starting at position 2701 of SEQ ID NO: 1879231
gaauaaauagccugagguu

SEQ ID NO: 1892407 - RNA, 19 nt, Artificial Sequence
  Description of Artificial Sequence: Synthetic oligonucleotide
  Antisense strand to SEQ ID NO: 1892406
aaccucaggcuauuuauuc

SEQ ID NO: 1892408 - RNA, 19 nt, Artificial Sequence
  Description of Artificial Sequence: Synthetic oligonucleotide
  Sense strand starting at position 2702 of SEQ ID NO: 1879231
aauaaauagccugagguuu

SEQ ID NO: 1892409 - RNA, 19 nt, Artificial Sequence
  Description of Artificial Sequence: Synthetic oligonucleotide
  Antisense strand to SEQ ID NO: 1892408
aaaccucaggcuauuuauu

SEQ ID NO: 1892410 - RNA, 19 nt, Artificial Sequence
  Description of Artificial Sequence: Synthetic oligonucleotide
  Sense strand starting at position 2708 of SEQ ID NO: 1879231
uagccugagguuugcaaga

SEQ ID NO: 1892411 - RNA, 19 nt, Artificial Sequence
  Description of Artificial Sequence: Synthetic oligonucleotide
  Antisense strand to SEQ ID NO: 1892410
ucuugcaaaccucaggcua

SEQ ID NO: 1892412 - RNA, 19 nt, Artificial Sequence
  Description of Artificial Sequence: Synthetic oligonucleotide
  Sense strand starting at position 3188 of SEQ ID NO: 1879231
ucuaucauugauggguaua

SEQ ID NO: 1892413 - RNA, 19 nt, Artificial Sequence
  Description of Artificial Sequence: Synthetic oligonucleotide
  Antisense strand to SEQ ID NO: 1892412
uauacccaucaaugauaga

SEQ ID NO: 1892414 - RNA, 19 nt, Artificial Sequence
  Description of Artificial Sequence: Synthetic oligonucleotide
  Sense strand starting at position 3273 of SEQ ID NO: 1879231
gggacuggguaucaggauu

SEQ ID NO: 1892415 - RNA, 19 nt, Artificial Sequence
  Description of Artificial Sequence: Synthetic oligonucleotide
  Antisense strand to SEQ ID NO: 1892414
aauccugauacccaguccc

SEQ ID NO: 1892416 - RNA, 19 nt, Artificial Sequence
  Description of Artificial Sequence: Synthetic oligonucleotide
  Sense strand starting at position 3281 of SEQ ID NO: 1879231
guaucaggauuacuuaaag

SEQ ID NO: 1892417 - RNA, 19 nt, Artificial Sequence
  Description of Artificial Sequence: Synthetic oligonucleotide
  Antisense strand to SEQ ID NO: 1892416
cuuuaaguaauccugauac

SEQ ID NO: 1892418 - RNA, 19 nt, Artificial Sequence
  Description of Artificial Sequence: Synthetic oligonucleotide
  Sense strand starting at position 3336 of SEQ ID NO: 1879231
cuauaugguacuggucaga

SEQ ID NO: 1892419 - RNA, 19 nt, Artificial Sequence
  Description of Artificial Sequence: Synthetic oligonucleotide
  Antisense strand to SEQ ID NO: 1892418
ucugaccaguaccauauag

SEQ ID NO: 1892420 - RNA, 19 nt, Artificial Sequence
  Description of Artificial Sequence: Synthetic oligonucleotide
  Sense strand starting at position 3339 of SEQ ID NO: 1879231
uaugguacuggucagagua

SEQ ID NO: 1892421 - RNA, 19 nt, Artificial Sequence
  Description of Artificial Sequence: Synthetic oligonucleotide
  Antisense strand to SEQ ID NO: 1892420
uacucugaccaguaccaua

SEQ ID NO: 1892422 - RNA, 19 nt, Artificial Sequence
  Description of Artificial Sequence: Synthetic oligonucleotide
  Sense strand starting at position 3449 of SEQ ID NO: 1879231
agaacaugcuucccuguaa

SEQ ID NO: 1892423 - RNA, 19 nt, Artificial Sequence
  Description of Artificial Sequence: Synthetic oligonucleotide
  Antisense strand to SEQ ID NO: 1892422
uuacagggaagcauguucu

SEQ ID NO: 1892424 - RNA, 19 nt, Artificial Sequence
  Description of Artificial Sequence: Synthetic oligonucleotide
  Sense strand starting at position 3524 of SEQ ID NO: 1879231
gccuuaccucguuaaguga

SEQ ID NO: 1892425 - RNA, 19 nt, Artificial Sequence
  Description of Artificial Sequence: Synthetic oligonucleotide
  Antisense strand to SEQ ID NO: 1892424
ucacuuaacgagguaaggc

SEQ ID NO: 1892426 - RNA, 19 nt, Artificial Sequence
  Description of Artificial Sequence: Synthetic oligonucleotide
  Sense strand starting at position 3527 of SEQ ID NO: 1879231
uuaccucguuaagugaaau

SEQ ID NO: 1892427 - RNA, 19 nt, Artificial Sequence
  Description of Artificial Sequence: Synthetic oligonucleotide
  Antisense strand to SEQ ID NO: 1892426
auuucacuuaacgagguaa

SEQ ID NO: 1892428 - RNA, 19 nt, Artificial Sequence
  Description of Artificial Sequence: Synthetic oligonucleotide
  Sense strand starting at position 3555 of SEQ ID NO: 1879231
ggaauuauacuuuggucua

SEQ ID NO: 1892429 - RNA, 19 nt, Artificial Sequence
  Description of Artificial Sequence: Synthetic oligonucleotide
  Antisense strand to SEQ ID NO: 1892428
uagaccaaaguauaauucc

SEQ ID NO: 1892430 - RNA, 19 nt, Artificial Sequence
  Description of Artificial Sequence: Synthetic oligonucleotide
  Sense strand starting at position 3588 of SEQ ID NO: 1879231
ggguauuuguuauauccua

SEQ ID NO: 1892431 - RNA, 19 nt, Artificial Sequence
  Description of Artificial Sequence: Synthetic oligonucleotide
  Antisense strand to SEQ ID NO: 1892430
uaggauauaacaaauaccc

SEQ ID NO: 1892432 - RNA, 19 nt, Artificial Sequence
  Description of Artificial Sequence: Synthetic oligonucleotide
  Sense strand starting at position 3612 of SEQ ID NO: 1879231
auauucuuuccugaagguu

SEQ ID NO: 1892433 - RNA, 19 nt, Artificial Sequence
  Description of Artificial Sequence: Synthetic oligonucleotide
  Antisense strand to SEQ ID NO: 1892432
aaccuucaggaaagaauau

SEQ ID NO: 1892434 - RNA, 19 nt, Artificial Sequence
  Description of Artificial Sequence: Synthetic oligonucleotide
  Sense strand starting at position 3755 of SEQ ID NO: 1879231
gagccaauccuacagugau

SEQ ID NO: 1892435 - RNA, 19 nt, Artificial Sequence
  Description of Artificial Sequence: Synthetic oligonucleotide
  Antisense strand to SEQ ID NO: 1892434
aucacuguaggauuggcuc

SEQ ID NO: 1892436 - RNA, 19 nt, Artificial Sequence
  Description of Artificial Sequence: Synthetic oligonucleotide
  Sense strand starting at position 3820 of SEQ ID NO: 1879231
ucgaacauuguggaguuua

SEQ ID NO: 1892437 - RNA, 19 nt, Artificial Sequence
  Description of Artificial Sequence: Synthetic oligonucleotide
  Antisense strand to SEQ ID NO: 1892436
uaaacuccacaauguucga

SEQ ID NO: 1892438 - RNA, 19 nt, Artificial Sequence
  Description of Artificial Sequence: Synthetic oligonucleotide
  Sense strand starting at position 3825 of SEQ ID NO: 1879231
cauuguggaguuuagaagu

SEQ ID NO: 1892439 - RNA, 19 nt, Artificial Sequence
  Description of Artificial Sequence: Synthetic oligonucleotide
  Antisense strand to SEQ ID NO: 1892438
acuucuaaacuccacaaug

SEQ ID NO: 1892440 - RNA, 19 nt, Artificial Sequence
  Description of Artificial Sequence: Synthetic oligonucleotide
  Sense strand starting at position 3872 of SEQ ID NO: 1879231
gugucauccucauauuuga

SEQ ID NO: 1892441 - RNA, 19 nt, Artificial Sequence
  Description of Artificial Sequence: Synthetic oligonucleotide
  Antisense strand to SEQ ID NO: 1892440
ucaaauaugaggaugacac

SEQ ID NO: 1892442 - RNA, 19 nt, Artificial Sequence
  Description of Artificial Sequence: Synthetic oligonucleotide
  Sense strand starting at position 3950 of SEQ ID NO: 1879231
ccuggcaguguuuagaagu

SEQ ID NO: 1892443 - RNA, 19 nt, Artificial Sequence
  Description of Artificial Sequence: Synthetic oligonucleotide
  Antisense strand to SEQ ID NO: 1892442
acuucuaaacacugccagg

SEQ ID NO: 1892444 - RNA, 19 nt, Artificial Sequence
  Description of Artificial Sequence: Synthetic oligonucleotide
  Sense strand starting at position 3957 of SEQ ID NO: 1879231
guguuuagaaguggcauga

SEQ ID NO: 1892445 - RNA, 19 nt, Artificial Sequence
  Description of Artificial Sequence: Synthetic oligonucleotide
  Antisense strand to SEQ ID NO: 1892444
ucaugccacuucuaaacac

SEQ ID NO: 1892446 - RNA, 19 nt, Artificial Sequence
  Description of Artificial Sequence: Synthetic oligonucleotide
  Sense strand starting at position 70 of SEQ ID NO: 1879232
ccagcuugccuggaggaga

SEQ ID NO: 1892447 - RNA, 19 nt, Artificial Sequence
  Description of Artificial Sequence: Synthetic oligonucleotide
  Antisense strand to SEQ ID NO: 1892446
ucuccuccaggcaagcugg

SEQ ID NO: 1892448 - RNA, 19 nt, Artificial Sequence
  Description of Artificial Sequence: Synthetic oligonucleotide
  Sense strand starting at position 103 of SEQ ID NO: 1879232
ucaauuaaucccuguuugu

SEQ ID NO: 1892449 - RNA, 19 nt, Artificial Sequence
  Description of Artificial Sequence: Synthetic oligonucleotide
  Antisense strand to SEQ ID NO: 1892448
acaaacagggauuaauuga

SEQ ID NO: 1892450 - RNA, 19 nt, Artificial Sequence
  Description of Artificial Sequence: Synthetic oligonucleotide
  Sense strand starting at position 165 of SEQ ID NO: 1879232
cuauuugggcccugugaug

SEQ ID NO: 1892451 - RNA, 19 nt, Artificial Sequence
  Description of Artificial Sequence: Synthetic oligonucleotide
  Antisense strand to SEQ ID NO: 1892450
caucacagggcccaaauag

SEQ ID NO: 1892452 - RNA, 19 nt, Artificial Sequence
  Description of Artificial Sequence: Synthetic oligonucleotide
  Sense strand starting at position 300 of SEQ ID NO: 1879232
aggagaagcucucucagcu

SEQ ID NO: 1892453 - RNA, 19 nt, Artificial Sequence
  Description of Artificial Sequence: Synthetic oligonucleotide
  Antisense strand to SEQ ID NO: 1892452
agcugagagagcuucuccu

SEQ ID NO: 1892454 - RNA, 19 nt, Artificial Sequence
  Description of Artificial Sequence: Synthetic oligonucleotide
  Sense strand starting at position 307 of SEQ ID NO: 1879232
gcucucucagcucagagaa

SEQ ID NO: 1892455 - RNA, 19 nt, Artificial Sequence
  Description of Artificial Sequence: Synthetic oligonucleotide
  Antisense strand to SEQ ID NO: 1892454
uucucugagcugagagagc

SEQ ID NO: 1892456 - RNA, 19 nt, Artificial Sequence
  Description of Artificial Sequence: Synthetic oligonucleotide
  Sense strand starting at position 397 of SEQ ID NO: 1879232
gaaggcugggcucaaauau

SEQ ID NO: 1892457 - RNA, 19 nt, Artificial Sequence
  Description of Artificial Sequence: Synthetic oligonucleotide
  Antisense strand to SEQ ID NO: 1892456
auauuugagcccagccuuc

SEQ ID NO: 1892458 - RNA, 19 nt, Artificial Sequence
  Description of Artificial Sequence: Synthetic oligonucleotide
  Sense strand starting at position 1137 of SEQ ID NO: 1879232
gacgacuuggcugacaaca

SEQ ID NO: 1892459 - RNA, 19 nt, Artificial Sequence
  Description of Artificial Sequence: Synthetic oligonucleotide
  Antisense strand to SEQ ID NO: 1892458
uguugucagccaagucguc

SEQ ID NO: 1892460 - RNA, 19 nt, Artificial Sequence
  Description of Artificial Sequence: Synthetic oligonucleotide
  Sense strand starting at position 1618 of SEQ ID NO: 1879232
ggacacuggcgaugaaaua

SEQ ID NO: 1892461 - RNA, 19 nt, Artificial Sequence
  Description of Artificial Sequence: Synthetic oligonucleotide
  Antisense strand to SEQ ID NO: 1892460
uauuucaucgccagugucc

SEQ ID NO: 1892462 - RNA, 19 nt, Artificial Sequence
  Description of Artificial Sequence: Synthetic oligonucleotide
  Sense strand starting at position 2179 of SEQ ID NO: 1879232
guaagaaauucuuuccuug

SEQ ID NO: 1892463 - RNA, 19 nt, Artificial Sequence
  Description of Artificial Sequence: Synthetic oligonucleotide
  Antisense strand to SEQ ID NO: 1892462
caaggaaagaauuucuuac

SEQ ID NO: 1892464 - RNA, 19 nt, Artificial Sequence
  Description of Artificial Sequence: Synthetic oligonucleotide
  Sense strand starting at position 2511 of SEQ ID NO: 1879232
acuguuaggcguaggguua

SEQ ID NO: 1892465 - RNA, 19 nt, Artificial Sequence
  Description of Artificial Sequence: Synthetic oligonucleotide
  Antisense strand to SEQ ID NO: 1892464
uaacccuacgccuaacagu

SEQ ID NO: 1892466 - RNA, 19 nt, Artificial Sequence
  Description of Artificial Sequence: Synthetic oligonucleotide
  Sense strand starting at position 2594 of SEQ ID NO: 1879232
guuucucccuucucagauu

SEQ ID NO: 1892467 - RNA, 19 nt, Artificial Sequence
  Description of Artificial Sequence: Synthetic oligonucleotide
  Antisense strand to SEQ ID NO: 1892466
aaucugagaagggagaaac

SEQ ID NO: 1892468 - RNA, 19 nt, Artificial Sequence
  Description of Artificial Sequence: Synthetic oligonucleotide
  Sense strand starting at position 2855 of SEQ ID NO: 1879232
cccuuucuugcagacagaa

SEQ ID NO: 1892469 - RNA, 19 nt, Artificial Sequence
  Description of Artificial Sequence: Synthetic oligonucleotide
  Antisense strand to SEQ ID NO: 1892468
uucugucugcaagaaaggg

SEQ ID NO: 1892470 - RNA, 19 nt, Artificial Sequence
  Description of Artificial Sequence: Synthetic oligonucleotide
  Sense strand starting at position 2917 of SEQ ID NO: 1879232
cuuaguuauuaugugagca

SEQ ID NO: 1892471 - RNA, 19 nt, Artificial Sequence
  Description of Artificial Sequence: Synthetic oligonucleotide
  Antisense strand to SEQ ID NO: 1892470
ugcucacauaauaacuaag

SEQ ID NO: 1892472 - RNA, 19 nt, Artificial Sequence
  Description of Artificial Sequence: Synthetic oligonucleotide
  Sense strand starting at position 2918 of SEQ ID NO: 1879232
uuaguuauuaugugagcag

SEQ ID NO: 1892473 - RNA, 19 nt, Artificial Sequence
  Description of Artificial Sequence: Synthetic oligonucleotide
  Antisense strand to SEQ ID NO: 1892472
cugcucacauaauaacuaa

SEQ ID NO: 1892474 - RNA, 19 nt, Artificial Sequence
  Description of Artificial Sequence: Synthetic oligonucleotide
  Sense strand starting at position 2921 of SEQ ID NO: 1879232
guuauuaugugagcaggaa

SEQ ID NO: 1892475 - RNA, 19 nt, Artificial Sequence
  Description of Artificial Sequence: Synthetic oligonucleotide
  Antisense strand to SEQ ID NO: 1892474
uuccugcucacauaauaac

SEQ ID NO: 1892476 - RNA, 19 nt, Artificial Sequence
  Description of Artificial Sequence: Synthetic oligonucleotide
  Sense strand starting at position 2922 of SEQ ID NO: 1879232
uuauuaugugagcaggaau

SEQ ID NO: 1892477 - RNA, 19 nt, Artificial Sequence
  Description of Artificial Sequence: Synthetic oligonucleotide
  Antisense strand to SEQ ID NO: 1892476
auuccugcucacauaauaa

SEQ ID NO: 1892478 - RNA, 19 nt, Artificial Sequence
  Description of Artificial Sequence: Synthetic oligonucleotide
  Sense strand starting at position 2991 of SEQ ID NO: 1879232
cauggugcagguugugaaa

SEQ ID NO: 1892479 - RNA, 19 nt, Artificial Sequence
  Description of Artificial Sequence: Synthetic oligonucleotide
  Antisense strand to SEQ ID NO: 1892478
uuucacaaccugcaccaug

SEQ ID NO: 1892480 - RNA, 19 nt, Artificial Sequence
  Description of Artificial Sequence: Synthetic oligonucleotide
  Sense strand starting at position 3003 of SEQ ID NO: 1879232
ugugaaacugagugggaau

SEQ ID NO: 1892481 - RNA, 19 nt, Artificial Sequence
  Description of Artificial Sequence: Synthetic oligonucleotide
  Antisense strand to SEQ ID NO: 1892480
auucccacucaguuucaca

SEQ ID NO: 1892482 - RNA, 19 nt, Artificial Sequence
  Description of Artificial Sequence: Synthetic oligonucleotide
  Sense strand starting at position 3014 of SEQ ID NO: 1879232
gugggaaugugcuuucuug

SEQ ID NO: 1892483 - RNA, 19 nt, Artificial Sequence
  Description of Artificial Sequence: Synthetic oligonucleotide
  Antisense strand to SEQ ID NO: 1892482
caagaaagcacauucccac

SEQ ID NO: 1892484 - RNA, 19 nt, Artificial Sequence
  Description of Artificial Sequence: Synthetic oligonucleotide
  Sense strand starting at position 3144 of SEQ ID NO: 1879232
guaucucuaucagugaaac

SEQ ID NO: 1892485 - RNA, 19 nt, Artificial Sequence
  Description of Artificial Sequence: Synthetic oligonucleotide
  Antisense strand to SEQ ID NO: 1892484
guuucacugauagagauac

SEQ ID NO: 1892486 - RNA, 19 nt, Artificial Sequence
  Description of Artificial Sequence: Synthetic oligonucleotide
  Sense strand starting at position 3156 of SEQ ID NO: 1879232
gugaaacuucugggaccaa

SEQ ID NO: 1892487 - RNA, 19 nt, Artificial Sequence
  Description of Artificial Sequence: Synthetic oligonucleotide
  Antisense strand to SEQ ID NO: 1892486
uuggucccagaaguuucac

SEQ ID NO: 1892488 - RNA, 19 nt, Artificial Sequence
  Description of Artificial Sequence: Synthetic oligonucleotide
  Sense strand starting at position 3157 of SEQ ID NO: 1879232
ugaaacuucugggaccaau

SEQ ID NO: 1892489 - RNA, 19 nt, Artificial Sequence
  Description of Artificial Sequence: Synthetic oligonucleotide
  Antisense strand to SEQ ID NO: 1892488
auuggucccagaaguuuca

SEQ ID NO: 1892490 - RNA, 19 nt, Artificial Sequence
  Description of Artificial Sequence: Synthetic oligonucleotide
  Sense strand starting at position 3190 of SEQ ID NO: 1879232
accugcuaucucgagauau

SEQ ID NO: 1892491 - RNA, 19 nt, Artificial Sequence
  Description of Artificial Sequence: Synthetic oligonucleotide
  Antisense strand to SEQ ID NO: 1892490
auaucucgagauagcaggu

SEQ ID NO: 1892492 - RNA, 19 nt, Artificial Sequence
  Description of Artificial Sequence: Synthetic oligonucleotide
  Sense strand starting at position 3192 of SEQ ID NO: 1879232
cugcuaucucgagauauuc

SEQ ID NO: 1892493 - RNA, 19 nt, Artificial Sequence
  Description of Artificial Sequence: Synthetic oligonucleotide
  Antisense strand to SEQ ID NO: 1892492
gaauaucucgagauagcag

SEQ ID NO: 1892494 - RNA, 19 nt, Artificial Sequence
  Description of Artificial Sequence: Synthetic oligonucleotide
  Sense strand starting at position 3200 of SEQ ID NO: 1879232
ucgagauauucccuaccau

SEQ ID NO: 1892495 - RNA, 19 nt, Artificial Sequence
  Description of Artificial Sequence: Synthetic oligonucleotide
  Antisense strand to SEQ ID NO: 1892494
augguagggaauaucucga

SEQ ID NO: 1892496 - RNA, 19 nt, Artificial Sequence
  Description of Artificial Sequence: Synthetic oligonucleotide
  Sense strand starting at position 3201 of SEQ ID NO: 1879232
cgagauauucccuaccauc

SEQ ID NO: 1892497 - RNA, 19 nt, Artificial Sequence
  Description of Artificial Sequence: Synthetic oligonucleotide
  Antisense strand to SEQ ID NO: 1892496
gaugguagggaauaucucg

SEQ ID NO: 1892498 - RNA, 19 nt, Artificial Sequence
  Description of Artificial Sequence: Synthetic oligonucleotide
  Sense strand starting at position 3209 of SEQ ID NO: 1879232
ucccuaccaucuguagaua

SEQ ID NO: 1892499 - RNA, 19 nt, Artificial Sequence
  Description of Artificial Sequence: Synthetic oligonucleotide
  Antisense strand to SEQ ID NO: 1892498
uaucuacagaugguaggga

SEQ ID NO: 1892500 - RNA, 19 nt, Artificial Sequence
  Description of Artificial Sequence: Synthetic oligonucleotide
  Sense strand starting at position 3424 of SEQ ID NO: 1879232
aagugcauugcuuggauua

SEQ ID NO: 1892501 - RNA, 19 nt, Artificial Sequence
  Description of Artificial Sequence: Synthetic oligonucleotide
  Antisense strand to SEQ ID NO: 1892500
uaauccaagcaaugcacuu

SEQ ID NO: 1892502 - RNA, 19 nt, Artificial Sequence
  Description of Artificial Sequence: Synthetic oligonucleotide
  Sense strand starting at position 3425 of SEQ ID NO: 1879232
agugcauugcuuggauuaa

SEQ ID NO: 1892503 - RNA, 19 nt, Artificial Sequence
  Description of Artificial Sequence: Synthetic oligonucleotide
  Antisense strand to SEQ ID NO: 1892502
uuaauccaagcaaugcacu

SEQ ID NO: 1892504 - RNA, 19 nt, Artificial Sequence
  Description of Artificial Sequence: Synthetic oligonucleotide
  Sense strand starting at position 3437 of SEQ ID NO: 1879232
ggauuaacuuagucuuacu

SEQ ID NO: 1892505 - RNA, 19 nt, Artificial Sequence
  Description of Artificial Sequence: Synthetic oligonucleotide
  Antisense strand to SEQ ID NO: 1892504
aguaagacuaaguuaaucc

SEQ ID NO: 1892506 - RNA, 19 nt, Artificial Sequence
  Description of Artificial Sequence: Synthetic oligonucleotide
  Sense strand starting at position 3730 of SEQ ID NO: 1879232
aggucauggucuccaggua

SEQ ID NO: 1892507 - RNA, 19 nt, Artificial Sequence
  Description of Artificial Sequence: Synthetic oligonucleotide
  Antisense strand to SEQ ID NO: 1892506
uaccuggagaccaugaccu

SEQ ID NO: 1892508 - RNA, 19 nt, Artificial Sequence
  Description of Artificial Sequence: Synthetic oligonucleotide
  Sense strand starting at position 3731 of SEQ ID NO: 1879232
ggucauggucuccagguau

SEQ ID NO: 1892509 - RNA, 19 nt, Artificial Sequence
  Description of Artificial Sequence: Synthetic oligonucleotide
  Antisense strand to SEQ ID NO: 1892508
auaccuggagaccaugacc

SEQ ID NO: 1892510 - RNA, 19 nt, Artificial Sequence
  Description of Artificial Sequence: Synthetic oligonucleotide
  Sense strand starting at position 3742 of SEQ ID NO: 1879232
ccagguauugggugaggaa

SEQ ID NO: 1892511 - RNA, 19 nt, Artificial Sequence
  Description of Artificial Sequence: Synthetic oligonucleotide
  Antisense strand to SEQ ID NO: 1892510
uuccucacccaauaccugg

SEQ ID NO: 1892512 - RNA, 19 nt, Artificial Sequence
  Description of Artificial Sequence: Synthetic oligonucleotide
  Sense strand starting at position 3756 of SEQ ID NO: 1879232
aggaauaacucauuaggcu

SEQ ID NO: 1892513 - RNA, 19 nt, Artificial Sequence
  Description of Artificial Sequence: Synthetic oligonucleotide
  Antisense strand to SEQ ID NO: 1892512
agccuaaugaguuauuccu

SEQ ID NO: 1892514 - RNA, 19 nt, Artificial Sequence
  Description of Artificial Sequence: Synthetic oligonucleotide
  Sense strand starting at position 3783 of SEQ ID NO: 1879232
uggacucuccuuugaccaa

SEQ ID NO: 1892515 - RNA, 19 nt, Artificial Sequence
  Description of Artificial Sequence: Synthetic oligonucleotide
  Antisense strand to SEQ ID NO: 1892514
uuggucaaaggagagucca

SEQ ID NO: 1892516 - RNA, 19 nt, Artificial Sequence
  Description of Artificial Sequence: Synthetic oligonucleotide
  Sense strand starting at position 3802 of SEQ ID NO: 1879232
ggagcagugccugcucuuu

SEQ ID NO: 1892517 - RNA, 19 nt, Artificial Sequence
  Description of Artificial Sequence: Synthetic oligonucleotide
  Antisense strand to SEQ ID NO: 1892516
aaagagcaggcacugcucc

SEQ ID NO: 1892518 - RNA, 19 nt, Artificial Sequence
  Description of Artificial Sequence: Synthetic oligonucleotide
  Sense strand starting at position 3827 of SEQ ID NO: 1879232
gagaaaugcuguccaucaa

SEQ ID NO: 1892519 - RNA, 19 nt, Artificial Sequence
  Description of Artificial Sequence: Synthetic oligonucleotide
  Antisense strand to SEQ ID NO: 1892518
uugauggacagcauuucuc

SEQ ID NO: 1892520 - RNA, 19 nt, Artificial Sequence
  Description of Artificial Sequence: Synthetic oligonucleotide
  Sense strand starting at position 3828 of SEQ ID NO: 1879232
agaaaugcuguccaucaag

SEQ ID NO: 1892521 - RNA, 19 nt, Artificial Sequence
  Description of Artificial Sequence: Synthetic oligonucleotide
  Antisense strand to SEQ ID NO: 1892520
cuugauggacagcauuucu

SEQ ID NO: 1892522 - RNA, 19 nt, Artificial Sequence
  Description of Artificial Sequence: Synthetic oligonucleotide
  Sense strand starting at position 3859 of SEQ ID NO: 1879232
cccucaaaugccugguuaa

SEQ ID NO: 1892523 - RNA, 19 nt, Artificial Sequence
  Description of Artificial Sequence: Synthetic oligonucleotide
  Antisense strand to SEQ ID NO: 1892522
uuaaccaggcauuugaggg

SEQ ID NO: 1892524 - RNA, 19 nt, Artificial Sequence
  Description of Artificial Sequence: Synthetic oligonucleotide
  Sense strand starting at position 3860 of SEQ ID NO: 1879232
ccucaaaugccugguuaau

SEQ ID NO: 1892525 - RNA, 19 nt, Artificial Sequence
  Description of Artificial Sequence: Synthetic oligonucleotide
  Antisense strand to SEQ ID NO: 1892524
auuaaccaggcauuugagg

SEQ ID NO: 1892526 - RNA, 19 nt, Artificial Sequence
  Description of Artificial Sequence: Synthetic oligonucleotide
  Sense strand starting at position 80 of SEQ ID NO: 1879233
uuucuuuaugcauaggcua

SEQ ID NO: 1892527 - RNA, 19 nt, Artificial Sequence
  Description of Artificial Sequence: Synthetic oligonucleotide
  Antisense strand to SEQ ID NO: 1892526
uagccuaugcauaaagaaa

SEQ ID NO: 1892528 - RNA, 19 nt, Artificial Sequence
  Description of Artificial Sequence: Synthetic oligonucleotide
  Sense strand starting at position 126 of SEQ ID NO: 1879233
guacuacuucuguaaccaa

SEQ ID NO: 1892529 - RNA, 19 nt, Artificial Sequence
  Description of Artificial Sequence: Synthetic oligonucleotide
  Antisense strand to SEQ ID NO: 1892528
uugguuacagaaguaguac

SEQ ID NO: 1892530 - RNA, 19 nt, Artificial Sequence
  Description of Artificial Sequence: Synthetic oligonucleotide
  Sense strand starting at position 202 of SEQ ID NO: 1879233
acacuaguuuauucuggua

SEQ ID NO: 1892531 - RNA, 19 nt, Artificial Sequence
  Description of Artificial Sequence: Synthetic oligonucleotide
  Antisense strand to SEQ ID NO: 1892530
uaccagaauaaacuagugu

SEQ ID NO: 1892532 - RNA, 19 nt, Artificial Sequence
  Description of Artificial Sequence: Synthetic oligonucleotide
  Sense strand starting at position 540 of SEQ ID NO: 1879233
acauaaacuuucguuaaga

SEQ ID NO: 1892533 - RNA, 19 nt, Artificial Sequence
  Description of Artificial Sequence: Synthetic oligonucleotide
  Antisense strand to SEQ ID NO: 1892532
ucuuaacgaaaguuuaugu

SEQ ID NO: 1892534 - RNA, 19 nt, Artificial Sequence
  Description of Artificial Sequence: Synthetic oligonucleotide
  Sense strand starting at position 777 of SEQ ID NO: 1879233
cgugguacugagcacuuaa

SEQ ID NO: 1892535 - RNA, 19 nt, Artificial Sequence
  Description of Artificial Sequence: Synthetic oligonucleotide
  Antisense strand to SEQ ID NO: 1892534
uuaagugcucaguaccacg

SEQ ID NO: 1892536 - RNA, 19 nt, Artificial Sequence
  Description of Artificial Sequence: Synthetic oligonucleotide
  Sense strand starting at position 880 of SEQ ID NO: 1879233
guagccaaugccuaagaau

SEQ ID NO: 1892537 - RNA, 19 nt, Artificial Sequence
  Description of Artificial Sequence: Synthetic oligonucleotide
  Antisense strand to SEQ ID NO: 1892536
auucuuaggcauuggcuac

SEQ ID NO: 1892538 - RNA, 19 nt, Artificial Sequence
  Description of Artificial Sequence: Synthetic oligonucleotide
  Sense strand starting at position 926 of SEQ ID NO: 1879233
ugaauaaacgacuguauua

SEQ ID NO: 1892539 - RNA, 19 nt, Artificial Sequence
  Description of Artificial Sequence: Synthetic oligonucleotide
  Antisense strand to SEQ ID NO: 1892538
uaauacagucguuuauuca

SEQ ID NO: 1892540 - RNA, 19 nt, Artificial Sequence
  Description of Artificial Sequence: Synthetic oligonucleotide
  Sense strand starting at position 951 of SEQ ID NO: 1879233
augcaugauucugucaaua

SEQ ID NO: 1892541 - RNA, 19 nt, Artificial Sequence
  Description of Artificial Sequence: Synthetic oligonucleotide
  Antisense strand to SEQ ID NO: 1892540
uauugacagaaucaugcau

SEQ ID NO: 1892542 - RNA, 19 nt, Artificial Sequence
  Description of Artificial Sequence: Synthetic oligonucleotide
  Sense strand starting at position 1124 of SEQ ID NO: 1879233
aagguucgcgcuuugcaga

SEQ ID NO: 1892543 - RNA, 19 nt, Artificial Sequence
  Description of Artificial Sequence: Synthetic oligonucleotide
  Antisense strand to SEQ ID NO: 1892542
ucugcaaagcgcgaaccuu

SEQ ID NO: 1892544 - RNA, 19 nt, Artificial Sequence
  Description of Artificial Sequence: Synthetic oligonucleotide
  Sense strand starting at position 1159 of SEQ ID NO: 1879233
gugucaauaaaucgaguua

SEQ ID NO: 1892545 - RNA, 19 nt, Artificial Sequence
  Description of Artificial Sequence: Synthetic oligonucleotide
  Antisense strand to SEQ ID NO: 1892544
uaacucgauuuauugacac

SEQ ID NO: 1892546 - RNA, 19 nt, Artificial Sequence
  Description of Artificial Sequence: Synthetic oligonucleotide
  Sense strand starting at position 1196 of SEQ ID NO: 1879233
caagcuaaguuggcauaua

SEQ ID NO: 1892547 - RNA, 19 nt, Artificial Sequence
  Description of Artificial Sequence: Synthetic oligonucleotide
  Antisense strand to SEQ ID NO: 1892546
uauaugccaacuuagcuug

SEQ ID NO: 1892548 - RNA, 19 nt, Artificial Sequence
  Description of Artificial Sequence: Synthetic oligonucleotide
  Sense strand starting at position 1219 of SEQ ID NO: 1879233
gugguucagucaguauuua

SEQ ID NO: 1892549 - RNA, 19 nt, Artificial Sequence
  Description of Artificial Sequence: Synthetic oligonucleotide
  Antisense strand to SEQ ID NO: 1892548
uaaauacugacugaaccac

SEQ ID NO: 1892550 - RNA, 19 nt, Artificial Sequence
  Description of Artificial Sequence: Synthetic oligonucleotide
  Sense strand starting at position 1227 of SEQ ID NO: 1879233
gucaguauuuaugaaugac

SEQ ID NO: 1892551 - RNA, 19 nt, Artificial Sequence
  Description of Artificial Sequence: Synthetic oligonucleotide
  Antisense strand to SEQ ID NO: 1892550
gucauucauaaauacugac

SEQ ID NO: 1892552 - RNA, 19 nt, Artificial Sequence
  Description of Artificial Sequence: Synthetic oligonucleotide
  Sense strand starting at position 1310 of SEQ ID NO: 1879233
uaacucgauccggagaauu

SEQ ID NO: 1892553 - RNA, 19 nt, Artificial Sequence
  Description of Artificial Sequence: Synthetic oligonucleotide
  Antisense strand to SEQ ID NO: 1892552
aauucuccggaucgaguua

SEQ ID NO: 1892554 - RNA, 19 nt, Artificial Sequence
  Description of Artificial Sequence: Synthetic oligonucleotide
  Sense strand starting at position 1322 of SEQ ID NO: 1879233
gagaauuaauccguggcga

SEQ ID NO: 1892555 - RNA, 19 nt, Artificial Sequence
  Description of Artificial Sequence: Synthetic oligonucleotide
  Antisense strand to SEQ ID NO: 1892554
ucgccacggauuaauucuc

SEQ ID NO: 1892556 - RNA, 19 nt, Artificial Sequence
  Description of Artificial Sequence: Synthetic oligonucleotide
  Sense strand starting at position 1323 of SEQ ID NO: 1879233
agaauuaauccguggcgaa

SEQ ID NO: 1892557 - RNA, 19 nt, Artificial Sequence
  Description of Artificial Sequence: Synthetic oligonucleotide
  Antisense strand to SEQ ID NO: 1892556
uucgccacggauuaauucu

SEQ ID NO: 1892558 - RNA, 19 nt, Artificial Sequence
  Description of Artificial Sequence: Synthetic oligonucleotide
  Sense strand starting at position 1335 of SEQ ID NO: 1879233
uggcgaauucuccaauaac

SEQ ID NO: 1892559 - RNA, 19 nt, Artificial Sequence
  Description of Artificial Sequence: Synthetic oligonucleotide
  Antisense strand to SEQ ID NO: 1892558
guuauuggagaauucgcca

SEQ ID NO: 1892560 - RNA, 19 nt, Artificial Sequence
  Description of Artificial Sequence: Synthetic oligonucleotide
  Sense strand starting at position 1387 of SEQ ID NO: 1879233
gggagaugaguugaucguu

SEQ ID NO: 1892561 - RNA, 19 nt, Artificial Sequence
  Description of Artificial Sequence: Synthetic oligonucleotide
  Antisense strand to SEQ ID NO: 1892560
aacgaucaacucaucuccc

SEQ ID NO: 1892562 - RNA, 19 nt, Artificial Sequence
  Description of Artificial Sequence: Synthetic oligonucleotide
  Sense strand starting at position 2068 of SEQ ID NO: 1879233
ccaagauauccggagcgga

SEQ ID NO: 1892563 - RNA, 19 nt, Artificial Sequence
  Description of Artificial Sequence: Synthetic oligonucleotide
  Antisense strand to SEQ ID NO: 1892562
uccgcuccggauaucuugg

SEQ ID NO: 1892564 - RNA, 19 nt, Artificial Sequence
  Description of Artificial Sequence: Synthetic oligonucleotide
  Sense strand starting at position 2271 of SEQ ID NO: 1879233
ucgacuaucaugugucaga

SEQ ID NO: 1892565 - RNA, 19 nt, Artificial Sequence
  Description of Artificial Sequence: Synthetic oligonucleotide
  Antisense strand to SEQ ID NO: 1892564
ucugacacaugauagucga

SEQ ID NO: 1892566 - RNA, 19 nt, Artificial Sequence
  Description of Artificial Sequence: Synthetic oligonucleotide
  Sense strand starting at position 2272 of SEQ ID NO: 1879233
cgacuaucaugugucagac

SEQ ID NO: 1892567 - RNA, 19 nt, Artificial Sequence
  Description of Artificial Sequence: Synthetic oligonucleotide
  Antisense strand to SEQ ID NO: 1892566
gucugacacaugauagucg

SEQ ID NO: 1892568 - RNA, 19 nt, Artificial Sequence
  Description of Artificial Sequence: Synthetic oligonucleotide
  Sense strand starting at position 2356 of SEQ ID NO: 1879233
agaucaaacuguucuuguu

SEQ ID NO: 1892569 - RNA, 19 nt, Artificial Sequence
  Description of Artificial Sequence: Synthetic oligonucleotide
  Antisense strand to SEQ ID NO: 1892568
aacaagaacaguuugaucu

SEQ ID NO: 1892570 - RNA, 19 nt, Artificial Sequence
  Description of Artificial Sequence: Synthetic oligonucleotide
  Sense strand starting at position 2503 of SEQ ID NO: 1879233
ggguaucucaagugcauua

SEQ ID NO: 1892571 - RNA, 19 nt, Artificial Sequence
  Description of Artificial Sequence: Synthetic oligonucleotide
  Antisense strand to SEQ ID NO: 1892570
uaaugcacuugagauaccc

SEQ ID NO: 1892572 - RNA, 19 nt, Artificial Sequence
  Description of Artificial Sequence: Synthetic oligonucleotide
  Sense strand starting at position 2660 of SEQ ID NO: 1879233
ggugguguccuaagggcuu

SEQ ID NO: 1892573 - RNA, 19 nt, Artificial Sequence
  Description of Artificial Sequence: Synthetic oligonucleotide
  Antisense strand to SEQ ID NO: 1892572
aagcccuuaggacaccacc

SEQ ID NO: 1892574 - RNA, 19 nt, Artificial Sequence
  Description of Artificial Sequence: Synthetic oligonucleotide
  Sense strand starting at position 2667 of SEQ ID NO: 1879233
uccuaagggcuuuaaguau

SEQ ID NO: 1892575 - RNA, 19 nt, Artificial Sequence
  Description of Artificial Sequence: Synthetic oligonucleotide
  Antisense strand to SEQ ID NO: 1892574
auacuuaaagcccuuagga

SEQ ID NO: 1892576 - RNA, 19 nt, Artificial Sequence
  Description of Artificial Sequence: Synthetic oligonucleotide
  Sense strand starting at position 2711 of SEQ ID NO: 1879233
accaauaauuagguguuau

SEQ ID NO: 1892577 - RNA, 19 nt, Artificial Sequence
  Description of Artificial Sequence: Synthetic oligonucleotide
  Antisense strand to SEQ ID NO: 1892576
auaacaccuaauuauuggu

SEQ ID NO: 1892578 - RNA, 19 nt, Artificial Sequence
  Description of Artificial Sequence: Synthetic oligonucleotide
  Sense strand starting at position 2760 of SEQ ID NO: 1879233
gggacuuguaaugguaauu

SEQ ID NO: 1892579 - RNA, 19 nt, Artificial Sequence
  Description of Artificial Sequence: Synthetic oligonucleotide
  Antisense strand to SEQ ID NO: 1892578
aauuaccauuacaaguccc

SEQ ID NO: 1892580 - RNA, 19 nt, Artificial Sequence
  Description of Artificial Sequence: Synthetic oligonucleotide
  Sense strand starting at position 2772 of SEQ ID NO: 1879233
gguaauuggcaguacugga

SEQ ID NO: 1892581 - RNA, 19 nt, Artificial Sequence
  Description of Artificial Sequence: Synthetic oligonucleotide
  Antisense strand to SEQ ID NO: 1892580
uccaguacugccaauuacc

SEQ ID NO: 1892582 - RNA, 19 nt, Artificial Sequence
  Description of Artificial Sequence: Synthetic oligonucleotide
  Sense strand starting at position 2797 of SEQ ID NO: 1879233
acgauauuauucucuggcu

SEQ ID NO: 1892583 - RNA, 19 nt, Artificial Sequence
  Description of Artificial Sequence: Synthetic oligonucleotide
  Antisense strand to SEQ ID NO: 1892582
agccagagaauaauaucgu

SEQ ID NO: 1892584 - RNA, 19 nt, Artificial Sequence
  Description of Artificial Sequence: Synthetic oligonucleotide
  Sense strand starting at position 2798 of SEQ ID NO: 1879233
cgauauuauucucuggcua

SEQ ID NO: 1892585 - RNA, 19 nt, Artificial Sequence
  Description of Artificial Sequence: Synthetic oligonucleotide
  Antisense strand to SEQ ID NO: 1892584
uagccagagaauaauaucg

SEQ ID NO: 1892586 - RNA, 19 nt, Artificial Sequence
  Description of Artificial Sequence: Synthetic oligonucleotide
  Sense strand starting at position 2802 of SEQ ID NO: 1879233
auuauucucuggcuaaugu

SEQ ID NO: 1892587 - RNA, 19 nt, Artificial Sequence
  Description of Artificial Sequence: Synthetic oligonucleotide
  Antisense strand to SEQ ID NO: 1892586
acauuagccagagaauaau

SEQ ID NO: 1892588 - RNA, 19 nt, Artificial Sequence
  Description of Artificial Sequence: Synthetic oligonucleotide
  Sense strand starting at position 2811 of SEQ ID NO: 1879233
uggcuaaugucauuagaau

SEQ ID NO: 1892589 - RNA, 19 nt, Artificial Sequence
  Description of Artificial Sequence: Synthetic oligonucleotide
  Antisense strand to SEQ ID NO: 1892588
auucuaaugacauuagcca

SEQ ID NO: 1892590 - RNA, 19 nt, Artificial Sequence
  Description of Artificial Sequence: Synthetic oligonucleotide
  Sense strand starting at position 2812 of SEQ ID NO: 1879233
ggcuaaugucauuagaaua

SEQ ID NO: 1892591 - RNA, 19 nt, Artificial Sequence
  Description of Artificial Sequence: Synthetic oligonucleotide
  Antisense strand to SEQ ID NO: 1892590
uauucuaaugacauuagcc

SEQ ID NO: 1892592 - RNA, 19 nt, Artificial Sequence
  Description of Artificial Sequence: Synthetic oligonucleotide
  Sense strand starting at position 3309 of SEQ ID NO: 1879233
agguaaugucauuacuuaa

SEQ ID NO: 1892593 - RNA, 19 nt, Artificial Sequence
  Description of Artificial Sequence: Synthetic oligonucleotide
  Antisense strand to SEQ ID NO: 1892592
uuaaguaaugacauuaccu

SEQ ID NO: 1892594 - RNA, 19 nt, Artificial Sequence
  Description of Artificial Sequence: Synthetic oligonucleotide
  Sense strand starting at position 3450 of SEQ ID NO: 1879233
gccugacacugacugaauu

SEQ ID NO: 1892595 - RNA, 19 nt, Artificial Sequence
  Description of Artificial Sequence: Synthetic oligonucleotide
  Antisense strand to SEQ ID NO: 1892594
aauucagucagugucaggc

SEQ ID NO: 1892596 - RNA, 19 nt, Artificial Sequence
  Description of Artificial Sequence: Synthetic oligonucleotide
  Sense strand starting at position 3451 of SEQ ID NO: 1879233
ccugacacugacugaauua

SEQ ID NO: 1892597 - RNA, 19 nt, Artificial Sequence
  Description of Artificial Sequence: Synthetic oligonucleotide
  Antisense strand to SEQ ID NO: 1892596
uaauucagucagugucagg

SEQ ID NO: 1892598 - RNA, 19 nt, Artificial Sequence
  Description of Artificial Sequence: Synthetic oligonucleotide
  Sense strand starting at position 3479 of SEQ ID NO: 1879233
ugccaagcacucuauggua

SEQ ID NO: 1892599 - RNA, 19 nt, Artificial Sequence
  Description of Artificial Sequence: Synthetic oligonucleotide
  Antisense strand to SEQ ID NO: 1892598
uaccauagagugcuuggca

SEQ ID NO: 1892600 - RNA, 19 nt, Artificial Sequence
  Description of Artificial Sequence: Synthetic oligonucleotide
  Sense strand starting at position 3509 of SEQ ID NO: 1879233
ggccacuuaucuccuggau

SEQ ID NO: 1892601 - RNA, 19 nt, Artificial Sequence
  Description of Artificial Sequence: Synthetic oligonucleotide
  Antisense strand to SEQ ID NO: 1892600
auccaggagauaaguggcc

SEQ ID NO: 1892602 - RNA, 19 nt, Artificial Sequence
  Description of Artificial Sequence: Synthetic oligonucleotide
  Sense strand starting at position 3607 of SEQ ID NO: 1879233
guauuucucgucgggugga

SEQ ID NO: 1892603 - RNA, 19 nt, Artificial Sequence
  Description of Artificial Sequence: Synthetic oligonucleotide
  Antisense strand to SEQ ID NO: 1892602
uccacccgacgagaaauac

SEQ ID NO: 1892604 - RNA, 19 nt, Artificial Sequence
  Description of Artificial Sequence: Synthetic oligonucleotide
  Sense strand starting at position 3765 of SEQ ID NO: 1879233
gggcauuucucagagagug

SEQ ID NO: 1892605 - RNA, 19 nt, Artificial Sequence
  Description of Artificial Sequence: Synthetic oligonucleotide
  Antisense strand to SEQ ID NO: 1892604
cacucucugagaaaugccc

SEQ ID NO: 1892606 - RNA, 19 nt, Artificial Sequence
  Description of Artificial Sequence: Synthetic oligonucleotide
  Sense strand starting at position 973 of SEQ ID NO: 1879234
gccuguuacccagagaaag

SEQ ID NO: 1892607 - RNA, 19 nt, Artificial Sequence
  Description of Artificial Sequence: Synthetic oligonucleotide
  Antisense strand to SEQ ID NO: 1892606
cuuucucuggguaacaggc

SEQ ID NO: 1892608 - RNA, 19 nt, Artificial Sequence
  Description of Artificial Sequence: Synthetic oligonucleotide
  Sense strand starting at position 999 of SEQ ID NO: 1879234
gagacaagcucccuaguga

SEQ ID NO: 1892609 - RNA, 19 nt, Artificial Sequence
  Description of Artificial Sequence: Synthetic oligonucleotide
  Antisense strand to SEQ ID NO: 1892608
ucacuagggagcuugucuc

SEQ ID NO: 1892610 - RNA, 19 nt, Artificial Sequence
  Description of Artificial Sequence: Synthetic oligonucleotide
  Sense strand starting at position 1095 of SEQ ID NO: 1879234
auguaagaacuuuauguug

SEQ ID NO: 1892611 - RNA, 19 nt, Artificial Sequence
  Description of Artificial Sequence: Synthetic oligonucleotide
  Antisense strand to SEQ ID NO: 1892610
caacauaaaguucuuacau

SEQ ID NO: 1892612 - RNA, 19 nt, Artificial Sequence
  Description of Artificial Sequence: Synthetic oligonucleotide
  Sense strand starting at position 1166 of SEQ ID NO: 1879234
ggcugaagauaucucuuag

SEQ ID NO: 1892613 - RNA, 19 nt, Artificial Sequence
  Description of Artificial Sequence: Synthetic oligonucleotide
  Antisense strand to SEQ ID NO: 1892612
cuaagagauaucuucagcc

SEQ ID NO: 1892614 - RNA, 19 nt, Artificial Sequence
  Description of Artificial Sequence: Synthetic oligonucleotide
  Sense strand starting at position 1232 of SEQ ID NO: 1879234
gugccuuuagcugaaauag

SEQ ID NO: 1892615 - RNA, 19 nt, Artificial Sequence
  Description of Artificial Sequence: Synthetic oligonucleotide
  Antisense strand to SEQ ID NO: 1892614
cuauuucagcuaaaggcac

SEQ ID NO: 1892616 - RNA, 19 nt, Artificial Sequence
  Description of Artificial Sequence: Synthetic oligonucleotide
  Sense strand starting at position 1370 of SEQ ID NO: 1879234
cccuuugagagagguauua

SEQ ID NO: 1892617 - RNA, 19 nt, Artificial Sequence
  Description of Artificial Sequence: Synthetic oligonucleotide
  Antisense strand to SEQ ID NO: 1892616
uaauaccucucucaaaggg

SEQ ID NO: 1892618 - RNA, 19 nt, Artificial Sequence
  Description of Artificial Sequence: Synthetic oligonucleotide
  Sense strand starting at position 1434 of SEQ ID NO: 1879234
augauaguauaagccuauu

SEQ ID NO: 1892619 - RNA, 19 nt, Artificial Sequence
  Description of Artificial Sequence: Synthetic oligonucleotide
  Antisense strand to SEQ ID NO: 1892618
aauaggcuuauacuaucau

SEQ ID NO: 1892620 - RNA, 19 nt, Artificial Sequence
  Description of Artificial Sequence: Synthetic oligonucleotide
  Sense strand starting at position 1461 of SEQ ID NO: 1879234
uuggauaucucccugagua

SEQ ID NO: 1892621 - RNA, 19 nt, Artificial Sequence
  Description of Artificial Sequence: Synthetic oligonucleotide
  Antisense strand to SEQ ID NO: 1892620
uacucagggagauauccaa

SEQ ID NO: 1892622 - RNA, 19 nt, Artificial Sequence
  Description of Artificial Sequence: Synthetic oligonucleotide
  Sense strand starting at position 1462 of SEQ ID NO: 1879234
uggauaucucccugaguaa

SEQ ID NO: 1892623 - RNA, 19 nt, Artificial Sequence
  Description of Artificial Sequence: Synthetic oligonucleotide
  Antisense strand to SEQ ID NO: 1892622
uuacucagggagauaucca

SEQ ID NO: 1892624 - RNA, 19 nt, Artificial Sequence
  Description of Artificial Sequence: Synthetic oligonucleotide
  Sense strand starting at position 1493 of SEQ ID NO: 1879234
ggaaaugagucuuccacca

SEQ ID NO: 1892625 - RNA, 19 nt, Artificial Sequence
  Description of Artificial Sequence: Synthetic oligonucleotide
  Antisense strand to SEQ ID NO: 1892624
ugguggaagacucauuucc

SEQ ID NO: 1892626 - RNA, 19 nt, Artificial Sequence
  Description of Artificial Sequence: Synthetic oligonucleotide
  Sense strand starting at position 1601 of SEQ ID NO: 1879234
uuaacuggucugugagaug

SEQ ID NO: 1892627 - RNA, 19 nt, Artificial Sequence
  Description of Artificial Sequence: Synthetic oligonucleotide
  Antisense strand to SEQ ID NO: 1892626
caucucacagaccaguuaa

SEQ ID NO: 1892628 - RNA, 19 nt, Artificial Sequence
  Description of Artificial Sequence: Synthetic oligonucleotide
  Sense strand starting at position 1612 of SEQ ID NO: 1879234
gugagauggagugguaaug

SEQ ID NO: 1892629 - RNA, 19 nt, Artificial Sequence
  Description of Artificial Sequence: Synthetic oligonucleotide
  Antisense strand to SEQ ID NO: 1892628
cauuaccacuccaucucac

SEQ ID NO: 1892630 - RNA, 19 nt, Artificial Sequence
  Description of Artificial Sequence: Synthetic oligonucleotide
  Sense strand starting at position 1671 of SEQ ID NO: 1879234
ucaguaagaugacagauuu

SEQ ID NO: 1892631 - RNA, 19 nt, Artificial Sequence
  Description of Artificial Sequence: Synthetic oligonucleotide
  Antisense strand to SEQ ID NO: 1892630
aaaucugucaucuuacuga

SEQ ID NO: 1892632 - RNA, 19 nt, Artificial Sequence
  Description of Artificial Sequence: Synthetic oligonucleotide
  Sense strand starting at position 1821 of SEQ ID NO: 1879234
cuuuaaacuugguuaggga

SEQ ID NO: 1892633 - RNA, 19 nt, Artificial Sequence
  Description of Artificial Sequence: Synthetic oligonucleotide
  Antisense strand to SEQ ID NO: 1892632
ucccuaaccaaguuuaaag

SEQ ID NO: 1892634 - RNA, 19 nt, Artificial Sequence
  Description of Artificial Sequence: Synthetic oligonucleotide
  Sense strand starting at position 1848 of SEQ ID NO: 1879234
cucuguagagaguaguuaa

SEQ ID NO: 1892635 - RNA, 19 nt, Artificial Sequence
  Description of Artificial Sequence: Synthetic oligonucleotide
  Antisense strand to SEQ ID NO: 1892634
uuaacuacucucuacagag

SEQ ID NO: 1892636 - RNA, 19 nt, Artificial Sequence
  Description of Artificial Sequence: Synthetic oligonucleotide
  Sense strand starting at position 1851 of SEQ ID NO: 1879234
uguagagaguaguuaauau

SEQ ID NO: 1892637 - RNA, 19 nt, Artificial Sequence
  Description of Artificial Sequence: Synthetic oligonucleotide
  Antisense strand to SEQ ID NO: 1892636
auauuaacuacucucuaca

SEQ ID NO: 1892638 - RNA, 19 nt, Artificial Sequence
  Description of Artificial Sequence: Synthetic oligonucleotide
  Sense strand starting at position 2030 of SEQ ID NO: 1879234
ggaggaaugugaguagagu

SEQ ID NO: 1892639 - RNA, 19 nt, Artificial Sequence
  Description of Artificial Sequence: Synthetic oligonucleotide
  Antisense strand to SEQ ID NO: 1892638
acucuacucacauuccucc

SEQ ID NO: 1892640 - RNA, 19 nt, Artificial Sequence
  Description of Artificial Sequence: Synthetic oligonucleotide
  Sense strand starting at position 2107 of SEQ ID NO: 1879234
cucuuaagauccucuguag

SEQ ID NO: 1892641 - RNA, 19 nt, Artificial Sequence
  Description of Artificial Sequence: Synthetic oligonucleotide
  Antisense strand to SEQ ID NO: 1892640
cuacagaggaucuuaagag

SEQ ID NO: 1892642 - RNA, 19 nt, Artificial Sequence
  Description of Artificial Sequence: Synthetic oligonucleotide
  Sense strand starting at position 2110 of SEQ ID NO: 1879234
uuaagauccucuguagaug

SEQ ID NO: 1892643 - RNA, 19 nt, Artificial Sequence
  Description of Artificial Sequence: Synthetic oligonucleotide
  Antisense strand to SEQ ID NO: 1892642
caucuacagaggaucuuaa

SEQ ID NO: 1892644 - RNA, 19 nt, Artificial Sequence
  Description of Artificial Sequence: Synthetic oligonucleotide
  Sense strand starting at position 2424 of SEQ ID NO: 1879234
augagacgaucucuuacca

SEQ ID NO: 1892645 - RNA, 19 nt, Artificial Sequence
  Description of Artificial Sequence: Synthetic oligonucleotide
  Antisense strand to SEQ ID NO: 1892644
ugguaagagaucgucucau

SEQ ID NO: 1892646 - RNA, 19 nt, Artificial Sequence
  Description of Artificial Sequence: Synthetic oligonucleotide
  Sense strand starting at position 2428 of SEQ ID NO: 1879234
gacgaucucuuaccaguga

SEQ ID NO: 1892647 - RNA, 19 nt, Artificial Sequence
  Description of Artificial Sequence: Synthetic oligonucleotide
  Antisense strand to SEQ ID NO: 1892646
ucacugguaagagaucguc

SEQ ID NO: 1892648 - RNA, 19 nt, Artificial Sequence
  Description of Artificial Sequence: Synthetic oligonucleotide
  Sense strand starting at position 2432 of SEQ ID NO: 1879234
aucucuuaccagugagaag

SEQ ID NO: 1892649 - RNA, 19 nt, Artificial Sequence
  Description of Artificial Sequence: Synthetic oligonucleotide
  Antisense strand to SEQ ID NO: 1892648
cuucucacugguaagagau

SEQ ID NO: 1892650 - RNA, 19 nt, Artificial Sequence
  Description of Artificial Sequence: Synthetic oligonucleotide
  Sense strand starting at position 2477 of SEQ ID NO: 1879234
gguagugucccucauccaa

SEQ ID NO: 1892651 - RNA, 19 nt, Artificial Sequence
  Description of Artificial Sequence: Synthetic oligonucleotide
  Antisense strand to SEQ ID NO: 1892650
uuggaugagggacacuacc

SEQ ID NO: 1892652 - RNA, 19 nt, Artificial Sequence
  Description of Artificial Sequence: Synthetic oligonucleotide
  Sense strand starting at position 2564 of SEQ ID NO: 1879234
aaaguaaguguugauauug

SEQ ID NO: 1892653 - RNA, 19 nt, Artificial Sequence
  Description of Artificial Sequence: Synthetic oligonucleotide
  Antisense strand to SEQ ID NO: 1892652
caauaucaacacuuacuuu

SEQ ID NO: 1892654 - RNA, 19 nt, Artificial Sequence
  Description of Artificial Sequence: Synthetic oligonucleotide
  Sense strand starting at position 2705 of SEQ ID NO: 1879234
uccauuauggaguagcuua

SEQ ID NO: 1892655 - RNA, 19 nt, Artificial Sequence
  Description of Artificial Sequence: Synthetic oligonucleotide
  Antisense strand to SEQ ID NO: 1892654
uaagcuacuccauaaugga

SEQ ID NO: 1892656 - RNA, 19 nt, Artificial Sequence
  Description of Artificial Sequence: Synthetic oligonucleotide
  Sense strand starting at position 2710 of SEQ ID NO: 1879234
uauggaguagcuuauauaa

SEQ ID NO: 1892657 - RNA, 19 nt, Artificial Sequence
  Description of Artificial Sequence: Synthetic oligonucleotide
  Antisense strand to SEQ ID NO: 1892656
uuauauaagcuacuccaua

SEQ ID NO: 1892658 - RNA, 19 nt, Artificial Sequence
  Description of Artificial Sequence: Synthetic oligonucleotide
  Sense strand starting at position 2743 of SEQ ID NO: 1879234
uguauagugggcuauauuc

SEQ ID NO: 1892659 - RNA, 19 nt, Artificial Sequence
  Description of Artificial Sequence: Synthetic oligonucleotide
  Antisense strand to SEQ ID NO: 1892658
gaauauagcccacuauaca

SEQ ID NO: 1892660 - RNA, 19 nt, Artificial Sequence
  Description of Artificial Sequence: Synthetic oligonucleotide
  Sense strand starting at position 2776 of SEQ ID NO: 1879234
gaagcaacugauuggcuau

SEQ ID NO: 1892661 - RNA, 19 nt, Artificial Sequence
  Description of Artificial Sequence: Synthetic oligonucleotide
  Antisense strand to SEQ ID NO: 1892660
auagccaaucaguugcuuc

SEQ ID NO: 1892662 - RNA, 19 nt, Artificial Sequence
  Description of Artificial Sequence: Synthetic oligonucleotide
  Sense strand starting at position 2805 of SEQ ID NO: 1879234
cuuugucagauggaagcau

SEQ ID NO: 1892663 - RNA, 19 nt, Artificial Sequence
  Description of Artificial Sequence: Synthetic oligonucleotide
  Antisense strand to SEQ ID NO: 1892662
augcuuccaucugacaaag

SEQ ID NO: 1892664 - RNA, 19 nt, Artificial Sequence
  Description of Artificial Sequence: Synthetic oligonucleotide
  Sense strand starting at position 2816 of SEQ ID NO: 1879234
ggaagcauugaguaacuuu

SEQ ID NO: 1892665 - RNA, 19 nt, Artificial Sequence
  Description of Artificial Sequence: Synthetic oligonucleotide
  Antisense strand to SEQ ID NO: 1892664
aaaguuacucaaugcuucc

SEQ ID NO: 1892666 - RNA, 19 nt, Artificial Sequence
  Description of Artificial Sequence: Synthetic oligonucleotide
  Sense strand starting at position 2900 of SEQ ID NO: 1879234
aagucuauagagggucauu

SEQ ID NO: 1892667 - RNA, 19 nt, Artificial Sequence
  Description of Artificial Sequence: Synthetic oligonucleotide
  Antisense strand to SEQ ID NO: 1892666
aaugacccucuauagacuu

SEQ ID NO: 1892668 - RNA, 19 nt, Artificial Sequence
  Description of Artificial Sequence: Synthetic oligonucleotide
  Sense strand starting at position 2905 of SEQ ID NO: 1879234
uauagagggucauuaccua

SEQ ID NO: 1892669 - RNA, 19 nt, Artificial Sequence
  Description of Artificial Sequence: Synthetic oligonucleotide
  Antisense strand to SEQ ID NO: 1892668
uagguaaugacccucuaua

SEQ ID NO: 1892670 - RNA, 19 nt, Artificial Sequence
  Description of Artificial Sequence: Synthetic oligonucleotide
  Sense strand starting at position 3197 of SEQ ID NO: 1879234
ccgugugugguuccaaagu

SEQ ID NO: 1892671 - RNA, 19 nt, Artificial Sequence
  Description of Artificial Sequence: Synthetic oligonucleotide
  Antisense strand to SEQ ID NO: 1892670
acuuuggaaccacacacgg

SEQ ID NO: 1892672 - RNA, 19 nt, Artificial Sequence
  Description of Artificial Sequence: Synthetic oligonucleotide
  Sense strand starting at position 3231 of SEQ ID NO: 1879234
ggcucucaccacuauaguu

SEQ ID NO: 1892673 - RNA, 19 nt, Artificial Sequence
  Description of Artificial Sequence: Synthetic oligonucleotide
  Antisense strand to SEQ ID NO: 1892672
aacuauaguggugagagcc

SEQ ID NO: 1892674 - RNA, 19 nt, Artificial Sequence
  Description of Artificial Sequence: Synthetic oligonucleotide
  Sense strand starting at position 3283 of SEQ ID NO: 1879234
acccauuggucacugaaau

SEQ ID NO: 1892675 - RNA, 19 nt, Artificial Sequence
  Description of Artificial Sequence: Synthetic oligonucleotide
  Antisense strand to SEQ ID NO: 1892674
auuucagugaccaaugggu

SEQ ID NO: 1892676 - RNA, 19 nt, Artificial Sequence
  Description of Artificial Sequence: Synthetic oligonucleotide
  Sense strand starting at position 3284 of SEQ ID NO: 1879234
cccauuggucacugaaauc

SEQ ID NO: 1892677 - RNA, 19 nt, Artificial Sequence
  Description of Artificial Sequence: Synthetic oligonucleotide
  Antisense strand to SEQ ID NO: 1892676
gauuucagugaccaauggg

SEQ ID NO: 1892678 - RNA, 19 nt, Artificial Sequence
  Description of Artificial Sequence: Synthetic oligonucleotide
  Sense strand starting at position 3487 of SEQ ID NO: 1879234
uccuuauugccucauagag

SEQ ID NO: 1892679 - RNA, 19 nt, Artificial Sequence
  Description of Artificial Sequence: Synthetic oligonucleotide
  Antisense strand to SEQ ID NO: 1892678
cucuaugaggcaauaagga

SEQ ID NO: 1892680 - RNA, 19 nt, Artificial Sequence
  Description of Artificial Sequence: Synthetic oligonucleotide
  Sense strand starting at position 3966 of SEQ ID NO: 1879234
uugggacaguuccuuaauc

SEQ ID NO: 1892681 - RNA, 19 nt, Artificial Sequence
  Description of Artificial Sequence: Synthetic oligonucleotide
  Antisense strand to SEQ ID NO: 1892680
gauuaaggaacugucccaa

SEQ ID NO: 1892682 - RNA, 19 nt, Artificial Sequence
  Description of Artificial Sequence: Synthetic oligonucleotide
  Sense strand starting at position 3967 of SEQ ID NO: 1879234
ugggacaguuccuuaaucu

SEQ ID NO: 1892683 - RNA, 19 nt, Artificial Sequence
  Description of Artificial Sequence: Synthetic oligonucleotide
  Antisense strand to SEQ ID NO: 1892682
agauuaaggaacuguccca

SEQ ID NO: 1892684 - RNA, 19 nt, Artificial Sequence
  Description of Artificial Sequence: Synthetic oligonucleotide
  Sense strand starting at position 3968 of SEQ ID NO: 1879234
gggacaguuccuuaaucuc

SEQ ID NO: 1892685 - RNA, 19 nt, Artificial Sequence
  Description of Artificial Sequence: Synthetic oligonucleotide
  Antisense strand to SEQ ID NO: 1892684
gagauuaaggaacuguccc

SEQ ID NO: 1892686 - RNA, 19 nt, Artificial Sequence
  Description of Artificial Sequence: Synthetic oligonucleotide
  Sense strand starting at position 11 of SEQ ID NO: 1879235
ccagaaguagccuggacua

SEQ ID NO: 1892687 - RNA, 19 nt, Artificial Sequence
  Description of Artificial Sequence: Synthetic oligonucleotide
  Antisense strand to SEQ ID NO: 1892686
uaguccaggcuacuucugg

SEQ ID NO: 1892688 - RNA, 19 nt, Artificial Sequence
  Description of Artificial Sequence: Synthetic oligonucleotide
  Sense strand starting at position 115 of SEQ ID NO: 1879235
agggaaauguaccuccaau

SEQ ID NO: 1892689 - RNA, 19 nt, Artificial Sequence
  Description of Artificial Sequence: Synthetic oligonucleotide
  Antisense strand to SEQ ID NO: 1892688
auuggagguacauuucccu

SEQ ID NO: 1892690 - RNA, 19 nt, Artificial Sequence
  Description of Artificial Sequence: Synthetic oligonucleotide
  Sense strand starting at position 197 of SEQ ID NO: 1879235
cacugaugcccagggaaug

SEQ ID NO: 1892691 - RNA, 19 nt, Artificial Sequence
  Description of Artificial Sequence: Synthetic oligonucleotide
  Antisense strand to SEQ ID NO: 1892690
cauucccugggcaucagug

SEQ ID NO: 1892692 - RNA, 19 nt, Artificial Sequence
  Description of Artificial Sequence: Synthetic oligonucleotide
  Sense strand starting at position 385 of SEQ ID NO: 1879235
ugcugaaccagaugagacu

SEQ ID NO: 1892693 - RNA, 19 nt, Artificial Sequence
  Description of Artificial Sequence: Synthetic oligonucleotide
  Antisense strand to SEQ ID NO: 1892692
agucucaucugguucagca

SEQ ID NO: 1892694 - RNA, 19 nt, Artificial Sequence
  Description of Artificial Sequence: Synthetic oligonucleotide
  Sense strand starting at position 422 of SEQ ID NO: 1879235
caacuuggagucugagacu

SEQ ID NO: 1892695 - RNA, 19 nt, Artificial Sequence
  Description of Artificial Sequence: Synthetic oligonucleotide
  Antisense strand to SEQ ID NO: 1892694
agucucagacuccaaguug

SEQ ID NO: 1892696 - RNA, 19 nt, Artificial Sequence
  Description of Artificial Sequence: Synthetic oligonucleotide
  Sense strand starting at position 461 of SEQ ID NO: 1879235
ccaauaaugagaggcagua

SEQ ID NO: 1892697 - RNA, 19 nt, Artificial Sequence
  Description of Artificial Sequence: Synthetic oligonucleotide
  Antisense strand to SEQ ID NO: 1892696
uacugccucucauuauugg

SEQ ID NO: 1892698 - RNA, 19 nt, Artificial Sequence
  Description of Artificial Sequence: Synthetic oligonucleotide
  Sense strand starting at position 670 of SEQ ID NO: 1879235
gggucugagcuuuggaaga

SEQ ID NO: 1892699 - RNA, 19 nt, Artificial Sequence
  Description of Artificial Sequence: Synthetic oligonucleotide
  Antisense strand to SEQ ID NO: 1892698
ucuuccaaagcucagaccc

SEQ ID NO: 1892700 - RNA, 19 nt, Artificial Sequence
  Description of Artificial Sequence: Synthetic oligonucleotide
  Sense strand starting at position 845 of SEQ ID NO: 1879235
gagagaaggccaggguuau

SEQ ID NO: 1892701 - RNA, 19 nt, Artificial Sequence
  Description of Artificial Sequence: Synthetic oligonucleotide
  Antisense strand to SEQ ID NO: 1892700
auaacccuggccuucucuc

SEQ ID NO: 1892702 - RNA, 19 nt, Artificial Sequence
  Description of Artificial Sequence: Synthetic oligonucleotide
  Sense strand starting at position 1133 of SEQ ID NO: 1879235
gcugacuugugaguuauuu

SEQ ID NO: 1892703 - RNA, 19 nt, Artificial Sequence
  Description of Artificial Sequence: Synthetic oligonucleotide
  Antisense strand to SEQ ID NO: 1892702
aaauaacucacaagucagc

SEQ ID NO: 1892704 - RNA, 19 nt, Artificial Sequence
  Description of Artificial Sequence: Synthetic oligonucleotide
  Sense strand starting at position 1141 of SEQ ID NO: 1879235
gugaguuauuuagagagau

SEQ ID NO: 1892705 - RNA, 19 nt, Artificial Sequence
  Description of Artificial Sequence: Synthetic oligonucleotide
  Antisense strand to SEQ ID NO: 1892704
aucucucuaaauaacucac

SEQ ID NO: 1892706 - RNA, 19 nt, Artificial Sequence
  Description of Artificial Sequence: Synthetic oligonucleotide
  Sense strand starting at position 1153 of SEQ ID NO: 1879235
gagagauaguuucucuuuc

SEQ ID NO: 1892707 - RNA, 19 nt, Artificial Sequence
  Description of Artificial Sequence: Synthetic oligonucleotide
  Antisense strand to SEQ ID NO: 1892706
gaaagagaaacuaucucuc

SEQ ID NO: 1892708 - RNA, 19 nt, Artificial Sequence
  Description of Artificial Sequence: Synthetic oligonucleotide
  Sense strand starting at position 1157 of SEQ ID NO: 1879235
gauaguuucucuuucggaa

SEQ ID NO: 1892709 - RNA, 19 nt, Artificial Sequence
  Description of Artificial Sequence: Synthetic oligonucleotide
  Antisense strand to SEQ ID NO: 1892708
uuccgaaagagaaacuauc

SEQ ID NO: 1892710 - RNA, 19 nt, Artificial Sequence
  Description of Artificial Sequence: Synthetic oligonucleotide
  Sense strand starting at position 1348 of SEQ ID NO: 1879235
acaggacuccuucgaagag

SEQ ID NO: 1892711 - RNA, 19 nt, Artificial Sequence
  Description of Artificial Sequence: Synthetic oligonucleotide
  Antisense strand to SEQ ID NO: 1892710
cucuucgaaggaguccugu

SEQ ID NO: 1892712 - RNA, 19 nt, Artificial Sequence
  Description of Artificial Sequence: Synthetic oligonucleotide
  Sense strand starting at position 1386 of SEQ ID NO: 1879235
cuuggacuucucugucaac

SEQ ID NO: 1892713 - RNA, 19 nt, Artificial Sequence
  Description of Artificial Sequence: Synthetic oligonucleotide
  Antisense strand to SEQ ID NO: 1892712
guugacagagaaguccaag

SEQ ID NO: 1892714 - RNA, 19 nt, Artificial Sequence
  Description of Artificial Sequence: Synthetic oligonucleotide
  Sense strand starting at position 1430 of SEQ ID NO: 1879235
caaggaugcccaggaucuu

SEQ ID NO: 1892715 - RNA, 19 nt, Artificial Sequence
  Description of Artificial Sequence: Synthetic oligonucleotide
  Antisense strand to SEQ ID NO: 1892714
aagauccugggcauccuug

SEQ ID NO: 1892716 - RNA, 19 nt, Artificial Sequence
  Description of Artificial Sequence: Synthetic oligonucleotide
  Sense strand starting at position 1667 of SEQ ID NO: 1879235
gaagucucuugggcugaaa

SEQ ID NO: 1892717 - RNA, 19 nt, Artificial Sequence
  Description of Artificial Sequence: Synthetic oligonucleotide
  Antisense strand to SEQ ID NO: 1892716
uuucagcccaagagacuuc

SEQ ID NO: 1892718 - RNA, 19 nt, Artificial Sequence
  Description of Artificial Sequence: Synthetic oligonucleotide
  Sense strand starting at position 1669 of SEQ ID NO: 1879235
agucucuugggcugaaaga

SEQ ID NO: 1892719 - RNA, 19 nt, Artificial Sequence
  Description of Artificial Sequence: Synthetic oligonucleotide
  Antisense strand to SEQ ID NO: 1892718
ucuuucagcccaagagacu

SEQ ID NO: 1892720 - RNA, 19 nt, Artificial Sequence
  Description of Artificial Sequence: Synthetic oligonucleotide
  Sense strand starting at position 1765 of SEQ ID NO: 1879235
ugaaguucuccugaguccu

SEQ ID NO: 1892721 - RNA, 19 nt, Artificial Sequence
  Description of Artificial Sequence: Synthetic oligonucleotide
  Antisense strand to SEQ ID NO: 1892720
aggacucaggagaacuuca

SEQ ID NO: 1892722 - RNA, 19 nt, Artificial Sequence
  Description of Artificial Sequence: Synthetic oligonucleotide
  Sense strand starting at position 2055 of SEQ ID NO: 1879235
gaugucaagcagcaugaau

SEQ ID NO: 1892723 - RNA, 19 nt, Artificial Sequence
  Description of Artificial Sequence: Synthetic oligonucleotide
  Antisense strand to SEQ ID NO: 1892722
auucaugcugcuugacauc

SEQ ID NO: 1892724 - RNA, 19 nt, Artificial Sequence
  Description of Artificial Sequence: Synthetic oligonucleotide
  Sense strand starting at position 2063 of SEQ ID NO: 1879235
gcagcaugaauugggcaaa

SEQ ID NO: 1892725 - RNA, 19 nt, Artificial Sequence
  Description of Artificial Sequence: Synthetic oligonucleotide
  Antisense strand to SEQ ID NO: 1892724
uuugcccaauucaugcugc

SEQ ID NO: 1892726 - RNA, 19 nt, Artificial Sequence
  Description of Artificial Sequence: Synthetic oligonucleotide
  Sense strand starting at position 2066 of SEQ ID NO: 1879235
gcaugaauugggcaaacuu

SEQ ID NO: 1892727 - RNA, 19 nt, Artificial Sequence
  Description of Artificial Sequence: Synthetic oligonucleotide
  Antisense strand to SEQ ID NO: 1892726
aaguuugcccaauucaugc

SEQ ID NO: 1892728 - RNA, 19 nt, Artificial Sequence
  Description of Artificial Sequence: Synthetic oligonucleotide
  Sense strand starting at position 2195 of SEQ ID NO: 1879235
gcaugacccugacuuucuu

SEQ ID NO: 1892729 - RNA, 19 nt, Artificial Sequence
  Description of Artificial Sequence: Synthetic oligonucleotide
  Antisense strand to SEQ ID NO: 1892728
aagaaagucagggucaugc

SEQ ID NO: 1892730 - RNA, 19 nt, Artificial Sequence
  Description of Artificial Sequence: Synthetic oligonucleotide
  Sense strand starting at position 2217 of SEQ ID NO: 1879235
guaguuggugaggaccaua

SEQ ID NO: 1892731 - RNA, 19 nt, Artificial Sequence
  Description of Artificial Sequence: Synthetic oligonucleotide
  Antisense strand to SEQ ID NO: 1892730
uaugguccucaccaacuac

SEQ ID NO: 1892732 - RNA, 19 nt, Artificial Sequence
  Description of Artificial Sequence: Synthetic oligonucleotide
  Sense strand starting at position 2397 of SEQ ID NO: 1879235
guaauaguugcauauccau

SEQ ID NO: 1892733 - RNA, 19 nt, Artificial Sequence
  Description of Artificial Sequence: Synthetic oligonucleotide
  Antisense strand to SEQ ID NO: 1892732
auggauaugcaacuauuac

SEQ ID NO: 1892734 - RNA, 19 nt, Artificial Sequence
  Description of Artificial Sequence: Synthetic oligonucleotide
  Sense strand starting at position 2404 of SEQ ID NO: 1879235
uugcauauccauugaugga

SEQ ID NO: 1892735 - RNA, 19 nt, Artificial Sequence
  Description of Artificial Sequence: Synthetic oligonucleotide
  Antisense strand to SEQ ID NO: 1892734
uccaucaauggauaugcaa

SEQ ID NO: 1892736 - RNA, 19 nt, Artificial Sequence
  Description of Artificial Sequence: Synthetic oligonucleotide
  Sense strand starting at position 2446 of SEQ ID NO: 1879235
ugacuauaaguuugguaau

SEQ ID NO: 1892737 - RNA, 19 nt, Artificial Sequence
  Description of Artificial Sequence: Synthetic oligonucleotide
  Antisense strand to SEQ ID NO: 1892736
auuaccaaacuuauaguca

SEQ ID NO: 1892738 - RNA, 19 nt, Artificial Sequence
  Description of Artificial Sequence: Synthetic oligonucleotide
  Sense strand starting at position 2457 of SEQ ID NO: 1879235
uugguaauggcuugaaaug

SEQ ID NO: 1892739 - RNA, 19 nt, Artificial Sequence
  Description of Artificial Sequence: Synthetic oligonucleotide
  Antisense strand to SEQ ID NO: 1892738
cauuucaagccauuaccaa

SEQ ID NO: 1892740 - RNA, 19 nt, Artificial Sequence
  Description of Artificial Sequence: Synthetic oligonucleotide
  Sense strand starting at position 2852 of SEQ ID NO: 1879235
cccagagcuucuguaacaa

SEQ ID NO: 1892741 - RNA, 19 nt, Artificial Sequence
  Description of Artificial Sequence: Synthetic oligonucleotide
  Antisense strand to SEQ ID NO: 1892740
uuguuacagaagcucuggg

SEQ ID NO: 1892742 - RNA, 19 nt, Artificial Sequence
  Description of Artificial Sequence: Synthetic oligonucleotide
  Sense strand starting at position 3027 of SEQ ID NO: 1879235
ggcauuccugggcaugcaa

SEQ ID NO: 1892743 - RNA, 19 nt, Artificial Sequence
  Description of Artificial Sequence: Synthetic oligonucleotide
  Antisense strand to SEQ ID NO: 1892742
uugcaugcccaggaaugcc

SEQ ID NO: 1892744 - RNA, 19 nt, Artificial Sequence
  Description of Artificial Sequence: Synthetic oligonucleotide
  Sense strand starting at position 3116 of SEQ ID NO: 1879235
uccuuucugucucugagaa

SEQ ID NO: 1892745 - RNA, 19 nt, Artificial Sequence
  Description of Artificial Sequence: Synthetic oligonucleotide
  Antisense strand to SEQ ID NO: 1892744
uucucagagacagaaagga

SEQ ID NO: 1892746 - RNA, 19 nt, Artificial Sequence
  Description of Artificial Sequence: Synthetic oligonucleotide
  Sense strand starting at position 3123 of SEQ ID NO: 1879235
ugucucugagaaggacauu

SEQ ID NO: 1892747 - RNA, 19 nt, Artificial Sequence
  Description of Artificial Sequence: Synthetic oligonucleotide
  Antisense strand to SEQ ID NO: 1892746
aauguccuucucagagaca

SEQ ID NO: 1892748 - RNA, 19 nt, Artificial Sequence
  Description of Artificial Sequence: Synthetic oligonucleotide
  Sense strand starting at position 3222 of SEQ ID NO: 1879235
ugagauuccaggugaaguu

SEQ ID NO: 1892749 - RNA, 19 nt, Artificial Sequence
  Description of Artificial Sequence: Synthetic oligonucleotide
  Antisense strand to SEQ ID NO: 1892748
aacuucaccuggaaucuca

SEQ ID NO: 1892750 - RNA, 19 nt, Artificial Sequence
  Description of Artificial Sequence: Synthetic oligonucleotide
  Sense strand starting at position 3296 of SEQ ID NO: 1879235
gggcacauauuacuguaau

SEQ ID NO: 1892751 - RNA, 19 nt, Artificial Sequence
  Description of Artificial Sequence: Synthetic oligonucleotide
  Antisense strand to SEQ ID NO: 1892750
auuacaguaauaugugccc

SEQ ID NO: 1892752 - RNA, 19 nt, Artificial Sequence
  Description of Artificial Sequence: Synthetic oligonucleotide
  Sense strand starting at position 3308 of SEQ ID NO: 1879235
cuguaaugucugcagacaa

SEQ ID NO: 1892753 - RNA, 19 nt, Artificial Sequence
  Description of Artificial Sequence: Synthetic oligonucleotide
  Antisense strand to SEQ ID NO: 1892752
uugucugcagacauuacag

SEQ ID NO: 1892754 - RNA, 19 nt, Artificial Sequence
  Description of Artificial Sequence: Synthetic oligonucleotide
  Sense strand starting at position 3463 of SEQ ID NO: 1879235
uuagguuccugaguuugaa

SEQ ID NO: 1892755 - RNA, 19 nt, Artificial Sequence
  Description of Artificial Sequence: Synthetic oligonucleotide
  Antisense strand to SEQ ID NO: 1892754
uucaaacucaggaaccuaa

SEQ ID NO: 1892756 - RNA, 19 nt, Artificial Sequence
  Description of Artificial Sequence: Synthetic oligonucleotide
  Sense strand starting at position 3497 of SEQ ID NO: 1879235
uuacuaucuguguaaacug

SEQ ID NO: 1892757 - RNA, 19 nt, Artificial Sequence
  Description of Artificial Sequence: Synthetic oligonucleotide
  Antisense strand to SEQ ID NO: 1892756
caguuuacacagauaguaa

SEQ ID NO: 1892758 - RNA, 19 nt, Artificial Sequence
  Description of Artificial Sequence: Synthetic oligonucleotide
  Sense strand starting at position 3514 of SEQ ID NO: 1879235
ugaagugaguuccuuaauu

SEQ ID NO: 1892759 - RNA, 19 nt, Artificial Sequence
  Description of Artificial Sequence: Synthetic oligonucleotide
  Antisense strand to SEQ ID NO: 1892758
aauuaaggaacucacuuca

SEQ ID NO: 1892760 - RNA, 19 nt, Artificial Sequence
  Description of Artificial Sequence: Synthetic oligonucleotide
  Sense strand starting at position 3658 of SEQ ID NO: 1879235
gucagagggcucuaguaac

SEQ ID NO: 1892761 - RNA, 19 nt, Artificial Sequence
  Description of Artificial Sequence: Synthetic oligonucleotide
  Antisense strand to SEQ ID NO: 1892760
guuacuagagcccucugac

SEQ ID NO: 1892762 - RNA, 19 nt, Artificial Sequence
  Description of Artificial Sequence: Synthetic oligonucleotide
  Sense strand starting at position 3750 of SEQ ID NO: 1879235
gcagucauggcuucuguuu

SEQ ID NO: 1892763 - RNA, 19 nt, Artificial Sequence
  Description of Artificial Sequence: Synthetic oligonucleotide
  Antisense strand to SEQ ID NO: 1892762
aaacagaagccaugacugc

SEQ ID NO: 1892764 - RNA, 19 nt, Artificial Sequence
  Description of Artificial Sequence: Synthetic oligonucleotide
  Sense strand starting at position 3921 of SEQ ID NO: 1879235
gaggcuucucuggagaguu

SEQ ID NO: 1892765 - RNA, 19 nt, Artificial Sequence
  Description of Artificial Sequence: Synthetic oligonucleotide
  Antisense strand to SEQ ID NO: 1892764
aacucuccagagaagccuc

SEQ ID NO: 1892766 - RNA, 19 nt, Artificial Sequence
  Description of Artificial Sequence: Synthetic oligonucleotide
  Sense strand starting at position 602 of SEQ ID NO: 1879236
cgcagacuggauuacaaau

SEQ ID NO: 1892767 - RNA, 19 nt, Artificial Sequence
  Description of Artificial Sequence: Synthetic oligonucleotide
  Antisense strand to SEQ ID NO: 1892766
auuuguaauccagucugcg

SEQ ID NO: 1892768 - RNA, 19 nt, Artificial Sequence
  Description of Artificial Sequence: Synthetic oligonucleotide
  Sense strand starting at position 631 of SEQ ID NO: 1879236
cacuaaauaguuggucuga

SEQ ID NO: 1892769 - RNA, 19 nt, Artificial Sequence
  Description of Artificial Sequence: Synthetic oligonucleotide
  Antisense strand to SEQ ID NO: 1892768
ucagaccaacuauuuagug

SEQ ID NO: 1892770 - RNA, 19 nt, Artificial Sequence
  Description of Artificial Sequence: Synthetic oligonucleotide
  Sense strand starting at position 633 of SEQ ID NO: 1879236
cuaaauaguuggucugaga

SEQ ID NO: 1892771 - RNA, 19 nt, Artificial Sequence
  Description of Artificial Sequence: Synthetic oligonucleotide
  Antisense strand to SEQ ID NO: 1892770
ucucagaccaacuauuuag

SEQ ID NO: 1892772 - RNA, 19 nt, Artificial Sequence
  Description of Artificial Sequence: Synthetic oligonucleotide
  Sense strand starting at position 858 of SEQ ID NO: 1879236
augaguuuaucuccuugga

SEQ ID NO: 1892773 - RNA, 19 nt, Artificial Sequence
  Description of Artificial Sequence: Synthetic oligonucleotide
  Antisense strand to SEQ ID NO: 1892772
uccaaggagauaaacucau

SEQ ID NO: 1892774 - RNA, 19 nt, Artificial Sequence
  Description of Artificial Sequence: Synthetic oligonucleotide
  Sense strand starting at position 860 of SEQ ID NO: 1879236
gaguuuaucuccuuggaau

SEQ ID NO: 1892775 - RNA, 19 nt, Artificial Sequence
  Description of Artificial Sequence: Synthetic oligonucleotide
  Antisense strand to SEQ ID NO: 1892774
auuccaaggagauaaacuc

SEQ ID NO: 1892776 - RNA, 19 nt, Artificial Sequence
  Description of Artificial Sequence: Synthetic oligonucleotide
  Sense strand starting at position 861 of SEQ ID NO: 1879236
aguuuaucuccuuggaauu

SEQ ID NO: 1892777 - RNA, 19 nt, Artificial Sequence
  Description of Artificial Sequence: Synthetic oligonucleotide
  Antisense strand to SEQ ID NO: 1892776
aauuccaaggagauaaacu

SEQ ID NO: 1892778 - RNA, 19 nt, Artificial Sequence
  Description of Artificial Sequence: Synthetic oligonucleotide
  Sense strand starting at position 910 of SEQ ID NO: 1879236
ggccuuguccguuucugua

SEQ ID NO: 1892779 - RNA, 19 nt, Artificial Sequence
  Description of Artificial Sequence: Synthetic oligonucleotide
  Antisense strand to SEQ ID NO: 1892778
uacagaaacggacaaggcc

SEQ ID NO: 1892780 - RNA, 19 nt, Artificial Sequence
  Description of Artificial Sequence: Synthetic oligonucleotide
  Sense strand starting at position 1051 of SEQ ID NO: 1879236
aggcaaauuuccuagaacu

SEQ ID NO: 1892781 - RNA, 19 nt, Artificial Sequence
  Description of Artificial Sequence: Synthetic oligonucleotide
  Antisense strand to SEQ ID NO: 1892780
aguucuaggaaauuugccu

SEQ ID NO: 1892782 - RNA, 19 nt, Artificial Sequence
  Description of Artificial Sequence: Synthetic oligonucleotide
  Sense strand starting at position 1184 of SEQ ID NO: 1879236
guggcuuuccaacauuauu

SEQ ID NO: 1892783 - RNA, 19 nt, Artificial Sequence
  Description of Artificial Sequence: Synthetic oligonucleotide
  Antisense strand to SEQ ID NO: 1892782
aauaauguuggaaagccac

SEQ ID NO: 1892784 - RNA, 19 nt, Artificial Sequence
  Description of Artificial Sequence: Synthetic oligonucleotide
  Sense strand starting at position 1222 of SEQ ID NO: 1879236
cguacaucaugacuauaga

SEQ ID NO: 1892785 - RNA, 19 nt, Artificial Sequence
  Description of Artificial Sequence: Synthetic oligonucleotide
  Antisense strand to SEQ ID NO: 1892784
ucuauagucaugauguacg

SEQ ID NO: 1892786 - RNA, 19 nt, Artificial Sequence
  Description of Artificial Sequence: Synthetic oligonucleotide
  Sense strand starting at position 1283 of SEQ ID NO: 1879236
aagugauauugauugucau

SEQ ID NO: 1892787 - RNA, 19 nt, Artificial Sequence
  Description of Artificial Sequence: Synthetic oligonucleotide
  Antisense strand to SEQ ID NO: 1892786
augacaaucaauaucacuu

SEQ ID NO: 1892788 - RNA, 19 nt, Artificial Sequence
  Description of Artificial Sequence: Synthetic oligonucleotide
  Sense strand starting at position 1284 of SEQ ID NO: 1879236
agugauauugauugucauu

SEQ ID NO: 1892789 - RNA, 19 nt, Artificial Sequence
  Description of Artificial Sequence: Synthetic oligonucleotide
  Antisense strand to SEQ ID NO: 1892788
aaugacaaucaauaucacu

SEQ ID NO: 1892790 - RNA, 19 nt, Artificial Sequence
  Description of Artificial Sequence: Synthetic oligonucleotide
  Sense strand starting at position 1659 of SEQ ID NO: 1879236
agccaauuagcggaccaau

SEQ ID NO: 1892791 - RNA, 19 nt, Artificial Sequence
  Description of Artificial Sequence: Synthetic oligonucleotide
  Antisense strand to SEQ ID NO: 1892790
auugguccgcuaauuggcu

SEQ ID NO: 1892792 - RNA, 19 nt, Artificial Sequence
  Description of Artificial Sequence: Synthetic oligonucleotide
  Sense strand starting at position 1805 of SEQ ID NO: 1879236
guacacuaaguauaucgua

SEQ ID NO: 1892793 - RNA, 19 nt, Artificial Sequence
  Description of Artificial Sequence: Synthetic oligonucleotide
  Antisense strand to SEQ ID NO: 1892792
uacgauauacuuaguguac

SEQ ID NO: 1892794 - RNA, 19 nt, Artificial Sequence
  Description of Artificial Sequence: Synthetic oligonucleotide
  Sense strand starting at position 2088 of SEQ ID NO: 1879236
agaacucuugccugggauu

SEQ ID NO: 1892795 - RNA, 19 nt, Artificial Sequence
  Description of Artificial Sequence: Synthetic oligonucleotide
  Antisense strand to SEQ ID NO: 1892794
aaucccaggcaagaguucu

SEQ ID NO: 1892796 - RNA, 19 nt, Artificial Sequence
  Description of Artificial Sequence: Synthetic oligonucleotide
  Sense strand starting at position 2089 of SEQ ID NO: 1879236
gaacucuugccugggauua

SEQ ID NO: 1892797 - RNA, 19 nt, Artificial Sequence
  Description of Artificial Sequence: Synthetic oligonucleotide
  Antisense strand to SEQ ID NO: 1892796
uaaucccaggcaagaguuc

SEQ ID NO: 1892798 - RNA, 19 nt, Artificial Sequence
  Description of Artificial Sequence: Synthetic oligonucleotide
  Sense strand starting at position 2238 of SEQ ID NO: 1879236
ugugaacuuccuugacuca

SEQ ID NO: 1892799 - RNA, 19 nt, Artificial Sequence
  Description of Artificial Sequence: Synthetic oligonucleotide
  Antisense strand to SEQ ID NO: 1892798
ugagucaaggaaguucaca

SEQ ID NO: 1892800 - RNA, 19 nt, Artificial Sequence
  Description of Artificial Sequence: Synthetic oligonucleotide
  Sense strand starting at position 2239 of SEQ ID NO: 1879236
gugaacuuccuugacucaa

SEQ ID NO: 1892801 - RNA, 19 nt, Artificial Sequence
  Description of Artificial Sequence: Synthetic oligonucleotide
  Antisense strand to SEQ ID NO: 1892800
uugagucaaggaaguucac

SEQ ID NO: 1892802 - RNA, 19 nt, Artificial Sequence
  Description of Artificial Sequence: Synthetic oligonucleotide
  Sense strand starting at position 2261 of SEQ ID NO: 1879236
auccuaaugcuauggaaua

SEQ ID NO: 1892803 - RNA, 19 nt, Artificial Sequence
  Description of Artificial Sequence: Synthetic oligonucleotide
  Antisense strand to SEQ ID NO: 1892802
uauuccauagcauuaggau

SEQ ID NO: 1892804 - RNA, 19 nt, Artificial Sequence
  Description of Artificial Sequence: Synthetic oligonucleotide
  Sense strand starting at position 2402 of SEQ ID NO: 1879236
cagucuugauucucaggaa

SEQ ID NO: 1892805 - RNA, 19 nt, Artificial Sequence
  Description of Artificial Sequence: Synthetic oligonucleotide
  Antisense strand to SEQ ID NO: 1892804
uuccugagaaucaagacug

SEQ ID NO: 1892806 - RNA, 19 nt, Artificial Sequence
  Description of Artificial Sequence: Synthetic oligonucleotide
  Sense strand starting at position 2703 of SEQ ID NO: 1879236
gggacauugucuuccuuga

SEQ ID NO: 1892807 - RNA, 19 nt, Artificial Sequence
  Description of Artificial Sequence: Synthetic oligonucleotide
  Antisense strand to SEQ ID NO: 1892806
ucaaggaagacaauguccc

SEQ ID NO: 1892808 - RNA, 19 nt, Artificial Sequence
  Description of Artificial Sequence: Synthetic oligonucleotide
  Sense strand starting at position 2708 of SEQ ID NO: 1879236
auugucuuccuugauaaag

SEQ ID NO: 1892809 - RNA, 19 nt, Artificial Sequence
  Description of Artificial Sequence: Synthetic oligonucleotide
  Antisense strand to SEQ ID NO: 1892808
cuuuaucaaggaagacaau

SEQ ID NO: 1892810 - RNA, 19 nt, Artificial Sequence
  Description of Artificial Sequence: Synthetic oligonucleotide
  Sense strand starting at position 2717 of SEQ ID NO: 1879236
cuugauaaagcuggguaca

SEQ ID NO: 1892811 - RNA, 19 nt, Artificial Sequence
  Description of Artificial Sequence: Synthetic oligonucleotide
  Antisense strand to SEQ ID NO: 1892810
uguacccagcuuuaucaag

SEQ ID NO: 1892812 - RNA, 19 nt, Artificial Sequence
  Description of Artificial Sequence: Synthetic oligonucleotide
  Sense strand starting at position 2729 of SEQ ID NO: 1879236
ggguacagccuugauauga

SEQ ID NO: 1892813 - RNA, 19 nt, Artificial Sequence
  Description of Artificial Sequence: Synthetic oligonucleotide
  Antisense strand to SEQ ID NO: 1892812
ucauaucaaggcuguaccc

SEQ ID NO: 1892814 - RNA, 19 nt, Artificial Sequence
  Description of Artificial Sequence: Synthetic oligonucleotide
  Sense strand starting at position 2795 of SEQ ID NO: 1879236
aagacagugugcucagaag

SEQ ID NO: 1892815 - RNA, 19 nt, Artificial Sequence
  Description of Artificial Sequence: Synthetic oligonucleotide
  Antisense strand to SEQ ID NO: 1892814
cuucugagcacacugucuu

SEQ ID NO: 1892816 - RNA, 19 nt, Artificial Sequence
  Description of Artificial Sequence: Synthetic oligonucleotide
  Sense strand starting at position 2801 of SEQ ID NO: 1879236
gugugcucagaagagguau

SEQ ID NO: 1892817 - RNA, 19 nt, Artificial Sequence
  Description of Artificial Sequence: Synthetic oligonucleotide
  Antisense strand to SEQ ID NO: 1892816
auaccucuucugagcacac

SEQ ID NO: 1892818 - RNA, 19 nt, Artificial Sequence
  Description of Artificial Sequence: Synthetic oligonucleotide
  Sense strand starting at position 2818 of SEQ ID NO: 1879236
auggcaggugcugaauauu

SEQ ID NO: 1892819 - RNA, 19 nt, Artificial Sequence
  Description of Artificial Sequence: Synthetic oligonucleotide
  Antisense strand to SEQ ID NO: 1892818
aauauucagcaccugccau

SEQ ID NO: 1892820 - RNA, 19 nt, Artificial Sequence
  Description of Artificial Sequence: Synthetic oligonucleotide
  Sense strand starting at position 2826 of SEQ ID NO: 1879236
ugcugaauauucccuugga

SEQ ID NO: 1892821 - RNA, 19 nt, Artificial Sequence
  Description of Artificial Sequence: Synthetic oligonucleotide
  Antisense strand to SEQ ID NO: 1892820
uccaagggaauauucagca

SEQ ID NO: 1892822 - RNA, 19 nt, Artificial Sequence
  Description of Artificial Sequence: Synthetic oligonucleotide
  Sense strand starting at position 2827 of SEQ ID NO: 1879236
gcugaauauucccuuggag

SEQ ID NO: 1892823 - RNA, 19 nt, Artificial Sequence
  Description of Artificial Sequence: Synthetic oligonucleotide
  Antisense strand to SEQ ID NO: 1892822
cuccaagggaauauucagc

SEQ ID NO: 1892824 - RNA, 19 nt, Artificial Sequence
  Description of Artificial Sequence: Synthetic oligonucleotide
  Sense strand starting at position 3106 of SEQ ID NO: 1879236
gggucucaacacugaaauc

SEQ ID NO: 1892825 - RNA, 19 nt, Artificial Sequence
  Description of Artificial Sequence: Synthetic oligonucleotide
  Antisense strand to SEQ ID NO: 1892824
gauuucaguguugagaccc

SEQ ID NO: 1892826 - RNA, 19 nt, Artificial Sequence
  Description of Artificial Sequence: Synthetic oligonucleotide
  Sense strand starting at position 3115 of SEQ ID NO: 1879236
cacugaaaucaagguguuc

SEQ ID NO: 1892827 - RNA, 19 nt, Artificial Sequence
  Description of Artificial Sequence: Synthetic oligonucleotide
  Antisense strand to SEQ ID NO: 1892826
gaacaccuugauuucagug

SEQ ID NO: 1892828 - RNA, 19 nt, Artificial Sequence
  Description of Artificial Sequence: Synthetic oligonucleotide
  Sense strand starting at position 3146 of SEQ ID NO: 1879236
uuacgucuuaggcaagacu

SEQ ID NO: 1892829 - RNA, 19 nt, Artificial Sequence
  Description of Artificial Sequence: Synthetic oligonucleotide
  Antisense strand to SEQ ID NO: 1892828
agucuugccuaagacguaa

SEQ ID NO: 1892830 - RNA, 19 nt, Artificial Sequence
  Description of Artificial Sequence: Synthetic oligonucleotide
  Sense strand starting at position 3282 of SEQ ID NO: 1879236
cuucuuugagucugaucaa

SEQ ID NO: 1892831 - RNA, 19 nt, Artificial Sequence
  Description of Artificial Sequence: Synthetic oligonucleotide
  Antisense strand to SEQ ID NO: 1892830
uugaucagacucaaagaag

SEQ ID NO: 1892832 - RNA, 19 nt, Artificial Sequence
  Description of Artificial Sequence: Synthetic oligonucleotide
  Sense strand starting at position 3285 of SEQ ID NO: 1879236
cuuugagucugaucaauau

SEQ ID NO: 1892833 - RNA, 19 nt, Artificial Sequence
  Description of Artificial Sequence: Synthetic oligonucleotide
  Antisense strand to SEQ ID NO: 1892832
auauugaucagacucaaag

SEQ ID NO: 1892834 - RNA, 19 nt, Artificial Sequence
  Description of Artificial Sequence: Synthetic oligonucleotide
  Sense strand starting at position 3472 of SEQ ID NO: 1879236
uuccucauucgggacauua

SEQ ID NO: 1892835 - RNA, 19 nt, Artificial Sequence
  Description of Artificial Sequence: Synthetic oligonucleotide
  Antisense strand to SEQ ID NO: 1892834
uaaugucccgaaugaggaa

SEQ ID NO: 1892836 - RNA, 19 nt, Artificial Sequence
  Description of Artificial Sequence: Synthetic oligonucleotide
  Sense strand starting at position 3474 of SEQ ID NO: 1879236
ccucauucgggacauuaca

SEQ ID NO: 1892837 - RNA, 19 nt, Artificial Sequence
  Description of Artificial Sequence: Synthetic oligonucleotide
  Antisense strand to SEQ ID NO: 1892836
uguaaugucccgaaugagg

SEQ ID NO: 1892838 - RNA, 19 nt, Artificial Sequence
  Description of Artificial Sequence: Synthetic oligonucleotide
  Sense strand starting at position 3644 of SEQ ID NO: 1879236
ucuauaugucuguauacaa

SEQ ID NO: 1892839 - RNA, 19 nt, Artificial Sequence
  Description of Artificial Sequence: Synthetic oligonucleotide
  Antisense strand to SEQ ID NO: 1892838
uuguauacagacauauaga

SEQ ID NO: 1892840 - RNA, 19 nt, Artificial Sequence
  Description of Artificial Sequence: Synthetic oligonucleotide
  Sense strand starting at position 3655 of SEQ ID NO: 1879236
guauacaaccuuuaguaua

SEQ ID NO: 1892841 - RNA, 19 nt, Artificial Sequence
  Description of Artificial Sequence: Synthetic oligonucleotide
  Antisense strand to SEQ ID NO: 1892840
uauacuaaagguuguauac

SEQ ID NO: 1892842 - RNA, 19 nt, Artificial Sequence
  Description of Artificial Sequence: Synthetic oligonucleotide
  Sense strand starting at position 3668 of SEQ ID NO: 1879236
aguauacaggcauguacaa

SEQ ID NO: 1892843 - RNA, 19 nt, Artificial Sequence
  Description of Artificial Sequence: Synthetic oligonucleotide
  Antisense strand to SEQ ID NO: 1892842
uuguacaugccuguauacu

SEQ ID NO: 1892844 - RNA, 19 nt, Artificial Sequence
  Description of Artificial Sequence: Synthetic oligonucleotide
  Sense strand starting at position 3948 of SEQ ID NO: 1879236
gcgugucuccuuguguaca

SEQ ID NO: 1892845 - RNA, 19 nt, Artificial Sequence
  Description of Artificial Sequence: Synthetic oligonucleotide
  Antisense strand to SEQ ID NO: 1892844
uguacacaaggagacacgc

SEQ ID NO: 1892846 - RNA, 19 nt, Artificial Sequence
  Description of Artificial Sequence: Synthetic oligonucleotide
  Sense strand starting at position 109 of SEQ ID NO: 1879237
ggaaguagccuugaauagu

SEQ ID NO: 1892847 - RNA, 19 nt, Artificial Sequence
  Description of Artificial Sequence: Synthetic oligonucleotide
  Antisense strand to SEQ ID NO: 1892846
acuauucaaggcuacuucc

SEQ ID NO: 1892848 - RNA, 19 nt, Artificial Sequence
  Description of Artificial Sequence: Synthetic oligonucleotide
  Sense strand starting at position 209 of SEQ ID NO: 1879237
agagccaugcuggacauua

SEQ ID NO: 1892849 - RNA, 19 nt, Artificial Sequence
  Description of Artificial Sequence: Synthetic oligonucleotide
  Antisense strand to SEQ ID NO: 1892848
uaauguccagcauggcucu

SEQ ID NO: 1892850 - RNA, 19 nt, Artificial Sequence
  Description of Artificial Sequence: Synthetic oligonucleotide
  Sense strand starting at position 487 of SEQ ID NO: 1879237
ccuaguguggcaggaauuu

SEQ ID NO: 1892851 - RNA, 19 nt, Artificial Sequence
  Description of Artificial Sequence: Synthetic oligonucleotide
  Antisense strand to SEQ ID NO: 1892850
aaauuccugccacacuagg

SEQ ID NO: 1892852 - RNA, 19 nt, Artificial Sequence
  Description of Artificial Sequence: Synthetic oligonucleotide
  Sense strand starting at position 584 of SEQ ID NO: 1879237
uuaaacaauguccgggaaa

SEQ ID NO: 1892853 - RNA, 19 nt, Artificial Sequence
  Description of Artificial Sequence: Synthetic oligonucleotide
  Antisense strand to SEQ ID NO: 1892852
uuucccggacauuguuuaa

SEQ ID NO: 1892854 - RNA, 19 nt, Artificial Sequence
  Description of Artificial Sequence: Synthetic oligonucleotide
  Sense strand starting at position 586 of SEQ ID NO: 1879237
aaacaauguccgggaaauu

SEQ ID NO: 1892855 - RNA, 19 nt, Artificial Sequence
  Description of Artificial Sequence: Synthetic oligonucleotide
  Antisense strand to SEQ ID NO: 1892854
aauuucccggacauuguuu

SEQ ID NO: 1892856 - RNA, 19 nt, Artificial Sequence
  Description of Artificial Sequence: Synthetic oligonucleotide
  Sense strand starting at position 630 of SEQ ID NO: 1879237
ucccucauuucgguucuau

SEQ ID NO: 1892857 - RNA, 19 nt, Artificial Sequence
  Description of Artificial Sequence: Synthetic oligonucleotide
  Antisense strand to SEQ ID NO: 1892856
auagaaccgaaaugaggga

SEQ ID NO: 1892858 - RNA, 19 nt, Artificial Sequence
  Description of Artificial Sequence: Synthetic oligonucleotide
  Sense strand starting at position 1095 of SEQ ID NO: 1879237
agguaaaugaaguguauau

SEQ ID NO: 1892859 - RNA, 19 nt, Artificial Sequence
  Description of Artificial Sequence: Synthetic oligonucleotide
  Antisense strand to SEQ ID NO: 1892858
auauacacuucauuuaccu

SEQ ID NO: 1892860 - RNA, 19 nt, Artificial Sequence
  Description of Artificial Sequence: Synthetic oligonucleotide
  Sense strand starting at position 1153 of SEQ ID NO: 1879237
auaaacucaguuuggaauu

SEQ ID NO: 1892861 - RNA, 19 nt, Artificial Sequence
  Description of Artificial Sequence: Synthetic oligonucleotide
  Antisense strand to SEQ ID NO: 1892860
aauuccaaacugaguuuau

SEQ ID NO: 1892862 - RNA, 19 nt, Artificial Sequence
  Description of Artificial Sequence: Synthetic oligonucleotide
  Sense strand starting at position 1186 of SEQ ID NO: 1879237
cauggaaugugucuuagag

SEQ ID NO: 1892863 - RNA, 19 nt, Artificial Sequence
  Description of Artificial Sequence: Synthetic oligonucleotide
  Antisense strand to SEQ ID NO: 1892862
cucuaagacacauuccaug

SEQ ID NO: 1892864 - RNA, 19 nt, Artificial Sequence
  Description of Artificial Sequence: Synthetic oligonucleotide
  Sense strand starting at position 1195 of SEQ ID NO: 1879237
ugucuuagagaccaagguu

SEQ ID NO: 1892865 - RNA, 19 nt, Artificial Sequence
  Description of Artificial Sequence: Synthetic oligonucleotide
  Antisense strand to SEQ ID NO: 1892864
aaccuuggucucuaagaca

SEQ ID NO: 1892866 - RNA, 19 nt, Artificial Sequence
  Description of Artificial Sequence: Synthetic oligonucleotide
  Sense strand starting at position 1283 of SEQ ID NO: 1879237
gucagauacugacuucuga

SEQ ID NO: 1892867 - RNA, 19 nt, Artificial Sequence
  Description of Artificial Sequence: Synthetic oligonucleotide
  Antisense strand to SEQ ID NO: 1892866
ucagaagucaguaucugac

SEQ ID NO: 1892868 - RNA, 19 nt, Artificial Sequence
  Description of Artificial Sequence: Synthetic oligonucleotide
  Sense strand starting at position 1330 of SEQ ID NO: 1879237
agcuauuuguuucuaauug

SEQ ID NO: 1892869 - RNA, 19 nt, Artificial Sequence
  Description of Artificial Sequence: Synthetic oligonucleotide
  Antisense strand to SEQ ID NO: 1892868
caauuagaaacaaauagcu

SEQ ID NO: 1892870 - RNA, 19 nt, Artificial Sequence
  Description of Artificial Sequence: Synthetic oligonucleotide
  Sense strand starting at position 1380 of SEQ ID NO: 1879237
cugggucaggaguaauauu

SEQ ID NO: 1892871 - RNA, 19 nt, Artificial Sequence
  Description of Artificial Sequence: Synthetic oligonucleotide
  Antisense strand to SEQ ID NO: 1892870
aauauuacuccugacccag

SEQ ID NO: 1892872 - RNA, 19 nt, Artificial Sequence
  Description of Artificial Sequence: Synthetic oligonucleotide
  Sense strand starting at position 1437 of SEQ ID NO: 1879237
ugguauuucuagcugagug

SEQ ID NO: 1892873 - RNA, 19 nt, Artificial Sequence
  Description of Artificial Sequence: Synthetic oligonucleotide
  Antisense strand to SEQ ID NO: 1892872
cacucagcuagaaauacca

SEQ ID NO: 1892874 - RNA, 19 nt, Artificial Sequence
  Description of Artificial Sequence: Synthetic oligonucleotide
  Sense strand starting at position 1439 of SEQ ID NO: 1879237
guauuucuagcugaguguu

SEQ ID NO: 1892875 - RNA, 19 nt, Artificial Sequence
  Description of Artificial Sequence: Synthetic oligonucleotide
  Antisense strand to SEQ ID NO: 1892874
aacacucagcuagaaauac

SEQ ID NO: 1892876 - RNA, 19 nt, Artificial Sequence
  Description of Artificial Sequence: Synthetic oligonucleotide
  Sense strand starting at position 1543 of SEQ ID NO: 1879237
uagugacacugauuaguaa

SEQ ID NO: 1892877 - RNA, 19 nt, Artificial Sequence
  Description of Artificial Sequence: Synthetic oligonucleotide
  Antisense strand to SEQ ID NO: 1892876
uuacuaaucagugucacua

SEQ ID NO: 1892878 - RNA, 19 nt, Artificial Sequence
  Description of Artificial Sequence: Synthetic oligonucleotide
  Sense strand starting at position 1835 of SEQ ID NO: 1879237
uucuuagaagcuuagaagu

SEQ ID NO: 1892879 - RNA, 19 nt, Artificial Sequence
  Description of Artificial Sequence: Synthetic oligonucleotide
  Antisense strand to SEQ ID NO: 1892878
acuucuaagcuucuaagaa

SEQ ID NO: 1892880 - RNA, 19 nt, Artificial Sequence
  Description of Artificial Sequence: Synthetic oligonucleotide
  Sense strand starting at position 1912 of SEQ ID NO: 1879237
agagguccaguguagaaua

SEQ ID NO: 1892881 - RNA, 19 nt, Artificial Sequence
  Description of Artificial Sequence: Synthetic oligonucleotide
  Antisense strand to SEQ ID NO: 1892880
uauucuacacuggaccucu

SEQ ID NO: 1892882 - RNA, 19 nt, Artificial Sequence
  Description of Artificial Sequence: Synthetic oligonucleotide
  Sense strand starting at position 1981 of SEQ ID NO: 1879237
aauacagggcuaugaguua

SEQ ID NO: 1892883 - RNA, 19 nt, Artificial Sequence
  Description of Artificial Sequence: Synthetic oligonucleotide
  Antisense strand to SEQ ID NO: 1892882
uaacucauagcccuguauu

SEQ ID NO: 1892884 - RNA, 19 nt, Artificial Sequence
  Description of Artificial Sequence: Synthetic oligonucleotide
  Sense strand starting at position 1987 of SEQ ID NO: 1879237
gggcuaugaguuagguguu

SEQ ID NO: 1892885 - RNA, 19 nt, Artificial Sequence
  Description of Artificial Sequence: Synthetic oligonucleotide
  Antisense strand to SEQ ID NO: 1892884
aacaccuaacucauagccc

SEQ ID NO: 1892886 - RNA, 19 nt, Artificial Sequence
  Description of Artificial Sequence: Synthetic oligonucleotide
  Sense strand starting at position 2022 of SEQ ID NO: 1879237
guguccggaaaugaugaaa

SEQ ID NO: 1892887 - RNA, 19 nt, Artificial Sequence
  Description of Artificial Sequence: Synthetic oligonucleotide
  Antisense strand to SEQ ID NO: 1892886
uuucaucauuuccggacac

SEQ ID NO: 1892888 - RNA, 19 nt, Artificial Sequence
  Description of Artificial Sequence: Synthetic oligonucleotide
  Sense strand starting at position 2056 of SEQ ID NO: 1879237
aaugcaggauaugugaaau

SEQ ID NO: 1892889 - RNA, 19 nt, Artificial Sequence
  Description of Artificial Sequence: Synthetic oligonucleotide
  Antisense strand to SEQ ID NO: 1892888
auuucacauauccugcauu

SEQ ID NO: 1892890 - RNA, 19 nt, Artificial Sequence
  Description of Artificial Sequence: Synthetic oligonucleotide
  Sense strand starting at position 2069 of SEQ ID NO: 1879237
ugaaauugguaaucagauc

SEQ ID NO: 1892891 - RNA, 19 nt, Artificial Sequence
  Description of Artificial Sequence: Synthetic oligonucleotide
  Antisense strand to SEQ ID NO: 1892890
gaucugauuaccaauuuca

SEQ ID NO: 1892892 - RNA, 19 nt, Artificial Sequence
  Description of Artificial Sequence: Synthetic oligonucleotide
  Sense strand starting at position 2076 of SEQ ID NO: 1879237
gguaaucagaucuacuggu

SEQ ID NO: 1892893 - RNA, 19 nt, Artificial Sequence
  Description of Artificial Sequence: Synthetic oligonucleotide
  Antisense strand to SEQ ID NO: 1892892
accaguagaucugauuacc

SEQ ID NO: 1892894 - RNA, 19 nt, Artificial Sequence
  Description of Artificial Sequence: Synthetic oligonucleotide
  Sense strand starting at position 2134 of SEQ ID NO: 1879237
gguguuagugguguuggca

SEQ ID NO: 1892895 - RNA, 19 nt, Artificial Sequence
  Description of Artificial Sequence: Synthetic oligonucleotide
  Antisense strand to SEQ ID NO: 1892894
ugccaacaccacuaacacc

SEQ ID NO: 1892896 - RNA, 19 nt, Artificial Sequence
  Description of Artificial Sequence: Synthetic oligonucleotide
  Sense strand starting at position 2195 of SEQ ID NO: 1879237
aguagcuuguaguuauuua

SEQ ID NO: 1892897 - RNA, 19 nt, Artificial Sequence
  Description of Artificial Sequence: Synthetic oligonucleotide
  Antisense strand to SEQ ID NO: 1892896
uaaauaacuacaagcuacu

SEQ ID NO: 1892898 - RNA, 19 nt, Artificial Sequence
  Description of Artificial Sequence: Synthetic oligonucleotide
  Sense strand starting at position 2202 of SEQ ID NO: 1879237
uguaguuauuuagcccuua

SEQ ID NO: 1892899 - RNA, 19 nt, Artificial Sequence
  Description of Artificial Sequence: Synthetic oligonucleotide
  Antisense strand to SEQ ID NO: 1892898
uaagggcuaaauaacuaca

SEQ ID NO: 1892900 - RNA, 19 nt, Artificial Sequence
  Description of Artificial Sequence: Synthetic oligonucleotide
  Sense strand starting at position 2203 of SEQ ID NO: 1879237
guaguuauuuagcccuuaa

SEQ ID NO: 1892901 - RNA, 19 nt, Artificial Sequence
  Description of Artificial Sequence: Synthetic oligonucleotide
  Antisense strand to SEQ ID NO: 1892900
uuaagggcuaaauaacuac

SEQ ID NO: 1892902 - RNA, 19 nt, Artificial Sequence
  Description of Artificial Sequence: Synthetic oligonucleotide
  Sense strand starting at position 2302 of SEQ ID NO: 1879237
caguucuaaggugauuaca

SEQ ID NO: 1892903 - RNA, 19 nt, Artificial Sequence
  Description of Artificial Sequence: Synthetic oligonucleotide
  Antisense strand to SEQ ID NO: 1892902
uguaaucaccuuagaacug

SEQ ID NO: 1892904 - RNA, 19 nt, Artificial Sequence
  Description of Artificial Sequence: Synthetic oligonucleotide
  Sense strand starting at position 2364 of SEQ ID NO: 1879237
gacucaaaguaagcugauu

SEQ ID NO: 1892905 - RNA, 19 nt, Artificial Sequence
  Description of Artificial Sequence: Synthetic oligonucleotide
  Antisense strand to SEQ ID NO: 1892904
aaucagcuuacuuugaguc

SEQ ID NO: 1892906 - RNA, 19 nt, Artificial Sequence
  Description of Artificial Sequence: Synthetic oligonucleotide
  Sense strand starting at position 2461 of SEQ ID NO: 1879237
aaggaauuacugggucauc

SEQ ID NO: 1892907 - RNA, 19 nt, Artificial Sequence
  Description of Artificial Sequence: Synthetic oligonucleotide
  Antisense strand to SEQ ID NO: 1892906
gaugacccaguaauuccuu

SEQ ID NO: 1892908 - RNA, 19 nt, Artificial Sequence
  Description of Artificial Sequence: Synthetic oligonucleotide
  Sense strand starting at position 2462 of SEQ ID NO: 1879237
aggaauuacugggucauca

SEQ ID NO: 1892909 - RNA, 19 nt, Artificial Sequence
  Description of Artificial Sequence: Synthetic oligonucleotide
  Antisense strand to SEQ ID NO: 1892908
ugaugacccaguaauuccu

SEQ ID NO: 1892910 - RNA, 19 nt, Artificial Sequence
  Description of Artificial Sequence: Synthetic oligonucleotide
  Sense strand starting at position 2786 of SEQ ID NO: 1879237
cuguguguauuuccacaaa

SEQ ID NO: 1892911 - RNA, 19 nt, Artificial Sequence
  Description of Artificial Sequence: Synthetic oligonucleotide
  Antisense strand to SEQ ID NO: 1892910
uuuguggaaauacacacag

SEQ ID NO: 1892912 - RNA, 19 nt, Artificial Sequence
  Description of Artificial Sequence: Synthetic oligonucleotide
  Sense strand starting at position 2985 of SEQ ID NO: 1879237
cuugcaaaccguguuguau

SEQ ID NO: 1892913 - RNA, 19 nt, Artificial Sequence
  Description of Artificial Sequence: Synthetic oligonucleotide
  Antisense strand to SEQ ID NO: 1892912
auacaacacgguuugcaag

SEQ ID NO: 1892914 - RNA, 19 nt, Artificial Sequence
  Description of Artificial Sequence: Synthetic oligonucleotide
  Sense strand starting at position 2986 of SEQ ID NO: 1879237
uugcaaaccguguuguauc

SEQ ID NO: 1892915 - RNA, 19 nt, Artificial Sequence
  Description of Artificial Sequence: Synthetic oligonucleotide
  Antisense strand to SEQ ID NO: 1892914
gauacaacacgguuugcaa

SEQ ID NO: 1892916 - RNA, 19 nt, Artificial Sequence
  Description of Artificial Sequence: Synthetic oligonucleotide
  Sense strand starting at position 3048 of SEQ ID NO: 1879237
ugcguuugcaaccugcaaa

SEQ ID NO: 1892917 - RNA, 19 nt, Artificial Sequence
  Description of Artificial Sequence: Synthetic oligonucleotide
  Antisense strand to SEQ ID NO: 1892916
uuugcagguugcaaacgca

SEQ ID NO: 1892918 - RNA, 19 nt, Artificial Sequence
  Description of Artificial Sequence: Synthetic oligonucleotide
  Sense strand starting at position 3068 of SEQ ID NO: 1879237
uaaugagccguguuguagu

SEQ ID NO: 1892919 - RNA, 19 nt, Artificial Sequence
  Description of Artificial Sequence: Synthetic oligonucleotide
  Antisense strand to SEQ ID NO: 1892918
acuacaacacggcucauua

SEQ ID NO: 1892920 - RNA, 19 nt, Artificial Sequence
  Description of Artificial Sequence: Synthetic oligonucleotide
  Sense strand starting at position 3073 of SEQ ID NO: 1879237
agccguguuguaguaacau

SEQ ID NO: 1892921 - RNA, 19 nt, Artificial Sequence
  Description of Artificial Sequence: Synthetic oligonucleotide
  Antisense strand to SEQ ID NO: 1892920
auguuacuacaacacggcu

SEQ ID NO: 1892922 - RNA, 19 nt, Artificial Sequence
  Description of Artificial Sequence: Synthetic oligonucleotide
  Sense strand starting at position 3101 of SEQ ID NO: 1879237
uuguauguuguguuguuua

SEQ ID NO: 1892923 - RNA, 19 nt, Artificial Sequence
  Description of Artificial Sequence: Synthetic oligonucleotide
  Antisense strand to SEQ ID NO: 1892922
uaaacaacacaacauacaa

SEQ ID NO: 1892924 - RNA, 19 nt, Artificial Sequence
  Description of Artificial Sequence: Synthetic oligonucleotide
  Sense strand starting at position 3679 of SEQ ID NO: 1879237
uggucaucuccugaauaua

SEQ ID NO: 1892925 - RNA, 19 nt, Artificial Sequence
  Description of Artificial Sequence: Synthetic oligonucleotide
  Antisense strand to SEQ ID NO: 1892924
uauauucaggagaugacca

SEQ ID NO: 1892926 - RNA, 19 nt, Artificial Sequence
  Description of Artificial Sequence: Synthetic oligonucleotide
  Sense strand starting at position 39 of SEQ ID NO: 1879238
guuaguuuaguucagaugu

SEQ ID NO: 1892927 - RNA, 19 nt, Artificial Sequence
  Description of Artificial Sequence: Synthetic oligonucleotide
  Antisense strand to SEQ ID NO: 1892926
acaucugaacuaaacuaac

SEQ ID NO: 1892928 - RNA, 19 nt, Artificial Sequence
  Description of Artificial Sequence: Synthetic oligonucleotide
  Sense strand starting at position 106 of SEQ ID NO: 1879238
gccgucuuggcauaaagau

SEQ ID NO: 1892929 - RNA, 19 nt, Artificial Sequence
  Description of Artificial Sequence: Synthetic oligonucleotide
  Antisense strand to SEQ ID NO: 1892928
aucuuuaugccaagacggc

SEQ ID NO: 1892930 - RNA, 19 nt, Artificial Sequence
  Description of Artificial Sequence: Synthetic oligonucleotide
  Sense strand starting at position 115 of SEQ ID NO: 1879238
gcauaaagaugauuaugua

SEQ ID NO: 1892931 - RNA, 19 nt, Artificial Sequence
  Description of Artificial Sequence: Synthetic oligonucleotide
  Antisense strand to SEQ ID NO: 1892930
uacauaaucaucuuuaugc

SEQ ID NO: 1892932 - RNA, 19 nt, Artificial Sequence
  Description of Artificial Sequence: Synthetic oligonucleotide
  Sense strand starting at position 130 of SEQ ID NO: 1879238
uguauuugucaaugcacau

SEQ ID NO: 1892933 - RNA, 19 nt, Artificial Sequence
  Description of Artificial Sequence: Synthetic oligonucleotide
  Antisense strand to SEQ ID NO: 1892932
augugcauugacaaauaca

SEQ ID NO: 1892934 - RNA, 19 nt, Artificial Sequence
  Description of Artificial Sequence: Synthetic oligonucleotide
  Sense strand starting at position 144 of SEQ ID NO: 1879238
cacaucgaguucucuggaa

SEQ ID NO: 1892935 - RNA, 19 nt, Artificial Sequence
  Description of Artificial Sequence: Synthetic oligonucleotide
  Antisense strand to SEQ ID NO: 1892934
uuccagagaacucgaugug

SEQ ID NO: 1892936 - RNA, 19 nt, Artificial Sequence
  Description of Artificial Sequence: Synthetic oligonucleotide
  Sense strand starting at position 146 of SEQ ID NO: 1879238
caucgaguucucuggaaga

SEQ ID NO: 1892937 - RNA, 19 nt, Artificial Sequence
  Description of Artificial Sequence: Synthetic oligonucleotide
  Antisense strand to SEQ ID NO: 1892936
ucuuccagagaacucgaug

SEQ ID NO: 1892938 - RNA, 19 nt, Artificial Sequence
  Description of Artificial Sequence: Synthetic oligonucleotide
  Sense strand starting at position 148 of SEQ ID NO: 1879238
ucgaguucucuggaagacc

SEQ ID NO: 1892939 - RNA, 19 nt, Artificial Sequence
  Description of Artificial Sequence: Synthetic oligonucleotide
  Antisense strand to SEQ ID NO: 1892938
ggucuuccagagaacucga

SEQ ID NO: 1892940 - RNA, 19 nt, Artificial Sequence
  Description of Artificial Sequence: Synthetic oligonucleotide
  Sense strand starting at position 833 of SEQ ID NO: 1879238
gagacaucacgcugaauug

SEQ ID NO: 1892941 - RNA, 19 nt, Artificial Sequence
  Description of Artificial Sequence: Synthetic oligonucleotide
  Antisense strand to SEQ ID NO: 1892940
caauucagcgugaugucuc

SEQ ID NO: 1892942 - RNA, 19 nt, Artificial Sequence
  Description of Artificial Sequence: Synthetic oligonucleotide
  Sense strand starting at position 973 of SEQ ID NO: 1879238
gcguccuggaguuagcaaa

SEQ ID NO: 1892943 - RNA, 19 nt, Artificial Sequence
  Description of Artificial Sequence: Synthetic oligonucleotide
  Antisense strand to SEQ ID NO: 1892942
uuugcuaacuccaggacgc

SEQ ID NO: 1892944 - RNA, 19 nt, Artificial Sequence
  Description of Artificial Sequence: Synthetic oligonucleotide
  Sense strand starting at position 1235 of SEQ ID NO: 1879238
uuaaguauuccguaacugu

SEQ ID NO: 1892945 - RNA, 19 nt, Artificial Sequence
  Description of Artificial Sequence: Synthetic oligonucleotide
  Antisense strand to SEQ ID NO: 1892944
acaguuacggaauacuuaa

SEQ ID NO: 1892946 - RNA, 19 nt, Artificial Sequence
  Description of Artificial Sequence: Synthetic oligonucleotide
  Sense strand starting at position 1249 of SEQ ID NO: 1879238
acuguucccuuugauauuu

SEQ ID NO: 1892947 - RNA, 19 nt, Artificial Sequence
  Description of Artificial Sequence: Synthetic oligonucleotide
  Antisense strand to SEQ ID NO: 1892946
aaauaucaaagggaacagu

SEQ ID NO: 1892948 - RNA, 19 nt, Artificial Sequence
  Description of Artificial Sequence: Synthetic oligonucleotide
  Sense strand starting at position 1392 of SEQ ID NO: 1879238
acgaguuaauaagcaauau

SEQ ID NO: 1892949 - RNA, 19 nt, Artificial Sequence
  Description of Artificial Sequence: Synthetic oligonucleotide
  Antisense strand to SEQ ID NO: 1892948
auauugcuuauuaacucgu

SEQ ID NO: 1892950 - RNA, 19 nt, Artificial Sequence
  Description of Artificial Sequence: Synthetic oligonucleotide
  Sense strand starting at position 1491 of SEQ ID NO: 1879238
ucgacaagauuacugugaa

SEQ ID NO: 1892951 - RNA, 19 nt, Artificial Sequence
  Description of Artificial Sequence: Synthetic oligonucleotide
  Antisense strand to SEQ ID NO: 1892950
uucacaguaaucuugucga

SEQ ID NO: 1892952 - RNA, 19 nt, Artificial Sequence
  Description of Artificial Sequence: Synthetic oligonucleotide
  Sense strand starting at position 1505 of SEQ ID NO: 1879238
gugaaacagucucuacaag

SEQ ID NO: 1892953 - RNA, 19 nt, Artificial Sequence
  Description of Artificial Sequence: Synthetic oligonucleotide
  Antisense strand to SEQ ID NO: 1892952
cuuguagagacuguuucac

SEQ ID NO: 1892954 - RNA, 19 nt, Artificial Sequence
  Description of Artificial Sequence: Synthetic oligonucleotide
  Sense strand starting at position 1526 of SEQ ID NO: 1879238
aaguuaaguuugcccgaua

SEQ ID NO: 1892955 - RNA, 19 nt, Artificial Sequence
  Description of Artificial Sequence: Synthetic oligonucleotide
  Antisense strand to SEQ ID NO: 1892954
uaucgggcaaacuuaacuu

SEQ ID NO: 1892956 - RNA, 19 nt, Artificial Sequence
  Description of Artificial Sequence: Synthetic oligonucleotide
  Sense strand starting at position 1527 of SEQ ID NO: 1879238
aguuaaguuugcccgauaa

SEQ ID NO: 1892957 - RNA, 19 nt, Artificial Sequence
  Description of Artificial Sequence: Synthetic oligonucleotide
  Antisense strand to SEQ ID NO: 1892956
uuaucgggcaaacuuaacu

SEQ ID NO: 1892958 - RNA, 19 nt, Artificial Sequence
  Description of Artificial Sequence: Synthetic oligonucleotide
  Sense strand starting at position 1529 of SEQ ID NO: 1879238
uuaaguuugcccgauaaag

SEQ ID NO: 1892959 - RNA, 19 nt, Artificial Sequence
  Description of Artificial Sequence: Synthetic oligonucleotide
  Antisense strand to SEQ ID NO: 1892958
cuuuaucgggcaaacuuaa

SEQ ID NO: 1892960 - RNA, 19 nt, Artificial Sequence
  Description of Artificial Sequence: Synthetic oligonucleotide
  Sense strand starting at position 1531 of SEQ ID NO: 1879238
aaguuugcccgauaaaguu

SEQ ID NO: 1892961 - RNA, 19 nt, Artificial Sequence
  Description of Artificial Sequence: Synthetic oligonucleotide
  Antisense strand to SEQ ID NO: 1892960
aacuuuaucgggcaaacuu

SEQ ID NO: 1892962 - RNA, 19 nt, Artificial Sequence
  Description of Artificial Sequence: Synthetic oligonucleotide
  Sense strand starting at position 1560 of SEQ ID NO: 1879238
uccagaaagccucaugggu

SEQ ID NO: 1892963 - RNA, 19 nt, Artificial Sequence
  Description of Artificial Sequence: Synthetic oligonucleotide
  Antisense strand to SEQ ID NO: 1892962
acccaugaggcuuucugga

SEQ ID NO: 1892964 - RNA, 19 nt, Artificial Sequence
  Description of Artificial Sequence: Synthetic oligonucleotide
  Sense strand starting at position 1688 of SEQ ID NO: 1879238
cgccuuacgccuuccacaa

SEQ ID NO: 1892965 - RNA, 19 nt, Artificial Sequence
  Description of Artificial Sequence: Synthetic oligonucleotide
  Antisense strand to SEQ ID NO: 1892964
uuguggaaggcguaaggcg

SEQ ID NO: 1892966 - RNA, 19 nt, Artificial Sequence
  Description of Artificial Sequence: Synthetic oligonucleotide
  Sense strand starting at position 2104 of SEQ ID NO: 1879238
uucucacgcuucucaagaa

SEQ ID NO: 1892967 - RNA, 19 nt, Artificial Sequence
  Description of Artificial Sequence: Synthetic oligonucleotide
  Antisense strand to SEQ ID NO: 1892966
uucuugagaagcgugagaa

SEQ ID NO: 1892968 - RNA, 19 nt, Artificial Sequence
  Description of Artificial Sequence: Synthetic oligonucleotide
  Sense strand starting at position 2257 of SEQ ID NO: 1879238
ggccggaagugaguguaau

SEQ ID NO: 1892969 - RNA, 19 nt, Artificial Sequence
  Description of Artificial Sequence: Synthetic oligonucleotide
  Antisense strand to SEQ ID NO: 1892968
auuacacucacuuccggcc

SEQ ID NO: 1892970 - RNA, 19 nt, Artificial Sequence
  Description of Artificial Sequence: Synthetic oligonucleotide
  Sense strand starting at position 2258 of SEQ ID NO: 1879238
gccggaagugaguguaaua

SEQ ID NO: 1892971 - RNA, 19 nt, Artificial Sequence
  Description of Artificial Sequence: Synthetic oligonucleotide
  Antisense strand to SEQ ID NO: 1892970
uauuacacucacuuccggc

SEQ ID NO: 1892972 - RNA, 19 nt, Artificial Sequence
  Description of Artificial Sequence: Synthetic oligonucleotide
  Sense strand starting at position 2273 of SEQ ID NO: 1879238
aauaaaguuucuccaggga

SEQ ID NO: 1892973 - RNA, 19 nt, Artificial Sequence
  Description of Artificial Sequence: Synthetic oligonucleotide
  Antisense strand to SEQ ID NO: 1892972
ucccuggagaaacuuuauu

SEQ ID NO: 1892974 - RNA, 19 nt, Artificial Sequence
  Description of Artificial Sequence: Synthetic oligonucleotide
  Sense strand starting at position 2643 of SEQ ID NO: 1879238
cgagaaacccuucguuacu

SEQ ID NO: 1892975 - RNA, 19 nt, Artificial Sequence
  Description of Artificial Sequence: Synthetic oligonucleotide
  Antisense strand to SEQ ID NO: 1892974
aguaacgaaggguuucucg

SEQ ID NO: 1892976 - RNA, 19 nt, Artificial Sequence
  Description of Artificial Sequence: Synthetic oligonucleotide
  Sense strand starting at position 2644 of SEQ ID NO: 1879238
gagaaacccuucguuacuc

SEQ ID NO: 1892977 - RNA, 19 nt, Artificial Sequence
  Description of Artificial Sequence: Synthetic oligonucleotide
  Antisense strand to SEQ ID NO: 1892976
gaguaacgaaggguuucuc

SEQ ID NO: 1892978 - RNA, 19 nt, Artificial Sequence
  Description of Artificial Sequence: Synthetic oligonucleotide
  Sense strand starting at position 2692 of SEQ ID NO: 1879238
caacgauccucggcuaacu

SEQ ID NO: 1892979 - RNA, 19 nt, Artificial Sequence
  Description of Artificial Sequence: Synthetic oligonucleotide
  Antisense strand to SEQ ID NO: 1892978
aguuagccgaggaucguug

SEQ ID NO: 1892980 - RNA, 19 nt, Artificial Sequence
  Description of Artificial Sequence: Synthetic oligonucleotide
  Sense strand starting at position 2817 of SEQ ID NO: 1879238
acgucugacuguccagaaa

SEQ ID NO: 1892981 - RNA, 19 nt, Artificial Sequence
  Description of Artificial Sequence: Synthetic oligonucleotide
  Antisense strand to SEQ ID NO: 1892980
uuucuggacagucagacgu

SEQ ID NO: 1892982 - RNA, 19 nt, Artificial Sequence
  Description of Artificial Sequence: Synthetic oligonucleotide
  Sense strand starting at position 2853 of SEQ ID NO: 1879238
ucugaaguucgcguccuua

SEQ ID NO: 1892983 - RNA, 19 nt, Artificial Sequence
  Description of Artificial Sequence: Synthetic oligonucleotide
  Antisense strand to SEQ ID NO: 1892982
uaaggacgcgaacuucaga

SEQ ID NO: 1892984 - RNA, 19 nt, Artificial Sequence
  Description of Artificial Sequence: Synthetic oligonucleotide
  Sense strand starting at position 2891 of SEQ ID NO: 1879238
gagcuuuaucuuuguggga

SEQ ID NO: 1892985 - RNA, 19 nt, Artificial Sequence
  Description of Artificial Sequence: Synthetic oligonucleotide
  Antisense strand to SEQ ID NO: 1892984
ucccacaaagauaaagcuc

SEQ ID NO: 1892986 - RNA, 19 nt, Artificial Sequence
  Description of Artificial Sequence: Synthetic oligonucleotide
  Sense strand starting at position 2934 of SEQ ID NO: 1879238
ugucgucaaucccugaaac

SEQ ID NO: 1892987 - RNA, 19 nt, Artificial Sequence
  Description of Artificial Sequence: Synthetic oligonucleotide
  Antisense strand to SEQ ID NO: 1892986
guuucagggauugacgaca

SEQ ID NO: 1892988 - RNA, 19 nt, Artificial Sequence
  Description of Artificial Sequence: Synthetic oligonucleotide
  Sense strand starting at position 2935 of SEQ ID NO: 1879238
gucgucaaucccugaaacu

SEQ ID NO: 1892989 - RNA, 19 nt, Artificial Sequence
  Description of Artificial Sequence: Synthetic oligonucleotide
  Antisense strand to SEQ ID NO: 1892988
aguuucagggauugacgac

SEQ ID NO: 1892990 - RNA, 19 nt, Artificial Sequence
  Description of Artificial Sequence: Synthetic oligonucleotide
  Sense strand starting at position 2936 of SEQ ID NO: 1879238
ucgucaaucccugaaacuc

SEQ ID NO: 1892991 - RNA, 19 nt, Artificial Sequence
  Description of Artificial Sequence: Synthetic oligonucleotide
  Antisense strand to SEQ ID NO: 1892990
gaguuucagggauugacga

SEQ ID NO: 1892992 - RNA, 19 nt, Artificial Sequence
  Description of Artificial Sequence: Synthetic oligonucleotide
  Sense strand starting at position 3057 of SEQ ID NO: 1879238
ggcuguaaggagugagauu

SEQ ID NO: 1892993 - RNA, 19 nt, Artificial Sequence
  Description of Artificial Sequence: Synthetic oligonucleotide
  Antisense strand to SEQ ID NO: 1892992
aaucucacuccuuacagcc

SEQ ID NO: 1892994 - RNA, 19 nt, Artificial Sequence
  Description of Artificial Sequence: Synthetic oligonucleotide
  Sense strand starting at position 3058 of SEQ ID NO: 1879238
gcuguaaggagugagauua

SEQ ID NO: 1892995 - RNA, 19 nt, Artificial Sequence
  Description of Artificial Sequence: Synthetic oligonucleotide
  Antisense strand to SEQ ID NO: 1892994
uaaucucacuccuuacagc

SEQ ID NO: 1892996 - RNA, 19 nt, Artificial Sequence
  Description of Artificial Sequence: Synthetic oligonucleotide
  Sense strand starting at position 3603 of SEQ ID NO: 1879238
cauggauuuguuggugugu

SEQ ID NO: 1892997 - RNA, 19 nt, Artificial Sequence
  Description of Artificial Sequence: Synthetic oligonucleotide
  Antisense strand to SEQ ID NO: 1892996
acacaccaacaaauccaug

SEQ ID NO: 1892998 - RNA, 19 nt, Artificial Sequence
  Description of Artificial Sequence: Synthetic oligonucleotide
  Sense strand starting at position 3627 of SEQ ID NO: 1879238
gugggugugacaugagcaa

SEQ ID NO: 1892999 - RNA, 19 nt, Artificial Sequence
  Description of Artificial Sequence: Synthetic oligonucleotide
  Antisense strand to SEQ ID NO: 1892998
uugcucaugucacacccac

SEQ ID NO: 1893000 - RNA, 19 nt, Artificial Sequence
  Description of Artificial Sequence: Synthetic oligonucleotide
  Sense strand starting at position 3777 of SEQ ID NO: 1879238
cagaguucuugucugggca

SEQ ID NO: 1893001 - RNA, 19 nt, Artificial Sequence
  Description of Artificial Sequence: Synthetic oligonucleotide
  Antisense strand to SEQ ID NO: 1893000
ugcccagacaagaacucug

SEQ ID NO: 1893002 - RNA, 19 nt, Artificial Sequence
  Description of Artificial Sequence: Synthetic oligonucleotide
  Sense strand starting at position 3778 of SEQ ID NO: 1879238
agaguucuugucugggcau

SEQ ID NO: 1893003 - RNA, 19 nt, Artificial Sequence
  Description of Artificial Sequence: Synthetic oligonucleotide
  Antisense strand to SEQ ID NO: 1893002
augcccagacaagaacucu

SEQ ID NO: 1893004 - RNA, 19 nt, Artificial Sequence
  Description of Artificial Sequence: Synthetic oligonucleotide
  Sense strand starting at position 3938 of SEQ ID NO: 1879238
cuggacuuccaguaggcaa

SEQ ID NO: 1893005 - RNA, 19 nt, Artificial Sequence
  Description of Artificial Sequence: Synthetic oligonucleotide
  Antisense strand to SEQ ID NO: 1893004
uugccuacuggaaguccag

SEQ ID NO: 1893006 - RNA, 19 nt, Artificial Sequence
  Description of Artificial Sequence: Synthetic oligonucleotide
  Sense strand starting at position 37 of SEQ ID NO: 1879239
uccuaaguuguugggauga

SEQ ID NO: 1893007 - RNA, 19 nt, Artificial Sequence
  Description of Artificial Sequence: Synthetic oligonucleotide
  Antisense strand to SEQ ID NO: 1893006
ucaucccaacaacuuagga

SEQ ID NO: 1893008 - RNA, 19 nt, Artificial Sequence
  Description of Artificial Sequence: Synthetic oligonucleotide
  Sense strand starting at position 42 of SEQ ID NO: 1879239
aguuguugggaugacaagu

SEQ ID NO: 1893009 - RNA, 19 nt, Artificial Sequence
  Description of Artificial Sequence: Synthetic oligonucleotide
  Antisense strand to SEQ ID NO: 1893008
acuugucaucccaacaacu

SEQ ID NO: 1893010 - RNA, 19 nt, Artificial Sequence
  Description of Artificial Sequence: Synthetic oligonucleotide
  Sense strand starting at position 48 of SEQ ID NO: 1879239
ugggaugacaagugucagu

SEQ ID NO: 1893011 - RNA, 19 nt, Artificial Sequence
  Description of Artificial Sequence: Synthetic oligonucleotide
  Antisense strand to SEQ ID NO: 1893010
acugacacuugucauccca

SEQ ID NO: 1893012 - RNA, 19 nt, Artificial Sequence
  Description of Artificial Sequence: Synthetic oligonucleotide
  Sense strand starting at position 149 of SEQ ID NO: 1879239
agaaguacaucauagauau

SEQ ID NO: 1893013 - RNA, 19 nt, Artificial Sequence
  Description of Artificial Sequence: Synthetic oligonucleotide
  Antisense strand to SEQ ID NO: 1893012
auaucuaugauguacuucu

SEQ ID NO: 1893014 - RNA, 19 nt, Artificial Sequence
  Description of Artificial Sequence: Synthetic oligonucleotide
  Sense strand starting at position 438 of SEQ ID NO: 1879239
cuacauuagugauuaguaa

SEQ ID NO: 1893015 - RNA, 19 nt, Artificial Sequence
  Description of Artificial Sequence: Synthetic oligonucleotide
  Antisense strand to SEQ ID NO: 1893014
uuacuaaucacuaauguag

SEQ ID NO: 1893016 - RNA, 19 nt, Artificial Sequence
  Description of Artificial Sequence: Synthetic oligonucleotide
  Sense strand starting at position 895 of SEQ ID NO: 1879239
gcaugauggguuggagaug

SEQ ID NO: 1893017 - RNA, 19 nt, Artificial Sequence
  Description of Artificial Sequence: Synthetic oligonucleotide
  Antisense strand to SEQ ID NO: 1893016
caucuccaacccaucaugc

SEQ ID NO: 1893018 - RNA, 19 nt, Artificial Sequence
  Description of Artificial Sequence: Synthetic oligonucleotide
  Sense strand starting at position 919 of SEQ ID NO: 1879239
gagggugcugggugagauu

SEQ ID NO: 1893019 - RNA, 19 nt, Artificial Sequence
  Description of Artificial Sequence: Synthetic oligonucleotide
  Antisense strand to SEQ ID NO: 1893018
aaucucacccagcacccuc

SEQ ID NO: 1893020 - RNA, 19 nt, Artificial Sequence
  Description of Artificial Sequence: Synthetic oligonucleotide
  Sense strand starting at position 930 of SEQ ID NO: 1879239
gugagauuaaggugauuaa

SEQ ID NO: 1893021 - RNA, 19 nt, Artificial Sequence
  Description of Artificial Sequence: Synthetic oligonucleotide
  Antisense strand to SEQ ID NO: 1893020
uuaaucaccuuaaucucac

SEQ ID NO: 1893022 - RNA, 19 nt, Artificial Sequence
  Description of Artificial Sequence: Synthetic oligonucleotide
  Sense strand starting at position 991 of SEQ ID NO: 1879239
aauggcuucugguuguuua

SEQ ID NO: 1893023 - RNA, 19 nt, Artificial Sequence
  Description of Artificial Sequence: Synthetic oligonucleotide
  Antisense strand to SEQ ID NO: 1893022
uaaacaaccagaagccauu

SEQ ID NO: 1893024 - RNA, 19 nt, Artificial Sequence
  Description of Artificial Sequence: Synthetic oligonucleotide
  Sense strand starting at position 994 of SEQ ID NO: 1879239
ggcuucugguuguuuagau

SEQ ID NO: 1893025 - RNA, 19 nt, Artificial Sequence
  Description of Artificial Sequence: Synthetic oligonucleotide
  Antisense strand to SEQ ID NO: 1893024
aucuaaacaaccagaagcc

SEQ ID NO: 1893026 - RNA, 19 nt, Artificial Sequence
  Description of Artificial Sequence: Synthetic oligonucleotide
  Sense strand starting at position 995 of SEQ ID NO: 1879239
gcuucugguuguuuagauu

SEQ ID NO: 1893027 - RNA, 19 nt, Artificial Sequence
  Description of Artificial Sequence: Synthetic oligonucleotide
  Antisense strand to SEQ ID NO: 1893026
aaucuaaacaaccagaagc

SEQ ID NO: 1893028 - RNA, 19 nt, Artificial Sequence
  Description of Artificial Sequence: Synthetic oligonucleotide
  Sense strand starting at position 1006 of SEQ ID NO: 1879239
uuuagauuaauugggaguu

SEQ ID NO: 1893029 - RNA, 19 nt, Artificial Sequence
  Description of Artificial Sequence: Synthetic oligonucleotide
  Antisense strand to SEQ ID NO: 1893028
aacucccaauuaaucuaaa

SEQ ID NO: 1893030 - RNA, 19 nt, Artificial Sequence
  Description of Artificial Sequence: Synthetic oligonucleotide
  Sense strand starting at position 1008 of SEQ ID NO: 1879239
uagauuaauugggaguuua

SEQ ID NO: 1893031 - RNA, 19 nt, Artificial Sequence
  Description of Artificial Sequence: Synthetic oligonucleotide
  Antisense strand to SEQ ID NO: 1893030
uaaacucccaauuaaucua

SEQ ID NO: 1893032 - RNA, 19 nt, Artificial Sequence
  Description of Artificial Sequence: Synthetic oligonucleotide
  Sense strand starting at position 1020 of SEQ ID NO: 1879239
gaguuuaaagucugguaga

SEQ ID NO: 1893033 - RNA, 19 nt, Artificial Sequence
  Description of Artificial Sequence: Synthetic oligonucleotide
  Antisense strand to SEQ ID NO: 1893032
ucuaccagacuuuaaacuc

SEQ ID NO: 1893034 - RNA, 19 nt, Artificial Sequence
  Description of Artificial Sequence: Synthetic oligonucleotide
  Sense strand starting at position 1025 of SEQ ID NO: 1879239
uaaagucugguagauuauu

SEQ ID NO: 1893035 - RNA, 19 nt, Artificial Sequence
  Description of Artificial Sequence: Synthetic oligonucleotide
  Antisense strand to SEQ ID NO: 1893034
aauaaucuaccagacuuua

SEQ ID NO: 1893036 - RNA, 19 nt, Artificial Sequence
  Description of Artificial Sequence: Synthetic oligonucleotide
  Sense strand starting at position 1087 of SEQ ID NO: 1879239
ugaguuaucuucucauaug

SEQ ID NO: 1893037 - RNA, 19 nt, Artificial Sequence
  Description of Artificial Sequence: Synthetic oligonucleotide
  Antisense strand to SEQ ID NO: 1893036
cauaugagaagauaacuca

SEQ ID NO: 1893038 - RNA, 19 nt, Artificial Sequence
  Description of Artificial Sequence: Synthetic oligonucleotide
  Sense strand starting at position 1191 of SEQ ID NO: 1879239
ggcacuuauugugagauuu

SEQ ID NO: 1893039 - RNA, 19 nt, Artificial Sequence
  Description of Artificial Sequence: Synthetic oligonucleotide
  Antisense strand to SEQ ID NO: 1893038
aaaucucacaauaagugcc

SEQ ID NO: 1893040 - RNA, 19 nt, Artificial Sequence
  Description of Artificial Sequence: Synthetic oligonucleotide
  Sense strand starting at position 1193 of SEQ ID NO: 1879239
cacuuauugugagauuuga

SEQ ID NO: 1893041 - RNA, 19 nt, Artificial Sequence
  Description of Artificial Sequence: Synthetic oligonucleotide
  Antisense strand to SEQ ID NO: 1893040
ucaaaucucacaauaagug

SEQ ID NO: 1893042 - RNA, 19 nt, Artificial Sequence
  Description of Artificial Sequence: Synthetic oligonucleotide
  Sense strand starting at position 1466 of SEQ ID NO: 1879239
gcuagagcuuaaguguaga

SEQ ID NO: 1893043 - RNA, 19 nt, Artificial Sequence
  Description of Artificial Sequence: Synthetic oligonucleotide
  Antisense strand to SEQ ID NO: 1893042
ucuacacuuaagcucuagc

SEQ ID NO: 1893044 - RNA, 19 nt, Artificial Sequence
  Description of Artificial Sequence: Synthetic oligonucleotide
  Sense strand starting at position 1469 of SEQ ID NO: 1879239
agagcuuaaguguagacua

SEQ ID NO: 1893045 - RNA, 19 nt, Artificial Sequence
  Description of Artificial Sequence: Synthetic oligonucleotide
  Antisense strand to SEQ ID NO: 1893044
uagucuacacuuaagcucu

SEQ ID NO: 1893046 - RNA, 19 nt, Artificial Sequence
  Description of Artificial Sequence: Synthetic oligonucleotide
  Sense strand starting at position 1477 of SEQ ID NO: 1879239
aguguagacuaguuagcua

SEQ ID NO: 1893047 - RNA, 19 nt, Artificial Sequence
  Description of Artificial Sequence: Synthetic oligonucleotide
  Antisense strand to SEQ ID NO: 1893046
uagcuaacuagucuacacu

SEQ ID NO: 1893048 - RNA, 19 nt, Artificial Sequence
  Description of Artificial Sequence: Synthetic oligonucleotide
  Sense strand starting at position 1548 of SEQ ID NO: 1879239
ugcuguaaugucuuucugu

SEQ ID NO: 1893049 - RNA, 19 nt, Artificial Sequence
  Description of Artificial Sequence: Synthetic oligonucleotide
  Antisense strand to SEQ ID NO: 1893048
acagaaagacauuacagca

SEQ ID NO: 1893050 - RNA, 19 nt, Artificial Sequence
  Description of Artificial Sequence: Synthetic oligonucleotide
  Sense strand starting at position 1551 of SEQ ID NO: 1879239
uguaaugucuuucuguuag

SEQ ID NO: 1893051 - RNA, 19 nt, Artificial Sequence
  Description of Artificial Sequence: Synthetic oligonucleotide
  Antisense strand to SEQ ID NO: 1893050
cuaacagaaagacauuaca

SEQ ID NO: 1893052 - RNA, 19 nt, Artificial Sequence
  Description of Artificial Sequence: Synthetic oligonucleotide
  Sense strand starting at position 1655 of SEQ ID NO: 1879239
uuaaacucagcagguauua

SEQ ID NO: 1893053 - RNA, 19 nt, Artificial Sequence
  Description of Artificial Sequence: Synthetic oligonucleotide
  Antisense strand to SEQ ID NO: 1893052
uaauaccugcugaguuuaa

SEQ ID NO: 1893054 - RNA, 19 nt, Artificial Sequence
  Description of Artificial Sequence: Synthetic oligonucleotide
  Sense strand starting at position 1726 of SEQ ID NO: 1879239
uuuggaaaguuaucacuca

SEQ ID NO: 1893055 - RNA, 19 nt, Artificial Sequence
  Description of Artificial Sequence: Synthetic oligonucleotide
  Antisense strand to SEQ ID NO: 1893054
ugagugauaacuuuccaaa

SEQ ID NO: 1893056 - RNA, 19 nt, Artificial Sequence
  Description of Artificial Sequence: Synthetic oligonucleotide
  Sense strand starting at position 1727 of SEQ ID NO: 1879239
uuggaaaguuaucacucaa

SEQ ID NO: 1893057 - RNA, 19 nt, Artificial Sequence
  Description of Artificial Sequence: Synthetic oligonucleotide
  Antisense strand to SEQ ID NO: 1893056
uugagugauaacuuuccaa

SEQ ID NO: 1893058 - RNA, 19 nt, Artificial Sequence
  Description of Artificial Sequence: Synthetic oligonucleotide
  Sense strand starting at position 1734 of SEQ ID NO: 1879239
guuaucacucaaugaaugu

SEQ ID NO: 1893059 - RNA, 19 nt, Artificial Sequence
  Description of Artificial Sequence: Synthetic oligonucleotide
  Antisense strand to SEQ ID NO: 1893058
acauucauugagugauaac

SEQ ID NO: 1893060 - RNA, 19 nt, Artificial Sequence
  Description of Artificial Sequence: Synthetic oligonucleotide
  Sense strand starting at position 1738 of SEQ ID NO: 1879239
ucacucaaugaauguguau

SEQ ID NO: 1893061 - RNA, 19 nt, Artificial Sequence
  Description of Artificial Sequence: Synthetic oligonucleotide
  Antisense strand to SEQ ID NO: 1893060
auacacauucauugaguga

SEQ ID NO: 1893062 - RNA, 19 nt, Artificial Sequence
  Description of Artificial Sequence: Synthetic oligonucleotide
  Sense strand starting at position 1760 of SEQ ID NO: 1879239
uaggcaccaugaguugaaa

SEQ ID NO: 1893063 - RNA, 19 nt, Artificial Sequence
  Description of Artificial Sequence: Synthetic oligonucleotide
  Antisense strand to SEQ ID NO: 1893062
uuucaacucauggugccua

SEQ ID NO: 1893064 - RNA, 19 nt, Artificial Sequence
  Description of Artificial Sequence: Synthetic oligonucleotide
  Sense strand starting at position 2023 of SEQ ID NO: 1879239
guauuuauguaucugcuua

SEQ ID NO: 1893065 - RNA, 19 nt, Artificial Sequence
  Description of Artificial Sequence: Synthetic oligonucleotide
  Antisense strand to SEQ ID NO: 1893064
uaagcagauacauaaauac

SEQ ID NO: 1893066 - RNA, 19 nt, Artificial Sequence
  Description of Artificial Sequence: Synthetic oligonucleotide
  Sense strand starting at position 2035 of SEQ ID NO: 1879239
cugcuuaacuuaggaauuu

SEQ ID NO: 1893067 - RNA, 19 nt, Artificial Sequence
  Description of Artificial Sequence: Synthetic oligonucleotide
  Antisense strand to SEQ ID NO: 1893066
aaauuccuaaguuaagcag

SEQ ID NO: 1893068 - RNA, 19 nt, Artificial Sequence
  Description of Artificial Sequence: Synthetic oligonucleotide
  Sense strand starting at position 2073 of SEQ ID NO: 1879239
ugcauaaaguuuguauagu

SEQ ID NO: 1893069 - RNA, 19 nt, Artificial Sequence
  Description of Artificial Sequence: Synthetic oligonucleotide
  Antisense strand to SEQ ID NO: 1893068
acuauacaaacuuuaugca

SEQ ID NO: 1893070 - RNA, 19 nt, Artificial Sequence
  Description of Artificial Sequence: Synthetic oligonucleotide
  Sense strand starting at position 2109 of SEQ ID NO: 1879239
uggaguugcuaaguagcaa

SEQ ID NO: 1893071 - RNA, 19 nt, Artificial Sequence
  Description of Artificial Sequence: Synthetic oligonucleotide
  Antisense strand to SEQ ID NO: 1893070
uugcuacuuagcaacucca

SEQ ID NO: 1893072 - RNA, 19 nt, Artificial Sequence
  Description of Artificial Sequence: Synthetic oligonucleotide
  Sense strand starting at position 2110 of SEQ ID NO: 1879239
ggaguugcuaaguagcaau

SEQ ID NO: 1893073 - RNA, 19 nt, Artificial Sequence
  Description of Artificial Sequence: Synthetic oligonucleotide
  Antisense strand to SEQ ID NO: 1893072
auugcuacuuagcaacucc

SEQ ID NO: 1893074 - RNA, 19 nt, Artificial Sequence
  Description of Artificial Sequence: Synthetic oligonucleotide
  Sense strand starting at position 2313 of SEQ ID NO: 1879239
uagggauuguuggacaaug

SEQ ID NO: 1893075 - RNA, 19 nt, Artificial Sequence
  Description of Artificial Sequence: Synthetic oligonucleotide
  Antisense strand to SEQ ID NO: 1893074
cauuguccaacaaucccua

SEQ ID NO: 1893076 - RNA, 19 nt, Artificial Sequence
  Description of Artificial Sequence: Synthetic oligonucleotide
  Sense strand starting at position 2497 of SEQ ID NO: 1879239
uuccaauggccucagcaaa

SEQ ID NO: 1893077 - RNA, 19 nt, Artificial Sequence
  Description of Artificial Sequence: Synthetic oligonucleotide
  Antisense strand to SEQ ID NO: 1893076
uuugcugaggccauuggaa

SEQ ID NO: 1893078 - RNA, 19 nt, Artificial Sequence
  Description of Artificial Sequence: Synthetic oligonucleotide
  Sense strand starting at position 2953 of SEQ ID NO: 1879239
agacgaaacuuccagagaa

SEQ ID NO: 1893079 - RNA, 19 nt, Artificial Sequence
  Description of Artificial Sequence: Synthetic oligonucleotide
  Antisense strand to SEQ ID NO: 1893078
uucucuggaaguuucgucu

SEQ ID NO: 1893080 - RNA, 19 nt, Artificial Sequence
  Description of Artificial Sequence: Synthetic oligonucleotide
  Sense strand starting at position 2986 of SEQ ID NO: 1879239
acguuugcuguucacgaau

SEQ ID NO: 1893081 - RNA, 19 nt, Artificial Sequence
  Description of Artificial Sequence: Synthetic oligonucleotide
  Antisense strand to SEQ ID NO: 1893080
auucgugaacagcaaacgu

SEQ ID NO: 1893082 - RNA, 19 nt, Artificial Sequence
  Description of Artificial Sequence: Synthetic oligonucleotide
  Sense strand starting at position 3850 of SEQ ID NO: 1879239
ugucauauccaccaaaguu

SEQ ID NO: 1893083 - RNA, 19 nt, Artificial Sequence
  Description of Artificial Sequence: Synthetic oligonucleotide
  Antisense strand to SEQ ID NO: 1893082
aacuuugguggauaugaca

SEQ ID NO: 1893084 - RNA, 19 nt, Artificial Sequence
  Description of Artificial Sequence: Synthetic oligonucleotide
  Sense strand starting at position 3884 of SEQ ID NO: 1879239
auguuaaugacaggcagaa

SEQ ID NO: 1893085 - RNA, 19 nt, Artificial Sequence
  Description of Artificial Sequence: Synthetic oligonucleotide
  Antisense strand to SEQ ID NO: 1893084
uucugccugucauuaacau

SEQ ID NO: 1893086 - RNA, 19 nt, Artificial Sequence
  Description of Artificial Sequence: Synthetic oligonucleotide
  Sense strand starting at position 72 of SEQ ID NO: 1879240
ugcucuuuagcaugucaua

SEQ ID NO: 1893087 - RNA, 19 nt, Artificial Sequence
  Description of Artificial Sequence: Synthetic oligonucleotide
  Antisense strand to SEQ ID NO: 1893086
uaugacaugcuaaagagca

SEQ ID NO: 1893088 - RNA, 19 nt, Artificial Sequence
  Description of Artificial Sequence: Synthetic oligonucleotide
  Sense strand starting at position 203 of SEQ ID NO: 1879240
aguguagaacccugucuaa

SEQ ID NO: 1893089 - RNA, 19 nt, Artificial Sequence
  Description of Artificial Sequence: Synthetic oligonucleotide
  Antisense strand to SEQ ID NO: 1893088
uuagacaggguucuacacu

SEQ ID NO: 1893090 - RNA, 19 nt, Artificial Sequence
  Description of Artificial Sequence: Synthetic oligonucleotide
  Sense strand starting at position 247 of SEQ ID NO: 1879240
ccauauuguccucacugca

SEQ ID NO: 1893091 - RNA, 19 nt, Artificial Sequence
  Description of Artificial Sequence: Synthetic oligonucleotide
  Antisense strand to SEQ ID NO: 1893090
ugcagugaggacaauaugg

SEQ ID NO: 1893092 - RNA, 19 nt, Artificial Sequence
  Description of Artificial Sequence: Synthetic oligonucleotide
  Sense strand starting at position 869 of SEQ ID NO: 1879240
aguggucaacaucauuaau

SEQ ID NO: 1893093 - RNA, 19 nt, Artificial Sequence
  Description of Artificial Sequence: Synthetic oligonucleotide
  Antisense strand to SEQ ID NO: 1893092
auuaaugauguugaccacu

SEQ ID NO: 1893094 - RNA, 19 nt, Artificial Sequence
  Description of Artificial Sequence: Synthetic oligonucleotide
  Sense strand starting at position 938 of SEQ ID NO: 1879240
uuggaaugguuauuaccaa

SEQ ID NO: 1893095 - RNA, 19 nt, Artificial Sequence
  Description of Artificial Sequence: Synthetic oligonucleotide
  Antisense strand to SEQ ID NO: 1893094
uugguaauaaccauuccaa

SEQ ID NO: 1893096 - RNA, 19 nt, Artificial Sequence
  Description of Artificial Sequence: Synthetic oligonucleotide
  Sense strand starting at position 939 of SEQ ID NO: 1879240
uggaaugguuauuaccaaa

SEQ ID NO: 1893097 - RNA, 19 nt, Artificial Sequence
  Description of Artificial Sequence: Synthetic oligonucleotide
  Antisense strand to SEQ ID NO: 1893096
uuugguaauaaccauucca

SEQ ID NO: 1893098 - RNA, 19 nt, Artificial Sequence
  Description of Artificial Sequence: Synthetic oligonucleotide
  Sense strand starting at position 1000 of SEQ ID NO: 1879240
auuauauaccauuggugaa

SEQ ID NO: 1893099 - RNA, 19 nt, Artificial Sequence
  Description of Artificial Sequence: Synthetic oligonucleotide
  Antisense strand to SEQ ID NO: 1893098
uucaccaaugguauauaau

SEQ ID NO: 1893100 - RNA, 19 nt, Artificial Sequence
  Description of Artificial Sequence: Synthetic oligonucleotide
  Sense strand starting at position 1224 of SEQ ID NO: 1879240
gauaaagugugguauauaa

SEQ ID NO: 1893101 - RNA, 19 nt, Artificial Sequence
  Description of Artificial Sequence: Synthetic oligonucleotide
  Antisense strand to SEQ ID NO: 1893100
uuauauaccacacuuuauc

SEQ ID NO: 1893102 - RNA, 19 nt, Artificial Sequence
  Description of Artificial Sequence: Synthetic oligonucleotide
  Sense strand starting at position 1226 of SEQ ID NO: 1879240
uaaagugugguauauaaac

SEQ ID NO: 1893103 - RNA, 19 nt, Artificial Sequence
  Description of Artificial Sequence: Synthetic oligonucleotide
  Antisense strand to SEQ ID NO: 1893102
guuuauauaccacacuuua

SEQ ID NO: 1893104 - RNA, 19 nt, Artificial Sequence
  Description of Artificial Sequence: Synthetic oligonucleotide
  Sense strand starting at position 1385 of SEQ ID NO: 1879240
gaacuaaaccaggguaucu

SEQ ID NO: 1893105 - RNA, 19 nt, Artificial Sequence
  Description of Artificial Sequence: Synthetic oligonucleotide
  Antisense strand to SEQ ID NO: 1893104
agauacccugguuuaguuc

SEQ ID NO: 1893106 - RNA, 19 nt, Artificial Sequence
  Description of Artificial Sequence: Synthetic oligonucleotide
  Sense strand starting at position 1395 of SEQ ID NO: 1879240
aggguaucuuauggagaua

SEQ ID NO: 1893107 - RNA, 19 nt, Artificial Sequence
  Description of Artificial Sequence: Synthetic oligonucleotide
  Antisense strand to SEQ ID NO: 1893106
uaucuccauaagauacccu

SEQ ID NO: 1893108 - RNA, 19 nt, Artificial Sequence
  Description of Artificial Sequence: Synthetic oligonucleotide
  Sense strand starting at position 1415 of SEQ ID NO: 1879240
agaguagaaugauacuuau

SEQ ID NO: 1893109 - RNA, 19 nt, Artificial Sequence
  Description of Artificial Sequence: Synthetic oligonucleotide
  Antisense strand to SEQ ID NO: 1893108
auaaguaucauucuacucu

SEQ ID NO: 1893110 - RNA, 19 nt, Artificial Sequence
  Description of Artificial Sequence: Synthetic oligonucleotide
  Sense strand starting at position 1418 of SEQ ID NO: 1879240
guagaaugauacuuauuag

SEQ ID NO: 1893111 - RNA, 19 nt, Artificial Sequence
  Description of Artificial Sequence: Synthetic oligonucleotide
  Antisense strand to SEQ ID NO: 1893110
cuaauaaguaucauucuac

SEQ ID NO: 1893112 - RNA, 19 nt, Artificial Sequence
  Description of Artificial Sequence: Synthetic oligonucleotide
  Sense strand starting at position 1468 of SEQ ID NO: 1879240
ugaagagaaguuugucaau

SEQ ID NO: 1893113 - RNA, 19 nt, Artificial Sequence
  Description of Artificial Sequence: Synthetic oligonucleotide
  Antisense strand to SEQ ID NO: 1893112
auugacaaacuucucuuca

SEQ ID NO: 1893114 - RNA, 19 nt, Artificial Sequence
  Description of Artificial Sequence: Synthetic oligonucleotide
  Sense strand starting at position 1470 of SEQ ID NO: 1879240
aagagaaguuugucaaugu

SEQ ID NO: 1893115 - RNA, 19 nt, Artificial Sequence
  Description of Artificial Sequence: Synthetic oligonucleotide
  Antisense strand to SEQ ID NO: 1893114
acauugacaaacuucucuu

SEQ ID NO: 1893116 - RNA, 19 nt, Artificial Sequence
  Description of Artificial Sequence: Synthetic oligonucleotide
  Sense strand starting at position 1474 of SEQ ID NO: 1879240
gaaguuugucaauguguac

SEQ ID NO: 1893117 - RNA, 19 nt, Artificial Sequence
  Description of Artificial Sequence: Synthetic oligonucleotide
  Antisense strand to SEQ ID NO: 1893116
guacacauugacaaacuuc

SEQ ID NO: 1893118 - RNA, 19 nt, Artificial Sequence
  Description of Artificial Sequence: Synthetic oligonucleotide
  Sense strand starting at position 1477 of SEQ ID NO: 1879240
guuugucaauguguacaaa

SEQ ID NO: 1893119 - RNA, 19 nt, Artificial Sequence
  Description of Artificial Sequence: Synthetic oligonucleotide
  Antisense strand to SEQ ID NO: 1893118
uuuguacacauugacaaac

SEQ ID NO: 1893120 - RNA, 19 nt, Artificial Sequence
  Description of Artificial Sequence: Synthetic oligonucleotide
  Sense strand starting at position 1557 of SEQ ID NO: 1879240
uacugauaaucuguugugu

SEQ ID NO: 1893121 - RNA, 19 nt, Artificial Sequence
  Description of Artificial Sequence: Synthetic oligonucleotide
  Antisense strand to SEQ ID NO: 1893120
acacaacagauuaucagua

SEQ ID NO: 1893122 - RNA, 19 nt, Artificial Sequence
  Description of Artificial Sequence: Synthetic oligonucleotide
  Sense strand starting at position 1561 of SEQ ID NO: 1879240
gauaaucuguuguguauuu

SEQ ID NO: 1893123 - RNA, 19 nt, Artificial Sequence
  Description of Artificial Sequence: Synthetic oligonucleotide
  Antisense strand to SEQ ID NO: 1893122
aaauacacaacagauuauc

SEQ ID NO: 1893124 - RNA, 19 nt, Artificial Sequence
  Description of Artificial Sequence: Synthetic oligonucleotide
  Sense strand starting at position 1605 of SEQ ID NO: 1879240
uaauguucccgacacaaug

SEQ ID NO: 1893125 - RNA, 19 nt, Artificial Sequence
  Description of Artificial Sequence: Synthetic oligonucleotide
  Antisense strand to SEQ ID NO: 1893124
cauugugucgggaacauua

SEQ ID NO: 1893126 - RNA, 19 nt, Artificial Sequence
  Description of Artificial Sequence: Synthetic oligonucleotide
  Sense strand starting at position 1633 of SEQ ID NO: 1879240
auguuugaguugcugaaua

SEQ ID NO: 1893127 - RNA, 19 nt, Artificial Sequence
  Description of Artificial Sequence: Synthetic oligonucleotide
  Antisense strand to SEQ ID NO: 1893126
uauucagcaacucaaacau

SEQ ID NO: 1893128 - RNA, 19 nt, Artificial Sequence
  Description of Artificial Sequence: Synthetic oligonucleotide
  Sense strand starting at position 1635 of SEQ ID NO: 1879240
guuugaguugcugaauaug

SEQ ID NO: 1893129 - RNA, 19 nt, Artificial Sequence
  Description of Artificial Sequence: Synthetic oligonucleotide
  Antisense strand to SEQ ID NO: 1893128
cauauucagcaacucaaac

SEQ ID NO: 1893130 - RNA, 19 nt, Artificial Sequence
  Description of Artificial Sequence: Synthetic oligonucleotide
  Sense strand starting at position 1638 of SEQ ID NO: 1879240
ugaguugcugaauaugcua

SEQ ID NO: 1893131 - RNA, 19 nt, Artificial Sequence
  Description of Artificial Sequence: Synthetic oligonucleotide
  Antisense strand to SEQ ID NO: 1893130
uagcauauucagcaacuca

SEQ ID NO: 1893132 - RNA, 19 nt, Artificial Sequence
  Description of Artificial Sequence: Synthetic oligonucleotide
  Sense strand starting at position 1990 of SEQ ID NO: 1879240
ugguuuguucaagaggcuu

SEQ ID NO: 1893133 - RNA, 19 nt, Artificial Sequence
  Description of Artificial Sequence: Synthetic oligonucleotide
  Antisense strand to SEQ ID NO: 1893132
aagccucuugaacaaacca

SEQ ID NO: 1893134 - RNA, 19 nt, Artificial Sequence
  Description of Artificial Sequence: Synthetic oligonucleotide
  Sense strand starting at position 2020 of SEQ ID NO: 1879240
cucuuuauauacguuccua

SEQ ID NO: 1893135 - RNA, 19 nt, Artificial Sequence
  Description of Artificial Sequence: Synthetic oligonucleotide
  Antisense strand to SEQ ID NO: 1893134
uaggaacguauauaaagag

SEQ ID NO: 1893136 - RNA, 19 nt, Artificial Sequence
  Description of Artificial Sequence: Synthetic oligonucleotide
  Sense strand starting at position 2043 of SEQ ID NO: 1879240
uuaccaguauuggcugauu

SEQ ID NO: 1893137 - RNA, 19 nt, Artificial Sequence
  Description of Artificial Sequence: Synthetic oligonucleotide
  Antisense strand to SEQ ID NO: 1893136
aaucagccaauacugguaa

SEQ ID NO: 1893138 - RNA, 19 nt, Artificial Sequence
  Description of Artificial Sequence: Synthetic oligonucleotide
  Sense strand starting at position 2045 of SEQ ID NO: 1879240
accaguauuggcugauuau

SEQ ID NO: 1893139 - RNA, 19 nt, Artificial Sequence
  Description of Artificial Sequence: Synthetic oligonucleotide
  Antisense strand to SEQ ID NO: 1893138
auaaucagccaauacuggu

SEQ ID NO: 1893140 - RNA, 19 nt, Artificial Sequence
  Description of Artificial Sequence: Synthetic oligonucleotide
  Sense strand starting at position 2046 of SEQ ID NO: 1879240
ccaguauuggcugauuaug

SEQ ID NO: 1893141 - RNA, 19 nt, Artificial Sequence
  Description of Artificial Sequence: Synthetic oligonucleotide
  Antisense strand to SEQ ID NO: 1893140
cauaaucagccaauacugg

SEQ ID NO: 1893142 - RNA, 19 nt, Artificial Sequence
  Description of Artificial Sequence: Synthetic oligonucleotide
  Sense strand starting at position 2056 of SEQ ID NO: 1879240
cugauuaugggauguugac

SEQ ID NO: 1893143 - RNA, 19 nt, Artificial Sequence
  Description of Artificial Sequence: Synthetic oligonucleotide
  Antisense strand to SEQ ID NO: 1893142
gucaacaucccauaaucag

SEQ ID NO: 1893144 - RNA, 19 nt, Artificial Sequence
  Description of Artificial Sequence: Synthetic oligonucleotide
  Sense strand starting at position 2062 of SEQ ID NO: 1879240
augggauguugacuguaua

SEQ ID NO: 1893145 - RNA, 19 nt, Artificial Sequence
  Description of Artificial Sequence: Synthetic oligonucleotide
  Antisense strand to SEQ ID NO: 1893144
uauacagucaacaucccau

SEQ ID NO: 1893146 - RNA, 19 nt, Artificial Sequence
  Description of Artificial Sequence: Synthetic oligonucleotide
  Sense strand starting at position 2063 of SEQ ID NO: 1879240
ugggauguugacuguauaa

SEQ ID NO: 1893147 - RNA, 19 nt, Artificial Sequence
  Description of Artificial Sequence: Synthetic oligonucleotide
  Antisense strand to SEQ ID NO: 1893146
uuauacagucaacauccca

SEQ ID NO: 1893148 - RNA, 19 nt, Artificial Sequence
  Description of Artificial Sequence: Synthetic oligonucleotide
  Sense strand starting at position 2118 of SEQ ID NO: 1879240
cugauugcuuaauuauaug

SEQ ID NO: 1893149 - RNA, 19 nt, Artificial Sequence
  Description of Artificial Sequence: Synthetic oligonucleotide
  Antisense strand to SEQ ID NO: 1893148
cauauaauuaagcaaucag

SEQ ID NO: 1893150 - RNA, 19 nt, Artificial Sequence
  Description of Artificial Sequence: Synthetic oligonucleotide
  Sense strand starting at position 2218 of SEQ ID NO: 1879240
ucuuuauuguugucauugu

SEQ ID NO: 1893151 - RNA, 19 nt, Artificial Sequence
  Description of Artificial Sequence: Synthetic oligonucleotide
  Antisense strand to SEQ ID NO: 1893150
acaaugacaacaauaaaga

SEQ ID NO: 1893152 - RNA, 19 nt, Artificial Sequence
  Description of Artificial Sequence: Synthetic oligonucleotide
  Sense strand starting at position 2222 of SEQ ID NO: 1879240
uauuguugucauuguugau

SEQ ID NO: 1893153 - RNA, 19 nt, Artificial Sequence
  Description of Artificial Sequence: Synthetic oligonucleotide
  Antisense strand to SEQ ID NO: 1893152
aucaacaaugacaacaaua

SEQ ID NO: 1893154 - RNA, 19 nt, Artificial Sequence
  Description of Artificial Sequence: Synthetic oligonucleotide
  Sense strand starting at position 3301 of SEQ ID NO: 1879240
gagguaucgcauuguaguu

SEQ ID NO: 1893155 - RNA, 19 nt, Artificial Sequence
  Description of Artificial Sequence: Synthetic oligonucleotide
  Antisense strand to SEQ ID NO: 1893154
aacuacaaugcgauaccuc

SEQ ID NO: 1893156 - RNA, 19 nt, Artificial Sequence
  Description of Artificial Sequence: Synthetic oligonucleotide
  Sense strand starting at position 3498 of SEQ ID NO: 1879240
cuuugucagcuguauagau

SEQ ID NO: 1893157 - RNA, 19 nt, Artificial Sequence
  Description of Artificial Sequence: Synthetic oligonucleotide
  Antisense strand to SEQ ID NO: 1893156
aucuauacagcugacaaag

SEQ ID NO: 1893158 - RNA, 19 nt, Artificial Sequence
  Description of Artificial Sequence: Synthetic oligonucleotide
  Sense strand starting at position 3507 of SEQ ID NO: 1879240
cuguauagauugcagagau

SEQ ID NO: 1893159 - RNA, 19 nt, Artificial Sequence
  Description of Artificial Sequence: Synthetic oligonucleotide
  Antisense strand to SEQ ID NO: 1893158
aucucugcaaucuauacag

SEQ ID NO: 1893160 - RNA, 19 nt, Artificial Sequence
  Description of Artificial Sequence: Synthetic oligonucleotide
  Sense strand starting at position 3681 of SEQ ID NO: 1879240
cuaggaggguucuucugaa

SEQ ID NO: 1893161 - RNA, 19 nt, Artificial Sequence
  Description of Artificial Sequence: Synthetic oligonucleotide
  Antisense strand to SEQ ID NO: 1893160
uucagaagaacccuccuag

SEQ ID NO: 1893162 - RNA, 19 nt, Artificial Sequence
  Description of Artificial Sequence: Synthetic oligonucleotide
  Sense strand starting at position 3806 of SEQ ID NO: 1879240
caccauguggcuugccaau

SEQ ID NO: 1893163 - RNA, 19 nt, Artificial Sequence
  Description of Artificial Sequence: Synthetic oligonucleotide
  Antisense strand to SEQ ID NO: 1893162
auuggcaagccacauggug

SEQ ID NO: 1893164 - RNA, 19 nt, Artificial Sequence
  Description of Artificial Sequence: Synthetic oligonucleotide
  Sense strand starting at position 3911 of SEQ ID NO: 1879240
uugguuuauuucuaaguuc

SEQ ID NO: 1893165 - RNA, 19 nt, Artificial Sequence
  Description of Artificial Sequence: Synthetic oligonucleotide
  Antisense strand to SEQ ID NO: 1893164
gaacuuagaaauaaaccaa

SEQ ID NO: 1893166 - RNA, 19 nt, Artificial Sequence
  Description of Artificial Sequence: Synthetic oligonucleotide
  Sense strand starting at position 189 of SEQ ID NO: 1879241
gugagugggacagguuaaa

SEQ ID NO: 1893167 - RNA, 19 nt, Artificial Sequence
  Description of Artificial Sequence: Synthetic oligonucleotide
  Antisense strand to SEQ ID NO: 1893166
uuuaaccugucccacucac

SEQ ID NO: 1893168 - RNA, 19 nt, Artificial Sequence
  Description of Artificial Sequence: Synthetic oligonucleotide
  Sense strand starting at position 275 of SEQ ID NO: 1879241
ggguaaggauguagaaaga

SEQ ID NO: 1893169 - RNA, 19 nt, Artificial Sequence
  Description of Artificial Sequence: Synthetic oligonucleotide
  Antisense strand to SEQ ID NO: 1893168
ucuuucuacauccuuaccc

SEQ ID NO: 1893170 - RNA, 19 nt, Artificial Sequence
  Description of Artificial Sequence: Synthetic oligonucleotide
  Sense strand starting at position 288 of SEQ ID NO: 1879241
gaaagauacuuaguaaggu

SEQ ID NO: 1893171 - RNA, 19 nt, Artificial Sequence
  Description of Artificial Sequence: Synthetic oligonucleotide
  Antisense strand to SEQ ID NO: 1893170
accuuacuaaguaucuuuc

SEQ ID NO: 1893172 - RNA, 19 nt, Artificial Sequence
  Description of Artificial Sequence: Synthetic oligonucleotide
  Sense strand starting at position 304 of SEQ ID NO: 1879241
gguguuaacagucaucuuu

SEQ ID NO: 1893173 - RNA, 19 nt, Artificial Sequence
  Description of Artificial Sequence: Synthetic oligonucleotide
  Antisense strand to SEQ ID NO: 1893172
aaagaugacuguuaacacc

SEQ ID NO: 1893174 - RNA, 19 nt, Artificial Sequence
  Description of Artificial Sequence: Synthetic oligonucleotide
  Sense strand starting at position 412 of SEQ ID NO: 1879241
caguguuggcuuuacuaaa

SEQ ID NO: 1893175 - RNA, 19 nt, Artificial Sequence
  Description of Artificial Sequence: Synthetic oligonucleotide
  Antisense strand to SEQ ID NO: 1893174
uuuaguaaagccaacacug

SEQ ID NO: 1893176 - RNA, 19 nt, Artificial Sequence
  Description of Artificial Sequence: Synthetic oligonucleotide
  Sense strand starting at position 476 of SEQ ID NO: 1879241
aagaacaugucagagagaa

SEQ ID NO: 1893177 - RNA, 19 nt, Artificial Sequence
  Description of Artificial Sequence: Synthetic oligonucleotide
  Antisense strand to SEQ ID NO: 1893176
uucucucugacauguucuu

SEQ ID NO: 1893178 - RNA, 19 nt, Artificial Sequence
  Description of Artificial Sequence: Synthetic oligonucleotide
  Sense strand starting at position 489 of SEQ ID NO: 1879241
agagaagcugcuugagcaa

SEQ ID NO: 1893179 - RNA, 19 nt, Artificial Sequence
  Description of Artificial Sequence: Synthetic oligonucleotide
  Antisense strand to SEQ ID NO: 1893178
uugcucaagcagcuucucu

SEQ ID NO: 1893180 - RNA, 19 nt, Artificial Sequence
  Description of Artificial Sequence: Synthetic oligonucleotide
  Sense strand starting at position 492 of SEQ ID NO: 1879241
gaagcugcuugagcaagaa

SEQ ID NO: 1893181 - RNA, 19 nt, Artificial Sequence
  Description of Artificial Sequence: Synthetic oligonucleotide
  Antisense strand to SEQ ID NO: 1893180
uucuugcucaagcagcuuc

SEQ ID NO: 1893182 - RNA, 19 nt, Artificial Sequence
  Description of Artificial Sequence: Synthetic oligonucleotide
  Sense strand starting at position 613 of SEQ ID NO: 1879241
cucuaagucucucuguaag

SEQ ID NO: 1893183 - RNA, 19 nt, Artificial Sequence
  Description of Artificial Sequence: Synthetic oligonucleotide
  Antisense strand to SEQ ID NO: 1893182
cuuacagagagacuuagag

SEQ ID NO: 1893184 - RNA, 19 nt, Artificial Sequence
  Description of Artificial Sequence: Synthetic oligonucleotide
  Sense strand starting at position 816 of SEQ ID NO: 1879241
gagcaucucugguuggaau

SEQ ID NO: 1893185 - RNA, 19 nt, Artificial Sequence
  Description of Artificial Sequence: Synthetic oligonucleotide
  Antisense strand to SEQ ID NO: 1893184
auuccaaccagagaugcuc

SEQ ID NO: 1893186 - RNA, 19 nt, Artificial Sequence
  Description of Artificial Sequence: Synthetic oligonucleotide
  Sense strand starting at position 818 of SEQ ID NO: 1879241
gcaucucugguuggaauca

SEQ ID NO: 1893187 - RNA, 19 nt, Artificial Sequence
  Description of Artificial Sequence: Synthetic oligonucleotide
  Antisense strand to SEQ ID NO: 1893186
ugauuccaaccagagaugc

SEQ ID NO: 1893188 - RNA, 19 nt, Artificial Sequence
  Description of Artificial Sequence: Synthetic oligonucleotide
  Sense strand starting at position 835 of SEQ ID NO: 1879241
cauaaugcuucggccugaa

SEQ ID NO: 1893189 - RNA, 19 nt, Artificial Sequence
  Description of Artificial Sequence: Synthetic oligonucleotide
  Antisense strand to SEQ ID NO: 1893188
uucaggccgaagcauuaug

SEQ ID NO: 1893190 - RNA, 19 nt, Artificial Sequence
  Description of Artificial Sequence: Synthetic oligonucleotide
  Sense strand starting at position 839 of SEQ ID NO: 1879241
augcuucggccugaaguga

SEQ ID NO: 1893191 - RNA, 19 nt, Artificial Sequence
  Description of Artificial Sequence: Synthetic oligonucleotide
  Antisense strand to SEQ ID NO: 1893190
ucacuucaggccgaagcau

SEQ ID NO: 1893192 - RNA, 19 nt, Artificial Sequence
  Description of Artificial Sequence: Synthetic oligonucleotide
  Sense strand starting at position 879 of SEQ ID NO: 1879241
uugcccaagcaguaucaaa

SEQ ID NO: 1893193 - RNA, 19 nt, Artificial Sequence
  Description of Artificial Sequence: Synthetic oligonucleotide
  Antisense strand to SEQ ID NO: 1893192
uuugauacugcuugggcaa

SEQ ID NO: 1893194 - RNA, 19 nt, Artificial Sequence
  Description of Artificial Sequence: Synthetic oligonucleotide
  Sense strand starting at position 954 of SEQ ID NO: 1879241
cuccaaggauggucuagaa

SEQ ID NO: 1893195 - RNA, 19 nt, Artificial Sequence
  Description of Artificial Sequence: Synthetic oligonucleotide
  Antisense strand to SEQ ID NO: 1893194
uucuagaccauccuuggag

SEQ ID NO: 1893196 - RNA, 19 nt, Artificial Sequence
  Description of Artificial Sequence: Synthetic oligonucleotide
  Sense strand starting at position 1024 of SEQ ID NO: 1879241
agaaguauuuacugaaauc

SEQ ID NO: 1893197 - RNA, 19 nt, Artificial Sequence
  Description of Artificial Sequence: Synthetic oligonucleotide
  Antisense strand to SEQ ID NO: 1893196
gauuucaguaaauacuucu

SEQ ID NO: 1893198 - RNA, 19 nt, Artificial Sequence
  Description of Artificial Sequence: Synthetic oligonucleotide
  Sense strand starting at position 1055 of SEQ ID NO: 1879241
cuaaaucaucuggagccau

SEQ ID NO: 1893199 - RNA, 19 nt, Artificial Sequence
  Description of Artificial Sequence: Synthetic oligonucleotide
  Antisense strand to SEQ ID NO: 1893198
auggcuccagaugauuuag

SEQ ID NO: 1893200 - RNA, 19 nt, Artificial Sequence
  Description of Artificial Sequence: Synthetic oligonucleotide
  Sense strand starting at position 1119 of SEQ ID NO: 1879241
ggaccaugugggugaggau

SEQ ID NO: 1893201 - RNA, 19 nt, Artificial Sequence
  Description of Artificial Sequence: Synthetic oligonucleotide
  Antisense strand to SEQ ID NO: 1893200
auccucacccacauggucc

SEQ ID NO: 1893202 - RNA, 19 nt, Artificial Sequence
  Description of Artificial Sequence: Synthetic oligonucleotide
  Sense strand starting at position 1249 of SEQ ID NO: 1879241
gcagguuccauuugacagu

SEQ ID NO: 1893203 - RNA, 19 nt, Artificial Sequence
  Description of Artificial Sequence: Synthetic oligonucleotide
  Antisense strand to SEQ ID NO: 1893202
acugucaaauggaaccugc

SEQ ID NO: 1893204 - RNA, 19 nt, Artificial Sequence
  Description of Artificial Sequence: Synthetic oligonucleotide
  Sense strand starting at position 1262 of SEQ ID NO: 1879241
gacagugugacguaucuga

SEQ ID NO: 1893205 - RNA, 19 nt, Artificial Sequence
  Description of Artificial Sequence: Synthetic oligonucleotide
  Antisense strand to SEQ ID NO: 1893204
ucagauacgucacacuguc

SEQ ID NO: 1893206 - RNA, 19 nt, Artificial Sequence
  Description of Artificial Sequence: Synthetic oligonucleotide
  Sense strand starting at position 1266 of SEQ ID NO: 1879241
gugugacguaucugaaauc

SEQ ID NO: 1893207 - RNA, 19 nt, Artificial Sequence
  Description of Artificial Sequence: Synthetic oligonucleotide
  Antisense strand to SEQ ID NO: 1893206
gauuucagauacgucacac

SEQ ID NO: 1893208 - RNA, 19 nt, Artificial Sequence
  Description of Artificial Sequence: Synthetic oligonucleotide
  Sense strand starting at position 1427 of SEQ ID NO: 1879241
cacaaaguccugugaggaa

SEQ ID NO: 1893209 - RNA, 19 nt, Artificial Sequence
  Description of Artificial Sequence: Synthetic oligonucleotide
  Antisense strand to SEQ ID NO: 1893208
uuccucacaggacuuugug

SEQ ID NO: 1893210 - RNA, 19 nt, Artificial Sequence
  Description of Artificial Sequence: Synthetic oligonucleotide
  Sense strand starting at position 1439 of SEQ ID NO: 1879241
ugaggaagcucauucugaa

SEQ ID NO: 1893211 - RNA, 19 nt, Artificial Sequence
  Description of Artificial Sequence: Synthetic oligonucleotide
  Antisense strand to SEQ ID NO: 1893210
uucagaaugagcuuccuca

SEQ ID NO: 1893212 - RNA, 19 nt, Artificial Sequence
  Description of Artificial Sequence: Synthetic oligonucleotide
  Sense strand starting at position 1530 of SEQ ID NO: 1879241
ccuggauucucccucagau

SEQ ID NO: 1893213 - RNA, 19 nt, Artificial Sequence
  Description of Artificial Sequence: Synthetic oligonucleotide
  Antisense strand to SEQ ID NO: 1893212
aucugagggagaauccagg

SEQ ID NO: 1893214 - RNA, 19 nt, Artificial Sequence
  Description of Artificial Sequence: Synthetic oligonucleotide
  Sense strand starting at position 1532 of SEQ ID NO: 1879241
uggauucucccucagauuc

SEQ ID NO: 1893215 - RNA, 19 nt, Artificial Sequence
  Description of Artificial Sequence: Synthetic oligonucleotide
  Antisense strand to SEQ ID NO: 1893214
gaaucugagggagaaucca

SEQ ID NO: 1893216 - RNA, 19 nt, Artificial Sequence
  Description of Artificial Sequence: Synthetic oligonucleotide
  Sense strand starting at position 2366 of SEQ ID NO: 1879241
ggauuaguguaacucccaa

SEQ ID NO: 1893217 - RNA, 19 nt, Artificial Sequence
  Description of Artificial Sequence: Synthetic oligonucleotide
  Antisense strand to SEQ ID NO: 1893216
uugggaguuacacuaaucc

SEQ ID NO: 1893218 - RNA, 19 nt, Artificial Sequence
  Description of Artificial Sequence: Synthetic oligonucleotide
  Sense strand starting at position 2739 of SEQ ID NO: 1879241
acuaguuguucaguaagug

SEQ ID NO: 1893219 - RNA, 19 nt, Artificial Sequence
  Description of Artificial Sequence: Synthetic oligonucleotide
  Antisense strand to SEQ ID NO: 1893218
cacuuacugaacaacuagu

SEQ ID NO: 1893220 - RNA, 19 nt, Artificial Sequence
  Description of Artificial Sequence: Synthetic oligonucleotide
  Sense strand starting at position 2792 of SEQ ID NO: 1879241
gcccuuuggcgcucaguga

SEQ ID NO: 1893221 - RNA, 19 nt, Artificial Sequence
  Description of Artificial Sequence: Synthetic oligonucleotide
  Antisense strand to SEQ ID NO: 1893220
ucacugagcgccaaagggc

SEQ ID NO: 1893222 - RNA, 19 nt, Artificial Sequence
  Description of Artificial Sequence: Synthetic oligonucleotide
  Sense strand starting at position 2806 of SEQ ID NO: 1879241
agugaauguuggcuaucac

SEQ ID NO: 1893223 - RNA, 19 nt, Artificial Sequence
  Description of Artificial Sequence: Synthetic oligonucleotide
  Antisense strand to SEQ ID NO: 1893222
gugauagccaacauucacu

SEQ ID NO: 1893224 - RNA, 19 nt, Artificial Sequence
  Description of Artificial Sequence: Synthetic oligonucleotide
  Sense strand starting at position 2816 of SEQ ID NO: 1879241
ggcuaucaccgugugccaa

SEQ ID NO: 1893225 - RNA, 19 nt, Artificial Sequence
  Description of Artificial Sequence: Synthetic oligonucleotide
  Antisense strand to SEQ ID NO: 1893224
uuggcacacggugauagcc

SEQ ID NO: 1893226 - RNA, 19 nt, Artificial Sequence
  Description of Artificial Sequence: Synthetic oligonucleotide
  Sense strand starting at position 2955 of SEQ ID NO: 1879241
cggauaaaucgugggaguu

SEQ ID NO: 1893227 - RNA, 19 nt, Artificial Sequence
  Description of Artificial Sequence: Synthetic oligonucleotide
  Antisense strand to SEQ ID NO: 1893226
aacucccacgauuuauccg

SEQ ID NO: 1893228 - RNA, 19 nt, Artificial Sequence
  Description of Artificial Sequence: Synthetic oligonucleotide
  Sense strand starting at position 2956 of SEQ ID NO: 1879241
ggauaaaucgugggaguug

SEQ ID NO: 1893229 - RNA, 19 nt, Artificial Sequence
  Description of Artificial Sequence: Synthetic oligonucleotide
  Antisense strand to SEQ ID NO: 1893228
caacucccacgauuuaucc

SEQ ID NO: 1893230 - RNA, 19 nt, Artificial Sequence
  Description of Artificial Sequence: Synthetic oligonucleotide
  Sense strand starting at position 2990 of SEQ ID NO: 1879241
acaugcguggcauauacua

SEQ ID NO: 1893231 - RNA, 19 nt, Artificial Sequence
  Description of Artificial Sequence: Synthetic oligonucleotide
  Antisense strand to SEQ ID NO: 1893230
uaguauaugccacgcaugu

SEQ ID NO: 1893232 - RNA, 19 nt, Artificial Sequence
  Description of Artificial Sequence: Synthetic oligonucleotide
  Sense strand starting at position 3006 of SEQ ID NO: 1879241
cuaggaaugcaauaagucu

SEQ ID NO: 1893233 - RNA, 19 nt, Artificial Sequence
  Description of Artificial Sequence: Synthetic oligonucleotide
  Antisense strand to SEQ ID NO: 1893232
agacuuauugcauuccuag

SEQ ID NO: 1893234 - RNA, 19 nt, Artificial Sequence
  Description of Artificial Sequence: Synthetic oligonucleotide
  Sense strand starting at position 3104 of SEQ ID NO: 1879241
cccuuaaacgcuggaggaa

SEQ ID NO: 1893235 - RNA, 19 nt, Artificial Sequence
  Description of Artificial Sequence: Synthetic oligonucleotide
  Antisense strand to SEQ ID NO: 1893234
uuccuccagcguuuaaggg

SEQ ID NO: 1893236 - RNA, 19 nt, Artificial Sequence
  Description of Artificial Sequence: Synthetic oligonucleotide
  Sense strand starting at position 3240 of SEQ ID NO: 1879241
gggagaaagcuuuggccca

SEQ ID NO: 1893237 - RNA, 19 nt, Artificial Sequence
  Description of Artificial Sequence: Synthetic oligonucleotide
  Antisense strand to SEQ ID NO: 1893236
ugggccaaagcuuucuccc

SEQ ID NO: 1893238 - RNA, 19 nt, Artificial Sequence
  Description of Artificial Sequence: Synthetic oligonucleotide
  Sense strand starting at position 3257 of SEQ ID NO: 1879241
caggguucuuagucuggaa

SEQ ID NO: 1893239 - RNA, 19 nt, Artificial Sequence
  Description of Artificial Sequence: Synthetic oligonucleotide
  Antisense strand to SEQ ID NO: 1893238
uuccagacuaagaacccug

SEQ ID NO: 1893240 - RNA, 19 nt, Artificial Sequence
  Description of Artificial Sequence: Synthetic oligonucleotide
  Sense strand starting at position 3259 of SEQ ID NO: 1879241
ggguucuuagucuggaauc

SEQ ID NO: 1893241 - RNA, 19 nt, Artificial Sequence
  Description of Artificial Sequence: Synthetic oligonucleotide
  Antisense strand to SEQ ID NO: 1893240
gauuccagacuaagaaccc

SEQ ID NO: 1893242 - RNA, 19 nt, Artificial Sequence
  Description of Artificial Sequence: Synthetic oligonucleotide
  Sense strand starting at position 3261 of SEQ ID NO: 1879241
guucuuagucuggaaucaa

SEQ ID NO: 1893243 - RNA, 19 nt, Artificial Sequence
  Description of Artificial Sequence: Synthetic oligonucleotide
  Antisense strand to SEQ ID NO: 1893242
uugauuccagacuaagaac

SEQ ID NO: 1893244 - RNA, 19 nt, Artificial Sequence
  Description of Artificial Sequence: Synthetic oligonucleotide
  Sense strand starting at position 3272 of SEQ ID NO: 1879241
ggaaucaacuccuugucuu

SEQ ID NO: 1893245 - RNA, 19 nt, Artificial Sequence
  Description of Artificial Sequence: Synthetic oligonucleotide
  Antisense strand to SEQ ID NO: 1893244
aagacaaggaguugauucc

SEQ ID NO: 1893246 - RNA, 19 nt, Artificial Sequence
  Description of Artificial Sequence: Synthetic oligonucleotide
  Sense strand starting at position 78 of SEQ ID NO: 1879242
agaggauguaaauguuaug

SEQ ID NO: 1893247 - RNA, 19 nt, Artificial Sequence
  Description of Artificial Sequence: Synthetic oligonucleotide
  Antisense strand to SEQ ID NO: 1893246
cauaacauuuacauccucu

SEQ ID NO: 1893248 - RNA, 19 nt, Artificial Sequence
  Description of Artificial Sequence: Synthetic oligonucleotide
  Sense strand starting at position 511 of SEQ ID NO: 1879242
ggaugcuauuuagggaaua

SEQ ID NO: 1893249 - RNA, 19 nt, Artificial Sequence
  Description of Artificial Sequence: Synthetic oligonucleotide
  Antisense strand to SEQ ID NO: 1893248
uauucccuaaauagcaucc

SEQ ID NO: 1893250 - RNA, 19 nt, Artificial Sequence
  Description of Artificial Sequence: Synthetic oligonucleotide
  Sense strand starting at position 512 of SEQ ID NO: 1879242
gaugcuauuuagggaauaa

SEQ ID NO: 1893251 - RNA, 19 nt, Artificial Sequence
  Description of Artificial Sequence: Synthetic oligonucleotide
  Antisense strand to SEQ ID NO: 1893250
uuauucccuaaauagcauc

SEQ ID NO: 1893252 - RNA, 19 nt, Artificial Sequence
  Description of Artificial Sequence: Synthetic oligonucleotide
  Sense strand starting at position 539 of SEQ ID NO: 1879242
acaggaguugauuguuaug

SEQ ID NO: 1893253 - RNA, 19 nt, Artificial Sequence
  Description of Artificial Sequence: Synthetic oligonucleotide
  Antisense strand to SEQ ID NO: 1893252
cauaacaaucaacuccugu

SEQ ID NO: 1893254 - RNA, 19 nt, Artificial Sequence
  Description of Artificial Sequence: Synthetic oligonucleotide
  Sense strand starting at position 541 of SEQ ID NO: 1879242
aggaguugauuguuaugaa

SEQ ID NO: 1893255 - RNA, 19 nt, Artificial Sequence
  Description of Artificial Sequence: Synthetic oligonucleotide
  Antisense strand to SEQ ID NO: 1893254
uucauaacaaucaacuccu

SEQ ID NO: 1893256 - RNA, 19 nt, Artificial Sequence
  Description of Artificial Sequence: Synthetic oligonucleotide
  Sense strand starting at position 586 of SEQ ID NO: 1879242
augcuaauauuggccauau

SEQ ID NO: 1893257 - RNA, 19 nt, Artificial Sequence
  Description of Artificial Sequence: Synthetic oligonucleotide
  Antisense strand to SEQ ID NO: 1893256
auauggccaauauuagcau

SEQ ID NO: 1893258 - RNA, 19 nt, Artificial Sequence
  Description of Artificial Sequence: Synthetic oligonucleotide
  Sense strand starting at position 622 of SEQ ID NO: 1879242
uuauaaguucuaggucaaa

SEQ ID NO: 1893259 - RNA, 19 nt, Artificial Sequence
  Description of Artificial Sequence: Synthetic oligonucleotide
  Antisense strand to SEQ ID NO: 1893258
uuugaccuagaacuuauaa

SEQ ID NO: 1893260 - RNA, 19 nt, Artificial Sequence
  Description of Artificial Sequence: Synthetic oligonucleotide
  Sense strand starting at position 699 of SEQ ID NO: 1879242
ccucuucuguuucuagaua

SEQ ID NO: 1893261 - RNA, 19 nt, Artificial Sequence
  Description of Artificial Sequence: Synthetic oligonucleotide
  Antisense strand to SEQ ID NO: 1893260
uaucuagaaacagaagagg

SEQ ID NO: 1893262 - RNA, 19 nt, Artificial Sequence
  Description of Artificial Sequence: Synthetic oligonucleotide
  Sense strand starting at position 836 of SEQ ID NO: 1879242
cugguaaccugucucaaag

SEQ ID NO: 1893263 - RNA, 19 nt, Artificial Sequence
  Description of Artificial Sequence: Synthetic oligonucleotide
  Antisense strand to SEQ ID NO: 1893262
cuuugagacagguuaccag

SEQ ID NO: 1893264 - RNA, 19 nt, Artificial Sequence
  Description of Artificial Sequence: Synthetic oligonucleotide
  Sense strand starting at position 936 of SEQ ID NO: 1879242
acuguauuacaagggcuaa

SEQ ID NO: 1893265 - RNA, 19 nt, Artificial Sequence
  Description of Artificial Sequence: Synthetic oligonucleotide
  Antisense strand to SEQ ID NO: 1893264
uuagcccuuguaauacagu

SEQ ID NO: 1893266 - RNA, 19 nt, Artificial Sequence
  Description of Artificial Sequence: Synthetic oligonucleotide
  Sense strand starting at position 1015 of SEQ ID NO: 1879242
guugaagcuugaucucaga

SEQ ID NO: 1893267 - RNA, 19 nt, Artificial Sequence
  Description of Artificial Sequence: Synthetic oligonucleotide
  Antisense strand to SEQ ID NO: 1893266
ucugagaucaagcuucaac

SEQ ID NO: 1893268 - RNA, 19 nt, Artificial Sequence
  Description of Artificial Sequence: Synthetic oligonucleotide
  Sense strand starting at position 1170 of SEQ ID NO: 1879242
gccuccuuucuagaguaaa

SEQ ID NO: 1893269 - RNA, 19 nt, Artificial Sequence
  Description of Artificial Sequence: Synthetic oligonucleotide
  Antisense strand to SEQ ID NO: 1893268
uuuacucuagaaaggaggc

SEQ ID NO: 1893270 - RNA, 19 nt, Artificial Sequence
  Description of Artificial Sequence: Synthetic oligonucleotide
  Sense strand starting at position 1398 of SEQ ID NO: 1879242
gcccacucuagagacgaau

SEQ ID NO: 1893271 - RNA, 19 nt, Artificial Sequence
  Description of Artificial Sequence: Synthetic oligonucleotide
  Antisense strand to SEQ ID NO: 1893270
auucgucucuagagugggc

SEQ ID NO: 1893272 - RNA, 19 nt, Artificial Sequence
  Description of Artificial Sequence: Synthetic oligonucleotide
  Sense strand starting at position 2093 of SEQ ID NO: 1879242
gcuuucugacugcagauau

SEQ ID NO: 1893273 - RNA, 19 nt, Artificial Sequence
  Description of Artificial Sequence: Synthetic oligonucleotide
  Antisense strand to SEQ ID NO: 1893272
auaucugcagucagaaagc

SEQ ID NO: 1893274 - RNA, 19 nt, Artificial Sequence
  Description of Artificial Sequence: Synthetic oligonucleotide
  Sense strand starting at position 2184 of SEQ ID NO: 1879242
uugucucugcucgcaauga

SEQ ID NO: 1893275 - RNA, 19 nt, Artificial Sequence
  Description of Artificial Sequence: Synthetic oligonucleotide
  Antisense strand to SEQ ID NO: 1893274
ucauugcgagcagagacaa

SEQ ID NO: 1893276 - RNA, 19 nt, Artificial Sequence
  Description of Artificial Sequence: Synthetic oligonucleotide
  Sense strand starting at position 2230 of SEQ ID NO: 1879242
ggagguagccagugugaau

SEQ ID NO: 1893277 - RNA, 19 nt, Artificial Sequence
  Description of Artificial Sequence: Synthetic oligonucleotide
  Antisense strand to SEQ ID NO: 1893276
auucacacuggcuaccucc

SEQ ID NO: 1893278 - RNA, 19 nt, Artificial Sequence
  Description of Artificial Sequence: Synthetic oligonucleotide
  Sense strand starting at position 2237 of SEQ ID NO: 1879242
gccagugugaaugaguaaa

SEQ ID NO: 1893279 - RNA, 19 nt, Artificial Sequence
  Description of Artificial Sequence: Synthetic oligonucleotide
  Antisense strand to SEQ ID NO: 1893278
uuuacucauucacacuggc

SEQ ID NO: 1893280 - RNA, 19 nt, Artificial Sequence
  Description of Artificial Sequence: Synthetic oligonucleotide
  Sense strand starting at position 2239 of SEQ ID NO: 1879242
cagugugaaugaguaaaca

SEQ ID NO: 1893281 - RNA, 19 nt, Artificial Sequence
  Description of Artificial Sequence: Synthetic oligonucleotide
  Antisense strand to SEQ ID NO: 1893280
uguuuacucauucacacug

SEQ ID NO: 1893282 - RNA, 19 nt, Artificial Sequence
  Description of Artificial Sequence: Synthetic oligonucleotide
  Sense strand starting at position 2456 of SEQ ID NO: 1879242
uguuaaagcaauugaagga

SEQ ID NO: 1893283 - RNA, 19 nt, Artificial Sequence
  Description of Artificial Sequence: Synthetic oligonucleotide
  Antisense strand to SEQ ID NO: 1893282
uccuucaauugcuuuaaca

SEQ ID NO: 1893284 - RNA, 19 nt, Artificial Sequence
  Description of Artificial Sequence: Synthetic oligonucleotide
  Sense strand starting at position 2861 of SEQ ID NO: 1879242
guauucuaacagcaaugga

SEQ ID NO: 1893285 - RNA, 19 nt, Artificial Sequence
  Description of Artificial Sequence: Synthetic oligonucleotide
  Antisense strand to SEQ ID NO: 1893284
uccauugcuguuagaauac

SEQ ID NO: 1893286 - RNA, 19 nt, Artificial Sequence
  Description of Artificial Sequence: Synthetic oligonucleotide
  Sense strand starting at position 2914 of SEQ ID NO: 1879242
agggaagaaucuuaaggga

SEQ ID NO: 1893287 - RNA, 19 nt, Artificial Sequence
  Description of Artificial Sequence: Synthetic oligonucleotide
  Antisense strand to SEQ ID NO: 1893286
ucccuuaagauucuucccu

SEQ ID NO: 1893288 - RNA, 19 nt, Artificial Sequence
  Description of Artificial Sequence: Synthetic oligonucleotide
  Sense strand starting at position 3043 of SEQ ID NO: 1879242
auugaagauguuuggccau

SEQ ID NO: 1893289 - RNA, 19 nt, Artificial Sequence
  Description of Artificial Sequence: Synthetic oligonucleotide
  Antisense strand to SEQ ID NO: 1893288
auggccaaacaucuucaau

SEQ ID NO: 1893290 - RNA, 19 nt, Artificial Sequence
  Description of Artificial Sequence: Synthetic oligonucleotide
  Sense strand starting at position 3094 of SEQ ID NO: 1879242
uuuacugaggguugggauu

SEQ ID NO: 1893291 - RNA, 19 nt, Artificial Sequence
  Description of Artificial Sequence: Synthetic oligonucleotide
  Antisense strand to SEQ ID NO: 1893290
aaucccaacccucaguaaa

SEQ ID NO: 1893292 - RNA, 19 nt, Artificial Sequence
  Description of Artificial Sequence: Synthetic oligonucleotide
  Sense strand starting at position 3148 of SEQ ID NO: 1879242
ugaugagaguguuuggaag

SEQ ID NO: 1893293 - RNA, 19 nt, Artificial Sequence
  Description of Artificial Sequence: Synthetic oligonucleotide
  Antisense strand to SEQ ID NO: 1893292
cuuccaaacacucucauca

SEQ ID NO: 1893294 - RNA, 19 nt, Artificial Sequence
  Description of Artificial Sequence: Synthetic oligonucleotide
  Sense strand starting at position 3156 of SEQ ID NO: 1879242
guguuuggaagagaauguu

SEQ ID NO: 1893295 - RNA, 19 nt, Artificial Sequence
  Description of Artificial Sequence: Synthetic oligonucleotide
  Antisense strand to SEQ ID NO: 1893294
aacauucucuuccaaacac

SEQ ID NO: 1893296 - RNA, 19 nt, Artificial Sequence
  Description of Artificial Sequence: Synthetic oligonucleotide
  Sense strand starting at position 3320 of SEQ ID NO: 1879242
gcaagugcucuggcaguau

SEQ ID NO: 1893297 - RNA, 19 nt, Artificial Sequence
  Description of Artificial Sequence: Synthetic oligonucleotide
  Antisense strand to SEQ ID NO: 1893296
auacugccagagcacuugc

SEQ ID NO: 1893298 - RNA, 19 nt, Artificial Sequence
  Description of Artificial Sequence: Synthetic oligonucleotide
  Sense strand starting at position 3347 of SEQ ID NO: 1879242
cuggucugagugggauauu

SEQ ID NO: 1893299 - RNA, 19 nt, Artificial Sequence
  Description of Artificial Sequence: Synthetic oligonucleotide
  Antisense strand to SEQ ID NO: 1893298
aauaucccacucagaccag

SEQ ID NO: 1893300 - RNA, 19 nt, Artificial Sequence
  Description of Artificial Sequence: Synthetic oligonucleotide
  Sense strand starting at position 3356 of SEQ ID NO: 1879242
gugggauauuuggaauuga

SEQ ID NO: 1893301 - RNA, 19 nt, Artificial Sequence
  Description of Artificial Sequence: Synthetic oligonucleotide
  Antisense strand to SEQ ID NO: 1893300
ucaauuccaaauaucccac

SEQ ID NO: 1893302 - RNA, 19 nt, Artificial Sequence
  Description of Artificial Sequence: Synthetic oligonucleotide
  Sense strand starting at position 3384 of SEQ ID NO: 1879242
gcuucugaguuucugauga

SEQ ID NO: 1893303 - RNA, 19 nt, Artificial Sequence
  Description of Artificial Sequence: Synthetic oligonucleotide
  Antisense strand to SEQ ID NO: 1893302
ucaucagaaacucagaagc

SEQ ID NO: 1893304 - RNA, 19 nt, Artificial Sequence
  Description of Artificial Sequence: Synthetic oligonucleotide
  Sense strand starting at position 3470 of SEQ ID NO: 1879242
cuaagaguccaggguguua

SEQ ID NO: 1893305 - RNA, 19 nt, Artificial Sequence
  Description of Artificial Sequence: Synthetic oligonucleotide
  Antisense strand to SEQ ID NO: 1893304
uaacacccuggacucuuag

SEQ ID NO: 1893306 - RNA, 19 nt, Artificial Sequence
  Description of Artificial Sequence: Synthetic oligonucleotide
  Sense strand starting at position 3472 of SEQ ID NO: 1879242
aagaguccaggguguuaga

SEQ ID NO: 1893307 - RNA, 19 nt, Artificial Sequence
  Description of Artificial Sequence: Synthetic oligonucleotide
  Antisense strand to SEQ ID NO: 1893306
ucuaacacccuggacucuu

SEQ ID NO: 1893308 - RNA, 19 nt, Artificial Sequence
  Description of Artificial Sequence: Synthetic oligonucleotide
  Sense strand starting at position 3481 of SEQ ID NO: 1879242
ggguguuagauuugucgua

SEQ ID NO: 1893309 - RNA, 19 nt, Artificial Sequence
  Description of Artificial Sequence: Synthetic oligonucleotide
  Antisense strand to SEQ ID NO: 1893308
uacgacaaaucuaacaccc

SEQ ID NO: 1893310 - RNA, 19 nt, Artificial Sequence
  Description of Artificial Sequence: Synthetic oligonucleotide
  Sense strand starting at position 3482 of SEQ ID NO: 1879242
gguguuagauuugucguac

SEQ ID NO: 1893311 - RNA, 19 nt, Artificial Sequence
  Description of Artificial Sequence: Synthetic oligonucleotide
  Antisense strand to SEQ ID NO: 1893310
guacgacaaaucuaacacc

SEQ ID NO: 1893312 - RNA, 19 nt, Artificial Sequence
  Description of Artificial Sequence: Synthetic oligonucleotide
  Sense strand starting at position 3483 of SEQ ID NO: 1879242
guguuagauuugucguaca

SEQ ID NO: 1893313 - RNA, 19 nt, Artificial Sequence
  Description of Artificial Sequence: Synthetic oligonucleotide
  Antisense strand to SEQ ID NO: 1893312
uguacgacaaaucuaacac

SEQ ID NO: 1893314 - RNA, 19 nt, Artificial Sequence
  Description of Artificial Sequence: Synthetic oligonucleotide
  Sense strand starting at position 3490 of SEQ ID NO: 1879242
auuugucguacagguacaa

SEQ ID NO: 1893315 - RNA, 19 nt, Artificial Sequence
  Description of Artificial Sequence: Synthetic oligonucleotide
  Antisense strand to SEQ ID NO: 1893314
uuguaccuguacgacaaau

SEQ ID NO: 1893316 - RNA, 19 nt, Artificial Sequence
  Description of Artificial Sequence: Synthetic oligonucleotide
  Sense strand starting at position 3516 of SEQ ID NO: 1879242
ucagauagugcuggaguga

SEQ ID NO: 1893317 - RNA, 19 nt, Artificial Sequence
  Description of Artificial Sequence: Synthetic oligonucleotide
  Antisense strand to SEQ ID NO: 1893316
ucacuccagcacuaucuga

SEQ ID NO: 1893318 - RNA, 19 nt, Artificial Sequence
  Description of Artificial Sequence: Synthetic oligonucleotide
  Sense strand starting at position 3517 of SEQ ID NO: 1879242
cagauagugcuggagugaa

SEQ ID NO: 1893319 - RNA, 19 nt, Artificial Sequence
  Description of Artificial Sequence: Synthetic oligonucleotide
  Antisense strand to SEQ ID NO: 1893318
uucacuccagcacuaucug

SEQ ID NO: 1893320 - RNA, 19 nt, Artificial Sequence
  Description of Artificial Sequence: Synthetic oligonucleotide
  Sense strand starting at position 3560 of SEQ ID NO: 1879242
gcuguuuagggcagaguga

SEQ ID NO: 1893321 - RNA, 19 nt, Artificial Sequence
  Description of Artificial Sequence: Synthetic oligonucleotide
  Antisense strand to SEQ ID NO: 1893320
ucacucugcccuaaacagc

SEQ ID NO: 1893322 - RNA, 19 nt, Artificial Sequence
  Description of Artificial Sequence: Synthetic oligonucleotide
  Sense strand starting at position 3571 of SEQ ID NO: 1879242
cagagugaccaggacguua

SEQ ID NO: 1893323 - RNA, 19 nt, Artificial Sequence
  Description of Artificial Sequence: Synthetic oligonucleotide
  Antisense strand to SEQ ID NO: 1893322
uaacguccuggucacucug

SEQ ID NO: 1893324 - RNA, 19 nt, Artificial Sequence
  Description of Artificial Sequence: Synthetic oligonucleotide
  Sense strand starting at position 3576 of SEQ ID NO: 1879242
ugaccaggacguuaguaaa

SEQ ID NO: 1893325 - RNA, 19 nt, Artificial Sequence
  Description of Artificial Sequence: Synthetic oligonucleotide
  Antisense strand to SEQ ID NO: 1893324
uuuacuaacguccugguca

SEQ ID NO: 1893326 - RNA, 19 nt, Artificial Sequence
  Description of Artificial Sequence: Synthetic oligonucleotide
  Sense strand starting at position 15 of SEQ ID NO: 1879243
augcauaaauugguguaaa

SEQ ID NO: 1893327 - RNA, 19 nt, Artificial Sequence
  Description of Artificial Sequence: Synthetic oligonucleotide
  Antisense strand to SEQ ID NO: 1893326
uuuacaccaauuuaugcau

SEQ ID NO: 1893328 - RNA, 19 nt, Artificial Sequence
  Description of Artificial Sequence: Synthetic oligonucleotide
  Sense strand starting at position 25 of SEQ ID NO: 1879243
ugguguaaaccagggcuau

SEQ ID NO: 1893329 - RNA, 19 nt, Artificial Sequence
  Description of Artificial Sequence: Synthetic oligonucleotide
  Antisense strand to SEQ ID NO: 1893328
auagcccugguuuacacca

SEQ ID NO: 1893330 - RNA, 19 nt, Artificial Sequence
  Description of Artificial Sequence: Synthetic oligonucleotide
  Sense strand starting at position 26 of SEQ ID NO: 1879243
gguguaaaccagggcuauu

SEQ ID NO: 1893331 - RNA, 19 nt, Artificial Sequence
  Description of Artificial Sequence: Synthetic oligonucleotide
  Antisense strand to SEQ ID NO: 1893330
aauagcccugguuuacacc

SEQ ID NO: 1893332 - RNA, 19 nt, Artificial Sequence
  Description of Artificial Sequence: Synthetic oligonucleotide
  Sense strand starting at position 341 of SEQ ID NO: 1879243
gcucuaguuccuuauauca

SEQ ID NO: 1893333 - RNA, 19 nt, Artificial Sequence
  Description of Artificial Sequence: Synthetic oligonucleotide
  Antisense strand to SEQ ID NO: 1893332
ugauauaaggaacuagagc

SEQ ID NO: 1893334 - RNA, 19 nt, Artificial Sequence
  Description of Artificial Sequence: Synthetic oligonucleotide
  Sense strand starting at position 391 of SEQ ID NO: 1879243
gcaagugaugcugcccuuu

SEQ ID NO: 1893335 - RNA, 19 nt, Artificial Sequence
  Description of Artificial Sequence: Synthetic oligonucleotide
  Antisense strand to SEQ ID NO: 1893334
aaagggcagcaucacuugc

SEQ ID NO: 1893336 - RNA, 19 nt, Artificial Sequence
  Description of Artificial Sequence: Synthetic oligonucleotide
  Sense strand starting at position 437 of SEQ ID NO: 1879243
ucagaaaucuugucguuag

SEQ ID NO: 1893337 - RNA, 19 nt, Artificial Sequence
  Description of Artificial Sequence: Synthetic oligonucleotide
  Antisense strand to SEQ ID NO: 1893336
cuaacgacaagauuucuga

SEQ ID NO: 1893338 - RNA, 19 nt, Artificial Sequence
  Description of Artificial Sequence: Synthetic oligonucleotide
  Sense strand starting at position 440 of SEQ ID NO: 1879243
gaaaucuugucguuagaua

SEQ ID NO: 1893339 - RNA, 19 nt, Artificial Sequence
  Description of Artificial Sequence: Synthetic oligonucleotide
  Antisense strand to SEQ ID NO: 1893338
uaucuaacgacaagauuuc

SEQ ID NO: 1893340 - RNA, 19 nt, Artificial Sequence
  Description of Artificial Sequence: Synthetic oligonucleotide
  Sense strand starting at position 441 of SEQ ID NO: 1879243
aaaucuugucguuagauau

SEQ ID NO: 1893341 - RNA, 19 nt, Artificial Sequence
  Description of Artificial Sequence: Synthetic oligonucleotide
  Antisense strand to SEQ ID NO: 1893340
auaucuaacgacaagauuu

SEQ ID NO: 1893342 - RNA, 19 nt, Artificial Sequence
  Description of Artificial Sequence: Synthetic oligonucleotide
  Sense strand starting at position 575 of SEQ ID NO: 1879243
cauugugcauaucuaggaa

SEQ ID NO: 1893343 - RNA, 19 nt, Artificial Sequence
  Description of Artificial Sequence: Synthetic oligonucleotide
  Antisense strand to SEQ ID NO: 1893342
uuccuagauaugcacaaug

SEQ ID NO: 1893344 - RNA, 19 nt, Artificial Sequence
  Description of Artificial Sequence: Synthetic oligonucleotide
  Sense strand starting at position 578 of SEQ ID NO: 1879243
ugugcauaucuaggaaaua

SEQ ID NO: 1893345 - RNA, 19 nt, Artificial Sequence
  Description of Artificial Sequence: Synthetic oligonucleotide
  Antisense strand to SEQ ID NO: 1893344
uauuuccuagauaugcaca

SEQ ID NO: 1893346 - RNA, 19 nt, Artificial Sequence
  Description of Artificial Sequence: Synthetic oligonucleotide
  Sense strand starting at position 635 of SEQ ID NO: 1879243
gggaaauaaugugcaagca

SEQ ID NO: 1893347 - RNA, 19 nt, Artificial Sequence
  Description of Artificial Sequence: Synthetic oligonucleotide
  Antisense strand to SEQ ID NO: 1893346
ugcuugcacauuauuuccc

SEQ ID NO: 1893348 - RNA, 19 nt, Artificial Sequence
  Description of Artificial Sequence: Synthetic oligonucleotide
  Sense strand starting at position 636 of SEQ ID NO: 1879243
ggaaauaaugugcaagcaa

SEQ ID NO: 1893349 - RNA, 19 nt, Artificial Sequence
  Description of Artificial Sequence: Synthetic oligonucleotide
  Antisense strand to SEQ ID NO: 1893348
uugcuugcacauuauuucc

SEQ ID NO: 1893350 - RNA, 19 nt, Artificial Sequence
  Description of Artificial Sequence: Synthetic oligonucleotide
  Sense strand starting at position 747 of SEQ ID NO: 1879243
acauauacucuguacgacu

SEQ ID NO: 1893351 - RNA, 19 nt, Artificial Sequence
  Description of Artificial Sequence: Synthetic oligonucleotide
  Antisense strand to SEQ ID NO: 1893350
agucguacagaguauaugu

SEQ ID NO: 1893352 - RNA, 19 nt, Artificial Sequence
  Description of Artificial Sequence: Synthetic oligonucleotide
  Sense strand starting at position 799 of SEQ ID NO: 1879243
guuuaauccgaucagaaac

SEQ ID NO: 1893353 - RNA, 19 nt, Artificial Sequence
  Description of Artificial Sequence: Synthetic oligonucleotide
  Antisense strand to SEQ ID NO: 1893352
guuucugaucggauuaaac

SEQ ID NO: 1893354 - RNA, 19 nt, Artificial Sequence
  Description of Artificial Sequence: Synthetic oligonucleotide
  Sense strand starting at position 933 of SEQ ID NO: 1879243
ccuagaugcuuugucaaga

SEQ ID NO: 1893355 - RNA, 19 nt, Artificial Sequence
  Description of Artificial Sequence: Synthetic oligonucleotide
  Antisense strand to SEQ ID NO: 1893354
ucuugacaaagcaucuagg

SEQ ID NO: 1893356 - RNA, 19 nt, Artificial Sequence
  Description of Artificial Sequence: Synthetic oligonucleotide
  Sense strand starting at position 934 of SEQ ID NO: 1879243
cuagaugcuuugucaagag

SEQ ID NO: 1893357 - RNA, 19 nt, Artificial Sequence
  Description of Artificial Sequence: Synthetic oligonucleotide
  Antisense strand to SEQ ID NO: 1893356
cucuugacaaagcaucuag

SEQ ID NO: 1893358 - RNA, 19 nt, Artificial Sequence
  Description of Artificial Sequence: Synthetic oligonucleotide
  Sense strand starting at position 938 of SEQ ID NO: 1879243
augcuuugucaagagaugg

SEQ ID NO: 1893359 - RNA, 19 nt, Artificial Sequence
  Description of Artificial Sequence: Synthetic oligonucleotide
  Antisense strand to SEQ ID NO: 1893358
ccaucucuugacaaagcau

SEQ ID NO: 1893360 - RNA, 19 nt, Artificial Sequence
  Description of Artificial Sequence: Synthetic oligonucleotide
  Sense strand starting at position 958 of SEQ ID NO: 1879243
aagaguuguagccgacaug

SEQ ID NO: 1893361 - RNA, 19 nt, Artificial Sequence
  Description of Artificial Sequence: Synthetic oligonucleotide
  Antisense strand to SEQ ID NO: 1893360
caugucggcuacaacucuu

SEQ ID NO: 1893362 - RNA, 19 nt, Artificial Sequence
  Description of Artificial Sequence: Synthetic oligonucleotide
  Sense strand starting at position 1024 of SEQ ID NO: 1879243
guuugaauacugcaacuua

SEQ ID NO: 1893363 - RNA, 19 nt, Artificial Sequence
  Description of Artificial Sequence: Synthetic oligonucleotide
  Antisense strand to SEQ ID NO: 1893362
uaaguugcaguauucaaac

SEQ ID NO: 1893364 - RNA, 19 nt, Artificial Sequence
  Description of Artificial Sequence: Synthetic oligonucleotide
  Sense strand starting at position 1046 of SEQ ID NO: 1879243
uuuaacauggaucgauaga

SEQ ID NO: 1893365 - RNA, 19 nt, Artificial Sequence
  Description of Artificial Sequence: Synthetic oligonucleotide
  Antisense strand to SEQ ID NO: 1893364
ucuaucgauccauguuaaa

SEQ ID NO: 1893366 - RNA, 19 nt, Artificial Sequence
  Description of Artificial Sequence: Synthetic oligonucleotide
  Sense strand starting at position 1099 of SEQ ID NO: 1879243
agcagauguaguuauugaa

SEQ ID NO: 1893367 - RNA, 19 nt, Artificial Sequence
  Description of Artificial Sequence: Synthetic oligonucleotide
  Antisense strand to SEQ ID NO: 1893366
uucaauaacuacaucugcu

SEQ ID NO: 1893368 - RNA, 19 nt, Artificial Sequence
  Description of Artificial Sequence: Synthetic oligonucleotide
  Sense strand starting at position 1233 of SEQ ID NO: 1879243
uccuuuggcgaaugaguca

SEQ ID NO: 1893369 - RNA, 19 nt, Artificial Sequence
  Description of Artificial Sequence: Synthetic oligonucleotide
  Antisense strand to SEQ ID NO: 1893368
ugacucauucgccaaagga

SEQ ID NO: 1893370 - RNA, 19 nt, Artificial Sequence
  Description of Artificial Sequence: Synthetic oligonucleotide
  Sense strand starting at position 1246 of SEQ ID NO: 1879243
gagucaacuccuggaugug

SEQ ID NO: 1893371 - RNA, 19 nt, Artificial Sequence
  Description of Artificial Sequence: Synthetic oligonucleotide
  Antisense strand to SEQ ID NO: 1893370
cacauccaggaguugacuc

SEQ ID NO: 1893372 - RNA, 19 nt, Artificial Sequence
  Description of Artificial Sequence: Synthetic oligonucleotide
  Sense strand starting at position 1247 of SEQ ID NO: 1879243
agucaacuccuggauguga

SEQ ID NO: 1893373 - RNA, 19 nt, Artificial Sequence
  Description of Artificial Sequence: Synthetic oligonucleotide
  Antisense strand to SEQ ID NO: 1893372
ucacauccaggaguugacu

SEQ ID NO: 1893374 - RNA, 19 nt, Artificial Sequence
  Description of Artificial Sequence: Synthetic oligonucleotide
  Sense strand starting at position 1249 of SEQ ID NO: 1879243
ucaacuccuggaugugaaa

SEQ ID NO: 1893375 - RNA, 19 nt, Artificial Sequence
  Description of Artificial Sequence: Synthetic oligonucleotide
  Antisense strand to SEQ ID NO: 1893374
uuucacauccaggaguuga

SEQ ID NO: 1893376 - RNA, 19 nt, Artificial Sequence
  Description of Artificial Sequence: Synthetic oligonucleotide
  Sense strand starting at position 1261 of SEQ ID NO: 1879243
ugugaaaggucccugcaag

SEQ ID NO: 1893377 - RNA, 19 nt, Artificial Sequence
  Description of Artificial Sequence: Synthetic oligonucleotide
  Antisense strand to SEQ ID NO: 1893376
cuugcagggaccuuucaca

SEQ ID NO: 1893378 - RNA, 19 nt, Artificial Sequence
  Description of Artificial Sequence: Synthetic oligonucleotide
  Sense strand starting at position 2001 of SEQ ID NO: 1879243
uggcaugccgggaguugua

SEQ ID NO: 1893379 - RNA, 19 nt, Artificial Sequence
  Description of Artificial Sequence: Synthetic oligonucleotide
  Antisense strand to SEQ ID NO: 1893378
uacaacucccggcaugcca

SEQ ID NO: 1893380 - RNA, 19 nt, Artificial Sequence
  Description of Artificial Sequence: Synthetic oligonucleotide
  Sense strand starting at position 2127 of SEQ ID NO: 1879243
uccgauuauuuccagaaau

SEQ ID NO: 1893381 - RNA, 19 nt, Artificial Sequence
  Description of Artificial Sequence: Synthetic oligonucleotide
  Antisense strand to SEQ ID NO: 1893380
auuucuggaaauaaucgga

SEQ ID NO: 1893382 - RNA, 19 nt, Artificial Sequence
  Description of Artificial Sequence: Synthetic oligonucleotide
  Sense strand starting at position 2230 of SEQ ID NO: 1879243
cgugauagagcucacuaug

SEQ ID NO: 1893383 - RNA, 19 nt, Artificial Sequence
  Description of Artificial Sequence: Synthetic oligonucleotide
  Antisense strand to SEQ ID NO: 1893382
cauagugagcucuaucacg

SEQ ID NO: 1893384 - RNA, 19 nt, Artificial Sequence
  Description of Artificial Sequence: Synthetic oligonucleotide
  Sense strand starting at position 2241 of SEQ ID NO: 1879243
ucacuaugaccucgaauuc

SEQ ID NO: 1893385 - RNA, 19 nt, Artificial Sequence
  Description of Artificial Sequence: Synthetic oligonucleotide
  Antisense strand to SEQ ID NO: 1893384
gaauucgaggucauaguga

SEQ ID NO: 1893386 - RNA, 19 nt, Artificial Sequence
  Description of Artificial Sequence: Synthetic oligonucleotide
  Sense strand starting at position 2647 of SEQ ID NO: 1879243
ccggauauccaguaggaug

SEQ ID NO: 1893387 - RNA, 19 nt, Artificial Sequence
  Description of Artificial Sequence: Synthetic oligonucleotide
  Antisense strand to SEQ ID NO: 1893386
cauccuacuggauauccgg

SEQ ID NO: 1893388 - RNA, 19 nt, Artificial Sequence
  Description of Artificial Sequence: Synthetic oligonucleotide
  Sense strand starting at position 2663 of SEQ ID NO: 1879243
auguauuucccauguguga

SEQ ID NO: 1893389 - RNA, 19 nt, Artificial Sequence
  Description of Artificial Sequence: Synthetic oligonucleotide
  Antisense strand to SEQ ID NO: 1893388
ucacacaugggaaauacau

SEQ ID NO: 1893390 - RNA, 19 nt, Artificial Sequence
  Description of Artificial Sequence: Synthetic oligonucleotide
  Sense strand starting at position 2686 of SEQ ID NO: 1879243
uucuuuagaguuggcucua

SEQ ID NO: 1893391 - RNA, 19 nt, Artificial Sequence
  Description of Artificial Sequence: Synthetic oligonucleotide
  Antisense strand to SEQ ID NO: 1893390
uagagccaacucuaaagaa

SEQ ID NO: 1893392 - RNA, 19 nt, Artificial Sequence
  Description of Artificial Sequence: Synthetic oligonucleotide
  Sense strand starting at position 2902 of SEQ ID NO: 1879243
aagugaauacgaugucuua

SEQ ID NO: 1893393 - RNA, 19 nt, Artificial Sequence
  Description of Artificial Sequence: Synthetic oligonucleotide
  Antisense strand to SEQ ID NO: 1893392
uaagacaucguauucacuu

SEQ ID NO: 1893394 - RNA, 19 nt, Artificial Sequence
  Description of Artificial Sequence: Synthetic oligonucleotide
  Sense strand starting at position 2992 of SEQ ID NO: 1879243
gccugacacgauggauagu

SEQ ID NO: 1893395 - RNA, 19 nt, Artificial Sequence
  Description of Artificial Sequence: Synthetic oligonucleotide
  Antisense strand to SEQ ID NO: 1893394
acuauccaucgugucaggc

SEQ ID NO: 1893396 - RNA, 19 nt, Artificial Sequence
  Description of Artificial Sequence: Synthetic oligonucleotide
  Sense strand starting at position 3141 of SEQ ID NO: 1879243
auguaaauguggucuuucu

SEQ ID NO: 1893397 - RNA, 19 nt, Artificial Sequence
  Description of Artificial Sequence: Synthetic oligonucleotide
  Antisense strand to SEQ ID NO: 1893396
agaaagaccacauuuacau

SEQ ID NO: 1893398 - RNA, 19 nt, Artificial Sequence
  Description of Artificial Sequence: Synthetic oligonucleotide
  Sense strand starting at position 3349 of SEQ ID NO: 1879243
gggaaucccucacugaagu

SEQ ID NO: 1893399 - RNA, 19 nt, Artificial Sequence
  Description of Artificial Sequence: Synthetic oligonucleotide
  Antisense strand to SEQ ID NO: 1893398
acuucagugagggauuccc

SEQ ID NO: 1893400 - RNA, 19 nt, Artificial Sequence
  Description of Artificial Sequence: Synthetic oligonucleotide
  Sense strand starting at position 3359 of SEQ ID NO: 1879243
cacugaagucuuuguauag

SEQ ID NO: 1893401 - RNA, 19 nt, Artificial Sequence
  Description of Artificial Sequence: Synthetic oligonucleotide
  Antisense strand to SEQ ID NO: 1893400
cuauacaaagacuucagug

SEQ ID NO: 1893402 - RNA, 19 nt, Artificial Sequence
  Description of Artificial Sequence: Synthetic oligonucleotide
  Sense strand starting at position 3369 of SEQ ID NO: 1879243
uuuguauaggcucaauacu

SEQ ID NO: 1893403 - RNA, 19 nt, Artificial Sequence
  Description of Artificial Sequence: Synthetic oligonucleotide
  Antisense strand to SEQ ID NO: 1893402
aguauugagccuauacaaa

SEQ ID NO: 1893404 - RNA, 19 nt, Artificial Sequence
  Description of Artificial Sequence: Synthetic oligonucleotide
  Sense strand starting at position 3903 of SEQ ID NO: 1879243
ugguucuuaccauagaucu

SEQ ID NO: 1893405 - RNA, 19 nt, Artificial Sequence
  Description of Artificial Sequence: Synthetic oligonucleotide
  Antisense strand to SEQ ID NO: 1893404
agaucuaugguaagaacca

SEQ ID NO: 1893406 - RNA, 19 nt, Artificial Sequence
  Description of Artificial Sequence: Synthetic oligonucleotide
  Sense strand starting at position 8 of SEQ ID NO: 1879244
gcuagauauuauguuauuc

SEQ ID NO: 1893407 - RNA, 19 nt, Artificial Sequence
  Description of Artificial Sequence: Synthetic oligonucleotide
  Antisense strand to SEQ ID NO: 1893406
gaauaacauaauaucuagc

SEQ ID NO: 1893408 - RNA, 19 nt, Artificial Sequence
  Description of Artificial Sequence: Synthetic oligonucleotide
  Sense strand starting at position 41 of SEQ ID NO: 1879244
cagaauuugugucaagaau

SEQ ID NO: 1893409 - RNA, 19 nt, Artificial Sequence
  Description of Artificial Sequence: Synthetic oligonucleotide
  Antisense strand to SEQ ID NO: 1893408
auucuugacacaaauucug

SEQ ID NO: 1893410 - RNA, 19 nt, Artificial Sequence
  Description of Artificial Sequence: Synthetic oligonucleotide
  Sense strand starting at position 102 of SEQ ID NO: 1879244
uuuaaagucaggugggaaa

SEQ ID NO: 1893411 - RNA, 19 nt, Artificial Sequence
  Description of Artificial Sequence: Synthetic oligonucleotide
  Antisense strand to SEQ ID NO: 1893410
uuucccaccugacuuuaaa

SEQ ID NO: 1893412 - RNA, 19 nt, Artificial Sequence
  Description of Artificial Sequence: Synthetic oligonucleotide
  Sense strand starting at position 129 of SEQ ID NO: 1879244
gcuaacaaggucuaaacua

SEQ ID NO: 1893413 - RNA, 19 nt, Artificial Sequence
  Description of Artificial Sequence: Synthetic oligonucleotide
  Antisense strand to SEQ ID NO: 1893412
uaguuuagaccuuguuagc

SEQ ID NO: 1893414 - RNA, 19 nt, Artificial Sequence
  Description of Artificial Sequence: Synthetic oligonucleotide
  Sense strand starting at position 477 of SEQ ID NO: 1879244
gacaaagcuguuugccaua

SEQ ID NO: 1893415 - RNA, 19 nt, Artificial Sequence
  Description of Artificial Sequence: Synthetic oligonucleotide
  Antisense strand to SEQ ID NO: 1893414
uauggcaaacagcuuuguc

SEQ ID NO: 1893416 - RNA, 19 nt, Artificial Sequence
  Description of Artificial Sequence: Synthetic oligonucleotide
  Sense strand starting at position 623 of SEQ ID NO: 1879244
aguuucaaggaggguaaau

SEQ ID NO: 1893417 - RNA, 19 nt, Artificial Sequence
  Description of Artificial Sequence: Synthetic oligonucleotide
  Antisense strand to SEQ ID NO: 1893416
auuuacccuccuugaaacu

SEQ ID NO: 1893418 - RNA, 19 nt, Artificial Sequence
  Description of Artificial Sequence: Synthetic oligonucleotide
  Sense strand starting at position 703 of SEQ ID NO: 1879244
guugcagucaaguauuaua

SEQ ID NO: 1893419 - RNA, 19 nt, Artificial Sequence
  Description of Artificial Sequence: Synthetic oligonucleotide
  Antisense strand to SEQ ID NO: 1893418
uauaauacuugacugcaac

SEQ ID NO: 1893420 - RNA, 19 nt, Artificial Sequence
  Description of Artificial Sequence: Synthetic oligonucleotide
  Sense strand starting at position 824 of SEQ ID NO: 1879244
aacuguaaaccguacaagu

SEQ ID NO: 1893421 - RNA, 19 nt, Artificial Sequence
  Description of Artificial Sequence: Synthetic oligonucleotide
  Antisense strand to SEQ ID NO: 1893420
acuuguacgguuuacaguu

SEQ ID NO: 1893422 - RNA, 19 nt, Artificial Sequence
  Description of Artificial Sequence: Synthetic oligonucleotide
  Sense strand starting at position 826 of SEQ ID NO: 1879244
cuguaaaccguacaaguaa

SEQ ID NO: 1893423 - RNA, 19 nt, Artificial Sequence
  Description of Artificial Sequence: Synthetic oligonucleotide
  Antisense strand to SEQ ID NO: 1893422
uuacuuguacgguuuacag

SEQ ID NO: 1893424 - RNA, 19 nt, Artificial Sequence
  Description of Artificial Sequence: Synthetic oligonucleotide
  Sense strand starting at position 1065 of SEQ ID NO: 1879244
gcaauuuggucuccucuga

SEQ ID NO: 1893425 - RNA, 19 nt, Artificial Sequence
  Description of Artificial Sequence: Synthetic oligonucleotide
  Antisense strand to SEQ ID NO: 1893424
ucagaggagaccaaauugc

SEQ ID NO: 1893426 - RNA, 19 nt, Artificial Sequence
  Description of Artificial Sequence: Synthetic oligonucleotide
  Sense strand starting at position 1104 of SEQ ID NO: 1879244
ccgacaagauuaucucaga

SEQ ID NO: 1893427 - RNA, 19 nt, Artificial Sequence
  Description of Artificial Sequence: Synthetic oligonucleotide
  Antisense strand to SEQ ID NO: 1893426
ucugagauaaucuugucgg

SEQ ID NO: 1893428 - RNA, 19 nt, Artificial Sequence
  Description of Artificial Sequence: Synthetic oligonucleotide
  Sense strand starting at position 1206 of SEQ ID NO: 1879244
ccauuucucuggugaaaga

SEQ ID NO: 1893429 - RNA, 19 nt, Artificial Sequence
  Description of Artificial Sequence: Synthetic oligonucleotide
  Antisense strand to SEQ ID NO: 1893428
ucuuucaccagagaaaugg

SEQ ID NO: 1893430 - RNA, 19 nt, Artificial Sequence
  Description of Artificial Sequence: Synthetic oligonucleotide
  Sense strand starting at position 1235 of SEQ ID NO: 1879244
accauuauccucugggaaa

SEQ ID NO: 1893431 - RNA, 19 nt, Artificial Sequence
  Description of Artificial Sequence: Synthetic oligonucleotide
  Antisense strand to SEQ ID NO: 1893430
uuucccagaggauaauggu

SEQ ID NO: 1893432 - RNA, 19 nt, Artificial Sequence
  Description of Artificial Sequence: Synthetic oligonucleotide
  Sense strand starting at position 1248 of SEQ ID NO: 1879244
gggaaacauugagacuauc

SEQ ID NO: 1893433 - RNA, 19 nt, Artificial Sequence
  Description of Artificial Sequence: Synthetic oligonucleotide
  Antisense strand to SEQ ID NO: 1893432
gauagucucaauguuuccc

SEQ ID NO: 1893434 - RNA, 19 nt, Artificial Sequence
  Description of Artificial Sequence: Synthetic oligonucleotide
  Sense strand starting at position 1320 of SEQ ID NO: 1879244
aaauauauaguauguggga

SEQ ID NO: 1893435 - RNA, 19 nt, Artificial Sequence
  Description of Artificial Sequence: Synthetic oligonucleotide
  Antisense strand to SEQ ID NO: 1893434
ucccacauacuauauauuu

SEQ ID NO: 1893436 - RNA, 19 nt, Artificial Sequence
  Description of Artificial Sequence: Synthetic oligonucleotide
  Sense strand starting at position 1321 of SEQ ID NO: 1879244
aauauauaguaugugggaa

SEQ ID NO: 1893437 - RNA, 19 nt, Artificial Sequence
  Description of Artificial Sequence: Synthetic oligonucleotide
  Antisense strand to SEQ ID NO: 1893436
uucccacauacuauauauu

SEQ ID NO: 1893438 - RNA, 19 nt, Artificial Sequence
  Description of Artificial Sequence: Synthetic oligonucleotide
  Sense strand starting at position 1322 of SEQ ID NO: 1879244
auauauaguaugugggaau

SEQ ID NO: 1893439 - RNA, 19 nt, Artificial Sequence
  Description of Artificial Sequence: Synthetic oligonucleotide
  Antisense strand to SEQ ID NO: 1893438
auucccacauacuauauau

SEQ ID NO: 1893440 - RNA, 19 nt, Artificial Sequence
  Description of Artificial Sequence: Synthetic oligonucleotide
  Sense strand starting at position 1566 of SEQ ID NO: 1879244
ugauuucuuuaacacagga

SEQ ID NO: 1893441 - RNA, 19 nt, Artificial Sequence
  Description of Artificial Sequence: Synthetic oligonucleotide
  Antisense strand to SEQ ID NO: 1893440
uccuguguuaaagaaauca

SEQ ID NO: 1893442 - RNA, 19 nt, Artificial Sequence
  Description of Artificial Sequence: Synthetic oligonucleotide
  Sense strand starting at position 2140 of SEQ ID NO: 1879244
gcucucaauagagggauua

SEQ ID NO: 1893443 - RNA, 19 nt, Artificial Sequence
  Description of Artificial Sequence: Synthetic oligonucleotide
  Antisense strand to SEQ ID NO: 1893442
uaaucccucuauugagagc

SEQ ID NO: 1893444 - RNA, 19 nt, Artificial Sequence
  Description of Artificial Sequence: Synthetic oligonucleotide
  Sense strand starting at position 2152 of SEQ ID NO: 1879244
gggauuaauuucugauaac

SEQ ID NO: 1893445 - RNA, 19 nt, Artificial Sequence
  Description of Artificial Sequence: Synthetic oligonucleotide
  Antisense strand to SEQ ID NO: 1893444
guuaucagaaauuaauccc

SEQ ID NO: 1893446 - RNA, 19 nt, Artificial Sequence
  Description of Artificial Sequence: Synthetic oligonucleotide
  Sense strand starting at position 2153 of SEQ ID NO: 1879244
ggauuaauuucugauaacu

SEQ ID NO: 1893447 - RNA, 19 nt, Artificial Sequence
  Description of Artificial Sequence: Synthetic oligonucleotide
  Antisense strand to SEQ ID NO: 1893446
aguuaucagaaauuaaucc

SEQ ID NO: 1893448 - RNA, 19 nt, Artificial Sequence
  Description of Artificial Sequence: Synthetic oligonucleotide
  Sense strand starting at position 2164 of SEQ ID NO: 1879244
ugauaacugccuugccaca

SEQ ID NO: 1893449 - RNA, 19 nt, Artificial Sequence
  Description of Artificial Sequence: Synthetic oligonucleotide
  Antisense strand to SEQ ID NO: 1893448
uguggcaaggcaguuauca

SEQ ID NO: 1893450 - RNA, 19 nt, Artificial Sequence
  Description of Artificial Sequence: Synthetic oligonucleotide
  Sense strand starting at position 2180 of SEQ ID NO: 1879244
acacaauuaugaucuggca

SEQ ID NO: 1893451 - RNA, 19 nt, Artificial Sequence
  Description of Artificial Sequence: Synthetic oligonucleotide
  Antisense strand to SEQ ID NO: 1893450
ugccagaucauaauugugu

SEQ ID NO: 1893452 - RNA, 19 nt, Artificial Sequence
  Description of Artificial Sequence: Synthetic oligonucleotide
  Sense strand starting at position 2205 of SEQ ID NO: 1879244
aaaggaauaccguauguuc

SEQ ID NO: 1893453 - RNA, 19 nt, Artificial Sequence
  Description of Artificial Sequence: Synthetic oligonucleotide
  Antisense strand to SEQ ID NO: 1893452
gaacauacgguauuccuuu

SEQ ID NO: 1893454 - RNA, 19 nt, Artificial Sequence
  Description of Artificial Sequence: Synthetic oligonucleotide
  Sense strand starting at position 2437 of SEQ ID NO: 1879244
gaaauuauaugcucuggga

SEQ ID NO: 1893455 - RNA, 19 nt, Artificial Sequence
  Description of Artificial Sequence: Synthetic oligonucleotide
  Antisense strand to SEQ ID NO: 1893454
ucccagagcauauaauuuc

SEQ ID NO: 1893456 - RNA, 19 nt, Artificial Sequence
  Description of Artificial Sequence: Synthetic oligonucleotide
  Sense strand starting at position 2489 of SEQ ID NO: 1879244
auguaaacauguuugcuua

SEQ ID NO: 1893457 - RNA, 19 nt, Artificial Sequence
  Description of Artificial Sequence: Synthetic oligonucleotide
  Antisense strand to SEQ ID NO: 1893456
uaagcaaacauguuuacau

SEQ ID NO: 1893458 - RNA, 19 nt, Artificial Sequence
  Description of Artificial Sequence: Synthetic oligonucleotide
  Sense strand starting at position 2640 of SEQ ID NO: 1879244
gguguuagugcuaguacag

SEQ ID NO: 1893459 - RNA, 19 nt, Artificial Sequence
  Description of Artificial Sequence: Synthetic oligonucleotide
  Antisense strand to SEQ ID NO: 1893458
cuguacuagcacuaacacc

SEQ ID NO: 1893460 - RNA, 19 nt, Artificial Sequence
  Description of Artificial Sequence: Synthetic oligonucleotide
  Sense strand starting at position 3130 of SEQ ID NO: 1879244
ggaccagagucuucccaug

SEQ ID NO: 1893461 - RNA, 19 nt, Artificial Sequence
  Description of Artificial Sequence: Synthetic oligonucleotide
  Antisense strand to SEQ ID NO: 1893460
caugggaagacucuggucc

SEQ ID NO: 1893462 - RNA, 19 nt, Artificial Sequence
  Description of Artificial Sequence: Synthetic oligonucleotide
  Sense strand starting at position 3132 of SEQ ID NO: 1879244
accagagucuucccaugau

SEQ ID NO: 1893463 - RNA, 19 nt, Artificial Sequence
  Description of Artificial Sequence: Synthetic oligonucleotide
  Antisense strand to SEQ ID NO: 1893462
aucaugggaagacucuggu

SEQ ID NO: 1893464 - RNA, 19 nt, Artificial Sequence
  Description of Artificial Sequence: Synthetic oligonucleotide
  Sense strand starting at position 3270 of SEQ ID NO: 1879244
ugaucuccauucguucuaa

SEQ ID NO: 1893465 - RNA, 19 nt, Artificial Sequence
  Description of Artificial Sequence: Synthetic oligonucleotide
  Antisense strand to SEQ ID NO: 1893464
uuagaacgaauggagauca

SEQ ID NO: 1893466 - RNA, 19 nt, Artificial Sequence
  Description of Artificial Sequence: Synthetic oligonucleotide
  Sense strand starting at position 3337 of SEQ ID NO: 1879244
ggccgauugauagacugga

SEQ ID NO: 1893467 - RNA, 19 nt, Artificial Sequence
  Description of Artificial Sequence: Synthetic oligonucleotide
  Antisense strand to SEQ ID NO: 1893466
uccagucuaucaaucggcc

SEQ ID NO: 1893468 - RNA, 19 nt, Artificial Sequence
  Description of Artificial Sequence: Synthetic oligonucleotide
  Sense strand starting at position 3407 of SEQ ID NO: 1879244
cuguuagggugucuuuaau

SEQ ID NO: 1893469 - RNA, 19 nt, Artificial Sequence
  Description of Artificial Sequence: Synthetic oligonucleotide
  Antisense strand to SEQ ID NO: 1893468
auuaaagacacccuaacag

SEQ ID NO: 1893470 - RNA, 19 nt, Artificial Sequence
  Description of Artificial Sequence: Synthetic oligonucleotide
  Sense strand starting at position 3413 of SEQ ID NO: 1879244
gggugucuuuaauuaugag

SEQ ID NO: 1893471 - RNA, 19 nt, Artificial Sequence
  Description of Artificial Sequence: Synthetic oligonucleotide
  Antisense strand to SEQ ID NO: 1893470
cucauaauuaaagacaccc

SEQ ID NO: 1893472 - RNA, 19 nt, Artificial Sequence
  Description of Artificial Sequence: Synthetic oligonucleotide
  Sense strand starting at position 3414 of SEQ ID NO: 1879244
ggugucuuuaauuaugagu

SEQ ID NO: 1893473 - RNA, 19 nt, Artificial Sequence
  Description of Artificial Sequence: Synthetic oligonucleotide
  Antisense strand to SEQ ID NO: 1893472
acucauaauuaaagacacc

SEQ ID NO: 1893474 - RNA, 19 nt, Artificial Sequence
  Description of Artificial Sequence: Synthetic oligonucleotide
  Sense strand starting at position 3420 of SEQ ID NO: 1879244
uuuaauuaugagugucaca

SEQ ID NO: 1893475 - RNA, 19 nt, Artificial Sequence
  Description of Artificial Sequence: Synthetic oligonucleotide
  Antisense strand to SEQ ID NO: 1893474
ugugacacucauaauuaaa

SEQ ID NO: 1893476 - RNA, 19 nt, Artificial Sequence
  Description of Artificial Sequence: Synthetic oligonucleotide
  Sense strand starting at position 3501 of SEQ ID NO: 1879244
gagagaacauguuauacaa

SEQ ID NO: 1893477 - RNA, 19 nt, Artificial Sequence
  Description of Artificial Sequence: Synthetic oligonucleotide
  Antisense strand to SEQ ID NO: 1893476
uuguauaacauguucucuc

SEQ ID NO: 1893478 - RNA, 19 nt, Artificial Sequence
  Description of Artificial Sequence: Synthetic oligonucleotide
  Sense strand starting at position 3503 of SEQ ID NO: 1879244
gagaacauguuauacaaag

SEQ ID NO: 1893479 - RNA, 19 nt, Artificial Sequence
  Description of Artificial Sequence: Synthetic oligonucleotide
  Antisense strand to SEQ ID NO: 1893478
cuuuguauaacauguucuc

SEQ ID NO: 1893480 - RNA, 19 nt, Artificial Sequence
  Description of Artificial Sequence: Synthetic oligonucleotide
  Sense strand starting at position 3518 of SEQ ID NO: 1879244
aaaggaugguuauaggaau

SEQ ID NO: 1893481 - RNA, 19 nt, Artificial Sequence
  Description of Artificial Sequence: Synthetic oligonucleotide
  Antisense strand to SEQ ID NO: 1893480
auuccuauaaccauccuuu

SEQ ID NO: 1893482 - RNA, 19 nt, Artificial Sequence
  Description of Artificial Sequence: Synthetic oligonucleotide
  Sense strand starting at position 3607 of SEQ ID NO: 1879244
augugucagauuugggcua

SEQ ID NO: 1893483 - RNA, 19 nt, Artificial Sequence
  Description of Artificial Sequence: Synthetic oligonucleotide
  Antisense strand to SEQ ID NO: 1893482
uagcccaaaucugacacau

SEQ ID NO: 1893484 - RNA, 19 nt, Artificial Sequence
  Description of Artificial Sequence: Synthetic oligonucleotide
  Sense strand starting at position 3783 of SEQ ID NO: 1879244
ggugguuagaccuaacccu

SEQ ID NO: 1893485 - RNA, 19 nt, Artificial Sequence
  Description of Artificial Sequence: Synthetic oligonucleotide
  Antisense strand to SEQ ID NO: 1893484
aggguuaggucuaaccacc

SEQ ID NO: 1893486 - RNA, 19 nt, Artificial Sequence
  Description of Artificial Sequence: Synthetic oligonucleotide
  Sense strand starting at position 325 of SEQ ID NO: 1879245
cugucugugugauuauaua

SEQ ID NO: 1893487 - RNA, 19 nt, Artificial Sequence
  Description of Artificial Sequence: Synthetic oligonucleotide
  Antisense strand to SEQ ID NO: 1893486
uauauaaucacacagacag

SEQ ID NO: 1893488 - RNA, 19 nt, Artificial Sequence
  Description of Artificial Sequence: Synthetic oligonucleotide
  Sense strand starting at position 341 of SEQ ID NO: 1879245
auauguaucaaggaguagu

SEQ ID NO: 1893489 - RNA, 19 nt, Artificial Sequence
  Description of Artificial Sequence: Synthetic oligonucleotide
  Antisense strand to SEQ ID NO: 1893488
acuacuccuugauacauau

SEQ ID NO: 1893490 - RNA, 19 nt, Artificial Sequence
  Description of Artificial Sequence: Synthetic oligonucleotide
  Sense strand starting at position 376 of SEQ ID NO: 1879245
aagacucaccaggguugua

SEQ ID NO: 1893491 - RNA, 19 nt, Artificial Sequence
  Description of Artificial Sequence: Synthetic oligonucleotide
  Antisense strand to SEQ ID NO: 1893490
uacaacccuggugagucuu

SEQ ID NO: 1893492 - RNA, 19 nt, Artificial Sequence
  Description of Artificial Sequence: Synthetic oligonucleotide
  Sense strand starting at position 496 of SEQ ID NO: 1879245
gcuccacugaucuggagua

SEQ ID NO: 1893493 - RNA, 19 nt, Artificial Sequence
  Description of Artificial Sequence: Synthetic oligonucleotide
  Antisense strand to SEQ ID NO: 1893492
uacuccagaucaguggagc

SEQ ID NO: 1893494 - RNA, 19 nt, Artificial Sequence
  Description of Artificial Sequence: Synthetic oligonucleotide
  Sense strand starting at position 1000 of SEQ ID NO: 1879245
ugggcauggagacaguuau

SEQ ID NO: 1893495 - RNA, 19 nt, Artificial Sequence
  Description of Artificial Sequence: Synthetic oligonucleotide
  Antisense strand to SEQ ID NO: 1893494
auaacugucuccaugccca

SEQ ID NO: 1893496 - RNA, 19 nt, Artificial Sequence
  Description of Artificial Sequence: Synthetic oligonucleotide
  Sense strand starting at position 1006 of SEQ ID NO: 1879245
uggagacaguuauuauaca

SEQ ID NO: 1893497 - RNA, 19 nt, Artificial Sequence
  Description of Artificial Sequence: Synthetic oligonucleotide
  Antisense strand to SEQ ID NO: 1893496
uguauaauaacugucucca

SEQ ID NO: 1893498 - RNA, 19 nt, Artificial Sequence
  Description of Artificial Sequence: Synthetic oligonucleotide
  Sense strand starting at position 1007 of SEQ ID NO: 1879245
ggagacaguuauuauacaa

SEQ ID NO: 1893499 - RNA, 19 nt, Artificial Sequence
  Description of Artificial Sequence: Synthetic oligonucleotide
  Antisense strand to SEQ ID NO: 1893498
uuguauaauaacugucucc

SEQ ID NO: 1893500 - RNA, 19 nt, Artificial Sequence
  Description of Artificial Sequence: Synthetic oligonucleotide
  Sense strand starting at position 1079 of SEQ ID NO: 1879245
ugaagccucuuaucacaga

SEQ ID NO: 1893501 - RNA, 19 nt, Artificial Sequence
  Description of Artificial Sequence: Synthetic oligonucleotide
  Antisense strand to SEQ ID NO: 1893500
ucugugauaagaggcuuca

SEQ ID NO: 1893502 - RNA, 19 nt, Artificial Sequence
  Description of Artificial Sequence: Synthetic oligonucleotide
  Sense strand starting at position 1345 of SEQ ID NO: 1879245
guugcagaaacggaaugau

SEQ ID NO: 1893503 - RNA, 19 nt, Artificial Sequence
  Description of Artificial Sequence: Synthetic oligonucleotide
  Antisense strand to SEQ ID NO: 1893502
aucauuccguuucugcaac

SEQ ID NO: 1893504 - RNA, 19 nt, Artificial Sequence
  Description of Artificial Sequence: Synthetic oligonucleotide
  Sense strand starting at position 1354 of SEQ ID NO: 1879245
acggaaugauggcugcuua

SEQ ID NO: 1893505 - RNA, 19 nt, Artificial Sequence
  Description of Artificial Sequence: Synthetic oligonucleotide
  Antisense strand to SEQ ID NO: 1893504
uaagcagccaucauuccgu

SEQ ID NO: 1893506 - RNA, 19 nt, Artificial Sequence
  Description of Artificial Sequence: Synthetic oligonucleotide
  Sense strand starting at position 1483 of SEQ ID NO: 1879245
agcccuaucccucagguuu

SEQ ID NO: 1893507 - RNA, 19 nt, Artificial Sequence
  Description of Artificial Sequence: Synthetic oligonucleotide
  Antisense strand to SEQ ID NO: 1893506
aaaccugagggauagggcu

SEQ ID NO: 1893508 - RNA, 19 nt, Artificial Sequence
  Description of Artificial Sequence: Synthetic oligonucleotide
  Sense strand starting at position 1522 of SEQ ID NO: 1879245
agcauuaccuguucugaag

SEQ ID NO: 1893509 - RNA, 19 nt, Artificial Sequence
  Description of Artificial Sequence: Synthetic oligonucleotide
  Antisense strand to SEQ ID NO: 1893508
cuucagaacagguaaugcu

SEQ ID NO: 1893510 - RNA, 19 nt, Artificial Sequence
  Description of Artificial Sequence: Synthetic oligonucleotide
  Sense strand starting at position 2095 of SEQ ID NO: 1879245
uuccguaacuggucggaga

SEQ ID NO: 1893511 - RNA, 19 nt, Artificial Sequence
  Description of Artificial Sequence: Synthetic oligonucleotide
  Antisense strand to SEQ ID NO: 1893510
ucuccgaccaguuacggaa

SEQ ID NO: 1893512 - RNA, 19 nt, Artificial Sequence
  Description of Artificial Sequence: Synthetic oligonucleotide
  Sense strand starting at position 2097 of SEQ ID NO: 1879245
ccguaacuggucggagaca

SEQ ID NO: 1893513 - RNA, 19 nt, Artificial Sequence
  Description of Artificial Sequence: Synthetic oligonucleotide
  Antisense strand to SEQ ID NO: 1893512
ugucuccgaccaguuacgg

SEQ ID NO: 1893514 - RNA, 19 nt, Artificial Sequence
  Description of Artificial Sequence: Synthetic oligonucleotide
  Sense strand starting at position 2388 of SEQ ID NO: 1879245
ggguaagcgccagaauaug

SEQ ID NO: 1893515 - RNA, 19 nt, Artificial Sequence
  Description of Artificial Sequence: Synthetic oligonucleotide
  Antisense strand to SEQ ID NO: 1893514
cauauucuggcgcuuaccc

SEQ ID NO: 1893516 - RNA, 19 nt, Artificial Sequence
  Description of Artificial Sequence: Synthetic oligonucleotide
  Sense strand starting at position 2400 of SEQ ID NO: 1879245
gaauaugaaucgccgggaa

SEQ ID NO: 1893517 - RNA, 19 nt, Artificial Sequence
  Description of Artificial Sequence: Synthetic oligonucleotide
  Antisense strand to SEQ ID NO: 1893516
uucccggcgauucauauuc

SEQ ID NO: 1893518 - RNA, 19 nt, Artificial Sequence
  Description of Artificial Sequence: Synthetic oligonucleotide
  Sense strand starting at position 2403 of SEQ ID NO: 1879245
uaugaaucgccgggaagcu

SEQ ID NO: 1893519 - RNA, 19 nt, Artificial Sequence
  Description of Artificial Sequence: Synthetic oligonucleotide
  Antisense strand to SEQ ID NO: 1893518
agcuucccggcgauucaua

SEQ ID NO: 1893520 - RNA, 19 nt, Artificial Sequence
  Description of Artificial Sequence: Synthetic oligonucleotide
  Sense strand starting at position 2422 of SEQ ID NO: 1879245
gggagaaagcuccgggaaa

SEQ ID NO: 1893521 - RNA, 19 nt, Artificial Sequence
  Description of Artificial Sequence: Synthetic oligonucleotide
  Antisense strand to SEQ ID NO: 1893520
uuucccggagcuuucuccc

SEQ ID NO: 1893522 - RNA, 19 nt, Artificial Sequence
  Description of Artificial Sequence: Synthetic oligonucleotide
  Sense strand starting at position 2598 of SEQ ID NO: 1879245
gcaguguggcguuaaugga

SEQ ID NO: 1893523 - RNA, 19 nt, Artificial Sequence
  Description of Artificial Sequence: Synthetic oligonucleotide
  Antisense strand to SEQ ID NO: 1893522
uccauuaacgccacacugc

SEQ ID NO: 1893524 - RNA, 19 nt, Artificial Sequence
  Description of Artificial Sequence: Synthetic oligonucleotide
  Sense strand starting at position 2708 of SEQ ID NO: 1879245
gcguuuguugucuuauugu

SEQ ID NO: 1893525 - RNA, 19 nt, Artificial Sequence
  Description of Artificial Sequence: Synthetic oligonucleotide
  Antisense strand to SEQ ID NO: 1893524
acaauaagacaacaaacgc

SEQ ID NO: 1893526 - RNA, 19 nt, Artificial Sequence
  Description of Artificial Sequence: Synthetic oligonucleotide
  Sense strand starting at position 2717 of SEQ ID NO: 1879245
gucuuauuguuugcauaca

SEQ ID NO: 1893527 - RNA, 19 nt, Artificial Sequence
  Description of Artificial Sequence: Synthetic oligonucleotide
  Antisense strand to SEQ ID NO: 1893526
uguaugcaaacaauaagac

SEQ ID NO: 1893528 - RNA, 19 nt, Artificial Sequence
  Description of Artificial Sequence: Synthetic oligonucleotide
  Sense strand starting at position 2732 of SEQ ID NO: 1879245
uacaguuaccgggaacauu

SEQ ID NO: 1893529 - RNA, 19 nt, Artificial Sequence
  Description of Artificial Sequence: Synthetic oligonucleotide
  Antisense strand to SEQ ID NO: 1893528
aauguucccgguaacugua

SEQ ID NO: 1893530 - RNA, 19 nt, Artificial Sequence
  Description of Artificial Sequence: Synthetic oligonucleotide
  Sense strand starting at position 2867 of SEQ ID NO: 1879245
gaggcagauccaugacuag

SEQ ID NO: 1893531 - RNA, 19 nt, Artificial Sequence
  Description of Artificial Sequence: Synthetic oligonucleotide
  Antisense strand to SEQ ID NO: 1893530
cuagucauggaucugccuc

SEQ ID NO: 1893532 - RNA, 19 nt, Artificial Sequence
  Description of Artificial Sequence: Synthetic oligonucleotide
  Sense strand starting at position 2939 of SEQ ID NO: 1879245
uggucuaaugucugauggu

SEQ ID NO: 1893533 - RNA, 19 nt, Artificial Sequence
  Description of Artificial Sequence: Synthetic oligonucleotide
  Antisense strand to SEQ ID NO: 1893532
accaucagacauuagacca

SEQ ID NO: 1893534 - RNA, 19 nt, Artificial Sequence
  Description of Artificial Sequence: Synthetic oligonucleotide
  Sense strand starting at position 3052 of SEQ ID NO: 1879245
aguaguuuggagugugaau

SEQ ID NO: 1893535 - RNA, 19 nt, Artificial Sequence
  Description of Artificial Sequence: Synthetic oligonucleotide
  Antisense strand to SEQ ID NO: 1893534
auucacacuccaaacuacu

SEQ ID NO: 1893536 - RNA, 19 nt, Artificial Sequence
  Description of Artificial Sequence: Synthetic oligonucleotide
  Sense strand starting at position 3063 of SEQ ID NO: 1879245
gugugaaucccagaacuca

SEQ ID NO: 1893537 - RNA, 19 nt, Artificial Sequence
  Description of Artificial Sequence: Synthetic oligonucleotide
  Antisense strand to SEQ ID NO: 1893536
ugaguucugggauucacac

SEQ ID NO: 1893538 - RNA, 19 nt, Artificial Sequence
  Description of Artificial Sequence: Synthetic oligonucleotide
  Sense strand starting at position 3193 of SEQ ID NO: 1879245
cugacaaguuuguuuguuu

SEQ ID NO: 1893539 - RNA, 19 nt, Artificial Sequence
  Description of Artificial Sequence: Synthetic oligonucleotide
  Antisense strand to SEQ ID NO: 1893538
aaacaaacaaacuugucag

SEQ ID NO: 1893540 - RNA, 19 nt, Artificial Sequence
  Description of Artificial Sequence: Synthetic oligonucleotide
  Sense strand starting at position 3478 of SEQ ID NO: 1879245
agcugacaaguuuaaguaa

SEQ ID NO: 1893541 - RNA, 19 nt, Artificial Sequence
  Description of Artificial Sequence: Synthetic oligonucleotide
  Antisense strand to SEQ ID NO: 1893540
uuacuuaaacuugucagcu

SEQ ID NO: 1893542 - RNA, 19 nt, Artificial Sequence
  Description of Artificial Sequence: Synthetic oligonucleotide
  Sense strand starting at position 3481 of SEQ ID NO: 1879245
ugacaaguuuaaguaacuu

SEQ ID NO: 1893543 - RNA, 19 nt, Artificial Sequence
  Description of Artificial Sequence: Synthetic oligonucleotide
  Antisense strand to SEQ ID NO: 1893542
aaguuacuuaaacuuguca

SEQ ID NO: 1893544 - RNA, 19 nt, Artificial Sequence
  Description of Artificial Sequence: Synthetic oligonucleotide
  Sense strand starting at position 3504 of SEQ ID NO: 1879245
aagguuacccuguaaguag

SEQ ID NO: 1893545 - RNA, 19 nt, Artificial Sequence
  Description of Artificial Sequence: Synthetic oligonucleotide
  Antisense strand to SEQ ID NO: 1893544
cuacuuacaggguaaccuu

SEQ ID NO: 1893546 - RNA, 19 nt, Artificial Sequence
  Description of Artificial Sequence: Synthetic oligonucleotide
  Sense strand starting at position 3631 of SEQ ID NO: 1879245
ugcucaaguagugaagaga

SEQ ID NO: 1893547 - RNA, 19 nt, Artificial Sequence
  Description of Artificial Sequence: Synthetic oligonucleotide
  Antisense strand to SEQ ID NO: 1893546
ucucuucacuacuugagca

SEQ ID NO: 1893548 - RNA, 19 nt, Artificial Sequence
  Description of Artificial Sequence: Synthetic oligonucleotide
  Sense strand starting at position 3654 of SEQ ID NO: 1879245
gcagccuuccuagauugau

SEQ ID NO: 1893549 - RNA, 19 nt, Artificial Sequence
  Description of Artificial Sequence: Synthetic oligonucleotide
  Antisense strand to SEQ ID NO: 1893548
aucaaucuaggaaggcugc

SEQ ID NO: 1893550 - RNA, 19 nt, Artificial Sequence
  Description of Artificial Sequence: Synthetic oligonucleotide
  Sense strand starting at position 3662 of SEQ ID NO: 1879245
ccuagauugaugcagagcu

SEQ ID NO: 1893551 - RNA, 19 nt, Artificial Sequence
  Description of Artificial Sequence: Synthetic oligonucleotide
  Antisense strand to SEQ ID NO: 1893550
agcucugcaucaaucuagg

SEQ ID NO: 1893552 - RNA, 19 nt, Artificial Sequence
  Description of Artificial Sequence: Synthetic oligonucleotide
  Sense strand starting at position 3711 of SEQ ID NO: 1879245
ucauucugagagcgagaaa

SEQ ID NO: 1893553 - RNA, 19 nt, Artificial Sequence
  Description of Artificial Sequence: Synthetic oligonucleotide
  Antisense strand to SEQ ID NO: 1893552
uuucucgcucucagaauga

SEQ ID NO: 1893554 - RNA, 19 nt, Artificial Sequence
  Description of Artificial Sequence: Synthetic oligonucleotide
  Sense strand starting at position 3720 of SEQ ID NO: 1879245
gagcgagaaaggugguuaa

SEQ ID NO: 1893555 - RNA, 19 nt, Artificial Sequence
  Description of Artificial Sequence: Synthetic oligonucleotide
  Antisense strand to SEQ ID NO: 1893554
uuaaccaccuuucucgcuc

SEQ ID NO: 1893556 - RNA, 19 nt, Artificial Sequence
  Description of Artificial Sequence: Synthetic oligonucleotide
  Sense strand starting at position 3723 of SEQ ID NO: 1879245
cgagaaaggugguuaaaua

SEQ ID NO: 1893557 - RNA, 19 nt, Artificial Sequence
  Description of Artificial Sequence: Synthetic oligonucleotide
  Antisense strand to SEQ ID NO: 1893556
uauuuaaccaccuuucucg

SEQ ID NO: 1893558 - RNA, 19 nt, Artificial Sequence
  Description of Artificial Sequence: Synthetic oligonucleotide
  Sense strand starting at position 3764 of SEQ ID NO: 1879245
gcuguaugugcagagauga

SEQ ID NO: 1893559 - RNA, 19 nt, Artificial Sequence
  Description of Artificial Sequence: Synthetic oligonucleotide
  Antisense strand to SEQ ID NO: 1893558
ucaucucugcacauacagc

SEQ ID NO: 1893560 - RNA, 19 nt, Artificial Sequence
  Description of Artificial Sequence: Synthetic oligonucleotide
  Sense strand starting at position 3796 of SEQ ID NO: 1879245
uguaguuagcuuccguuga

SEQ ID NO: 1893561 - RNA, 19 nt, Artificial Sequence
  Description of Artificial Sequence: Synthetic oligonucleotide
  Antisense strand to SEQ ID NO: 1893560
ucaacggaagcuaacuaca

SEQ ID NO: 1893562 - RNA, 19 nt, Artificial Sequence
  Description of Artificial Sequence: Synthetic oligonucleotide
  Sense strand starting at position 3801 of SEQ ID NO: 1879245
uuagcuuccguugauguua

SEQ ID NO: 1893563 - RNA, 19 nt, Artificial Sequence
  Description of Artificial Sequence: Synthetic oligonucleotide
  Antisense strand to SEQ ID NO: 1893562
uaacaucaacggaagcuaa

SEQ ID NO: 1893564 - RNA, 19 nt, Artificial Sequence
  Description of Artificial Sequence: Synthetic oligonucleotide
  Sense strand starting at position 3837 of SEQ ID NO: 1879245
ugcagucaucugcuuguuu

SEQ ID NO: 1893565 - RNA, 19 nt, Artificial Sequence
  Description of Artificial Sequence: Synthetic oligonucleotide
  Antisense strand to SEQ ID NO: 1893564
aaacaagcagaugacugca

SEQ ID NO: 1893566 - RNA, 19 nt, Artificial Sequence
  Description of Artificial Sequence: Synthetic oligonucleotide
  Sense strand starting at position 37 of SEQ ID NO: 1879246
aggcaauugugccaccagu

SEQ ID NO: 1893567 - RNA, 19 nt, Artificial Sequence
  Description of Artificial Sequence: Synthetic oligonucleotide
  Antisense strand to SEQ ID NO: 1893566
acugguggcacaauugccu

SEQ ID NO: 1893568 - RNA, 19 nt, Artificial Sequence
  Description of Artificial Sequence: Synthetic oligonucleotide
  Sense strand starting at position 1633 of SEQ ID NO: 1879246
ugugauuucccuugcuaga

SEQ ID NO: 1893569 - RNA, 19 nt, Artificial Sequence
  Description of Artificial Sequence: Synthetic oligonucleotide
  Antisense strand to SEQ ID NO: 1893568
ucuagcaagggaaaucaca

SEQ ID NO: 1893570 - RNA, 19 nt, Artificial Sequence
  Description of Artificial Sequence: Synthetic oligonucleotide
  Sense strand starting at position 1662 of SEQ ID NO: 1879246
ggguccuggcucuguauga

SEQ ID NO: 1893571 - RNA, 19 nt, Artificial Sequence
  Description of Artificial Sequence: Synthetic oligonucleotide
  Antisense strand to SEQ ID NO: 1893570
ucauacagagccaggaccc

SEQ ID NO: 1893572 - RNA, 19 nt, Artificial Sequence
  Description of Artificial Sequence: Synthetic oligonucleotide
  Sense strand starting at position 2036 of SEQ ID NO: 1879246
cguggagucuucugagcag

SEQ ID NO: 1893573 - RNA, 19 nt, Artificial Sequence
  Description of Artificial Sequence: Synthetic oligonucleotide
  Antisense strand to SEQ ID NO: 1893572
cugcucagaagacuccacg

SEQ ID NO: 1893574 - RNA, 19 nt, Artificial Sequence
  Description of Artificial Sequence: Synthetic oligonucleotide
  Sense strand starting at position 2375 of SEQ ID NO: 1879246
ucccauuuauugcgaagac

SEQ ID NO: 1893575 - RNA, 19 nt, Artificial Sequence
  Description of Artificial Sequence: Synthetic oligonucleotide
  Antisense strand to SEQ ID NO: 1893574
gucuucgcaauaaauggga

SEQ ID NO: 1893576 - RNA, 19 nt, Artificial Sequence
  Description of Artificial Sequence: Synthetic oligonucleotide
  Sense strand starting at position 2376 of SEQ ID NO: 1879246
cccauuuauugcgaagaca

SEQ ID NO: 1893577 - RNA, 19 nt, Artificial Sequence
  Description of Artificial Sequence: Synthetic oligonucleotide
  Antisense strand to SEQ ID NO: 1893576
ugucuucgcaauaaauggg

SEQ ID NO: 1893578 - RNA, 19 nt, Artificial Sequence
  Description of Artificial Sequence: Synthetic oligonucleotide
  Sense strand starting at position 2742 of SEQ ID NO: 1879246
gguucugucuuaccugaaa

SEQ ID NO: 1893579 - RNA, 19 nt, Artificial Sequence
  Description of Artificial Sequence: Synthetic oligonucleotide
  Antisense strand to SEQ ID NO: 1893578
uuucagguaagacagaacc

SEQ ID NO: 1893580 - RNA, 19 nt, Artificial Sequence
  Description of Artificial Sequence: Synthetic oligonucleotide
  Sense strand starting at position 2997 of SEQ ID NO: 1879246
gagugagugucccacuggu

SEQ ID NO: 1893581 - RNA, 19 nt, Artificial Sequence
  Description of Artificial Sequence: Synthetic oligonucleotide
  Antisense strand to SEQ ID NO: 1893580
accagugggacacucacuc

SEQ ID NO: 1893582 - RNA, 19 nt, Artificial Sequence
  Description of Artificial Sequence: Synthetic oligonucleotide
  Sense strand starting at position 3141 of SEQ ID NO: 1879246
guuucccauccgugucauu

SEQ ID NO: 1893583 - RNA, 19 nt, Artificial Sequence
  Description of Artificial Sequence: Synthetic oligonucleotide
  Antisense strand to SEQ ID NO: 1893582
aaugacacggaugggaaac

SEQ ID NO: 1893584 - RNA, 19 nt, Artificial Sequence
  Description of Artificial Sequence: Synthetic oligonucleotide
  Sense strand starting at position 3146 of SEQ ID NO: 1879246
ccauccgugucauuaggau

SEQ ID NO: 1893585 - RNA, 19 nt, Artificial Sequence
  Description of Artificial Sequence: Synthetic oligonucleotide
  Antisense strand to SEQ ID NO: 1893584
auccuaaugacacggaugg

SEQ ID NO: 1893586 - RNA, 19 nt, Artificial Sequence
  Description of Artificial Sequence: Synthetic oligonucleotide
  Sense strand starting at position 3150 of SEQ ID NO: 1879246
ccgugucauuaggauuacu

SEQ ID NO: 1893587 - RNA, 19 nt, Artificial Sequence
  Description of Artificial Sequence: Synthetic oligonucleotide
  Antisense strand to SEQ ID NO: 1893586
aguaauccuaaugacacgg

SEQ ID NO: 1893588 - RNA, 19 nt, Artificial Sequence
  Description of Artificial Sequence: Synthetic oligonucleotide
  Sense strand starting at position 3153 of SEQ ID NO: 1879246
ugucauuaggauuacucua

SEQ ID NO: 1893589 - RNA, 19 nt, Artificial Sequence
  Description of Artificial Sequence: Synthetic oligonucleotide
  Antisense strand to SEQ ID NO: 1893588
uagaguaauccuaaugaca

SEQ ID NO: 1893590 - RNA, 19 nt, Artificial Sequence
  Description of Artificial Sequence: Synthetic oligonucleotide
  Sense strand starting at position 3200 of SEQ ID NO: 1879246
ggaggaagugagugugcuu

SEQ ID NO: 1893591 - RNA, 19 nt, Artificial Sequence
  Description of Artificial Sequence: Synthetic oligonucleotide
  Antisense strand to SEQ ID NO: 1893590
aagcacacucacuuccucc

SEQ ID NO: 1893592 - RNA, 19 nt, Artificial Sequence
  Description of Artificial Sequence: Synthetic oligonucleotide
  Sense strand starting at position 3209 of SEQ ID NO: 1879246
gagugugcuucccacaaag

SEQ ID NO: 1893593 - RNA, 19 nt, Artificial Sequence
  Description of Artificial Sequence: Synthetic oligonucleotide
  Antisense strand to SEQ ID NO: 1893592
cuuugugggaagcacacuc

SEQ ID NO: 1893594 - RNA, 19 nt, Artificial Sequence
  Description of Artificial Sequence: Synthetic oligonucleotide
  Sense strand starting at position 3293 of SEQ ID NO: 1879246
gcccuaagccuguguccau

SEQ ID NO: 1893595 - RNA, 19 nt, Artificial Sequence
  Description of Artificial Sequence: Synthetic oligonucleotide
  Antisense strand to SEQ ID NO: 1893594
auggacacaggcuuagggc

SEQ ID NO: 1893596 - RNA, 19 nt, Artificial Sequence
  Description of Artificial Sequence: Synthetic oligonucleotide
  Sense strand starting at position 3386 of SEQ ID NO: 1879246
cggugagguccuugucgac

SEQ ID NO: 1893597 - RNA, 19 nt, Artificial Sequence
  Description of Artificial Sequence: Synthetic oligonucleotide
  Antisense strand to SEQ ID NO: 1893596
gucgacaaggaccucaccg

SEQ ID NO: 1893598 - RNA, 19 nt, Artificial Sequence
  Description of Artificial Sequence: Synthetic oligonucleotide
  Sense strand starting at position 3415 of SEQ ID NO: 1879246
uccagauucugcuucugua

SEQ ID NO: 1893599 - RNA, 19 nt, Artificial Sequence
  Description of Artificial Sequence: Synthetic oligonucleotide
  Antisense strand to SEQ ID NO: 1893598
uacagaagcagaaucugga

SEQ ID NO: 1893600 - RNA, 19 nt, Artificial Sequence
  Description of Artificial Sequence: Synthetic oligonucleotide
  Sense strand starting at position 3778 of SEQ ID NO: 1879246
gccggaauacagugaugug

SEQ ID NO: 1893601 - RNA, 19 nt, Artificial Sequence
  Description of Artificial Sequence: Synthetic oligonucleotide
  Antisense strand to SEQ ID NO: 1893600
cacaucacuguauuccggc

SEQ ID NO: 1893602 - RNA, 19 nt, Artificial Sequence
  Description of Artificial Sequence: Synthetic oligonucleotide
  Sense strand starting at position 3779 of SEQ ID NO: 1879246
ccggaauacagugauguga

SEQ ID NO: 1893603 - RNA, 19 nt, Artificial Sequence
  Description of Artificial Sequence: Synthetic oligonucleotide
  Antisense strand to SEQ ID NO: 1893602
ucacaucacuguauuccgg

SEQ ID NO: 1893604 - RNA, 19 nt, Artificial Sequence
  Description of Artificial Sequence: Synthetic oligonucleotide
  Sense strand starting at position 36 of SEQ ID NO: 1879247
ccagauguucucggagcau

SEQ ID NO: 1893605 - RNA, 19 nt, Artificial Sequence
  Description of Artificial Sequence: Synthetic oligonucleotide
  Antisense strand to SEQ ID NO: 1893604
augcuccgagaacaucugg

SEQ ID NO: 1893606 - RNA, 19 nt, Artificial Sequence
  Description of Artificial Sequence: Synthetic oligonucleotide
  Sense strand starting at position 365 of SEQ ID NO: 1879247
ccgaguaccucuucuugua

SEQ ID NO: 1893607 - RNA, 19 nt, Artificial Sequence
  Description of Artificial Sequence: Synthetic oligonucleotide
  Antisense strand to SEQ ID NO: 1893606
uacaagaagagguacucgg

SEQ ID NO: 1893608 - RNA, 19 nt, Artificial Sequence
  Description of Artificial Sequence: Synthetic oligonucleotide
  Sense strand starting at position 878 of SEQ ID NO: 1879247
uccuaaguauuugggauca

SEQ ID NO: 1893609 - RNA, 19 nt, Artificial Sequence
  Description of Artificial Sequence: Synthetic oligonucleotide
  Antisense strand to SEQ ID NO: 1893608
ugaucccaaauacuuagga

SEQ ID NO: 1893610 - RNA, 19 nt, Artificial Sequence
  Description of Artificial Sequence: Synthetic oligonucleotide
  Sense strand starting at position 880 of SEQ ID NO: 1879247
cuaaguauuugggaucauc

SEQ ID NO: 1893611 - RNA, 19 nt, Artificial Sequence
  Description of Artificial Sequence: Synthetic oligonucleotide
  Antisense strand to SEQ ID NO: 1893610
gaugaucccaaauacuuag

SEQ ID NO: 1893612 - RNA, 19 nt, Artificial Sequence
  Description of Artificial Sequence: Synthetic oligonucleotide
  Sense strand starting at position 930 of SEQ ID NO: 1879247
agcuaagaaugagaggauu

SEQ ID NO: 1893613 - RNA, 19 nt, Artificial Sequence
  Description of Artificial Sequence: Synthetic oligonucleotide
  Antisense strand to SEQ ID NO: 1893612
aauccucucauucuuagcu

SEQ ID NO: 1893614 - RNA, 19 nt, Artificial Sequence
  Description of Artificial Sequence: Synthetic oligonucleotide
  Sense strand starting at position 977 of SEQ ID NO: 1879247
aagaaugcaggcugugaga

SEQ ID NO: 1893615 - RNA, 19 nt, Artificial Sequence
  Description of Artificial Sequence: Synthetic oligonucleotide
  Antisense strand to SEQ ID NO: 1893614
ucucacagccugcauucuu

SEQ ID NO: 1893616 - RNA, 19 nt, Artificial Sequence
  Description of Artificial Sequence: Synthetic oligonucleotide
  Sense strand starting at position 1071 of SEQ ID NO: 1879247
gcagcauuccuaggucuga

SEQ ID NO: 1893617 - RNA, 19 nt, Artificial Sequence
  Description of Artificial Sequence: Synthetic oligonucleotide
  Antisense strand to SEQ ID NO: 1893616
ucagaccuaggaaugcugc

SEQ ID NO: 1893618 - RNA, 19 nt, Artificial Sequence
  Description of Artificial Sequence: Synthetic oligonucleotide
  Sense strand starting at position 1100 of SEQ ID NO: 1879247
gugguagagccucgaacua

SEQ ID NO: 1893619 - RNA, 19 nt, Artificial Sequence
  Description of Artificial Sequence: Synthetic oligonucleotide
  Antisense strand to SEQ ID NO: 1893618
uaguucgaggcucuaccac

SEQ ID NO: 1893620 - RNA, 19 nt, Artificial Sequence
  Description of Artificial Sequence: Synthetic oligonucleotide
  Sense strand starting at position 1232 of SEQ ID NO: 1879247
gagacucaguguccucuua

SEQ ID NO: 1893621 - RNA, 19 nt, Artificial Sequence
  Description of Artificial Sequence: Synthetic oligonucleotide
  Antisense strand to SEQ ID NO: 1893620
uaagaggacacugagucuc

SEQ ID NO: 1893622 - RNA, 19 nt, Artificial Sequence
  Description of Artificial Sequence: Synthetic oligonucleotide
  Sense strand starting at position 1240 of SEQ ID NO: 1879247
guguccucuuacguaagau

SEQ ID NO: 1893623 - RNA, 19 nt, Artificial Sequence
  Description of Artificial Sequence: Synthetic oligonucleotide
  Antisense strand to SEQ ID NO: 1893622
aucuuacguaagaggacac

SEQ ID NO: 1893624 - RNA, 19 nt, Artificial Sequence
  Description of Artificial Sequence: Synthetic oligonucleotide
  Sense strand starting at position 1241 of SEQ ID NO: 1879247
uguccucuuacguaagaug

SEQ ID NO: 1893625 - RNA, 19 nt, Artificial Sequence
  Description of Artificial Sequence: Synthetic oligonucleotide
  Antisense strand to SEQ ID NO: 1893624
caucuuacguaagaggaca

SEQ ID NO: 1893626 - RNA, 19 nt, Artificial Sequence
  Description of Artificial Sequence: Synthetic oligonucleotide
  Sense strand starting at position 1246 of SEQ ID NO: 1879247
ucuuacguaagaugugaau

SEQ ID NO: 1893627 - RNA, 19 nt, Artificial Sequence
  Description of Artificial Sequence: Synthetic oligonucleotide
  Antisense strand to SEQ ID NO: 1893626
auucacaucuuacguaaga

SEQ ID NO: 1893628 - RNA, 19 nt, Artificial Sequence
  Description of Artificial Sequence: Synthetic oligonucleotide
  Sense strand starting at position 1248 of SEQ ID NO: 1879247
uuacguaagaugugaauaa

SEQ ID NO: 1893629 - RNA, 19 nt, Artificial Sequence
  Description of Artificial Sequence: Synthetic oligonucleotide
  Antisense strand to SEQ ID NO: 1893628
uuauucacaucuuacguaa

SEQ ID NO: 1893630 - RNA, 19 nt, Artificial Sequence
  Description of Artificial Sequence: Synthetic oligonucleotide
  Sense strand starting at position 1249 of SEQ ID NO: 1879247
uacguaagaugugaauaau

SEQ ID NO: 1893631 - RNA, 19 nt, Artificial Sequence
  Description of Artificial Sequence: Synthetic oligonucleotide
  Antisense strand to SEQ ID NO: 1893630
auuauucacaucuuacgua

SEQ ID NO: 1893632 - RNA, 19 nt, Artificial Sequence
  Description of Artificial Sequence: Synthetic oligonucleotide
  Sense strand starting at position 1260 of SEQ ID NO: 1879247
ugaauaauauugguacuca

SEQ ID NO: 1893633 - RNA, 19 nt, Artificial Sequence
  Description of Artificial Sequence: Synthetic oligonucleotide
  Antisense strand to SEQ ID NO: 1893632
ugaguaccaauauuauuca

SEQ ID NO: 1893634 - RNA, 19 nt, Artificial Sequence
  Description of Artificial Sequence: Synthetic oligonucleotide
  Sense strand starting at position 1305 of SEQ ID NO: 1879247
cagaauaucgugugugcau

SEQ ID NO: 1893635 - RNA, 19 nt, Artificial Sequence
  Description of Artificial Sequence: Synthetic oligonucleotide
  Antisense strand to SEQ ID NO: 1893634
augcacacacgauauucug

SEQ ID NO: 1893636 - RNA, 19 nt, Artificial Sequence
  Description of Artificial Sequence: Synthetic oligonucleotide
  Sense strand starting at position 1306 of SEQ ID NO: 1879247
agaauaucgugugugcaua

SEQ ID NO: 1893637 - RNA, 19 nt, Artificial Sequence
  Description of Artificial Sequence: Synthetic oligonucleotide
  Antisense strand to SEQ ID NO: 1893636
uaugcacacacgauauucu

SEQ ID NO: 1893638 - RNA, 19 nt, Artificial Sequence
  Description of Artificial Sequence: Synthetic oligonucleotide
  Sense strand starting at position 1307 of SEQ ID NO: 1879247
gaauaucgugugugcauaa

SEQ ID NO: 1893639 - RNA, 19 nt, Artificial Sequence
  Description of Artificial Sequence: Synthetic oligonucleotide
  Antisense strand to SEQ ID NO: 1893638
uuaugcacacacgauauuc

SEQ ID NO: 1893640 - RNA, 19 nt, Artificial Sequence
  Description of Artificial Sequence: Synthetic oligonucleotide
  Sense strand starting at position 1797 of SEQ ID NO: 1879247
ggcuaugugcucuagugcu

SEQ ID NO: 1893641 - RNA, 19 nt, Artificial Sequence
  Description of Artificial Sequence: Synthetic oligonucleotide
  Antisense strand to SEQ ID NO: 1893640
agcacuagagcacauagcc

SEQ ID NO: 1893642 - RNA, 19 nt, Artificial Sequence
  Description of Artificial Sequence: Synthetic oligonucleotide
  Sense strand starting at position 1799 of SEQ ID NO: 1879247
cuaugugcucuagugcuua

SEQ ID NO: 1893643 - RNA, 19 nt, Artificial Sequence
  Description of Artificial Sequence: Synthetic oligonucleotide
  Antisense strand to SEQ ID NO: 1893642
uaagcacuagagcacauag

SEQ ID NO: 1893644 - RNA, 19 nt, Artificial Sequence
  Description of Artificial Sequence: Synthetic oligonucleotide
  Sense strand starting at position 1836 of SEQ ID NO: 1879247
caguaucaggucugagguu

SEQ ID NO: 1893645 - RNA, 19 nt, Artificial Sequence
  Description of Artificial Sequence: Synthetic oligonucleotide
  Antisense strand to SEQ ID NO: 1893644
aaccucagaccugauacug

SEQ ID NO: 1893646 - RNA, 19 nt, Artificial Sequence
  Description of Artificial Sequence: Synthetic oligonucleotide
  Sense strand starting at position 2429 of SEQ ID NO: 1879247
ccuggaagaucgcuauggu

SEQ ID NO: 1893647 - RNA, 19 nt, Artificial Sequence
  Description of Artificial Sequence: Synthetic oligonucleotide
  Antisense strand to SEQ ID NO: 1893646
accauagcgaucuuccagg

SEQ ID NO: 1893648 - RNA, 19 nt, Artificial Sequence
  Description of Artificial Sequence: Synthetic oligonucleotide
  Sense strand starting at position 2430 of SEQ ID NO: 1879247
cuggaagaucgcuaugguu

SEQ ID NO: 1893649 - RNA, 19 nt, Artificial Sequence
  Description of Artificial Sequence: Synthetic oligonucleotide
  Antisense strand to SEQ ID NO: 1893648
aaccauagcgaucuuccag

SEQ ID NO: 1893650 - RNA, 19 nt, Artificial Sequence
  Description of Artificial Sequence: Synthetic oligonucleotide
  Sense strand starting at position 2432 of SEQ ID NO: 1879247
ggaagaucgcuaugguuac

SEQ ID NO: 1893651 - RNA, 19 nt, Artificial Sequence
  Description of Artificial Sequence: Synthetic oligonucleotide
  Antisense strand to SEQ ID NO: 1893650
guaaccauagcgaucuucc

SEQ ID NO: 1893652 - RNA, 19 nt, Artificial Sequence
  Description of Artificial Sequence: Synthetic oligonucleotide
  Sense strand starting at position 2885 of SEQ ID NO: 1879247
gcgagacucuguccuacca

SEQ ID NO: 1893653 - RNA, 19 nt, Artificial Sequence
  Description of Artificial Sequence: Synthetic oligonucleotide
  Antisense strand to SEQ ID NO: 1893652
ugguaggacagagucucgc

SEQ ID NO: 1893654 - RNA, 19 nt, Artificial Sequence
  Description of Artificial Sequence: Synthetic oligonucleotide
  Sense strand starting at position 2954 of SEQ ID NO: 1879247
ugagcuauuagccaauggu

SEQ ID NO: 1893655 - RNA, 19 nt, Artificial Sequence
  Description of Artificial Sequence: Synthetic oligonucleotide
  Antisense strand to SEQ ID NO: 1893654
accauuggcuaauagcuca

SEQ ID NO: 1893656 - RNA, 19 nt, Artificial Sequence
  Description of Artificial Sequence: Synthetic oligonucleotide
  Sense strand starting at position 2981 of SEQ ID NO: 1879247
uuccuauugucauuagcau

SEQ ID NO: 1893657 - RNA, 19 nt, Artificial Sequence
  Description of Artificial Sequence: Synthetic oligonucleotide
  Antisense strand to SEQ ID NO: 1893656
augcuaaugacaauaggaa

SEQ ID NO: 1893658 - RNA, 19 nt, Artificial Sequence
  Description of Artificial Sequence: Synthetic oligonucleotide
  Sense strand starting at position 2982 of SEQ ID NO: 1879247
uccuauugucauuagcauc

SEQ ID NO: 1893659 - RNA, 19 nt, Artificial Sequence
  Description of Artificial Sequence: Synthetic oligonucleotide
  Antisense strand to SEQ ID NO: 1893658
gaugcuaaugacaauagga

SEQ ID NO: 1893660 - RNA, 19 nt, Artificial Sequence
  Description of Artificial Sequence: Synthetic oligonucleotide
  Sense strand starting at position 3010 of SEQ ID NO: 1879247
gccuccugcccuuagaguu

SEQ ID NO: 1893661 - RNA, 19 nt, Artificial Sequence
  Description of Artificial Sequence: Synthetic oligonucleotide
  Antisense strand to SEQ ID NO: 1893660
aacucuaagggcaggaggc

SEQ ID NO: 1893662 - RNA, 19 nt, Artificial Sequence
  Description of Artificial Sequence: Synthetic oligonucleotide
  Sense strand starting at position 3095 of SEQ ID NO: 1879247
gaaguucccggccgaauaa

SEQ ID NO: 1893663 - RNA, 19 nt, Artificial Sequence
  Description of Artificial Sequence: Synthetic oligonucleotide
  Antisense strand to SEQ ID NO: 1893662
uuauucggccgggaacuuc

SEQ ID NO: 1893664 - RNA, 19 nt, Artificial Sequence
  Description of Artificial Sequence: Synthetic oligonucleotide
  Sense strand starting at position 3123 of SEQ ID NO: 1879247
cuucuuuaaccuggugacu

SEQ ID NO: 1893665 - RNA, 19 nt, Artificial Sequence
  Description of Artificial Sequence: Synthetic oligonucleotide
  Antisense strand to SEQ ID NO: 1893664
agucaccagguuaaagaag

SEQ ID NO: 1893666 - RNA, 19 nt, Artificial Sequence
  Description of Artificial Sequence: Synthetic oligonucleotide
  Sense strand starting at position 3299 of SEQ ID NO: 1879247
cagagagauugggcucuca

SEQ ID NO: 1893667 - RNA, 19 nt, Artificial Sequence
  Description of Artificial Sequence: Synthetic oligonucleotide
  Antisense strand to SEQ ID NO: 1893666
ugagagcccaaucucucug

SEQ ID NO: 1893668 - RNA, 19 nt, Artificial Sequence
  Description of Artificial Sequence: Synthetic oligonucleotide
  Sense strand starting at position 3327 of SEQ ID NO: 1879247
ggcgacaugcuucagggaa

SEQ ID NO: 1893669 - RNA, 19 nt, Artificial Sequence
  Description of Artificial Sequence: Synthetic oligonucleotide
  Antisense strand to SEQ ID NO: 1893668
uucccugaagcaugucgcc

SEQ ID NO: 1893670 - RNA, 19 nt, Artificial Sequence
  Description of Artificial Sequence: Synthetic oligonucleotide
  Sense strand starting at position 3379 of SEQ ID NO: 1879247
gcagccucccaaugaguga

SEQ ID NO: 1893671 - RNA, 19 nt, Artificial Sequence
  Description of Artificial Sequence: Synthetic oligonucleotide
  Antisense strand to SEQ ID NO: 1893670
ucacucauugggaggcugc

SEQ ID NO: 1893672 - RNA, 19 nt, Artificial Sequence
  Description of Artificial Sequence: Synthetic oligonucleotide
  Sense strand starting at position 3409 of SEQ ID NO: 1879247
ggccgaggcauuugugcuu

SEQ ID NO: 1893673 - RNA, 19 nt, Artificial Sequence
  Description of Artificial Sequence: Synthetic oligonucleotide
  Antisense strand to SEQ ID NO: 1893672
aagcacaaaugccucggcc

SEQ ID NO: 1893674 - RNA, 19 nt, Artificial Sequence
  Description of Artificial Sequence: Synthetic oligonucleotide
  Sense strand starting at position 3412 of SEQ ID NO: 1879247
cgaggcauuugugcuuuga

SEQ ID NO: 1893675 - RNA, 19 nt, Artificial Sequence
  Description of Artificial Sequence: Synthetic oligonucleotide
  Antisense strand to SEQ ID NO: 1893674
ucaaagcacaaaugccucg

SEQ ID NO: 1893676 - RNA, 19 nt, Artificial Sequence
  Description of Artificial Sequence: Synthetic oligonucleotide
  Sense strand starting at position 3416 of SEQ ID NO: 1879247
gcauuugugcuuugaggcu

SEQ ID NO: 1893677 - RNA, 19 nt, Artificial Sequence
  Description of Artificial Sequence: Synthetic oligonucleotide
  Antisense strand to SEQ ID NO: 1893676
agccucaaagcacaaaugc

SEQ ID NO: 1893678 - RNA, 19 nt, Artificial Sequence
  Description of Artificial Sequence: Synthetic oligonucleotide
  Sense strand starting at position 3431 of SEQ ID NO: 1879247
ggcucuacuucuguaucca

SEQ ID NO: 1893679 - RNA, 19 nt, Artificial Sequence
  Description of Artificial Sequence: Synthetic oligonucleotide
  Antisense strand to SEQ ID NO: 1893678
uggauacagaaguagagcc

SEQ ID NO: 1893680 - RNA, 19 nt, Artificial Sequence
  Description of Artificial Sequence: Synthetic oligonucleotide
  Sense strand starting at position 3475 of SEQ ID NO: 1879247
uguauaaaugcucaucagu

SEQ ID NO: 1893681 - RNA, 19 nt, Artificial Sequence
  Description of Artificial Sequence: Synthetic oligonucleotide
  Antisense strand to SEQ ID NO: 1893680
acugaugagcauuuauaca

SEQ ID NO: 1893682 - RNA, 19 nt, Artificial Sequence
  Description of Artificial Sequence: Synthetic oligonucleotide
  Sense strand starting at position 3565 of SEQ ID NO: 1879247
agauaaauguugccaaguu

SEQ ID NO: 1893683 - RNA, 19 nt, Artificial Sequence
  Description of Artificial Sequence: Synthetic oligonucleotide
  Antisense strand to SEQ ID NO: 1893682
aacuuggcaacauuuaucu

SEQ ID NO: 1893684 - RNA, 19 nt, Artificial Sequence
  Description of Artificial Sequence: Synthetic oligonucleotide
  Sense strand starting at position 200 of SEQ ID NO: 1879248
gauuacacagagugugaau

SEQ ID NO: 1893685 - RNA, 19 nt, Artificial Sequence
  Description of Artificial Sequence: Synthetic oligonucleotide
  Antisense strand to SEQ ID NO: 1893684
auucacacucuguguaauc

SEQ ID NO: 1893686 - RNA, 19 nt, Artificial Sequence
  Description of Artificial Sequence: Synthetic oligonucleotide
  Sense strand starting at position 309 of SEQ ID NO: 1879248
cugauuaugccaugucaga

SEQ ID NO: 1893687 - RNA, 19 nt, Artificial Sequence
  Description of Artificial Sequence: Synthetic oligonucleotide
  Antisense strand to SEQ ID NO: 1893686
ucugacauggcauaaucag

SEQ ID NO: 1893688 - RNA, 19 nt, Artificial Sequence
  Description of Artificial Sequence: Synthetic oligonucleotide
  Sense strand starting at position 322 of SEQ ID NO: 1879248
gucagacucccauagguga

SEQ ID NO: 1893689 - RNA, 19 nt, Artificial Sequence
  Description of Artificial Sequence: Synthetic oligonucleotide
  Antisense strand to SEQ ID NO: 1893688
ucaccuaugggagucugac

SEQ ID NO: 1893690 - RNA, 19 nt, Artificial Sequence
  Description of Artificial Sequence: Synthetic oligonucleotide
  Sense strand starting at position 380 of SEQ ID NO: 1879248
auagaaaugucacccagca

SEQ ID NO: 1893691 - RNA, 19 nt, Artificial Sequence
  Description of Artificial Sequence: Synthetic oligonucleotide
  Antisense strand to SEQ ID NO: 1893690
ugcugggugacauuucuau

SEQ ID NO: 1893692 - RNA, 19 nt, Artificial Sequence
  Description of Artificial Sequence: Synthetic oligonucleotide
  Sense strand starting at position 737 of SEQ ID NO: 1879248
gcagguacuguuugaugga

SEQ ID NO: 1893693 - RNA, 19 nt, Artificial Sequence
  Description of Artificial Sequence: Synthetic oligonucleotide
  Antisense strand to SEQ ID NO: 1893692
uccaucaaacaguaccugc

SEQ ID NO: 1893694 - RNA, 19 nt, Artificial Sequence
  Description of Artificial Sequence: Synthetic oligonucleotide
  Sense strand starting at position 742 of SEQ ID NO: 1879248
uacuguuugauggaagugu

SEQ ID NO: 1893695 - RNA, 19 nt, Artificial Sequence
  Description of Artificial Sequence: Synthetic oligonucleotide
  Antisense strand to SEQ ID NO: 1893694
acacuuccaucaaacagua

SEQ ID NO: 1893696 - RNA, 19 nt, Artificial Sequence
  Description of Artificial Sequence: Synthetic oligonucleotide
  Sense strand starting at position 746 of SEQ ID NO: 1879248
guuugauggaagugugaca

SEQ ID NO: 1893697 - RNA, 19 nt, Artificial Sequence
  Description of Artificial Sequence: Synthetic oligonucleotide
  Antisense strand to SEQ ID NO: 1893696
ugucacacuuccaucaaac

SEQ ID NO: 1893698 - RNA, 19 nt, Artificial Sequence
  Description of Artificial Sequence: Synthetic oligonucleotide
  Sense strand starting at position 759 of SEQ ID NO: 1879248
gugacaaguggucacauga

SEQ ID NO: 1893699 - RNA, 19 nt, Artificial Sequence
  Description of Artificial Sequence: Synthetic oligonucleotide
  Antisense strand to SEQ ID NO: 1893698
ucaugugaccacuugucac

SEQ ID NO: 1893700 - RNA, 19 nt, Artificial Sequence
  Description of Artificial Sequence: Synthetic oligonucleotide
  Sense strand starting at position 975 of SEQ ID NO: 1879248
accaacuucucuguuggaa

SEQ ID NO: 1893701 - RNA, 19 nt, Artificial Sequence
  Description of Artificial Sequence: Synthetic oligonucleotide
  Antisense strand to SEQ ID NO: 1893700
uuccaacagagaaguuggu

SEQ ID NO: 1893702 - RNA, 19 nt, Artificial Sequence
  Description of Artificial Sequence: Synthetic oligonucleotide
  Sense strand starting at position 987 of SEQ ID NO: 1879248
guuggaauuugagggaaac

SEQ ID NO: 1893703 - RNA, 19 nt, Artificial Sequence
  Description of Artificial Sequence: Synthetic oligonucleotide
  Antisense strand to SEQ ID NO: 1893702
guuucccucaaauuccaac

SEQ ID NO: 1893704 - RNA, 19 nt, Artificial Sequence
  Description of Artificial Sequence: Synthetic oligonucleotide
  Sense strand starting at position 1031 of SEQ ID NO: 1879248
cucucaagugcagaaucaa

SEQ ID NO: 1893705 - RNA, 19 nt, Artificial Sequence
  Description of Artificial Sequence: Synthetic oligonucleotide
  Antisense strand to SEQ ID NO: 1893704
uugauucugcacuugagag

SEQ ID NO: 1893706 - RNA, 19 nt, Artificial Sequence
  Description of Artificial Sequence: Synthetic oligonucleotide
  Sense strand starting at position 1080 of SEQ ID NO: 1879248
aucagcaugucaccuuuau

SEQ ID NO: 1893707 - RNA, 19 nt, Artificial Sequence
  Description of Artificial Sequence: Synthetic oligonucleotide
  Antisense strand to SEQ ID NO: 1893706
auaaaggugacaugcugau

SEQ ID NO: 1893708 - RNA, 19 nt, Artificial Sequence
  Description of Artificial Sequence: Synthetic oligonucleotide
  Sense strand starting at position 1084 of SEQ ID NO: 1879248
gcaugucaccuuuauuacu

SEQ ID NO: 1893709 - RNA, 19 nt, Artificial Sequence
  Description of Artificial Sequence: Synthetic oligonucleotide
  Antisense strand to SEQ ID NO: 1893708
aguaauaaaggugacaugc

SEQ ID NO: 1893710 - RNA, 19 nt, Artificial Sequence
  Description of Artificial Sequence: Synthetic oligonucleotide
  Sense strand starting at position 1114 of SEQ ID NO: 1879248
uggagagcugucugaauau

SEQ ID NO: 1893711 - RNA, 19 nt, Artificial Sequence
  Description of Artificial Sequence: Synthetic oligonucleotide
  Antisense strand to SEQ ID NO: 1893710
auauucagacagcucucca

SEQ ID NO: 1893712 - RNA, 19 nt, Artificial Sequence
  Description of Artificial Sequence: Synthetic oligonucleotide
  Sense strand starting at position 1273 of SEQ ID NO: 1879248
agaauuugucugugguccu

SEQ ID NO: 1893713 - RNA, 19 nt, Artificial Sequence
  Description of Artificial Sequence: Synthetic oligonucleotide
  Antisense strand to SEQ ID NO: 1893712
aggaccacagacaaauucu

SEQ ID NO: 1893714 - RNA, 19 nt, Artificial Sequence
  Description of Artificial Sequence: Synthetic oligonucleotide
  Sense strand starting at position 1794 of SEQ ID NO: 1879248
gugguucuccacuacugaa

SEQ ID NO: 1893715 - RNA, 19 nt, Artificial Sequence
  Description of Artificial Sequence: Synthetic oligonucleotide
  Antisense strand to SEQ ID NO: 1893714
uucaguaguggagaaccac

SEQ ID NO: 1893716 - RNA, 19 nt, Artificial Sequence
  Description of Artificial Sequence: Synthetic oligonucleotide
  Sense strand starting at position 1993 of SEQ ID NO: 1879248
ggaggacucuucucuuaca

SEQ ID NO: 1893717 - RNA, 19 nt, Artificial Sequence
  Description of Artificial Sequence: Synthetic oligonucleotide
  Antisense strand to SEQ ID NO: 1893716
uguaagagaagaguccucc

SEQ ID NO: 1893718 - RNA, 19 nt, Artificial Sequence
  Description of Artificial Sequence: Synthetic oligonucleotide
  Sense strand starting at position 2150 of SEQ ID NO: 1879248
gugaguacuuuacccuauc

SEQ ID NO: 1893719 - RNA, 19 nt, Artificial Sequence
  Description of Artificial Sequence: Synthetic oligonucleotide
  Antisense strand to SEQ ID NO: 1893718
gauaggguaaaguacucac

SEQ ID NO: 1893720 - RNA, 19 nt, Artificial Sequence
  Description of Artificial Sequence: Synthetic oligonucleotide
  Sense strand starting at position 2151 of SEQ ID NO: 1879248
ugaguacuuuacccuauca

SEQ ID NO: 1893721 - RNA, 19 nt, Artificial Sequence
  Description of Artificial Sequence: Synthetic oligonucleotide
  Antisense strand to SEQ ID NO: 1893720
ugauaggguaaaguacuca

SEQ ID NO: 1893722 - RNA, 19 nt, Artificial Sequence
  Description of Artificial Sequence: Synthetic oligonucleotide
  Sense strand starting at position 2180 of SEQ ID NO: 1879248
cgauauauguauuuguguu

SEQ ID NO: 1893723 - RNA, 19 nt, Artificial Sequence
  Description of Artificial Sequence: Synthetic oligonucleotide
  Antisense strand to SEQ ID NO: 1893722
aacacaaauacauauaucg

SEQ ID NO: 1893724 - RNA, 19 nt, Artificial Sequence
  Description of Artificial Sequence: Synthetic oligonucleotide
  Sense strand starting at position 2552 of SEQ ID NO: 1879248
ugaggaaccuuguuguauu

SEQ ID NO: 1893725 - RNA, 19 nt, Artificial Sequence
  Description of Artificial Sequence: Synthetic oligonucleotide
  Antisense strand to SEQ ID NO: 1893724
aauacaacaagguuccuca

SEQ ID NO: 1893726 - RNA, 19 nt, Artificial Sequence
  Description of Artificial Sequence: Synthetic oligonucleotide
  Sense strand starting at position 2564 of SEQ ID NO: 1879248
uuguauucccagcaccaga

SEQ ID NO: 1893727 - RNA, 19 nt, Artificial Sequence
  Description of Artificial Sequence: Synthetic oligonucleotide
  Antisense strand to SEQ ID NO: 1893726
ucuggugcugggaauacaa

SEQ ID NO: 1893728 - RNA, 19 nt, Artificial Sequence
  Description of Artificial Sequence: Synthetic oligonucleotide
  Sense strand starting at position 2684 of SEQ ID NO: 1879248
agagaaggaucagaguuga

SEQ ID NO: 1893729 - RNA, 19 nt, Artificial Sequence
  Description of Artificial Sequence: Synthetic oligonucleotide
  Antisense strand to SEQ ID NO: 1893728
ucaacucugauccuucucu

SEQ ID NO: 1893730 - RNA, 19 nt, Artificial Sequence
  Description of Artificial Sequence: Synthetic oligonucleotide
  Sense strand starting at position 2688 of SEQ ID NO: 1879248
aaggaucagaguugaguga

SEQ ID NO: 1893731 - RNA, 19 nt, Artificial Sequence
  Description of Artificial Sequence: Synthetic oligonucleotide
  Antisense strand to SEQ ID NO: 1893730
ucacucaacucugauccuu

SEQ ID NO: 1893732 - RNA, 19 nt, Artificial Sequence
  Description of Artificial Sequence: Synthetic oligonucleotide
  Sense strand starting at position 2695 of SEQ ID NO: 1879248
agaguugagugauucaguc

SEQ ID NO: 1893733 - RNA, 19 nt, Artificial Sequence
  Description of Artificial Sequence: Synthetic oligonucleotide
  Antisense strand to SEQ ID NO: 1893732
gacugaaucacucaacucu

SEQ ID NO: 1893734 - RNA, 19 nt, Artificial Sequence
  Description of Artificial Sequence: Synthetic oligonucleotide
  Sense strand starting at position 2798 of SEQ ID NO: 1879248
acaccagauuguccaucua

SEQ ID NO: 1893735 - RNA, 19 nt, Artificial Sequence
  Description of Artificial Sequence: Synthetic oligonucleotide
  Antisense strand to SEQ ID NO: 1893734
uagauggacaaucuggugu

SEQ ID NO: 1893736 - RNA, 19 nt, Artificial Sequence
  Description of Artificial Sequence: Synthetic oligonucleotide
  Sense strand starting at position 2954 of SEQ ID NO: 1879248
aggacuguuaauggaguua

SEQ ID NO: 1893737 - RNA, 19 nt, Artificial Sequence
  Description of Artificial Sequence: Synthetic oligonucleotide
  Antisense strand to SEQ ID NO: 1893736
uaacuccauuaacaguccu

SEQ ID NO: 1893738 - RNA, 19 nt, Artificial Sequence
  Description of Artificial Sequence: Synthetic oligonucleotide
  Sense strand starting at position 3096 of SEQ ID NO: 1879248
gcccucuucccagagagga

SEQ ID NO: 1893739 - RNA, 19 nt, Artificial Sequence
  Description of Artificial Sequence: Synthetic oligonucleotide
  Antisense strand to SEQ ID NO: 1893738
uccucucugggaagagggc

SEQ ID NO: 1893740 - RNA, 19 nt, Artificial Sequence
  Description of Artificial Sequence: Synthetic oligonucleotide
  Sense strand starting at position 3111 of SEQ ID NO: 1879248
aggagugugguacaucaca

SEQ ID NO: 1893741 - RNA, 19 nt, Artificial Sequence
  Description of Artificial Sequence: Synthetic oligonucleotide
  Antisense strand to SEQ ID NO: 1893740
ugugauguaccacacuccu

SEQ ID NO: 1893742 - RNA, 19 nt, Artificial Sequence
  Description of Artificial Sequence: Synthetic oligonucleotide
  Sense strand starting at position 3185 of SEQ ID NO: 1879248
ggaacuacuacuggguaau

SEQ ID NO: 1893743 - RNA, 19 nt, Artificial Sequence
  Description of Artificial Sequence: Synthetic oligonucleotide
  Antisense strand to SEQ ID NO: 1893742
auuacccaguaguaguucc

SEQ ID NO: 1893744 - RNA, 19 nt, Artificial Sequence
  Description of Artificial Sequence: Synthetic oligonucleotide
  Sense strand starting at position 3186 of SEQ ID NO: 1879248
gaacuacuacuggguaaua

SEQ ID NO: 1893745 - RNA, 19 nt, Artificial Sequence
  Description of Artificial Sequence: Synthetic oligonucleotide
  Antisense strand to SEQ ID NO: 1893744
uauuacccaguaguaguuc

SEQ ID NO: 1893746 - RNA, 19 nt, Artificial Sequence
  Description of Artificial Sequence: Synthetic oligonucleotide
  Sense strand starting at position 3265 of SEQ ID NO: 1879248
guaacaagagauugguaac

SEQ ID NO: 1893747 - RNA, 19 nt, Artificial Sequence
  Description of Artificial Sequence: Synthetic oligonucleotide
  Antisense strand to SEQ ID NO: 1893746
guuaccaaucucuuguuac

SEQ ID NO: 1893748 - RNA, 19 nt, Artificial Sequence
  Description of Artificial Sequence: Synthetic oligonucleotide
  Sense strand starting at position 3268 of SEQ ID NO: 1879248
acaagagauugguaacaaa

SEQ ID NO: 1893749 - RNA, 19 nt, Artificial Sequence
  Description of Artificial Sequence: Synthetic oligonucleotide
  Antisense strand to SEQ ID NO: 1893748
uuuguuaccaaucucuugu

SEQ ID NO: 1893750 - RNA, 19 nt, Artificial Sequence
  Description of Artificial Sequence: Synthetic oligonucleotide
  Sense strand starting at position 3271 of SEQ ID NO: 1879248
agagauugguaacaaagga

SEQ ID NO: 1893751 - RNA, 19 nt, Artificial Sequence
  Description of Artificial Sequence: Synthetic oligonucleotide
  Antisense strand to SEQ ID NO: 1893750
uccuuuguuaccaaucucu

SEQ ID NO: 1893752 - RNA, 19 nt, Artificial Sequence
  Description of Artificial Sequence: Synthetic oligonucleotide
  Sense strand starting at position 3381 of SEQ ID NO: 1879248
aguaauguauucucuauug

SEQ ID NO: 1893753 - RNA, 19 nt, Artificial Sequence
  Description of Artificial Sequence: Synthetic oligonucleotide
  Antisense strand to SEQ ID NO: 1893752
caauagagaauacauuacu

SEQ ID NO: 1893754 - RNA, 19 nt, Artificial Sequence
  Description of Artificial Sequence: Synthetic oligonucleotide
  Sense strand starting at position 3651 of SEQ ID NO: 1879248
cugagaacuucuguuucuc

SEQ ID NO: 1893755 - RNA, 19 nt, Artificial Sequence
  Description of Artificial Sequence: Synthetic oligonucleotide
  Antisense strand to SEQ ID NO: 1893754
gagaaacagaaguucucag

SEQ ID NO: 1893756 - RNA, 19 nt, Artificial Sequence
  Description of Artificial Sequence: Synthetic oligonucleotide
  Sense strand starting at position 3702 of SEQ ID NO: 1879248
cuagacauuucccacaguu

SEQ ID NO: 1893757 - RNA, 19 nt, Artificial Sequence
  Description of Artificial Sequence: Synthetic oligonucleotide
  Antisense strand to SEQ ID NO: 1893756
aacugugggaaaugucuag

SEQ ID NO: 1893758 - RNA, 19 nt, Artificial Sequence
  Description of Artificial Sequence: Synthetic oligonucleotide
  Sense strand starting at position 3794 of SEQ ID NO: 1879248
gagcaaaguggcuagcaau

SEQ ID NO: 1893759 - RNA, 19 nt, Artificial Sequence
  Description of Artificial Sequence: Synthetic oligonucleotide
  Antisense strand to SEQ ID NO: 1893758
auugcuagccacuuugcuc

SEQ ID NO: 1893760 - RNA, 19 nt, Artificial Sequence
  Description of Artificial Sequence: Synthetic oligonucleotide
  Sense strand starting at position 3868 of SEQ ID NO: 1879248
cacauucuauggguuagaa

SEQ ID NO: 1893761 - RNA, 19 nt, Artificial Sequence
  Description of Artificial Sequence: Synthetic oligonucleotide
  Antisense strand to SEQ ID NO: 1893760
uucuaacccauagaaugug

SEQ ID NO: 1893762 - RNA, 19 nt, Artificial Sequence
  Description of Artificial Sequence: Synthetic oligonucleotide
  Sense strand starting at position 3982 of SEQ ID NO: 1879248
gaguauauccgcuauauua

SEQ ID NO: 1893763 - RNA, 19 nt, Artificial Sequence
  Description of Artificial Sequence: Synthetic oligonucleotide
  Antisense strand to SEQ ID NO: 1893762
uaauauagcggauauacuc

SEQ ID NO: 1893764 - RNA, 19 nt, Artificial Sequence
  Description of Artificial Sequence: Synthetic oligonucleotide
  Sense strand starting at position 29 of SEQ ID NO: 1879249
gcgggaggcucauucauuc

SEQ ID NO: 1893765 - RNA, 19 nt, Artificial Sequence
  Description of Artificial Sequence: Synthetic oligonucleotide
  Antisense strand to SEQ ID NO: 1893764
gaaugaaugagccucccgc

SEQ ID NO: 1893766 - RNA, 19 nt, Artificial Sequence
  Description of Artificial Sequence: Synthetic oligonucleotide
  Sense strand starting at position 58 of SEQ ID NO: 1879249
gcuacugacuuacaugaca

SEQ ID NO: 1893767 - RNA, 19 nt, Artificial Sequence
  Description of Artificial Sequence: Synthetic oligonucleotide
  Antisense strand to SEQ ID NO: 1893766
ugucauguaagucaguagc

SEQ ID NO: 1893768 - RNA, 19 nt, Artificial Sequence
  Description of Artificial Sequence: Synthetic oligonucleotide
  Sense strand starting at position 115 of SEQ ID NO: 1879249
gggcccauaucucaacuuu

SEQ ID NO: 1893769 - RNA, 19 nt, Artificial Sequence
  Description of Artificial Sequence: Synthetic oligonucleotide
  Antisense strand to SEQ ID NO: 1893768
aaaguugagauaugggccc

SEQ ID NO: 1893770 - RNA, 19 nt, Artificial Sequence
  Description of Artificial Sequence: Synthetic oligonucleotide
  Sense strand starting at position 174 of SEQ ID NO: 1879249
ugaguaauucagugacggu

SEQ ID NO: 1893771 - RNA, 19 nt, Artificial Sequence
  Description of Artificial Sequence: Synthetic oligonucleotide
  Antisense strand to SEQ ID NO: 1893770
accgucacugaauuacuca

SEQ ID NO: 1893772 - RNA, 19 nt, Artificial Sequence
  Description of Artificial Sequence: Synthetic oligonucleotide
  Sense strand starting at position 324 of SEQ ID NO: 1879249
guagauaugacuugcaaug

SEQ ID NO: 1893773 - RNA, 19 nt, Artificial Sequence
  Description of Artificial Sequence: Synthetic oligonucleotide
  Antisense strand to SEQ ID NO: 1893772
cauugcaagucauaucuac

SEQ ID NO: 1893774 - RNA, 19 nt, Artificial Sequence
  Description of Artificial Sequence: Synthetic oligonucleotide
  Sense strand starting at position 501 of SEQ ID NO: 1879249
gccagaucaugugcaaacu

SEQ ID NO: 1893775 - RNA, 19 nt, Artificial Sequence
  Description of Artificial Sequence: Synthetic oligonucleotide
  Antisense strand to SEQ ID NO: 1893774
aguuugcacaugaucuggc

SEQ ID NO: 1893776 - RNA, 19 nt, Artificial Sequence
  Description of Artificial Sequence: Synthetic oligonucleotide
  Sense strand starting at position 533 of SEQ ID NO: 1879249
ugaacuuaauccugaaggu

SEQ ID NO: 1893777 - RNA, 19 nt, Artificial Sequence
  Description of Artificial Sequence: Synthetic oligonucleotide
  Antisense strand to SEQ ID NO: 1893776
accuucaggauuaaguuca

SEQ ID NO: 1893778 - RNA, 19 nt, Artificial Sequence
  Description of Artificial Sequence: Synthetic oligonucleotide
  Sense strand starting at position 588 of SEQ ID NO: 1879249
aacguaaaucaagacgcau

SEQ ID NO: 1893779 - RNA, 19 nt, Artificial Sequence
  Description of Artificial Sequence: Synthetic oligonucleotide
  Antisense strand to SEQ ID NO: 1893778
augcgucuugauuuacguu

SEQ ID NO: 1893780 - RNA, 19 nt, Artificial Sequence
  Description of Artificial Sequence: Synthetic oligonucleotide
  Sense strand starting at position 597 of SEQ ID NO: 1879249
caagacgcaucagagaaau

SEQ ID NO: 1893781 - RNA, 19 nt, Artificial Sequence
  Description of Artificial Sequence: Synthetic oligonucleotide
  Antisense strand to SEQ ID NO: 1893780
auuucucugaugcgucuug

SEQ ID NO: 1893782 - RNA, 19 nt, Artificial Sequence
  Description of Artificial Sequence: Synthetic oligonucleotide
  Sense strand starting at position 687 of SEQ ID NO: 1879249
gugugcagaccucaaucau

SEQ ID NO: 1893783 - RNA, 19 nt, Artificial Sequence
  Description of Artificial Sequence: Synthetic oligonucleotide
  Antisense strand to SEQ ID NO: 1893782
augauugaggucugcacac

SEQ ID NO: 1893784 - RNA, 19 nt, Artificial Sequence
  Description of Artificial Sequence: Synthetic oligonucleotide
  Sense strand starting at position 837 of SEQ ID NO: 1879249
cguggugagcucuauacac

SEQ ID NO: 1893785 - RNA, 19 nt, Artificial Sequence
  Description of Artificial Sequence: Synthetic oligonucleotide
  Antisense strand to SEQ ID NO: 1893784
guguauagagcucaccacg

SEQ ID NO: 1893786 - RNA, 19 nt, Artificial Sequence
  Description of Artificial Sequence: Synthetic oligonucleotide
  Sense strand starting at position 1346 of SEQ ID NO: 1879249
cccugauugguaggagcga

SEQ ID NO: 1893787 - RNA, 19 nt, Artificial Sequence
  Description of Artificial Sequence: Synthetic oligonucleotide
  Antisense strand to SEQ ID NO: 1893786
ucgcuccuaccaaucaggg

SEQ ID NO: 1893788 - RNA, 19 nt, Artificial Sequence
  Description of Artificial Sequence: Synthetic oligonucleotide
  Sense strand starting at position 2066 of SEQ ID NO: 1879249
ggcugcuuuggauggacua

SEQ ID NO: 1893789 - RNA, 19 nt, Artificial Sequence
  Description of Artificial Sequence: Synthetic oligonucleotide
  Antisense strand to SEQ ID NO: 1893788
uaguccauccaaagcagcc

SEQ ID NO: 1893790 - RNA, 19 nt, Artificial Sequence
  Description of Artificial Sequence: Synthetic oligonucleotide
  Sense strand starting at position 2214 of SEQ ID NO: 1879249
acacuuuaugguuguuaug

SEQ ID NO: 1893791 - RNA, 19 nt, Artificial Sequence
  Description of Artificial Sequence: Synthetic oligonucleotide
  Antisense strand to SEQ ID NO: 1893790
cauaacaaccauaaagugu

SEQ ID NO: 1893792 - RNA, 19 nt, Artificial Sequence
  Description of Artificial Sequence: Synthetic oligonucleotide
  Sense strand starting at position 2232 of SEQ ID NO: 1879249
gggugcuugcugcagagau

SEQ ID NO: 1893793 - RNA, 19 nt, Artificial Sequence
  Description of Artificial Sequence: Synthetic oligonucleotide
  Antisense strand to SEQ ID NO: 1893792
aucucugcagcaagcaccc

SEQ ID NO: 1893794 - RNA, 19 nt, Artificial Sequence
  Description of Artificial Sequence: Synthetic oligonucleotide
  Sense strand starting at position 2233 of SEQ ID NO: 1879249
ggugcuugcugcagagaug

SEQ ID NO: 1893795 - RNA, 19 nt, Artificial Sequence
  Description of Artificial Sequence: Synthetic oligonucleotide
  Antisense strand to SEQ ID NO: 1893794
caucucugcagcaagcacc

SEQ ID NO: 1893796 - RNA, 19 nt, Artificial Sequence
  Description of Artificial Sequence: Synthetic oligonucleotide
  Sense strand starting at position 2296 of SEQ ID NO: 1879249
uccgguggugauugggaau

SEQ ID NO: 1893797 - RNA, 19 nt, Artificial Sequence
  Description of Artificial Sequence: Synthetic oligonucleotide
  Antisense strand to SEQ ID NO: 1893796
auucccaaucaccaccgga

SEQ ID NO: 1893798 - RNA, 19 nt, Artificial Sequence
  Description of Artificial Sequence: Synthetic oligonucleotide
  Sense strand starting at position 2299 of SEQ ID NO: 1879249
gguggugauugggaauuca

SEQ ID NO: 1893799 - RNA, 19 nt, Artificial Sequence
  Description of Artificial Sequence: Synthetic oligonucleotide
  Antisense strand to SEQ ID NO: 1893798
ugaauucccaaucaccacc

SEQ ID NO: 1893800 - RNA, 19 nt, Artificial Sequence
  Description of Artificial Sequence: Synthetic oligonucleotide
  Sense strand starting at position 2360 of SEQ ID NO: 1879249
cuaaguagacggcaaagau

SEQ ID NO: 1893801 - RNA, 19 nt, Artificial Sequence
  Description of Artificial Sequence: Synthetic oligonucleotide
  Antisense strand to SEQ ID NO: 1893800
aucuuugccgucuacuuag

SEQ ID NO: 1893802 - RNA, 19 nt, Artificial Sequence
  Description of Artificial Sequence: Synthetic oligonucleotide
  Sense strand starting at position 2912 of SEQ ID NO: 1879249
aagcgagauuaacaugaga

SEQ ID NO: 1893803 - RNA, 19 nt, Artificial Sequence
  Description of Artificial Sequence: Synthetic oligonucleotide
  Antisense strand to SEQ ID NO: 1893802
ucucauguuaaucucgcuu

SEQ ID NO: 1893804 - RNA, 19 nt, Artificial Sequence
  Description of Artificial Sequence: Synthetic oligonucleotide
  Sense strand starting at position 2914 of SEQ ID NO: 1879249
gcgagauuaacaugagauu

SEQ ID NO: 1893805 - RNA, 19 nt, Artificial Sequence
  Description of Artificial Sequence: Synthetic oligonucleotide
  Antisense strand to SEQ ID NO: 1893804
aaucucauguuaaucucgc

SEQ ID NO: 1893806 - RNA, 19 nt, Artificial Sequence
  Description of Artificial Sequence: Synthetic oligonucleotide
  Sense strand starting at position 2957 of SEQ ID NO: 1879249
uacggugaagagcauuaua

SEQ ID NO: 1893807 - RNA, 19 nt, Artificial Sequence
  Description of Artificial Sequence: Synthetic oligonucleotide
  Antisense strand to SEQ ID NO: 1893806
uauaaugcucuucaccgua

SEQ ID NO: 1893808 - RNA, 19 nt, Artificial Sequence
  Description of Artificial Sequence: Synthetic oligonucleotide
  Sense strand starting at position 2992 of SEQ ID NO: 1879249
cucuuucuccuagggauag

SEQ ID NO: 1893809 - RNA, 19 nt, Artificial Sequence
  Description of Artificial Sequence: Synthetic oligonucleotide
  Antisense strand to SEQ ID NO: 1893808
cuaucccuaggagaaagag

SEQ ID NO: 1893810 - RNA, 19 nt, Artificial Sequence
  Description of Artificial Sequence: Synthetic oligonucleotide
  Sense strand starting at position 3042 of SEQ ID NO: 1879249
ugaccuuccuuugaauagu

SEQ ID NO: 1893811 - RNA, 19 nt, Artificial Sequence
  Description of Artificial Sequence: Synthetic oligonucleotide
  Antisense strand to SEQ ID NO: 1893810
acuauucaaaggaagguca

SEQ ID NO: 1893812 - RNA, 19 nt, Artificial Sequence
  Description of Artificial Sequence: Synthetic oligonucleotide
  Sense strand starting at position 3045 of SEQ ID NO: 1879249
ccuuccuuugaauagugaa

SEQ ID NO: 1893813 - RNA, 19 nt, Artificial Sequence
  Description of Artificial Sequence: Synthetic oligonucleotide
  Antisense strand to SEQ ID NO: 1893812
uucacuauucaaaggaagg

SEQ ID NO: 1893814 - RNA, 19 nt, Artificial Sequence
  Description of Artificial Sequence: Synthetic oligonucleotide
  Sense strand starting at position 3048 of SEQ ID NO: 1879249
uccuuugaauagugaauau

SEQ ID NO: 1893815 - RNA, 19 nt, Artificial Sequence
  Description of Artificial Sequence: Synthetic oligonucleotide
  Antisense strand to SEQ ID NO: 1893814
auauucacuauucaaagga

SEQ ID NO: 1893816 - RNA, 19 nt, Artificial Sequence
  Description of Artificial Sequence: Synthetic oligonucleotide
  Sense strand starting at position 3060 of SEQ ID NO: 1879249
ugaauauauguacaugguu

SEQ ID NO: 1893817 - RNA, 19 nt, Artificial Sequence
  Description of Artificial Sequence: Synthetic oligonucleotide
  Antisense strand to SEQ ID NO: 1893816
aaccauguacauauauuca

SEQ ID NO: 1893818 - RNA, 19 nt, Artificial Sequence
  Description of Artificial Sequence: Synthetic oligonucleotide
  Sense strand starting at position 3264 of SEQ ID NO: 1879249
gcagauggauucccagaaa

SEQ ID NO: 1893819 - RNA, 19 nt, Artificial Sequence
  Description of Artificial Sequence: Synthetic oligonucleotide
  Antisense strand to SEQ ID NO: 1893818
uuucugggaauccaucugc

SEQ ID NO: 1893820 - RNA, 19 nt, Artificial Sequence
  Description of Artificial Sequence: Synthetic oligonucleotide
  Sense strand starting at position 3434 of SEQ ID NO: 1879249
acuugugauccugacacuu

SEQ ID NO: 1893821 - RNA, 19 nt, Artificial Sequence
  Description of Artificial Sequence: Synthetic oligonucleotide
  Antisense strand to SEQ ID NO: 1893820
aagugucaggaucacaagu

SEQ ID NO: 1893822 - RNA, 19 nt, Artificial Sequence
  Description of Artificial Sequence: Synthetic oligonucleotide
  Sense strand starting at position 3436 of SEQ ID NO: 1879249
uugugauccugacacuuug

SEQ ID NO: 1893823 - RNA, 19 nt, Artificial Sequence
  Description of Artificial Sequence: Synthetic oligonucleotide
  Antisense strand to SEQ ID NO: 1893822
caaagugucaggaucacaa

SEQ ID NO: 1893824 - RNA, 19 nt, Artificial Sequence
  Description of Artificial Sequence: Synthetic oligonucleotide
  Sense strand starting at position 3713 of SEQ ID NO: 1879249
aaguuuggguugucuuuga

SEQ ID NO: 1893825 - RNA, 19 nt, Artificial Sequence
  Description of Artificial Sequence: Synthetic oligonucleotide
  Antisense strand to SEQ ID NO: 1893824
ucaaagacaacccaaacuu

SEQ ID NO: 1893826 - RNA, 19 nt, Artificial Sequence
  Description of Artificial Sequence: Synthetic oligonucleotide
  Sense strand starting at position 3717 of SEQ ID NO: 1879249
uuggguugucuuugaaggu

SEQ ID NO: 1893827 - RNA, 19 nt, Artificial Sequence
  Description of Artificial Sequence: Synthetic oligonucleotide
  Antisense strand to SEQ ID NO: 1893826
accuucaaagacaacccaa

SEQ ID NO: 1893828 - RNA, 19 nt, Artificial Sequence
  Description of Artificial Sequence: Synthetic oligonucleotide
  Sense strand starting at position 3758 of SEQ ID NO: 1879249
caagaagcauuugauguuu

SEQ ID NO: 1893829 - RNA, 19 nt, Artificial Sequence
  Description of Artificial Sequence: Synthetic oligonucleotide
  Antisense strand to SEQ ID NO: 1893828
aaacaucaaaugcuucuug

SEQ ID NO: 1893830 - RNA, 19 nt, Artificial Sequence
  Description of Artificial Sequence: Synthetic oligonucleotide
  Sense strand starting at position 3760 of SEQ ID NO: 1879249
agaagcauuugauguuuau

SEQ ID NO: 1893831 - RNA, 19 nt, Artificial Sequence
  Description of Artificial Sequence: Synthetic oligonucleotide
  Antisense strand to SEQ ID NO: 1893830
auaaacaucaaaugcuucu

SEQ ID NO: 1893832 - RNA, 19 nt, Artificial Sequence
  Description of Artificial Sequence: Synthetic oligonucleotide
  Sense strand starting at position 3776 of SEQ ID NO: 1879249
uaucaaagugccuggaaca

SEQ ID NO: 1893833 - RNA, 19 nt, Artificial Sequence
  Description of Artificial Sequence: Synthetic oligonucleotide
  Antisense strand to SEQ ID NO: 1893832
uguuccaggcacuuugaua

SEQ ID NO: 1893834 - RNA, 19 nt, Artificial Sequence
  Description of Artificial Sequence: Synthetic oligonucleotide
  Sense strand starting at position 3777 of SEQ ID NO: 1879249
aucaaagugccuggaacau

SEQ ID NO: 1893835 - RNA, 19 nt, Artificial Sequence
  Description of Artificial Sequence: Synthetic oligonucleotide
  Antisense strand to SEQ ID NO: 1893834
auguuccaggcacuuugau

SEQ ID NO: 1893836 - RNA, 19 nt, Artificial Sequence
  Description of Artificial Sequence: Synthetic oligonucleotide
  Sense strand starting at position 3808 of SEQ ID NO: 1879249
gaacauacuugcugaggua

SEQ ID NO: 1893837 - RNA, 19 nt, Artificial Sequence
  Description of Artificial Sequence: Synthetic oligonucleotide
  Antisense strand to SEQ ID NO: 1893836
uaccucagcaaguauguuc

SEQ ID NO: 1893838 - RNA, 19 nt, Artificial Sequence
  Description of Artificial Sequence: Synthetic oligonucleotide
  Sense strand starting at position 3809 of SEQ ID NO: 1879249
aacauacuugcugagguaa

SEQ ID NO: 1893839 - RNA, 19 nt, Artificial Sequence
  Description of Artificial Sequence: Synthetic oligonucleotide
  Antisense strand to SEQ ID NO: 1893838
uuaccucagcaaguauguu

SEQ ID NO: 1893840 - RNA, 19 nt, Artificial Sequence
  Description of Artificial Sequence: Synthetic oligonucleotide
  Sense strand starting at position 3825 of SEQ ID NO: 1879249
uaaugaagaugcuauggga

SEQ ID NO: 1893841 - RNA, 19 nt, Artificial Sequence
  Description of Artificial Sequence: Synthetic oligonucleotide
  Antisense strand to SEQ ID NO: 1893840
ucccauagcaucuucauua

SEQ ID NO: 1893842 - RNA, 19 nt, Artificial Sequence
  Description of Artificial Sequence: Synthetic oligonucleotide
  Sense strand starting at position 3828 of SEQ ID NO: 1879249
ugaagaugcuaugggagau

SEQ ID NO: 1893843 - RNA, 19 nt, Artificial Sequence
  Description of Artificial Sequence: Synthetic oligonucleotide
  Antisense strand to SEQ ID NO: 1893842
aucucccauagcaucuuca

SEQ ID NO: 1893844 - RNA, 19 nt, Artificial Sequence
  Description of Artificial Sequence: Synthetic oligonucleotide
  Sense strand starting at position 39 of SEQ ID NO: 1879250
aggguuccagaaugcuaga

SEQ ID NO: 1893845 - RNA, 19 nt, Artificial Sequence
  Description of Artificial Sequence: Synthetic oligonucleotide
  Antisense strand to SEQ ID NO: 1893844
ucuagcauucuggaacccu

SEQ ID NO: 1893846 - RNA, 19 nt, Artificial Sequence
  Description of Artificial Sequence: Synthetic oligonucleotide
  Sense strand starting at position 44 of SEQ ID NO: 1879250
uccagaaugcuagaagcaa

SEQ ID NO: 1893847 - RNA, 19 nt, Artificial Sequence
  Description of Artificial Sequence: Synthetic oligonucleotide
  Antisense strand to SEQ ID NO: 1893846
uugcuucuagcauucugga

SEQ ID NO: 1893848 - RNA, 19 nt, Artificial Sequence
  Description of Artificial Sequence: Synthetic oligonucleotide
  Sense strand starting at position 133 of SEQ ID NO: 1879250
uuaugucuccuuuacagua

SEQ ID NO: 1893849 - RNA, 19 nt, Artificial Sequence
  Description of Artificial Sequence: Synthetic oligonucleotide
  Antisense strand to SEQ ID NO: 1893848
uacuguaaaggagacauaa

SEQ ID NO: 1893850 - RNA, 19 nt, Artificial Sequence
  Description of Artificial Sequence: Synthetic oligonucleotide
  Sense strand starting at position 152 of SEQ ID NO: 1879250
uaccuuaacguauguaaag

SEQ ID NO: 1893851 - RNA, 19 nt, Artificial Sequence
  Description of Artificial Sequence: Synthetic oligonucleotide
  Antisense strand to SEQ ID NO: 1893850
cuuuacauacguuaaggua

SEQ ID NO: 1893852 - RNA, 19 nt, Artificial Sequence
  Description of Artificial Sequence: Synthetic oligonucleotide
  Sense strand starting at position 153 of SEQ ID NO: 1879250
accuuaacguauguaaaga

SEQ ID NO: 1893853 - RNA, 19 nt, Artificial Sequence
  Description of Artificial Sequence: Synthetic oligonucleotide
  Antisense strand to SEQ ID NO: 1893852
ucuuuacauacguuaaggu

SEQ ID NO: 1893854 - RNA, 19 nt, Artificial Sequence
  Description of Artificial Sequence: Synthetic oligonucleotide
  Sense strand starting at position 161 of SEQ ID NO: 1879250
guauguaaagacugagaua

SEQ ID NO: 1893855 - RNA, 19 nt, Artificial Sequence
  Description of Artificial Sequence: Synthetic oligonucleotide
  Antisense strand to SEQ ID NO: 1893854
uaucucagucuuuacauac

SEQ ID NO: 1893856 - RNA, 19 nt, Artificial Sequence
  Description of Artificial Sequence: Synthetic oligonucleotide
  Sense strand starting at position 539 of SEQ ID NO: 1879250
uucuaaguugcuuaggaga

SEQ ID NO: 1893857 - RNA, 19 nt, Artificial Sequence
  Description of Artificial Sequence: Synthetic oligonucleotide
  Antisense strand to SEQ ID NO: 1893856
ucuccuaagcaacuuagaa

SEQ ID NO: 1893858 - RNA, 19 nt, Artificial Sequence
  Description of Artificial Sequence: Synthetic oligonucleotide
  Sense strand starting at position 628 of SEQ ID NO: 1879250
auguacucuuaauugaaag

SEQ ID NO: 1893859 - RNA, 19 nt, Artificial Sequence
  Description of Artificial Sequence: Synthetic oligonucleotide
  Antisense strand to SEQ ID NO: 1893858
cuuucaauuaagaguacau

SEQ ID NO: 1893860 - RNA, 19 nt, Artificial Sequence
  Description of Artificial Sequence: Synthetic oligonucleotide
  Sense strand starting at position 786 of SEQ ID NO: 1879250
uuaaaucaguggcuuuauu

SEQ ID NO: 1893861 - RNA, 19 nt, Artificial Sequence
  Description of Artificial Sequence: Synthetic oligonucleotide
  Antisense strand to SEQ ID NO: 1893860
aauaaagccacugauuuaa

SEQ ID NO: 1893862 - RNA, 19 nt, Artificial Sequence
  Description of Artificial Sequence: Synthetic oligonucleotide
  Sense strand starting at position 937 of SEQ ID NO: 1879250
acagcaguucuacaguguu

SEQ ID NO: 1893863 - RNA, 19 nt, Artificial Sequence
  Description of Artificial Sequence: Synthetic oligonucleotide
  Antisense strand to SEQ ID NO: 1893862
aacacuguagaacugcugu

SEQ ID NO: 1893864 - RNA, 19 nt, Artificial Sequence
  Description of Artificial Sequence: Synthetic oligonucleotide
  Sense strand starting at position 950 of SEQ ID NO: 1879250
aguguuauguuucugaaug

SEQ ID NO: 1893865 - RNA, 19 nt, Artificial Sequence
  Description of Artificial Sequence: Synthetic oligonucleotide
  Antisense strand to SEQ ID NO: 1893864
cauucagaaacauaacacu

SEQ ID NO: 1893866 - RNA, 19 nt, Artificial Sequence
  Description of Artificial Sequence: Synthetic oligonucleotide
  Sense strand starting at position 1001 of SEQ ID NO: 1879250
gucugaauuagaugguaaa

SEQ ID NO: 1893867 - RNA, 19 nt, Artificial Sequence
  Description of Artificial Sequence: Synthetic oligonucleotide
  Antisense strand to SEQ ID NO: 1893866
uuuaccaucuaauucagac

SEQ ID NO: 1893868 - RNA, 19 nt, Artificial Sequence
  Description of Artificial Sequence: Synthetic oligonucleotide
  Sense strand starting at position 1339 of SEQ ID NO: 1879250
ucacauaacuaguuaugua

SEQ ID NO: 1893869 - RNA, 19 nt, Artificial Sequence
  Description of Artificial Sequence: Synthetic oligonucleotide
  Antisense strand to SEQ ID NO: 1893868
uacauaacuaguuauguga

SEQ ID NO: 1893870 - RNA, 19 nt, Artificial Sequence
  Description of Artificial Sequence: Synthetic oligonucleotide
  Sense strand starting at position 1596 of SEQ ID NO: 1879250
ucuggauucugguuuauga

SEQ ID NO: 1893871 - RNA, 19 nt, Artificial Sequence
  Description of Artificial Sequence: Synthetic oligonucleotide
  Antisense strand to SEQ ID NO: 1893870
ucauaaaccagaauccaga

SEQ ID NO: 1893872 - RNA, 19 nt, Artificial Sequence
  Description of Artificial Sequence: Synthetic oligonucleotide
  Sense strand starting at position 2033 of SEQ ID NO: 1879250
gaagguuccugcucggaag

SEQ ID NO: 1893873 - RNA, 19 nt, Artificial Sequence
  Description of Artificial Sequence: Synthetic oligonucleotide
  Antisense strand to SEQ ID NO: 1893872
cuuccgagcaggaaccuuc

SEQ ID NO: 1893874 - RNA, 19 nt, Artificial Sequence
  Description of Artificial Sequence: Synthetic oligonucleotide
  Sense strand starting at position 2057 of SEQ ID NO: 1879250
cguccugcucucuaaauca

SEQ ID NO: 1893875 - RNA, 19 nt, Artificial Sequence
  Description of Artificial Sequence: Synthetic oligonucleotide
  Antisense strand to SEQ ID NO: 1893874
ugauuuagagagcaggacg

SEQ ID NO: 1893876 - RNA, 19 nt, Artificial Sequence
  Description of Artificial Sequence: Synthetic oligonucleotide
  Sense strand starting at position 2065 of SEQ ID NO: 1879250
ucucuaaaucaguggcuua

SEQ ID NO: 1893877 - RNA, 19 nt, Artificial Sequence
  Description of Artificial Sequence: Synthetic oligonucleotide
  Antisense strand to SEQ ID NO: 1893876
uaagccacugauuuagaga

SEQ ID NO: 1893878 - RNA, 19 nt, Artificial Sequence
  Description of Artificial Sequence: Synthetic oligonucleotide
  Sense strand starting at position 2115 of SEQ ID NO: 1879250
guggaacauuaguuuggga

SEQ ID NO: 1893879 - RNA, 19 nt, Artificial Sequence
  Description of Artificial Sequence: Synthetic oligonucleotide
  Antisense strand to SEQ ID NO: 1893878
ucccaaacuaauguuccac

SEQ ID NO: 1893880 - RNA, 19 nt, Artificial Sequence
  Description of Artificial Sequence: Synthetic oligonucleotide
  Sense strand starting at position 2171 of SEQ ID NO: 1879250
cccagaaagcuacagucuu

SEQ ID NO: 1893881 - RNA, 19 nt, Artificial Sequence
  Description of Artificial Sequence: Synthetic oligonucleotide
  Antisense strand to SEQ ID NO: 1893880
aagacuguagcuuucuggg

SEQ ID NO: 1893882 - RNA, 19 nt, Artificial Sequence
  Description of Artificial Sequence: Synthetic oligonucleotide
  Sense strand starting at position 2267 of SEQ ID NO: 1879250
cccauaucuguguaccuuu

SEQ ID NO: 1893883 - RNA, 19 nt, Artificial Sequence
  Description of Artificial Sequence: Synthetic oligonucleotide
  Antisense strand to SEQ ID NO: 1893882
aaagguacacagauauggg

SEQ ID NO: 1893884 - RNA, 19 nt, Artificial Sequence
  Description of Artificial Sequence: Synthetic oligonucleotide
  Sense strand starting at position 2486 of SEQ ID NO: 1879250
aguugagaacugugagcca

SEQ ID NO: 1893885 - RNA, 19 nt, Artificial Sequence
  Description of Artificial Sequence: Synthetic oligonucleotide
  Antisense strand to SEQ ID NO: 1893884
uggcucacaguucucaacu

SEQ ID NO: 1893886 - RNA, 19 nt, Artificial Sequence
  Description of Artificial Sequence: Synthetic oligonucleotide
  Sense strand starting at position 2489 of SEQ ID NO: 1879250
ugagaacugugagccacua

SEQ ID NO: 1893887 - RNA, 19 nt, Artificial Sequence
  Description of Artificial Sequence: Synthetic oligonucleotide
  Antisense strand to SEQ ID NO: 1893886
uaguggcucacaguucuca

SEQ ID NO: 1893888 - RNA, 19 nt, Artificial Sequence
  Description of Artificial Sequence: Synthetic oligonucleotide
  Sense strand starting at position 2837 of SEQ ID NO: 1879250
caguguauguuaucacuua

SEQ ID NO: 1893889 - RNA, 19 nt, Artificial Sequence
  Description of Artificial Sequence: Synthetic oligonucleotide
  Antisense strand to SEQ ID NO: 1893888
uaagugauaacauacacug

SEQ ID NO: 1893890 - RNA, 19 nt, Artificial Sequence
  Description of Artificial Sequence: Synthetic oligonucleotide
  Sense strand starting at position 2871 of SEQ ID NO: 1879250
guaagcaaacuuggaagaa

SEQ ID NO: 1893891 - RNA, 19 nt, Artificial Sequence
  Description of Artificial Sequence: Synthetic oligonucleotide
  Antisense strand to SEQ ID NO: 1893890
uucuuccaaguuugcuuac

SEQ ID NO: 1893892 - RNA, 19 nt, Artificial Sequence
  Description of Artificial Sequence: Synthetic oligonucleotide
  Sense strand starting at position 2919 of SEQ ID NO: 1879250
ccuccuuaauguuugaaag

SEQ ID NO: 1893893 - RNA, 19 nt, Artificial Sequence
  Description of Artificial Sequence: Synthetic oligonucleotide
  Antisense strand to SEQ ID NO: 1893892
cuuucaaacauuaaggagg

SEQ ID NO: 1893894 - RNA, 19 nt, Artificial Sequence
  Description of Artificial Sequence: Synthetic oligonucleotide
  Sense strand starting at position 2961 of SEQ ID NO: 1879250
aguagaauuuguuagagga

SEQ ID NO: 1893895 - RNA, 19 nt, Artificial Sequence
  Description of Artificial Sequence: Synthetic oligonucleotide
  Antisense strand to SEQ ID NO: 1893894
uccucuaacaaauucuacu

SEQ ID NO: 1893896 - RNA, 19 nt, Artificial Sequence
  Description of Artificial Sequence: Synthetic oligonucleotide
  Sense strand starting at position 2963 of SEQ ID NO: 1879250
uagaauuuguuagaggaau

SEQ ID NO: 1893897 - RNA, 19 nt, Artificial Sequence
  Description of Artificial Sequence: Synthetic oligonucleotide
  Antisense strand to SEQ ID NO: 1893896
auuccucuaacaaauucua

SEQ ID NO: 1893898 - RNA, 19 nt, Artificial Sequence
  Description of Artificial Sequence: Synthetic oligonucleotide
  Sense strand starting at position 2978 of SEQ ID NO: 1879250
gaauauagauuuggagaga

SEQ ID NO: 1893899 - RNA, 19 nt, Artificial Sequence
  Description of Artificial Sequence: Synthetic oligonucleotide
  Antisense strand to SEQ ID NO: 1893898
ucucuccaaaucuauauuc

SEQ ID NO: 1893900 - RNA, 19 nt, Artificial Sequence
  Description of Artificial Sequence: Synthetic oligonucleotide
  Sense strand starting at position 3007 of SEQ ID NO: 1879250
uuugaaucucugugaagca

SEQ ID NO: 1893901 - RNA, 19 nt, Artificial Sequence
  Description of Artificial Sequence: Synthetic oligonucleotide
  Antisense strand to SEQ ID NO: 1893900
ugcuucacagagauucaaa

SEQ ID NO: 1893902 - RNA, 19 nt, Artificial Sequence
  Description of Artificial Sequence: Synthetic oligonucleotide
  Sense strand starting at position 3016 of SEQ ID NO: 1879250
cugugaagcagugauugua

SEQ ID NO: 1893903 - RNA, 19 nt, Artificial Sequence
  Description of Artificial Sequence: Synthetic oligonucleotide
  Antisense strand to SEQ ID NO: 1893902
uacaaucacugcuucacag

SEQ ID NO: 1893904 - RNA, 19 nt, Artificial Sequence
  Description of Artificial Sequence: Synthetic oligonucleotide
  Sense strand starting at position 3019 of SEQ ID NO: 1879250
ugaagcagugauuguauau

SEQ ID NO: 1893905 - RNA, 19 nt, Artificial Sequence
  Description of Artificial Sequence: Synthetic oligonucleotide
  Antisense strand to SEQ ID NO: 1893904
auauacaaucacugcuuca

SEQ ID NO: 1893906 - RNA, 19 nt, Artificial Sequence
  Description of Artificial Sequence: Synthetic oligonucleotide
  Sense strand starting at position 3113 of SEQ ID NO: 1879250
aaacauggucaguguaugu

SEQ ID NO: 1893907 - RNA, 19 nt, Artificial Sequence
  Description of Artificial Sequence: Synthetic oligonucleotide
  Antisense strand to SEQ ID NO: 1893906
acauacacugaccauguuu

SEQ ID NO: 1893908 - RNA, 19 nt, Artificial Sequence
  Description of Artificial Sequence: Synthetic oligonucleotide
  Sense strand starting at position 3134 of SEQ ID NO: 1879250
gguauagggucuuugaguu

SEQ ID NO: 1893909 - RNA, 19 nt, Artificial Sequence
  Description of Artificial Sequence: Synthetic oligonucleotide
  Antisense strand to SEQ ID NO: 1893908
aacucaaagacccuauacc

SEQ ID NO: 1893910 - RNA, 19 nt, Artificial Sequence
  Description of Artificial Sequence: Synthetic oligonucleotide
  Sense strand starting at position 3716 of SEQ ID NO: 1879250
cucgaaauauaucuguauu

SEQ ID NO: 1893911 - RNA, 19 nt, Artificial Sequence
  Description of Artificial Sequence: Synthetic oligonucleotide
  Antisense strand to SEQ ID NO: 1893910
aauacagauauauuucgag

SEQ ID NO: 1893912 - RNA, 19 nt, Artificial Sequence
  Description of Artificial Sequence: Synthetic oligonucleotide
  Sense strand starting at position 3765 of SEQ ID NO: 1879250
uagucuaggcagugaguaa

SEQ ID NO: 1893913 - RNA, 19 nt, Artificial Sequence
  Description of Artificial Sequence: Synthetic oligonucleotide
  Antisense strand to SEQ ID NO: 1893912
uuacucacugccuagacua

SEQ ID NO: 1893914 - RNA, 19 nt, Artificial Sequence
  Description of Artificial Sequence: Synthetic oligonucleotide
  Sense strand starting at position 3766 of SEQ ID NO: 1879250
agucuaggcagugaguaaa

SEQ ID NO: 1893915 - RNA, 19 nt, Artificial Sequence
  Description of Artificial Sequence: Synthetic oligonucleotide
  Antisense strand to SEQ ID NO: 1893914
uuuacucacugccuagacu

SEQ ID NO: 1893916 - RNA, 19 nt, Artificial Sequence
  Description of Artificial Sequence: Synthetic oligonucleotide
  Sense strand starting at position 3769 of SEQ ID NO: 1879250
cuaggcagugaguaaacau

SEQ ID NO: 1893917 - RNA, 19 nt, Artificial Sequence
  Description of Artificial Sequence: Synthetic oligonucleotide
  Antisense strand to SEQ ID NO: 1893916
auguuuacucacugccuag

SEQ ID NO: 1893918 - RNA, 19 nt, Artificial Sequence
  Description of Artificial Sequence: Synthetic oligonucleotide
  Sense strand starting at position 3776 of SEQ ID NO: 1879250
gugaguaaacaucagaugu

SEQ ID NO: 1893919 - RNA, 19 nt, Artificial Sequence
  Description of Artificial Sequence: Synthetic oligonucleotide
  Antisense strand to SEQ ID NO: 1893918
acaucugauguuuacucac

SEQ ID NO: 1893920 - RNA, 19 nt, Artificial Sequence
  Description of Artificial Sequence: Synthetic oligonucleotide
  Sense strand starting at position 3835 of SEQ ID NO: 1879250
ucuuaaauguucucgaaug

SEQ ID NO: 1893921 - RNA, 19 nt, Artificial Sequence
  Description of Artificial Sequence: Synthetic oligonucleotide
  Antisense strand to SEQ ID NO: 1893920
cauucgagaacauuuaaga

SEQ ID NO: 1893922 - RNA, 19 nt, Artificial Sequence
  Description of Artificial Sequence: Synthetic oligonucleotide
  Sense strand starting at position 3837 of SEQ ID NO: 1879250
uuaaauguucucgaauguu

SEQ ID NO: 1893923 - RNA, 19 nt, Artificial Sequence
  Description of Artificial Sequence: Synthetic oligonucleotide
  Antisense strand to SEQ ID NO: 1893922
aacauucgagaacauuuaa

SEQ ID NO: 1893924 - RNA, 19 nt, Artificial Sequence
  Description of Artificial Sequence: Synthetic oligonucleotide
  Sense strand starting at position 482 of SEQ ID NO: 1879251
ugacaaaugcuacgacaau

SEQ ID NO: 1893925 - RNA, 19 nt, Artificial Sequence
  Description of Artificial Sequence: Synthetic oligonucleotide
  Antisense strand to SEQ ID NO: 1893924
auugucguagcauuuguca

SEQ ID NO: 1893926 - RNA, 19 nt, Artificial Sequence
  Description of Artificial Sequence: Synthetic oligonucleotide
  Sense strand starting at position 575 of SEQ ID NO: 1879251
aacgguuucucagcacaga

SEQ ID NO: 1893927 - RNA, 19 nt, Artificial Sequence
  Description of Artificial Sequence: Synthetic oligonucleotide
  Antisense strand to SEQ ID NO: 1893926
ucugugcugagaaaccguu

SEQ ID NO: 1893928 - RNA, 19 nt, Artificial Sequence
  Description of Artificial Sequence: Synthetic oligonucleotide
  Sense strand starting at position 678 of SEQ ID NO: 1879251
ugcagaaacugguucuaga

SEQ ID NO: 1893929 - RNA, 19 nt, Artificial Sequence
  Description of Artificial Sequence: Synthetic oligonucleotide
  Antisense strand to SEQ ID NO: 1893928
ucuagaaccaguuucugca

SEQ ID NO: 1893930 - RNA, 19 nt, Artificial Sequence
  Description of Artificial Sequence: Synthetic oligonucleotide
  Sense strand starting at position 838 of SEQ ID NO: 1879251
uuaguuuccucuccuauag

SEQ ID NO: 1893931 - RNA, 19 nt, Artificial Sequence
  Description of Artificial Sequence: Synthetic oligonucleotide
  Antisense strand to SEQ ID NO: 1893930
cuauaggagaggaaacuaa

SEQ ID NO: 1893932 - RNA, 19 nt, Artificial Sequence
  Description of Artificial Sequence: Synthetic oligonucleotide
  Sense strand starting at position 1121 of SEQ ID NO: 1879251
cagcuuucccagggaguaa

SEQ ID NO: 1893933 - RNA, 19 nt, Artificial Sequence
  Description of Artificial Sequence: Synthetic oligonucleotide
  Antisense strand to SEQ ID NO: 1893932
uuacucccugggaaagcug

SEQ ID NO: 1893934 - RNA, 19 nt, Artificial Sequence
  Description of Artificial Sequence: Synthetic oligonucleotide
  Sense strand starting at position 1122 of SEQ ID NO: 1879251
agcuuucccagggaguaau

SEQ ID NO: 1893935 - RNA, 19 nt, Artificial Sequence
  Description of Artificial Sequence: Synthetic oligonucleotide
  Antisense strand to SEQ ID NO: 1893934
auuacucccugggaaagcu

SEQ ID NO: 1893936 - RNA, 19 nt, Artificial Sequence
  Description of Artificial Sequence: Synthetic oligonucleotide
  Sense strand starting at position 1189 of SEQ ID NO: 1879251
uguagauuaccacgugaug

SEQ ID NO: 1893937 - RNA, 19 nt, Artificial Sequence
  Description of Artificial Sequence: Synthetic oligonucleotide
  Antisense strand to SEQ ID NO: 1893936
caucacgugguaaucuaca

SEQ ID NO: 1893938 - RNA, 19 nt, Artificial Sequence
  Description of Artificial Sequence: Synthetic oligonucleotide
  Sense strand starting at position 1191 of SEQ ID NO: 1879251
uagauuaccacgugaugug

SEQ ID NO: 1893939 - RNA, 19 nt, Artificial Sequence
  Description of Artificial Sequence: Synthetic oligonucleotide
  Antisense strand to SEQ ID NO: 1893938
cacaucacgugguaaucua

SEQ ID NO: 1893940 - RNA, 19 nt, Artificial Sequence
  Description of Artificial Sequence: Synthetic oligonucleotide
  Sense strand starting at position 1192 of SEQ ID NO: 1879251
agauuaccacgugauguga

SEQ ID NO: 1893941 - RNA, 19 nt, Artificial Sequence
  Description of Artificial Sequence: Synthetic oligonucleotide
  Antisense strand to SEQ ID NO: 1893940
ucacaucacgugguaaucu

SEQ ID NO: 1893942 - RNA, 19 nt, Artificial Sequence
  Description of Artificial Sequence: Synthetic oligonucleotide
  Sense strand starting at position 1200 of SEQ ID NO: 1879251
acgugaugugauggcaaga

SEQ ID NO: 1893943 - RNA, 19 nt, Artificial Sequence
  Description of Artificial Sequence: Synthetic oligonucleotide
  Antisense strand to SEQ ID NO: 1893942
ucuugccaucacaucacgu

SEQ ID NO: 1893944 - RNA, 19 nt, Artificial Sequence
  Description of Artificial Sequence: Synthetic oligonucleotide
  Sense strand starting at position 1317 of SEQ ID NO: 1879251
gugucucaucuguaaauug

SEQ ID NO: 1893945 - RNA, 19 nt, Artificial Sequence
  Description of Artificial Sequence: Synthetic oligonucleotide
  Antisense strand to SEQ ID NO: 1893944
caauuuacagaugagacac

SEQ ID NO: 1893946 - RNA, 19 nt, Artificial Sequence
  Description of Artificial Sequence: Synthetic oligonucleotide
  Sense strand starting at position 1349 of SEQ ID NO: 1879251
guacuuaauccaugaggau

SEQ ID NO: 1893947 - RNA, 19 nt, Artificial Sequence
  Description of Artificial Sequence: Synthetic oligonucleotide
  Antisense strand to SEQ ID NO: 1893946
auccucauggauuaaguac

SEQ ID NO: 1893948 - RNA, 19 nt, Artificial Sequence
  Description of Artificial Sequence: Synthetic oligonucleotide
  Sense strand starting at position 1364 of SEQ ID NO: 1879251
ggauuaguggcuuagugga

SEQ ID NO: 1893949 - RNA, 19 nt, Artificial Sequence
  Description of Artificial Sequence: Synthetic oligonucleotide
  Antisense strand to SEQ ID NO: 1893948
uccacuaagccacuaaucc

SEQ ID NO: 1893950 - RNA, 19 nt, Artificial Sequence
  Description of Artificial Sequence: Synthetic oligonucleotide
  Sense strand starting at position 1418 of SEQ ID NO: 1879251
gucaguuauuacuuuggga

SEQ ID NO: 1893951 - RNA, 19 nt, Artificial Sequence
  Description of Artificial Sequence: Synthetic oligonucleotide
  Antisense strand to SEQ ID NO: 1893950
ucccaaaguaauaacugac

SEQ ID NO: 1893952 - RNA, 19 nt, Artificial Sequence
  Description of Artificial Sequence: Synthetic oligonucleotide
  Sense strand starting at position 1420 of SEQ ID NO: 1879251
caguuauuacuuugggagg

SEQ ID NO: 1893953 - RNA, 19 nt, Artificial Sequence
  Description of Artificial Sequence: Synthetic oligonucleotide
  Antisense strand to SEQ ID NO: 1893952
ccucccaaaguaauaacug

SEQ ID NO: 1893954 - RNA, 19 nt, Artificial Sequence
  Description of Artificial Sequence: Synthetic oligonucleotide
  Sense strand starting at position 1632 of SEQ ID NO: 1879251
ggcacagagaguuaaguua

SEQ ID NO: 1893955 - RNA, 19 nt, Artificial Sequence
  Description of Artificial Sequence: Synthetic oligonucleotide
  Antisense strand to SEQ ID NO: 1893954
uaacuuaacucucugugcc

SEQ ID NO: 1893956 - RNA, 19 nt, Artificial Sequence
  Description of Artificial Sequence: Synthetic oligonucleotide
  Sense strand starting at position 1675 of SEQ ID NO: 1879251
cagguaguuugacuccaga

SEQ ID NO: 1893957 - RNA, 19 nt, Artificial Sequence
  Description of Artificial Sequence: Synthetic oligonucleotide
  Antisense strand to SEQ ID NO: 1893956
ucuggagucaaacuaccug

SEQ ID NO: 1893958 - RNA, 19 nt, Artificial Sequence
  Description of Artificial Sequence: Synthetic oligonucleotide
  Sense strand starting at position 1809 of SEQ ID NO: 1879251
agcuguuacccugggaacu

SEQ ID NO: 1893959 - RNA, 19 nt, Artificial Sequence
  Description of Artificial Sequence: Synthetic oligonucleotide
  Antisense strand to SEQ ID NO: 1893958
aguucccaggguaacagcu

SEQ ID NO: 1893960 - RNA, 19 nt, Artificial Sequence
  Description of Artificial Sequence: Synthetic oligonucleotide
  Sense strand starting at position 2097 of SEQ ID NO: 1879251
gagauagcuccugacugua

SEQ ID NO: 1893961 - RNA, 19 nt, Artificial Sequence
  Description of Artificial Sequence: Synthetic oligonucleotide
  Antisense strand to SEQ ID NO: 1893960
uacagucaggagcuaucuc

SEQ ID NO: 1893962 - RNA, 19 nt, Artificial Sequence
  Description of Artificial Sequence: Synthetic oligonucleotide
  Sense strand starting at position 2153 of SEQ ID NO: 1879251
accuaagacccaugcugau

SEQ ID NO: 1893963 - RNA, 19 nt, Artificial Sequence
  Description of Artificial Sequence: Synthetic oligonucleotide
  Antisense strand to SEQ ID NO: 1893962
aucagcaugggucuuaggu

SEQ ID NO: 1893964 - RNA, 19 nt, Artificial Sequence
  Description of Artificial Sequence: Synthetic oligonucleotide
  Sense strand starting at position 2242 of SEQ ID NO: 1879251
gucucagaauaucuguauu

SEQ ID NO: 1893965 - RNA, 19 nt, Artificial Sequence
  Description of Artificial Sequence: Synthetic oligonucleotide
  Antisense strand to SEQ ID NO: 1893964
aauacagauauucugagac

SEQ ID NO: 1893966 - RNA, 19 nt, Artificial Sequence
  Description of Artificial Sequence: Synthetic oligonucleotide
  Sense strand starting at position 2252 of SEQ ID NO: 1879251
aucuguauuccagggacuu

SEQ ID NO: 1893967 - RNA, 19 nt, Artificial Sequence
  Description of Artificial Sequence: Synthetic oligonucleotide
  Antisense strand to SEQ ID NO: 1893966
aagucccuggaauacagau

SEQ ID NO: 1893968 - RNA, 19 nt, Artificial Sequence
  Description of Artificial Sequence: Synthetic oligonucleotide
  Sense strand starting at position 2253 of SEQ ID NO: 1879251
ucuguauuccagggacuuc

SEQ ID NO: 1893969 - RNA, 19 nt, Artificial Sequence
  Description of Artificial Sequence: Synthetic oligonucleotide
  Antisense strand to SEQ ID NO: 1893968
gaagucccuggaauacaga

SEQ ID NO: 1893970 - RNA, 19 nt, Artificial Sequence
  Description of Artificial Sequence: Synthetic oligonucleotide
  Sense strand starting at position 2352 of SEQ ID NO: 1879251
acgggacuucucgagccaa

SEQ ID NO: 1893971 - RNA, 19 nt, Artificial Sequence
  Description of Artificial Sequence: Synthetic oligonucleotide
  Antisense strand to SEQ ID NO: 1893970
uuggcucgagaagucccgu

SEQ ID NO: 1893972 - RNA, 19 nt, Artificial Sequence
  Description of Artificial Sequence: Synthetic oligonucleotide
  Sense strand starting at position 2378 of SEQ ID NO: 1879251
gaggcacugccagaaaugu

SEQ ID NO: 1893973 - RNA, 19 nt, Artificial Sequence
  Description of Artificial Sequence: Synthetic oligonucleotide
  Antisense strand to SEQ ID NO: 1893972
acauuucuggcagugccuc

SEQ ID NO: 1893974 - RNA, 19 nt, Artificial Sequence
  Description of Artificial Sequence: Synthetic oligonucleotide
  Sense strand starting at position 2717 of SEQ ID NO: 1879251
ggacauaggcccuguucca

SEQ ID NO: 1893975 - RNA, 19 nt, Artificial Sequence
  Description of Artificial Sequence: Synthetic oligonucleotide
  Antisense strand to SEQ ID NO: 1893974
uggaacagggccuaugucc

SEQ ID NO: 1893976 - RNA, 19 nt, Artificial Sequence
  Description of Artificial Sequence: Synthetic oligonucleotide
  Sense strand starting at position 2774 of SEQ ID NO: 1879251
gccagaucacacuggcauu

SEQ ID NO: 1893977 - RNA, 19 nt, Artificial Sequence
  Description of Artificial Sequence: Synthetic oligonucleotide
  Antisense strand to SEQ ID NO: 1893976
aaugccagugugaucuggc

SEQ ID NO: 1893978 - RNA, 19 nt, Artificial Sequence
  Description of Artificial Sequence: Synthetic oligonucleotide
  Sense strand starting at position 2855 of SEQ ID NO: 1879251
gaaauauggcagugauacg

SEQ ID NO: 1893979 - RNA, 19 nt, Artificial Sequence
  Description of Artificial Sequence: Synthetic oligonucleotide
  Antisense strand to SEQ ID NO: 1893978
cguaucacugccauauuuc

SEQ ID NO: 1893980 - RNA, 19 nt, Artificial Sequence
  Description of Artificial Sequence: Synthetic oligonucleotide
  Sense strand starting at position 2863 of SEQ ID NO: 1879251
gcagugauacgguagggaa

SEQ ID NO: 1893981 - RNA, 19 nt, Artificial Sequence
  Description of Artificial Sequence: Synthetic oligonucleotide
  Antisense strand to SEQ ID NO: 1893980
uucccuaccguaucacugc

SEQ ID NO: 1893982 - RNA, 19 nt, Artificial Sequence
  Description of Artificial Sequence: Synthetic oligonucleotide
  Sense strand starting at position 2979 of SEQ ID NO: 1879251
uggagucuaggccagagau

SEQ ID NO: 1893983 - RNA, 19 nt, Artificial Sequence
  Description of Artificial Sequence: Synthetic oligonucleotide
  Antisense strand to SEQ ID NO: 1893982
aucucuggccuagacucca

SEQ ID NO: 1893984 - RNA, 19 nt, Artificial Sequence
  Description of Artificial Sequence: Synthetic oligonucleotide
  Sense strand starting at position 2981 of SEQ ID NO: 1879251
gagucuaggccagagauuc

SEQ ID NO: 1893985 - RNA, 19 nt, Artificial Sequence
  Description of Artificial Sequence: Synthetic oligonucleotide
  Antisense strand to SEQ ID NO: 1893984
gaaucucuggccuagacuc

SEQ ID NO: 1893986 - RNA, 19 nt, Artificial Sequence
  Description of Artificial Sequence: Synthetic oligonucleotide
  Sense strand starting at position 3002 of SEQ ID NO: 1879251
ugaggcuuguagccagaga

SEQ ID NO: 1893987 - RNA, 19 nt, Artificial Sequence
  Description of Artificial Sequence: Synthetic oligonucleotide
  Antisense strand to SEQ ID NO: 1893986
ucucuggcuacaagccuca

SEQ ID NO: 1893988 - RNA, 19 nt, Artificial Sequence
  Description of Artificial Sequence: Synthetic oligonucleotide
  Sense strand starting at position 3110 of SEQ ID NO: 1879251
gcaaaucaggacuguguaa

SEQ ID NO: 1893989 - RNA, 19 nt, Artificial Sequence
  Description of Artificial Sequence: Synthetic oligonucleotide
  Antisense strand to SEQ ID NO: 1893988
uuacacaguccugauuugc

SEQ ID NO: 1893990 - RNA, 19 nt, Artificial Sequence
  Description of Artificial Sequence: Synthetic oligonucleotide
  Sense strand starting at position 3159 of SEQ ID NO: 1879251
gcuucagguccaugggaga

SEQ ID NO: 1893991 - RNA, 19 nt, Artificial Sequence
  Description of Artificial Sequence: Synthetic oligonucleotide
  Antisense strand to SEQ ID NO: 1893990
ucucccauggaccugaagc

SEQ ID NO: 1893992 - RNA, 19 nt, Artificial Sequence
  Description of Artificial Sequence: Synthetic oligonucleotide
  Sense strand starting at position 3209 of SEQ ID NO: 1879251
gacagauguccacguggag

SEQ ID NO: 1893993 - RNA, 19 nt, Artificial Sequence
  Description of Artificial Sequence: Synthetic oligonucleotide
  Antisense strand to SEQ ID NO: 1893992
cuccacguggacaucuguc

SEQ ID NO: 1893994 - RNA, 19 nt, Artificial Sequence
  Description of Artificial Sequence: Synthetic oligonucleotide
  Sense strand starting at position 3398 of SEQ ID NO: 1879251
aguaaagagaacugauguu

SEQ ID NO: 1893995 - RNA, 19 nt, Artificial Sequence
  Description of Artificial Sequence: Synthetic oligonucleotide
  Antisense strand to SEQ ID NO: 1893994
aacaucaguucucuuuacu

SEQ ID NO: 1893996 - RNA, 19 nt, Artificial Sequence
  Description of Artificial Sequence: Synthetic oligonucleotide
  Sense strand starting at position 3770 of SEQ ID NO: 1879251
aggaauguuugguuaagca

SEQ ID NO: 1893997 - RNA, 19 nt, Artificial Sequence
  Description of Artificial Sequence: Synthetic oligonucleotide
  Antisense strand to SEQ ID NO: 1893996
ugcuuaaccaaacauuccu

SEQ ID NO: 1893998 - RNA, 19 nt, Artificial Sequence
  Description of Artificial Sequence: Synthetic oligonucleotide
  Sense strand starting at position 3779 of SEQ ID NO: 1879251
ugguuaagcaaaugaauga

SEQ ID NO: 1893999 - RNA, 19 nt, Artificial Sequence
  Description of Artificial Sequence: Synthetic oligonucleotide
  Antisense strand to SEQ ID NO: 1893998
ucauucauuugcuuaacca

SEQ ID NO: 1894000 - RNA, 19 nt, Artificial Sequence
  Description of Artificial Sequence: Synthetic oligonucleotide
  Sense strand starting at position 3900 of SEQ ID NO: 1879251
aggguuggccuguaaugaa

SEQ ID NO: 1894001 - RNA, 19 nt, Artificial Sequence
  Description of Artificial Sequence: Synthetic oligonucleotide
  Antisense strand to SEQ ID NO: 1894000
uucauuacaggccaacccu

SEQ ID NO: 1894002 - RNA, 19 nt, Artificial Sequence
  Description of Artificial Sequence: Synthetic oligonucleotide
  Sense strand starting at position 3939 of SEQ ID NO: 1879251
ugagacuccuagucuaaca

SEQ ID NO: 1894003 - RNA, 19 nt, Artificial Sequence
  Description of Artificial Sequence: Synthetic oligonucleotide
  Antisense strand to SEQ ID NO: 1894002
uguuagacuaggagucuca

SEQ ID NO: 1894004 - RNA, 19 nt, Artificial Sequence
  Description of Artificial Sequence: Synthetic oligonucleotide
  Sense strand starting at position 99 of SEQ ID NO: 1879252
gucugagguaaguaaaugu

SEQ ID NO: 1894005 - RNA, 19 nt, Artificial Sequence
  Description of Artificial Sequence: Synthetic oligonucleotide
  Antisense strand to SEQ ID NO: 1894004
acauuuacuuaccucagac

SEQ ID NO: 1894006 - RNA, 19 nt, Artificial Sequence
  Description of Artificial Sequence: Synthetic oligonucleotide
  Sense strand starting at position 103 of SEQ ID NO: 1879252
gagguaaguaaaugugaug

SEQ ID NO: 1894007 - RNA, 19 nt, Artificial Sequence
  Description of Artificial Sequence: Synthetic oligonucleotide
  Antisense strand to SEQ ID NO: 1894006
caucacauuuacuuaccuc

SEQ ID NO: 1894008 - RNA, 19 nt, Artificial Sequence
  Description of Artificial Sequence: Synthetic oligonucleotide
  Sense strand starting at position 109 of SEQ ID NO: 1879252
aguaaaugugauggaagca

SEQ ID NO: 1894009 - RNA, 19 nt, Artificial Sequence
  Description of Artificial Sequence: Synthetic oligonucleotide
  Antisense strand to SEQ ID NO: 1894008
ugcuuccaucacauuuacu

SEQ ID NO: 1894010 - RNA, 19 nt, Artificial Sequence
  Description of Artificial Sequence: Synthetic oligonucleotide
  Sense strand starting at position 110 of SEQ ID NO: 1879252
guaaaugugauggaagcau

SEQ ID NO: 1894011 - RNA, 19 nt, Artificial Sequence
  Description of Artificial Sequence: Synthetic oligonucleotide
  Antisense strand to SEQ ID NO: 1894010
augcuuccaucacauuuac

SEQ ID NO: 1894012 - RNA, 19 nt, Artificial Sequence
  Description of Artificial Sequence: Synthetic oligonucleotide
  Sense strand starting at position 166 of SEQ ID NO: 1879252
ggaaauggaucagagaauc

SEQ ID NO: 1894013 - RNA, 19 nt, Artificial Sequence
  Description of Artificial Sequence: Synthetic oligonucleotide
  Antisense strand to SEQ ID NO: 1894012
gauucucugauccauuucc

SEQ ID NO: 1894014 - RNA, 19 nt, Artificial Sequence
  Description of Artificial Sequence: Synthetic oligonucleotide
  Sense strand starting at position 205 of SEQ ID NO: 1879252
gaguccugacuaugauguu

SEQ ID NO: 1894015 - RNA, 19 nt, Artificial Sequence
  Description of Artificial Sequence: Synthetic oligonucleotide
  Antisense strand to SEQ ID NO: 1894014
aacaucauagucaggacuc

SEQ ID NO: 1894016 - RNA, 19 nt, Artificial Sequence
  Description of Artificial Sequence: Synthetic oligonucleotide
  Sense strand starting at position 389 of SEQ ID NO: 1879252
ugacauagucugggucaug

SEQ ID NO: 1894017 - RNA, 19 nt, Artificial Sequence
  Description of Artificial Sequence: Synthetic oligonucleotide
  Antisense strand to SEQ ID NO: 1894016
caugacccagacuauguca

SEQ ID NO: 1894018 - RNA, 19 nt, Artificial Sequence
  Description of Artificial Sequence: Synthetic oligonucleotide
  Sense strand starting at position 392 of SEQ ID NO: 1879252
cauagucugggucauggau

SEQ ID NO: 1894019 - RNA, 19 nt, Artificial Sequence
  Description of Artificial Sequence: Synthetic oligonucleotide
  Antisense strand to SEQ ID NO: 1894018
auccaugacccagacuaug

SEQ ID NO: 1894020 - RNA, 19 nt, Artificial Sequence
  Description of Artificial Sequence: Synthetic oligonucleotide
  Sense strand starting at position 464 of SEQ ID NO: 1879252
uuuccaucagcucaggaua

SEQ ID NO: 1894021 - RNA, 19 nt, Artificial Sequence
  Description of Artificial Sequence: Synthetic oligonucleotide
  Antisense strand to SEQ ID NO: 1894020
uauccugagcugauggaaa

SEQ ID NO: 1894022 - RNA, 19 nt, Artificial Sequence
  Description of Artificial Sequence: Synthetic oligonucleotide
  Sense strand starting at position 512 of SEQ ID NO: 1879252
gucauaagauaagucauga

SEQ ID NO: 1894023 - RNA, 19 nt, Artificial Sequence
  Description of Artificial Sequence: Synthetic oligonucleotide
  Antisense strand to SEQ ID NO: 1894022
ucaugacuuaucuuaugac

SEQ ID NO: 1894024 - RNA, 19 nt, Artificial Sequence
  Description of Artificial Sequence: Synthetic oligonucleotide
  Sense strand starting at position 523 of SEQ ID NO: 1879252
agucaugacugguuaguaa

SEQ ID NO: 1894025 - RNA, 19 nt, Artificial Sequence
  Description of Artificial Sequence: Synthetic oligonucleotide
  Antisense strand to SEQ ID NO: 1894024
uuacuaaccagucaugacu

SEQ ID NO: 1894026 - RNA, 19 nt, Artificial Sequence
  Description of Artificial Sequence: Synthetic oligonucleotide
  Sense strand starting at position 544 of SEQ ID NO: 1879252
guugucaucccaggaggau

SEQ ID NO: 1894027 - RNA, 19 nt, Artificial Sequence
  Description of Artificial Sequence: Synthetic oligonucleotide
  Antisense strand to SEQ ID NO: 1894026
auccuccugggaugacaac

SEQ ID NO: 1894028 - RNA, 19 nt, Artificial Sequence
  Description of Artificial Sequence: Synthetic oligonucleotide
  Sense strand starting at position 559 of SEQ ID NO: 1879252
ggaucccuuucccucagau

SEQ ID NO: 1894029 - RNA, 19 nt, Artificial Sequence
  Description of Artificial Sequence: Synthetic oligonucleotide
  Antisense strand to SEQ ID NO: 1894028
aucugagggaaagggaucc

SEQ ID NO: 1894030 - RNA, 19 nt, Artificial Sequence
  Description of Artificial Sequence: Synthetic oligonucleotide
  Sense strand starting at position 575 of SEQ ID NO: 1879252
gauggaccaugugcuaaau

SEQ ID NO: 1894031 - RNA, 19 nt, Artificial Sequence
  Description of Artificial Sequence: Synthetic oligonucleotide
  Antisense strand to SEQ ID NO: 1894030
auuuagcacaugguccauc

SEQ ID NO: 1894032 - RNA, 19 nt, Artificial Sequence
  Description of Artificial Sequence: Synthetic oligonucleotide
  Sense strand starting at position 802 of SEQ ID NO: 1879252
cgucauuagggccaugauu

SEQ ID NO: 1894033 - RNA, 19 nt, Artificial Sequence
  Description of Artificial Sequence: Synthetic oligonucleotide
  Antisense strand to SEQ ID NO: 1894032
aaucauggcccuaaugacg

SEQ ID NO: 1894034 - RNA, 19 nt, Artificial Sequence
  Description of Artificial Sequence: Synthetic oligonucleotide
  Sense strand starting at position 913 of SEQ ID NO: 1879252
aagguaaaccguuaguaac

SEQ ID NO: 1894035 - RNA, 19 nt, Artificial Sequence
  Description of Artificial Sequence: Synthetic oligonucleotide
  Antisense strand to SEQ ID NO: 1894034
guuacuaacgguuuaccuu

SEQ ID NO: 1894036 - RNA, 19 nt, Artificial Sequence
  Description of Artificial Sequence: Synthetic oligonucleotide
  Sense strand starting at position 947 of SEQ ID NO: 1879252
ucaucuuugcucuggauau

SEQ ID NO: 1894037 - RNA, 19 nt, Artificial Sequence
  Description of Artificial Sequence: Synthetic oligonucleotide
  Antisense strand to SEQ ID NO: 1894036
auauccagagcaaagauga

SEQ ID NO: 1894038 - RNA, 19 nt, Artificial Sequence
  Description of Artificial Sequence: Synthetic oligonucleotide
  Sense strand starting at position 1424 of SEQ ID NO: 1879252
cuuugcauauuuccuguua

SEQ ID NO: 1894039 - RNA, 19 nt, Artificial Sequence
  Description of Artificial Sequence: Synthetic oligonucleotide
  Antisense strand to SEQ ID NO: 1894038
uaacaggaaauaugcaaag

SEQ ID NO: 1894040 - RNA, 19 nt, Artificial Sequence
  Description of Artificial Sequence: Synthetic oligonucleotide
  Sense strand starting at position 1441 of SEQ ID NO: 1879252
uaacaauuggcuuggucua

SEQ ID NO: 1894041 - RNA, 19 nt, Artificial Sequence
  Description of Artificial Sequence: Synthetic oligonucleotide
  Antisense strand to SEQ ID NO: 1894040
uagaccaagccaauuguua

SEQ ID NO: 1894042 - RNA, 19 nt, Artificial Sequence
  Description of Artificial Sequence: Synthetic oligonucleotide
  Sense strand starting at position 1442 of SEQ ID NO: 1879252
aacaauuggcuuggucuau

SEQ ID NO: 1894043 - RNA, 19 nt, Artificial Sequence
  Description of Artificial Sequence: Synthetic oligonucleotide
  Antisense strand to SEQ ID NO: 1894042
auagaccaagccaauuguu

SEQ ID NO: 1894044 - RNA, 19 nt, Artificial Sequence
  Description of Artificial Sequence: Synthetic oligonucleotide
  Sense strand starting at position 1443 of SEQ ID NO: 1879252
acaauuggcuuggucuauu

SEQ ID NO: 1894045 - RNA, 19 nt, Artificial Sequence
  Description of Artificial Sequence: Synthetic oligonucleotide
  Antisense strand to SEQ ID NO: 1894044
aauagaccaagccaauugu

SEQ ID NO: 1894046 - RNA, 19 nt, Artificial Sequence
  Description of Artificial Sequence: Synthetic oligonucleotide
  Sense strand starting at position 1662 of SEQ ID NO: 1879252
ucaaaugagauugguguga

SEQ ID NO: 1894047 - RNA, 19 nt, Artificial Sequence
  Description of Artificial Sequence: Synthetic oligonucleotide
  Antisense strand to SEQ ID NO: 1894046
ucacaccaaucucauuuga

SEQ ID NO: 1894048 - RNA, 19 nt, Artificial Sequence
  Description of Artificial Sequence: Synthetic oligonucleotide
  Sense strand starting at position 1666 of SEQ ID NO: 1879252
augagauuggugugaaagc

SEQ ID NO: 1894049 - RNA, 19 nt, Artificial Sequence
  Description of Artificial Sequence: Synthetic oligonucleotide
  Antisense strand to SEQ ID NO: 1894048
gcuuucacaccaaucucau

SEQ ID NO: 1894050 - RNA, 19 nt, Artificial Sequence
  Description of Artificial Sequence: Synthetic oligonucleotide
  Sense strand starting at position 1782 of SEQ ID NO: 1879252
ccuccuuguggccauagaa

SEQ ID NO: 1894051 - RNA, 19 nt, Artificial Sequence
  Description of Artificial Sequence: Synthetic oligonucleotide
  Antisense strand to SEQ ID NO: 1894050
uucuauggccacaaggagg

SEQ ID NO: 1894052 - RNA, 19 nt, Artificial Sequence
  Description of Artificial Sequence: Synthetic oligonucleotide
  Sense strand starting at position 1929 of SEQ ID NO: 1879252
ccaugaguuccugaagcca

SEQ ID NO: 1894053 - RNA, 19 nt, Artificial Sequence
  Description of Artificial Sequence: Synthetic oligonucleotide
  Antisense strand to SEQ ID NO: 1894052
uggcuucaggaacucaugg

SEQ ID NO: 1894054 - RNA, 19 nt, Artificial Sequence
  Description of Artificial Sequence: Synthetic oligonucleotide
  Sense strand starting at position 1945 of SEQ ID NO: 1879252
ccaggagggcuccauucuu

SEQ ID NO: 1894055 - RNA, 19 nt, Artificial Sequence
  Description of Artificial Sequence: Synthetic oligonucleotide
  Antisense strand to SEQ ID NO: 1894054
aagaauggagcccuccugg

SEQ ID NO: 1894056 - RNA, 19 nt, Artificial Sequence
  Description of Artificial Sequence: Synthetic oligonucleotide
  Sense strand starting at position 1951 of SEQ ID NO: 1879252
gggcuccauucuucucaga

SEQ ID NO: 1894057 - RNA, 19 nt, Artificial Sequence
  Description of Artificial Sequence: Synthetic oligonucleotide
  Antisense strand to SEQ ID NO: 1894056
ucugagaagaauggagccc

SEQ ID NO: 1894058 - RNA, 19 nt, Artificial Sequence
  Description of Artificial Sequence: Synthetic oligonucleotide
  Sense strand starting at position 1970 of SEQ ID NO: 1879252
gguccugagcucuggaaag

SEQ ID NO: 1894059 - RNA, 19 nt, Artificial Sequence
  Description of Artificial Sequence: Synthetic oligonucleotide
  Antisense strand to SEQ ID NO: 1894058
cuuuccagagcucaggacc

SEQ ID NO: 1894060 - RNA, 19 nt, Artificial Sequence
  Description of Artificial Sequence: Synthetic oligonucleotide
  Sense strand starting at position 2011 of SEQ ID NO: 1879252
gaaugcaggucucucauaa

SEQ ID NO: 1894061 - RNA, 19 nt, Artificial Sequence
  Description of Artificial Sequence: Synthetic oligonucleotide
  Antisense strand to SEQ ID NO: 1894060
uuaugagagaccugcauuc

SEQ ID NO: 1894062 - RNA, 19 nt, Artificial Sequence
  Description of Artificial Sequence: Synthetic oligonucleotide
  Sense strand starting at position 2112 of SEQ ID NO: 1879252
uuaagucugcagggugaaa

SEQ ID NO: 1894063 - RNA, 19 nt, Artificial Sequence
  Description of Artificial Sequence: Synthetic oligonucleotide
  Antisense strand to SEQ ID NO: 1894062
uuucacccugcagacuuaa

SEQ ID NO: 1894064 - RNA, 19 nt, Artificial Sequence
  Description of Artificial Sequence: Synthetic oligonucleotide
  Sense strand starting at position 2493 of SEQ ID NO: 1879252
ucugaugauuguguuaacu

SEQ ID NO: 1894065 - RNA, 19 nt, Artificial Sequence
  Description of Artificial Sequence: Synthetic oligonucleotide
  Antisense strand to SEQ ID NO: 1894064
aguuaacacaaucaucaga

SEQ ID NO: 1894066 - RNA, 19 nt, Artificial Sequence
  Description of Artificial Sequence: Synthetic oligonucleotide
  Sense strand starting at position 3283 of SEQ ID NO: 1879252
gauaucuagugugccaaca

SEQ ID NO: 1894067 - RNA, 19 nt, Artificial Sequence
  Description of Artificial Sequence: Synthetic oligonucleotide
  Antisense strand to SEQ ID NO: 1894066
uguuggcacacuagauauc

SEQ ID NO: 1894068 - RNA, 19 nt, Artificial Sequence
  Description of Artificial Sequence: Synthetic oligonucleotide
  Sense strand starting at position 3389 of SEQ ID NO: 1879252
acuuguucggcuccgugau

SEQ ID NO: 1894069 - RNA, 19 nt, Artificial Sequence
  Description of Artificial Sequence: Synthetic oligonucleotide
  Antisense strand to SEQ ID NO: 1894068
aucacggagccgaacaagu

SEQ ID NO: 1894070 - RNA, 19 nt, Artificial Sequence
  Description of Artificial Sequence: Synthetic oligonucleotide
  Sense strand starting at position 3428 of SEQ ID NO: 1879252
uauugucuggguuaacuau

SEQ ID NO: 1894071 - RNA, 19 nt, Artificial Sequence
  Description of Artificial Sequence: Synthetic oligonucleotide
  Antisense strand to SEQ ID NO: 1894070
auaguuaacccagacaaua

SEQ ID NO: 1894072 - RNA, 19 nt, Artificial Sequence
  Description of Artificial Sequence: Synthetic oligonucleotide
  Sense strand starting at position 3512 of SEQ ID NO: 1879252
ggguucaaguguccaugga

SEQ ID NO: 1894073 - RNA, 19 nt, Artificial Sequence
  Description of Artificial Sequence: Synthetic oligonucleotide
  Antisense strand to SEQ ID NO: 1894072
uccauggacacuugaaccc

SEQ ID NO: 1894074 - RNA, 19 nt, Artificial Sequence
  Description of Artificial Sequence: Synthetic oligonucleotide
  Sense strand starting at position 3513 of SEQ ID NO: 1879252
gguucaaguguccauggaa

SEQ ID NO: 1894075 - RNA, 19 nt, Artificial Sequence
  Description of Artificial Sequence: Synthetic oligonucleotide
  Antisense strand to SEQ ID NO: 1894074
uuccauggacacuugaacc

SEQ ID NO: 1894076 - RNA, 19 nt, Artificial Sequence
  Description of Artificial Sequence: Synthetic oligonucleotide
  Sense strand starting at position 3753 of SEQ ID NO: 1879252
ugaaucuugugacucucua

SEQ ID NO: 1894077 - RNA, 19 nt, Artificial Sequence
  Description of Artificial Sequence: Synthetic oligonucleotide
  Antisense strand to SEQ ID NO: 1894076
uagagagucacaagauuca

SEQ ID NO: 1894078 - RNA, 19 nt, Artificial Sequence
  Description of Artificial Sequence: Synthetic oligonucleotide
  Sense strand starting at position 3793 of SEQ ID NO: 1879252
ccugcauggccuucguuau

SEQ ID NO: 1894079 - RNA, 19 nt, Artificial Sequence
  Description of Artificial Sequence: Synthetic oligonucleotide
  Antisense strand to SEQ ID NO: 1894078
auaacgaaggccaugcagg

SEQ ID NO: 1894080 - RNA, 19 nt, Artificial Sequence
  Description of Artificial Sequence: Synthetic oligonucleotide
  Sense strand starting at position 3894 of SEQ ID NO: 1879252
aaggucacucccugaugau

SEQ ID NO: 1894081 - RNA, 19 nt, Artificial Sequence
  Description of Artificial Sequence: Synthetic oligonucleotide
  Antisense strand to SEQ ID NO: 1894080
aucaucagggagugaccuu

SEQ ID NO: 1894082 - RNA, 19 nt, Artificial Sequence
  Description of Artificial Sequence: Synthetic oligonucleotide
  Sense strand starting at position 3895 of SEQ ID NO: 1879252
aggucacucccugaugauc

SEQ ID NO: 1894083 - RNA, 19 nt, Artificial Sequence
  Description of Artificial Sequence: Synthetic oligonucleotide
  Antisense strand to SEQ ID NO: 1894082
gaucaucagggagugaccu

SEQ ID NO: 1894084 - RNA, 19 nt, Artificial Sequence
  Description of Artificial Sequence: Synthetic oligonucleotide
  Sense strand starting at position 80 of SEQ ID NO: 1879253
uucguauuccuagaaacaa

SEQ ID NO: 1894085 - RNA, 19 nt, Artificial Sequence
  Description of Artificial Sequence: Synthetic oligonucleotide
  Antisense strand to SEQ ID NO: 1894084
uuguuucuaggaauacgaa

SEQ ID NO: 1894086 - RNA, 19 nt, Artificial Sequence
  Description of Artificial Sequence: Synthetic oligonucleotide
  Sense strand starting at position 193 of SEQ ID NO: 1879253
aaaggugacuguuuccuca

SEQ ID NO: 1894087 - RNA, 19 nt, Artificial Sequence
  Description of Artificial Sequence: Synthetic oligonucleotide
  Antisense strand to SEQ ID NO: 1894086
ugaggaaacagucaccuuu

SEQ ID NO: 1894088 - RNA, 19 nt, Artificial Sequence
  Description of Artificial Sequence: Synthetic oligonucleotide
  Sense strand starting at position 197 of SEQ ID NO: 1879253
gugacuguuuccucaauuu

SEQ ID NO: 1894089 - RNA, 19 nt, Artificial Sequence
  Description of Artificial Sequence: Synthetic oligonucleotide
  Antisense strand to SEQ ID NO: 1894088
aaauugaggaaacagucac

SEQ ID NO: 1894090 - RNA, 19 nt, Artificial Sequence
  Description of Artificial Sequence: Synthetic oligonucleotide
  Sense strand starting at position 591 of SEQ ID NO: 1879253
uaaccaugugagcagguua

SEQ ID NO: 1894091 - RNA, 19 nt, Artificial Sequence
  Description of Artificial Sequence: Synthetic oligonucleotide
  Antisense strand to SEQ ID NO: 1894090
uaaccugcucacaugguua

SEQ ID NO: 1894092 - RNA, 19 nt, Artificial Sequence
  Description of Artificial Sequence: Synthetic oligonucleotide
  Sense strand starting at position 596 of SEQ ID NO: 1879253
augugagcagguuauagaa

SEQ ID NO: 1894093 - RNA, 19 nt, Artificial Sequence
  Description of Artificial Sequence: Synthetic oligonucleotide
  Antisense strand to SEQ ID NO: 1894092
uucuauaaccugcucacau

SEQ ID NO: 1894094 - RNA, 19 nt, Artificial Sequence
  Description of Artificial Sequence: Synthetic oligonucleotide
  Sense strand starting at position 680 of SEQ ID NO: 1879253
ugguucuugguaggagaua

SEQ ID NO: 1894095 - RNA, 19 nt, Artificial Sequence
  Description of Artificial Sequence: Synthetic oligonucleotide
  Antisense strand to SEQ ID NO: 1894094
uaucuccuaccaagaacca

SEQ ID NO: 1894096 - RNA, 19 nt, Artificial Sequence
  Description of Artificial Sequence: Synthetic oligonucleotide
  Sense strand starting at position 987 of SEQ ID NO: 1879253
uuggcaauggacugaaagu

SEQ ID NO: 1894097 - RNA, 19 nt, Artificial Sequence
  Description of Artificial Sequence: Synthetic oligonucleotide
  Antisense strand to SEQ ID NO: 1894096
acuuucaguccauugccaa

SEQ ID NO: 1894098 - RNA, 19 nt, Artificial Sequence
  Description of Artificial Sequence: Synthetic oligonucleotide
  Sense strand starting at position 1029 of SEQ ID NO: 1879253
guugaaaucuuauucccag

SEQ ID NO: 1894099 - RNA, 19 nt, Artificial Sequence
  Description of Artificial Sequence: Synthetic oligonucleotide
  Antisense strand to SEQ ID NO: 1894098
cugggaauaagauuucaac

SEQ ID NO: 1894100 - RNA, 19 nt, Artificial Sequence
  Description of Artificial Sequence: Synthetic oligonucleotide
  Sense strand starting at position 1077 of SEQ ID NO: 1879253
ccagguaauuaggucauga

SEQ ID NO: 1894101 - RNA, 19 nt, Artificial Sequence
  Description of Artificial Sequence: Synthetic oligonucleotide
  Antisense strand to SEQ ID NO: 1894100
ucaugaccuaauuaccugg

SEQ ID NO: 1894102 - RNA, 19 nt, Artificial Sequence
  Description of Artificial Sequence: Synthetic oligonucleotide
  Sense strand starting at position 1154 of SEQ ID NO: 1879253
ugcaaucuguaacccagaa

SEQ ID NO: 1894103 - RNA, 19 nt, Artificial Sequence
  Description of Artificial Sequence: Synthetic oligonucleotide
  Antisense strand to SEQ ID NO: 1894102
uucuggguuacagauugca

SEQ ID NO: 1894104 - RNA, 19 nt, Artificial Sequence
  Description of Artificial Sequence: Synthetic oligonucleotide
  Sense strand starting at position 1331 of SEQ ID NO: 1879253
cugaguaaaguccaugcuu

SEQ ID NO: 1894105 - RNA, 19 nt, Artificial Sequence
  Description of Artificial Sequence: Synthetic oligonucleotide
  Antisense strand to SEQ ID NO: 1894104
aagcauggacuuuacucag

SEQ ID NO: 1894106 - RNA, 19 nt, Artificial Sequence
  Description of Artificial Sequence: Synthetic oligonucleotide
  Sense strand starting at position 1489 of SEQ ID NO: 1879253
gucagugggaacgaguauu

SEQ ID NO: 1894107 - RNA, 19 nt, Artificial Sequence
  Description of Artificial Sequence: Synthetic oligonucleotide
  Antisense strand to SEQ ID NO: 1894106
aauacucguucccacugac

SEQ ID NO: 1894108 - RNA, 19 nt, Artificial Sequence
  Description of Artificial Sequence: Synthetic oligonucleotide
  Sense strand starting at position 2049 of SEQ ID NO: 1879253
uuccaaacacuguguggaa

SEQ ID NO: 1894109 - RNA, 19 nt, Artificial Sequence
  Description of Artificial Sequence: Synthetic oligonucleotide
  Antisense strand to SEQ ID NO: 1894108
uuccacacaguguuuggaa

SEQ ID NO: 1894110 - RNA, 19 nt, Artificial Sequence
  Description of Artificial Sequence: Synthetic oligonucleotide
  Sense strand starting at position 2050 of SEQ ID NO: 1879253
uccaaacacuguguggaau

SEQ ID NO: 1894111 - RNA, 19 nt, Artificial Sequence
  Description of Artificial Sequence: Synthetic oligonucleotide
  Antisense strand to SEQ ID NO: 1894110
auuccacacaguguuugga

SEQ ID NO: 1894112 - RNA, 19 nt, Artificial Sequence
  Description of Artificial Sequence: Synthetic oligonucleotide
  Sense strand starting at position 2051 of SEQ ID NO: 1879253
ccaaacacuguguggaauu

SEQ ID NO: 1894113 - RNA, 19 nt, Artificial Sequence
  Description of Artificial Sequence: Synthetic oligonucleotide
  Antisense strand to SEQ ID NO: 1894112
aauuccacacaguguuugg

SEQ ID NO: 1894114 - RNA, 19 nt, Artificial Sequence
  Description of Artificial Sequence: Synthetic oligonucleotide
  Sense strand starting at position 2061 of SEQ ID NO: 1879253
uguggaauuccuuaagcau

SEQ ID NO: 1894115 - RNA, 19 nt, Artificial Sequence
  Description of Artificial Sequence: Synthetic oligonucleotide
  Antisense strand to SEQ ID NO: 1894114
augcuuaaggaauuccaca

SEQ ID NO: 1894116 - RNA, 19 nt, Artificial Sequence
  Description of Artificial Sequence: Synthetic oligonucleotide
  Sense strand starting at position 2064 of SEQ ID NO: 1879253
ggaauuccuuaagcaucuu

SEQ ID NO: 1894117 - RNA, 19 nt, Artificial Sequence
  Description of Artificial Sequence: Synthetic oligonucleotide
  Antisense strand to SEQ ID NO: 1894116
aagaugcuuaaggaauucc

SEQ ID NO: 1894118 - RNA, 19 nt, Artificial Sequence
  Description of Artificial Sequence: Synthetic oligonucleotide
  Sense strand starting at position 2124 of SEQ ID NO: 1879253
agagaauggcuuuggaguc

SEQ ID NO: 1894119 - RNA, 19 nt, Artificial Sequence
  Description of Artificial Sequence: Synthetic oligonucleotide
  Antisense strand to SEQ ID NO: 1894118
gacuccaaagccauucucu

SEQ ID NO: 1894120 - RNA, 19 nt, Artificial Sequence
  Description of Artificial Sequence: Synthetic oligonucleotide
  Sense strand starting at position 2161 of SEQ ID NO: 1879253
uccugacucucagugacua

SEQ ID NO: 1894121 - RNA, 19 nt, Artificial Sequence
  Description of Artificial Sequence: Synthetic oligonucleotide
  Antisense strand to SEQ ID NO: 1894120
uagucacugagagucagga

SEQ ID NO: 1894122 - RNA, 19 nt, Artificial Sequence
  Description of Artificial Sequence: Synthetic oligonucleotide
  Sense strand starting at position 2261 of SEQ ID NO: 1879253
ucauaugagugucucaaau

SEQ ID NO: 1894123 - RNA, 19 nt, Artificial Sequence
  Description of Artificial Sequence: Synthetic oligonucleotide
  Antisense strand to SEQ ID NO: 1894122
auuugagacacucauauga

SEQ ID NO: 1894124 - RNA, 19 nt, Artificial Sequence
  Description of Artificial Sequence: Synthetic oligonucleotide
  Sense strand starting at position 2329 of SEQ ID NO: 1879253
auauguuaguucccuugaa

SEQ ID NO: 1894125 - RNA, 19 nt, Artificial Sequence
  Description of Artificial Sequence: Synthetic oligonucleotide
  Antisense strand to SEQ ID NO: 1894124
uucaagggaacuaacauau

SEQ ID NO: 1894126 - RNA, 19 nt, Artificial Sequence
  Description of Artificial Sequence: Synthetic oligonucleotide
  Sense strand starting at position 2368 of SEQ ID NO: 1879253
uguuacauucgugaaauac

SEQ ID NO: 1894127 - RNA, 19 nt, Artificial Sequence
  Description of Artificial Sequence: Synthetic oligonucleotide
  Antisense strand to SEQ ID NO: 1894126
guauuucacgaauguaaca

SEQ ID NO: 1894128 - RNA, 19 nt, Artificial Sequence
  Description of Artificial Sequence: Synthetic oligonucleotide
  Sense strand starting at position 2422 of SEQ ID NO: 1879253
acccauauccuguauuagu

SEQ ID NO: 1894129 - RNA, 19 nt, Artificial Sequence
  Description of Artificial Sequence: Synthetic oligonucleotide
  Antisense strand to SEQ ID NO: 1894128
acuaauacaggauaugggu

SEQ ID NO: 1894130 - RNA, 19 nt, Artificial Sequence
  Description of Artificial Sequence: Synthetic oligonucleotide
  Sense strand starting at position 2649 of SEQ ID NO: 1879253
agguuuauuagaggucuuu

SEQ ID NO: 1894131 - RNA, 19 nt, Artificial Sequence
  Description of Artificial Sequence: Synthetic oligonucleotide
  Antisense strand to SEQ ID NO: 1894130
aaagaccucuaauaaaccu

SEQ ID NO: 1894132 - RNA, 19 nt, Artificial Sequence
  Description of Artificial Sequence: Synthetic oligonucleotide
  Sense strand starting at position 2655 of SEQ ID NO: 1879253
auuagaggucuuugucuaa

SEQ ID NO: 1894133 - RNA, 19 nt, Artificial Sequence
  Description of Artificial Sequence: Synthetic oligonucleotide
  Antisense strand to SEQ ID NO: 1894132
uuagacaaagaccucuaau

SEQ ID NO: 1894134 - RNA, 19 nt, Artificial Sequence
  Description of Artificial Sequence: Synthetic oligonucleotide
  Sense strand starting at position 2658 of SEQ ID NO: 1879253
agaggucuuugucuaauag

SEQ ID NO: 1894135 - RNA, 19 nt, Artificial Sequence
  Description of Artificial Sequence: Synthetic oligonucleotide
  Antisense strand to SEQ ID NO: 1894134
cuauuagacaaagaccucu

SEQ ID NO: 1894136 - RNA, 19 nt, Artificial Sequence
  Description of Artificial Sequence: Synthetic oligonucleotide
  Sense strand starting at position 2659 of SEQ ID NO: 1879253
gaggucuuugucuaauagu

SEQ ID NO: 1894137 - RNA, 19 nt, Artificial Sequence
  Description of Artificial Sequence: Synthetic oligonucleotide
  Antisense strand to SEQ ID NO: 1894136
acuauuagacaaagaccuc

SEQ ID NO: 1894138 - RNA, 19 nt, Artificial Sequence
  Description of Artificial Sequence: Synthetic oligonucleotide
  Sense strand starting at position 2756 of SEQ ID NO: 1879253
guuccucacucgcuuauuu

SEQ ID NO: 1894139 - RNA, 19 nt, Artificial Sequence
  Description of Artificial Sequence: Synthetic oligonucleotide
  Antisense strand to SEQ ID NO: 1894138
aaauaagcgagugaggaac

SEQ ID NO: 1894140 - RNA, 19 nt, Artificial Sequence
  Description of Artificial Sequence: Synthetic oligonucleotide
  Sense strand starting at position 2863 of SEQ ID NO: 1879253
cagggaauguaguuaaacu

SEQ ID NO: 1894141 - RNA, 19 nt, Artificial Sequence
  Description of Artificial Sequence: Synthetic oligonucleotide
  Antisense strand to SEQ ID NO: 1894140
aguuuaacuacauucccug

SEQ ID NO: 1894142 - RNA, 19 nt, Artificial Sequence
  Description of Artificial Sequence: Synthetic oligonucleotide
  Sense strand starting at position 2876 of SEQ ID NO: 1879253
uaaacuaguuagucuggaa

SEQ ID NO: 1894143 - RNA, 19 nt, Artificial Sequence
  Description of Artificial Sequence: Synthetic oligonucleotide
  Antisense strand to SEQ ID NO: 1894142
uuccagacuaacuaguuua

SEQ ID NO: 1894144 - RNA, 19 nt, Artificial Sequence
  Description of Artificial Sequence: Synthetic oligonucleotide
  Sense strand starting at position 3004 of SEQ ID NO: 1879253
acuuucuagcucugaggaa

SEQ ID NO: 1894145 - RNA, 19 nt, Artificial Sequence
  Description of Artificial Sequence: Synthetic oligonucleotide
  Antisense strand to SEQ ID NO: 1894144
uuccucagagcuagaaagu

SEQ ID NO: 1894146 - RNA, 19 nt, Artificial Sequence
  Description of Artificial Sequence: Synthetic oligonucleotide
  Sense strand starting at position 3008 of SEQ ID NO: 1879253
ucuagcucugaggaauugu

SEQ ID NO: 1894147 - RNA, 19 nt, Artificial Sequence
  Description of Artificial Sequence: Synthetic oligonucleotide
  Antisense strand to SEQ ID NO: 1894146
acaauuccucagagcuaga

SEQ ID NO: 1894148 - RNA, 19 nt, Artificial Sequence
  Description of Artificial Sequence: Synthetic oligonucleotide
  Sense strand starting at position 3045 of SEQ ID NO: 1879253
ucuguaagaugagcauauu

SEQ ID NO: 1894149 - RNA, 19 nt, Artificial Sequence
  Description of Artificial Sequence: Synthetic oligonucleotide
  Antisense strand to SEQ ID NO: 1894148
aauaugcucaucuuacaga

SEQ ID NO: 1894150 - RNA, 19 nt, Artificial Sequence
  Description of Artificial Sequence: Synthetic oligonucleotide
  Sense strand starting at position 3046 of SEQ ID NO: 1879253
cuguaagaugagcauauua

SEQ ID NO: 1894151 - RNA, 19 nt, Artificial Sequence
  Description of Artificial Sequence: Synthetic oligonucleotide
  Antisense strand to SEQ ID NO: 1894150
uaauaugcucaucuuacag

SEQ ID NO: 1894152 - RNA, 19 nt, Artificial Sequence
  Description of Artificial Sequence: Synthetic oligonucleotide
  Sense strand starting at position 3441 of SEQ ID NO: 1879253
uagggaaguucuguucuca

SEQ ID NO: 1894153 - RNA, 19 nt, Artificial Sequence
  Description of Artificial Sequence: Synthetic oligonucleotide
  Antisense strand to SEQ ID NO: 1894152
ugagaacagaacuucccua

SEQ ID NO: 1894154 - RNA, 19 nt, Artificial Sequence
  Description of Artificial Sequence: Synthetic oligonucleotide
  Sense strand starting at position 3517 of SEQ ID NO: 1879253
gcagaagugccugauggaa

SEQ ID NO: 1894155 - RNA, 19 nt, Artificial Sequence
  Description of Artificial Sequence: Synthetic oligonucleotide
  Antisense strand to SEQ ID NO: 1894154
uuccaucaggcacuucugc

SEQ ID NO: 1894156 - RNA, 19 nt, Artificial Sequence
  Description of Artificial Sequence: Synthetic oligonucleotide
  Sense strand starting at position 3603 of SEQ ID NO: 1879253
ugcauuccauacuuggaau

SEQ ID NO: 1894157 - RNA, 19 nt, Artificial Sequence
  Description of Artificial Sequence: Synthetic oligonucleotide
  Antisense strand to SEQ ID NO: 1894156
auuccaaguauggaaugca

SEQ ID NO: 1894158 - RNA, 19 nt, Artificial Sequence
  Description of Artificial Sequence: Synthetic oligonucleotide
  Sense strand starting at position 3656 of SEQ ID NO: 1879253
uuaagaguugcccauguga

SEQ ID NO: 1894159 - RNA, 19 nt, Artificial Sequence
  Description of Artificial Sequence: Synthetic oligonucleotide
  Antisense strand to SEQ ID NO: 1894158
ucacaugggcaacucuuaa

SEQ ID NO: 1894160 - RNA, 19 nt, Artificial Sequence
  Description of Artificial Sequence: Synthetic oligonucleotide
  Sense strand starting at position 3862 of SEQ ID NO: 1879253
aguugucagccagaacuuu

SEQ ID NO: 1894161 - RNA, 19 nt, Artificial Sequence
  Description of Artificial Sequence: Synthetic oligonucleotide
  Antisense strand to SEQ ID NO: 1894160
aaaguucuggcugacaacu

SEQ ID NO: 1894162 - RNA, 19 nt, Artificial Sequence
  Description of Artificial Sequence: Synthetic oligonucleotide
  Sense strand starting at position 3954 of SEQ ID NO: 1879253
agaguuaggagguggaguu

SEQ ID NO: 1894163 - RNA, 19 nt, Artificial Sequence
  Description of Artificial Sequence: Synthetic oligonucleotide
  Antisense strand to SEQ ID NO: 1894162
aacuccaccuccuaacucu

SEQ ID NO: 1894164 - RNA, 19 nt, Artificial Sequence
  Description of Artificial Sequence: Synthetic oligonucleotide
  Sense strand starting at position 45 of SEQ ID NO: 1879255
accugaaagccucacgaaa

SEQ ID NO: 1894165 - RNA, 19 nt, Artificial Sequence
  Description of Artificial Sequence: Synthetic oligonucleotide
  Antisense strand to SEQ ID NO: 1894164
uuucgugaggcuuucaggu

SEQ ID NO: 1894166 - RNA, 19 nt, Artificial Sequence
  Description of Artificial Sequence: Synthetic oligonucleotide
  Sense strand starting at position 71 of SEQ ID NO: 1879255
uuauaaguauguucugacu

SEQ ID NO: 1894167 - RNA, 19 nt, Artificial Sequence
  Description of Artificial Sequence: Synthetic oligonucleotide
  Antisense strand to SEQ ID NO: 1894166
agucagaacauacuuauaa

SEQ ID NO: 1894168 - RNA, 19 nt, Artificial Sequence
  Description of Artificial Sequence: Synthetic oligonucleotide
  Sense strand starting at position 114 of SEQ ID NO: 1879255
gcugaaugcccaggauguu

SEQ ID NO: 1894169 - RNA, 19 nt, Artificial Sequence
  Description of Artificial Sequence: Synthetic oligonucleotide
  Antisense strand to SEQ ID NO: 1894168
aacauccugggcauucagc

SEQ ID NO: 1894170 - RNA, 19 nt, Artificial Sequence
  Description of Artificial Sequence: Synthetic oligonucleotide
  Sense strand starting at position 124 of SEQ ID NO: 1879255
caggauguuucuucugcua

SEQ ID NO: 1894171 - RNA, 19 nt, Artificial Sequence
  Description of Artificial Sequence: Synthetic oligonucleotide
  Antisense strand to SEQ ID NO: 1894170
uagcagaagaaacauccug

SEQ ID NO: 1894172 - RNA, 19 nt, Artificial Sequence
  Description of Artificial Sequence: Synthetic oligonucleotide
  Sense strand starting at position 530 of SEQ ID NO: 1879255
uuaagucauuuggagauac

SEQ ID NO: 1894173 - RNA, 19 nt, Artificial Sequence
  Description of Artificial Sequence: Synthetic oligonucleotide
  Antisense strand to SEQ ID NO: 1894172
guaucuccaaaugacuuaa

SEQ ID NO: 1894174 - RNA, 19 nt, Artificial Sequence
  Description of Artificial Sequence: Synthetic oligonucleotide
  Sense strand starting at position 643 of SEQ ID NO: 1879255
acucaagcucuuugggaaa

SEQ ID NO: 1894175 - RNA, 19 nt, Artificial Sequence
  Description of Artificial Sequence: Synthetic oligonucleotide
  Antisense strand to SEQ ID NO: 1894174
uuucccaaagagcuugagu

SEQ ID NO: 1894176 - RNA, 19 nt, Artificial Sequence
  Description of Artificial Sequence: Synthetic oligonucleotide
  Sense strand starting at position 654 of SEQ ID NO: 1879255
uugggaaacugguaggaau

SEQ ID NO: 1894177 - RNA, 19 nt, Artificial Sequence
  Description of Artificial Sequence: Synthetic oligonucleotide
  Antisense strand to SEQ ID NO: 1894176
auuccuaccaguuucccaa

SEQ ID NO: 1894178 - RNA, 19 nt, Artificial Sequence
  Description of Artificial Sequence: Synthetic oligonucleotide
  Sense strand starting at position 678 of SEQ ID NO: 1879255
gacuuuaguggucagcagu

SEQ ID NO: 1894179 - RNA, 19 nt, Artificial Sequence
  Description of Artificial Sequence: Synthetic oligonucleotide
  Antisense strand to SEQ ID NO: 1894178
acugcugaccacuaaaguc

SEQ ID NO: 1894180 - RNA, 19 nt, Artificial Sequence
  Description of Artificial Sequence: Synthetic oligonucleotide
  Sense strand starting at position 704 of SEQ ID NO: 1879255
cagcgcagucugucuugaa

SEQ ID NO: 1894181 - RNA, 19 nt, Artificial Sequence
  Description of Artificial Sequence: Synthetic oligonucleotide
  Antisense strand to SEQ ID NO: 1894180
uucaagacagacugcgcug

SEQ ID NO: 1894182 - RNA, 19 nt, Artificial Sequence
  Description of Artificial Sequence: Synthetic oligonucleotide
  Sense strand starting at position 708 of SEQ ID NO: 1879255
gcagucugucuugaacuca

SEQ ID NO: 1894183 - RNA, 19 nt, Artificial Sequence
  Description of Artificial Sequence: Synthetic oligonucleotide
  Antisense strand to SEQ ID NO: 1894182
ugaguucaagacagacugc

SEQ ID NO: 1894184 - RNA, 19 nt, Artificial Sequence
  Description of Artificial Sequence: Synthetic oligonucleotide
  Sense strand starting at position 857 of SEQ ID NO: 1879255
aaaggugugucuucuacug

SEQ ID NO: 1894185 - RNA, 19 nt, Artificial Sequence
  Description of Artificial Sequence: Synthetic oligonucleotide
  Antisense strand to SEQ ID NO: 1894184
caguagaagacacaccuuu

SEQ ID NO: 1894186 - RNA, 19 nt, Artificial Sequence
  Description of Artificial Sequence: Synthetic oligonucleotide
  Sense strand starting at position 1171 of SEQ ID NO: 1879255
gcuagugccgguuuguuua

SEQ ID NO: 1894187 - RNA, 19 nt, Artificial Sequence
  Description of Artificial Sequence: Synthetic oligonucleotide
  Antisense strand to SEQ ID NO: 1894186
uaaacaaaccggcacuagc

SEQ ID NO: 1894188 - RNA, 19 nt, Artificial Sequence
  Description of Artificial Sequence: Synthetic oligonucleotide
  Sense strand starting at position 1474 of SEQ ID NO: 1879255
agccgugucccucaaucua

SEQ ID NO: 1894189 - RNA, 19 nt, Artificial Sequence
  Description of Artificial Sequence: Synthetic oligonucleotide
  Antisense strand to SEQ ID NO: 1894188
uagauugagggacacggcu

SEQ ID NO: 1894190 - RNA, 19 nt, Artificial Sequence
  Description of Artificial Sequence: Synthetic oligonucleotide
  Sense strand starting at position 1652 of SEQ ID NO: 1879255
gcgcuaagagcuugggaua

SEQ ID NO: 1894191 - RNA, 19 nt, Artificial Sequence
  Description of Artificial Sequence: Synthetic oligonucleotide
  Antisense strand to SEQ ID NO: 1894190
uaucccaagcucuuagcgc

SEQ ID NO: 1894192 - RNA, 19 nt, Artificial Sequence
  Description of Artificial Sequence: Synthetic oligonucleotide
  Sense strand starting at position 2001 of SEQ ID NO: 1879255
gacgaugugcucgagaaga

SEQ ID NO: 1894193 - RNA, 19 nt, Artificial Sequence
  Description of Artificial Sequence: Synthetic oligonucleotide
  Antisense strand to SEQ ID NO: 1894192
ucuucucgagcacaucguc

SEQ ID NO: 1894194 - RNA, 19 nt, Artificial Sequence
  Description of Artificial Sequence: Synthetic oligonucleotide
  Sense strand starting at position 2003 of SEQ ID NO: 1879255
cgaugugcucgagaagacu

SEQ ID NO: 1894195 - RNA, 19 nt, Artificial Sequence
  Description of Artificial Sequence: Synthetic oligonucleotide
  Antisense strand to SEQ ID NO: 1894194
agucuucucgagcacaucg

SEQ ID NO: 1894196 - RNA, 19 nt, Artificial Sequence
  Description of Artificial Sequence: Synthetic oligonucleotide
  Sense strand starting at position 2156 of SEQ ID NO: 1879255
guuucuucgggcuugcuua

SEQ ID NO: 1894197 - RNA, 19 nt, Artificial Sequence
  Description of Artificial Sequence: Synthetic oligonucleotide
  Antisense strand to SEQ ID NO: 1894196
uaagcaagcccgaagaaac

SEQ ID NO: 1894198 - RNA, 19 nt, Artificial Sequence
  Description of Artificial Sequence: Synthetic oligonucleotide
  Sense strand starting at position 2256 of SEQ ID NO: 1879255
aggccacuuccuggaugau

SEQ ID NO: 1894199 - RNA, 19 nt, Artificial Sequence
  Description of Artificial Sequence: Synthetic oligonucleotide
  Antisense strand to SEQ ID NO: 1894198
aucauccaggaaguggccu

SEQ ID NO: 1894200 - RNA, 19 nt, Artificial Sequence
  Description of Artificial Sequence: Synthetic oligonucleotide
  Sense strand starting at position 2306 of SEQ ID NO: 1879255
gagcaaugauugccacaag

SEQ ID NO: 1894201 - RNA, 19 nt, Artificial Sequence
  Description of Artificial Sequence: Synthetic oligonucleotide
  Antisense strand to SEQ ID NO: 1894200
cuuguggcaaucauugcuc

SEQ ID NO: 1894202 - RNA, 19 nt, Artificial Sequence
  Description of Artificial Sequence: Synthetic oligonucleotide
  Sense strand starting at position 2453 of SEQ ID NO: 1879255
agguguagcuauuccagaa

SEQ ID NO: 1894203 - RNA, 19 nt, Artificial Sequence
  Description of Artificial Sequence: Synthetic oligonucleotide
  Antisense strand to SEQ ID NO: 1894202
uucuggaauagcuacaccu

SEQ ID NO: 1894204 - RNA, 19 nt, Artificial Sequence
  Description of Artificial Sequence: Synthetic oligonucleotide
  Sense strand starting at position 2457 of SEQ ID NO: 1879255
guagcuauuccagaagcuc

SEQ ID NO: 1894205 - RNA, 19 nt, Artificial Sequence
  Description of Artificial Sequence: Synthetic oligonucleotide
  Antisense strand to SEQ ID NO: 1894204
gagcuucuggaauagcuac

SEQ ID NO: 1894206 - RNA, 19 nt, Artificial Sequence
  Description of Artificial Sequence: Synthetic oligonucleotide
  Sense strand starting at position 2497 of SEQ ID NO: 1879255
ggguaaagguucccaagag

SEQ ID NO: 1894207 - RNA, 19 nt, Artificial Sequence
  Description of Artificial Sequence: Synthetic oligonucleotide
  Antisense strand to SEQ ID NO: 1894206
cucuugggaaccuuuaccc

SEQ ID NO: 1894208 - RNA, 19 nt, Artificial Sequence
  Description of Artificial Sequence: Synthetic oligonucleotide
  Sense strand starting at position 2711 of SEQ ID NO: 1879255
uuaagacuaccgcaauaga

SEQ ID NO: 1894209 - RNA, 19 nt, Artificial Sequence
  Description of Artificial Sequence: Synthetic oligonucleotide
  Antisense strand to SEQ ID NO: 1894208
ucuauugcgguagucuuaa

SEQ ID NO: 1894210 - RNA, 19 nt, Artificial Sequence
  Description of Artificial Sequence: Synthetic oligonucleotide
  Sense strand starting at position 2725 of SEQ ID NO: 1879255
auagaaacuuaccucguuu

SEQ ID NO: 1894211 - RNA, 19 nt, Artificial Sequence
  Description of Artificial Sequence: Synthetic oligonucleotide
  Antisense strand to SEQ ID NO: 1894210
aaacgagguaaguuucuau

SEQ ID NO: 1894212 - RNA, 19 nt, Artificial Sequence
  Description of Artificial Sequence: Synthetic oligonucleotide
  Sense strand starting at position 2727 of SEQ ID NO: 1879255
agaaacuuaccucguuugu

SEQ ID NO: 1894213 - RNA, 19 nt, Artificial Sequence
  Description of Artificial Sequence: Synthetic oligonucleotide
  Antisense strand to SEQ ID NO: 1894212
acaaacgagguaaguuucu

SEQ ID NO: 1894214 - RNA, 19 nt, Artificial Sequence
  Description of Artificial Sequence: Synthetic oligonucleotide
  Sense strand starting at position 2888 of SEQ ID NO: 1879255
gaguucgaaacucguuuga

SEQ ID NO: 1894215 - RNA, 19 nt, Artificial Sequence
  Description of Artificial Sequence: Synthetic oligonucleotide
  Antisense strand to SEQ ID NO: 1894214
ucaaacgaguuucgaacuc

SEQ ID NO: 1894216 - RNA, 19 nt, Artificial Sequence
  Description of Artificial Sequence: Synthetic oligonucleotide
  Sense strand starting at position 2890 of SEQ ID NO: 1879255
guucgaaacucguuugaaa

SEQ ID NO: 1894217 - RNA, 19 nt, Artificial Sequence
  Description of Artificial Sequence: Synthetic oligonucleotide
  Antisense strand to SEQ ID NO: 1894216
uuucaaacgaguuucgaac

SEQ ID NO: 1894218 - RNA, 19 nt, Artificial Sequence
  Description of Artificial Sequence: Synthetic oligonucleotide
  Sense strand starting at position 3190 of SEQ ID NO: 1879255
aaaguaugauagccuuaga

SEQ ID NO: 1894219 - RNA, 19 nt, Artificial Sequence
  Description of Artificial Sequence: Synthetic oligonucleotide
  Antisense strand to SEQ ID NO: 1894218
ucuaaggcuaucauacuuu

SEQ ID NO: 1894220 - RNA, 19 nt, Artificial Sequence
  Description of Artificial Sequence: Synthetic oligonucleotide
  Sense strand starting at position 3193 of SEQ ID NO: 1879255
guaugauagccuuagaggc

SEQ ID NO: 1894221 - RNA, 19 nt, Artificial Sequence
  Description of Artificial Sequence: Synthetic oligonucleotide
  Antisense strand to SEQ ID NO: 1894220
gccucuaaggcuaucauac

SEQ ID NO: 1894222 - RNA, 19 nt, Artificial Sequence
  Description of Artificial Sequence: Synthetic oligonucleotide
  Sense strand starting at position 3200 of SEQ ID NO: 1879255
agccuuagaggccaucaaa

SEQ ID NO: 1894223 - RNA, 19 nt, Artificial Sequence
  Description of Artificial Sequence: Synthetic oligonucleotide
  Antisense strand to SEQ ID NO: 1894222
uuugauggccucuaaggcu

SEQ ID NO: 1894224 - RNA, 19 nt, Artificial Sequence
  Description of Artificial Sequence: Synthetic oligonucleotide
  Sense strand starting at position 3407 of SEQ ID NO: 1879255
cuagacuugaggugucuau

SEQ ID NO: 1894225 - RNA, 19 nt, Artificial Sequence
  Description of Artificial Sequence: Synthetic oligonucleotide
  Antisense strand to SEQ ID NO: 1894224
auagacaccucaagucuag

SEQ ID NO: 1894226 - RNA, 19 nt, Artificial Sequence
  Description of Artificial Sequence: Synthetic oligonucleotide
  Sense strand starting at position 3411 of SEQ ID NO: 1879255
acuugaggugucuauugaa

SEQ ID NO: 1894227 - RNA, 19 nt, Artificial Sequence
  Description of Artificial Sequence: Synthetic oligonucleotide
  Antisense strand to SEQ ID NO: 1894226
uucaauagacaccucaagu

SEQ ID NO: 1894228 - RNA, 19 nt, Artificial Sequence
  Description of Artificial Sequence: Synthetic oligonucleotide
  Sense strand starting at position 3446 of SEQ ID NO: 1879255
caggcagcucuugacuauu

SEQ ID NO: 1894229 - RNA, 19 nt, Artificial Sequence
  Description of Artificial Sequence: Synthetic oligonucleotide
  Antisense strand to SEQ ID NO: 1894228
aauagucaagagcugccug

SEQ ID NO: 1894230 - RNA, 19 nt, Artificial Sequence
  Description of Artificial Sequence: Synthetic oligonucleotide
  Sense strand starting at position 3449 of SEQ ID NO: 1879255
gcagcucuugacuauugua

SEQ ID NO: 1894231 - RNA, 19 nt, Artificial Sequence
  Description of Artificial Sequence: Synthetic oligonucleotide
  Antisense strand to SEQ ID NO: 1894230
uacaauagucaagagcugc

SEQ ID NO: 1894232 - RNA, 19 nt, Artificial Sequence
  Description of Artificial Sequence: Synthetic oligonucleotide
  Sense strand starting at position 3726 of SEQ ID NO: 1879255
uugaauuccugcucuggaa

SEQ ID NO: 1894233 - RNA, 19 nt, Artificial Sequence
  Description of Artificial Sequence: Synthetic oligonucleotide
  Antisense strand to SEQ ID NO: 1894232
uuccagagcaggaauucaa

SEQ ID NO: 1894234 - RNA, 19 nt, Artificial Sequence
  Description of Artificial Sequence: Synthetic oligonucleotide
  Sense strand starting at position 3738 of SEQ ID NO: 1879255
ucuggaaggcccuguucua

SEQ ID NO: 1894235 - RNA, 19 nt, Artificial Sequence
  Description of Artificial Sequence: Synthetic oligonucleotide
  Antisense strand to SEQ ID NO: 1894234
uagaacagggccuuccaga

SEQ ID NO: 1894236 - RNA, 19 nt, Artificial Sequence
  Description of Artificial Sequence: Synthetic oligonucleotide
  Sense strand starting at position 3765 of SEQ ID NO: 1879255
ggcugcaacagugaauaga

SEQ ID NO: 1894237 - RNA, 19 nt, Artificial Sequence
  Description of Artificial Sequence: Synthetic oligonucleotide
  Antisense strand to SEQ ID NO: 1894236
ucuauucacuguugcagcc

SEQ ID NO: 1894238 - RNA, 19 nt, Artificial Sequence
  Description of Artificial Sequence: Synthetic oligonucleotide
  Sense strand starting at position 3806 of SEQ ID NO: 1879255
aacuuauuagugcaagggu

SEQ ID NO: 1894239 - RNA, 19 nt, Artificial Sequence
  Description of Artificial Sequence: Synthetic oligonucleotide
  Antisense strand to SEQ ID NO: 1894238
acccuugcacuaauaaguu

SEQ ID NO: 1894240 - RNA, 19 nt, Artificial Sequence
  Description of Artificial Sequence: Synthetic oligonucleotide
  Sense strand starting at position 3864 of SEQ ID NO: 1879255
aguuauaaagaguacugua

SEQ ID NO: 1894241 - RNA, 19 nt, Artificial Sequence
  Description of Artificial Sequence: Synthetic oligonucleotide
  Antisense strand to SEQ ID NO: 1894240
uacaguacucuuuauaacu

SEQ ID NO: 1894242 - RNA, 19 nt, Artificial Sequence
  Description of Artificial Sequence: Synthetic oligonucleotide
  Sense strand starting at position 3978 of SEQ ID NO: 1879255
aaauaaagguuugaaguga

SEQ ID NO: 1894243 - RNA, 19 nt, Artificial Sequence
  Description of Artificial Sequence: Synthetic oligonucleotide
  Antisense strand to SEQ ID NO: 1894242
ucacuucaaaccuuuauuu

SEQ ID NO: 1894244 - RNA, 19 nt, Artificial Sequence
  Description of Artificial Sequence: Synthetic oligonucleotide
  Sense strand starting at position 86 of SEQ ID NO: 1879254
accugaaagccucacgaaa

SEQ ID NO: 1894245 - RNA, 19 nt, Artificial Sequence
  Description of Artificial Sequence: Synthetic oligonucleotide
  Antisense strand to SEQ ID NO: 1894244
uuucgugaggcuuucaggu

SEQ ID NO: 1894246 - RNA, 19 nt, Artificial Sequence
  Description of Artificial Sequence: Synthetic oligonucleotide
  Sense strand starting at position 112 of SEQ ID NO: 1879254
uuauaaguauguucugacu

SEQ ID NO: 1894247 - RNA, 19 nt, Artificial Sequence
  Description of Artificial Sequence: Synthetic oligonucleotide
  Antisense strand to SEQ ID NO: 1894246
agucagaacauacuuauaa

SEQ ID NO: 1894248 - RNA, 19 nt, Artificial Sequence
  Description of Artificial Sequence: Synthetic oligonucleotide
  Sense strand starting at position 155 of SEQ ID NO: 1879254
gcugaaugcccaggauguu

SEQ ID NO: 1894249 - RNA, 19 nt, Artificial Sequence
  Description of Artificial Sequence: Synthetic oligonucleotide
  Antisense strand to SEQ ID NO: 1894248
aacauccugggcauucagc

SEQ ID NO: 1894250 - RNA, 19 nt, Artificial Sequence
  Description of Artificial Sequence: Synthetic oligonucleotide
  Sense strand starting at position 165 of SEQ ID NO: 1879254
caggauguuucuucugcua

SEQ ID NO: 1894251 - RNA, 19 nt, Artificial Sequence
  Description of Artificial Sequence: Synthetic oligonucleotide
  Antisense strand to SEQ ID NO: 1894250
uagcagaagaaacauccug

SEQ ID NO: 1894252 - RNA, 19 nt, Artificial Sequence
  Description of Artificial Sequence: Synthetic oligonucleotide
  Sense strand starting at position 571 of SEQ ID NO: 1879254
uuaagucauuuggagauac

SEQ ID NO: 1894253 - RNA, 19 nt, Artificial Sequence
  Description of Artificial Sequence: Synthetic oligonucleotide
  Antisense strand to SEQ ID NO: 1894252
guaucuccaaaugacuuaa

SEQ ID NO: 1894254 - RNA, 19 nt, Artificial Sequence
  Description of Artificial Sequence: Synthetic oligonucleotide
  Sense strand starting at position 684 of SEQ ID NO: 1879254
acucaagcucuuugggaaa

SEQ ID NO: 1894255 - RNA, 19 nt, Artificial Sequence
  Description of Artificial Sequence: Synthetic oligonucleotide
  Antisense strand to SEQ ID NO: 1894254
uuucccaaagagcuugagu

SEQ ID NO: 1894256 - RNA, 19 nt, Artificial Sequence
  Description of Artificial Sequence: Synthetic oligonucleotide
  Sense strand starting at position 695 of SEQ ID NO: 1879254
uugggaaacugguaggaau

SEQ ID NO: 1894257 - RNA, 19 nt, Artificial Sequence
  Description of Artificial Sequence: Synthetic oligonucleotide
  Antisense strand to SEQ ID NO: 1894256
auuccuaccaguuucccaa

SEQ ID NO: 1894258 - RNA, 19 nt, Artificial Sequence
  Description of Artificial Sequence: Synthetic oligonucleotide
  Sense strand starting at position 719 of SEQ ID NO: 1879254
gacuuuaguggucagcagu

SEQ ID NO: 1894259 - RNA, 19 nt, Artificial Sequence
  Description of Artificial Sequence: Synthetic oligonucleotide
  Antisense strand to SEQ ID NO: 1894258
acugcugaccacuaaaguc

SEQ ID NO: 1894260 - RNA, 19 nt, Artificial Sequence
  Description of Artificial Sequence: Synthetic oligonucleotide
  Sense strand starting at position 745 of SEQ ID NO: 1879254
cagcgcagucugucuugaa

SEQ ID NO: 1894261 - RNA, 19 nt, Artificial Sequence
  Description of Artificial Sequence: Synthetic oligonucleotide
  Antisense strand to SEQ ID NO: 1894260
uucaagacagacugcgcug

SEQ ID NO: 1894262 - RNA, 19 nt, Artificial Sequence
  Description of Artificial Sequence: Synthetic oligonucleotide
  Sense strand starting at position 749 of SEQ ID NO: 1879254
gcagucugucuugaacuca

SEQ ID NO: 1894263 - RNA, 19 nt, Artificial Sequence
  Description of Artificial Sequence: Synthetic oligonucleotide
  Antisense strand to SEQ ID NO: 1894262
ugaguucaagacagacugc

SEQ ID NO: 1894264 - RNA, 19 nt, Artificial Sequence
  Description of Artificial Sequence: Synthetic oligonucleotide
  Sense strand starting at position 898 of SEQ ID NO: 1879254
aaaggugugucuucuacug

SEQ ID NO: 1894265 - RNA, 19 nt, Artificial Sequence
  Description of Artificial Sequence: Synthetic oligonucleotide
  Antisense strand to SEQ ID NO: 1894264
caguagaagacacaccuuu

SEQ ID NO: 1894266 - RNA, 19 nt, Artificial Sequence
  Description of Artificial Sequence: Synthetic oligonucleotide
  Sense strand starting at position 1210 of SEQ ID NO: 1879254
gcgcuagugccgguuuguu

SEQ ID NO: 1894267 - RNA, 19 nt, Artificial Sequence
  Description of Artificial Sequence: Synthetic oligonucleotide
  Antisense strand to SEQ ID NO: 1894266
aacaaaccggcacuagcgc

SEQ ID NO: 1894268 - RNA, 19 nt, Artificial Sequence
  Description of Artificial Sequence: Synthetic oligonucleotide
  Sense strand starting at position 1212 of SEQ ID NO: 1879254
gcuagugccgguuuguuua

SEQ ID NO: 1894269 - RNA, 19 nt, Artificial Sequence
  Description of Artificial Sequence: Synthetic oligonucleotide
  Antisense strand to SEQ ID NO: 1894268
uaaacaaaccggcacuagc

SEQ ID NO: 1894270 - RNA, 19 nt, Artificial Sequence
  Description of Artificial Sequence: Synthetic oligonucleotide
  Sense strand starting at position 1515 of SEQ ID NO: 1879254
agccgugucccucaaucua

SEQ ID NO: 1894271 - RNA, 19 nt, Artificial Sequence
  Description of Artificial Sequence: Synthetic oligonucleotide
  Antisense strand to SEQ ID NO: 1894270
uagauugagggacacggcu

SEQ ID NO: 1894272 - RNA, 19 nt, Artificial Sequence
  Description of Artificial Sequence: Synthetic oligonucleotide
  Sense strand starting at position 1693 of SEQ ID NO: 1879254
gcgcuaagagcuugggaua

SEQ ID NO: 1894273 - RNA, 19 nt, Artificial Sequence
  Description of Artificial Sequence: Synthetic oligonucleotide
  Antisense strand to SEQ ID NO: 1894272
uaucccaagcucuuagcgc

SEQ ID NO: 1894274 - RNA, 19 nt, Artificial Sequence
  Description of Artificial Sequence: Synthetic oligonucleotide
  Sense strand starting at position 2042 of SEQ ID NO: 1879254
gacgaugugcucgagaaga

SEQ ID NO: 1894275 - RNA, 19 nt, Artificial Sequence
  Description of Artificial Sequence: Synthetic oligonucleotide
  Antisense strand to SEQ ID NO: 1894274
ucuucucgagcacaucguc

SEQ ID NO: 1894276 - RNA, 19 nt, Artificial Sequence
  Description of Artificial Sequence: Synthetic oligonucleotide
  Sense strand starting at position 2044 of SEQ ID NO: 1879254
cgaugugcucgagaagacu

SEQ ID NO: 1894277 - RNA, 19 nt, Artificial Sequence
  Description of Artificial Sequence: Synthetic oligonucleotide
  Antisense strand to SEQ ID NO: 1894276
agucuucucgagcacaucg

SEQ ID NO: 1894278 - RNA, 19 nt, Artificial Sequence
  Description of Artificial Sequence: Synthetic oligonucleotide
  Sense strand starting at position 2197 of SEQ ID NO: 1879254
guuucuucgggcuugcuua

SEQ ID NO: 1894279 - RNA, 19 nt, Artificial Sequence
  Description of Artificial Sequence: Synthetic oligonucleotide
  Antisense strand to SEQ ID NO: 1894278
uaagcaagcccgaagaaac

SEQ ID NO: 1894280 - RNA, 19 nt, Artificial Sequence
  Description of Artificial Sequence: Synthetic oligonucleotide
  Sense strand starting at position 2297 of SEQ ID NO: 1879254
aggccacuuccuggaugau

SEQ ID NO: 1894281 - RNA, 19 nt, Artificial Sequence
  Description of Artificial Sequence: Synthetic oligonucleotide
  Antisense strand to SEQ ID NO: 1894280
aucauccaggaaguggccu

SEQ ID NO: 1894282 - RNA, 19 nt, Artificial Sequence
  Description of Artificial Sequence: Synthetic oligonucleotide
  Sense strand starting at position 2347 of SEQ ID NO: 1879254
gagcaaugauugccacaag

SEQ ID NO: 1894283 - RNA, 19 nt, Artificial Sequence
  Description of Artificial Sequence: Synthetic oligonucleotide
  Antisense strand to SEQ ID NO: 1894282
cuuguggcaaucauugcuc

SEQ ID NO: 1894284 - RNA, 19 nt, Artificial Sequence
  Description of Artificial Sequence: Synthetic oligonucleotide
  Sense strand starting at position 2494 of SEQ ID NO: 1879254
agguguagcuauuccagaa

SEQ ID NO: 1894285 - RNA, 19 nt, Artificial Sequence
  Description of Artificial Sequence: Synthetic oligonucleotide
  Antisense strand to SEQ ID NO: 1894284
uucuggaauagcuacaccu

SEQ ID NO: 1894286 - RNA, 19 nt, Artificial Sequence
  Description of Artificial Sequence: Synthetic oligonucleotide
  Sense strand starting at position 2498 of SEQ ID NO: 1879254
guagcuauuccagaagcuc

SEQ ID NO: 1894287 - RNA, 19 nt, Artificial Sequence
  Description of Artificial Sequence: Synthetic oligonucleotide
  Antisense strand to SEQ ID NO: 1894286
gagcuucuggaauagcuac

SEQ ID NO: 1894288 - RNA, 19 nt, Artificial Sequence
  Description of Artificial Sequence: Synthetic oligonucleotide
  Sense strand starting at position 2538 of SEQ ID NO: 1879254
ggguaaagguucccaagag

SEQ ID NO: 1894289 - RNA, 19 nt, Artificial Sequence
  Description of Artificial Sequence: Synthetic oligonucleotide
  Antisense strand to SEQ ID NO: 1894288
cucuugggaaccuuuaccc

SEQ ID NO: 1894290 - RNA, 19 nt, Artificial Sequence
  Description of Artificial Sequence: Synthetic oligonucleotide
  Sense strand starting at position 2752 of SEQ ID NO: 1879254
uuaagacuaccgcaauaga

SEQ ID NO: 1894291 - RNA, 19 nt, Artificial Sequence
  Description of Artificial Sequence: Synthetic oligonucleotide
  Antisense strand to SEQ ID NO: 1894290
ucuauugcgguagucuuaa

SEQ ID NO: 1894292 - RNA, 19 nt, Artificial Sequence
  Description of Artificial Sequence: Synthetic oligonucleotide
  Sense strand starting at position 2766 of SEQ ID NO: 1879254
auagaaacuuaccucguuu

SEQ ID NO: 1894293 - RNA, 19 nt, Artificial Sequence
  Description of Artificial Sequence: Synthetic oligonucleotide
  Antisense strand to SEQ ID NO: 1894292
aaacgagguaaguuucuau

SEQ ID NO: 1894294 - RNA, 19 nt, Artificial Sequence
  Description of Artificial Sequence: Synthetic oligonucleotide
  Sense strand starting at position 2768 of SEQ ID NO: 1879254
agaaacuuaccucguuugu

SEQ ID NO: 1894295 - RNA, 19 nt, Artificial Sequence
  Description of Artificial Sequence: Synthetic oligonucleotide
  Antisense strand to SEQ ID NO: 1894294
acaaacgagguaaguuucu

SEQ ID NO: 1894296 - RNA, 19 nt, Artificial Sequence
  Description of Artificial Sequence: Synthetic oligonucleotide
  Sense strand starting at position 2929 of SEQ ID NO: 1879254
gaguucgaaacucguuuga

SEQ ID NO: 1894297 - RNA, 19 nt, Artificial Sequence
  Description of Artificial Sequence: Synthetic oligonucleotide
  Antisense strand to SEQ ID NO: 1894296
ucaaacgaguuucgaacuc

SEQ ID NO: 1894298 - RNA, 19 nt, Artificial Sequence
  Description of Artificial Sequence: Synthetic oligonucleotide
  Sense strand starting at position 2931 of SEQ ID NO: 1879254
guucgaaacucguuugaaa

SEQ ID NO: 1894299 - RNA, 19 nt, Artificial Sequence
  Description of Artificial Sequence: Synthetic oligonucleotide
  Antisense strand to SEQ ID NO: 1894298
uuucaaacgaguuucgaac

SEQ ID NO: 1894300 - RNA, 19 nt, Artificial Sequence
  Description of Artificial Sequence: Synthetic oligonucleotide
  Sense strand starting at position 3231 of SEQ ID NO: 1879254
aaaguaugauagccuuaga

SEQ ID NO: 1894301 - RNA, 19 nt, Artificial Sequence
  Description of Artificial Sequence: Synthetic oligonucleotide
  Antisense strand to SEQ ID NO: 1894300
ucuaaggcuaucauacuuu

SEQ ID NO: 1894302 - RNA, 19 nt, Artificial Sequence
  Description of Artificial Sequence: Synthetic oligonucleotide
  Sense strand starting at position 3234 of SEQ ID NO: 1879254
guaugauagccuuagaggc

SEQ ID NO: 1894303 - RNA, 19 nt, Artificial Sequence
  Description of Artificial Sequence: Synthetic oligonucleotide
  Antisense strand to SEQ ID NO: 1894302
gccucuaaggcuaucauac

SEQ ID NO: 1894304 - RNA, 19 nt, Artificial Sequence
  Description of Artificial Sequence: Synthetic oligonucleotide
  Sense strand starting at position 3241 of SEQ ID NO: 1879254
agccuuagaggccaucaaa

SEQ ID NO: 1894305 - RNA, 19 nt, Artificial Sequence
  Description of Artificial Sequence: Synthetic oligonucleotide
  Antisense strand to SEQ ID NO: 1894304
uuugauggccucuaaggcu

SEQ ID NO: 1894306 - RNA, 19 nt, Artificial Sequence
  Description of Artificial Sequence: Synthetic oligonucleotide
  Sense strand starting at position 3448 of SEQ ID NO: 1879254
cuagacuugaggugucuau

SEQ ID NO: 1894307 - RNA, 19 nt, Artificial Sequence
  Description of Artificial Sequence: Synthetic oligonucleotide
  Antisense strand to SEQ ID NO: 1894306
auagacaccucaagucuag

SEQ ID NO: 1894308 - RNA, 19 nt, Artificial Sequence
  Description of Artificial Sequence: Synthetic oligonucleotide
  Sense strand starting at position 3452 of SEQ ID NO: 1879254
acuugaggugucuauugaa

SEQ ID NO: 1894309 - RNA, 19 nt, Artificial Sequence
  Description of Artificial Sequence: Synthetic oligonucleotide
  Antisense strand to SEQ ID NO: 1894308
uucaauagacaccucaagu

SEQ ID NO: 1894310 - RNA, 19 nt, Artificial Sequence
  Description of Artificial Sequence: Synthetic oligonucleotide
  Sense strand starting at position 3487 of SEQ ID NO: 1879254
caggcagcucuugacuauu

SEQ ID NO: 1894311 - RNA, 19 nt, Artificial Sequence
  Description of Artificial Sequence: Synthetic oligonucleotide
  Antisense strand to SEQ ID NO: 1894310
aauagucaagagcugccug

SEQ ID NO: 1894312 - RNA, 19 nt, Artificial Sequence
  Description of Artificial Sequence: Synthetic oligonucleotide
  Sense strand starting at position 3490 of SEQ ID NO: 1879254
gcagcucuugacuauugua

SEQ ID NO: 1894313 - RNA, 19 nt, Artificial Sequence
  Description of Artificial Sequence: Synthetic oligonucleotide
  Antisense strand to SEQ ID NO: 1894312
uacaauagucaagagcugc

SEQ ID NO: 1894314 - RNA, 19 nt, Artificial Sequence
  Description of Artificial Sequence: Synthetic oligonucleotide
  Sense strand starting at position 3767 of SEQ ID NO: 1879254
uugaauuccugcucuggaa

SEQ ID NO: 1894315 - RNA, 19 nt, Artificial Sequence
  Description of Artificial Sequence: Synthetic oligonucleotide
  Antisense strand to SEQ ID NO: 1894314
uuccagagcaggaauucaa

SEQ ID NO: 1894316 - RNA, 19 nt, Artificial Sequence
  Description of Artificial Sequence: Synthetic oligonucleotide
  Sense strand starting at position 3779 of SEQ ID NO: 1879254
ucuggaaggcccuguucua

SEQ ID NO: 1894317 - RNA, 19 nt, Artificial Sequence
  Description of Artificial Sequence: Synthetic oligonucleotide
  Antisense strand to SEQ ID NO: 1894316
uagaacagggccuuccaga

SEQ ID NO: 1894318 - RNA, 19 nt, Artificial Sequence
  Description of Artificial Sequence: Synthetic oligonucleotide
  Sense strand starting at position 3806 of SEQ ID NO: 1879254
ggcugcaacagugaauaga

SEQ ID NO: 1894319 - RNA, 19 nt, Artificial Sequence
  Description of Artificial Sequence: Synthetic oligonucleotide
  Antisense strand to SEQ ID NO: 1894318
ucuauucacuguugcagcc

SEQ ID NO: 1894320 - RNA, 19 nt, Artificial Sequence
  Description of Artificial Sequence: Synthetic oligonucleotide
  Sense strand starting at position 3847 of SEQ ID NO: 1879254
aacuuauuagugcaagggu

SEQ ID NO: 1894321 - RNA, 19 nt, Artificial Sequence
  Description of Artificial Sequence: Synthetic oligonucleotide
  Antisense strand to SEQ ID NO: 1894320
acccuugcacuaauaaguu

SEQ ID NO: 1894322 - RNA, 19 nt, Artificial Sequence
  Description of Artificial Sequence: Synthetic oligonucleotide
  Sense strand starting at position 3905 of SEQ ID NO: 1879254
aguuauaaagaguacugua

SEQ ID NO: 1894323 - RNA, 19 nt, Artificial Sequence
  Description of Artificial Sequence: Synthetic oligonucleotide
  Antisense strand to SEQ ID NO: 1894322
uacaguacucuuuauaacu

SEQ ID NO: 1894324 - RNA, 19 nt, Artificial Sequence
  Description of Artificial Sequence: Synthetic oligonucleotide
  Sense strand starting at position 2402 of SEQ ID NO: 1879256
ucccuauaauccgccagua

SEQ ID NO: 1894325 - RNA, 19 nt, Artificial Sequence
  Description of Artificial Sequence: Synthetic oligonucleotide
  Antisense strand to SEQ ID NO: 1894324
uacuggcggauuauaggga

SEQ ID NO: 1894326 - RNA, 19 nt, Artificial Sequence
  Description of Artificial Sequence: Synthetic oligonucleotide
  Sense strand starting at position 2404 of SEQ ID NO: 1879256
ccuauaauccgccaguacu

SEQ ID NO: 1894327 - RNA, 19 nt, Artificial Sequence
  Description of Artificial Sequence: Synthetic oligonucleotide
  Antisense strand to SEQ ID NO: 1894326
aguacuggcggauuauagg

SEQ ID NO: 1894328 - RNA, 19 nt, Artificial Sequence
  Description of Artificial Sequence: Synthetic oligonucleotide
  Sense strand starting at position 2414 of SEQ ID NO: 1879256
gccaguacuguuggagcaa

SEQ ID NO: 1894329 - RNA, 19 nt, Artificial Sequence
  Description of Artificial Sequence: Synthetic oligonucleotide
  Antisense strand to SEQ ID NO: 1894328
uugcuccaacaguacuggc

SEQ ID NO: 1894330 - RNA, 19 nt, Artificial Sequence
  Description of Artificial Sequence: Synthetic oligonucleotide
  Sense strand starting at position 2724 of SEQ ID NO: 1879256
ucggauuacugagguucua

SEQ ID NO: 1894331 - RNA, 19 nt, Artificial Sequence
  Description of Artificial Sequence: Synthetic oligonucleotide
  Antisense strand to SEQ ID NO: 1894330
uagaaccucaguaauccga

SEQ ID NO: 1894332 - RNA, 19 nt, Artificial Sequence
  Description of Artificial Sequence: Synthetic oligonucleotide
  Sense strand starting at position 91 of SEQ ID NO: 1879257
auccauuaucuuuggagaa

SEQ ID NO: 1894333 - RNA, 19 nt, Artificial Sequence
  Description of Artificial Sequence: Synthetic oligonucleotide
  Antisense strand to SEQ ID NO: 1894332
uucuccaaagauaauggau

SEQ ID NO: 1894334 - RNA, 19 nt, Artificial Sequence
  Description of Artificial Sequence: Synthetic oligonucleotide
  Sense strand starting at position 353 of SEQ ID NO: 1879257
guuaauaucucaguuauuc

SEQ ID NO: 1894335 - RNA, 19 nt, Artificial Sequence
  Description of Artificial Sequence: Synthetic oligonucleotide
  Antisense strand to SEQ ID NO: 1894334
gaauaacugagauauuaac

SEQ ID NO: 1894336 - RNA, 19 nt, Artificial Sequence
  Description of Artificial Sequence: Synthetic oligonucleotide
  Sense strand starting at position 589 of SEQ ID NO: 1879257
gggaauaaucugggcucag

SEQ ID NO: 1894337 - RNA, 19 nt, Artificial Sequence
  Description of Artificial Sequence: Synthetic oligonucleotide
  Antisense strand to SEQ ID NO: 1894336
cugagcccagauuauuccc

SEQ ID NO: 1894338 - RNA, 19 nt, Artificial Sequence
  Description of Artificial Sequence: Synthetic oligonucleotide
  Sense strand starting at position 636 of SEQ ID NO: 1879257
ugucaagaagcauacuauu

SEQ ID NO: 1894339 - RNA, 19 nt, Artificial Sequence
  Description of Artificial Sequence: Synthetic oligonucleotide
  Antisense strand to SEQ ID NO: 1894338
aauaguaugcuucuugaca

SEQ ID NO: 1894340 - RNA, 19 nt, Artificial Sequence
  Description of Artificial Sequence: Synthetic oligonucleotide
  Sense strand starting at position 766 of SEQ ID NO: 1879257
guuaaauauugacucaguu

SEQ ID NO: 1894341 - RNA, 19 nt, Artificial Sequence
  Description of Artificial Sequence: Synthetic oligonucleotide
  Antisense strand to SEQ ID NO: 1894340
aacugagucaauauuuaac

SEQ ID NO: 1894342 - RNA, 19 nt, Artificial Sequence
  Description of Artificial Sequence: Synthetic oligonucleotide
  Sense strand starting at position 862 of SEQ ID NO: 1879257
gauaguaaaggguggguaa

SEQ ID NO: 1894343 - RNA, 19 nt, Artificial Sequence
  Description of Artificial Sequence: Synthetic oligonucleotide
  Antisense strand to SEQ ID NO: 1894342
uuacccacccuuuacuauc

SEQ ID NO: 1894344 - RNA, 19 nt, Artificial Sequence
  Description of Artificial Sequence: Synthetic oligonucleotide
  Sense strand starting at position 994 of SEQ ID NO: 1879257
cuaaucuccugagcaaagu

SEQ ID NO: 1894345 - RNA, 19 nt, Artificial Sequence
  Description of Artificial Sequence: Synthetic oligonucleotide
  Antisense strand to SEQ ID NO: 1894344
acuuugcucaggagauuag

SEQ ID NO: 1894346 - RNA, 19 nt, Artificial Sequence
  Description of Artificial Sequence: Synthetic oligonucleotide
  Sense strand starting at position 1007 of SEQ ID NO: 1879257
caaaguagucguugauaaa

SEQ ID NO: 1894347 - RNA, 19 nt, Artificial Sequence
  Description of Artificial Sequence: Synthetic oligonucleotide
  Antisense strand to SEQ ID NO: 1894346
uuuaucaacgacuacuuug

SEQ ID NO: 1894348 - RNA, 19 nt, Artificial Sequence
  Description of Artificial Sequence: Synthetic oligonucleotide
  Sense strand starting at position 1008 of SEQ ID NO: 1879257
aaaguagucguugauaaau

SEQ ID NO: 1894349 - RNA, 19 nt, Artificial Sequence
  Description of Artificial Sequence: Synthetic oligonucleotide
  Antisense strand to SEQ ID NO: 1894348
auuuaucaacgacuacuuu

SEQ ID NO: 1894350 - RNA, 19 nt, Artificial Sequence
  Description of Artificial Sequence: Synthetic oligonucleotide
  Sense strand starting at position 1017 of SEQ ID NO: 1879257
guugauaaauacuuuagca

SEQ ID NO: 1894351 - RNA, 19 nt, Artificial Sequence
  Description of Artificial Sequence: Synthetic oligonucleotide
  Antisense strand to SEQ ID NO: 1894350
ugcuaaaguauuuaucaac

SEQ ID NO: 1894352 - RNA, 19 nt, Artificial Sequence
  Description of Artificial Sequence: Synthetic oligonucleotide
  Sense strand starting at position 1046 of SEQ ID NO: 1879257
aguacccucuaauuggaua

SEQ ID NO: 1894353 - RNA, 19 nt, Artificial Sequence
  Description of Artificial Sequence: Synthetic oligonucleotide
  Antisense strand to SEQ ID NO: 1894352
uauccaauuagaggguacu

SEQ ID NO: 1894354 - RNA, 19 nt, Artificial Sequence
  Description of Artificial Sequence: Synthetic oligonucleotide
  Sense strand starting at position 1089 of SEQ ID NO: 1879257
acaguugcugcauaaagaa

SEQ ID NO: 1894355 - RNA, 19 nt, Artificial Sequence
  Description of Artificial Sequence: Synthetic oligonucleotide
  Antisense strand to SEQ ID NO: 1894354
uucuuuaugcagcaacugu

SEQ ID NO: 1894356 - RNA, 19 nt, Artificial Sequence
  Description of Artificial Sequence: Synthetic oligonucleotide
  Sense strand starting at position 1198 of SEQ ID NO: 1879257
auuuaaugcucagagagca

SEQ ID NO: 1894357 - RNA, 19 nt, Artificial Sequence
  Description of Artificial Sequence: Synthetic oligonucleotide
  Antisense strand to SEQ ID NO: 1894356
ugcucucugagcauuaaau

SEQ ID NO: 1894358 - RNA, 19 nt, Artificial Sequence
  Description of Artificial Sequence: Synthetic oligonucleotide
  Sense strand starting at position 1208 of SEQ ID NO: 1879257
cagagagcacucggaauaa

SEQ ID NO: 1894359 - RNA, 19 nt, Artificial Sequence
  Description of Artificial Sequence: Synthetic oligonucleotide
  Antisense strand to SEQ ID NO: 1894358
uuauuccgagugcucucug

SEQ ID NO: 1894360 - RNA, 19 nt, Artificial Sequence
  Description of Artificial Sequence: Synthetic oligonucleotide
  Sense strand starting at position 1218 of SEQ ID NO: 1879257
ucggaauaauaaccucuua

SEQ ID NO: 1894361 - RNA, 19 nt, Artificial Sequence
  Description of Artificial Sequence: Synthetic oligonucleotide
  Antisense strand to SEQ ID NO: 1894360
uaagagguuauuauuccga

SEQ ID NO: 1894362 - RNA, 19 nt, Artificial Sequence
  Description of Artificial Sequence: Synthetic oligonucleotide
  Sense strand starting at position 2564 of SEQ ID NO: 1879257
cacagacugcagugauaac

SEQ ID NO: 1894363 - RNA, 19 nt, Artificial Sequence
  Description of Artificial Sequence: Synthetic oligonucleotide
  Antisense strand to SEQ ID NO: 1894362
guuaucacugcagucugug

SEQ ID NO: 1894364 - RNA, 19 nt, Artificial Sequence
  Description of Artificial Sequence: Synthetic oligonucleotide
  Sense strand starting at position 2703 of SEQ ID NO: 1879257
gcacaugugaagcagguua

SEQ ID NO: 1894365 - RNA, 19 nt, Artificial Sequence
  Description of Artificial Sequence: Synthetic oligonucleotide
  Antisense strand to SEQ ID NO: 1894364
uaaccugcuucacaugugc

SEQ ID NO: 1894366 - RNA, 19 nt, Artificial Sequence
  Description of Artificial Sequence: Synthetic oligonucleotide
  Sense strand starting at position 2744 of SEQ ID NO: 1879257
gucauaggugugugauaga

SEQ ID NO: 1894367 - RNA, 19 nt, Artificial Sequence
  Description of Artificial Sequence: Synthetic oligonucleotide
  Antisense strand to SEQ ID NO: 1894366
ucuaucacacaccuaugac

SEQ ID NO: 1894368 - RNA, 19 nt, Artificial Sequence
  Description of Artificial Sequence: Synthetic oligonucleotide
  Sense strand starting at position 2749 of SEQ ID NO: 1879257
aggugugugauagauacuu

SEQ ID NO: 1894369 - RNA, 19 nt, Artificial Sequence
  Description of Artificial Sequence: Synthetic oligonucleotide
  Antisense strand to SEQ ID NO: 1894368
aaguaucuaucacacaccu

SEQ ID NO: 1894370 - RNA, 19 nt, Artificial Sequence
  Description of Artificial Sequence: Synthetic oligonucleotide
  Sense strand starting at position 2751 of SEQ ID NO: 1879257
gugugugauagauacuuuc

SEQ ID NO: 1894371 - RNA, 19 nt, Artificial Sequence
  Description of Artificial Sequence: Synthetic oligonucleotide
  Antisense strand to SEQ ID NO: 1894370
gaaaguaucuaucacacac

SEQ ID NO: 1894372 - RNA, 19 nt, Artificial Sequence
  Description of Artificial Sequence: Synthetic oligonucleotide
  Sense strand starting at position 2831 of SEQ ID NO: 1879257
cuaucugaugcugauuauu

SEQ ID NO: 1894373 - RNA, 19 nt, Artificial Sequence
  Description of Artificial Sequence: Synthetic oligonucleotide
  Antisense strand to SEQ ID NO: 1894372
aauaaucagcaucagauag

SEQ ID NO: 1894374 - RNA, 19 nt, Artificial Sequence
  Description of Artificial Sequence: Synthetic oligonucleotide
  Sense strand starting at position 2898 of SEQ ID NO: 1879257
aggaucuacugagaagaca

SEQ ID NO: 1894375 - RNA, 19 nt, Artificial Sequence
  Description of Artificial Sequence: Synthetic oligonucleotide
  Antisense strand to SEQ ID NO: 1894374
ugucuucucaguagauccu

SEQ ID NO: 1894376 - RNA, 19 nt, Artificial Sequence
  Description of Artificial Sequence: Synthetic oligonucleotide
  Sense strand starting at position 2924 of SEQ ID NO: 1879257
aagucuuaugauggacauu

SEQ ID NO: 1894377 - RNA, 19 nt, Artificial Sequence
  Description of Artificial Sequence: Synthetic oligonucleotide
  Antisense strand to SEQ ID NO: 1894376
aauguccaucauaagacuu

SEQ ID NO: 1894378 - RNA, 19 nt, Artificial Sequence
  Description of Artificial Sequence: Synthetic oligonucleotide
  Sense strand starting at position 3021 of SEQ ID NO: 1879257
gacacauagccacaguguu

SEQ ID NO: 1894379 - RNA, 19 nt, Artificial Sequence
  Description of Artificial Sequence: Synthetic oligonucleotide
  Antisense strand to SEQ ID NO: 1894378
aacacuguggcuauguguc

SEQ ID NO: 1894380 - RNA, 19 nt, Artificial Sequence
  Description of Artificial Sequence: Synthetic oligonucleotide
  Sense strand starting at position 3082 of SEQ ID NO: 1879257
uuaagaugaugagaggaaa

SEQ ID NO: 1894381 - RNA, 19 nt, Artificial Sequence
  Description of Artificial Sequence: Synthetic oligonucleotide
  Antisense strand to SEQ ID NO: 1894380
uuuccucucaucaucuuaa

SEQ ID NO: 1894382 - RNA, 19 nt, Artificial Sequence
  Description of Artificial Sequence: Synthetic oligonucleotide
  Sense strand starting at position 3101 of SEQ ID NO: 1879257
ccaaaugugguaugaaugu

SEQ ID NO: 1894383 - RNA, 19 nt, Artificial Sequence
  Description of Artificial Sequence: Synthetic oligonucleotide
  Antisense strand to SEQ ID NO: 1894382
acauucauaccacauuugg

SEQ ID NO: 1894384 - RNA, 19 nt, Artificial Sequence
  Description of Artificial Sequence: Synthetic oligonucleotide
  Sense strand starting at position 3112 of SEQ ID NO: 1879257
augaauguagugugaguca

SEQ ID NO: 1894385 - RNA, 19 nt, Artificial Sequence
  Description of Artificial Sequence: Synthetic oligonucleotide
  Antisense strand to SEQ ID NO: 1894384
ugacucacacuacauucau

SEQ ID NO: 1894386 - RNA, 19 nt, Artificial Sequence
  Description of Artificial Sequence: Synthetic oligonucleotide
  Sense strand starting at position 3115 of SEQ ID NO: 1879257
aauguagugugagucauaa

SEQ ID NO: 1894387 - RNA, 19 nt, Artificial Sequence
  Description of Artificial Sequence: Synthetic oligonucleotide
  Antisense strand to SEQ ID NO: 1894386
uuaugacucacacuacauu

SEQ ID NO: 1894388 - RNA, 19 nt, Artificial Sequence
  Description of Artificial Sequence: Synthetic oligonucleotide
  Sense strand starting at position 3117 of SEQ ID NO: 1879257
uguagugugagucauaaga

SEQ ID NO: 1894389 - RNA, 19 nt, Artificial Sequence
  Description of Artificial Sequence: Synthetic oligonucleotide
  Antisense strand to SEQ ID NO: 1894388
ucuuaugacucacacuaca

SEQ ID NO: 1894390 - RNA, 19 nt, Artificial Sequence
  Description of Artificial Sequence: Synthetic oligonucleotide
  Sense strand starting at position 3235 of SEQ ID NO: 1879257
uuggguacuacuuggucaa

SEQ ID NO: 1894391 - RNA, 19 nt, Artificial Sequence
  Description of Artificial Sequence: Synthetic oligonucleotide
  Antisense strand to SEQ ID NO: 1894390
uugaccaaguaguacccaa

SEQ ID NO: 1894392 - RNA, 19 nt, Artificial Sequence
  Description of Artificial Sequence: Synthetic oligonucleotide
  Sense strand starting at position 3237 of SEQ ID NO: 1879257
ggguacuacuuggucaaca

SEQ ID NO: 1894393 - RNA, 19 nt, Artificial Sequence
  Description of Artificial Sequence: Synthetic oligonucleotide
  Antisense strand to SEQ ID NO: 1894392
uguugaccaaguaguaccc

SEQ ID NO: 1894394 - RNA, 19 nt, Artificial Sequence
  Description of Artificial Sequence: Synthetic oligonucleotide
  Sense strand starting at position 3261 of SEQ ID NO: 1879257
agaaauauuguauagccau

SEQ ID NO: 1894395 - RNA, 19 nt, Artificial Sequence
  Description of Artificial Sequence: Synthetic oligonucleotide
  Antisense strand to SEQ ID NO: 1894394
auggcuauacaauauuucu

SEQ ID NO: 1894396 - RNA, 19 nt, Artificial Sequence
  Description of Artificial Sequence: Synthetic oligonucleotide
  Sense strand starting at position 3418 of SEQ ID NO: 1879257
ugggaauuauuacuuguac

SEQ ID NO: 1894397 - RNA, 19 nt, Artificial Sequence
  Description of Artificial Sequence: Synthetic oligonucleotide
  Antisense strand to SEQ ID NO: 1894396
guacaaguaauaauuccca

SEQ ID NO: 1894398 - RNA, 19 nt, Artificial Sequence
  Description of Artificial Sequence: Synthetic oligonucleotide
  Sense strand starting at position 3419 of SEQ ID NO: 1879257
gggaauuauuacuuguaca

SEQ ID NO: 1894399 - RNA, 19 nt, Artificial Sequence
  Description of Artificial Sequence: Synthetic oligonucleotide
  Antisense strand to SEQ ID NO: 1894398
uguacaaguaauaauuccc

SEQ ID NO: 1894400 - RNA, 19 nt, Artificial Sequence
  Description of Artificial Sequence: Synthetic oligonucleotide
  Sense strand starting at position 3438 of SEQ ID NO: 1879257
ucacaugagcagugugaug

SEQ ID NO: 1894401 - RNA, 19 nt, Artificial Sequence
  Description of Artificial Sequence: Synthetic oligonucleotide
  Antisense strand to SEQ ID NO: 1894400
caucacacugcucauguga

SEQ ID NO: 1894402 - RNA, 19 nt, Artificial Sequence
  Description of Artificial Sequence: Synthetic oligonucleotide
  Sense strand starting at position 3494 of SEQ ID NO: 1879257
uugagaaauuauucuguga

SEQ ID NO: 1894403 - RNA, 19 nt, Artificial Sequence
  Description of Artificial Sequence: Synthetic oligonucleotide
  Antisense strand to SEQ ID NO: 1894402
ucacagaauaauuucucaa

SEQ ID NO: 1894404 - RNA, 19 nt, Artificial Sequence
  Description of Artificial Sequence: Synthetic oligonucleotide
  Sense strand starting at position 3577 of SEQ ID NO: 1879257
cugcauaagugaccauacu

SEQ ID NO: 1894405 - RNA, 19 nt, Artificial Sequence
  Description of Artificial Sequence: Synthetic oligonucleotide
  Antisense strand to SEQ ID NO: 1894404
aguauggucacuuaugcag

SEQ ID NO: 1894406 - RNA, 19 nt, Artificial Sequence
  Description of Artificial Sequence: Synthetic oligonucleotide
  Sense strand starting at position 3739 of SEQ ID NO: 1879257
uuaauuuggugugaggaga

SEQ ID NO: 1894407 - RNA, 19 nt, Artificial Sequence
  Description of Artificial Sequence: Synthetic oligonucleotide
  Antisense strand to SEQ ID NO: 1894406
ucuccucacaccaaauuaa

SEQ ID NO: 1894408 - RNA, 19 nt, Artificial Sequence
  Description of Artificial Sequence: Synthetic oligonucleotide
  Sense strand starting at position 3810 of SEQ ID NO: 1879257
agucauacccuugaacagu

SEQ ID NO: 1894409 - RNA, 19 nt, Artificial Sequence
  Description of Artificial Sequence: Synthetic oligonucleotide
  Antisense strand to SEQ ID NO: 1894408
acuguucaaggguaugacu

SEQ ID NO: 1894410 - RNA, 19 nt, Artificial Sequence
  Description of Artificial Sequence: Synthetic oligonucleotide
  Sense strand starting at position 3857 of SEQ ID NO: 1879257
uaaguacaucgagggaaau

SEQ ID NO: 1894411 - RNA, 19 nt, Artificial Sequence
  Description of Artificial Sequence: Synthetic oligonucleotide
  Antisense strand to SEQ ID NO: 1894410
auuucccucgauguacuua

SEQ ID NO: 1894412 - RNA, 19 nt, Artificial Sequence
  Description of Artificial Sequence: Synthetic oligonucleotide
  Sense strand starting at position 60 of SEQ ID NO: 1879258
gcaaucaaugaauaauugu

SEQ ID NO: 1894413 - RNA, 19 nt, Artificial Sequence
  Description of Artificial Sequence: Synthetic oligonucleotide
  Antisense strand to SEQ ID NO: 1894412
acaauuauucauugauugc

SEQ ID NO: 1894414 - RNA, 19 nt, Artificial Sequence
  Description of Artificial Sequence: Synthetic oligonucleotide
  Sense strand starting at position 73 of SEQ ID NO: 1879258
aauuguuaagagcaaaggu

SEQ ID NO: 1894415 - RNA, 19 nt, Artificial Sequence
  Description of Artificial Sequence: Synthetic oligonucleotide
  Antisense strand to SEQ ID NO: 1894414
accuuugcucuuaacaauu

SEQ ID NO: 1894416 - RNA, 19 nt, Artificial Sequence
  Description of Artificial Sequence: Synthetic oligonucleotide
  Sense strand starting at position 82 of SEQ ID NO: 1879258
gagcaaagguauguaaagu

SEQ ID NO: 1894417 - RNA, 19 nt, Artificial Sequence
  Description of Artificial Sequence: Synthetic oligonucleotide
  Antisense strand to SEQ ID NO: 1894416
acuuuacauaccuuugcuc

SEQ ID NO: 1894418 - RNA, 19 nt, Artificial Sequence
  Description of Artificial Sequence: Synthetic oligonucleotide
  Sense strand starting at position 83 of SEQ ID NO: 1879258
agcaaagguauguaaaguu

SEQ ID NO: 1894419 - RNA, 19 nt, Artificial Sequence
  Description of Artificial Sequence: Synthetic oligonucleotide
  Antisense strand to SEQ ID NO: 1894418
aacuuuacauaccuuugcu

SEQ ID NO: 1894420 - RNA, 19 nt, Artificial Sequence
  Description of Artificial Sequence: Synthetic oligonucleotide
  Sense strand starting at position 92 of SEQ ID NO: 1879258
auguaaaguuaccuuaaag

SEQ ID NO: 1894421 - RNA, 19 nt, Artificial Sequence
  Description of Artificial Sequence: Synthetic oligonucleotide
  Antisense strand to SEQ ID NO: 1894420
cuuuaagguaacuuuacau

SEQ ID NO: 1894422 - RNA, 19 nt, Artificial Sequence
  Description of Artificial Sequence: Synthetic oligonucleotide
  Sense strand starting at position 212 of SEQ ID NO: 1879258
gccacaguggauuauuaag

SEQ ID NO: 1894423 - RNA, 19 nt, Artificial Sequence
  Description of Artificial Sequence: Synthetic oligonucleotide
  Antisense strand to SEQ ID NO: 1894422
cuuaauaauccacuguggc

SEQ ID NO: 1894424 - RNA, 19 nt, Artificial Sequence
  Description of Artificial Sequence: Synthetic oligonucleotide
  Sense strand starting at position 243 of SEQ ID NO: 1879258
uguggcuaccuauaucaaa

SEQ ID NO: 1894425 - RNA, 19 nt, Artificial Sequence
  Description of Artificial Sequence: Synthetic oligonucleotide
  Antisense strand to SEQ ID NO: 1894424
uuugauauagguagccaca

SEQ ID NO: 1894426 - RNA, 19 nt, Artificial Sequence
  Description of Artificial Sequence: Synthetic oligonucleotide
  Sense strand starting at position 255 of SEQ ID NO: 1879258
uaucaaaggcuguauguga

SEQ ID NO: 1894427 - RNA, 19 nt, Artificial Sequence
  Description of Artificial Sequence: Synthetic oligonucleotide
  Antisense strand to SEQ ID NO: 1894426
ucacauacagccuuugaua

SEQ ID NO: 1894428 - RNA, 19 nt, Artificial Sequence
  Description of Artificial Sequence: Synthetic oligonucleotide
  Sense strand starting at position 387 of SEQ ID NO: 1879258
aucauaaagccagguaaga

SEQ ID NO: 1894429 - RNA, 19 nt, Artificial Sequence
  Description of Artificial Sequence: Synthetic oligonucleotide
  Antisense strand to SEQ ID NO: 1894428
ucuuaccuggcuuuaugau

SEQ ID NO: 1894430 - RNA, 19 nt, Artificial Sequence
  Description of Artificial Sequence: Synthetic oligonucleotide
  Sense strand starting at position 513 of SEQ ID NO: 1879258
cccacugguccugguagaa

SEQ ID NO: 1894431 - RNA, 19 nt, Artificial Sequence
  Description of Artificial Sequence: Synthetic oligonucleotide
  Antisense strand to SEQ ID NO: 1894430
uucuaccaggaccaguggg

SEQ ID NO: 1894432 - RNA, 19 nt, Artificial Sequence
  Description of Artificial Sequence: Synthetic oligonucleotide
  Sense strand starting at position 706 of SEQ ID NO: 1879258
aagggauucuuagcaucag

SEQ ID NO: 1894433 - RNA, 19 nt, Artificial Sequence
  Description of Artificial Sequence: Synthetic oligonucleotide
  Antisense strand to SEQ ID NO: 1894432
cugaugcuaagaaucccuu

SEQ ID NO: 1894434 - RNA, 19 nt, Artificial Sequence
  Description of Artificial Sequence: Synthetic oligonucleotide
  Sense strand starting at position 844 of SEQ ID NO: 1879258
uugacuucuguugaagauu

SEQ ID NO: 1894435 - RNA, 19 nt, Artificial Sequence
  Description of Artificial Sequence: Synthetic oligonucleotide
  Antisense strand to SEQ ID NO: 1894434
aaucuucaacagaagucaa

SEQ ID NO: 1894436 - RNA, 19 nt, Artificial Sequence
  Description of Artificial Sequence: Synthetic oligonucleotide
  Sense strand starting at position 888 of SEQ ID NO: 1879258
uuaaguguauaaucacgau

SEQ ID NO: 1894437 - RNA, 19 nt, Artificial Sequence
  Description of Artificial Sequence: Synthetic oligonucleotide
  Antisense strand to SEQ ID NO: 1894436
aucgugauuauacacuuaa

SEQ ID NO: 1894438 - RNA, 19 nt, Artificial Sequence
  Description of Artificial Sequence: Synthetic oligonucleotide
  Sense strand starting at position 892 of SEQ ID NO: 1879258
guguauaaucacgauccaa

SEQ ID NO: 1894439 - RNA, 19 nt, Artificial Sequence
  Description of Artificial Sequence: Synthetic oligonucleotide
  Antisense strand to SEQ ID NO: 1894438
uuggaucgugauuauacac

SEQ ID NO: 1894440 - RNA, 19 nt, Artificial Sequence
  Description of Artificial Sequence: Synthetic oligonucleotide
  Sense strand starting at position 923 of SEQ ID NO: 1879258
uucuuauacagugguagag

SEQ ID NO: 1894441 - RNA, 19 nt, Artificial Sequence
  Description of Artificial Sequence: Synthetic oligonucleotide
  Antisense strand to SEQ ID NO: 1894440
cucuaccacuguauaagaa

SEQ ID NO: 1894442 - RNA, 19 nt, Artificial Sequence
  Description of Artificial Sequence: Synthetic oligonucleotide
  Sense strand starting at position 927 of SEQ ID NO: 1879258
uauacagugguagaguuua

SEQ ID NO: 1894443 - RNA, 19 nt, Artificial Sequence
  Description of Artificial Sequence: Synthetic oligonucleotide
  Antisense strand to SEQ ID NO: 1894442
uaaacucuaccacuguaua

SEQ ID NO: 1894444 - RNA, 19 nt, Artificial Sequence
  Description of Artificial Sequence: Synthetic oligonucleotide
  Sense strand starting at position 933 of SEQ ID NO: 1879258
gugguagaguuuaagggaa

SEQ ID NO: 1894445 - RNA, 19 nt, Artificial Sequence
  Description of Artificial Sequence: Synthetic oligonucleotide
  Antisense strand to SEQ ID NO: 1894444
uucccuuaaacucuaccac

SEQ ID NO: 1894446 - RNA, 19 nt, Artificial Sequence
  Description of Artificial Sequence: Synthetic oligonucleotide
  Sense strand starting at position 987 of SEQ ID NO: 1879258
cccacauuguauguacuua

SEQ ID NO: 1894447 - RNA, 19 nt, Artificial Sequence
  Description of Artificial Sequence: Synthetic oligonucleotide
  Antisense strand to SEQ ID NO: 1894446
uaaguacauacaauguggg

SEQ ID NO: 1894448 - RNA, 19 nt, Artificial Sequence
  Description of Artificial Sequence: Synthetic oligonucleotide
  Sense strand starting at position 1726 of SEQ ID NO: 1879258
guaagacagcucggauaga

SEQ ID NO: 1894449 - RNA, 19 nt, Artificial Sequence
  Description of Artificial Sequence: Synthetic oligonucleotide
  Antisense strand to SEQ ID NO: 1894448
ucuauccgagcugucuuac

SEQ ID NO: 1894450 - RNA, 19 nt, Artificial Sequence
  Description of Artificial Sequence: Synthetic oligonucleotide
  Sense strand starting at position 2027 of SEQ ID NO: 1879258
gucuuagaauauuccgauu

SEQ ID NO: 1894451 - RNA, 19 nt, Artificial Sequence
  Description of Artificial Sequence: Synthetic oligonucleotide
  Antisense strand to SEQ ID NO: 1894450
aaucggaauauucuaagac

SEQ ID NO: 1894452 - RNA, 19 nt, Artificial Sequence
  Description of Artificial Sequence: Synthetic oligonucleotide
  Sense strand starting at position 2197 of SEQ ID NO: 1879258
gccgaauagcacuaggaua

SEQ ID NO: 1894453 - RNA, 19 nt, Artificial Sequence
  Description of Artificial Sequence: Synthetic oligonucleotide
  Antisense strand to SEQ ID NO: 1894452
uauccuagugcuauucggc

SEQ ID NO: 1894454 - RNA, 19 nt, Artificial Sequence
  Description of Artificial Sequence: Synthetic oligonucleotide
  Sense strand starting at position 2235 of SEQ ID NO: 1879258
cgguauuucugaguaccca

SEQ ID NO: 1894455 - RNA, 19 nt, Artificial Sequence
  Description of Artificial Sequence: Synthetic oligonucleotide
  Antisense strand to SEQ ID NO: 1894454
uggguacucagaaauaccg

SEQ ID NO: 1894456 - RNA, 19 nt, Artificial Sequence
  Description of Artificial Sequence: Synthetic oligonucleotide
  Sense strand starting at position 2243 of SEQ ID NO: 1879258
cugaguacccaucaguaac

SEQ ID NO: 1894457 - RNA, 19 nt, Artificial Sequence
  Description of Artificial Sequence: Synthetic oligonucleotide
  Antisense strand to SEQ ID NO: 1894456
guuacugauggguacucag

SEQ ID NO: 1894458 - RNA, 19 nt, Artificial Sequence
  Description of Artificial Sequence: Synthetic oligonucleotide
  Sense strand starting at position 2324 of SEQ ID NO: 1879258
uucgguucuauaggauacu

SEQ ID NO: 1894459 - RNA, 19 nt, Artificial Sequence
  Description of Artificial Sequence: Synthetic oligonucleotide
  Antisense strand to SEQ ID NO: 1894458
aguauccuauagaaccgaa

SEQ ID NO: 1894460 - RNA, 19 nt, Artificial Sequence
  Description of Artificial Sequence: Synthetic oligonucleotide
  Sense strand starting at position 2469 of SEQ ID NO: 1879258
uguugugaucugcagaaua

SEQ ID NO: 1894461 - RNA, 19 nt, Artificial Sequence
  Description of Artificial Sequence: Synthetic oligonucleotide
  Antisense strand to SEQ ID NO: 1894460
uauucugcagaucacaaca

SEQ ID NO: 1894462 - RNA, 19 nt, Artificial Sequence
  Description of Artificial Sequence: Synthetic oligonucleotide
  Sense strand starting at position 2471 of SEQ ID NO: 1879258
uugugaucugcagaauaac

SEQ ID NO: 1894463 - RNA, 19 nt, Artificial Sequence
  Description of Artificial Sequence: Synthetic oligonucleotide
  Antisense strand to SEQ ID NO: 1894462
guuauucugcagaucacaa

SEQ ID NO: 1894464 - RNA, 19 nt, Artificial Sequence
  Description of Artificial Sequence: Synthetic oligonucleotide
  Sense strand starting at position 2526 of SEQ ID NO: 1879258
auguauuauuagcccuacu

SEQ ID NO: 1894465 - RNA, 19 nt, Artificial Sequence
  Description of Artificial Sequence: Synthetic oligonucleotide
  Antisense strand to SEQ ID NO: 1894464
aguagggcuaauaauacau

SEQ ID NO: 1894466 - RNA, 19 nt, Artificial Sequence
  Description of Artificial Sequence: Synthetic oligonucleotide
  Sense strand starting at position 2640 of SEQ ID NO: 1879258
ggcgaucuuacauggauuc

SEQ ID NO: 1894467 - RNA, 19 nt, Artificial Sequence
  Description of Artificial Sequence: Synthetic oligonucleotide
  Antisense strand to SEQ ID NO: 1894466
gaauccauguaagaucgcc

SEQ ID NO: 1894468 - RNA, 19 nt, Artificial Sequence
  Description of Artificial Sequence: Synthetic oligonucleotide
  Sense strand starting at position 2641 of SEQ ID NO: 1879258
gcgaucuuacauggauucu

SEQ ID NO: 1894469 - RNA, 19 nt, Artificial Sequence
  Description of Artificial Sequence: Synthetic oligonucleotide
  Antisense strand to SEQ ID NO: 1894468
agaauccauguaagaucgc

SEQ ID NO: 1894470 - RNA, 19 nt, Artificial Sequence
  Description of Artificial Sequence: Synthetic oligonucleotide
  Sense strand starting at position 2653 of SEQ ID NO: 1879258
ggauucugcuacuuaguaa

SEQ ID NO: 1894471 - RNA, 19 nt, Artificial Sequence
  Description of Artificial Sequence: Synthetic oligonucleotide
  Antisense strand to SEQ ID NO: 1894470
uuacuaaguagcagaaucc

SEQ ID NO: 1894472 - RNA, 19 nt, Artificial Sequence
  Description of Artificial Sequence: Synthetic oligonucleotide
  Sense strand starting at position 2664 of SEQ ID NO: 1879258
cuuaguaaguuauuggcua

SEQ ID NO: 1894473 - RNA, 19 nt, Artificial Sequence
  Description of Artificial Sequence: Synthetic oligonucleotide
  Antisense strand to SEQ ID NO: 1894472
uagccaauaacuuacuaag

SEQ ID NO: 1894474 - RNA, 19 nt, Artificial Sequence
  Description of Artificial Sequence: Synthetic oligonucleotide
  Sense strand starting at position 2668 of SEQ ID NO: 1879258
guaaguuauuggcuauauu

SEQ ID NO: 1894475 - RNA, 19 nt, Artificial Sequence
  Description of Artificial Sequence: Synthetic oligonucleotide
  Antisense strand to SEQ ID NO: 1894474
aauauagccaauaacuuac

SEQ ID NO: 1894476 - RNA, 19 nt, Artificial Sequence
  Description of Artificial Sequence: Synthetic oligonucleotide
  Sense strand starting at position 2678 of SEQ ID NO: 1879258
ggcuauauuuaccaauaug

SEQ ID NO: 1894477 - RNA, 19 nt, Artificial Sequence
  Description of Artificial Sequence: Synthetic oligonucleotide
  Antisense strand to SEQ ID NO: 1894476
cauauugguaaauauagcc

SEQ ID NO: 1894478 - RNA, 19 nt, Artificial Sequence
  Description of Artificial Sequence: Synthetic oligonucleotide
  Sense strand starting at position 2733 of SEQ ID NO: 1879258
guaguccugccacauuauu

SEQ ID NO: 1894479 - RNA, 19 nt, Artificial Sequence
  Description of Artificial Sequence: Synthetic oligonucleotide
  Antisense strand to SEQ ID NO: 1894478
aauaauguggcaggacuac

SEQ ID NO: 1894480 - RNA, 19 nt, Artificial Sequence
  Description of Artificial Sequence: Synthetic oligonucleotide
  Sense strand starting at position 2990 of SEQ ID NO: 1879258
uccagagccuguucuuaaa

SEQ ID NO: 1894481 - RNA, 19 nt, Artificial Sequence
  Description of Artificial Sequence: Synthetic oligonucleotide
  Antisense strand to SEQ ID NO: 1894480
uuuaagaacaggcucugga

SEQ ID NO: 1894482 - RNA, 19 nt, Artificial Sequence
  Description of Artificial Sequence: Synthetic oligonucleotide
  Sense strand starting at position 3043 of SEQ ID NO: 1879258
ucuguaaucucccuuagua

SEQ ID NO: 1894483 - RNA, 19 nt, Artificial Sequence
  Description of Artificial Sequence: Synthetic oligonucleotide
  Antisense strand to SEQ ID NO: 1894482
uacuaagggagauuacaga

SEQ ID NO: 1894484 - RNA, 19 nt, Artificial Sequence
  Description of Artificial Sequence: Synthetic oligonucleotide
  Sense strand starting at position 3045 of SEQ ID NO: 1879258
uguaaucucccuuaguaca

SEQ ID NO: 1894485 - RNA, 19 nt, Artificial Sequence
  Description of Artificial Sequence: Synthetic oligonucleotide
  Antisense strand to SEQ ID NO: 1894484
uguacuaagggagauuaca

SEQ ID NO: 1894486 - RNA, 19 nt, Artificial Sequence
  Description of Artificial Sequence: Synthetic oligonucleotide
  Sense strand starting at position 3110 of SEQ ID NO: 1879258
gagugagcagcucaauauc

SEQ ID NO: 1894487 - RNA, 19 nt, Artificial Sequence
  Description of Artificial Sequence: Synthetic oligonucleotide
  Antisense strand to SEQ ID NO: 1894486
gauauugagcugcucacuc

SEQ ID NO: 1894488 - RNA, 19 nt, Artificial Sequence
  Description of Artificial Sequence: Synthetic oligonucleotide
  Sense strand starting at position 3113 of SEQ ID NO: 1879258
ugagcagcucaauaucagu

SEQ ID NO: 1894489 - RNA, 19 nt, Artificial Sequence
  Description of Artificial Sequence: Synthetic oligonucleotide
  Antisense strand to SEQ ID NO: 1894488
acugauauugagcugcuca

SEQ ID NO: 1894490 - RNA, 19 nt, Artificial Sequence
  Description of Artificial Sequence: Synthetic oligonucleotide
  Sense strand starting at position 3152 of SEQ ID NO: 1879258
ggguuugaaugccuagguu

SEQ ID NO: 1894491 - RNA, 19 nt, Artificial Sequence
  Description of Artificial Sequence: Synthetic oligonucleotide
  Antisense strand to SEQ ID NO: 1894490
aaccuaggcauucaaaccc

SEQ ID NO: 1894492 - RNA, 19 nt, Artificial Sequence
  Description of Artificial Sequence: Synthetic oligonucleotide
  Sense strand starting at position 164 of SEQ ID NO: 1879259
ggcacacugugaucucaag

SEQ ID NO: 1894493 - RNA, 19 nt, Artificial Sequence
  Description of Artificial Sequence: Synthetic oligonucleotide
  Antisense strand to SEQ ID NO: 1894492
cuugagaucacagugugcc

SEQ ID NO: 1894494 - RNA, 19 nt, Artificial Sequence
  Description of Artificial Sequence: Synthetic oligonucleotide
  Sense strand starting at position 170 of SEQ ID NO: 1879259
cugugaucucaagagcaga

SEQ ID NO: 1894495 - RNA, 19 nt, Artificial Sequence
  Description of Artificial Sequence: Synthetic oligonucleotide
  Antisense strand to SEQ ID NO: 1894494
ucugcucuugagaucacag

SEQ ID NO: 1894496 - RNA, 19 nt, Artificial Sequence
  Description of Artificial Sequence: Synthetic oligonucleotide
  Sense strand starting at position 205 of SEQ ID NO: 1879259
aguaauagcccucaugaau

SEQ ID NO: 1894497 - RNA, 19 nt, Artificial Sequence
  Description of Artificial Sequence: Synthetic oligonucleotide
  Antisense strand to SEQ ID NO: 1894496
auucaugagggcuauuacu

SEQ ID NO: 1894498 - RNA, 19 nt, Artificial Sequence
  Description of Artificial Sequence: Synthetic oligonucleotide
  Sense strand starting at position 481 of SEQ ID NO: 1879259
ccaggcucacaucagaauu

SEQ ID NO: 1894499 - RNA, 19 nt, Artificial Sequence
  Description of Artificial Sequence: Synthetic oligonucleotide
  Antisense strand to SEQ ID NO: 1894498
aauucugaugugagccugg

SEQ ID NO: 1894500 - RNA, 19 nt, Artificial Sequence
  Description of Artificial Sequence: Synthetic oligonucleotide
  Sense strand starting at position 656 of SEQ ID NO: 1879259
auaagacucuuggccugua

SEQ ID NO: 1894501 - RNA, 19 nt, Artificial Sequence
  Description of Artificial Sequence: Synthetic oligonucleotide
  Antisense strand to SEQ ID NO: 1894500
uacaggccaagagucuuau

SEQ ID NO: 1894502 - RNA, 19 nt, Artificial Sequence
  Description of Artificial Sequence: Synthetic oligonucleotide
  Sense strand starting at position 765 of SEQ ID NO: 1879259
ugcagucagagguacuaau

SEQ ID NO: 1894503 - RNA, 19 nt, Artificial Sequence
  Description of Artificial Sequence: Synthetic oligonucleotide
  Antisense strand to SEQ ID NO: 1894502
auuaguaccucugacugca

SEQ ID NO: 1894504 - RNA, 19 nt, Artificial Sequence
  Description of Artificial Sequence: Synthetic oligonucleotide
  Sense strand starting at position 1013 of SEQ ID NO: 1879259
uguugcaucaccuggaaag

SEQ ID NO: 1894505 - RNA, 19 nt, Artificial Sequence
  Description of Artificial Sequence: Synthetic oligonucleotide
  Antisense strand to SEQ ID NO: 1894504
cuuuccaggugaugcaaca

SEQ ID NO: 1894506 - RNA, 19 nt, Artificial Sequence
  Description of Artificial Sequence: Synthetic oligonucleotide
  Sense strand starting at position 1027 of SEQ ID NO: 1879259
gaaaguggucuucagagug

SEQ ID NO: 1894507 - RNA, 19 nt, Artificial Sequence
  Description of Artificial Sequence: Synthetic oligonucleotide
  Antisense strand to SEQ ID NO: 1894506
cacucugaagaccacuuuc

SEQ ID NO: 1894508 - RNA, 19 nt, Artificial Sequence
  Description of Artificial Sequence: Synthetic oligonucleotide
  Sense strand starting at position 1034 of SEQ ID NO: 1879259
gucuucagaguguaggaaa

SEQ ID NO: 1894509 - RNA, 19 nt, Artificial Sequence
  Description of Artificial Sequence: Synthetic oligonucleotide
  Antisense strand to SEQ ID NO: 1894508
uuuccuacacucugaagac

SEQ ID NO: 1894510 - RNA, 19 nt, Artificial Sequence
  Description of Artificial Sequence: Synthetic oligonucleotide
  Sense strand starting at position 1098 of SEQ ID NO: 1879259
ugagaaauguuagccucau

SEQ ID NO: 1894511 - RNA, 19 nt, Artificial Sequence
  Description of Artificial Sequence: Synthetic oligonucleotide
  Antisense strand to SEQ ID NO: 1894510
augaggcuaacauuucuca

SEQ ID NO: 1894512 - RNA, 19 nt, Artificial Sequence
  Description of Artificial Sequence: Synthetic oligonucleotide
  Sense strand starting at position 1099 of SEQ ID NO: 1879259
gagaaauguuagccucauu

SEQ ID NO: 1894513 - RNA, 19 nt, Artificial Sequence
  Description of Artificial Sequence: Synthetic oligonucleotide
  Antisense strand to SEQ ID NO: 1894512
aaugaggcuaacauuucuc

SEQ ID NO: 1894514 - RNA, 19 nt, Artificial Sequence
  Description of Artificial Sequence: Synthetic oligonucleotide
  Sense strand starting at position 1128 of SEQ ID NO: 1879259
cgagguugccuuuaacaca

SEQ ID NO: 1894515 - RNA, 19 nt, Artificial Sequence
  Description of Artificial Sequence: Synthetic oligonucleotide
  Antisense strand to SEQ ID NO: 1894514
uguguuaaaggcaaccucg

SEQ ID NO: 1894516 - RNA, 19 nt, Artificial Sequence
  Description of Artificial Sequence: Synthetic oligonucleotide
  Sense strand starting at position 1157 of SEQ ID NO: 1879259
guguguuggcuccuguuca

SEQ ID NO: 1894517 - RNA, 19 nt, Artificial Sequence
  Description of Artificial Sequence: Synthetic oligonucleotide
  Antisense strand to SEQ ID NO: 1894516
ugaacaggagccaacacac

SEQ ID NO: 1894518 - RNA, 19 nt, Artificial Sequence
  Description of Artificial Sequence: Synthetic oligonucleotide
  Sense strand starting at position 1239 of SEQ ID NO: 1879259
ggaguuucugaagacguag

SEQ ID NO: 1894519 - RNA, 19 nt, Artificial Sequence
  Description of Artificial Sequence: Synthetic oligonucleotide
  Antisense strand to SEQ ID NO: 1894518
cuacgucuucagaaacucc

SEQ ID NO: 1894520 - RNA, 19 nt, Artificial Sequence
  Description of Artificial Sequence: Synthetic oligonucleotide
  Sense strand starting at position 1250 of SEQ ID NO: 1879259
agacguagccauggagaga

SEQ ID NO: 1894521 - RNA, 19 nt, Artificial Sequence
  Description of Artificial Sequence: Synthetic oligonucleotide
  Antisense strand to SEQ ID NO: 1894520
ucucuccauggcuacgucu

SEQ ID NO: 1894522 - RNA, 19 nt, Artificial Sequence
  Description of Artificial Sequence: Synthetic oligonucleotide
  Sense strand starting at position 1371 of SEQ ID NO: 1879259
ggaagcuuugccgaaagga

SEQ ID NO: 1894523 - RNA, 19 nt, Artificial Sequence
  Description of Artificial Sequence: Synthetic oligonucleotide
  Antisense strand to SEQ ID NO: 1894522
uccuuucggcaaagcuucc

SEQ ID NO: 1894524 - RNA, 19 nt, Artificial Sequence
  Description of Artificial Sequence: Synthetic oligonucleotide
  Sense strand starting at position 2175 of SEQ ID NO: 1879259
ccagcaugcagugaggauu

SEQ ID NO: 1894525 - RNA, 19 nt, Artificial Sequence
  Description of Artificial Sequence: Synthetic oligonucleotide
  Antisense strand to SEQ ID NO: 1894524
aauccucacugcaugcugg

SEQ ID NO: 1894526 - RNA, 19 nt, Artificial Sequence
  Description of Artificial Sequence: Synthetic oligonucleotide
  Sense strand starting at position 2437 of SEQ ID NO: 1879259
gaugaagccagcgaaaugu

SEQ ID NO: 1894527 - RNA, 19 nt, Artificial Sequence
  Description of Artificial Sequence: Synthetic oligonucleotide
  Antisense strand to SEQ ID NO: 1894526
acauuucgcuggcuucauc

SEQ ID NO: 1894528 - RNA, 19 nt, Artificial Sequence
  Description of Artificial Sequence: Synthetic oligonucleotide
  Sense strand starting at position 2468 of SEQ ID NO: 1879259
gagugaugacccuaaguuu

SEQ ID NO: 1894529 - RNA, 19 nt, Artificial Sequence
  Description of Artificial Sequence: Synthetic oligonucleotide
  Antisense strand to SEQ ID NO: 1894528
aaacuuagggucaucacuc

SEQ ID NO: 1894530 - RNA, 19 nt, Artificial Sequence
  Description of Artificial Sequence: Synthetic oligonucleotide
  Sense strand starting at position 2546 of SEQ ID NO: 1879259
gaguuacuggugugggaug

SEQ ID NO: 1894531 - RNA, 19 nt, Artificial Sequence
  Description of Artificial Sequence: Synthetic oligonucleotide
  Antisense strand to SEQ ID NO: 1894530
caucccacaccaguaacuc

SEQ ID NO: 1894532 - RNA, 19 nt, Artificial Sequence
  Description of Artificial Sequence: Synthetic oligonucleotide
  Sense strand starting at position 2583 of SEQ ID NO: 1879259
auuaauccucaauguggaa

SEQ ID NO: 1894533 - RNA, 19 nt, Artificial Sequence
  Description of Artificial Sequence: Synthetic oligonucleotide
  Antisense strand to SEQ ID NO: 1894532
uuccacauugaggauuaau

SEQ ID NO: 1894534 - RNA, 19 nt, Artificial Sequence
  Description of Artificial Sequence: Synthetic oligonucleotide
  Sense strand starting at position 2674 of SEQ ID NO: 1879259
guaguaugcagcucugcau

SEQ ID NO: 1894535 - RNA, 19 nt, Artificial Sequence
  Description of Artificial Sequence: Synthetic oligonucleotide
  Antisense strand to SEQ ID NO: 1894534
augcagagcugcauacuac

SEQ ID NO: 1894536 - RNA, 19 nt, Artificial Sequence
  Description of Artificial Sequence: Synthetic oligonucleotide
  Sense strand starting at position 2697 of SEQ ID NO: 1879259
ucaacaaauguuuguuaug

SEQ ID NO: 1894537 - RNA, 19 nt, Artificial Sequence
  Description of Artificial Sequence: Synthetic oligonucleotide
  Antisense strand to SEQ ID NO: 1894536
cauaacaaacauuuguuga

SEQ ID NO: 1894538 - RNA, 19 nt, Artificial Sequence
  Description of Artificial Sequence: Synthetic oligonucleotide
  Sense strand starting at position 2706 of SEQ ID NO: 1879259
guuuguuaugugcuuccua

SEQ ID NO: 1894539 - RNA, 19 nt, Artificial Sequence
  Description of Artificial Sequence: Synthetic oligonucleotide
  Antisense strand to SEQ ID NO: 1894538
uaggaagcacauaacaaac

SEQ ID NO: 1894540 - RNA, 19 nt, Artificial Sequence
  Description of Artificial Sequence: Synthetic oligonucleotide
  Sense strand starting at position 2750 of SEQ ID NO: 1879259
cgggaaugccgugauaaac

SEQ ID NO: 1894541 - RNA, 19 nt, Artificial Sequence
  Description of Artificial Sequence: Synthetic oligonucleotide
  Antisense strand to SEQ ID NO: 1894540
guuuaucacggcauucccg

SEQ ID NO: 1894542 - RNA, 19 nt, Artificial Sequence
  Description of Artificial Sequence: Synthetic oligonucleotide
  Sense strand starting at position 2855 of SEQ ID NO: 1879259
ggaagaucgcuguaaugag

SEQ ID NO: 1894543 - RNA, 19 nt, Artificial Sequence
  Description of Artificial Sequence: Synthetic oligonucleotide
  Antisense strand to SEQ ID NO: 1894542
cucauuacagcgaucuucc

SEQ ID NO: 1894544 - RNA, 19 nt, Artificial Sequence
  Description of Artificial Sequence: Synthetic oligonucleotide
  Sense strand starting at position 2922 of SEQ ID NO: 1879259
ggaggaguauuucagucaa

SEQ ID NO: 1894545 - RNA, 19 nt, Artificial Sequence
  Description of Artificial Sequence: Synthetic oligonucleotide
  Antisense strand to SEQ ID NO: 1894544
uugacugaaauacuccucc

SEQ ID NO: 1894546 - RNA, 19 nt, Artificial Sequence
  Description of Artificial Sequence: Synthetic oligonucleotide
  Sense strand starting at position 3002 of SEQ ID NO: 1879259
ucacucuugcugggacaca

SEQ ID NO: 1894547 - RNA, 19 nt, Artificial Sequence
  Description of Artificial Sequence: Synthetic oligonucleotide
  Antisense strand to SEQ ID NO: 1894546
ugugucccagcaagaguga

SEQ ID NO: 1894548 - RNA, 19 nt, Artificial Sequence
  Description of Artificial Sequence: Synthetic oligonucleotide
  Sense strand starting at position 3149 of SEQ ID NO: 1879259
augagugugcguguguuua

SEQ ID NO: 1894549 - RNA, 19 nt, Artificial Sequence
  Description of Artificial Sequence: Synthetic oligonucleotide
  Antisense strand to SEQ ID NO: 1894548
uaaacacacgcacacucau

SEQ ID NO: 1894550 - RNA, 19 nt, Artificial Sequence
  Description of Artificial Sequence: Synthetic oligonucleotide
  Sense strand starting at position 3231 of SEQ ID NO: 1879259
gggagaugaguguggcaga

SEQ ID NO: 1894551 - RNA, 19 nt, Artificial Sequence
  Description of Artificial Sequence: Synthetic oligonucleotide
  Antisense strand to SEQ ID NO: 1894550
ucugccacacucaucuccc

SEQ ID NO: 1894552 - RNA, 19 nt, Artificial Sequence
  Description of Artificial Sequence: Synthetic oligonucleotide
  Sense strand starting at position 3420 of SEQ ID NO: 1879259
uugggaguccugugaccac

SEQ ID NO: 1894553 - RNA, 19 nt, Artificial Sequence
  Description of Artificial Sequence: Synthetic oligonucleotide
  Antisense strand to SEQ ID NO: 1894552
guggucacaggacucccaa

SEQ ID NO: 1894554 - RNA, 19 nt, Artificial Sequence
  Description of Artificial Sequence: Synthetic oligonucleotide
  Sense strand starting at position 3424 of SEQ ID NO: 1879259
gaguccugugaccaccauu

SEQ ID NO: 1894555 - RNA, 19 nt, Artificial Sequence
  Description of Artificial Sequence: Synthetic oligonucleotide
  Antisense strand to SEQ ID NO: 1894554
aaugguggucacaggacuc

SEQ ID NO: 1894556 - RNA, 19 nt, Artificial Sequence
  Description of Artificial Sequence: Synthetic oligonucleotide
  Sense strand starting at position 3455 of SEQ ID NO: 1879259
gugggcuagccugauggau

SEQ ID NO: 1894557 - RNA, 19 nt, Artificial Sequence
  Description of Artificial Sequence: Synthetic oligonucleotide
  Antisense strand to SEQ ID NO: 1894556
auccaucaggcuagcccac

SEQ ID NO: 1894558 - RNA, 19 nt, Artificial Sequence
  Description of Artificial Sequence: Synthetic oligonucleotide
  Sense strand starting at position 3683 of SEQ ID NO: 1879259
auuggaugcuguuccagaa

SEQ ID NO: 1894559 - RNA, 19 nt, Artificial Sequence
  Description of Artificial Sequence: Synthetic oligonucleotide
  Antisense strand to SEQ ID NO: 1894558
uucuggaacagcauccaau

SEQ ID NO: 1894560 - RNA, 19 nt, Artificial Sequence
  Description of Artificial Sequence: Synthetic oligonucleotide
  Sense strand starting at position 3718 of SEQ ID NO: 1879259
ggcuucguuguggcugaua

SEQ ID NO: 1894561 - RNA, 19 nt, Artificial Sequence
  Description of Artificial Sequence: Synthetic oligonucleotide
  Antisense strand to SEQ ID NO: 1894560
uaucagccacaacgaagcc

SEQ ID NO: 1894562 - RNA, 19 nt, Artificial Sequence
  Description of Artificial Sequence: Synthetic oligonucleotide
  Sense strand starting at position 3736 of SEQ ID NO: 1879259
agugguggagaccgaaaua

SEQ ID NO: 1894563 - RNA, 19 nt, Artificial Sequence
  Description of Artificial Sequence: Synthetic oligonucleotide
  Antisense strand to SEQ ID NO: 1894562
uauuucggucuccaccacu

SEQ ID NO: 1894564 - RNA, 19 nt, Artificial Sequence
  Description of Artificial Sequence: Synthetic oligonucleotide
  Sense strand starting at position 3773 of SEQ ID NO: 1879259
uggaguaaagucuguggaa

SEQ ID NO: 1894565 - RNA, 19 nt, Artificial Sequence
  Description of Artificial Sequence: Synthetic oligonucleotide
  Antisense strand to SEQ ID NO: 1894564
uuccacagacuuuacucca

SEQ ID NO: 1894566 - RNA, 19 nt, Artificial Sequence
  Description of Artificial Sequence: Synthetic oligonucleotide
  Sense strand starting at position 3774 of SEQ ID NO: 1879259
ggaguaaagucuguggaac

SEQ ID NO: 1894567 - RNA, 19 nt, Artificial Sequence
  Description of Artificial Sequence: Synthetic oligonucleotide
  Antisense strand to SEQ ID NO: 1894566
guuccacagacuuuacucc

SEQ ID NO: 1894568 - RNA, 19 nt, Artificial Sequence
  Description of Artificial Sequence: Synthetic oligonucleotide
  Sense strand starting at position 3775 of SEQ ID NO: 1879259
gaguaaagucuguggaacu

SEQ ID NO: 1894569 - RNA, 19 nt, Artificial Sequence
  Description of Artificial Sequence: Synthetic oligonucleotide
  Antisense strand to SEQ ID NO: 1894568
aguuccacagacuuuacuc

SEQ ID NO: 1894570 - RNA, 19 nt, Artificial Sequence
  Description of Artificial Sequence: Synthetic oligonucleotide
  Sense strand starting at position 3791 of SEQ ID NO: 1879259
acuugcuaauggguuagau

SEQ ID NO: 1894571 - RNA, 19 nt, Artificial Sequence
  Description of Artificial Sequence: Synthetic oligonucleotide
  Antisense strand to SEQ ID NO: 1894570
aucuaacccauuagcaagu

SEQ ID NO: 1894572 - RNA, 19 nt, Artificial Sequence
  Description of Artificial Sequence: Synthetic oligonucleotide
  Sense strand starting at position 132 of SEQ ID NO: 1879260
cccucugcucuugggaauu

SEQ ID NO: 1894573 - RNA, 19 nt, Artificial Sequence
  Description of Artificial Sequence: Synthetic oligonucleotide
  Antisense strand to SEQ ID NO: 1894572
aauucccaagagcagaggg

SEQ ID NO: 1894574 - RNA, 19 nt, Artificial Sequence
  Description of Artificial Sequence: Synthetic oligonucleotide
  Sense strand starting at position 244 of SEQ ID NO: 1879260
ugaggacucugccaccuaa

SEQ ID NO: 1894575 - RNA, 19 nt, Artificial Sequence
  Description of Artificial Sequence: Synthetic oligonucleotide
  Antisense strand to SEQ ID NO: 1894574
uuagguggcagaguccuca

SEQ ID NO: 1894576 - RNA, 19 nt, Artificial Sequence
  Description of Artificial Sequence: Synthetic oligonucleotide
  Sense strand starting at position 627 of SEQ ID NO: 1879260
accggaaugagcugugcuu

SEQ ID NO: 1894577 - RNA, 19 nt, Artificial Sequence
  Description of Artificial Sequence: Synthetic oligonucleotide
  Antisense strand to SEQ ID NO: 1894576
aagcacagcucauuccggu

SEQ ID NO: 1894578 - RNA, 19 nt, Artificial Sequence
  Description of Artificial Sequence: Synthetic oligonucleotide
  Sense strand starting at position 629 of SEQ ID NO: 1879260
cggaaugagcugugcuuaa

SEQ ID NO: 1894579 - RNA, 19 nt, Artificial Sequence
  Description of Artificial Sequence: Synthetic oligonucleotide
  Antisense strand to SEQ ID NO: 1894578
uuaagcacagcucauuccg

SEQ ID NO: 1894580 - RNA, 19 nt, Artificial Sequence
  Description of Artificial Sequence: Synthetic oligonucleotide
  Sense strand starting at position 633 of SEQ ID NO: 1879260
augagcugugcuuaaagaa

SEQ ID NO: 1894581 - RNA, 19 nt, Artificial Sequence
  Description of Artificial Sequence: Synthetic oligonucleotide
  Antisense strand to SEQ ID NO: 1894580
uucuuuaagcacagcucau

SEQ ID NO: 1894582 - RNA, 19 nt, Artificial Sequence
  Description of Artificial Sequence: Synthetic oligonucleotide
  Sense strand starting at position 837 of SEQ ID NO: 1879260
ucaaauagagccugucuuu

SEQ ID NO: 1894583 - RNA, 19 nt, Artificial Sequence
  Description of Artificial Sequence: Synthetic oligonucleotide
  Antisense strand to SEQ ID NO: 1894582
aaagacaggcucuauuuga

SEQ ID NO: 1894584 - RNA, 19 nt, Artificial Sequence
  Description of Artificial Sequence: Synthetic oligonucleotide
  Sense strand starting at position 975 of SEQ ID NO: 1879260
gcacguggcacuguuaauu

SEQ ID NO: 1894585 - RNA, 19 nt, Artificial Sequence
  Description of Artificial Sequence: Synthetic oligonucleotide
  Antisense strand to SEQ ID NO: 1894584
aauuaacagugccacgugc

SEQ ID NO: 1894586 - RNA, 19 nt, Artificial Sequence
  Description of Artificial Sequence: Synthetic oligonucleotide
  Sense strand starting at position 985 of SEQ ID NO: 1879260
cuguuaauuuguuggaguc

SEQ ID NO: 1894587 - RNA, 19 nt, Artificial Sequence
  Description of Artificial Sequence: Synthetic oligonucleotide
  Antisense strand to SEQ ID NO: 1894586
gacuccaacaaauuaacag

SEQ ID NO: 1894588 - RNA, 19 nt, Artificial Sequence
  Description of Artificial Sequence: Synthetic oligonucleotide
  Sense strand starting at position 1125 of SEQ ID NO: 1879260
ccuagaauaaggugacgau

SEQ ID NO: 1894589 - RNA, 19 nt, Artificial Sequence
  Description of Artificial Sequence: Synthetic oligonucleotide
  Antisense strand to SEQ ID NO: 1894588
aucgucaccuuauucuagg

SEQ ID NO: 1894590 - RNA, 19 nt, Artificial Sequence
  Description of Artificial Sequence: Synthetic oligonucleotide
  Sense strand starting at position 2063 of SEQ ID NO: 1879260
gggcuugguugucaugaga

SEQ ID NO: 1894591 - RNA, 19 nt, Artificial Sequence
  Description of Artificial Sequence: Synthetic oligonucleotide
  Antisense strand to SEQ ID NO: 1894590
ucucaugacaaccaagccc

SEQ ID NO: 1894592 - RNA, 19 nt, Artificial Sequence
  Description of Artificial Sequence: Synthetic oligonucleotide
  Sense strand starting at position 2066 of SEQ ID NO: 1879260
cuugguugucaugagagug

SEQ ID NO: 1894593 - RNA, 19 nt, Artificial Sequence
  Description of Artificial Sequence: Synthetic oligonucleotide
  Antisense strand to SEQ ID NO: 1894592
cacucucaugacaaccaag

SEQ ID NO: 1894594 - RNA, 19 nt, Artificial Sequence
  Description of Artificial Sequence: Synthetic oligonucleotide
  Sense strand starting at position 2194 of SEQ ID NO: 1879260
ccgaguuccgucugaggaa

SEQ ID NO: 1894595 - RNA, 19 nt, Artificial Sequence
  Description of Artificial Sequence: Synthetic oligonucleotide
  Antisense strand to SEQ ID NO: 1894594
uuccucagacggaacucgg

SEQ ID NO: 1894596 - RNA, 19 nt, Artificial Sequence
  Description of Artificial Sequence: Synthetic oligonucleotide
  Sense strand starting at position 2195 of SEQ ID NO: 1879260
cgaguuccgucugaggaag

SEQ ID NO: 1894597 - RNA, 19 nt, Artificial Sequence
  Description of Artificial Sequence: Synthetic oligonucleotide
  Antisense strand to SEQ ID NO: 1894596
cuuccucagacggaacucg

SEQ ID NO: 1894598 - RNA, 19 nt, Artificial Sequence
  Description of Artificial Sequence: Synthetic oligonucleotide
  Sense strand starting at position 2633 of SEQ ID NO: 1879260
gcccauuuagcguggaaua

SEQ ID NO: 1894599 - RNA, 19 nt, Artificial Sequence
  Description of Artificial Sequence: Synthetic oligonucleotide
  Antisense strand to SEQ ID NO: 1894598
uauuccacgcuaaaugggc

SEQ ID NO: 1894600 - RNA, 19 nt, Artificial Sequence
  Description of Artificial Sequence: Synthetic oligonucleotide
  Sense strand starting at position 2634 of SEQ ID NO: 1879260
cccauuuagcguggaauau

SEQ ID NO: 1894601 - RNA, 19 nt, Artificial Sequence
  Description of Artificial Sequence: Synthetic oligonucleotide
  Antisense strand to SEQ ID NO: 1894600
auauuccacgcuaaauggg

SEQ ID NO: 1894602 - RNA, 19 nt, Artificial Sequence
  Description of Artificial Sequence: Synthetic oligonucleotide
  Sense strand starting at position 2712 of SEQ ID NO: 1879260
auguguucugcugagcaaa

SEQ ID NO: 1894603 - RNA, 19 nt, Artificial Sequence
  Description of Artificial Sequence: Synthetic oligonucleotide
  Antisense strand to SEQ ID NO: 1894602
uuugcucagcagaacacau

SEQ ID NO: 1894604 - RNA, 19 nt, Artificial Sequence
  Description of Artificial Sequence: Synthetic oligonucleotide
  Sense strand starting at position 2743 of SEQ ID NO: 1879260
auugcucugucccuauaga

SEQ ID NO: 1894605 - RNA, 19 nt, Artificial Sequence
  Description of Artificial Sequence: Synthetic oligonucleotide
  Antisense strand to SEQ ID NO: 1894604
ucuauagggacagagcaau

SEQ ID NO: 1894606 - RNA, 19 nt, Artificial Sequence
  Description of Artificial Sequence: Synthetic oligonucleotide
  Sense strand starting at position 2760 of SEQ ID NO: 1879260
gagauuaaagucugauggu

SEQ ID NO: 1894607 - RNA, 19 nt, Artificial Sequence
  Description of Artificial Sequence: Synthetic oligonucleotide
  Antisense strand to SEQ ID NO: 1894606
accaucagacuuuaaucuc

SEQ ID NO: 1894608 - RNA, 19 nt, Artificial Sequence
  Description of Artificial Sequence: Synthetic oligonucleotide
  Sense strand starting at position 2761 of SEQ ID NO: 1879260
agauuaaagucugaugguu

SEQ ID NO: 1894609 - RNA, 19 nt, Artificial Sequence
  Description of Artificial Sequence: Synthetic oligonucleotide
  Antisense strand to SEQ ID NO: 1894608
aaccaucagacuuuaaucu

SEQ ID NO: 1894610 - RNA, 19 nt, Artificial Sequence
  Description of Artificial Sequence: Synthetic oligonucleotide
  Sense strand starting at position 3182 of SEQ ID NO: 1879260
uuuguuuccuagucuugua

SEQ ID NO: 1894611 - RNA, 19 nt, Artificial Sequence
  Description of Artificial Sequence: Synthetic oligonucleotide
  Antisense strand to SEQ ID NO: 1894610
uacaagacuaggaaacaaa

SEQ ID NO: 1894612 - RNA, 19 nt, Artificial Sequence
  Description of Artificial Sequence: Synthetic oligonucleotide
  Sense strand starting at position 3187 of SEQ ID NO: 1879260
uuccuagucuuguaacaaa

SEQ ID NO: 1894613 - RNA, 19 nt, Artificial Sequence
  Description of Artificial Sequence: Synthetic oligonucleotide
  Antisense strand to SEQ ID NO: 1894612
uuuguuacaagacuaggaa

SEQ ID NO: 1894614 - RNA, 19 nt, Artificial Sequence
  Description of Artificial Sequence: Synthetic oligonucleotide
  Sense strand starting at position 3217 of SEQ ID NO: 1879260
uacacugaguuuccguuua

SEQ ID NO: 1894615 - RNA, 19 nt, Artificial Sequence
  Description of Artificial Sequence: Synthetic oligonucleotide
  Antisense strand to SEQ ID NO: 1894614
uaaacggaaacucagugua

SEQ ID NO: 1894616 - RNA, 19 nt, Artificial Sequence
  Description of Artificial Sequence: Synthetic oligonucleotide
  Sense strand starting at position 3219 of SEQ ID NO: 1879260
cacugaguuuccguuuaau

SEQ ID NO: 1894617 - RNA, 19 nt, Artificial Sequence
  Description of Artificial Sequence: Synthetic oligonucleotide
  Antisense strand to SEQ ID NO: 1894616
auuaaacggaaacucagug

SEQ ID NO: 1894618 - RNA, 19 nt, Artificial Sequence
  Description of Artificial Sequence: Synthetic oligonucleotide
  Sense strand starting at position 3326 of SEQ ID NO: 1879260
gauguacucuggcauuugu

SEQ ID NO: 1894619 - RNA, 19 nt, Artificial Sequence
  Description of Artificial Sequence: Synthetic oligonucleotide
  Antisense strand to SEQ ID NO: 1894618
acaaaugccagaguacauc

SEQ ID NO: 1894620 - RNA, 19 nt, Artificial Sequence
  Description of Artificial Sequence: Synthetic oligonucleotide
  Sense strand starting at position 3334 of SEQ ID NO: 1879260
cuggcauuugucgggaugu

SEQ ID NO: 1894621 - RNA, 19 nt, Artificial Sequence
  Description of Artificial Sequence: Synthetic oligonucleotide
  Antisense strand to SEQ ID NO: 1894620
acaucccgacaaaugccag

SEQ ID NO: 1894622 - RNA, 19 nt, Artificial Sequence
  Description of Artificial Sequence: Synthetic oligonucleotide
  Sense strand starting at position 3335 of SEQ ID NO: 1879260
uggcauuugucgggauguc

SEQ ID NO: 1894623 - RNA, 19 nt, Artificial Sequence
  Description of Artificial Sequence: Synthetic oligonucleotide
  Antisense strand to SEQ ID NO: 1894622
gacaucccgacaaaugcca

SEQ ID NO: 1894624 - RNA, 19 nt, Artificial Sequence
  Description of Artificial Sequence: Synthetic oligonucleotide
  Sense strand starting at position 3384 of SEQ ID NO: 1879260
ucaugccucuggugaggaa

SEQ ID NO: 1894625 - RNA, 19 nt, Artificial Sequence
  Description of Artificial Sequence: Synthetic oligonucleotide
  Antisense strand to SEQ ID NO: 1894624
uuccucaccagaggcauga

SEQ ID NO: 1894626 - RNA, 19 nt, Artificial Sequence
  Description of Artificial Sequence: Synthetic oligonucleotide
  Sense strand starting at position 3500 of SEQ ID NO: 1879260
uuccaaguaucuuauguaa

SEQ ID NO: 1894627 - RNA, 19 nt, Artificial Sequence
  Description of Artificial Sequence: Synthetic oligonucleotide
  Antisense strand to SEQ ID NO: 1894626
uuacauaagauacuuggaa

SEQ ID NO: 1894628 - RNA, 19 nt, Artificial Sequence
  Description of Artificial Sequence: Synthetic oligonucleotide
  Sense strand starting at position 3502 of SEQ ID NO: 1879260
ccaaguaucuuauguaaca

SEQ ID NO: 1894629 - RNA, 19 nt, Artificial Sequence
  Description of Artificial Sequence: Synthetic oligonucleotide
  Antisense strand to SEQ ID NO: 1894628
uguuacauaagauacuugg

SEQ ID NO: 1894630 - RNA, 19 nt, Artificial Sequence
  Description of Artificial Sequence: Synthetic oligonucleotide
  Sense strand starting at position 3512 of SEQ ID NO: 1879260
uauguaacacuugaagguu

SEQ ID NO: 1894631 - RNA, 19 nt, Artificial Sequence
  Description of Artificial Sequence: Synthetic oligonucleotide
  Antisense strand to SEQ ID NO: 1894630
aaccuucaaguguuacaua

SEQ ID NO: 1894632 - RNA, 19 nt, Artificial Sequence
  Description of Artificial Sequence: Synthetic oligonucleotide
  Sense strand starting at position 3605 of SEQ ID NO: 1879260
auaccagacugagguaaua

SEQ ID NO: 1894633 - RNA, 19 nt, Artificial Sequence
  Description of Artificial Sequence: Synthetic oligonucleotide
  Antisense strand to SEQ ID NO: 1894632
uauuaccucagucugguau

SEQ ID NO: 1894634 - RNA, 19 nt, Artificial Sequence
  Description of Artificial Sequence: Synthetic oligonucleotide
  Sense strand starting at position 3646 of SEQ ID NO: 1879260
gcauuucucuuagcugguu

SEQ ID NO: 1894635 - RNA, 19 nt, Artificial Sequence
  Description of Artificial Sequence: Synthetic oligonucleotide
  Antisense strand to SEQ ID NO: 1894634
aaccagcuaagagaaaugc

SEQ ID NO: 1894636 - RNA, 19 nt, Artificial Sequence
  Description of Artificial Sequence: Synthetic oligonucleotide
  Sense strand starting at position 3651 of SEQ ID NO: 1879260
ucucuuagcugguucuuaa

SEQ ID NO: 1894637 - RNA, 19 nt, Artificial Sequence
  Description of Artificial Sequence: Synthetic oligonucleotide
  Antisense strand to SEQ ID NO: 1894636
uuaagaaccagcuaagaga

SEQ ID NO: 1894638 - RNA, 19 nt, Artificial Sequence
  Description of Artificial Sequence: Synthetic oligonucleotide
  Sense strand starting at position 3722 of SEQ ID NO: 1879260
acccuucuguuugacugaa

SEQ ID NO: 1894639 - RNA, 19 nt, Artificial Sequence
  Description of Artificial Sequence: Synthetic oligonucleotide
  Antisense strand to SEQ ID NO: 1894638
uucagucaaacagaagggu

SEQ ID NO: 1894640 - RNA, 19 nt, Artificial Sequence
  Description of Artificial Sequence: Synthetic oligonucleotide
  Sense strand starting at position 3753 of SEQ ID NO: 1879260
uuaugucuucgagccguaa

SEQ ID NO: 1894641 - RNA, 19 nt, Artificial Sequence
  Description of Artificial Sequence: Synthetic oligonucleotide
  Antisense strand to SEQ ID NO: 1894640
uuacggcucgaagacauaa

SEQ ID NO: 1894642 - RNA, 19 nt, Artificial Sequence
  Description of Artificial Sequence: Synthetic oligonucleotide
  Sense strand starting at position 3755 of SEQ ID NO: 1879260
augucuucgagccguaaca

SEQ ID NO: 1894643 - RNA, 19 nt, Artificial Sequence
  Description of Artificial Sequence: Synthetic oligonucleotide
  Antisense strand to SEQ ID NO: 1894642
uguuacggcucgaagacau

SEQ ID NO: 1894644 - RNA, 19 nt, Artificial Sequence
  Description of Artificial Sequence: Synthetic oligonucleotide
  Sense strand starting at position 3757 of SEQ ID NO: 1879260
gucuucgagccguaacaga

SEQ ID NO: 1894645 - RNA, 19 nt, Artificial Sequence
  Description of Artificial Sequence: Synthetic oligonucleotide
  Antisense strand to SEQ ID NO: 1894644
ucuguuacggcucgaagac

SEQ ID NO: 1894646 - RNA, 19 nt, Artificial Sequence
  Description of Artificial Sequence: Synthetic oligonucleotide
  Sense strand starting at position 3772 of SEQ ID NO: 1879260
cagagaguguugguuaggu

SEQ ID NO: 1894647 - RNA, 19 nt, Artificial Sequence
  Description of Artificial Sequence: Synthetic oligonucleotide
  Antisense strand to SEQ ID NO: 1894646
accuaaccaacacucucug

SEQ ID NO: 1894648 - RNA, 19 nt, Artificial Sequence
  Description of Artificial Sequence: Synthetic oligonucleotide
  Sense strand starting at position 3777 of SEQ ID NO: 1879260
aguguugguuagguucaga

SEQ ID NO: 1894649 - RNA, 19 nt, Artificial Sequence
  Description of Artificial Sequence: Synthetic oligonucleotide
  Antisense strand to SEQ ID NO: 1894648
ucugaaccuaaccaacacu

SEQ ID NO: 1894650 - RNA, 19 nt, Artificial Sequence
  Description of Artificial Sequence: Synthetic oligonucleotide
  Sense strand starting at position 3782 of SEQ ID NO: 1879260
ugguuagguucagagacua

SEQ ID NO: 1894651 - RNA, 19 nt, Artificial Sequence
  Description of Artificial Sequence: Synthetic oligonucleotide
  Antisense strand to SEQ ID NO: 1894650
uagucucugaaccuaacca

SEQ ID NO: 1894652 - RNA, 19 nt, Artificial Sequence
  Description of Artificial Sequence: Synthetic oligonucleotide
  Sense strand starting at position 492 of SEQ ID NO: 1879261
cguccacucccuuaagauu

SEQ ID NO: 1894653 - RNA, 19 nt, Artificial Sequence
  Description of Artificial Sequence: Synthetic oligonucleotide
  Antisense strand to SEQ ID NO: 1894652
aaucuuaagggaguggacg

SEQ ID NO: 1894654 - RNA, 19 nt, Artificial Sequence
  Description of Artificial Sequence: Synthetic oligonucleotide
  Sense strand starting at position 515 of SEQ ID NO: 1879261
auagcuaucccuuguagaa

SEQ ID NO: 1894655 - RNA, 19 nt, Artificial Sequence
  Description of Artificial Sequence: Synthetic oligonucleotide
  Antisense strand to SEQ ID NO: 1894654
uucuacaagggauagcuau

SEQ ID NO: 1894656 - RNA, 19 nt, Artificial Sequence
  Description of Artificial Sequence: Synthetic oligonucleotide
  Sense strand starting at position 533 of SEQ ID NO: 1879261
acccuuaaugugugucaaa

SEQ ID NO: 1894657 - RNA, 19 nt, Artificial Sequence
  Description of Artificial Sequence: Synthetic oligonucleotide
  Antisense strand to SEQ ID NO: 1894656
uuugacacacauuaagggu

SEQ ID NO: 1894658 - RNA, 19 nt, Artificial Sequence
  Description of Artificial Sequence: Synthetic oligonucleotide
  Sense strand starting at position 534 of SEQ ID NO: 1879261
cccuuaaugugugucaaac

SEQ ID NO: 1894659 - RNA, 19 nt, Artificial Sequence
  Description of Artificial Sequence: Synthetic oligonucleotide
  Antisense strand to SEQ ID NO: 1894658
guuugacacacauuaaggg

SEQ ID NO: 1894660 - RNA, 19 nt, Artificial Sequence
  Description of Artificial Sequence: Synthetic oligonucleotide
  Sense strand starting at position 1138 of SEQ ID NO: 1879261
gggcuagugaaauauuguc

SEQ ID NO: 1894661 - RNA, 19 nt, Artificial Sequence
  Description of Artificial Sequence: Synthetic oligonucleotide
  Antisense strand to SEQ ID NO: 1894660
gacaauauuucacuagccc

SEQ ID NO: 1894662 - RNA, 19 nt, Artificial Sequence
  Description of Artificial Sequence: Synthetic oligonucleotide
  Sense strand starting at position 1143 of SEQ ID NO: 1879261
agugaaauauuguccuaca

SEQ ID NO: 1894663 - RNA, 19 nt, Artificial Sequence
  Description of Artificial Sequence: Synthetic oligonucleotide
  Antisense strand to SEQ ID NO: 1894662
uguaggacaauauuucacu

SEQ ID NO: 1894664 - RNA, 19 nt, Artificial Sequence
  Description of Artificial Sequence: Synthetic oligonucleotide
  Sense strand starting at position 1144 of SEQ ID NO: 1879261
gugaaauauuguccuacac

SEQ ID NO: 1894665 - RNA, 19 nt, Artificial Sequence
  Description of Artificial Sequence: Synthetic oligonucleotide
  Antisense strand to SEQ ID NO: 1894664
guguaggacaauauuucac

SEQ ID NO: 1894666 - RNA, 19 nt, Artificial Sequence
  Description of Artificial Sequence: Synthetic oligonucleotide
  Sense strand starting at position 1266 of SEQ ID NO: 1879261
gcccuuaagcgauaacuaa

SEQ ID NO: 1894667 - RNA, 19 nt, Artificial Sequence
  Description of Artificial Sequence: Synthetic oligonucleotide
  Antisense strand to SEQ ID NO: 1894666
uuaguuaucgcuuaagggc

SEQ ID NO: 1894668 - RNA, 19 nt, Artificial Sequence
  Description of Artificial Sequence: Synthetic oligonucleotide
  Sense strand starting at position 1363 of SEQ ID NO: 1879261
gccuuaccucgcuauacua

SEQ ID NO: 1894669 - RNA, 19 nt, Artificial Sequence
  Description of Artificial Sequence: Synthetic oligonucleotide
  Antisense strand to SEQ ID NO: 1894668
uaguauagcgagguaaggc

SEQ ID NO: 1894670 - RNA, 19 nt, Artificial Sequence
  Description of Artificial Sequence: Synthetic oligonucleotide
  Sense strand starting at position 1454 of SEQ ID NO: 1879261
uuauucguggcuugaauga

SEQ ID NO: 1894671 - RNA, 19 nt, Artificial Sequence
  Description of Artificial Sequence: Synthetic oligonucleotide
  Antisense strand to SEQ ID NO: 1894670
ucauucaagccacgaauaa

SEQ ID NO: 1894672 - RNA, 19 nt, Artificial Sequence
  Description of Artificial Sequence: Synthetic oligonucleotide
  Sense strand starting at position 1459 of SEQ ID NO: 1879261
cguggcuugaaugaaugaa

SEQ ID NO: 1894673 - RNA, 19 nt, Artificial Sequence
  Description of Artificial Sequence: Synthetic oligonucleotide
  Antisense strand to SEQ ID NO: 1894672
uucauucauucaagccacg

SEQ ID NO: 1894674 - RNA, 19 nt, Artificial Sequence
  Description of Artificial Sequence: Synthetic oligonucleotide
  Sense strand starting at position 2084 of SEQ ID NO: 1879261
gguuucguugcuagggaga

SEQ ID NO: 1894675 - RNA, 19 nt, Artificial Sequence
  Description of Artificial Sequence: Synthetic oligonucleotide
  Antisense strand to SEQ ID NO: 1894674
ucucccuagcaacgaaacc

SEQ ID NO: 1894676 - RNA, 19 nt, Artificial Sequence
  Description of Artificial Sequence: Synthetic oligonucleotide
  Sense strand starting at position 2133 of SEQ ID NO: 1879261
ccugcuacucuggauaauc

SEQ ID NO: 1894677 - RNA, 19 nt, Artificial Sequence
  Description of Artificial Sequence: Synthetic oligonucleotide
  Antisense strand to SEQ ID NO: 1894676
gauuauccagaguagcagg

SEQ ID NO: 1894678 - RNA, 19 nt, Artificial Sequence
  Description of Artificial Sequence: Synthetic oligonucleotide
  Sense strand starting at position 2200 of SEQ ID NO: 1879261
gcgcauguuagggaguuga

SEQ ID NO: 1894679 - RNA, 19 nt, Artificial Sequence
  Description of Artificial Sequence: Synthetic oligonucleotide
  Antisense strand to SEQ ID NO: 1894678
ucaacucccuaacaugcgc

SEQ ID NO: 1894680 - RNA, 19 nt, Artificial Sequence
  Description of Artificial Sequence: Synthetic oligonucleotide
  Sense strand starting at position 2256 of SEQ ID NO: 1879261
gggucugucauagggaucu

SEQ ID NO: 1894681 - RNA, 19 nt, Artificial Sequence
  Description of Artificial Sequence: Synthetic oligonucleotide
  Antisense strand to SEQ ID NO: 1894680
agaucccuaugacagaccc

SEQ ID NO: 1894682 - RNA, 19 nt, Artificial Sequence
  Description of Artificial Sequence: Synthetic oligonucleotide
  Sense strand starting at position 2281 of SEQ ID NO: 1879261
agaggagguucccuucgaa

SEQ ID NO: 1894683 - RNA, 19 nt, Artificial Sequence
  Description of Artificial Sequence: Synthetic oligonucleotide
  Antisense strand to SEQ ID NO: 1894682
uucgaagggaaccuccucu

SEQ ID NO: 1894684 - RNA, 19 nt, Artificial Sequence
  Description of Artificial Sequence: Synthetic oligonucleotide
  Sense strand starting at position 2307 of SEQ ID NO: 1879261
cuggaaaccuugcugcuaa

SEQ ID NO: 1894685 - RNA, 19 nt, Artificial Sequence
  Description of Artificial Sequence: Synthetic oligonucleotide
  Antisense strand to SEQ ID NO: 1894684
uuagcagcaagguuuccag

SEQ ID NO: 1894686 - RNA, 19 nt, Artificial Sequence
  Description of Artificial Sequence: Synthetic oligonucleotide
  Sense strand starting at position 2327 of SEQ ID NO: 1879261
uugguaggguuguugagau

SEQ ID NO: 1894687 - RNA, 19 nt, Artificial Sequence
  Description of Artificial Sequence: Synthetic oligonucleotide
  Antisense strand to SEQ ID NO: 1894686
aucucaacaacccuaccaa

SEQ ID NO: 1894688 - RNA, 19 nt, Artificial Sequence
  Description of Artificial Sequence: Synthetic oligonucleotide
  Sense strand starting at position 2339 of SEQ ID NO: 1879261
uugagauaauuacaugaga

SEQ ID NO: 1894689 - RNA, 19 nt, Artificial Sequence
  Description of Artificial Sequence: Synthetic oligonucleotide
  Antisense strand to SEQ ID NO: 1894688
ucucauguaauuaucucaa

SEQ ID NO: 1894690 - RNA, 19 nt, Artificial Sequence
  Description of Artificial Sequence: Synthetic oligonucleotide
  Sense strand starting at position 2403 of SEQ ID NO: 1879261
uguucagugggcguaguua

SEQ ID NO: 1894691 - RNA, 19 nt, Artificial Sequence
  Description of Artificial Sequence: Synthetic oligonucleotide
  Antisense strand to SEQ ID NO: 1894690
uaacuacgcccacugaaca

SEQ ID NO: 1894692 - RNA, 19 nt, Artificial Sequence
  Description of Artificial Sequence: Synthetic oligonucleotide
  Sense strand starting at position 2897 of SEQ ID NO: 1879261
acuguaagugcucagcaaa

SEQ ID NO: 1894693 - RNA, 19 nt, Artificial Sequence
  Description of Artificial Sequence: Synthetic oligonucleotide
  Antisense strand to SEQ ID NO: 1894692
uuugcugagcacuuacagu

SEQ ID NO: 1894694 - RNA, 19 nt, Artificial Sequence
  Description of Artificial Sequence: Synthetic oligonucleotide
  Sense strand starting at position 2900 of SEQ ID NO: 1879261
guaagugcucagcaaacua

SEQ ID NO: 1894695 - RNA, 19 nt, Artificial Sequence
  Description of Artificial Sequence: Synthetic oligonucleotide
  Antisense strand to SEQ ID NO: 1894694
uaguuugcugagcacuuac

SEQ ID NO: 1894696 - RNA, 19 nt, Artificial Sequence
  Description of Artificial Sequence: Synthetic oligonucleotide
  Sense strand starting at position 2910 of SEQ ID NO: 1879261
agcaaacuacuuuaaggua

SEQ ID NO: 1894697 - RNA, 19 nt, Artificial Sequence
  Description of Artificial Sequence: Synthetic oligonucleotide
  Antisense strand to SEQ ID NO: 1894696
uaccuuaaaguaguuugcu

SEQ ID NO: 1894698 - RNA, 19 nt, Artificial Sequence
  Description of Artificial Sequence: Synthetic oligonucleotide
  Sense strand starting at position 2918 of SEQ ID NO: 1879261
acuuuaagguaggaauaaa

SEQ ID NO: 1894699 - RNA, 19 nt, Artificial Sequence
  Description of Artificial Sequence: Synthetic oligonucleotide
  Antisense strand to SEQ ID NO: 1894698
uuuauuccuaccuuaaagu

SEQ ID NO: 1894700 - RNA, 19 nt, Artificial Sequence
  Description of Artificial Sequence: Synthetic oligonucleotide
  Sense strand starting at position 2978 of SEQ ID NO: 1879261
guuccaagucuuuggagua

SEQ ID NO: 1894701 - RNA, 19 nt, Artificial Sequence
  Description of Artificial Sequence: Synthetic oligonucleotide
  Antisense strand to SEQ ID NO: 1894700
uacuccaaagacuuggaac

SEQ ID NO: 1894702 - RNA, 19 nt, Artificial Sequence
  Description of Artificial Sequence: Synthetic oligonucleotide
  Sense strand starting at position 3003 of SEQ ID NO: 1879261
uguuccaagucuuuggaau

SEQ ID NO: 1894703 - RNA, 19 nt, Artificial Sequence
  Description of Artificial Sequence: Synthetic oligonucleotide
  Antisense strand to SEQ ID NO: 1894702
auuccaaagacuuggaaca

SEQ ID NO: 1894704 - RNA, 19 nt, Artificial Sequence
  Description of Artificial Sequence: Synthetic oligonucleotide
  Sense strand starting at position 3004 of SEQ ID NO: 1879261
guuccaagucuuuggaaua

SEQ ID NO: 1894705 - RNA, 19 nt, Artificial Sequence
  Description of Artificial Sequence: Synthetic oligonucleotide
  Antisense strand to SEQ ID NO: 1894704
uauuccaaagacuuggaac

SEQ ID NO: 1894706 - RNA, 19 nt, Artificial Sequence
  Description of Artificial Sequence: Synthetic oligonucleotide
  Sense strand starting at position 3009 of SEQ ID NO: 1879261
aagucuuuggaauaauugu

SEQ ID NO: 1894707 - RNA, 19 nt, Artificial Sequence
  Description of Artificial Sequence: Synthetic oligonucleotide
  Antisense strand to SEQ ID NO: 1894706
acaauuauuccaaagacuu

SEQ ID NO: 1894708 - RNA, 19 nt, Artificial Sequence
  Description of Artificial Sequence: Synthetic oligonucleotide
  Sense strand starting at position 3016 of SEQ ID NO: 1879261
uggaauaauuguguccuua

SEQ ID NO: 1894709 - RNA, 19 nt, Artificial Sequence
  Description of Artificial Sequence: Synthetic oligonucleotide
  Antisense strand to SEQ ID NO: 1894708
uaaggacacaauuauucca

SEQ ID NO: 1894710 - RNA, 19 nt, Artificial Sequence
  Description of Artificial Sequence: Synthetic oligonucleotide
  Sense strand starting at position 3036 of SEQ ID NO: 1879261
uuauuauacuagucacugu

SEQ ID NO: 1894711 - RNA, 19 nt, Artificial Sequence
  Description of Artificial Sequence: Synthetic oligonucleotide
  Antisense strand to SEQ ID NO: 1894710
acagugacuaguauaauaa

SEQ ID NO: 1894712 - RNA, 19 nt, Artificial Sequence
  Description of Artificial Sequence: Synthetic oligonucleotide
  Sense strand starting at position 3039 of SEQ ID NO: 1879261
uuauacuagucacuguuaa

SEQ ID NO: 1894713 - RNA, 19 nt, Artificial Sequence
  Description of Artificial Sequence: Synthetic oligonucleotide
  Antisense strand to SEQ ID NO: 1894712
uuaacagugacuaguauaa

SEQ ID NO: 1894714 - RNA, 19 nt, Artificial Sequence
  Description of Artificial Sequence: Synthetic oligonucleotide
  Sense strand starting at position 3043 of SEQ ID NO: 1879261
acuagucacuguuaaauuu

SEQ ID NO: 1894715 - RNA, 19 nt, Artificial Sequence
  Description of Artificial Sequence: Synthetic oligonucleotide
  Antisense strand to SEQ ID NO: 1894714
aaauuuaacagugacuagu

SEQ ID NO: 1894716 - RNA, 19 nt, Artificial Sequence
  Description of Artificial Sequence: Synthetic oligonucleotide
  Sense strand starting at position 3112 of SEQ ID NO: 1879261
gggauuguuccagggaauc

SEQ ID NO: 1894717 - RNA, 19 nt, Artificial Sequence
  Description of Artificial Sequence: Synthetic oligonucleotide
  Antisense strand to SEQ ID NO: 1894716
gauucccuggaacaauccc

SEQ ID NO: 1894718 - RNA, 19 nt, Artificial Sequence
  Description of Artificial Sequence: Synthetic oligonucleotide
  Sense strand starting at position 3138 of SEQ ID NO: 1879261
aucaauuaucugggcucau

SEQ ID NO: 1894719 - RNA, 19 nt, Artificial Sequence
  Description of Artificial Sequence: Synthetic oligonucleotide
  Antisense strand to SEQ ID NO: 1894718
augagcccagauaauugau

SEQ ID NO: 1894720 - RNA, 19 nt, Artificial Sequence
  Description of Artificial Sequence: Synthetic oligonucleotide
  Sense strand starting at position 3139 of SEQ ID NO: 1879261
ucaauuaucugggcucauu

SEQ ID NO: 1894721 - RNA, 19 nt, Artificial Sequence
  Description of Artificial Sequence: Synthetic oligonucleotide
  Antisense strand to SEQ ID NO: 1894720
aaugagcccagauaauuga

SEQ ID NO: 1894722 - RNA, 19 nt, Artificial Sequence
  Description of Artificial Sequence: Synthetic oligonucleotide
  Sense strand starting at position 3142 of SEQ ID NO: 1879261
auuaucugggcucauuaua

SEQ ID NO: 1894723 - RNA, 19 nt, Artificial Sequence
  Description of Artificial Sequence: Synthetic oligonucleotide
  Antisense strand to SEQ ID NO: 1894722
uauaaugagcccagauaau

SEQ ID NO: 1894724 - RNA, 19 nt, Artificial Sequence
  Description of Artificial Sequence: Synthetic oligonucleotide
  Sense strand starting at position 3150 of SEQ ID NO: 1879261
ggcucauuauaucuaugga

SEQ ID NO: 1894725 - RNA, 19 nt, Artificial Sequence
  Description of Artificial Sequence: Synthetic oligonucleotide
  Antisense strand to SEQ ID NO: 1894724
uccauagauauaaugagcc

SEQ ID NO: 1894726 - RNA, 19 nt, Artificial Sequence
  Description of Artificial Sequence: Synthetic oligonucleotide
  Sense strand starting at position 3293 of SEQ ID NO: 1879261
ucaugugauuguucuccuu

SEQ ID NO: 1894727 - RNA, 19 nt, Artificial Sequence
  Description of Artificial Sequence: Synthetic oligonucleotide
  Antisense strand to SEQ ID NO: 1894726
aaggagaacaaucacauga

SEQ ID NO: 1894728 - RNA, 19 nt, Artificial Sequence
  Description of Artificial Sequence: Synthetic oligonucleotide
  Sense strand starting at position 3295 of SEQ ID NO: 1879261
augugauuguucuccuuaa

SEQ ID NO: 1894729 - RNA, 19 nt, Artificial Sequence
  Description of Artificial Sequence: Synthetic oligonucleotide
  Antisense strand to SEQ ID NO: 1894728
uuaaggagaacaaucacau

SEQ ID NO: 1894730 - RNA, 19 nt, Artificial Sequence
  Description of Artificial Sequence: Synthetic oligonucleotide
  Sense strand starting at position 3296 of SEQ ID NO: 1879261
ugugauuguucuccuuaau

SEQ ID NO: 1894731 - RNA, 19 nt, Artificial Sequence
  Description of Artificial Sequence: Synthetic oligonucleotide
  Antisense strand to SEQ ID NO: 1894730
auuaaggagaacaaucaca

SEQ ID NO: 1894732 - RNA, 19 nt, Artificial Sequence
  Description of Artificial Sequence: Synthetic oligonucleotide
  Sense strand starting at position 359 of SEQ ID NO: 1879262
ugaagcauuguacacauua

SEQ ID NO: 1894733 - RNA, 19 nt, Artificial Sequence
  Description of Artificial Sequence: Synthetic oligonucleotide
  Antisense strand to SEQ ID NO: 1894732
uaauguguacaaugcuuca

SEQ ID NO: 1894734 - RNA, 19 nt, Artificial Sequence
  Description of Artificial Sequence: Synthetic oligonucleotide
  Sense strand starting at position 382 of SEQ ID NO: 1879262
ggcagaauuugauaccaga

SEQ ID NO: 1894735 - RNA, 19 nt, Artificial Sequence
  Description of Artificial Sequence: Synthetic oligonucleotide
  Antisense strand to SEQ ID NO: 1894734
ucugguaucaaauucugcc

SEQ ID NO: 1894736 - RNA, 19 nt, Artificial Sequence
  Description of Artificial Sequence: Synthetic oligonucleotide
  Sense strand starting at position 423 of SEQ ID NO: 1879262
ccagcuacucugggaagaa

SEQ ID NO: 1894737 - RNA, 19 nt, Artificial Sequence
  Description of Artificial Sequence: Synthetic oligonucleotide
  Antisense strand to SEQ ID NO: 1894736
uucuucccagaguagcugg

SEQ ID NO: 1894738 - RNA, 19 nt, Artificial Sequence
  Description of Artificial Sequence: Synthetic oligonucleotide
  Sense strand starting at position 466 of SEQ ID NO: 1879262
ucaggcuaugcagaaaucu

SEQ ID NO: 1894739 - RNA, 19 nt, Artificial Sequence
  Description of Artificial Sequence: Synthetic oligonucleotide
  Antisense strand to SEQ ID NO: 1894738
agauuucugcauagccuga

SEQ ID NO: 1894740 - RNA, 19 nt, Artificial Sequence
  Description of Artificial Sequence: Synthetic oligonucleotide
  Sense strand starting at position 525 of SEQ ID NO: 1879262
guucuuaaccuagaaaugu

SEQ ID NO: 1894741 - RNA, 19 nt, Artificial Sequence
  Description of Artificial Sequence: Synthetic oligonucleotide
  Antisense strand to SEQ ID NO: 1894740
acauuucuagguuaagaac

SEQ ID NO: 1894742 - RNA, 19 nt, Artificial Sequence
  Description of Artificial Sequence: Synthetic oligonucleotide
  Sense strand starting at position 533 of SEQ ID NO: 1879262
ccuagaaaugugugagagu

SEQ ID NO: 1894743 - RNA, 19 nt, Artificial Sequence
  Description of Artificial Sequence: Synthetic oligonucleotide
  Antisense strand to SEQ ID NO: 1894742
acucucacacauuucuagg

SEQ ID NO: 1894744 - RNA, 19 nt, Artificial Sequence
  Description of Artificial Sequence: Synthetic oligonucleotide
  Sense strand starting at position 556 of SEQ ID NO: 1879262
caugcuuugggucaggauu

SEQ ID NO: 1894745 - RNA, 19 nt, Artificial Sequence
  Description of Artificial Sequence: Synthetic oligonucleotide
  Antisense strand to SEQ ID NO: 1894744
aauccugacccaaagcaug

SEQ ID NO: 1894746 - RNA, 19 nt, Artificial Sequence
  Description of Artificial Sequence: Synthetic oligonucleotide
  Sense strand starting at position 591 of SEQ ID NO: 1879262
gccaauacauggcuauaaa

SEQ ID NO: 1894747 - RNA, 19 nt, Artificial Sequence
  Description of Artificial Sequence: Synthetic oligonucleotide
  Antisense strand to SEQ ID NO: 1894746
uuuauagccauguauuggc

SEQ ID NO: 1894748 - RNA, 19 nt, Artificial Sequence
  Description of Artificial Sequence: Synthetic oligonucleotide
  Sense strand starting at position 610 of SEQ ID NO: 1879262
uggaaauugcauggccaca

SEQ ID NO: 1894749 - RNA, 19 nt, Artificial Sequence
  Description of Artificial Sequence: Synthetic oligonucleotide
  Antisense strand to SEQ ID NO: 1894748
uguggccaugcaauuucca

SEQ ID NO: 1894750 - RNA, 19 nt, Artificial Sequence
  Description of Artificial Sequence: Synthetic oligonucleotide
  Sense strand starting at position 768 of SEQ ID NO: 1879262
uugugaguggguuacagaa

SEQ ID NO: 1894751 - RNA, 19 nt, Artificial Sequence
  Description of Artificial Sequence: Synthetic oligonucleotide
  Antisense strand to SEQ ID NO: 1894750
uucuguaacccacucacaa

SEQ ID NO: 1894752 - RNA, 19 nt, Artificial Sequence
  Description of Artificial Sequence: Synthetic oligonucleotide
  Sense strand starting at position 1058 of SEQ ID NO: 1879262
ggaauaaaucucugcccuu

SEQ ID NO: 1894753 - RNA, 19 nt, Artificial Sequence
  Description of Artificial Sequence: Synthetic oligonucleotide
  Antisense strand to SEQ ID NO: 1894752
aagggcagagauuuauucc

SEQ ID NO: 1894754 - RNA, 19 nt, Artificial Sequence
  Description of Artificial Sequence: Synthetic oligonucleotide
  Sense strand starting at position 1259 of SEQ ID NO: 1879262
gggaccagucaccaaguuu

SEQ ID NO: 1894755 - RNA, 19 nt, Artificial Sequence
  Description of Artificial Sequence: Synthetic oligonucleotide
  Antisense strand to SEQ ID NO: 1894754
aaacuuggugacugguccc

SEQ ID NO: 1894756 - RNA, 19 nt, Artificial Sequence
  Description of Artificial Sequence: Synthetic oligonucleotide
  Sense strand starting at position 1274 of SEQ ID NO: 1879262
guuuauagaaauggugagu

SEQ ID NO: 1894757 - RNA, 19 nt, Artificial Sequence
  Description of Artificial Sequence: Synthetic oligonucleotide
  Antisense strand to SEQ ID NO: 1894756
acucaccauuucuauaaac

SEQ ID NO: 1894758 - RNA, 19 nt, Artificial Sequence
  Description of Artificial Sequence: Synthetic oligonucleotide
  Sense strand starting at position 1279 of SEQ ID NO: 1879262
uagaaauggugagucacaa

SEQ ID NO: 1894759 - RNA, 19 nt, Artificial Sequence
  Description of Artificial Sequence: Synthetic oligonucleotide
  Antisense strand to SEQ ID NO: 1894758
uugugacucaccauuucua

SEQ ID NO: 1894760 - RNA, 19 nt, Artificial Sequence
  Description of Artificial Sequence: Synthetic oligonucleotide
  Sense strand starting at position 1343 of SEQ ID NO: 1879262
aguuguucuggugaaagaa

SEQ ID NO: 1894761 - RNA, 19 nt, Artificial Sequence
  Description of Artificial Sequence: Synthetic oligonucleotide
  Antisense strand to SEQ ID NO: 1894760
uucuuucaccagaacaacu

SEQ ID NO: 1894762 - RNA, 19 nt, Artificial Sequence
  Description of Artificial Sequence: Synthetic oligonucleotide
  Sense strand starting at position 1395 of SEQ ID NO: 1879262
uuguuccugccauaacuga

SEQ ID NO: 1894763 - RNA, 19 nt, Artificial Sequence
  Description of Artificial Sequence: Synthetic oligonucleotide
  Antisense strand to SEQ ID NO: 1894762
ucaguuauggcaggaacaa

SEQ ID NO: 1894764 - RNA, 19 nt, Artificial Sequence
  Description of Artificial Sequence: Synthetic oligonucleotide
  Sense strand starting at position 1564 of SEQ ID NO: 1879262
gguauuaauuugcuuauuc

SEQ ID NO: 1894765 - RNA, 19 nt, Artificial Sequence
  Description of Artificial Sequence: Synthetic oligonucleotide
  Antisense strand to SEQ ID NO: 1894764
gaauaagcaaauuaauacc

SEQ ID NO: 1894766 - RNA, 19 nt, Artificial Sequence
  Description of Artificial Sequence: Synthetic oligonucleotide
  Sense strand starting at position 1752 of SEQ ID NO: 1879262
ugcugauaaucaccacagu

SEQ ID NO: 1894767 - RNA, 19 nt, Artificial Sequence
  Description of Artificial Sequence: Synthetic oligonucleotide
  Antisense strand to SEQ ID NO: 1894766
acuguggugauuaucagca

SEQ ID NO: 1894768 - RNA, 19 nt, Artificial Sequence
  Description of Artificial Sequence: Synthetic oligonucleotide
  Sense strand starting at position 1794 of SEQ ID NO: 1879262
uguuuauuaugggugagau

SEQ ID NO: 1894769 - RNA, 19 nt, Artificial Sequence
  Description of Artificial Sequence: Synthetic oligonucleotide
  Antisense strand to SEQ ID NO: 1894768
aucucacccauaauaaaca

SEQ ID NO: 1894770 - RNA, 19 nt, Artificial Sequence
  Description of Artificial Sequence: Synthetic oligonucleotide
  Sense strand starting at position 1795 of SEQ ID NO: 1879262
guuuauuaugggugagaua

SEQ ID NO: 1894771 - RNA, 19 nt, Artificial Sequence
  Description of Artificial Sequence: Synthetic oligonucleotide
  Antisense strand to SEQ ID NO: 1894770
uaucucacccauaauaaac

SEQ ID NO: 1894772 - RNA, 19 nt, Artificial Sequence
  Description of Artificial Sequence: Synthetic oligonucleotide
  Sense strand starting at position 1814 of SEQ ID NO: 1879262
uggaauuaguugccuaaug

SEQ ID NO: 1894773 - RNA, 19 nt, Artificial Sequence
  Description of Artificial Sequence: Synthetic oligonucleotide
  Antisense strand to SEQ ID NO: 1894772
cauuaggcaacuaauucca

SEQ ID NO: 1894774 - RNA, 19 nt, Artificial Sequence
  Description of Artificial Sequence: Synthetic oligonucleotide
  Sense strand starting at position 1910 of SEQ ID NO: 1879262
auccaaagucaagguguua

SEQ ID NO: 1894775 - RNA, 19 nt, Artificial Sequence
  Description of Artificial Sequence: Synthetic oligonucleotide
  Antisense strand to SEQ ID NO: 1894774
uaacaccuugacuuuggau

SEQ ID NO: 1894776 - RNA, 19 nt, Artificial Sequence
  Description of Artificial Sequence: Synthetic oligonucleotide
  Sense strand starting at position 2202 of SEQ ID NO: 1879262
auccaagaauggucacauu

SEQ ID NO: 1894777 - RNA, 19 nt, Artificial Sequence
  Description of Artificial Sequence: Synthetic oligonucleotide
  Antisense strand to SEQ ID NO: 1894776
aaugugaccauucuuggau

SEQ ID NO: 1894778 - RNA, 19 nt, Artificial Sequence
  Description of Artificial Sequence: Synthetic oligonucleotide
  Sense strand starting at position 2286 of SEQ ID NO: 1879262
cuuaauaggaggcauguua

SEQ ID NO: 1894779 - RNA, 19 nt, Artificial Sequence
  Description of Artificial Sequence: Synthetic oligonucleotide
  Antisense strand to SEQ ID NO: 1894778
uaacaugccuccuauuaag

SEQ ID NO: 1894780 - RNA, 19 nt, Artificial Sequence
  Description of Artificial Sequence: Synthetic oligonucleotide
  Sense strand starting at position 2366 of SEQ ID NO: 1879262
ugugaacaucuggguaaua

SEQ ID NO: 1894781 - RNA, 19 nt, Artificial Sequence
  Description of Artificial Sequence: Synthetic oligonucleotide
  Antisense strand to SEQ ID NO: 1894780
uauuacccagauguucaca

SEQ ID NO: 1894782 - RNA, 19 nt, Artificial Sequence
  Description of Artificial Sequence: Synthetic oligonucleotide
  Sense strand starting at position 2367 of SEQ ID NO: 1879262
gugaacaucuggguaauau

SEQ ID NO: 1894783 - RNA, 19 nt, Artificial Sequence
  Description of Artificial Sequence: Synthetic oligonucleotide
  Antisense strand to SEQ ID NO: 1894782
auauuacccagauguucac

SEQ ID NO: 1894784 - RNA, 19 nt, Artificial Sequence
  Description of Artificial Sequence: Synthetic oligonucleotide
  Sense strand starting at position 2376 of SEQ ID NO: 1879262
uggguaauaucccugguag

SEQ ID NO: 1894785 - RNA, 19 nt, Artificial Sequence
  Description of Artificial Sequence: Synthetic oligonucleotide
  Antisense strand to SEQ ID NO: 1894784
cuaccagggauauuaccca

SEQ ID NO: 1894786 - RNA, 19 nt, Artificial Sequence
  Description of Artificial Sequence: Synthetic oligonucleotide
  Sense strand starting at position 2436 of SEQ ID NO: 1879262
cucugaauucugugacaga

SEQ ID NO: 1894787 - RNA, 19 nt, Artificial Sequence
  Description of Artificial Sequence: Synthetic oligonucleotide
  Antisense strand to SEQ ID NO: 1894786
ucugucacagaauucagag

SEQ ID NO: 1894788 - RNA, 19 nt, Artificial Sequence
  Description of Artificial Sequence: Synthetic oligonucleotide
  Sense strand starting at position 2569 of SEQ ID NO: 1879262
aagguuuggagucagaugu

SEQ ID NO: 1894789 - RNA, 19 nt, Artificial Sequence
  Description of Artificial Sequence: Synthetic oligonucleotide
  Antisense strand to SEQ ID NO: 1894788
acaucugacuccaaaccuu

SEQ ID NO: 1894790 - RNA, 19 nt, Artificial Sequence
  Description of Artificial Sequence: Synthetic oligonucleotide
  Sense strand starting at position 2573 of SEQ ID NO: 1879262
uuuggagucagaugugacu

SEQ ID NO: 1894791 - RNA, 19 nt, Artificial Sequence
  Description of Artificial Sequence: Synthetic oligonucleotide
  Antisense strand to SEQ ID NO: 1894790
agucacaucugacuccaaa

SEQ ID NO: 1894792 - RNA, 19 nt, Artificial Sequence
  Description of Artificial Sequence: Synthetic oligonucleotide
  Sense strand starting at position 2575 of SEQ ID NO: 1879262
uggagucagaugugacuuu

SEQ ID NO: 1894793 - RNA, 19 nt, Artificial Sequence
  Description of Artificial Sequence: Synthetic oligonucleotide
  Antisense strand to SEQ ID NO: 1894792
aaagucacaucugacucca

SEQ ID NO: 1894794 - RNA, 19 nt, Artificial Sequence
  Description of Artificial Sequence: Synthetic oligonucleotide
  Sense strand starting at position 2582 of SEQ ID NO: 1879262
agaugugacuuucuaagau

SEQ ID NO: 1894795 - RNA, 19 nt, Artificial Sequence
  Description of Artificial Sequence: Synthetic oligonucleotide
  Antisense strand to SEQ ID NO: 1894794
aucuuagaaagucacaucu

SEQ ID NO: 1894796 - RNA, 19 nt, Artificial Sequence
  Description of Artificial Sequence: Synthetic oligonucleotide
  Sense strand starting at position 3181 of SEQ ID NO: 1879262
ugcaaauguccauauguug

SEQ ID NO: 1894797 - RNA, 19 nt, Artificial Sequence
  Description of Artificial Sequence: Synthetic oligonucleotide
  Antisense strand to SEQ ID NO: 1894796
caacauauggacauuugca

SEQ ID NO: 1894798 - RNA, 19 nt, Artificial Sequence
  Description of Artificial Sequence: Synthetic oligonucleotide
  Sense strand starting at position 3261 of SEQ ID NO: 1879262
gaaucaggauucucaguau

SEQ ID NO: 1894799 - RNA, 19 nt, Artificial Sequence
  Description of Artificial Sequence: Synthetic oligonucleotide
  Antisense strand to SEQ ID NO: 1894798
auacugagaauccugauuc

SEQ ID NO: 1894800 - RNA, 19 nt, Artificial Sequence
  Description of Artificial Sequence: Synthetic oligonucleotide
  Sense strand starting at position 3264 of SEQ ID NO: 1879262
ucaggauucucaguaucac

SEQ ID NO: 1894801 - RNA, 19 nt, Artificial Sequence
  Description of Artificial Sequence: Synthetic oligonucleotide
  Antisense strand to SEQ ID NO: 1894800
gugauacugagaauccuga

SEQ ID NO: 1894802 - RNA, 19 nt, Artificial Sequence
  Description of Artificial Sequence: Synthetic oligonucleotide
  Sense strand starting at position 3273 of SEQ ID NO: 1879262
ucaguaucaccggaucuuu

SEQ ID NO: 1894803 - RNA, 19 nt, Artificial Sequence
  Description of Artificial Sequence: Synthetic oligonucleotide
  Antisense strand to SEQ ID NO: 1894802
aaagauccggugauacuga

SEQ ID NO: 1894804 - RNA, 19 nt, Artificial Sequence
  Description of Artificial Sequence: Synthetic oligonucleotide
  Sense strand starting at position 3638 of SEQ ID NO: 1879262
caggaugcauuccuuugau

SEQ ID NO: 1894805 - RNA, 19 nt, Artificial Sequence
  Description of Artificial Sequence: Synthetic oligonucleotide
  Antisense strand to SEQ ID NO: 1894804
aucaaaggaaugcauccug

SEQ ID NO: 1894806 - RNA, 19 nt, Artificial Sequence
  Description of Artificial Sequence: Synthetic oligonucleotide
  Sense strand starting at position 3717 of SEQ ID NO: 1879262
acgacaagcucuuuaaauu

SEQ ID NO: 1894807 - RNA, 19 nt, Artificial Sequence
  Description of Artificial Sequence: Synthetic oligonucleotide
  Antisense strand to SEQ ID NO: 1894806
aauuuaaagagcuugucgu

SEQ ID NO: 1894808 - RNA, 19 nt, Artificial Sequence
  Description of Artificial Sequence: Synthetic oligonucleotide
  Sense strand starting at position 3771 of SEQ ID NO: 1879262
uauagcgauguugaaauaa

SEQ ID NO: 1894809 - RNA, 19 nt, Artificial Sequence
  Description of Artificial Sequence: Synthetic oligonucleotide
  Antisense strand to SEQ ID NO: 1894808
uuauuucaacaucgcuaua

SEQ ID NO: 1894810 - RNA, 19 nt, Artificial Sequence
  Description of Artificial Sequence: Synthetic oligonucleotide
  Sense strand starting at position 3840 of SEQ ID NO: 1879262
ggacuugucaaaugaaugc

SEQ ID NO: 1894811 - RNA, 19 nt, Artificial Sequence
  Description of Artificial Sequence: Synthetic oligonucleotide
  Antisense strand to SEQ ID NO: 1894810
gcauucauuugacaagucc

SEQ ID NO: 1894812 - RNA, 19 nt, Artificial Sequence
  Description of Artificial Sequence: Synthetic oligonucleotide
  Sense strand starting at position 72 of SEQ ID NO: 1879263
ugguuugagguaugaauca

SEQ ID NO: 1894813 - RNA, 19 nt, Artificial Sequence
  Description of Artificial Sequence: Synthetic oligonucleotide
  Antisense strand to SEQ ID NO: 1894812
ugauucauaccucaaacca

SEQ ID NO: 1894814 - RNA, 19 nt, Artificial Sequence
  Description of Artificial Sequence: Synthetic oligonucleotide
  Sense strand starting at position 290 of SEQ ID NO: 1879263
agcauuagucuugaaacca

SEQ ID NO: 1894815 - RNA, 19 nt, Artificial Sequence
  Description of Artificial Sequence: Synthetic oligonucleotide
  Antisense strand to SEQ ID NO: 1894814
ugguuucaagacuaaugcu

SEQ ID NO: 1894816 - RNA, 19 nt, Artificial Sequence
  Description of Artificial Sequence: Synthetic oligonucleotide
  Sense strand starting at position 484 of SEQ ID NO: 1879263
cuauguugcccagacaaga

SEQ ID NO: 1894817 - RNA, 19 nt, Artificial Sequence
  Description of Artificial Sequence: Synthetic oligonucleotide
  Antisense strand to SEQ ID NO: 1894816
ucuugucugggcaacauag

SEQ ID NO: 1894818 - RNA, 19 nt, Artificial Sequence
  Description of Artificial Sequence: Synthetic oligonucleotide
  Sense strand starting at position 554 of SEQ ID NO: 1879263
augggcucauucuucuaga

SEQ ID NO: 1894819 - RNA, 19 nt, Artificial Sequence
  Description of Artificial Sequence: Synthetic oligonucleotide
  Antisense strand to SEQ ID NO: 1894818
ucuagaagaaugagcccau

SEQ ID NO: 1894820 - RNA, 19 nt, Artificial Sequence
  Description of Artificial Sequence: Synthetic oligonucleotide
  Sense strand starting at position 717 of SEQ ID NO: 1879263
accacugugccagauuaau

SEQ ID NO: 1894821 - RNA, 19 nt, Artificial Sequence
  Description of Artificial Sequence: Synthetic oligonucleotide
  Antisense strand to SEQ ID NO: 1894820
auuaaucuggcacaguggu

SEQ ID NO: 1894822 - RNA, 19 nt, Artificial Sequence
  Description of Artificial Sequence: Synthetic oligonucleotide
  Sense strand starting at position 987 of SEQ ID NO: 1879263
gaacuuccaguguauguau

SEQ ID NO: 1894823 - RNA, 19 nt, Artificial Sequence
  Description of Artificial Sequence: Synthetic oligonucleotide
  Antisense strand to SEQ ID NO: 1894822
auacauacacuggaaguuc

SEQ ID NO: 1894824 - RNA, 19 nt, Artificial Sequence
  Description of Artificial Sequence: Synthetic oligonucleotide
  Sense strand starting at position 1179 of SEQ ID NO: 1879263
uagacauaagauugauguu

SEQ ID NO: 1894825 - RNA, 19 nt, Artificial Sequence
  Description of Artificial Sequence: Synthetic oligonucleotide
  Antisense strand to SEQ ID NO: 1894824
aacaucaaucuuaugucua

SEQ ID NO: 1894826 - RNA, 19 nt, Artificial Sequence
  Description of Artificial Sequence: Synthetic oligonucleotide
  Sense strand starting at position 1185 of SEQ ID NO: 1879263
uaagauugauguuuguaca

SEQ ID NO: 1894827 - RNA, 19 nt, Artificial Sequence
  Description of Artificial Sequence: Synthetic oligonucleotide
  Antisense strand to SEQ ID NO: 1894826
uguacaaacaucaaucuua

SEQ ID NO: 1894828 - RNA, 19 nt, Artificial Sequence
  Description of Artificial Sequence: Synthetic oligonucleotide
  Sense strand starting at position 1186 of SEQ ID NO: 1879263
aagauugauguuuguacau

SEQ ID NO: 1894829 - RNA, 19 nt, Artificial Sequence
  Description of Artificial Sequence: Synthetic oligonucleotide
  Antisense strand to SEQ ID NO: 1894828
auguacaaacaucaaucuu

SEQ ID NO: 1894830 - RNA, 19 nt, Artificial Sequence
  Description of Artificial Sequence: Synthetic oligonucleotide
  Sense strand starting at position 1252 of SEQ ID NO: 1879263
uucucagugcuuuacagaa

SEQ ID NO: 1894831 - RNA, 19 nt, Artificial Sequence
  Description of Artificial Sequence: Synthetic oligonucleotide
  Antisense strand to SEQ ID NO: 1894830
uucuguaaagcacugagaa

SEQ ID NO: 1894832 - RNA, 19 nt, Artificial Sequence
  Description of Artificial Sequence: Synthetic oligonucleotide
  Sense strand starting at position 1286 of SEQ ID NO: 1879263
uguaacuaccuaugaguca

SEQ ID NO: 1894833 - RNA, 19 nt, Artificial Sequence
  Description of Artificial Sequence: Synthetic oligonucleotide
  Antisense strand to SEQ ID NO: 1894832
ugacucauagguaguuaca

SEQ ID NO: 1894834 - RNA, 19 nt, Artificial Sequence
  Description of Artificial Sequence: Synthetic oligonucleotide
  Sense strand starting at position 1367 of SEQ ID NO: 1879263
ggucacacaguuugaguaa

SEQ ID NO: 1894835 - RNA, 19 nt, Artificial Sequence
  Description of Artificial Sequence: Synthetic oligonucleotide
  Antisense strand to SEQ ID NO: 1894834
uuacucaaacugugugacc

SEQ ID NO: 1894836 - RNA, 19 nt, Artificial Sequence
  Description of Artificial Sequence: Synthetic oligonucleotide
  Sense strand starting at position 1403 of SEQ ID NO: 1879263
uuaggucaacucugauuau

SEQ ID NO: 1894837 - RNA, 19 nt, Artificial Sequence
  Description of Artificial Sequence: Synthetic oligonucleotide
  Antisense strand to SEQ ID NO: 1894836
auaaucagaguugaccuaa

SEQ ID NO: 1894838 - RNA, 19 nt, Artificial Sequence
  Description of Artificial Sequence: Synthetic oligonucleotide
  Sense strand starting at position 1406 of SEQ ID NO: 1879263
ggucaacucugauuauaug

SEQ ID NO: 1894839 - RNA, 19 nt, Artificial Sequence
  Description of Artificial Sequence: Synthetic oligonucleotide
  Antisense strand to SEQ ID NO: 1894838
cauauaaucagaguugacc

SEQ ID NO: 1894840 - RNA, 19 nt, Artificial Sequence
  Description of Artificial Sequence: Synthetic oligonucleotide
  Sense strand starting at position 1501 of SEQ ID NO: 1879263
gugguuucucuggauucca

SEQ ID NO: 1894841 - RNA, 19 nt, Artificial Sequence
  Description of Artificial Sequence: Synthetic oligonucleotide
  Antisense strand to SEQ ID NO: 1894840
uggaauccagagaaaccac

SEQ ID NO: 1894842 - RNA, 19 nt, Artificial Sequence
  Description of Artificial Sequence: Synthetic oligonucleotide
  Sense strand starting at position 1509 of SEQ ID NO: 1879263
ucuggauuccacugggaca

SEQ ID NO: 1894843 - RNA, 19 nt, Artificial Sequence
  Description of Artificial Sequence: Synthetic oligonucleotide
  Antisense strand to SEQ ID NO: 1894842
ugucccaguggaauccaga

SEQ ID NO: 1894844 - RNA, 19 nt, Artificial Sequence
  Description of Artificial Sequence: Synthetic oligonucleotide
  Sense strand starting at position 1510 of SEQ ID NO: 1879263
cuggauuccacugggacau

SEQ ID NO: 1894845 - RNA, 19 nt, Artificial Sequence
  Description of Artificial Sequence: Synthetic oligonucleotide
  Antisense strand to SEQ ID NO: 1894844
augucccaguggaauccag

SEQ ID NO: 1894846 - RNA, 19 nt, Artificial Sequence
  Description of Artificial Sequence: Synthetic oligonucleotide
  Sense strand starting at position 1511 of SEQ ID NO: 1879263
uggauuccacugggacauu

SEQ ID NO: 1894847 - RNA, 19 nt, Artificial Sequence
  Description of Artificial Sequence: Synthetic oligonucleotide
  Antisense strand to SEQ ID NO: 1894846
aaugucccaguggaaucca

SEQ ID NO: 1894848 - RNA, 19 nt, Artificial Sequence
  Description of Artificial Sequence: Synthetic oligonucleotide
  Sense strand starting at position 1512 of SEQ ID NO: 1879263
ggauuccacugggacauuu

SEQ ID NO: 1894849 - RNA, 19 nt, Artificial Sequence
  Description of Artificial Sequence: Synthetic oligonucleotide
  Antisense strand to SEQ ID NO: 1894848
aaaugucccaguggaaucc

SEQ ID NO: 1894850 - RNA, 19 nt, Artificial Sequence
  Description of Artificial Sequence: Synthetic oligonucleotide
  Sense strand starting at position 1539 of SEQ ID NO: 1879263
ucauacuuuacgggagaug

SEQ ID NO: 1894851 - RNA, 19 nt, Artificial Sequence
  Description of Artificial Sequence: Synthetic oligonucleotide
  Antisense strand to SEQ ID NO: 1894850
caucucccguaaaguauga

SEQ ID NO: 1894852 - RNA, 19 nt, Artificial Sequence
  Description of Artificial Sequence: Synthetic oligonucleotide
  Sense strand starting at position 2801 of SEQ ID NO: 1879263
guaaauacuccguaaauug

SEQ ID NO: 1894853 - RNA, 19 nt, Artificial Sequence
  Description of Artificial Sequence: Synthetic oligonucleotide
  Antisense strand to SEQ ID NO: 1894852
caauuuacggaguauuuac

SEQ ID NO: 1894854 - RNA, 19 nt, Artificial Sequence
  Description of Artificial Sequence: Synthetic oligonucleotide
  Sense strand starting at position 2876 of SEQ ID NO: 1879263
ugaaguuaagugcaucaau

SEQ ID NO: 1894855 - RNA, 19 nt, Artificial Sequence
  Description of Artificial Sequence: Synthetic oligonucleotide
  Antisense strand to SEQ ID NO: 1894854
auugaugcacuuaacuuca

SEQ ID NO: 1894856 - RNA, 19 nt, Artificial Sequence
  Description of Artificial Sequence: Synthetic oligonucleotide
  Sense strand starting at position 2887 of SEQ ID NO: 1879263
gcaucaauuugggaugaau

SEQ ID NO: 1894857 - RNA, 19 nt, Artificial Sequence
  Description of Artificial Sequence: Synthetic oligonucleotide
  Antisense strand to SEQ ID NO: 1894856
auucaucccaaauugaugc

SEQ ID NO: 1894858 - RNA, 19 nt, Artificial Sequence
  Description of Artificial Sequence: Synthetic oligonucleotide
  Sense strand starting at position 2922 of SEQ ID NO: 1879263
ugucuaucaauuuguguag

SEQ ID NO: 1894859 - RNA, 19 nt, Artificial Sequence
  Description of Artificial Sequence: Synthetic oligonucleotide
  Antisense strand to SEQ ID NO: 1894858
cuacacaaauugauagaca

SEQ ID NO: 1894860 - RNA, 19 nt, Artificial Sequence
  Description of Artificial Sequence: Synthetic oligonucleotide
  Sense strand starting at position 3089 of SEQ ID NO: 1879263
ccguauauguaacuagaga

SEQ ID NO: 1894861 - RNA, 19 nt, Artificial Sequence
  Description of Artificial Sequence: Synthetic oligonucleotide
  Antisense strand to SEQ ID NO: 1894860
ucucuaguuacauauacgg

SEQ ID NO: 1894862 - RNA, 19 nt, Artificial Sequence
  Description of Artificial Sequence: Synthetic oligonucleotide
  Sense strand starting at position 3090 of SEQ ID NO: 1879263
cguauauguaacuagagac

SEQ ID NO: 1894863 - RNA, 19 nt, Artificial Sequence
  Description of Artificial Sequence: Synthetic oligonucleotide
  Antisense strand to SEQ ID NO: 1894862
gucucuaguuacauauacg

SEQ ID NO: 1894864 - RNA, 19 nt, Artificial Sequence
  Description of Artificial Sequence: Synthetic oligonucleotide
  Sense strand starting at position 3111 of SEQ ID NO: 1879263
uacguuugaggcuaaauaa

SEQ ID NO: 1894865 - RNA, 19 nt, Artificial Sequence
  Description of Artificial Sequence: Synthetic oligonucleotide
  Antisense strand to SEQ ID NO: 1894864
uuauuuagccucaaacgua

SEQ ID NO: 1894866 - RNA, 19 nt, Artificial Sequence
  Description of Artificial Sequence: Synthetic oligonucleotide
  Sense strand starting at position 3121 of SEQ ID NO: 1879263
gcuaaauaacuguaguacu

SEQ ID NO: 1894867 - RNA, 19 nt, Artificial Sequence
  Description of Artificial Sequence: Synthetic oligonucleotide
  Antisense strand to SEQ ID NO: 1894866
aguacuacaguuauuuagc

SEQ ID NO: 1894868 - RNA, 19 nt, Artificial Sequence
  Description of Artificial Sequence: Synthetic oligonucleotide
  Sense strand starting at position 3185 of SEQ ID NO: 1879263
ucugucaugauaggaauga

SEQ ID NO: 1894869 - RNA, 19 nt, Artificial Sequence
  Description of Artificial Sequence: Synthetic oligonucleotide
  Antisense strand to SEQ ID NO: 1894868
ucauuccuaucaugacaga

SEQ ID NO: 1894870 - RNA, 19 nt, Artificial Sequence
  Description of Artificial Sequence: Synthetic oligonucleotide
  Sense strand starting at position 3198 of SEQ ID NO: 1879263
gaaugaggauuguacauuu

SEQ ID NO: 1894871 - RNA, 19 nt, Artificial Sequence
  Description of Artificial Sequence: Synthetic oligonucleotide
  Antisense strand to SEQ ID NO: 1894870
aaauguacaauccucauuc

SEQ ID NO: 1894872 - RNA, 19 nt, Artificial Sequence
  Description of Artificial Sequence: Synthetic oligonucleotide
  Sense strand starting at position 3205 of SEQ ID NO: 1879263
gauuguacauuugaaauag

SEQ ID NO: 1894873 - RNA, 19 nt, Artificial Sequence
  Description of Artificial Sequence: Synthetic oligonucleotide
  Antisense strand to SEQ ID NO: 1894872
cuauuucaaauguacaauc

SEQ ID NO: 1894874 - RNA, 19 nt, Artificial Sequence
  Description of Artificial Sequence: Synthetic oligonucleotide
  Sense strand starting at position 3246 of SEQ ID NO: 1879263
auguauaaacgauggaaac

SEQ ID NO: 1894875 - RNA, 19 nt, Artificial Sequence
  Description of Artificial Sequence: Synthetic oligonucleotide
  Antisense strand to SEQ ID NO: 1894874
guuuccaucguuuauacau

SEQ ID NO: 1894876 - RNA, 19 nt, Artificial Sequence
  Description of Artificial Sequence: Synthetic oligonucleotide
  Sense strand starting at position 3247 of SEQ ID NO: 1879263
uguauaaacgauggaaacu

SEQ ID NO: 1894877 - RNA, 19 nt, Artificial Sequence
  Description of Artificial Sequence: Synthetic oligonucleotide
  Antisense strand to SEQ ID NO: 1894876
aguuuccaucguuuauaca

SEQ ID NO: 1894878 - RNA, 19 nt, Artificial Sequence
  Description of Artificial Sequence: Synthetic oligonucleotide
  Sense strand starting at position 3344 of SEQ ID NO: 1879263
gugaacaaauuugagcaaa

SEQ ID NO: 1894879 - RNA, 19 nt, Artificial Sequence
  Description of Artificial Sequence: Synthetic oligonucleotide
  Antisense strand to SEQ ID NO: 1894878
uuugcucaaauuuguucac

SEQ ID NO: 1894880 - RNA, 19 nt, Artificial Sequence
  Description of Artificial Sequence: Synthetic oligonucleotide
  Sense strand starting at position 3521 of SEQ ID NO: 1879263
gauuguuaccauggaugau

SEQ ID NO: 1894881 - RNA, 19 nt, Artificial Sequence
  Description of Artificial Sequence: Synthetic oligonucleotide
  Antisense strand to SEQ ID NO: 1894880
aucauccaugguaacaauc

SEQ ID NO: 1894882 - RNA, 19 nt, Artificial Sequence
  Description of Artificial Sequence: Synthetic oligonucleotide
  Sense strand starting at position 3695 of SEQ ID NO: 1879263
auuaauaaucuaggguuga

SEQ ID NO: 1894883 - RNA, 19 nt, Artificial Sequence
  Description of Artificial Sequence: Synthetic oligonucleotide
  Antisense strand to SEQ ID NO: 1894882
ucaacccuagauuauuaau

SEQ ID NO: 1894884 - RNA, 19 nt, Artificial Sequence
  Description of Artificial Sequence: Synthetic oligonucleotide
  Sense strand starting at position 3699 of SEQ ID NO: 1879263
auaaucuaggguugagagu

SEQ ID NO: 1894885 - RNA, 19 nt, Artificial Sequence
  Description of Artificial Sequence: Synthetic oligonucleotide
  Antisense strand to SEQ ID NO: 1894884
acucucaacccuagauuau

SEQ ID NO: 1894886 - RNA, 19 nt, Artificial Sequence
  Description of Artificial Sequence: Synthetic oligonucleotide
  Sense strand starting at position 3707 of SEQ ID NO: 1879263
ggguugagagugugggaaa

SEQ ID NO: 1894887 - RNA, 19 nt, Artificial Sequence
  Description of Artificial Sequence: Synthetic oligonucleotide
  Antisense strand to SEQ ID NO: 1894886
uuucccacacucucaaccc

SEQ ID NO: 1894888 - RNA, 19 nt, Artificial Sequence
  Description of Artificial Sequence: Synthetic oligonucleotide
  Sense strand starting at position 3742 of SEQ ID NO: 1879263
uccugaauacauugaagcu

SEQ ID NO: 1894889 - RNA, 19 nt, Artificial Sequence
  Description of Artificial Sequence: Synthetic oligonucleotide
  Antisense strand to SEQ ID NO: 1894888
agcuucaauguauucagga

SEQ ID NO: 1894890 - RNA, 19 nt, Artificial Sequence
  Description of Artificial Sequence: Synthetic oligonucleotide
  Sense strand starting at position 3880 of SEQ ID NO: 1879263
aggagaguguacuuaugca

SEQ ID NO: 1894891 - RNA, 19 nt, Artificial Sequence
  Description of Artificial Sequence: Synthetic oligonucleotide
  Antisense strand to SEQ ID NO: 1894890
ugcauaaguacacucuccu

SEQ ID NO: 1894892 - RNA, 19 nt, Artificial Sequence
  Description of Artificial Sequence: Synthetic oligonucleotide
  Sense strand starting at position 33 of SEQ ID NO: 1879264
acuggacuucccuagucuu

SEQ ID NO: 1894893 - RNA, 19 nt, Artificial Sequence
  Description of Artificial Sequence: Synthetic oligonucleotide
  Antisense strand to SEQ ID NO: 1894892
aagacuagggaaguccagu

SEQ ID NO: 1894894 - RNA, 19 nt, Artificial Sequence
  Description of Artificial Sequence: Synthetic oligonucleotide
  Sense strand starting at position 71 of SEQ ID NO: 1879264
cucaguuaaugguaacuca

SEQ ID NO: 1894895 - RNA, 19 nt, Artificial Sequence
  Description of Artificial Sequence: Synthetic oligonucleotide
  Antisense strand to SEQ ID NO: 1894894
ugaguuaccauuaacugag

SEQ ID NO: 1894896 - RNA, 19 nt, Artificial Sequence
  Description of Artificial Sequence: Synthetic oligonucleotide
  Sense strand starting at position 82 of SEQ ID NO: 1879264
guaacucagucuuuccagu

SEQ ID NO: 1894897 - RNA, 19 nt, Artificial Sequence
  Description of Artificial Sequence: Synthetic oligonucleotide
  Antisense strand to SEQ ID NO: 1894896
acuggaaagacugaguuac

SEQ ID NO: 1894898 - RNA, 19 nt, Artificial Sequence
  Description of Artificial Sequence: Synthetic oligonucleotide
  Sense strand starting at position 168 of SEQ ID NO: 1879264
uaggaaauccuaugguucu

SEQ ID NO: 1894899 - RNA, 19 nt, Artificial Sequence
  Description of Artificial Sequence: Synthetic oligonucleotide
  Antisense strand to SEQ ID NO: 1894898
agaaccauaggauuuccua

SEQ ID NO: 1894900 - RNA, 19 nt, Artificial Sequence
  Description of Artificial Sequence: Synthetic oligonucleotide
  Sense strand starting at position 2149 of SEQ ID NO: 1879264
ccucuaauggagcagaguu

SEQ ID NO: 1894901 - RNA, 19 nt, Artificial Sequence
  Description of Artificial Sequence: Synthetic oligonucleotide
  Antisense strand to SEQ ID NO: 1894900
aacucugcuccauuagagg

SEQ ID NO: 1894902 - RNA, 19 nt, Artificial Sequence
  Description of Artificial Sequence: Synthetic oligonucleotide
  Sense strand starting at position 2157 of SEQ ID NO: 1879264
ggagcagaguugggagaau

SEQ ID NO: 1894903 - RNA, 19 nt, Artificial Sequence
  Description of Artificial Sequence: Synthetic oligonucleotide
  Antisense strand to SEQ ID NO: 1894902
auucucccaacucugcucc

SEQ ID NO: 1894904 - RNA, 19 nt, Artificial Sequence
  Description of Artificial Sequence: Synthetic oligonucleotide
  Sense strand starting at position 2168 of SEQ ID NO: 1879264
gggagaauauugcuccuuu

SEQ ID NO: 1894905 - RNA, 19 nt, Artificial Sequence
  Description of Artificial Sequence: Synthetic oligonucleotide
  Antisense strand to SEQ ID NO: 1894904
aaaggagcaauauucuccc

SEQ ID NO: 1894906 - RNA, 19 nt, Artificial Sequence
  Description of Artificial Sequence: Synthetic oligonucleotide
  Sense strand starting at position 2169 of SEQ ID NO: 1879264
ggagaauauugcuccuuuc

SEQ ID NO: 1894907 - RNA, 19 nt, Artificial Sequence
  Description of Artificial Sequence: Synthetic oligonucleotide
  Antisense strand to SEQ ID NO: 1894906
gaaaggagcaauauucucc

SEQ ID NO: 1894908 - RNA, 19 nt, Artificial Sequence
  Description of Artificial Sequence: Synthetic oligonucleotide
  Sense strand starting at position 2231 of SEQ ID NO: 1879264
ucuugaucccaucagagcu

SEQ ID NO: 1894909 - RNA, 19 nt, Artificial Sequence
  Description of Artificial Sequence: Synthetic oligonucleotide
  Antisense strand to SEQ ID NO: 1894908
agcucugaugggaucaaga

SEQ ID NO: 1894910 - RNA, 19 nt, Artificial Sequence
  Description of Artificial Sequence: Synthetic oligonucleotide
  Sense strand starting at position 2290 of SEQ ID NO: 1879264
acagaucuuucccaggaga

SEQ ID NO: 1894911 - RNA, 19 nt, Artificial Sequence
  Description of Artificial Sequence: Synthetic oligonucleotide
  Antisense strand to SEQ ID NO: 1894910
ucuccugggaaagaucugu

SEQ ID NO: 1894912 - RNA, 19 nt, Artificial Sequence
  Description of Artificial Sequence: Synthetic oligonucleotide
  Sense strand starting at position 2357 of SEQ ID NO: 1879264
gaugucagguaccauacaa

SEQ ID NO: 1894913 - RNA, 19 nt, Artificial Sequence
  Description of Artificial Sequence: Synthetic oligonucleotide
  Antisense strand to SEQ ID NO: 1894912
uuguaugguaccugacauc

SEQ ID NO: 1894914 - RNA, 19 nt, Artificial Sequence
  Description of Artificial Sequence: Synthetic oligonucleotide
  Sense strand starting at position 2365 of SEQ ID NO: 1879264
guaccauacaaguggaaga

SEQ ID NO: 1894915 - RNA, 19 nt, Artificial Sequence
  Description of Artificial Sequence: Synthetic oligonucleotide
  Antisense strand to SEQ ID NO: 1894914
ucuuccacuuguaugguac

SEQ ID NO: 1894916 - RNA, 19 nt, Artificial Sequence
  Description of Artificial Sequence: Synthetic oligonucleotide
  Sense strand starting at position 2825 of SEQ ID NO: 1879264
agaguauucugucuaccug

SEQ ID NO: 1894917 - RNA, 19 nt, Artificial Sequence
  Description of Artificial Sequence: Synthetic oligonucleotide
  Antisense strand to SEQ ID NO: 1894916
cagguagacagaauacucu

SEQ ID NO: 1894918 - RNA, 19 nt, Artificial Sequence
  Description of Artificial Sequence: Synthetic oligonucleotide
  Sense strand starting at position 2832 of SEQ ID NO: 1879264
ucugucuaccuggaauacu

SEQ ID NO: 1894919 - RNA, 19 nt, Artificial Sequence
  Description of Artificial Sequence: Synthetic oligonucleotide
  Antisense strand to SEQ ID NO: 1894918
aguauuccagguagacaga

SEQ ID NO: 1894920 - RNA, 19 nt, Artificial Sequence
  Description of Artificial Sequence: Synthetic oligonucleotide
  Sense strand starting at position 2912 of SEQ ID NO: 1879264
ccuugccuucuguggaaga

SEQ ID NO: 1894921 - RNA, 19 nt, Artificial Sequence
  Description of Artificial Sequence: Synthetic oligonucleotide
  Antisense strand to SEQ ID NO: 1894920
ucuuccacagaaggcaagg

SEQ ID NO: 1894922 - RNA, 19 nt, Artificial Sequence
  Description of Artificial Sequence: Synthetic oligonucleotide
  Sense strand starting at position 2914 of SEQ ID NO: 1879264
uugccuucuguggaagaca

SEQ ID NO: 1894923 - RNA, 19 nt, Artificial Sequence
  Description of Artificial Sequence: Synthetic oligonucleotide
  Antisense strand to SEQ ID NO: 1894922
ugucuuccacagaaggcaa

SEQ ID NO: 1894924 - RNA, 19 nt, Artificial Sequence
  Description of Artificial Sequence: Synthetic oligonucleotide
  Sense strand starting at position 3031 of SEQ ID NO: 1879264
cuggacuugccuugugacu

SEQ ID NO: 1894925 - RNA, 19 nt, Artificial Sequence
  Description of Artificial Sequence: Synthetic oligonucleotide
  Antisense strand to SEQ ID NO: 1894924
agucacaaggcaaguccag

SEQ ID NO: 1894926 - RNA, 19 nt, Artificial Sequence
  Description of Artificial Sequence: Synthetic oligonucleotide
  Sense strand starting at position 3042 of SEQ ID NO: 1879264
uugugacuuucugugagca

SEQ ID NO: 1894927 - RNA, 19 nt, Artificial Sequence
  Description of Artificial Sequence: Synthetic oligonucleotide
  Antisense strand to SEQ ID NO: 1894926
ugcucacagaaagucacaa

SEQ ID NO: 1894928 - RNA, 19 nt, Artificial Sequence
  Description of Artificial Sequence: Synthetic oligonucleotide
  Sense strand starting at position 3043 of SEQ ID NO: 1879264
ugugacuuucugugagcaa

SEQ ID NO: 1894929 - RNA, 19 nt, Artificial Sequence
  Description of Artificial Sequence: Synthetic oligonucleotide
  Antisense strand to SEQ ID NO: 1894928
uugcucacagaaagucaca

SEQ ID NO: 1894930 - RNA, 19 nt, Artificial Sequence
  Description of Artificial Sequence: Synthetic oligonucleotide
  Sense strand starting at position 3047 of SEQ ID NO: 1879264
acuuucugugagcaacaga

SEQ ID NO: 1894931 - RNA, 19 nt, Artificial Sequence
  Description of Artificial Sequence: Synthetic oligonucleotide
  Antisense strand to SEQ ID NO: 1894930
ucuguugcucacagaaagu

SEQ ID NO: 1894932 - RNA, 19 nt, Artificial Sequence
  Description of Artificial Sequence: Synthetic oligonucleotide
  Sense strand starting at position 3050 of SEQ ID NO: 1879264
uucugugagcaacagaaua

SEQ ID NO: 1894933 - RNA, 19 nt, Artificial Sequence
  Description of Artificial Sequence: Synthetic oligonucleotide
  Antisense strand to SEQ ID NO: 1894932
uauucuguugcucacagaa

SEQ ID NO: 1894934 - RNA, 19 nt, Artificial Sequence
  Description of Artificial Sequence: Synthetic oligonucleotide
  Sense strand starting at position 3113 of SEQ ID NO: 1879264
auccuauugugccaagaga

SEQ ID NO: 1894935 - RNA, 19 nt, Artificial Sequence
  Description of Artificial Sequence: Synthetic oligonucleotide
  Antisense strand to SEQ ID NO: 1894934
ucucuuggcacaauaggau

SEQ ID NO: 1894936 - RNA, 19 nt, Artificial Sequence
  Description of Artificial Sequence: Synthetic oligonucleotide
  Sense strand starting at position 3144 of SEQ ID NO: 1879264
uaguuuacugaaggauuau

SEQ ID NO: 1894937 - RNA, 19 nt, Artificial Sequence
  Description of Artificial Sequence: Synthetic oligonucleotide
  Antisense strand to SEQ ID NO: 1894936
auaauccuucaguaaacua

SEQ ID NO: 1894938 - RNA, 19 nt, Artificial Sequence
  Description of Artificial Sequence: Synthetic oligonucleotide
  Sense strand starting at position 3168 of SEQ ID NO: 1879264
aucauaugaggcugaguca

SEQ ID NO: 1894939 - RNA, 19 nt, Artificial Sequence
  Description of Artificial Sequence: Synthetic oligonucleotide
  Antisense strand to SEQ ID NO: 1894938
ugacucagccucauaugau

SEQ ID NO: 1894940 - RNA, 19 nt, Artificial Sequence
  Description of Artificial Sequence: Synthetic oligonucleotide
  Sense strand starting at position 3169 of SEQ ID NO: 1879264
ucauaugaggcugagucaa

SEQ ID NO: 1894941 - RNA, 19 nt, Artificial Sequence
  Description of Artificial Sequence: Synthetic oligonucleotide
  Antisense strand to SEQ ID NO: 1894940
uugacucagccucauauga

SEQ ID NO: 1894942 - RNA, 19 nt, Artificial Sequence
  Description of Artificial Sequence: Synthetic oligonucleotide
  Sense strand starting at position 3180 of SEQ ID NO: 1879264
ugagucaaguugucccaga

SEQ ID NO: 1894943 - RNA, 19 nt, Artificial Sequence
  Description of Artificial Sequence: Synthetic oligonucleotide
  Antisense strand to SEQ ID NO: 1894942
ucugggacaacuugacuca

SEQ ID NO: 1894944 - RNA, 19 nt, Artificial Sequence
  Description of Artificial Sequence: Synthetic oligonucleotide
  Sense strand starting at position 3181 of SEQ ID NO: 1879264
gagucaaguugucccagau

SEQ ID NO: 1894945 - RNA, 19 nt, Artificial Sequence
  Description of Artificial Sequence: Synthetic oligonucleotide
  Antisense strand to SEQ ID NO: 1894944
aucugggacaacuugacuc

SEQ ID NO: 1894946 - RNA, 19 nt, Artificial Sequence
  Description of Artificial Sequence: Synthetic oligonucleotide
  Sense strand starting at position 3185 of SEQ ID NO: 1879264
caaguugucccagauggga

SEQ ID NO: 1894947 - RNA, 19 nt, Artificial Sequence
  Description of Artificial Sequence: Synthetic oligonucleotide
  Antisense strand to SEQ ID NO: 1894946
ucccaucugggacaacuug

SEQ ID NO: 1894948 - RNA, 19 nt, Artificial Sequence
  Description of Artificial Sequence: Synthetic oligonucleotide
  Sense strand starting at position 3250 of SEQ ID NO: 1879264
ccagcuaaccuguagcuaa

SEQ ID NO: 1894949 - RNA, 19 nt, Artificial Sequence
  Description of Artificial Sequence: Synthetic oligonucleotide
  Antisense strand to SEQ ID NO: 1894948
uuagcuacagguuagcugg

SEQ ID NO: 1894950 - RNA, 19 nt, Artificial Sequence
  Description of Artificial Sequence: Synthetic oligonucleotide
  Sense strand starting at position 3267 of SEQ ID NO: 1879264
aaccauaacugugugagca

SEQ ID NO: 1894951 - RNA, 19 nt, Artificial Sequence
  Description of Artificial Sequence: Synthetic oligonucleotide
  Antisense strand to SEQ ID NO: 1894950
ugcucacacaguuaugguu

SEQ ID NO: 1894952 - RNA, 19 nt, Artificial Sequence
  Description of Artificial Sequence: Synthetic oligonucleotide
  Sense strand starting at position 3311 of SEQ ID NO: 1879264
ggcucagacuaagaacuaa

SEQ ID NO: 1894953 - RNA, 19 nt, Artificial Sequence
  Description of Artificial Sequence: Synthetic oligonucleotide
  Antisense strand to SEQ ID NO: 1894952
uuaguucuuagucugagcc

SEQ ID NO: 1894954 - RNA, 19 nt, Artificial Sequence
  Description of Artificial Sequence: Synthetic oligonucleotide
  Sense strand starting at position 3600 of SEQ ID NO: 1879264
auguauuguuucccucacu

SEQ ID NO: 1894955 - RNA, 19 nt, Artificial Sequence
  Description of Artificial Sequence: Synthetic oligonucleotide
  Antisense strand to SEQ ID NO: 1894954
agugagggaaacaauacau

SEQ ID NO: 1894956 - RNA, 19 nt, Artificial Sequence
  Description of Artificial Sequence: Synthetic oligonucleotide
  Sense strand starting at position 3601 of SEQ ID NO: 1879264
uguauuguuucccucacua

SEQ ID NO: 1894957 - RNA, 19 nt, Artificial Sequence
  Description of Artificial Sequence: Synthetic oligonucleotide
  Antisense strand to SEQ ID NO: 1894956
uagugagggaaacaauaca

SEQ ID NO: 1894958 - RNA, 19 nt, Artificial Sequence
  Description of Artificial Sequence: Synthetic oligonucleotide
  Sense strand starting at position 3683 of SEQ ID NO: 1879264
uaaacugaugucugguaua

SEQ ID NO: 1894959 - RNA, 19 nt, Artificial Sequence
  Description of Artificial Sequence: Synthetic oligonucleotide
  Antisense strand to SEQ ID NO: 1894958
uauaccagacaucaguuua

SEQ ID NO: 1894960 - RNA, 19 nt, Artificial Sequence
  Description of Artificial Sequence: Synthetic oligonucleotide
  Sense strand starting at position 3686 of SEQ ID NO: 1879264
acugaugucugguauauaa

SEQ ID NO: 1894961 - RNA, 19 nt, Artificial Sequence
  Description of Artificial Sequence: Synthetic oligonucleotide
  Antisense strand to SEQ ID NO: 1894960
uuauauaccagacaucagu

SEQ ID NO: 1894962 - RNA, 19 nt, Artificial Sequence
  Description of Artificial Sequence: Synthetic oligonucleotide
  Sense strand starting at position 3699 of SEQ ID NO: 1879264
auauaaggcccucgauaac

SEQ ID NO: 1894963 - RNA, 19 nt, Artificial Sequence
  Description of Artificial Sequence: Synthetic oligonucleotide
  Antisense strand to SEQ ID NO: 1894962
guuaucgagggccuuauau

SEQ ID NO: 1894964 - RNA, 19 nt, Artificial Sequence
  Description of Artificial Sequence: Synthetic oligonucleotide
  Sense strand starting at position 3792 of SEQ ID NO: 1879264
gggcuaucuugauuccucu

SEQ ID NO: 1894965 - RNA, 19 nt, Artificial Sequence
  Description of Artificial Sequence: Synthetic oligonucleotide
  Antisense strand to SEQ ID NO: 1894964
agaggaaucaagauagccc

SEQ ID NO: 1894966 - RNA, 19 nt, Artificial Sequence
  Description of Artificial Sequence: Synthetic oligonucleotide
  Sense strand starting at position 3863 of SEQ ID NO: 1879264
uuauacguaucccacaaga

SEQ ID NO: 1894967 - RNA, 19 nt, Artificial Sequence
  Description of Artificial Sequence: Synthetic oligonucleotide
  Antisense strand to SEQ ID NO: 1894966
ucuugugggauacguauaa

SEQ ID NO: 1894968 - RNA, 19 nt, Artificial Sequence
  Description of Artificial Sequence: Synthetic oligonucleotide
  Sense strand starting at position 3936 of SEQ ID NO: 1879264
gugggaauccuuuaguaag

SEQ ID NO: 1894969 - RNA, 19 nt, Artificial Sequence
  Description of Artificial Sequence: Synthetic oligonucleotide
  Antisense strand to SEQ ID NO: 1894968
cuuacuaaaggauucccac

SEQ ID NO: 1894970 - RNA, 19 nt, Artificial Sequence
  Description of Artificial Sequence: Synthetic oligonucleotide
  Sense strand starting at position 3939 of SEQ ID NO: 1879264
ggaauccuuuaguaagaaa

SEQ ID NO: 1894971 - RNA, 19 nt, Artificial Sequence
  Description of Artificial Sequence: Synthetic oligonucleotide
  Antisense strand to SEQ ID NO: 1894970
uuucuuacuaaaggauucc

SEQ ID NO: 1894972 - RNA, 19 nt, Artificial Sequence
  Description of Artificial Sequence: Synthetic oligonucleotide
  Sense strand starting at position 52 of SEQ ID NO: 1879265
cugcuagaucuugaaguug

SEQ ID NO: 1894973 - RNA, 19 nt, Artificial Sequence
  Description of Artificial Sequence: Synthetic oligonucleotide
  Antisense strand to SEQ ID NO: 1894972
caacuucaagaucuagcag

SEQ ID NO: 1894974 - RNA, 19 nt, Artificial Sequence
  Description of Artificial Sequence: Synthetic oligonucleotide
  Sense strand starting at position 58 of SEQ ID NO: 1879265
gaucuugaaguuggagauu

SEQ ID NO: 1894975 - RNA, 19 nt, Artificial Sequence
  Description of Artificial Sequence: Synthetic oligonucleotide
  Antisense strand to SEQ ID NO: 1894974
aaucuccaacuucaagauc

SEQ ID NO: 1894976 - RNA, 19 nt, Artificial Sequence
  Description of Artificial Sequence: Synthetic oligonucleotide
  Sense strand starting at position 193 of SEQ ID NO: 1879265
accaaacaguucucagagu

SEQ ID NO: 1894977 - RNA, 19 nt, Artificial Sequence
  Description of Artificial Sequence: Synthetic oligonucleotide
  Antisense strand to SEQ ID NO: 1894976
acucugagaacuguuuggu

SEQ ID NO: 1894978 - RNA, 19 nt, Artificial Sequence
  Description of Artificial Sequence: Synthetic oligonucleotide
  Sense strand starting at position 305 of SEQ ID NO: 1879265
aggccauaugguuaacacu

SEQ ID NO: 1894979 - RNA, 19 nt, Artificial Sequence
  Description of Artificial Sequence: Synthetic oligonucleotide
  Antisense strand to SEQ ID NO: 1894978
aguguuaaccauauggccu

SEQ ID NO: 1894980 - RNA, 19 nt, Artificial Sequence
  Description of Artificial Sequence: Synthetic oligonucleotide
  Sense strand starting at position 683 of SEQ ID NO: 1879265
gcaagaauacaauguuaaa

SEQ ID NO: 1894981 - RNA, 19 nt, Artificial Sequence
  Description of Artificial Sequence: Synthetic oligonucleotide
  Antisense strand to SEQ ID NO: 1894980
uuuaacauuguauucuugc

SEQ ID NO: 1894982 - RNA, 19 nt, Artificial Sequence
  Description of Artificial Sequence: Synthetic oligonucleotide
  Sense strand starting at position 1145 of SEQ ID NO: 1879265
uaagauauagagugcuaga

SEQ ID NO: 1894983 - RNA, 19 nt, Artificial Sequence
  Description of Artificial Sequence: Synthetic oligonucleotide
  Antisense strand to SEQ ID NO: 1894982
ucuagcacucuauaucuua

SEQ ID NO: 1894984 - RNA, 19 nt, Artificial Sequence
  Description of Artificial Sequence: Synthetic oligonucleotide
  Sense strand starting at position 1150 of SEQ ID NO: 1879265
uauagagugcuagacaauc

SEQ ID NO: 1894985 - RNA, 19 nt, Artificial Sequence
  Description of Artificial Sequence: Synthetic oligonucleotide
  Antisense strand to SEQ ID NO: 1894984
gauugucuagcacucuaua

SEQ ID NO: 1894986 - RNA, 19 nt, Artificial Sequence
  Description of Artificial Sequence: Synthetic oligonucleotide
  Sense strand starting at position 1170 of SEQ ID NO: 1879265
ucaauagaguuucuacaga

SEQ ID NO: 1894987 - RNA, 19 nt, Artificial Sequence
  Description of Artificial Sequence: Synthetic oligonucleotide
  Antisense strand to SEQ ID NO: 1894986
ucuguagaaacucuauuga

SEQ ID NO: 1894988 - RNA, 19 nt, Artificial Sequence
  Description of Artificial Sequence: Synthetic oligonucleotide
  Sense strand starting at position 1409 of SEQ ID NO: 1879265
gagaucuuuccagggaagc

SEQ ID NO: 1894989 - RNA, 19 nt, Artificial Sequence
  Description of Artificial Sequence: Synthetic oligonucleotide
  Antisense strand to SEQ ID NO: 1894988
gcuucccuggaaagaucuc

SEQ ID NO: 1894990 - RNA, 19 nt, Artificial Sequence
  Description of Artificial Sequence: Synthetic oligonucleotide
  Sense strand starting at position 1410 of SEQ ID NO: 1879265
agaucuuuccagggaagcu

SEQ ID NO: 1894991 - RNA, 19 nt, Artificial Sequence
  Description of Artificial Sequence: Synthetic oligonucleotide
  Antisense strand to SEQ ID NO: 1894990
agcuucccuggaaagaucu

SEQ ID NO: 1894992 - RNA, 19 nt, Artificial Sequence
  Description of Artificial Sequence: Synthetic oligonucleotide
  Sense strand starting at position 1534 of SEQ ID NO: 1879265
aucagacauguauguauua

SEQ ID NO: 1894993 - RNA, 19 nt, Artificial Sequence
  Description of Artificial Sequence: Synthetic oligonucleotide
  Antisense strand to SEQ ID NO: 1894992
uaauacauacaugucugau

SEQ ID NO: 1894994 - RNA, 19 nt, Artificial Sequence
  Description of Artificial Sequence: Synthetic oligonucleotide
  Sense strand starting at position 1535 of SEQ ID NO: 1879265
ucagacauguauguauuaa

SEQ ID NO: 1894995 - RNA, 19 nt, Artificial Sequence
  Description of Artificial Sequence: Synthetic oligonucleotide
  Antisense strand to SEQ ID NO: 1894994
uuaauacauacaugucuga

SEQ ID NO: 1894996 - RNA, 19 nt, Artificial Sequence
  Description of Artificial Sequence: Synthetic oligonucleotide
  Sense strand starting at position 2039 of SEQ ID NO: 1879265
cugacuuugugaucacaca

SEQ ID NO: 1894997 - RNA, 19 nt, Artificial Sequence
  Description of Artificial Sequence: Synthetic oligonucleotide
  Antisense strand to SEQ ID NO: 1894996
ugugugaucacaaagucag

SEQ ID NO: 1894998 - RNA, 19 nt, Artificial Sequence
  Description of Artificial Sequence: Synthetic oligonucleotide
  Sense strand starting at position 2222 of SEQ ID NO: 1879265
augcauauuuaugugcauu

SEQ ID NO: 1894999 - RNA, 19 nt, Artificial Sequence
  Description of Artificial Sequence: Synthetic oligonucleotide
  Antisense strand to SEQ ID NO: 1894998
aaugcacauaaauaugcau

SEQ ID NO: 1895000 - RNA, 19 nt, Artificial Sequence
  Description of Artificial Sequence: Synthetic oligonucleotide
  Sense strand starting at position 2375 of SEQ ID NO: 1879265
gugacuuaucuauggagau

SEQ ID NO: 1895001 - RNA, 19 nt, Artificial Sequence
  Description of Artificial Sequence: Synthetic oligonucleotide
  Antisense strand to SEQ ID NO: 1895000
aucuccauagauaagucac

SEQ ID NO: 1895002 - RNA, 19 nt, Artificial Sequence
  Description of Artificial Sequence: Synthetic oligonucleotide
  Sense strand starting at position 2379 of SEQ ID NO: 1879265
cuuaucuauggagauguuu

SEQ ID NO: 1895003 - RNA, 19 nt, Artificial Sequence
  Description of Artificial Sequence: Synthetic oligonucleotide
  Antisense strand to SEQ ID NO: 1895002
aaacaucuccauagauaag

SEQ ID NO: 1895004 - RNA, 19 nt, Artificial Sequence
  Description of Artificial Sequence: Synthetic oligonucleotide
  Sense strand starting at position 2385 of SEQ ID NO: 1879265
uauggagauguuuauuguu

SEQ ID NO: 1895005 - RNA, 19 nt, Artificial Sequence
  Description of Artificial Sequence: Synthetic oligonucleotide
  Antisense strand to SEQ ID NO: 1895004
aacaauaaacaucuccaua

SEQ ID NO: 1895006 - RNA, 19 nt, Artificial Sequence
  Description of Artificial Sequence: Synthetic oligonucleotide
  Sense strand starting at position 2387 of SEQ ID NO: 1879265
uggagauguuuauuguuaa

SEQ ID NO: 1895007 - RNA, 19 nt, Artificial Sequence
  Description of Artificial Sequence: Synthetic oligonucleotide
  Antisense strand to SEQ ID NO: 1895006
uuaacaauaaacaucucca

SEQ ID NO: 1895008 - RNA, 19 nt, Artificial Sequence
  Description of Artificial Sequence: Synthetic oligonucleotide
  Sense strand starting at position 2414 of SEQ ID NO: 1879265
acaugaaaguucucaacug

SEQ ID NO: 1895009 - RNA, 19 nt, Artificial Sequence
  Description of Artificial Sequence: Synthetic oligonucleotide
  Antisense strand to SEQ ID NO: 1895008
caguugagaacuuucaugu

SEQ ID NO: 1895010 - RNA, 19 nt, Artificial Sequence
  Description of Artificial Sequence: Synthetic oligonucleotide
  Sense strand starting at position 2732 of SEQ ID NO: 1879265
uuguuauucuacuugagau

SEQ ID NO: 1895011 - RNA, 19 nt, Artificial Sequence
  Description of Artificial Sequence: Synthetic oligonucleotide
  Antisense strand to SEQ ID NO: 1895010
aucucaaguagaauaacaa

SEQ ID NO: 1895012 - RNA, 19 nt, Artificial Sequence
  Description of Artificial Sequence: Synthetic oligonucleotide
  Sense strand starting at position 2830 of SEQ ID NO: 1879265
uuugucaaguauuuagcau

SEQ ID NO: 1895013 - RNA, 19 nt, Artificial Sequence
  Description of Artificial Sequence: Synthetic oligonucleotide
  Antisense strand to SEQ ID NO: 1895012
augcuaaauacuugacaaa

SEQ ID NO: 1895014 - RNA, 19 nt, Artificial Sequence
  Description of Artificial Sequence: Synthetic oligonucleotide
  Sense strand starting at position 2845 of SEQ ID NO: 1879265
gcauuauacuuucuuggga

SEQ ID NO: 1895015 - RNA, 19 nt, Artificial Sequence
  Description of Artificial Sequence: Synthetic oligonucleotide
  Antisense strand to SEQ ID NO: 1895014
ucccaagaaaguauaaugc

SEQ ID NO: 1895016 - RNA, 19 nt, Artificial Sequence
  Description of Artificial Sequence: Synthetic oligonucleotide
  Sense strand starting at position 2848 of SEQ ID NO: 1879265
uuauacuuucuugggauua

SEQ ID NO: 1895017 - RNA, 19 nt, Artificial Sequence
  Description of Artificial Sequence: Synthetic oligonucleotide
  Antisense strand to SEQ ID NO: 1895016
uaaucccaagaaaguauaa

SEQ ID NO: 1895018 - RNA, 19 nt, Artificial Sequence
  Description of Artificial Sequence: Synthetic oligonucleotide
  Sense strand starting at position 2892 of SEQ ID NO: 1879265
gaguuugguaagggugaua

SEQ ID NO: 1895019 - RNA, 19 nt, Artificial Sequence
  Description of Artificial Sequence: Synthetic oligonucleotide
  Antisense strand to SEQ ID NO: 1895018
uaucacccuuaccaaacuc

SEQ ID NO: 1895020 - RNA, 19 nt, Artificial Sequence
  Description of Artificial Sequence: Synthetic oligonucleotide
  Sense strand starting at position 2957 of SEQ ID NO: 1879265
gaguauguacaagaguuau

SEQ ID NO: 1895021 - RNA, 19 nt, Artificial Sequence
  Description of Artificial Sequence: Synthetic oligonucleotide
  Antisense strand to SEQ ID NO: 1895020
auaacucuuguacauacuc

SEQ ID NO: 1895022 - RNA, 19 nt, Artificial Sequence
  Description of Artificial Sequence: Synthetic oligonucleotide
  Sense strand starting at position 3275 of SEQ ID NO: 1879265
acaggaagccacugugaaa

SEQ ID NO: 1895023 - RNA, 19 nt, Artificial Sequence
  Description of Artificial Sequence: Synthetic oligonucleotide
  Antisense strand to SEQ ID NO: 1895022
uuucacaguggcuuccugu

SEQ ID NO: 1895024 - RNA, 19 nt, Artificial Sequence
  Description of Artificial Sequence: Synthetic oligonucleotide
  Sense strand starting at position 3372 of SEQ ID NO: 1879265
guuuaauuuggauguguua

SEQ ID NO: 1895025 - RNA, 19 nt, Artificial Sequence
  Description of Artificial Sequence: Synthetic oligonucleotide
  Antisense strand to SEQ ID NO: 1895024
uaacacauccaaauuaaac

SEQ ID NO: 1895026 - RNA, 19 nt, Artificial Sequence
  Description of Artificial Sequence: Synthetic oligonucleotide
  Sense strand starting at position 3374 of SEQ ID NO: 1879265
uuaauuuggauguguuagu

SEQ ID NO: 1895027 - RNA, 19 nt, Artificial Sequence
  Description of Artificial Sequence: Synthetic oligonucleotide
  Antisense strand to SEQ ID NO: 1895026
acuaacacauccaaauuaa

SEQ ID NO: 1895028 - RNA, 19 nt, Artificial Sequence
  Description of Artificial Sequence: Synthetic oligonucleotide
  Sense strand starting at position 3385 of SEQ ID NO: 1879265
guguuaguagaccauuaac

SEQ ID NO: 1895029 - RNA, 19 nt, Artificial Sequence
  Description of Artificial Sequence: Synthetic oligonucleotide
  Antisense strand to SEQ ID NO: 1895028
guuaauggucuacuaacac

SEQ ID NO: 1895030 - RNA, 19 nt, Artificial Sequence
  Description of Artificial Sequence: Synthetic oligonucleotide
  Sense strand starting at position 3388 of SEQ ID NO: 1879265
uuaguagaccauuaacagu

SEQ ID NO: 1895031 - RNA, 19 nt, Artificial Sequence
  Description of Artificial Sequence: Synthetic oligonucleotide
  Antisense strand to SEQ ID NO: 1895030
acuguuaauggucuacuaa

SEQ ID NO: 1895032 - RNA, 19 nt, Artificial Sequence
  Description of Artificial Sequence: Synthetic oligonucleotide
  Sense strand starting at position 3396 of SEQ ID NO: 1879265
ccauuaacagucuguaaua

SEQ ID NO: 1895033 - RNA, 19 nt, Artificial Sequence
  Description of Artificial Sequence: Synthetic oligonucleotide
  Antisense strand to SEQ ID NO: 1895032
uauuacagacuguuaaugg

SEQ ID NO: 1895034 - RNA, 19 nt, Artificial Sequence
  Description of Artificial Sequence: Synthetic oligonucleotide
  Sense strand starting at position 3398 of SEQ ID NO: 1879265
auuaacagucuguaauauc

SEQ ID NO: 1895035 - RNA, 19 nt, Artificial Sequence
  Description of Artificial Sequence: Synthetic oligonucleotide
  Antisense strand to SEQ ID NO: 1895034
gauauuacagacuguuaau

SEQ ID NO: 1895036 - RNA, 19 nt, Artificial Sequence
  Description of Artificial Sequence: Synthetic oligonucleotide
  Sense strand starting at position 3405 of SEQ ID NO: 1879265
gucuguaauaucuaagggu

SEQ ID NO: 1895037 - RNA, 19 nt, Artificial Sequence
  Description of Artificial Sequence: Synthetic oligonucleotide
  Antisense strand to SEQ ID NO: 1895036
acccuuagauauuacagac

SEQ ID NO: 1895038 - RNA, 19 nt, Artificial Sequence
  Description of Artificial Sequence: Synthetic oligonucleotide
  Sense strand starting at position 3409 of SEQ ID NO: 1879265
guaauaucuaaggguacag

SEQ ID NO: 1895039 - RNA, 19 nt, Artificial Sequence
  Description of Artificial Sequence: Synthetic oligonucleotide
  Antisense strand to SEQ ID NO: 1895038
cuguacccuuagauauuac

SEQ ID NO: 1895040 - RNA, 19 nt, Artificial Sequence
  Description of Artificial Sequence: Synthetic oligonucleotide
  Sense strand starting at position 3430 of SEQ ID NO: 1879265
gcauuagaaacguagcaau

SEQ ID NO: 1895041 - RNA, 19 nt, Artificial Sequence
  Description of Artificial Sequence: Synthetic oligonucleotide
  Antisense strand to SEQ ID NO: 1895040
auugcuacguuucuaaugc

SEQ ID NO: 1895042 - RNA, 19 nt, Artificial Sequence
  Description of Artificial Sequence: Synthetic oligonucleotide
  Sense strand starting at position 3442 of SEQ ID NO: 1879265
uagcaauugggauguauga

SEQ ID NO: 1895043 - RNA, 19 nt, Artificial Sequence
  Description of Artificial Sequence: Synthetic oligonucleotide
  Antisense strand to SEQ ID NO: 1895042
ucauacaucccaauugcua

SEQ ID NO: 1895044 - RNA, 19 nt, Artificial Sequence
  Description of Artificial Sequence: Synthetic oligonucleotide
  Sense strand starting at position 3633 of SEQ ID NO: 1879265
accagaagucauugccaug

SEQ ID NO: 1895045 - RNA, 19 nt, Artificial Sequence
  Description of Artificial Sequence: Synthetic oligonucleotide
  Antisense strand to SEQ ID NO: 1895044
cauggcaaugacuucuggu

SEQ ID NO: 1895046 - RNA, 19 nt, Artificial Sequence
  Description of Artificial Sequence: Synthetic oligonucleotide
  Sense strand starting at position 3686 of SEQ ID NO: 1879265
ggagaaaggugagcaugau

SEQ ID NO: 1895047 - RNA, 19 nt, Artificial Sequence
  Description of Artificial Sequence: Synthetic oligonucleotide
  Antisense strand to SEQ ID NO: 1895046
aucaugcucaccuuucucc

SEQ ID NO: 1895048 - RNA, 19 nt, Artificial Sequence
  Description of Artificial Sequence: Synthetic oligonucleotide
  Sense strand starting at position 3690 of SEQ ID NO: 1879265
aaaggugagcaugauguua

SEQ ID NO: 1895049 - RNA, 19 nt, Artificial Sequence
  Description of Artificial Sequence: Synthetic oligonucleotide
  Antisense strand to SEQ ID NO: 1895048
uaacaucaugcucaccuuu

SEQ ID NO: 1895050 - RNA, 19 nt, Artificial Sequence
  Description of Artificial Sequence: Synthetic oligonucleotide
  Sense strand starting at position 3970 of SEQ ID NO: 1879265
cuggcauuacacuaagcau

SEQ ID NO: 1895051 - RNA, 19 nt, Artificial Sequence
  Description of Artificial Sequence: Synthetic oligonucleotide
  Antisense strand to SEQ ID NO: 1895050
augcuuaguguaaugccag

SEQ ID NO: 1895052 - RNA, 19 nt, Artificial Sequence
  Description of Artificial Sequence: Synthetic oligonucleotide
  Sense strand starting at position 191 of SEQ ID NO: 1879266
aaaugagauaguuguggca

SEQ ID NO: 1895053 - RNA, 19 nt, Artificial Sequence
  Description of Artificial Sequence: Synthetic oligonucleotide
  Antisense strand to SEQ ID NO: 1895052
ugccacaacuaucucauuu

SEQ ID NO: 1895054 - RNA, 19 nt, Artificial Sequence
  Description of Artificial Sequence: Synthetic oligonucleotide
  Sense strand starting at position 206 of SEQ ID NO: 1879266
ggcauucuugggcauuaaa

SEQ ID NO: 1895055 - RNA, 19 nt, Artificial Sequence
  Description of Artificial Sequence: Synthetic oligonucleotide
  Antisense strand to SEQ ID NO: 1895054
uuuaaugcccaagaaugcc

SEQ ID NO: 1895056 - RNA, 19 nt, Artificial Sequence
  Description of Artificial Sequence: Synthetic oligonucleotide
  Sense strand starting at position 216 of SEQ ID NO: 1879266
ggcauuaaauaaguacaaa

SEQ ID NO: 1895057 - RNA, 19 nt, Artificial Sequence
  Description of Artificial Sequence: Synthetic oligonucleotide
  Antisense strand to SEQ ID NO: 1895056
uuuguacuuauuuaaugcc

SEQ ID NO: 1895058 - RNA, 19 nt, Artificial Sequence
  Description of Artificial Sequence: Synthetic oligonucleotide
  Sense strand starting at position 229 of SEQ ID NO: 1879266
uacaaacauggacgugaaa

SEQ ID NO: 1895059 - RNA, 19 nt, Artificial Sequence
  Description of Artificial Sequence: Synthetic oligonucleotide
  Antisense strand to SEQ ID NO: 1895058
uuucacguccauguuugua

SEQ ID NO: 1895060 - RNA, 19 nt, Artificial Sequence
  Description of Artificial Sequence: Synthetic oligonucleotide
  Sense strand starting at position 659 of SEQ ID NO: 1879266
ggccaauauggucauuauu

SEQ ID NO: 1895061 - RNA, 19 nt, Artificial Sequence
  Description of Artificial Sequence: Synthetic oligonucleotide
  Antisense strand to SEQ ID NO: 1895060
aauaaugaccauauuggcc

SEQ ID NO: 1895062 - RNA, 19 nt, Artificial Sequence
  Description of Artificial Sequence: Synthetic oligonucleotide
  Sense strand starting at position 799 of SEQ ID NO: 1879266
ugaguacagugacuuaauu

SEQ ID NO: 1895063 - RNA, 19 nt, Artificial Sequence
  Description of Artificial Sequence: Synthetic oligonucleotide
  Antisense strand to SEQ ID NO: 1895062
aauuaagucacuguacuca

SEQ ID NO: 1895064 - RNA, 19 nt, Artificial Sequence
  Description of Artificial Sequence: Synthetic oligonucleotide
  Sense strand starting at position 831 of SEQ ID NO: 1879266
ggaaauaauccuggcuggu

SEQ ID NO: 1895065 - RNA, 19 nt, Artificial Sequence
  Description of Artificial Sequence: Synthetic oligonucleotide
  Antisense strand to SEQ ID NO: 1895064
accagccaggauuauuucc

SEQ ID NO: 1895066 - RNA, 19 nt, Artificial Sequence
  Description of Artificial Sequence: Synthetic oligonucleotide
  Sense strand starting at position 833 of SEQ ID NO: 1879266
aaauaauccuggcugguua

SEQ ID NO: 1895067 - RNA, 19 nt, Artificial Sequence
  Description of Artificial Sequence: Synthetic oligonucleotide
  Antisense strand to SEQ ID NO: 1895066
uaaccagccaggauuauuu

SEQ ID NO: 1895068 - RNA, 19 nt, Artificial Sequence
  Description of Artificial Sequence: Synthetic oligonucleotide
  Sense strand starting at position 847 of SEQ ID NO: 1879266
gguuaaugaacaggguagu

SEQ ID NO: 1895069 - RNA, 19 nt, Artificial Sequence
  Description of Artificial Sequence: Synthetic oligonucleotide
  Antisense strand to SEQ ID NO: 1895068
acuacccuguucauuaacc

SEQ ID NO: 1895070 - RNA, 19 nt, Artificial Sequence
  Description of Artificial Sequence: Synthetic oligonucleotide
  Sense strand starting at position 904 of SEQ ID NO: 1879266
gcuguuauacccuacaaug

SEQ ID NO: 1895071 - RNA, 19 nt, Artificial Sequence
  Description of Artificial Sequence: Synthetic oligonucleotide
  Antisense strand to SEQ ID NO: 1895070
cauuguaggguauaacagc

SEQ ID NO: 1895072 - RNA, 19 nt, Artificial Sequence
  Description of Artificial Sequence: Synthetic oligonucleotide
  Sense strand starting at position 906 of SEQ ID NO: 1879266
uguuauacccuacaauguu

SEQ ID NO: 1895073 - RNA, 19 nt, Artificial Sequence
  Description of Artificial Sequence: Synthetic oligonucleotide
  Antisense strand to SEQ ID NO: 1895072
aacauuguaggguauaaca

SEQ ID NO: 1895074 - RNA, 19 nt, Artificial Sequence
  Description of Artificial Sequence: Synthetic oligonucleotide
  Sense strand starting at position 1012 of SEQ ID NO: 1879266
agggcaaagcuauaacagu

SEQ ID NO: 1895075 - RNA, 19 nt, Artificial Sequence
  Description of Artificial Sequence: Synthetic oligonucleotide
  Antisense strand to SEQ ID NO: 1895074
acuguuauagcuuugcccu

SEQ ID NO: 1895076 - RNA, 19 nt, Artificial Sequence
  Description of Artificial Sequence: Synthetic oligonucleotide
  Sense strand starting at position 1031 of SEQ ID NO: 1879266
gguggauuuccguaagugc

SEQ ID NO: 1895077 - RNA, 19 nt, Artificial Sequence
  Description of Artificial Sequence: Synthetic oligonucleotide
  Antisense strand to SEQ ID NO: 1895076
gcacuuacggaaauccacc

SEQ ID NO: 1895078 - RNA, 19 nt, Artificial Sequence
  Description of Artificial Sequence: Synthetic oligonucleotide
  Sense strand starting at position 1351 of SEQ ID NO: 1879266
ggacuaaaugcauguaaag

SEQ ID NO: 1895079 - RNA, 19 nt, Artificial Sequence
  Description of Artificial Sequence: Synthetic oligonucleotide
  Antisense strand to SEQ ID NO: 1895078
cuuuacaugcauuuagucc

SEQ ID NO: 1895080 - RNA, 19 nt, Artificial Sequence
  Description of Artificial Sequence: Synthetic oligonucleotide
  Sense strand starting at position 1368 of SEQ ID NO: 1879266
aggguuuacugagcccaga

SEQ ID NO: 1895081 - RNA, 19 nt, Artificial Sequence
  Description of Artificial Sequence: Synthetic oligonucleotide
  Antisense strand to SEQ ID NO: 1895080
ucugggcucaguaaacccu

SEQ ID NO: 1895082 - RNA, 19 nt, Artificial Sequence
  Description of Artificial Sequence: Synthetic oligonucleotide
  Sense strand starting at position 1412 of SEQ ID NO: 1879266
gugcuauuauuucuaccau

SEQ ID NO: 1895083 - RNA, 19 nt, Artificial Sequence
  Description of Artificial Sequence: Synthetic oligonucleotide
  Antisense strand to SEQ ID NO: 1895082
augguagaaauaauagcac

SEQ ID NO: 1895084 - RNA, 19 nt, Artificial Sequence
  Description of Artificial Sequence: Synthetic oligonucleotide
  Sense strand starting at position 1434 of SEQ ID NO: 1879266
guacgaucgcugccuuauu

SEQ ID NO: 1895085 - RNA, 19 nt, Artificial Sequence
  Description of Artificial Sequence: Synthetic oligonucleotide
  Antisense strand to SEQ ID NO: 1895084
aauaaggcagcgaucguac

SEQ ID NO: 1895086 - RNA, 19 nt, Artificial Sequence
  Description of Artificial Sequence: Synthetic oligonucleotide
  Sense strand starting at position 1500 of SEQ ID NO: 1879266
ugggaaguucuuuagcuga

SEQ ID NO: 1895087 - RNA, 19 nt, Artificial Sequence
  Description of Artificial Sequence: Synthetic oligonucleotide
  Antisense strand to SEQ ID NO: 1895086
ucagcuaaagaacuuccca

SEQ ID NO: 1895088 - RNA, 19 nt, Artificial Sequence
  Description of Artificial Sequence: Synthetic oligonucleotide
  Sense strand starting at position 1623 of SEQ ID NO: 1879266
agacaagcuccaggucuaa

SEQ ID NO: 1895089 - RNA, 19 nt, Artificial Sequence
  Description of Artificial Sequence: Synthetic oligonucleotide
  Antisense strand to SEQ ID NO: 1895088
uuagaccuggagcuugucu

SEQ ID NO: 1895090 - RNA, 19 nt, Artificial Sequence
  Description of Artificial Sequence: Synthetic oligonucleotide
  Sense strand starting at position 2147 of SEQ ID NO: 1879266
aaggcugaucgugaccaaa

SEQ ID NO: 1895091 - RNA, 19 nt, Artificial Sequence
  Description of Artificial Sequence: Synthetic oligonucleotide
  Antisense strand to SEQ ID NO: 1895090
uuuggucacgaucagccuu

SEQ ID NO: 1895092 - RNA, 19 nt, Artificial Sequence
  Description of Artificial Sequence: Synthetic oligonucleotide
  Sense strand starting at position 2330 of SEQ ID NO: 1879266
acccuauucguagaaccuu

SEQ ID NO: 1895093 - RNA, 19 nt, Artificial Sequence
  Description of Artificial Sequence: Synthetic oligonucleotide
  Antisense strand to SEQ ID NO: 1895092
aagguucuacgaauagggu

SEQ ID NO: 1895094 - RNA, 19 nt, Artificial Sequence
  Description of Artificial Sequence: Synthetic oligonucleotide
  Sense strand starting at position 2375 of SEQ ID NO: 1879266
gggauucuuuaacucucca

SEQ ID NO: 1895095 - RNA, 19 nt, Artificial Sequence
  Description of Artificial Sequence: Synthetic oligonucleotide
  Antisense strand to SEQ ID NO: 1895094
uggagaguuaaagaauccc

SEQ ID NO: 1895096 - RNA, 19 nt, Artificial Sequence
  Description of Artificial Sequence: Synthetic oligonucleotide
  Sense strand starting at position 2633 of SEQ ID NO: 1879266
ggaaacuuucuuugagcca

SEQ ID NO: 1895097 - RNA, 19 nt, Artificial Sequence
  Description of Artificial Sequence: Synthetic oligonucleotide
  Antisense strand to SEQ ID NO: 1895096
uggcucaaagaaaguuucc

SEQ ID NO: 1895098 - RNA, 19 nt, Artificial Sequence
  Description of Artificial Sequence: Synthetic oligonucleotide
  Sense strand starting at position 2659 of SEQ ID NO: 1879266
agaucccuugcggauauaa

SEQ ID NO: 1895099 - RNA, 19 nt, Artificial Sequence
  Description of Artificial Sequence: Synthetic oligonucleotide
  Antisense strand to SEQ ID NO: 1895098
uuauauccgcaagggaucu

SEQ ID NO: 1895100 - RNA, 19 nt, Artificial Sequence
  Description of Artificial Sequence: Synthetic oligonucleotide
  Sense strand starting at position 2765 of SEQ ID NO: 1879266
aguuuaucaccugauccuu

SEQ ID NO: 1895101 - RNA, 19 nt, Artificial Sequence
  Description of Artificial Sequence: Synthetic oligonucleotide
  Antisense strand to SEQ ID NO: 1895100
aaggaucaggugauaaacu

SEQ ID NO: 1895102 - RNA, 19 nt, Artificial Sequence
  Description of Artificial Sequence: Synthetic oligonucleotide
  Sense strand starting at position 2857 of SEQ ID NO: 1879266
cucaauaaauauucguaga

SEQ ID NO: 1895103 - RNA, 19 nt, Artificial Sequence
  Description of Artificial Sequence: Synthetic oligonucleotide
  Antisense strand to SEQ ID NO: 1895102
ucuacgaauauuuauugag

SEQ ID NO: 1895104 - RNA, 19 nt, Artificial Sequence
  Description of Artificial Sequence: Synthetic oligonucleotide
  Sense strand starting at position 2862 of SEQ ID NO: 1879266
uaaauauucguagaaguga

SEQ ID NO: 1895105 - RNA, 19 nt, Artificial Sequence
  Description of Artificial Sequence: Synthetic oligonucleotide
  Antisense strand to SEQ ID NO: 1895104
ucacuucuacgaauauuua

SEQ ID NO: 1895106 - RNA, 19 nt, Artificial Sequence
  Description of Artificial Sequence: Synthetic oligonucleotide
  Sense strand starting at position 2867 of SEQ ID NO: 1879266
auucguagaagugaacgaa

SEQ ID NO: 1895107 - RNA, 19 nt, Artificial Sequence
  Description of Artificial Sequence: Synthetic oligonucleotide
  Antisense strand to SEQ ID NO: 1895106
uucguucacuucuacgaau

SEQ ID NO: 1895108 - RNA, 19 nt, Artificial Sequence
  Description of Artificial Sequence: Synthetic oligonucleotide
  Sense strand starting at position 2898 of SEQ ID NO: 1879266
uuuggugcucaagagauua

SEQ ID NO: 1895109 - RNA, 19 nt, Artificial Sequence
  Description of Artificial Sequence: Synthetic oligonucleotide
  Antisense strand to SEQ ID NO: 1895108
uaaucucuugagcaccaaa

SEQ ID NO: 1895110 - RNA, 19 nt, Artificial Sequence
  Description of Artificial Sequence: Synthetic oligonucleotide
  Sense strand starting at position 2900 of SEQ ID NO: 1879266
uggugcucaagagauuaua

SEQ ID NO: 1895111 - RNA, 19 nt, Artificial Sequence
  Description of Artificial Sequence: Synthetic oligonucleotide
  Antisense strand to SEQ ID NO: 1895110
uauaaucucuugagcacca

SEQ ID NO: 1895112 - RNA, 19 nt, Artificial Sequence
  Description of Artificial Sequence: Synthetic oligonucleotide
  Sense strand starting at position 2994 of SEQ ID NO: 1879266
guacccaagugaccuuaaa

SEQ ID NO: 1895113 - RNA, 19 nt, Artificial Sequence
  Description of Artificial Sequence: Synthetic oligonucleotide
  Antisense strand to SEQ ID NO: 1895112
uuuaaggucacuuggguac

SEQ ID NO: 1895114 - RNA, 19 nt, Artificial Sequence
  Description of Artificial Sequence: Synthetic oligonucleotide
  Sense strand starting at position 3063 of SEQ ID NO: 1879266
ugggaauacuuuccuggca

SEQ ID NO: 1895115 - RNA, 19 nt, Artificial Sequence
  Description of Artificial Sequence: Synthetic oligonucleotide
  Antisense strand to SEQ ID NO: 1895114
ugccaggaaaguauuccca

SEQ ID NO: 1895116 - RNA, 19 nt, Artificial Sequence
  Description of Artificial Sequence: Synthetic oligonucleotide
  Sense strand starting at position 3066 of SEQ ID NO: 1879266
gaauacuuuccuggcagga

SEQ ID NO: 1895117 - RNA, 19 nt, Artificial Sequence
  Description of Artificial Sequence: Synthetic oligonucleotide
  Antisense strand to SEQ ID NO: 1895116
uccugccaggaaaguauuc

SEQ ID NO: 1895118 - RNA, 19 nt, Artificial Sequence
  Description of Artificial Sequence: Synthetic oligonucleotide
  Sense strand starting at position 3079 of SEQ ID NO: 1879266
gcaggauuguaguuaagga

SEQ ID NO: 1895119 - RNA, 19 nt, Artificial Sequence
  Description of Artificial Sequence: Synthetic oligonucleotide
  Antisense strand to SEQ ID NO: 1895118
uccuuaacuacaauccugc

SEQ ID NO: 1895120 - RNA, 19 nt, Artificial Sequence
  Description of Artificial Sequence: Synthetic oligonucleotide
  Sense strand starting at position 3084 of SEQ ID NO: 1879266
auuguaguuaaggauaagu

SEQ ID NO: 1895121 - RNA, 19 nt, Artificial Sequence
  Description of Artificial Sequence: Synthetic oligonucleotide
  Antisense strand to SEQ ID NO: 1895120
acuuauccuuaacuacaau

SEQ ID NO: 1895122 - RNA, 19 nt, Artificial Sequence
  Description of Artificial Sequence: Synthetic oligonucleotide
  Sense strand starting at position 3086 of SEQ ID NO: 1879266
uguaguuaaggauaaguga

SEQ ID NO: 1895123 - RNA, 19 nt, Artificial Sequence
  Description of Artificial Sequence: Synthetic oligonucleotide
  Antisense strand to SEQ ID NO: 1895122
ucacuuauccuuaacuaca

SEQ ID NO: 1895124 - RNA, 19 nt, Artificial Sequence
  Description of Artificial Sequence: Synthetic oligonucleotide
  Sense strand starting at position 3131 of SEQ ID NO: 1879266
augccugggacuuagcaaa

SEQ ID NO: 1895125 - RNA, 19 nt, Artificial Sequence
  Description of Artificial Sequence: Synthetic oligonucleotide
  Antisense strand to SEQ ID NO: 1895124
uuugcuaagucccaggcau

SEQ ID NO: 1895126 - RNA, 19 nt, Artificial Sequence
  Description of Artificial Sequence: Synthetic oligonucleotide
  Sense strand starting at position 3142 of SEQ ID NO: 1879266
uuagcaaaugcucaguaaa

SEQ ID NO: 1895127 - RNA, 19 nt, Artificial Sequence
  Description of Artificial Sequence: Synthetic oligonucleotide
  Antisense strand to SEQ ID NO: 1895126
uuuacugagcauuugcuaa

SEQ ID NO: 1895128 - RNA, 19 nt, Artificial Sequence
  Description of Artificial Sequence: Synthetic oligonucleotide
  Sense strand starting at position 3318 of SEQ ID NO: 1879266
ggaucagacacucgaguuu

SEQ ID NO: 1895129 - RNA, 19 nt, Artificial Sequence
  Description of Artificial Sequence: Synthetic oligonucleotide
  Antisense strand to SEQ ID NO: 1895128
aaacucgagugucugaucc

SEQ ID NO: 1895130 - RNA, 19 nt, Artificial Sequence
  Description of Artificial Sequence: Synthetic oligonucleotide
  Sense strand starting at position 3329 of SEQ ID NO: 1879266
ucgaguuuggaacagucaa

SEQ ID NO: 1895131 - RNA, 19 nt, Artificial Sequence
  Description of Artificial Sequence: Synthetic oligonucleotide
  Antisense strand to SEQ ID NO: 1895130
uugacuguuccaaacucga

SEQ ID NO: 1895132 - RNA, 19 nt, Artificial Sequence
  Description of Artificial Sequence: Synthetic oligonucleotide
  Sense strand starting at position 164 of SEQ ID NO: 1879267
aagugaaaguagcuaaauu

SEQ ID NO: 1895133 - RNA, 19 nt, Artificial Sequence
  Description of Artificial Sequence: Synthetic oligonucleotide
  Antisense strand to SEQ ID NO: 1895132
aauuuagcuacuuucacuu

SEQ ID NO: 1895134 - RNA, 19 nt, Artificial Sequence
  Description of Artificial Sequence: Synthetic oligonucleotide
  Sense strand starting at position 259 of SEQ ID NO: 1879267
gggugaucagaaggguaau

SEQ ID NO: 1895135 - RNA, 19 nt, Artificial Sequence
  Description of Artificial Sequence: Synthetic oligonucleotide
  Antisense strand to SEQ ID NO: 1895134
auuacccuucugaucaccc

SEQ ID NO: 1895136 - RNA, 19 nt, Artificial Sequence
  Description of Artificial Sequence: Synthetic oligonucleotide
  Sense strand starting at position 260 of SEQ ID NO: 1879267
ggugaucagaaggguaauu

SEQ ID NO: 1895137 - RNA, 19 nt, Artificial Sequence
  Description of Artificial Sequence: Synthetic oligonucleotide
  Antisense strand to SEQ ID NO: 1895136
aauuacccuucugaucacc

SEQ ID NO: 1895138 - RNA, 19 nt, Artificial Sequence
  Description of Artificial Sequence: Synthetic oligonucleotide
  Sense strand starting at position 484 of SEQ ID NO: 1879267
uauauagaauuguuucgga

SEQ ID NO: 1895139 - RNA, 19 nt, Artificial Sequence
  Description of Artificial Sequence: Synthetic oligonucleotide
  Antisense strand to SEQ ID NO: 1895138
uccgaaacaauucuauaua

SEQ ID NO: 1895140 - RNA, 19 nt, Artificial Sequence
  Description of Artificial Sequence: Synthetic oligonucleotide
  Sense strand starting at position 767 of SEQ ID NO: 1879267
aucaguggguuucuagaca

SEQ ID NO: 1895141 - RNA, 19 nt, Artificial Sequence
  Description of Artificial Sequence: Synthetic oligonucleotide
  Antisense strand to SEQ ID NO: 1895140
ugucuagaaacccacugau

SEQ ID NO: 1895142 - RNA, 19 nt, Artificial Sequence
  Description of Artificial Sequence: Synthetic oligonucleotide
  Sense strand starting at position 1128 of SEQ ID NO: 1879267
gcaaguauucuuuacuuug

SEQ ID NO: 1895143 - RNA, 19 nt, Artificial Sequence
  Description of Artificial Sequence: Synthetic oligonucleotide
  Antisense strand to SEQ ID NO: 1895142
caaaguaaagaauacuugc

SEQ ID NO: 1895144 - RNA, 19 nt, Artificial Sequence
  Description of Artificial Sequence: Synthetic oligonucleotide
  Sense strand starting at position 1160 of SEQ ID NO: 1879267
ucaguccugggauguuaaa

SEQ ID NO: 1895145 - RNA, 19 nt, Artificial Sequence
  Description of Artificial Sequence: Synthetic oligonucleotide
  Antisense strand to SEQ ID NO: 1895144
uuuaacaucccaggacuga

SEQ ID NO: 1895146 - RNA, 19 nt, Artificial Sequence
  Description of Artificial Sequence: Synthetic oligonucleotide
  Sense strand starting at position 1262 of SEQ ID NO: 1879267
auucuuaagugucuggaau

SEQ ID NO: 1895147 - RNA, 19 nt, Artificial Sequence
  Description of Artificial Sequence: Synthetic oligonucleotide
  Antisense strand to SEQ ID NO: 1895146
auuccagacacuuaagaau

SEQ ID NO: 1895148 - RNA, 19 nt, Artificial Sequence
  Description of Artificial Sequence: Synthetic oligonucleotide
  Sense strand starting at position 1366 of SEQ ID NO: 1879267
acaguaaaucgcuauauac

SEQ ID NO: 1895149 - RNA, 19 nt, Artificial Sequence
  Description of Artificial Sequence: Synthetic oligonucleotide
  Antisense strand to SEQ ID NO: 1895148
guauauagcgauuuacugu

SEQ ID NO: 1895150 - RNA, 19 nt, Artificial Sequence
  Description of Artificial Sequence: Synthetic oligonucleotide
  Sense strand starting at position 1368 of SEQ ID NO: 1879267
aguaaaucgcuauauacca

SEQ ID NO: 1895151 - RNA, 19 nt, Artificial Sequence
  Description of Artificial Sequence: Synthetic oligonucleotide
  Antisense strand to SEQ ID NO: 1895150
ugguauauagcgauuuacu

SEQ ID NO: 1895152 - RNA, 19 nt, Artificial Sequence
  Description of Artificial Sequence: Synthetic oligonucleotide
  Sense strand starting at position 1650 of SEQ ID NO: 1879267
augucuucuccuuggaaac

SEQ ID NO: 1895153 - RNA, 19 nt, Artificial Sequence
  Description of Artificial Sequence: Synthetic oligonucleotide
  Antisense strand to SEQ ID NO: 1895152
guuuccaaggagaagacau

SEQ ID NO: 1895154 - RNA, 19 nt, Artificial Sequence
  Description of Artificial Sequence: Synthetic oligonucleotide
  Sense strand starting at position 1651 of SEQ ID NO: 1879267
ugucuucuccuuggaaaca

SEQ ID NO: 1895155 - RNA, 19 nt, Artificial Sequence
  Description of Artificial Sequence: Synthetic oligonucleotide
  Antisense strand to SEQ ID NO: 1895154
uguuuccaaggagaagaca

SEQ ID NO: 1895156 - RNA, 19 nt, Artificial Sequence
  Description of Artificial Sequence: Synthetic oligonucleotide
  Sense strand starting at position 1788 of SEQ ID NO: 1879267
gcaggaucuccagaagcuu

SEQ ID NO: 1895157 - RNA, 19 nt, Artificial Sequence
  Description of Artificial Sequence: Synthetic oligonucleotide
  Antisense strand to SEQ ID NO: 1895156
aagcuucuggagauccugc

SEQ ID NO: 1895158 - RNA, 19 nt, Artificial Sequence
  Description of Artificial Sequence: Synthetic oligonucleotide
  Sense strand starting at position 1889 of SEQ ID NO: 1879267
cugaauucugcugcgcuga

SEQ ID NO: 1895159 - RNA, 19 nt, Artificial Sequence
  Description of Artificial Sequence: Synthetic oligonucleotide
  Antisense strand to SEQ ID NO: 1895158
ucagcgcagcagaauucag

SEQ ID NO: 1895160 - RNA, 19 nt, Artificial Sequence
  Description of Artificial Sequence: Synthetic oligonucleotide
  Sense strand starting at position 2020 of SEQ ID NO: 1879267
aguccauauaugggaugau

SEQ ID NO: 1895161 - RNA, 19 nt, Artificial Sequence
  Description of Artificial Sequence: Synthetic oligonucleotide
  Antisense strand to SEQ ID NO: 1895160
aucaucccauauauggacu

SEQ ID NO: 1895162 - RNA, 19 nt, Artificial Sequence
  Description of Artificial Sequence: Synthetic oligonucleotide
  Sense strand starting at position 2023 of SEQ ID NO: 1879267
ccauauaugggaugauguc

SEQ ID NO: 1895163 - RNA, 19 nt, Artificial Sequence
  Description of Artificial Sequence: Synthetic oligonucleotide
  Antisense strand to SEQ ID NO: 1895162
gacaucaucccauauaugg

SEQ ID NO: 1895164 - RNA, 19 nt, Artificial Sequence
  Description of Artificial Sequence: Synthetic oligonucleotide
  Sense strand starting at position 2238 of SEQ ID NO: 1879267
agagucaagauguacaguu

SEQ ID NO: 1895165 - RNA, 19 nt, Artificial Sequence
  Description of Artificial Sequence: Synthetic oligonucleotide
  Antisense strand to SEQ ID NO: 1895164
aacuguacaucuugacucu

SEQ ID NO: 1895166 - RNA, 19 nt, Artificial Sequence
  Description of Artificial Sequence: Synthetic oligonucleotide
  Sense strand starting at position 2265 of SEQ ID NO: 1879267
gccaacugaaagugaguua

SEQ ID NO: 1895167 - RNA, 19 nt, Artificial Sequence
  Description of Artificial Sequence: Synthetic oligonucleotide
  Antisense strand to SEQ ID NO: 1895166
uaacucacuuucaguuggc

SEQ ID NO: 1895168 - RNA, 19 nt, Artificial Sequence
  Description of Artificial Sequence: Synthetic oligonucleotide
  Sense strand starting at position 2270 of SEQ ID NO: 1879267
cugaaagugaguuagugua

SEQ ID NO: 1895169 - RNA, 19 nt, Artificial Sequence
  Description of Artificial Sequence: Synthetic oligonucleotide
  Antisense strand to SEQ ID NO: 1895168
uacacuaacucacuuucag

SEQ ID NO: 1895170 - RNA, 19 nt, Artificial Sequence
  Description of Artificial Sequence: Synthetic oligonucleotide
  Sense strand starting at position 2272 of SEQ ID NO: 1879267
gaaagugaguuaguguaga

SEQ ID NO: 1895171 - RNA, 19 nt, Artificial Sequence
  Description of Artificial Sequence: Synthetic oligonucleotide
  Antisense strand to SEQ ID NO: 1895170
ucuacacuaacucacuuuc

SEQ ID NO: 1895172 - RNA, 19 nt, Artificial Sequence
  Description of Artificial Sequence: Synthetic oligonucleotide
  Sense strand starting at position 2638 of SEQ ID NO: 1879267
ugcucuagacuugaacagu

SEQ ID NO: 1895173 - RNA, 19 nt, Artificial Sequence
  Description of Artificial Sequence: Synthetic oligonucleotide
  Antisense strand to SEQ ID NO: 1895172
acuguucaagucuagagca

SEQ ID NO: 1895174 - RNA, 19 nt, Artificial Sequence
  Description of Artificial Sequence: Synthetic oligonucleotide
  Sense strand starting at position 2701 of SEQ ID NO: 1879267
gagaaauguucuuugucau

SEQ ID NO: 1895175 - RNA, 19 nt, Artificial Sequence
  Description of Artificial Sequence: Synthetic oligonucleotide
  Antisense strand to SEQ ID NO: 1895174
augacaaagaacauuucuc

SEQ ID NO: 1895176 - RNA, 19 nt, Artificial Sequence
  Description of Artificial Sequence: Synthetic oligonucleotide
  Sense strand starting at position 2702 of SEQ ID NO: 1879267
agaaauguucuuugucaug

SEQ ID NO: 1895177 - RNA, 19 nt, Artificial Sequence
  Description of Artificial Sequence: Synthetic oligonucleotide
  Antisense strand to SEQ ID NO: 1895176
caugacaaagaacauuucu

SEQ ID NO: 1895178 - RNA, 19 nt, Artificial Sequence
  Description of Artificial Sequence: Synthetic oligonucleotide
  Sense strand starting at position 2714 of SEQ ID NO: 1879267
ugucauggccucuacauga

SEQ ID NO: 1895179 - RNA, 19 nt, Artificial Sequence
  Description of Artificial Sequence: Synthetic oligonucleotide
  Antisense strand to SEQ ID NO: 1895178
ucauguagaggccaugaca

SEQ ID NO: 1895180 - RNA, 19 nt, Artificial Sequence
  Description of Artificial Sequence: Synthetic oligonucleotide
  Sense strand starting at position 2719 of SEQ ID NO: 1879267
uggccucuacaugaguaau

SEQ ID NO: 1895181 - RNA, 19 nt, Artificial Sequence
  Description of Artificial Sequence: Synthetic oligonucleotide
  Antisense strand to SEQ ID NO: 1895180
auuacucauguagaggcca

SEQ ID NO: 1895182 - RNA, 19 nt, Artificial Sequence
  Description of Artificial Sequence: Synthetic oligonucleotide
  Sense strand starting at position 2729 of SEQ ID NO: 1879267
augaguaauuaguuccaca

SEQ ID NO: 1895183 - RNA, 19 nt, Artificial Sequence
  Description of Artificial Sequence: Synthetic oligonucleotide
  Antisense strand to SEQ ID NO: 1895182
uguggaacuaauuacucau

SEQ ID NO: 1895184 - RNA, 19 nt, Artificial Sequence
  Description of Artificial Sequence: Synthetic oligonucleotide
  Sense strand starting at position 2800 of SEQ ID NO: 1879267
gcuauaguuugaccuaaag

SEQ ID NO: 1895185 - RNA, 19 nt, Artificial Sequence
  Description of Artificial Sequence: Synthetic oligonucleotide
  Antisense strand to SEQ ID NO: 1895184
cuuuaggucaaacuauagc

SEQ ID NO: 1895186 - RNA, 19 nt, Artificial Sequence
  Description of Artificial Sequence: Synthetic oligonucleotide
  Sense strand starting at position 2838 of SEQ ID NO: 1879267
ugaagcauccacuacgaaa

SEQ ID NO: 1895187 - RNA, 19 nt, Artificial Sequence
  Description of Artificial Sequence: Synthetic oligonucleotide
  Antisense strand to SEQ ID NO: 1895186
uuucguaguggaugcuuca

SEQ ID NO: 1895188 - RNA, 19 nt, Artificial Sequence
  Description of Artificial Sequence: Synthetic oligonucleotide
  Sense strand starting at position 2926 of SEQ ID NO: 1879267
cuuguaauuccugauucug

SEQ ID NO: 1895189 - RNA, 19 nt, Artificial Sequence
  Description of Artificial Sequence: Synthetic oligonucleotide
  Antisense strand to SEQ ID NO: 1895188
cagaaucaggaauuacaag

SEQ ID NO: 1895190 - RNA, 19 nt, Artificial Sequence
  Description of Artificial Sequence: Synthetic oligonucleotide
  Sense strand starting at position 3154 of SEQ ID NO: 1879267
auaggauucugaucaaagc

SEQ ID NO: 1895191 - RNA, 19 nt, Artificial Sequence
  Description of Artificial Sequence: Synthetic oligonucleotide
  Antisense strand to SEQ ID NO: 1895190
gcuuugaucagaauccuau

SEQ ID NO: 1895192 - RNA, 19 nt, Artificial Sequence
  Description of Artificial Sequence: Synthetic oligonucleotide
  Sense strand starting at position 3187 of SEQ ID NO: 1879267
acaagagcuugauuaauug

SEQ ID NO: 1895193 - RNA, 19 nt, Artificial Sequence
  Description of Artificial Sequence: Synthetic oligonucleotide
  Antisense strand to SEQ ID NO: 1895192
caauuaaucaagcucuugu

SEQ ID NO: 1895194 - RNA, 19 nt, Artificial Sequence
  Description of Artificial Sequence: Synthetic oligonucleotide
  Sense strand starting at position 3204 of SEQ ID NO: 1879267
ugcccuucugaagaucaaa

SEQ ID NO: 1895195 - RNA, 19 nt, Artificial Sequence
  Description of Artificial Sequence: Synthetic oligonucleotide
  Antisense strand to SEQ ID NO: 1895194
uuugaucuucagaagggca

SEQ ID NO: 1895196 - RNA, 19 nt, Artificial Sequence
  Description of Artificial Sequence: Synthetic oligonucleotide
  Sense strand starting at position 3550 of SEQ ID NO: 1879267
ggcaucuuaggauggaaca

SEQ ID NO: 1895197 - RNA, 19 nt, Artificial Sequence
  Description of Artificial Sequence: Synthetic oligonucleotide
  Antisense strand to SEQ ID NO: 1895196
uguuccauccuaagaugcc

SEQ ID NO: 1895198 - RNA, 19 nt, Artificial Sequence
  Description of Artificial Sequence: Synthetic oligonucleotide
  Sense strand starting at position 3630 of SEQ ID NO: 1879267
augacuuuauaucucugua

SEQ ID NO: 1895199 - RNA, 19 nt, Artificial Sequence
  Description of Artificial Sequence: Synthetic oligonucleotide
  Antisense strand to SEQ ID NO: 1895198
uacagagauauaaagucau

SEQ ID NO: 1895200 - RNA, 19 nt, Artificial Sequence
  Description of Artificial Sequence: Synthetic oligonucleotide
  Sense strand starting at position 3656 of SEQ ID NO: 1879267
uuccauauuugugucuuua

SEQ ID NO: 1895201 - RNA, 19 nt, Artificial Sequence
  Description of Artificial Sequence: Synthetic oligonucleotide
  Antisense strand to SEQ ID NO: 1895200
uaaagacacaaauauggaa

SEQ ID NO: 1895202 - RNA, 19 nt, Artificial Sequence
  Description of Artificial Sequence: Synthetic oligonucleotide
  Sense strand starting at position 3755 of SEQ ID NO: 1879267
augaucuaagugugacuaa

SEQ ID NO: 1895203 - RNA, 19 nt, Artificial Sequence
  Description of Artificial Sequence: Synthetic oligonucleotide
  Antisense strand to SEQ ID NO: 1895202
uuagucacacuuagaucau

SEQ ID NO: 1895204 - RNA, 19 nt, Artificial Sequence
  Description of Artificial Sequence: Synthetic oligonucleotide
  Sense strand starting at position 3758 of SEQ ID NO: 1879267
aucuaagugugacuaaaua

SEQ ID NO: 1895205 - RNA, 19 nt, Artificial Sequence
  Description of Artificial Sequence: Synthetic oligonucleotide
  Antisense strand to SEQ ID NO: 1895204
uauuuagucacacuuagau

SEQ ID NO: 1895206 - RNA, 19 nt, Artificial Sequence
  Description of Artificial Sequence: Synthetic oligonucleotide
  Sense strand starting at position 3787 of SEQ ID NO: 1879267
cuuguauuauauguggaua

SEQ ID NO: 1895207 - RNA, 19 nt, Artificial Sequence
  Description of Artificial Sequence: Synthetic oligonucleotide
  Antisense strand to SEQ ID NO: 1895206
uauccacauauaauacaag

SEQ ID NO: 1895208 - RNA, 19 nt, Artificial Sequence
  Description of Artificial Sequence: Synthetic oligonucleotide
  Sense strand starting at position 3790 of SEQ ID NO: 1879267
guauuauauguggauacca

SEQ ID NO: 1895209 - RNA, 19 nt, Artificial Sequence
  Description of Artificial Sequence: Synthetic oligonucleotide
  Antisense strand to SEQ ID NO: 1895208
ugguauccacauauaauac

SEQ ID NO: 1895210 - RNA, 19 nt, Artificial Sequence
  Description of Artificial Sequence: Synthetic oligonucleotide
  Sense strand starting at position 3971 of SEQ ID NO: 1879267
agacaugccuuggaaauuu

SEQ ID NO: 1895211 - RNA, 19 nt, Artificial Sequence
  Description of Artificial Sequence: Synthetic oligonucleotide
  Antisense strand to SEQ ID NO: 1895210
aaauuuccaaggcaugucu

SEQ ID NO: 1895212 - RNA, 19 nt, Artificial Sequence
  Description of Artificial Sequence: Synthetic oligonucleotide
  Sense strand starting at position 173 of SEQ ID NO: 1879268
guguguuguauuuaguucu

SEQ ID NO: 1895213 - RNA, 19 nt, Artificial Sequence
  Description of Artificial Sequence: Synthetic oligonucleotide
  Antisense strand to SEQ ID NO: 1895212
agaacuaaauacaacacac

SEQ ID NO: 1895214 - RNA, 19 nt, Artificial Sequence
  Description of Artificial Sequence: Synthetic oligonucleotide
  Sense strand starting at position 176 of SEQ ID NO: 1879268
uguuguauuuaguucugua

SEQ ID NO: 1895215 - RNA, 19 nt, Artificial Sequence
  Description of Artificial Sequence: Synthetic oligonucleotide
  Antisense strand to SEQ ID NO: 1895214
uacagaacuaaauacaaca

SEQ ID NO: 1895216 - RNA, 19 nt, Artificial Sequence
  Description of Artificial Sequence: Synthetic oligonucleotide
  Sense strand starting at position 180 of SEQ ID NO: 1879268
guauuuaguucuguacaau

SEQ ID NO: 1895217 - RNA, 19 nt, Artificial Sequence
  Description of Artificial Sequence: Synthetic oligonucleotide
  Antisense strand to SEQ ID NO: 1895216
auuguacagaacuaaauac

SEQ ID NO: 1895218 - RNA, 19 nt, Artificial Sequence
  Description of Artificial Sequence: Synthetic oligonucleotide
  Sense strand starting at position 316 of SEQ ID NO: 1879268
cccucaagacaguauuguu

SEQ ID NO: 1895219 - RNA, 19 nt, Artificial Sequence
  Description of Artificial Sequence: Synthetic oligonucleotide
  Antisense strand to SEQ ID NO: 1895218
aacaauacugucuugaggg

SEQ ID NO: 1895220 - RNA, 19 nt, Artificial Sequence
  Description of Artificial Sequence: Synthetic oligonucleotide
  Sense strand starting at position 519 of SEQ ID NO: 1879268
aguagaccucacugaaauu

SEQ ID NO: 1895221 - RNA, 19 nt, Artificial Sequence
  Description of Artificial Sequence: Synthetic oligonucleotide
  Antisense strand to SEQ ID NO: 1895220
aauuucagugaggucuacu

SEQ ID NO: 1895222 - RNA, 19 nt, Artificial Sequence
  Description of Artificial Sequence: Synthetic oligonucleotide
  Sense strand starting at position 625 of SEQ ID NO: 1879268
gugguccagacucaauguu

SEQ ID NO: 1895223 - RNA, 19 nt, Artificial Sequence
  Description of Artificial Sequence: Synthetic oligonucleotide
  Antisense strand to SEQ ID NO: 1895222
aacauugagucuggaccac

SEQ ID NO: 1895224 - RNA, 19 nt, Artificial Sequence
  Description of Artificial Sequence: Synthetic oligonucleotide
  Sense strand starting at position 681 of SEQ ID NO: 1879268
gggaguggcugaccacaaa

SEQ ID NO: 1895225 - RNA, 19 nt, Artificial Sequence
  Description of Artificial Sequence: Synthetic oligonucleotide
  Antisense strand to SEQ ID NO: 1895224
uuuguggucagccacuccc

SEQ ID NO: 1895226 - RNA, 19 nt, Artificial Sequence
  Description of Artificial Sequence: Synthetic oligonucleotide
  Sense strand starting at position 899 of SEQ ID NO: 1879268
uguggcuaugacuacuaua

SEQ ID NO: 1895227 - RNA, 19 nt, Artificial Sequence
  Description of Artificial Sequence: Synthetic oligonucleotide
  Antisense strand to SEQ ID NO: 1895226
uauaguagucauagccaca

SEQ ID NO: 1895228 - RNA, 19 nt, Artificial Sequence
  Description of Artificial Sequence: Synthetic oligonucleotide
  Sense strand starting at position 912 of SEQ ID NO: 1879268
acuauaugauuuggagaua

SEQ ID NO: 1895229 - RNA, 19 nt, Artificial Sequence
  Description of Artificial Sequence: Synthetic oligonucleotide
  Antisense strand to SEQ ID NO: 1895228
uaucuccaaaucauauagu

SEQ ID NO: 1895230 - RNA, 19 nt, Artificial Sequence
  Description of Artificial Sequence: Synthetic oligonucleotide
  Sense strand starting at position 913 of SEQ ID NO: 1879268
cuauaugauuuggagauau

SEQ ID NO: 1895231 - RNA, 19 nt, Artificial Sequence
  Description of Artificial Sequence: Synthetic oligonucleotide
  Antisense strand to SEQ ID NO: 1895230
auaucuccaaaucauauag

SEQ ID NO: 1895232 - RNA, 19 nt, Artificial Sequence
  Description of Artificial Sequence: Synthetic oligonucleotide
  Sense strand starting at position 925 of SEQ ID NO: 1879268
gagauauagugugucugga

SEQ ID NO: 1895233 - RNA, 19 nt, Artificial Sequence
  Description of Artificial Sequence: Synthetic oligonucleotide
  Antisense strand to SEQ ID NO: 1895232
uccagacacacuauaucuc

SEQ ID NO: 1895234 - RNA, 19 nt, Artificial Sequence
  Description of Artificial Sequence: Synthetic oligonucleotide
  Sense strand starting at position 1573 of SEQ ID NO: 1879268
agugcaauaugauuaugaa

SEQ ID NO: 1895235 - RNA, 19 nt, Artificial Sequence
  Description of Artificial Sequence: Synthetic oligonucleotide
  Antisense strand to SEQ ID NO: 1895234
uucauaaucauauugcacu

SEQ ID NO: 1895236 - RNA, 19 nt, Artificial Sequence
  Description of Artificial Sequence: Synthetic oligonucleotide
  Sense strand starting at position 1696 of SEQ ID NO: 1879268
caugaaagccuguagauca

SEQ ID NO: 1895237 - RNA, 19 nt, Artificial Sequence
  Description of Artificial Sequence: Synthetic oligonucleotide
  Antisense strand to SEQ ID NO: 1895236
ugaucuacaggcuuucaug

SEQ ID NO: 1895238 - RNA, 19 nt, Artificial Sequence
  Description of Artificial Sequence: Synthetic oligonucleotide
  Sense strand starting at position 1703 of SEQ ID NO: 1879268
gccuguagaucauuaauca

SEQ ID NO: 1895239 - RNA, 19 nt, Artificial Sequence
  Description of Artificial Sequence: Synthetic oligonucleotide
  Antisense strand to SEQ ID NO: 1895238
ugauuaaugaucuacaggc

SEQ ID NO: 1895240 - RNA, 19 nt, Artificial Sequence
  Description of Artificial Sequence: Synthetic oligonucleotide
  Sense strand starting at position 1758 of SEQ ID NO: 1879268
ugaagucuuggauguagau

SEQ ID NO: 1895241 - RNA, 19 nt, Artificial Sequence
  Description of Artificial Sequence: Synthetic oligonucleotide
  Antisense strand to SEQ ID NO: 1895240
aucuacauccaagacuuca

SEQ ID NO: 1895242 - RNA, 19 nt, Artificial Sequence
  Description of Artificial Sequence: Synthetic oligonucleotide
  Sense strand starting at position 1774 of SEQ ID NO: 1879268
gauaaagauuucugaagua

SEQ ID NO: 1895243 - RNA, 19 nt, Artificial Sequence
  Description of Artificial Sequence: Synthetic oligonucleotide
  Antisense strand to SEQ ID NO: 1895242
uacuucagaaaucuuuauc

SEQ ID NO: 1895244 - RNA, 19 nt, Artificial Sequence
  Description of Artificial Sequence: Synthetic oligonucleotide
  Sense strand starting at position 1860 of SEQ ID NO: 1879268
uuuggagguuauccagagu

SEQ ID NO: 1895245 - RNA, 19 nt, Artificial Sequence
  Description of Artificial Sequence: Synthetic oligonucleotide
  Antisense strand to SEQ ID NO: 1895244
acucuggauaaccuccaaa

SEQ ID NO: 1895246 - RNA, 19 nt, Artificial Sequence
  Description of Artificial Sequence: Synthetic oligonucleotide
  Sense strand starting at position 1866 of SEQ ID NO: 1879268
gguuauccagagugaaaug

SEQ ID NO: 1895247 - RNA, 19 nt, Artificial Sequence
  Description of Artificial Sequence: Synthetic oligonucleotide
  Antisense strand to SEQ ID NO: 1895246
cauuucacucuggauaacc

SEQ ID NO: 1895248 - RNA, 19 nt, Artificial Sequence
  Description of Artificial Sequence: Synthetic oligonucleotide
  Sense strand starting at position 1867 of SEQ ID NO: 1879268
guuauccagagugaaaugu

SEQ ID NO: 1895249 - RNA, 19 nt, Artificial Sequence
  Description of Artificial Sequence: Synthetic oligonucleotide
  Antisense strand to SEQ ID NO: 1895248
acauuucacucuggauaac

SEQ ID NO: 1895250 - RNA, 19 nt, Artificial Sequence
  Description of Artificial Sequence: Synthetic oligonucleotide
  Sense strand starting at position 1909 of SEQ ID NO: 1879268
gccucaagacauuguagau

SEQ ID NO: 1895251 - RNA, 19 nt, Artificial Sequence
  Description of Artificial Sequence: Synthetic oligonucleotide
  Antisense strand to SEQ ID NO: 1895250
aucuacaaugucuugaggc

SEQ ID NO: 1895252 - RNA, 19 nt, Artificial Sequence
  Description of Artificial Sequence: Synthetic oligonucleotide
  Sense strand starting at position 2161 of SEQ ID NO: 1879268
gcaguuaucucuuuagaaa

SEQ ID NO: 1895253 - RNA, 19 nt, Artificial Sequence
  Description of Artificial Sequence: Synthetic oligonucleotide
  Antisense strand to SEQ ID NO: 1895252
uuucuaaagagauaacugc

SEQ ID NO: 1895254 - RNA, 19 nt, Artificial Sequence
  Description of Artificial Sequence: Synthetic oligonucleotide
  Sense strand starting at position 2311 of SEQ ID NO: 1879268
gcuuuaauuuguguaauca

SEQ ID NO: 1895255 - RNA, 19 nt, Artificial Sequence
  Description of Artificial Sequence: Synthetic oligonucleotide
  Antisense strand to SEQ ID NO: 1895254
ugauuacacaaauuaaagc

SEQ ID NO: 1895256 - RNA, 19 nt, Artificial Sequence
  Description of Artificial Sequence: Synthetic oligonucleotide
  Sense strand starting at position 2522 of SEQ ID NO: 1879268
auagacaguuguuccaaga

SEQ ID NO: 1895257 - RNA, 19 nt, Artificial Sequence
  Description of Artificial Sequence: Synthetic oligonucleotide
  Antisense strand to SEQ ID NO: 1895256
ucuuggaacaacugucuau

SEQ ID NO: 1895258 - RNA, 19 nt, Artificial Sequence
  Description of Artificial Sequence: Synthetic oligonucleotide
  Sense strand starting at position 2689 of SEQ ID NO: 1879268
ugaauuagacaagguucua

SEQ ID NO: 1895259 - RNA, 19 nt, Artificial Sequence
  Description of Artificial Sequence: Synthetic oligonucleotide
  Antisense strand to SEQ ID NO: 1895258
uagaaccuugucuaauuca

SEQ ID NO: 1895260 - RNA, 19 nt, Artificial Sequence
  Description of Artificial Sequence: Synthetic oligonucleotide
  Sense strand starting at position 2703 of SEQ ID NO: 1879268
uucuaauaaggauggucaa

SEQ ID NO: 1895261 - RNA, 19 nt, Artificial Sequence
  Description of Artificial Sequence: Synthetic oligonucleotide
  Antisense strand to SEQ ID NO: 1895260
uugaccauccuuauuagaa

SEQ ID NO: 1895262 - RNA, 19 nt, Artificial Sequence
  Description of Artificial Sequence: Synthetic oligonucleotide
  Sense strand starting at position 2704 of SEQ ID NO: 1879268
ucuaauaaggauggucaau

SEQ ID NO: 1895263 - RNA, 19 nt, Artificial Sequence
  Description of Artificial Sequence: Synthetic oligonucleotide
  Antisense strand to SEQ ID NO: 1895262
auugaccauccuuauuaga

SEQ ID NO: 1895264 - RNA, 19 nt, Artificial Sequence
  Description of Artificial Sequence: Synthetic oligonucleotide
  Sense strand starting at position 2713 of SEQ ID NO: 1879268
gauggucaaucucuagaaa

SEQ ID NO: 1895265 - RNA, 19 nt, Artificial Sequence
  Description of Artificial Sequence: Synthetic oligonucleotide
  Antisense strand to SEQ ID NO: 1895264
uuucuagagauugaccauc

SEQ ID NO: 1895266 - RNA, 19 nt, Artificial Sequence
  Description of Artificial Sequence: Synthetic oligonucleotide
  Sense strand starting at position 2742 of SEQ ID NO: 1879268
gccguaaguaauuauuugu

SEQ ID NO: 1895267 - RNA, 19 nt, Artificial Sequence
  Description of Artificial Sequence: Synthetic oligonucleotide
  Antisense strand to SEQ ID NO: 1895266
acaaauaauuacuuacggc

SEQ ID NO: 1895268 - RNA, 19 nt, Artificial Sequence
  Description of Artificial Sequence: Synthetic oligonucleotide
  Sense strand starting at position 2986 of SEQ ID NO: 1879268
gaaggugggccuugagaaa

SEQ ID NO: 1895269 - RNA, 19 nt, Artificial Sequence
  Description of Artificial Sequence: Synthetic oligonucleotide
  Antisense strand to SEQ ID NO: 1895268
uuucucaaggcccaccuuc

SEQ ID NO: 1895270 - RNA, 19 nt, Artificial Sequence
  Description of Artificial Sequence: Synthetic oligonucleotide
  Sense strand starting at position 3028 of SEQ ID NO: 1879268
uguagucucauaugaugga

SEQ ID NO: 1895271 - RNA, 19 nt, Artificial Sequence
  Description of Artificial Sequence: Synthetic oligonucleotide
  Antisense strand to SEQ ID NO: 1895270
uccaucauaugagacuaca

SEQ ID NO: 1895272 - RNA, 19 nt, Artificial Sequence
  Description of Artificial Sequence: Synthetic oligonucleotide
  Sense strand starting at position 3032 of SEQ ID NO: 1879268
gucucauaugauggaagcu

SEQ ID NO: 1895273 - RNA, 19 nt, Artificial Sequence
  Description of Artificial Sequence: Synthetic oligonucleotide
  Antisense strand to SEQ ID NO: 1895272
agcuuccaucauaugagac

SEQ ID NO: 1895274 - RNA, 19 nt, Artificial Sequence
  Description of Artificial Sequence: Synthetic oligonucleotide
  Sense strand starting at position 3275 of SEQ ID NO: 1879268
cccaguagccaucauacuu

SEQ ID NO: 1895275 - RNA, 19 nt, Artificial Sequence
  Description of Artificial Sequence: Synthetic oligonucleotide
  Antisense strand to SEQ ID NO: 1895274
aaguaugauggcuacuggg

SEQ ID NO: 1895276 - RNA, 19 nt, Artificial Sequence
  Description of Artificial Sequence: Synthetic oligonucleotide
  Sense strand starting at position 3499 of SEQ ID NO: 1879268
ggccucaguguguugcuua

SEQ ID NO: 1895277 - RNA, 19 nt, Artificial Sequence
  Description of Artificial Sequence: Synthetic oligonucleotide
  Antisense strand to SEQ ID NO: 1895276
uaagcaacacacugaggcc

SEQ ID NO: 1895278 - RNA, 19 nt, Artificial Sequence
  Description of Artificial Sequence: Synthetic oligonucleotide
  Sense strand starting at position 3681 of SEQ ID NO: 1879268
agguaagcuccuuagcaua

SEQ ID NO: 1895279 - RNA, 19 nt, Artificial Sequence
  Description of Artificial Sequence: Synthetic oligonucleotide
  Antisense strand to SEQ ID NO: 1895278
uaugcuaaggagcuuaccu

SEQ ID NO: 1895280 - RNA, 19 nt, Artificial Sequence
  Description of Artificial Sequence: Synthetic oligonucleotide
  Sense strand starting at position 3778 of SEQ ID NO: 1879268
aggugauaauuugaggaau

SEQ ID NO: 1895281 - RNA, 19 nt, Artificial Sequence
  Description of Artificial Sequence: Synthetic oligonucleotide
  Antisense strand to SEQ ID NO: 1895280
auuccucaaauuaucaccu

SEQ ID NO: 1895282 - RNA, 19 nt, Artificial Sequence
  Description of Artificial Sequence: Synthetic oligonucleotide
  Sense strand starting at position 3780 of SEQ ID NO: 1879268
gugauaauuugaggaauga

SEQ ID NO: 1895283 - RNA, 19 nt, Artificial Sequence
  Description of Artificial Sequence: Synthetic oligonucleotide
  Antisense strand to SEQ ID NO: 1895282
ucauuccucaaauuaucac

SEQ ID NO: 1895284 - RNA, 19 nt, Artificial Sequence
  Description of Artificial Sequence: Synthetic oligonucleotide
  Sense strand starting at position 3817 of SEQ ID NO: 1879268
acaacaaagugugcagaau

SEQ ID NO: 1895285 - RNA, 19 nt, Artificial Sequence
  Description of Artificial Sequence: Synthetic oligonucleotide
  Antisense strand to SEQ ID NO: 1895284
auucugcacacuuuguugu

SEQ ID NO: 1895286 - RNA, 19 nt, Artificial Sequence
  Description of Artificial Sequence: Synthetic oligonucleotide
  Sense strand starting at position 3818 of SEQ ID NO: 1879268
caacaaagugugcagaaua

SEQ ID NO: 1895287 - RNA, 19 nt, Artificial Sequence
  Description of Artificial Sequence: Synthetic oligonucleotide
  Antisense strand to SEQ ID NO: 1895286
uauucugcacacuuuguug

SEQ ID NO: 1895288 - RNA, 19 nt, Artificial Sequence
  Description of Artificial Sequence: Synthetic oligonucleotide
  Sense strand starting at position 3912 of SEQ ID NO: 1879268
uuuauaugagaacgaucca

SEQ ID NO: 1895289 - RNA, 19 nt, Artificial Sequence
  Description of Artificial Sequence: Synthetic oligonucleotide
  Antisense strand to SEQ ID NO: 1895288
uggaucguucucauauaaa

SEQ ID NO: 1895290 - RNA, 19 nt, Artificial Sequence
  Description of Artificial Sequence: Synthetic oligonucleotide
  Sense strand starting at position 3917 of SEQ ID NO: 1879268
augagaacgauccaggcuu

SEQ ID NO: 1895291 - RNA, 19 nt, Artificial Sequence
  Description of Artificial Sequence: Synthetic oligonucleotide
  Antisense strand to SEQ ID NO: 1895290
aagccuggaucguucucau

SEQ ID NO: 1895292 - RNA, 19 nt, Artificial Sequence
  Description of Artificial Sequence: Synthetic oligonucleotide
  Sense strand starting at position 223 of SEQ ID NO: 1879269
guuaaauacuuuguaugga

SEQ ID NO: 1895293 - RNA, 19 nt, Artificial Sequence
  Description of Artificial Sequence: Synthetic oligonucleotide
  Antisense strand to SEQ ID NO: 1895292
uccauacaaaguauuuaac

SEQ ID NO: 1895294 - RNA, 19 nt, Artificial Sequence
  Description of Artificial Sequence: Synthetic oligonucleotide
  Sense strand starting at position 231 of SEQ ID NO: 1879269
cuuuguauggauuaucuua

SEQ ID NO: 1895295 - RNA, 19 nt, Artificial Sequence
  Description of Artificial Sequence: Synthetic oligonucleotide
  Antisense strand to SEQ ID NO: 1895294
uaagauaauccauacaaag

SEQ ID NO: 1895296 - RNA, 19 nt, Artificial Sequence
  Description of Artificial Sequence: Synthetic oligonucleotide
  Sense strand starting at position 326 of SEQ ID NO: 1879269
accucaauacugugaggua

SEQ ID NO: 1895297 - RNA, 19 nt, Artificial Sequence
  Description of Artificial Sequence: Synthetic oligonucleotide
  Antisense strand to SEQ ID NO: 1895296
uaccucacaguauugaggu

SEQ ID NO: 1895298 - RNA, 19 nt, Artificial Sequence
  Description of Artificial Sequence: Synthetic oligonucleotide
  Sense strand starting at position 346 of SEQ ID NO: 1879269
guacuauuaguauacucau

SEQ ID NO: 1895299 - RNA, 19 nt, Artificial Sequence
  Description of Artificial Sequence: Synthetic oligonucleotide
  Antisense strand to SEQ ID NO: 1895298
augaguauacuaauaguac

SEQ ID NO: 1895300 - RNA, 19 nt, Artificial Sequence
  Description of Artificial Sequence: Synthetic oligonucleotide
  Sense strand starting at position 471 of SEQ ID NO: 1879269
auggucauacacugaguaa

SEQ ID NO: 1895301 - RNA, 19 nt, Artificial Sequence
  Description of Artificial Sequence: Synthetic oligonucleotide
  Antisense strand to SEQ ID NO: 1895300
uuacucaguguaugaccau

SEQ ID NO: 1895302 - RNA, 19 nt, Artificial Sequence
  Description of Artificial Sequence: Synthetic oligonucleotide
  Sense strand starting at position 478 of SEQ ID NO: 1879269
uacacugaguaagugauaa

SEQ ID NO: 1895303 - RNA, 19 nt, Artificial Sequence
  Description of Artificial Sequence: Synthetic oligonucleotide
  Antisense strand to SEQ ID NO: 1895302
uuaucacuuacucagugua

SEQ ID NO: 1895304 - RNA, 19 nt, Artificial Sequence
  Description of Artificial Sequence: Synthetic oligonucleotide
  Sense strand starting at position 519 of SEQ ID NO: 1879269
ucacuauuugcuugauugu

SEQ ID NO: 1895305 - RNA, 19 nt, Artificial Sequence
  Description of Artificial Sequence: Synthetic oligonucleotide
  Antisense strand to SEQ ID NO: 1895304
acaaucaagcaaauaguga

SEQ ID NO: 1895306 - RNA, 19 nt, Artificial Sequence
  Description of Artificial Sequence: Synthetic oligonucleotide
  Sense strand starting at position 530 of SEQ ID NO: 1879269
uugauugucacagggaauu

SEQ ID NO: 1895307 - RNA, 19 nt, Artificial Sequence
  Description of Artificial Sequence: Synthetic oligonucleotide
  Antisense strand to SEQ ID NO: 1895306
aauucccugugacaaucaa

SEQ ID NO: 1895308 - RNA, 19 nt, Artificial Sequence
  Description of Artificial Sequence: Synthetic oligonucleotide
  Sense strand starting at position 581 of SEQ ID NO: 1879269
uguguaugacuagaugguu

SEQ ID NO: 1895309 - RNA, 19 nt, Artificial Sequence
  Description of Artificial Sequence: Synthetic oligonucleotide
  Antisense strand to SEQ ID NO: 1895308
aaccaucuagucauacaca

SEQ ID NO: 1895310 - RNA, 19 nt, Artificial Sequence
  Description of Artificial Sequence: Synthetic oligonucleotide
  Sense strand starting at position 584 of SEQ ID NO: 1879269
guaugacuagaugguuaua

SEQ ID NO: 1895311 - RNA, 19 nt, Artificial Sequence
  Description of Artificial Sequence: Synthetic oligonucleotide
  Antisense strand to SEQ ID NO: 1895310
uauaaccaucuagucauac

SEQ ID NO: 1895312 - RNA, 19 nt, Artificial Sequence
  Description of Artificial Sequence: Synthetic oligonucleotide
  Sense strand starting at position 740 of SEQ ID NO: 1879269
accauauucuuguugggaa

SEQ ID NO: 1895313 - RNA, 19 nt, Artificial Sequence
  Description of Artificial Sequence: Synthetic oligonucleotide
  Antisense strand to SEQ ID NO: 1895312
uucccaacaagaauauggu

SEQ ID NO: 1895314 - RNA, 19 nt, Artificial Sequence
  Description of Artificial Sequence: Synthetic oligonucleotide
  Sense strand starting at position 742 of SEQ ID NO: 1879269
cauauucuuguugggaaga

SEQ ID NO: 1895315 - RNA, 19 nt, Artificial Sequence
  Description of Artificial Sequence: Synthetic oligonucleotide
  Antisense strand to SEQ ID NO: 1895314
ucuucccaacaagaauaug

SEQ ID NO: 1895316 - RNA, 19 nt, Artificial Sequence
  Description of Artificial Sequence: Synthetic oligonucleotide
  Sense strand starting at position 1617 of SEQ ID NO: 1879269
uuguuuauaccucaggguu

SEQ ID NO: 1895317 - RNA, 19 nt, Artificial Sequence
  Description of Artificial Sequence: Synthetic oligonucleotide
  Antisense strand to SEQ ID NO: 1895316
aacccugagguauaaacaa

SEQ ID NO: 1895318 - RNA, 19 nt, Artificial Sequence
  Description of Artificial Sequence: Synthetic oligonucleotide
  Sense strand starting at position 1778 of SEQ ID NO: 1879269
uguauuuccuccuugcauu

SEQ ID NO: 1895319 - RNA, 19 nt, Artificial Sequence
  Description of Artificial Sequence: Synthetic oligonucleotide
  Antisense strand to SEQ ID NO: 1895318
aaugcaaggaggaaauaca

SEQ ID NO: 1895320 - RNA, 19 nt, Artificial Sequence
  Description of Artificial Sequence: Synthetic oligonucleotide
  Sense strand starting at position 1803 of SEQ ID NO: 1879269
aagauaagacucuguugua

SEQ ID NO: 1895321 - RNA, 19 nt, Artificial Sequence
  Description of Artificial Sequence: Synthetic oligonucleotide
  Antisense strand to SEQ ID NO: 1895320
uacaacagagucuuaucuu

SEQ ID NO: 1895322 - RNA, 19 nt, Artificial Sequence
  Description of Artificial Sequence: Synthetic oligonucleotide
  Sense strand starting at position 1804 of SEQ ID NO: 1879269
agauaagacucuguuguaa

SEQ ID NO: 1895323 - RNA, 19 nt, Artificial Sequence
  Description of Artificial Sequence: Synthetic oligonucleotide
  Antisense strand to SEQ ID NO: 1895322
uuacaacagagucuuaucu

SEQ ID NO: 1895324 - RNA, 19 nt, Artificial Sequence
  Description of Artificial Sequence: Synthetic oligonucleotide
  Sense strand starting at position 2041 of SEQ ID NO: 1879269
uacuguuaccaagggaaca

SEQ ID NO: 1895325 - RNA, 19 nt, Artificial Sequence
  Description of Artificial Sequence: Synthetic oligonucleotide
  Antisense strand to SEQ ID NO: 1895324
uguucccuugguaacagua

SEQ ID NO: 1895326 - RNA, 19 nt, Artificial Sequence
  Description of Artificial Sequence: Synthetic oligonucleotide
  Sense strand starting at position 2077 of SEQ ID NO: 1879269
acaguagugccacaaauua

SEQ ID NO: 1895327 - RNA, 19 nt, Artificial Sequence
  Description of Artificial Sequence: Synthetic oligonucleotide
  Antisense strand to SEQ ID NO: 1895326
uaauuuguggcacuacugu

SEQ ID NO: 1895328 - RNA, 19 nt, Artificial Sequence
  Description of Artificial Sequence: Synthetic oligonucleotide
  Sense strand starting at position 2150 of SEQ ID NO: 1879269
uuaccauuguucccacaga

SEQ ID NO: 1895329 - RNA, 19 nt, Artificial Sequence
  Description of Artificial Sequence: Synthetic oligonucleotide
  Antisense strand to SEQ ID NO: 1895328
ucugugggaacaaugguaa

SEQ ID NO: 1895330 - RNA, 19 nt, Artificial Sequence
  Description of Artificial Sequence: Synthetic oligonucleotide
  Sense strand starting at position 2215 of SEQ ID NO: 1879269
ucacuacuccuggauguuu

SEQ ID NO: 1895331 - RNA, 19 nt, Artificial Sequence
  Description of Artificial Sequence: Synthetic oligonucleotide
  Antisense strand to SEQ ID NO: 1895330
aaacauccaggaguaguga

SEQ ID NO: 1895332 - RNA, 19 nt, Artificial Sequence
  Description of Artificial Sequence: Synthetic oligonucleotide
  Sense strand starting at position 2340 of SEQ ID NO: 1879269
ccaauuaauguagaguauu

SEQ ID NO: 1895333 - RNA, 19 nt, Artificial Sequence
  Description of Artificial Sequence: Synthetic oligonucleotide
  Antisense strand to SEQ ID NO: 1895332
aauacucuacauuaauugg

SEQ ID NO: 1895334 - RNA, 19 nt, Artificial Sequence
  Description of Artificial Sequence: Synthetic oligonucleotide
  Sense strand starting at position 2417 of SEQ ID NO: 1879269
guaacucaugggcauaauu

SEQ ID NO: 1895335 - RNA, 19 nt, Artificial Sequence
  Description of Artificial Sequence: Synthetic oligonucleotide
  Antisense strand to SEQ ID NO: 1895334
aauuaugcccaugaguuac

SEQ ID NO: 1895336 - RNA, 19 nt, Artificial Sequence
  Description of Artificial Sequence: Synthetic oligonucleotide
  Sense strand starting at position 2475 of SEQ ID NO: 1879269
aguguauugagaggauaca

SEQ ID NO: 1895337 - RNA, 19 nt, Artificial Sequence
  Description of Artificial Sequence: Synthetic oligonucleotide
  Antisense strand to SEQ ID NO: 1895336
uguauccucucaauacacu

SEQ ID NO: 1895338 - RNA, 19 nt, Artificial Sequence
  Description of Artificial Sequence: Synthetic oligonucleotide
  Sense strand starting at position 2707 of SEQ ID NO: 1879269
acagaauugguauguggau

SEQ ID NO: 1895339 - RNA, 19 nt, Artificial Sequence
  Description of Artificial Sequence: Synthetic oligonucleotide
  Antisense strand to SEQ ID NO: 1895338
auccacauaccaauucugu

SEQ ID NO: 1895340 - RNA, 19 nt, Artificial Sequence
  Description of Artificial Sequence: Synthetic oligonucleotide
  Sense strand starting at position 2708 of SEQ ID NO: 1879269
cagaauugguauguggauu

SEQ ID NO: 1895341 - RNA, 19 nt, Artificial Sequence
  Description of Artificial Sequence: Synthetic oligonucleotide
  Antisense strand to SEQ ID NO: 1895340
aauccacauaccaauucug

SEQ ID NO: 1895342 - RNA, 19 nt, Artificial Sequence
  Description of Artificial Sequence: Synthetic oligonucleotide
  Sense strand starting at position 2729 of SEQ ID NO: 1879269
aagagauaugugugaaagu

SEQ ID NO: 1895343 - RNA, 19 nt, Artificial Sequence
  Description of Artificial Sequence: Synthetic oligonucleotide
  Antisense strand to SEQ ID NO: 1895342
acuuucacacauaucucuu

SEQ ID NO: 1895344 - RNA, 19 nt, Artificial Sequence
  Description of Artificial Sequence: Synthetic oligonucleotide
  Sense strand starting at position 2779 of SEQ ID NO: 1879269
cuauuaugaucauugucau

SEQ ID NO: 1895345 - RNA, 19 nt, Artificial Sequence
  Description of Artificial Sequence: Synthetic oligonucleotide
  Antisense strand to SEQ ID NO: 1895344
augacaaugaucauaauag

SEQ ID NO: 1895346 - RNA, 19 nt, Artificial Sequence
  Description of Artificial Sequence: Synthetic oligonucleotide
  Sense strand starting at position 2846 of SEQ ID NO: 1879269
agaauugguauguggauga

SEQ ID NO: 1895347 - RNA, 19 nt, Artificial Sequence
  Description of Artificial Sequence: Synthetic oligonucleotide
  Antisense strand to SEQ ID NO: 1895346
ucauccacauaccaauucu

SEQ ID NO: 1895348 - RNA, 19 nt, Artificial Sequence
  Description of Artificial Sequence: Synthetic oligonucleotide
  Sense strand starting at position 3067 of SEQ ID NO: 1879269
ucauuauaccuagggcaca

SEQ ID NO: 1895349 - RNA, 19 nt, Artificial Sequence
  Description of Artificial Sequence: Synthetic oligonucleotide
  Antisense strand to SEQ ID NO: 1895348
ugugcccuagguauaauga

SEQ ID NO: 1895350 - RNA, 19 nt, Artificial Sequence
  Description of Artificial Sequence: Synthetic oligonucleotide
  Sense strand starting at position 3139 of SEQ ID NO: 1879269
uccagagaaugagucauau

SEQ ID NO: 1895351 - RNA, 19 nt, Artificial Sequence
  Description of Artificial Sequence: Synthetic oligonucleotide
  Antisense strand to SEQ ID NO: 1895350
auaugacucauucucugga

SEQ ID NO: 1895352 - RNA, 19 nt, Artificial Sequence
  Description of Artificial Sequence: Synthetic oligonucleotide
  Sense strand starting at position 3220 of SEQ ID NO: 1879269
auaauauaggaguguguau

SEQ ID NO: 1895353 - RNA, 19 nt, Artificial Sequence
  Description of Artificial Sequence: Synthetic oligonucleotide
  Antisense strand to SEQ ID NO: 1895352
auacacacuccuauauuau

SEQ ID NO: 1895354 - RNA, 19 nt, Artificial Sequence
  Description of Artificial Sequence: Synthetic oligonucleotide
  Sense strand starting at position 3276 of SEQ ID NO: 1879269
guacaugugaaauaugagu

SEQ ID NO: 1895355 - RNA, 19 nt, Artificial Sequence
  Description of Artificial Sequence: Synthetic oligonucleotide
  Antisense strand to SEQ ID NO: 1895354
acucauauuucacauguac

SEQ ID NO: 1895356 - RNA, 19 nt, Artificial Sequence
  Description of Artificial Sequence: Synthetic oligonucleotide
  Sense strand starting at position 3345 of SEQ ID NO: 1879269
aaaugaguuuauguaggaa

SEQ ID NO: 1895357 - RNA, 19 nt, Artificial Sequence
  Description of Artificial Sequence: Synthetic oligonucleotide
  Antisense strand to SEQ ID NO: 1895356
uuccuacauaaacucauuu

SEQ ID NO: 1895358 - RNA, 19 nt, Artificial Sequence
  Description of Artificial Sequence: Synthetic oligonucleotide
  Sense strand starting at position 3453 of SEQ ID NO: 1879269
uuagcaagaucagcauaua

SEQ ID NO: 1895359 - RNA, 19 nt, Artificial Sequence
  Description of Artificial Sequence: Synthetic oligonucleotide
  Antisense strand to SEQ ID NO: 1895358
uauaugcugaucuugcuaa

SEQ ID NO: 1895360 - RNA, 19 nt, Artificial Sequence
  Description of Artificial Sequence: Synthetic oligonucleotide
  Sense strand starting at position 3490 of SEQ ID NO: 1879269
uuacuaaauguugaguagu

SEQ ID NO: 1895361 - RNA, 19 nt, Artificial Sequence
  Description of Artificial Sequence: Synthetic oligonucleotide
  Antisense strand to SEQ ID NO: 1895360
acuacucaacauuuaguaa

SEQ ID NO: 1895362 - RNA, 19 nt, Artificial Sequence
  Description of Artificial Sequence: Synthetic oligonucleotide
  Sense strand starting at position 3603 of SEQ ID NO: 1879269
auuuguagcuaggcauauu

SEQ ID NO: 1895363 - RNA, 19 nt, Artificial Sequence
  Description of Artificial Sequence: Synthetic oligonucleotide
  Antisense strand to SEQ ID NO: 1895362
aauaugccuagcuacaaau

SEQ ID NO: 1895364 - RNA, 19 nt, Artificial Sequence
  Description of Artificial Sequence: Synthetic oligonucleotide
  Sense strand starting at position 3642 of SEQ ID NO: 1879269
uauggugaauauguaguaa

SEQ ID NO: 1895365 - RNA, 19 nt, Artificial Sequence
  Description of Artificial Sequence: Synthetic oligonucleotide
  Antisense strand to SEQ ID NO: 1895364
uuacuacauauucaccaua

SEQ ID NO: 1895366 - RNA, 19 nt, Artificial Sequence
  Description of Artificial Sequence: Synthetic oligonucleotide
  Sense strand starting at position 3785 of SEQ ID NO: 1879269
guaugacuuuaacuggacu

SEQ ID NO: 1895367 - RNA, 19 nt, Artificial Sequence
  Description of Artificial Sequence: Synthetic oligonucleotide
  Antisense strand to SEQ ID NO: 1895366
aguccaguuaaagucauac

SEQ ID NO: 1895368 - RNA, 19 nt, Artificial Sequence
  Description of Artificial Sequence: Synthetic oligonucleotide
  Sense strand starting at position 3944 of SEQ ID NO: 1879269
caagauuagguauauugca

SEQ ID NO: 1895369 - RNA, 19 nt, Artificial Sequence
  Description of Artificial Sequence: Synthetic oligonucleotide
  Antisense strand to SEQ ID NO: 1895368
ugcaauauaccuaaucuug

SEQ ID NO: 1895370 - RNA, 19 nt, Artificial Sequence
  Description of Artificial Sequence: Synthetic oligonucleotide
  Sense strand starting at position 3952 of SEQ ID NO: 1879269
gguauauugcaagauugau

SEQ ID NO: 1895371 - RNA, 19 nt, Artificial Sequence
  Description of Artificial Sequence: Synthetic oligonucleotide
  Antisense strand to SEQ ID NO: 1895370
aucaaucuugcaauauacc

SEQ ID NO: 1895372 - RNA, 19 nt, Artificial Sequence
  Description of Artificial Sequence: Synthetic oligonucleotide
  Sense strand starting at position 460 of SEQ ID NO: 1879270
agaugaagacgucgaaugu

SEQ ID NO: 1895373 - RNA, 19 nt, Artificial Sequence
  Description of Artificial Sequence: Synthetic oligonucleotide
  Antisense strand to SEQ ID NO: 1895372
acauucgacgucuucaucu

SEQ ID NO: 1895374 - RNA, 19 nt, Artificial Sequence
  Description of Artificial Sequence: Synthetic oligonucleotide
  Sense strand starting at position 469 of SEQ ID NO: 1879270
cgucgaauguggucucacu

SEQ ID NO: 1895375 - RNA, 19 nt, Artificial Sequence
  Description of Artificial Sequence: Synthetic oligonucleotide
  Antisense strand to SEQ ID NO: 1895374
agugagaccacauucgacg

SEQ ID NO: 1895376 - RNA, 19 nt, Artificial Sequence
  Description of Artificial Sequence: Synthetic oligonucleotide
  Sense strand starting at position 2016 of SEQ ID NO: 1879271
gccagaguguaguggugau

SEQ ID NO: 1895377 - RNA, 19 nt, Artificial Sequence
  Description of Artificial Sequence: Synthetic oligonucleotide
  Antisense strand to SEQ ID NO: 1895376
aucaccacuacacucuggc

SEQ ID NO: 1895378 - RNA, 19 nt, Artificial Sequence
  Description of Artificial Sequence: Synthetic oligonucleotide
  Sense strand starting at position 2087 of SEQ ID NO: 1879271
aaauucuucccgggaagac

SEQ ID NO: 1895379 - RNA, 19 nt, Artificial Sequence
  Description of Artificial Sequence: Synthetic oligonucleotide
  Antisense strand to SEQ ID NO: 1895378
gucuucccgggaagaauuu

SEQ ID NO: 1895380 - RNA, 19 nt, Artificial Sequence
  Description of Artificial Sequence: Synthetic oligonucleotide
  Sense strand starting at position 2203 of SEQ ID NO: 1879271
gaaagagcauuugaagugu

SEQ ID NO: 1895381 - RNA, 19 nt, Artificial Sequence
  Description of Artificial Sequence: Synthetic oligonucleotide
  Antisense strand to SEQ ID NO: 1895380
acacuucaaaugcucuuuc

SEQ ID NO: 1895382 - RNA, 19 nt, Artificial Sequence
  Description of Artificial Sequence: Synthetic oligonucleotide
  Sense strand starting at position 2289 of SEQ ID NO: 1879271
cuuuaagggcccuacauua

SEQ ID NO: 1895383 - RNA, 19 nt, Artificial Sequence
  Description of Artificial Sequence: Synthetic oligonucleotide
  Antisense strand to SEQ ID NO: 1895382
uaauguagggcccuuaaag

SEQ ID NO: 1895384 - RNA, 19 nt, Artificial Sequence
  Description of Artificial Sequence: Synthetic oligonucleotide
  Sense strand starting at position 2358 of SEQ ID NO: 1879271
cuccuagaacagugucaga

SEQ ID NO: 1895385 - RNA, 19 nt, Artificial Sequence
  Description of Artificial Sequence: Synthetic oligonucleotide
  Antisense strand to SEQ ID NO: 1895384
ucugacacuguucuaggag

SEQ ID NO: 1895386 - RNA, 19 nt, Artificial Sequence
  Description of Artificial Sequence: Synthetic oligonucleotide
  Sense strand starting at position 2361 of SEQ ID NO: 1879271
cuagaacagugucagaacu

SEQ ID NO: 1895387 - RNA, 19 nt, Artificial Sequence
  Description of Artificial Sequence: Synthetic oligonucleotide
  Antisense strand to SEQ ID NO: 1895386
aguucugacacuguucuag

SEQ ID NO: 1895388 - RNA, 19 nt, Artificial Sequence
  Description of Artificial Sequence: Synthetic oligonucleotide
  Sense strand starting at position 2363 of SEQ ID NO: 1879271
agaacagugucagaacuca

SEQ ID NO: 1895389 - RNA, 19 nt, Artificial Sequence
  Description of Artificial Sequence: Synthetic oligonucleotide
  Antisense strand to SEQ ID NO: 1895388
ugaguucugacacuguucu

SEQ ID NO: 1895390 - RNA, 19 nt, Artificial Sequence
  Description of Artificial Sequence: Synthetic oligonucleotide
  Sense strand starting at position 2381 of SEQ ID NO: 1879271
agggaagccuucuaggaug

SEQ ID NO: 1895391 - RNA, 19 nt, Artificial Sequence
  Description of Artificial Sequence: Synthetic oligonucleotide
  Antisense strand to SEQ ID NO: 1895390
cauccuagaaggcuucccu

SEQ ID NO: 1895392 - RNA, 19 nt, Artificial Sequence
  Description of Artificial Sequence: Synthetic oligonucleotide
  Sense strand starting at position 2686 of SEQ ID NO: 1879271
ggauacauagcucaguguu

SEQ ID NO: 1895393 - RNA, 19 nt, Artificial Sequence
  Description of Artificial Sequence: Synthetic oligonucleotide
  Antisense strand to SEQ ID NO: 1895392
aacacugagcuauguaucc

SEQ ID NO: 1895394 - RNA, 19 nt, Artificial Sequence
  Description of Artificial Sequence: Synthetic oligonucleotide
  Sense strand starting at position 2688 of SEQ ID NO: 1879271
auacauagcucaguguuga

SEQ ID NO: 1895395 - RNA, 19 nt, Artificial Sequence
  Description of Artificial Sequence: Synthetic oligonucleotide
  Antisense strand to SEQ ID NO: 1895394
ucaacacugagcuauguau

SEQ ID NO: 1895396 - RNA, 19 nt, Artificial Sequence
  Description of Artificial Sequence: Synthetic oligonucleotide
  Sense strand starting at position 2689 of SEQ ID NO: 1879271
uacauagcucaguguugaa

SEQ ID NO: 1895397 - RNA, 19 nt, Artificial Sequence
  Description of Artificial Sequence: Synthetic oligonucleotide
  Antisense strand to SEQ ID NO: 1895396
uucaacacugagcuaugua

SEQ ID NO: 1895398 - RNA, 19 nt, Artificial Sequence
  Description of Artificial Sequence: Synthetic oligonucleotide
  Sense strand starting at position 2949 of SEQ ID NO: 1879271
cauggugaggucuaguaac

SEQ ID NO: 1895399 - RNA, 19 nt, Artificial Sequence
  Description of Artificial Sequence: Synthetic oligonucleotide
  Antisense strand to SEQ ID NO: 1895398
guuacuagaccucaccaug

SEQ ID NO: 1895400 - RNA, 19 nt, Artificial Sequence
  Description of Artificial Sequence: Synthetic oligonucleotide
  Sense strand starting at position 2955 of SEQ ID NO: 1879271
gaggucuaguaacagacua

SEQ ID NO: 1895401 - RNA, 19 nt, Artificial Sequence
  Description of Artificial Sequence: Synthetic oligonucleotide
  Antisense strand to SEQ ID NO: 1895400
uagucuguuacuagaccuc

SEQ ID NO: 1895402 - RNA, 19 nt, Artificial Sequence
  Description of Artificial Sequence: Synthetic oligonucleotide
  Sense strand starting at position 3044 of SEQ ID NO: 1879271
ggcccagcuucucagacuu

SEQ ID NO: 1895403 - RNA, 19 nt, Artificial Sequence
  Description of Artificial Sequence: Synthetic oligonucleotide
  Antisense strand to SEQ ID NO: 1895402
aagucugagaagcugggcc

SEQ ID NO: 1895404 - RNA, 19 nt, Artificial Sequence
  Description of Artificial Sequence: Synthetic oligonucleotide
  Sense strand starting at position 3112 of SEQ ID NO: 1879271
ugcuuucugccgcuggaga

SEQ ID NO: 1895405 - RNA, 19 nt, Artificial Sequence
  Description of Artificial Sequence: Synthetic oligonucleotide
  Antisense strand to SEQ ID NO: 1895404
ucuccagcggcagaaagca

SEQ ID NO: 1895406 - RNA, 19 nt, Artificial Sequence
  Description of Artificial Sequence: Synthetic oligonucleotide
  Sense strand starting at position 3113 of SEQ ID NO: 1879271
gcuuucugccgcuggagaa

SEQ ID NO: 1895407 - RNA, 19 nt, Artificial Sequence
  Description of Artificial Sequence: Synthetic oligonucleotide
  Antisense strand to SEQ ID NO: 1895406
uucuccagcggcagaaagc

SEQ ID NO: 1895408 - RNA, 19 nt, Artificial Sequence
  Description of Artificial Sequence: Synthetic oligonucleotide
  Sense strand starting at position 3214 of SEQ ID NO: 1879271
ggaucacuccucuggccau

SEQ ID NO: 1895409 - RNA, 19 nt, Artificial Sequence
  Description of Artificial Sequence: Synthetic oligonucleotide
  Antisense strand to SEQ ID NO: 1895408
auggccagaggagugaucc

SEQ ID NO: 1895410 - RNA, 19 nt, Artificial Sequence
  Description of Artificial Sequence: Synthetic oligonucleotide
  Sense strand starting at position 3322 of SEQ ID NO: 1879271
cccagaggcagugaucuuu

SEQ ID NO: 1895411 - RNA, 19 nt, Artificial Sequence
  Description of Artificial Sequence: Synthetic oligonucleotide
  Antisense strand to SEQ ID NO: 1895410
aaagaucacugccucuggg

SEQ ID NO: 1895412 - RNA, 19 nt, Artificial Sequence
  Description of Artificial Sequence: Synthetic oligonucleotide
  Sense strand starting at position 3349 of SEQ ID NO: 1879271
ugacuaugcuccugucacu

SEQ ID NO: 1895413 - RNA, 19 nt, Artificial Sequence
  Description of Artificial Sequence: Synthetic oligonucleotide
  Antisense strand to SEQ ID NO: 1895412
agugacaggagcauaguca

SEQ ID NO: 1895414 - RNA, 19 nt, Artificial Sequence
  Description of Artificial Sequence: Synthetic oligonucleotide
  Sense strand starting at position 3361 of SEQ ID NO: 1879271
ugucacuucccugaugaaa

SEQ ID NO: 1895415 - RNA, 19 nt, Artificial Sequence
  Description of Artificial Sequence: Synthetic oligonucleotide
  Antisense strand to SEQ ID NO: 1895414
uuucaucagggaagugaca

SEQ ID NO: 1895416 - RNA, 19 nt, Artificial Sequence
  Description of Artificial Sequence: Synthetic oligonucleotide
  Sense strand starting at position 77 of SEQ ID NO: 1879272
ccauccacuuugucauaga

SEQ ID NO: 1895417 - RNA, 19 nt, Artificial Sequence
  Description of Artificial Sequence: Synthetic oligonucleotide
  Antisense strand to SEQ ID NO: 1895416
ucuaugacaaaguggaugg

SEQ ID NO: 1895418 - RNA, 19 nt, Artificial Sequence
  Description of Artificial Sequence: Synthetic oligonucleotide
  Sense strand starting at position 97 of SEQ ID NO: 1879272
cucuauugccaauaagagu

SEQ ID NO: 1895419 - RNA, 19 nt, Artificial Sequence
  Description of Artificial Sequence: Synthetic oligonucleotide
  Antisense strand to SEQ ID NO: 1895418
acucuuauuggcaauagag

SEQ ID NO: 1895420 - RNA, 19 nt, Artificial Sequence
  Description of Artificial Sequence: Synthetic oligonucleotide
  Sense strand starting at position 305 of SEQ ID NO: 1879272
uccuauaaagauuguagca

SEQ ID NO: 1895421 - RNA, 19 nt, Artificial Sequence
  Description of Artificial Sequence: Synthetic oligonucleotide
  Antisense strand to SEQ ID NO: 1895420
ugcuacaaucuuuauagga

SEQ ID NO: 1895422 - RNA, 19 nt, Artificial Sequence
  Description of Artificial Sequence: Synthetic oligonucleotide
  Sense strand starting at position 444 of SEQ ID NO: 1879272
gagggaagcuccucuguag

SEQ ID NO: 1895423 - RNA, 19 nt, Artificial Sequence
  Description of Artificial Sequence: Synthetic oligonucleotide
  Antisense strand to SEQ ID NO: 1895422
cuacagaggagcuucccuc

SEQ ID NO: 1895424 - RNA, 19 nt, Artificial Sequence
  Description of Artificial Sequence: Synthetic oligonucleotide
  Sense strand starting at position 481 of SEQ ID NO: 1879272
cacagagggauucgaaguu

SEQ ID NO: 1895425 - RNA, 19 nt, Artificial Sequence
  Description of Artificial Sequence: Synthetic oligonucleotide
  Antisense strand to SEQ ID NO: 1895424
aacuucgaaucccucugug

SEQ ID NO: 1895426 - RNA, 19 nt, Artificial Sequence
  Description of Artificial Sequence: Synthetic oligonucleotide
  Sense strand starting at position 697 of SEQ ID NO: 1879272
uguuuaaucugguugauag

SEQ ID NO: 1895427 - RNA, 19 nt, Artificial Sequence
  Description of Artificial Sequence: Synthetic oligonucleotide
  Antisense strand to SEQ ID NO: 1895426
cuaucaaccagauuaaaca

SEQ ID NO: 1895428 - RNA, 19 nt, Artificial Sequence
  Description of Artificial Sequence: Synthetic oligonucleotide
  Sense strand starting at position 707 of SEQ ID NO: 1879272
gguugauagguguauggau

SEQ ID NO: 1895429 - RNA, 19 nt, Artificial Sequence
  Description of Artificial Sequence: Synthetic oligonucleotide
  Antisense strand to SEQ ID NO: 1895428
auccauacaccuaucaacc

SEQ ID NO: 1895430 - RNA, 19 nt, Artificial Sequence
  Description of Artificial Sequence: Synthetic oligonucleotide
  Sense strand starting at position 929 of SEQ ID NO: 1879272
auggauggucuagaauugu

SEQ ID NO: 1895431 - RNA, 19 nt, Artificial Sequence
  Description of Artificial Sequence: Synthetic oligonucleotide
  Antisense strand to SEQ ID NO: 1895430
acaauucuagaccauccau

SEQ ID NO: 1895432 - RNA, 19 nt, Artificial Sequence
  Description of Artificial Sequence: Synthetic oligonucleotide
  Sense strand starting at position 961 of SEQ ID NO: 1879272
ucaguuugacuagaaagca

SEQ ID NO: 1895433 - RNA, 19 nt, Artificial Sequence
  Description of Artificial Sequence: Synthetic oligonucleotide
  Antisense strand to SEQ ID NO: 1895432
ugcuuucuagucaaacuga

SEQ ID NO: 1895434 - RNA, 19 nt, Artificial Sequence
  Description of Artificial Sequence: Synthetic oligonucleotide
  Sense strand starting at position 1160 of SEQ ID NO: 1879272
cagggagggcacuguaaau

SEQ ID NO: 1895435 - RNA, 19 nt, Artificial Sequence
  Description of Artificial Sequence: Synthetic oligonucleotide
  Antisense strand to SEQ ID NO: 1895434
auuuacagugcccucccug

SEQ ID NO: 1895436 - RNA, 19 nt, Artificial Sequence
  Description of Artificial Sequence: Synthetic oligonucleotide
  Sense strand starting at position 1386 of SEQ ID NO: 1879272
augggccagccauaaauua

SEQ ID NO: 1895437 - RNA, 19 nt, Artificial Sequence
  Description of Artificial Sequence: Synthetic oligonucleotide
  Antisense strand to SEQ ID NO: 1895436
uaauuuauggcuggcccau

SEQ ID NO: 1895438 - RNA, 19 nt, Artificial Sequence
  Description of Artificial Sequence: Synthetic oligonucleotide
  Sense strand starting at position 1437 of SEQ ID NO: 1879272
cuaacaagccuuuagaagu

SEQ ID NO: 1895439 - RNA, 19 nt, Artificial Sequence
  Description of Artificial Sequence: Synthetic oligonucleotide
  Antisense strand to SEQ ID NO: 1895438
acuucuaaaggcuuguuag

SEQ ID NO: 1895440 - RNA, 19 nt, Artificial Sequence
  Description of Artificial Sequence: Synthetic oligonucleotide
  Sense strand starting at position 1581 of SEQ ID NO: 1879272
aaauaaaucugagaggaga

SEQ ID NO: 1895441 - RNA, 19 nt, Artificial Sequence
  Description of Artificial Sequence: Synthetic oligonucleotide
  Antisense strand to SEQ ID NO: 1895440
ucuccucucagauuuauuu

SEQ ID NO: 1895442 - RNA, 19 nt, Artificial Sequence
  Description of Artificial Sequence: Synthetic oligonucleotide
  Sense strand starting at position 1604 of SEQ ID NO: 1879272
agaccagaauggucugcuu

SEQ ID NO: 1895443 - RNA, 19 nt, Artificial Sequence
  Description of Artificial Sequence: Synthetic oligonucleotide
  Antisense strand to SEQ ID NO: 1895442
aagcagaccauucuggucu

SEQ ID NO: 1895444 - RNA, 19 nt, Artificial Sequence
  Description of Artificial Sequence: Synthetic oligonucleotide
  Sense strand starting at position 2073 of SEQ ID NO: 1879272
aggcaaucuuacucugaca

SEQ ID NO: 1895445 - RNA, 19 nt, Artificial Sequence
  Description of Artificial Sequence: Synthetic oligonucleotide
  Antisense strand to SEQ ID NO: 1895444
ugucagaguaagauugccu

SEQ ID NO: 1895446 - RNA, 19 nt, Artificial Sequence
  Description of Artificial Sequence: Synthetic oligonucleotide
  Sense strand starting at position 2274 of SEQ ID NO: 1879272
ccaugauuaggaggucuag

SEQ ID NO: 1895447 - RNA, 19 nt, Artificial Sequence
  Description of Artificial Sequence: Synthetic oligonucleotide
  Antisense strand to SEQ ID NO: 1895446
cuagaccuccuaaucaugg

SEQ ID NO: 1895448 - RNA, 19 nt, Artificial Sequence
  Description of Artificial Sequence: Synthetic oligonucleotide
  Sense strand starting at position 2280 of SEQ ID NO: 1879272
uuaggaggucuaggaucau

SEQ ID NO: 1895449 - RNA, 19 nt, Artificial Sequence
  Description of Artificial Sequence: Synthetic oligonucleotide
  Antisense strand to SEQ ID NO: 1895448
augauccuagaccuccuaa

SEQ ID NO: 1895450 - RNA, 19 nt, Artificial Sequence
  Description of Artificial Sequence: Synthetic oligonucleotide
  Sense strand starting at position 2286 of SEQ ID NO: 1879272
ggucuaggaucaucuugau

SEQ ID NO: 1895451 - RNA, 19 nt, Artificial Sequence
  Description of Artificial Sequence: Synthetic oligonucleotide
  Antisense strand to SEQ ID NO: 1895450
aucaagaugauccuagacc

SEQ ID NO: 1895452 - RNA, 19 nt, Artificial Sequence
  Description of Artificial Sequence: Synthetic oligonucleotide
  Sense strand starting at position 2392 of SEQ ID NO: 1879272
ucaucaugaucauuggcua

SEQ ID NO: 1895453 - RNA, 19 nt, Artificial Sequence
  Description of Artificial Sequence: Synthetic oligonucleotide
  Antisense strand to SEQ ID NO: 1895452
uagccaaugaucaugauga

SEQ ID NO: 1895454 - RNA, 19 nt, Artificial Sequence
  Description of Artificial Sequence: Synthetic oligonucleotide
  Sense strand starting at position 2446 of SEQ ID NO: 1879272
augggaaauuccucgguag

SEQ ID NO: 1895455 - RNA, 19 nt, Artificial Sequence
  Description of Artificial Sequence: Synthetic oligonucleotide
  Antisense strand to SEQ ID NO: 1895454
cuaccgaggaauuucccau

SEQ ID NO: 1895456 - RNA, 19 nt, Artificial Sequence
  Description of Artificial Sequence: Synthetic oligonucleotide
  Sense strand starting at position 2448 of SEQ ID NO: 1879272
gggaaauuccucgguagga

SEQ ID NO: 1895457 - RNA, 19 nt, Artificial Sequence
  Description of Artificial Sequence: Synthetic oligonucleotide
  Antisense strand to SEQ ID NO: 1895456
uccuaccgaggaauuuccc

SEQ ID NO: 1895458 - RNA, 19 nt, Artificial Sequence
  Description of Artificial Sequence: Synthetic oligonucleotide
  Sense strand starting at position 2449 of SEQ ID NO: 1879272
ggaaauuccucgguaggau

SEQ ID NO: 1895459 - RNA, 19 nt, Artificial Sequence
  Description of Artificial Sequence: Synthetic oligonucleotide
  Antisense strand to SEQ ID NO: 1895458
auccuaccgaggaauuucc

SEQ ID NO: 1895460 - RNA, 19 nt, Artificial Sequence
  Description of Artificial Sequence: Synthetic oligonucleotide
  Sense strand starting at position 2450 of SEQ ID NO: 1879272
gaaauuccucgguaggauu

SEQ ID NO: 1895461 - RNA, 19 nt, Artificial Sequence
  Description of Artificial Sequence: Synthetic oligonucleotide
  Antisense strand to SEQ ID NO: 1895460
aauccuaccgaggaauuuc

SEQ ID NO: 1895462 - RNA, 19 nt, Artificial Sequence
  Description of Artificial Sequence: Synthetic oligonucleotide
  Sense strand starting at position 2509 of SEQ ID NO: 1879272
agacaauagcaggguaaau

SEQ ID NO: 1895463 - RNA, 19 nt, Artificial Sequence
  Description of Artificial Sequence: Synthetic oligonucleotide
  Antisense strand to SEQ ID NO: 1895462
auuuacccugcuauugucu

SEQ ID NO: 1895464 - RNA, 19 nt, Artificial Sequence
  Description of Artificial Sequence: Synthetic oligonucleotide
  Sense strand starting at position 2521 of SEQ ID NO: 1879272
gguaaauauccugggaauc

SEQ ID NO: 1895465 - RNA, 19 nt, Artificial Sequence
  Description of Artificial Sequence: Synthetic oligonucleotide
  Antisense strand to SEQ ID NO: 1895464
gauucccaggauauuuacc

SEQ ID NO: 1895466 - RNA, 19 nt, Artificial Sequence
  Description of Artificial Sequence: Synthetic oligonucleotide
  Sense strand starting at position 2522 of SEQ ID NO: 1879272
guaaauauccugggaauca

SEQ ID NO: 1895467 - RNA, 19 nt, Artificial Sequence
  Description of Artificial Sequence: Synthetic oligonucleotide
  Antisense strand to SEQ ID NO: 1895466
ugauucccaggauauuuac

SEQ ID NO: 1895468 - RNA, 19 nt, Artificial Sequence
  Description of Artificial Sequence: Synthetic oligonucleotide
  Sense strand starting at position 2800 of SEQ ID NO: 1879272
gagauugugucaguggaau

SEQ ID NO: 1895469 - RNA, 19 nt, Artificial Sequence
  Description of Artificial Sequence: Synthetic oligonucleotide
  Antisense strand to SEQ ID NO: 1895468
auuccacugacacaaucuc

SEQ ID NO: 1895470 - RNA, 19 nt, Artificial Sequence
  Description of Artificial Sequence: Synthetic oligonucleotide
  Sense strand starting at position 2894 of SEQ ID NO: 1879272
aaagcugucccauagagac

SEQ ID NO: 1895471 - RNA, 19 nt, Artificial Sequence
  Description of Artificial Sequence: Synthetic oligonucleotide
  Antisense strand to SEQ ID NO: 1895470
gucucuaugggacagcuuu

SEQ ID NO: 1895472 - RNA, 19 nt, Artificial Sequence
  Description of Artificial Sequence: Synthetic oligonucleotide
  Sense strand starting at position 3074 of SEQ ID NO: 1879272
agacgacuaucucucacua

SEQ ID NO: 1895473 - RNA, 19 nt, Artificial Sequence
  Description of Artificial Sequence: Synthetic oligonucleotide
  Antisense strand to SEQ ID NO: 1895472
uagugagagauagucgucu

SEQ ID NO: 1895474 - RNA, 19 nt, Artificial Sequence
  Description of Artificial Sequence: Synthetic oligonucleotide
  Sense strand starting at position 3106 of SEQ ID NO: 1879272
aaagaugccgaaugagagu

SEQ ID NO: 1895475 - RNA, 19 nt, Artificial Sequence
  Description of Artificial Sequence: Synthetic oligonucleotide
  Antisense strand to SEQ ID NO: 1895474
acucucauucggcaucuuu

SEQ ID NO: 1895476 - RNA, 19 nt, Artificial Sequence
  Description of Artificial Sequence: Synthetic oligonucleotide
  Sense strand starting at position 3187 of SEQ ID NO: 1879272
gaugcaggcuacuuggaaa

SEQ ID NO: 1895477 - RNA, 19 nt, Artificial Sequence
  Description of Artificial Sequence: Synthetic oligonucleotide
  Antisense strand to SEQ ID NO: 1895476
uuuccaaguagccugcauc

SEQ ID NO: 1895478 - RNA, 19 nt, Artificial Sequence
  Description of Artificial Sequence: Synthetic oligonucleotide
  Sense strand starting at position 3311 of SEQ ID NO: 1879272
gggcaagugacccauuacu

SEQ ID NO: 1895479 - RNA, 19 nt, Artificial Sequence
  Description of Artificial Sequence: Synthetic oligonucleotide
  Antisense strand to SEQ ID NO: 1895478
aguaaugggucacuugccc

SEQ ID NO: 1895480 - RNA, 19 nt, Artificial Sequence
  Description of Artificial Sequence: Synthetic oligonucleotide
  Sense strand starting at position 3426 of SEQ ID NO: 1879272
ggagccuuggcagaggaau

SEQ ID NO: 1895481 - RNA, 19 nt, Artificial Sequence
  Description of Artificial Sequence: Synthetic oligonucleotide
  Antisense strand to SEQ ID NO: 1895480
auuccucugccaaggcucc

SEQ ID NO: 1895482 - RNA, 19 nt, Artificial Sequence
  Description of Artificial Sequence: Synthetic oligonucleotide
  Sense strand starting at position 3532 of SEQ ID NO: 1879272
aagucaagcuggucagaaa

SEQ ID NO: 1895483 - RNA, 19 nt, Artificial Sequence
  Description of Artificial Sequence: Synthetic oligonucleotide
  Antisense strand to SEQ ID NO: 1895482
uuucugaccagcuugacuu

SEQ ID NO: 1895484 - RNA, 19 nt, Artificial Sequence
  Description of Artificial Sequence: Synthetic oligonucleotide
  Sense strand starting at position 3637 of SEQ ID NO: 1879272
ccaucaacauugguuaagu

SEQ ID NO: 1895485 - RNA, 19 nt, Artificial Sequence
  Description of Artificial Sequence: Synthetic oligonucleotide
  Antisense strand to SEQ ID NO: 1895484
acuuaaccaauguugaugg

SEQ ID NO: 1895486 - RNA, 19 nt, Artificial Sequence
  Description of Artificial Sequence: Synthetic oligonucleotide
  Sense strand starting at position 3645 of SEQ ID NO: 1879272
auugguuaagucugagaga

SEQ ID NO: 1895487 - RNA, 19 nt, Artificial Sequence
  Description of Artificial Sequence: Synthetic oligonucleotide
  Antisense strand to SEQ ID NO: 1895486
ucucucagacuuaaccaau

SEQ ID NO: 1895488 - RNA, 19 nt, Artificial Sequence
  Description of Artificial Sequence: Synthetic oligonucleotide
  Sense strand starting at position 3677 of SEQ ID NO: 1879272
acuagugauugauuggaau

SEQ ID NO: 1895489 - RNA, 19 nt, Artificial Sequence
  Description of Artificial Sequence: Synthetic oligonucleotide
  Antisense strand to SEQ ID NO: 1895488
auuccaaucaaucacuagu

SEQ ID NO: 1895490 - RNA, 19 nt, Artificial Sequence
  Description of Artificial Sequence: Synthetic oligonucleotide
  Sense strand starting at position 3708 of SEQ ID NO: 1879272
ccaggcaugacuugagaua

SEQ ID NO: 1895491 - RNA, 19 nt, Artificial Sequence
  Description of Artificial Sequence: Synthetic oligonucleotide
  Antisense strand to SEQ ID NO: 1895490
uaucucaagucaugccugg

SEQ ID NO: 1895492 - RNA, 19 nt, Artificial Sequence
  Description of Artificial Sequence: Synthetic oligonucleotide
  Sense strand starting at position 3727 of SEQ ID NO: 1879272
ccaucugguguguauaaag

SEQ ID NO: 1895493 - RNA, 19 nt, Artificial Sequence
  Description of Artificial Sequence: Synthetic oligonucleotide
  Antisense strand to SEQ ID NO: 1895492
cuuuauacacaccagaugg

SEQ ID NO: 1895494 - RNA, 19 nt, Artificial Sequence
  Description of Artificial Sequence: Synthetic oligonucleotide
  Sense strand starting at position 3782 of SEQ ID NO: 1879272
ggugaaaugacuugcacaa

SEQ ID NO: 1895495 - RNA, 19 nt, Artificial Sequence
  Description of Artificial Sequence: Synthetic oligonucleotide
  Antisense strand to SEQ ID NO: 1895494
uugugcaagucauuucacc

SEQ ID NO: 1895496 - RNA, 19 nt, Artificial Sequence
  Description of Artificial Sequence: Synthetic oligonucleotide
  Sense strand starting at position 28 of SEQ ID NO: 1879273
cuugcaugcuugccauuua

SEQ ID NO: 1895497 - RNA, 19 nt, Artificial Sequence
  Description of Artificial Sequence: Synthetic oligonucleotide
  Antisense strand to SEQ ID NO: 1895496
uaaauggcaagcaugcaag

SEQ ID NO: 1895498 - RNA, 19 nt, Artificial Sequence
  Description of Artificial Sequence: Synthetic oligonucleotide
  Sense strand starting at position 164 of SEQ ID NO: 1879273
agugaaucucuuuaacuug

SEQ ID NO: 1895499 - RNA, 19 nt, Artificial Sequence
  Description of Artificial Sequence: Synthetic oligonucleotide
  Antisense strand to SEQ ID NO: 1895498
caaguuaaagagauucacu

SEQ ID NO: 1895500 - RNA, 19 nt, Artificial Sequence
  Description of Artificial Sequence: Synthetic oligonucleotide
  Sense strand starting at position 170 of SEQ ID NO: 1879273
ucucuuuaacuuggagcua

SEQ ID NO: 1895501 - RNA, 19 nt, Artificial Sequence
  Description of Artificial Sequence: Synthetic oligonucleotide
  Antisense strand to SEQ ID NO: 1895500
uagcuccaaguuaaagaga

SEQ ID NO: 1895502 - RNA, 19 nt, Artificial Sequence
  Description of Artificial Sequence: Synthetic oligonucleotide
  Sense strand starting at position 413 of SEQ ID NO: 1879273
ccucauuccugccuggaaa

SEQ ID NO: 1895503 - RNA, 19 nt, Artificial Sequence
  Description of Artificial Sequence: Synthetic oligonucleotide
  Antisense strand to SEQ ID NO: 1895502
uuuccaggcaggaaugagg

SEQ ID NO: 1895504 - RNA, 19 nt, Artificial Sequence
  Description of Artificial Sequence: Synthetic oligonucleotide
  Sense strand starting at position 414 of SEQ ID NO: 1879273
cucauuccugccuggaaag

SEQ ID NO: 1895505 - RNA, 19 nt, Artificial Sequence
  Description of Artificial Sequence: Synthetic oligonucleotide
  Antisense strand to SEQ ID NO: 1895504
cuuuccaggcaggaaugag

SEQ ID NO: 1895506 - RNA, 19 nt, Artificial Sequence
  Description of Artificial Sequence: Synthetic oligonucleotide
  Sense strand starting at position 488 of SEQ ID NO: 1879273
ccuagagcuucucucaaug

SEQ ID NO: 1895507 - RNA, 19 nt, Artificial Sequence
  Description of Artificial Sequence: Synthetic oligonucleotide
  Antisense strand to SEQ ID NO: 1895506
cauugagagaagcucuagg

SEQ ID NO: 1895508 - RNA, 19 nt, Artificial Sequence
  Description of Artificial Sequence: Synthetic oligonucleotide
  Sense strand starting at position 562 of SEQ ID NO: 1879273
aguacugauuccguaaaga

SEQ ID NO: 1895509 - RNA, 19 nt, Artificial Sequence
  Description of Artificial Sequence: Synthetic oligonucleotide
  Antisense strand to SEQ ID NO: 1895508
ucuuuacggaaucaguacu

SEQ ID NO: 1895510 - RNA, 19 nt, Artificial Sequence
  Description of Artificial Sequence: Synthetic oligonucleotide
  Sense strand starting at position 595 of SEQ ID NO: 1879273
gccuguacucguugaaagg

SEQ ID NO: 1895511 - RNA, 19 nt, Artificial Sequence
  Description of Artificial Sequence: Synthetic oligonucleotide
  Antisense strand to SEQ ID NO: 1895510
ccuuucaacgaguacaggc

SEQ ID NO: 1895512 - RNA, 19 nt, Artificial Sequence
  Description of Artificial Sequence: Synthetic oligonucleotide
  Sense strand starting at position 619 of SEQ ID NO: 1879273
ugaauuguugcccaccgga

SEQ ID NO: 1895513 - RNA, 19 nt, Artificial Sequence
  Description of Artificial Sequence: Synthetic oligonucleotide
  Antisense strand to SEQ ID NO: 1895512
uccggugggcaacaauuca

SEQ ID NO: 1895514 - RNA, 19 nt, Artificial Sequence
  Description of Artificial Sequence: Synthetic oligonucleotide
  Sense strand starting at position 773 of SEQ ID NO: 1879273
ccaagagacgcucaccuaa

SEQ ID NO: 1895515 - RNA, 19 nt, Artificial Sequence
  Description of Artificial Sequence: Synthetic oligonucleotide
  Antisense strand to SEQ ID NO: 1895514
uuaggugagcgucucuugg

SEQ ID NO: 1895516 - RNA, 19 nt, Artificial Sequence
  Description of Artificial Sequence: Synthetic oligonucleotide
  Sense strand starting at position 852 of SEQ ID NO: 1879273
ccauucucauccgucuaca

SEQ ID NO: 1895517 - RNA, 19 nt, Artificial Sequence
  Description of Artificial Sequence: Synthetic oligonucleotide
  Antisense strand to SEQ ID NO: 1895516
uguagacggaugagaaugg

SEQ ID NO: 1895518 - RNA, 19 nt, Artificial Sequence
  Description of Artificial Sequence: Synthetic oligonucleotide
  Sense strand starting at position 878 of SEQ ID NO: 1879273
gucaccauucucugacaca

SEQ ID NO: 1895519 - RNA, 19 nt, Artificial Sequence
  Description of Artificial Sequence: Synthetic oligonucleotide
  Antisense strand to SEQ ID NO: 1895518
ugugucagagaauggugac

SEQ ID NO: 1895520 - RNA, 19 nt, Artificial Sequence
  Description of Artificial Sequence: Synthetic oligonucleotide
  Sense strand starting at position 1060 of SEQ ID NO: 1879273
aguucuauuccagaagcua

SEQ ID NO: 1895521 - RNA, 19 nt, Artificial Sequence
  Description of Artificial Sequence: Synthetic oligonucleotide
  Antisense strand to SEQ ID NO: 1895520
uagcuucuggaauagaacu

SEQ ID NO: 1895522 - RNA, 19 nt, Artificial Sequence
  Description of Artificial Sequence: Synthetic oligonucleotide
  Sense strand starting at position 1104 of SEQ ID NO: 1879273
ggugaaagucuuugcuauu

SEQ ID NO: 1895523 - RNA, 19 nt, Artificial Sequence
  Description of Artificial Sequence: Synthetic oligonucleotide
  Antisense strand to SEQ ID NO: 1895522
aauagcaaagacuuucacc

SEQ ID NO: 1895524 - RNA, 19 nt, Artificial Sequence
  Description of Artificial Sequence: Synthetic oligonucleotide
  Sense strand starting at position 1105 of SEQ ID NO: 1879273
gugaaagucuuugcuauug

SEQ ID NO: 1895525 - RNA, 19 nt, Artificial Sequence
  Description of Artificial Sequence: Synthetic oligonucleotide
  Antisense strand to SEQ ID NO: 1895524
caauagcaaagacuuucac

SEQ ID NO: 1895526 - RNA, 19 nt, Artificial Sequence
  Description of Artificial Sequence: Synthetic oligonucleotide
  Sense strand starting at position 1156 of SEQ ID NO: 1879273
uaccauuucuucugagagg

SEQ ID NO: 1895527 - RNA, 19 nt, Artificial Sequence
  Description of Artificial Sequence: Synthetic oligonucleotide
  Antisense strand to SEQ ID NO: 1895526
ccucucagaagaaauggua

SEQ ID NO: 1895528 - RNA, 19 nt, Artificial Sequence
  Description of Artificial Sequence: Synthetic oligonucleotide
  Sense strand starting at position 1176 of SEQ ID NO: 1879273
acgcauaagcguguucaca

SEQ ID NO: 1895529 - RNA, 19 nt, Artificial Sequence
  Description of Artificial Sequence: Synthetic oligonucleotide
  Antisense strand to SEQ ID NO: 1895528
ugugaacacgcuuaugcgu

SEQ ID NO: 1895530 - RNA, 19 nt, Artificial Sequence
  Description of Artificial Sequence: Synthetic oligonucleotide
  Sense strand starting at position 1177 of SEQ ID NO: 1879273
cgcauaagcguguucacag

SEQ ID NO: 1895531 - RNA, 19 nt, Artificial Sequence
  Description of Artificial Sequence: Synthetic oligonucleotide
  Antisense strand to SEQ ID NO: 1895530
cugugaacacgcuuaugcg

SEQ ID NO: 1895532 - RNA, 19 nt, Artificial Sequence
  Description of Artificial Sequence: Synthetic oligonucleotide
  Sense strand starting at position 1298 of SEQ ID NO: 1879273
guacauacugcccgugaaa

SEQ ID NO: 1895533 - RNA, 19 nt, Artificial Sequence
  Description of Artificial Sequence: Synthetic oligonucleotide
  Antisense strand to SEQ ID NO: 1895532
uuucacgggcaguauguac

SEQ ID NO: 1895534 - RNA, 19 nt, Artificial Sequence
  Description of Artificial Sequence: Synthetic oligonucleotide
  Sense strand starting at position 1778 of SEQ ID NO: 1879273
ggaguagucgcggugacuu

SEQ ID NO: 1895535 - RNA, 19 nt, Artificial Sequence
  Description of Artificial Sequence: Synthetic oligonucleotide
  Antisense strand to SEQ ID NO: 1895534
aagucaccgcgacuacucc

SEQ ID NO: 1895536 - RNA, 19 nt, Artificial Sequence
  Description of Artificial Sequence: Synthetic oligonucleotide
  Sense strand starting at position 1815 of SEQ ID NO: 1879273
aguguauuccuccaccauc

SEQ ID NO: 1895537 - RNA, 19 nt, Artificial Sequence
  Description of Artificial Sequence: Synthetic oligonucleotide
  Antisense strand to SEQ ID NO: 1895536
gaugguggaggaauacacu

SEQ ID NO: 1895538 - RNA, 19 nt, Artificial Sequence
  Description of Artificial Sequence: Synthetic oligonucleotide
  Sense strand starting at position 2072 of SEQ ID NO: 1879273
ggccucaucucuuuaagga

SEQ ID NO: 1895539 - RNA, 19 nt, Artificial Sequence
  Description of Artificial Sequence: Synthetic oligonucleotide
  Antisense strand to SEQ ID NO: 1895538
uccuuaaagagaugaggcc

SEQ ID NO: 1895540 - RNA, 19 nt, Artificial Sequence
  Description of Artificial Sequence: Synthetic oligonucleotide
  Sense strand starting at position 2073 of SEQ ID NO: 1879273
gccucaucucuuuaaggag

SEQ ID NO: 1895541 - RNA, 19 nt, Artificial Sequence
  Description of Artificial Sequence: Synthetic oligonucleotide
  Antisense strand to SEQ ID NO: 1895540
cuccuuaaagagaugaggc

SEQ ID NO: 1895542 - RNA, 19 nt, Artificial Sequence
  Description of Artificial Sequence: Synthetic oligonucleotide
  Sense strand starting at position 2079 of SEQ ID NO: 1879273
ucucuuuaaggaggguuua

SEQ ID NO: 1895543 - RNA, 19 nt, Artificial Sequence
  Description of Artificial Sequence: Synthetic oligonucleotide
  Antisense strand to SEQ ID NO: 1895542
uaaacccuccuuaaagaga

SEQ ID NO: 1895544 - RNA, 19 nt, Artificial Sequence
  Description of Artificial Sequence: Synthetic oligonucleotide
  Sense strand starting at position 2080 of SEQ ID NO: 1879273
cucuuuaaggaggguuuau

SEQ ID NO: 1895545 - RNA, 19 nt, Artificial Sequence
  Description of Artificial Sequence: Synthetic oligonucleotide
  Antisense strand to SEQ ID NO: 1895544
auaaacccuccuuaaagag

SEQ ID NO: 1895546 - RNA, 19 nt, Artificial Sequence
  Description of Artificial Sequence: Synthetic oligonucleotide
  Sense strand starting at position 2136 of SEQ ID NO: 1879273
cggugaugucauuggcaac

SEQ ID NO: 1895547 - RNA, 19 nt, Artificial Sequence
  Description of Artificial Sequence: Synthetic oligonucleotide
  Antisense strand to SEQ ID NO: 1895546
guugccaaugacaucaccg

SEQ ID NO: 1895548 - RNA, 19 nt, Artificial Sequence
  Description of Artificial Sequence: Synthetic oligonucleotide
  Sense strand starting at position 2193 of SEQ ID NO: 1879273
agcagcugcucucuauuua

SEQ ID NO: 1895549 - RNA, 19 nt, Artificial Sequence
  Description of Artificial Sequence: Synthetic oligonucleotide
  Antisense strand to SEQ ID NO: 1895548
uaaauagagagcagcugcu

SEQ ID NO: 1895550 - RNA, 19 nt, Artificial Sequence
  Description of Artificial Sequence: Synthetic oligonucleotide
  Sense strand starting at position 2385 of SEQ ID NO: 1879273
aaaguaucggaguaacuuu

SEQ ID NO: 1895551 - RNA, 19 nt, Artificial Sequence
  Description of Artificial Sequence: Synthetic oligonucleotide
  Antisense strand to SEQ ID NO: 1895550
aaaguuacuccgauacuuu

SEQ ID NO: 1895552 - RNA, 19 nt, Artificial Sequence
  Description of Artificial Sequence: Synthetic oligonucleotide
  Sense strand starting at position 2392 of SEQ ID NO: 1879273
cggaguaacuuucuaaagg

SEQ ID NO: 1895553 - RNA, 19 nt, Artificial Sequence
  Description of Artificial Sequence: Synthetic oligonucleotide
  Antisense strand to SEQ ID NO: 1895552
ccuuuagaaaguuacuccg

SEQ ID NO: 1895554 - RNA, 19 nt, Artificial Sequence
  Description of Artificial Sequence: Synthetic oligonucleotide
  Sense strand starting at position 2393 of SEQ ID NO: 1879273
ggaguaacuuucuaaagga

SEQ ID NO: 1895555 - RNA, 19 nt, Artificial Sequence
  Description of Artificial Sequence: Synthetic oligonucleotide
  Antisense strand to SEQ ID NO: 1895554
uccuuuagaaaguuacucc

SEQ ID NO: 1895556 - RNA, 19 nt, Artificial Sequence
  Description of Artificial Sequence: Synthetic oligonucleotide
  Sense strand starting at position 3189 of SEQ ID NO: 1879273
ugcaaauagcuagauugaa

SEQ ID NO: 1895557 - RNA, 19 nt, Artificial Sequence
  Description of Artificial Sequence: Synthetic oligonucleotide
  Antisense strand to SEQ ID NO: 1895556
uucaaucuagcuauuugca

SEQ ID NO: 1895558 - RNA, 19 nt, Artificial Sequence
  Description of Artificial Sequence: Synthetic oligonucleotide
  Sense strand starting at position 3373 of SEQ ID NO: 1879273
gaaaguugcccugggauac

SEQ ID NO: 1895559 - RNA, 19 nt, Artificial Sequence
  Description of Artificial Sequence: Synthetic oligonucleotide
  Antisense strand to SEQ ID NO: 1895558
guaucccagggcaacuuuc

SEQ ID NO: 1895560 - RNA, 19 nt, Artificial Sequence
  Description of Artificial Sequence: Synthetic oligonucleotide
  Sense strand starting at position 3374 of SEQ ID NO: 1879273
aaaguugcccugggauaca

SEQ ID NO: 1895561 - RNA, 19 nt, Artificial Sequence
  Description of Artificial Sequence: Synthetic oligonucleotide
  Antisense strand to SEQ ID NO: 1895560
uguaucccagggcaacuuu

SEQ ID NO: 1895562 - RNA, 19 nt, Artificial Sequence
  Description of Artificial Sequence: Synthetic oligonucleotide
  Sense strand starting at position 3611 of SEQ ID NO: 1879273
guaguauacugaguagcag

SEQ ID NO: 1895563 - RNA, 19 nt, Artificial Sequence
  Description of Artificial Sequence: Synthetic oligonucleotide
  Antisense strand to SEQ ID NO: 1895562
cugcuacucaguauacuac

SEQ ID NO: 1895564 - RNA, 19 nt, Artificial Sequence
  Description of Artificial Sequence: Synthetic oligonucleotide
  Sense strand starting at position 3663 of SEQ ID NO: 1879273
cugaaaucaggagguguca

SEQ ID NO: 1895565 - RNA, 19 nt, Artificial Sequence
  Description of Artificial Sequence: Synthetic oligonucleotide
  Antisense strand to SEQ ID NO: 1895564
ugacaccuccugauuucag

SEQ ID NO: 1895566 - RNA, 19 nt, Artificial Sequence
  Description of Artificial Sequence: Synthetic oligonucleotide
  Sense strand starting at position 3665 of SEQ ID NO: 1879273
gaaaucaggaggugucaga

SEQ ID NO: 1895567 - RNA, 19 nt, Artificial Sequence
  Description of Artificial Sequence: Synthetic oligonucleotide
  Antisense strand to SEQ ID NO: 1895566
ucugacaccuccugauuuc

SEQ ID NO: 1895568 - RNA, 19 nt, Artificial Sequence
  Description of Artificial Sequence: Synthetic oligonucleotide
  Sense strand starting at position 3705 of SEQ ID NO: 1879273
ugcucaaugagcugugaag

SEQ ID NO: 1895569 - RNA, 19 nt, Artificial Sequence
  Description of Artificial Sequence: Synthetic oligonucleotide
  Antisense strand to SEQ ID NO: 1895568
cuucacagcucauugagca

SEQ ID NO: 1895570 - RNA, 19 nt, Artificial Sequence
  Description of Artificial Sequence: Synthetic oligonucleotide
  Sense strand starting at position 3707 of SEQ ID NO: 1879273
cucaaugagcugugaagag

SEQ ID NO: 1895571 - RNA, 19 nt, Artificial Sequence
  Description of Artificial Sequence: Synthetic oligonucleotide
  Antisense strand to SEQ ID NO: 1895570
cucuucacagcucauugag

SEQ ID NO: 1895572 - RNA, 19 nt, Artificial Sequence
  Description of Artificial Sequence: Synthetic oligonucleotide
  Sense strand starting at position 3809 of SEQ ID NO: 1879273
guacacauccgauagucuu

SEQ ID NO: 1895573 - RNA, 19 nt, Artificial Sequence
  Description of Artificial Sequence: Synthetic oligonucleotide
  Antisense strand to SEQ ID NO: 1895572
aagacuaucggauguguac

SEQ ID NO: 1895574 - RNA, 19 nt, Artificial Sequence
  Description of Artificial Sequence: Synthetic oligonucleotide
  Sense strand starting at position 3845 of SEQ ID NO: 1879273
guguaacgucuguugucga

SEQ ID NO: 1895575 - RNA, 19 nt, Artificial Sequence
  Description of Artificial Sequence: Synthetic oligonucleotide
  Antisense strand to SEQ ID NO: 1895574
ucgacaacagacguuacac

SEQ ID NO: 1895576 - RNA, 19 nt, Artificial Sequence
  Description of Artificial Sequence: Synthetic oligonucleotide
  Sense strand starting at position 206 of SEQ ID NO: 1879275
caaggaaaucugugauccu

SEQ ID NO: 1895577 - RNA, 19 nt, Artificial Sequence
  Description of Artificial Sequence: Synthetic oligonucleotide
  Antisense strand to SEQ ID NO: 1895576
aggaucacagauuuccuug

SEQ ID NO: 1895578 - RNA, 19 nt, Artificial Sequence
  Description of Artificial Sequence: Synthetic oligonucleotide
  Sense strand starting at position 215 of SEQ ID NO: 1879275
cugugauccuaccugaagu

SEQ ID NO: 1895579 - RNA, 19 nt, Artificial Sequence
  Description of Artificial Sequence: Synthetic oligonucleotide
  Antisense strand to SEQ ID NO: 1895578
acuucagguaggaucacag

SEQ ID NO: 1895580 - RNA, 19 nt, Artificial Sequence
  Description of Artificial Sequence: Synthetic oligonucleotide
  Sense strand starting at position 402 of SEQ ID NO: 1879275
ggguaacacaugugccuua

SEQ ID NO: 1895581 - RNA, 19 nt, Artificial Sequence
  Description of Artificial Sequence: Synthetic oligonucleotide
  Antisense strand to SEQ ID NO: 1895580
uaaggcacauguguuaccc

SEQ ID NO: 1895582 - RNA, 19 nt, Artificial Sequence
  Description of Artificial Sequence: Synthetic oligonucleotide
  Sense strand starting at position 420 of SEQ ID NO: 1879275
agaggcuugacuugaaagu

SEQ ID NO: 1895583 - RNA, 19 nt, Artificial Sequence
  Description of Artificial Sequence: Synthetic oligonucleotide
  Antisense strand to SEQ ID NO: 1895582
acuuucaagucaagccucu

SEQ ID NO: 1895584 - RNA, 19 nt, Artificial Sequence
  Description of Artificial Sequence: Synthetic oligonucleotide
  Sense strand starting at position 456 of SEQ ID NO: 1879275
guguguucagaugggauua

SEQ ID NO: 1895585 - RNA, 19 nt, Artificial Sequence
  Description of Artificial Sequence: Synthetic oligonucleotide
  Antisense strand to SEQ ID NO: 1895584
uaaucccaucugaacacac

SEQ ID NO: 1895586 - RNA, 19 nt, Artificial Sequence
  Description of Artificial Sequence: Synthetic oligonucleotide
  Sense strand starting at position 541 of SEQ ID NO: 1879275
agcacuuucgagugacaga

SEQ ID NO: 1895587 - RNA, 19 nt, Artificial Sequence
  Description of Artificial Sequence: Synthetic oligonucleotide
  Antisense strand to SEQ ID NO: 1895586
ucugucacucgaaagugcu

SEQ ID NO: 1895588 - RNA, 19 nt, Artificial Sequence
  Description of Artificial Sequence: Synthetic oligonucleotide
  Sense strand starting at position 542 of SEQ ID NO: 1879275
gcacuuucgagugacagag

SEQ ID NO: 1895589 - RNA, 19 nt, Artificial Sequence
  Description of Artificial Sequence: Synthetic oligonucleotide
  Antisense strand to SEQ ID NO: 1895588
cucugucacucgaaagugc

SEQ ID NO: 1895590 - RNA, 19 nt, Artificial Sequence
  Description of Artificial Sequence: Synthetic oligonucleotide
  Sense strand starting at position 546 of SEQ ID NO: 1879275
uuucgagugacagagcuaa

SEQ ID NO: 1895591 - RNA, 19 nt, Artificial Sequence
  Description of Artificial Sequence: Synthetic oligonucleotide
  Antisense strand to SEQ ID NO: 1895590
uuagcucugucacucgaaa

SEQ ID NO: 1895592 - RNA, 19 nt, Artificial Sequence
  Description of Artificial Sequence: Synthetic oligonucleotide
  Sense strand starting at position 642 of SEQ ID NO: 1879275
gcaaguguuuggaugcgga

SEQ ID NO: 1895593 - RNA, 19 nt, Artificial Sequence
  Description of Artificial Sequence: Synthetic oligonucleotide
  Antisense strand to SEQ ID NO: 1895592
uccgcauccaaacacuugc

SEQ ID NO: 1895594 - RNA, 19 nt, Artificial Sequence
  Description of Artificial Sequence: Synthetic oligonucleotide
  Sense strand starting at position 848 of SEQ ID NO: 1879275
ucaucugucguuugaggga

SEQ ID NO: 1895595 - RNA, 19 nt, Artificial Sequence
  Description of Artificial Sequence: Synthetic oligonucleotide
  Antisense strand to SEQ ID NO: 1895594
ucccucaaacgacagauga

SEQ ID NO: 1895596 - RNA, 19 nt, Artificial Sequence
  Description of Artificial Sequence: Synthetic oligonucleotide
  Sense strand starting at position 894 of SEQ ID NO: 1879275
gggcuccugagaugaucau

SEQ ID NO: 1895597 - RNA, 19 nt, Artificial Sequence
  Description of Artificial Sequence: Synthetic oligonucleotide
  Antisense strand to SEQ ID NO: 1895596
augaucaucucaggagccc

SEQ ID NO: 1895598 - RNA, 19 nt, Artificial Sequence
  Description of Artificial Sequence: Synthetic oligonucleotide
  Sense strand starting at position 927 of SEQ ID NO: 1879275
uggcaaagagccuggcaua

SEQ ID NO: 1895599 - RNA, 19 nt, Artificial Sequence
  Description of Artificial Sequence: Synthetic oligonucleotide
  Antisense strand to SEQ ID NO: 1895598
uaugccaggcucuuugcca

SEQ ID NO: 1895600 - RNA, 19 nt, Artificial Sequence
  Description of Artificial Sequence: Synthetic oligonucleotide
  Sense strand starting at position 970 of SEQ ID NO: 1879275
aucguauuauuauuggaag

SEQ ID NO: 1895601 - RNA, 19 nt, Artificial Sequence
  Description of Artificial Sequence: Synthetic oligonucleotide
  Antisense strand to SEQ ID NO: 1895600
cuuccaauaauaauacgau

SEQ ID NO: 1895602 - RNA, 19 nt, Artificial Sequence
  Description of Artificial Sequence: Synthetic oligonucleotide
  Sense strand starting at position 972 of SEQ ID NO: 1879275
cguauuauuauuggaagag

SEQ ID NO: 1895603 - RNA, 19 nt, Artificial Sequence
  Description of Artificial Sequence: Synthetic oligonucleotide
  Antisense strand to SEQ ID NO: 1895602
cucuuccaauaauaauacg

SEQ ID NO: 1895604 - RNA, 19 nt, Artificial Sequence
  Description of Artificial Sequence: Synthetic oligonucleotide
  Sense strand starting at position 1046 of SEQ ID NO: 1879275
ggugccuacccuuacaauu

SEQ ID NO: 1895605 - RNA, 19 nt, Artificial Sequence
  Description of Artificial Sequence: Synthetic oligonucleotide
  Antisense strand to SEQ ID NO: 1895604
aauuguaaggguaggcacc

SEQ ID NO: 1895606 - RNA, 19 nt, Artificial Sequence
  Description of Artificial Sequence: Synthetic oligonucleotide
  Sense strand starting at position 1059 of SEQ ID NO: 1879275
acaauuaccugugugaucu

SEQ ID NO: 1895607 - RNA, 19 nt, Artificial Sequence
  Description of Artificial Sequence: Synthetic oligonucleotide
  Antisense strand to SEQ ID NO: 1895606
agaucacacagguaauugu

SEQ ID NO: 1895608 - RNA, 19 nt, Artificial Sequence
  Description of Artificial Sequence: Synthetic oligonucleotide
  Sense strand starting at position 1143 of SEQ ID NO: 1879275
uuaccaggcugucuuaaga

SEQ ID NO: 1895609 - RNA, 19 nt, Artificial Sequence
  Description of Artificial Sequence: Synthetic oligonucleotide
  Antisense strand to SEQ ID NO: 1895608
ucuuaagacagccugguaa

SEQ ID NO: 1895610 - RNA, 19 nt, Artificial Sequence
  Description of Artificial Sequence: Synthetic oligonucleotide
  Sense strand starting at position 1460 of SEQ ID NO: 1879275
gugccuugggcaugagaug

SEQ ID NO: 1895611 - RNA, 19 nt, Artificial Sequence
  Description of Artificial Sequence: Synthetic oligonucleotide
  Antisense strand to SEQ ID NO: 1895610
caucucaugcccaaggcac

SEQ ID NO: 1895612 - RNA, 19 nt, Artificial Sequence
  Description of Artificial Sequence: Synthetic oligonucleotide
  Sense strand starting at position 1602 of SEQ ID NO: 1879275
ccuccucuugcauaaucga

SEQ ID NO: 1895613 - RNA, 19 nt, Artificial Sequence
  Description of Artificial Sequence: Synthetic oligonucleotide
  Antisense strand to SEQ ID NO: 1895612
ucgauuaugcaagaggagg

SEQ ID NO: 1895614 - RNA, 19 nt, Artificial Sequence
  Description of Artificial Sequence: Synthetic oligonucleotide
  Sense strand starting at position 1609 of SEQ ID NO: 1879275
uugcauaaucgagggaguu

SEQ ID NO: 1895615 - RNA, 19 nt, Artificial Sequence
  Description of Artificial Sequence: Synthetic oligonucleotide
  Antisense strand to SEQ ID NO: 1895614
aacucccucgauuaugcaa

SEQ ID NO: 1895616 - RNA, 19 nt, Artificial Sequence
  Description of Artificial Sequence: Synthetic oligonucleotide
  Sense strand starting at position 1610 of SEQ ID NO: 1879275
ugcauaaucgagggaguug

SEQ ID NO: 1895617 - RNA, 19 nt, Artificial Sequence
  Description of Artificial Sequence: Synthetic oligonucleotide
  Antisense strand to SEQ ID NO: 1895616
caacucccucgauuaugca

SEQ ID NO: 1895618 - RNA, 19 nt, Artificial Sequence
  Description of Artificial Sequence: Synthetic oligonucleotide
  Sense strand starting at position 1695 of SEQ ID NO: 1879275
gcaccucuguauuugcaga

SEQ ID NO: 1895619 - RNA, 19 nt, Artificial Sequence
  Description of Artificial Sequence: Synthetic oligonucleotide
  Antisense strand to SEQ ID NO: 1895618
ucugcaaauacagaggugc

SEQ ID NO: 1895620 - RNA, 19 nt, Artificial Sequence
  Description of Artificial Sequence: Synthetic oligonucleotide
  Sense strand starting at position 1976 of SEQ ID NO: 1879275
ugcuauuaagcugagcaga

SEQ ID NO: 1895621 - RNA, 19 nt, Artificial Sequence
  Description of Artificial Sequence: Synthetic oligonucleotide
  Antisense strand to SEQ ID NO: 1895620
ucugcucagcuuaauagca

SEQ ID NO: 1895622 - RNA, 19 nt, Artificial Sequence
  Description of Artificial Sequence: Synthetic oligonucleotide
  Sense strand starting at position 1978 of SEQ ID NO: 1879275
cuauuaagcugagcagaua

SEQ ID NO: 1895623 - RNA, 19 nt, Artificial Sequence
  Description of Artificial Sequence: Synthetic oligonucleotide
  Antisense strand to SEQ ID NO: 1895622
uaucugcucagcuuaauag

SEQ ID NO: 1895624 - RNA, 19 nt, Artificial Sequence
  Description of Artificial Sequence: Synthetic oligonucleotide
  Sense strand starting at position 2248 of SEQ ID NO: 1879275
gcuggacuuccucaaguca

SEQ ID NO: 1895625 - RNA, 19 nt, Artificial Sequence
  Description of Artificial Sequence: Synthetic oligonucleotide
  Antisense strand to SEQ ID NO: 1895624
ugacuugaggaaguccagc

SEQ ID NO: 1895626 - RNA, 19 nt, Artificial Sequence
  Description of Artificial Sequence: Synthetic oligonucleotide
  Sense strand starting at position 2378 of SEQ ID NO: 1879275
ggagaagacucugccaucu

SEQ ID NO: 1895627 - RNA, 19 nt, Artificial Sequence
  Description of Artificial Sequence: Synthetic oligonucleotide
  Antisense strand to SEQ ID NO: 1895626
agauggcagagucuucucc

SEQ ID NO: 1895628 - RNA, 19 nt, Artificial Sequence
  Description of Artificial Sequence: Synthetic oligonucleotide
  Sense strand starting at position 2438 of SEQ ID NO: 1879275
uguugugugggaugugaaa

SEQ ID NO: 1895629 - RNA, 19 nt, Artificial Sequence
  Description of Artificial Sequence: Synthetic oligonucleotide
  Antisense strand to SEQ ID NO: 1895628
uuucacaucccacacaaca

SEQ ID NO: 1895630 - RNA, 19 nt, Artificial Sequence
  Description of Artificial Sequence: Synthetic oligonucleotide
  Sense strand starting at position 2475 of SEQ ID NO: 1879275
uggccuugggcgagucaga

SEQ ID NO: 1895631 - RNA, 19 nt, Artificial Sequence
  Description of Artificial Sequence: Synthetic oligonucleotide
  Antisense strand to SEQ ID NO: 1895630
ucugacucgcccaaggcca

SEQ ID NO: 1895632 - RNA, 19 nt, Artificial Sequence
  Description of Artificial Sequence: Synthetic oligonucleotide
  Sense strand starting at position 2531 of SEQ ID NO: 1879275
gcucaugccugacuucuga

SEQ ID NO: 1895633 - RNA, 19 nt, Artificial Sequence
  Description of Artificial Sequence: Synthetic oligonucleotide
  Antisense strand to SEQ ID NO: 1895632
ucagaagucaggcaugagc

SEQ ID NO: 1895634 - RNA, 19 nt, Artificial Sequence
  Description of Artificial Sequence: Synthetic oligonucleotide
  Sense strand starting at position 2696 of SEQ ID NO: 1879275
gccuguuuccuuguuugca

SEQ ID NO: 1895635 - RNA, 19 nt, Artificial Sequence
  Description of Artificial Sequence: Synthetic oligonucleotide
  Antisense strand to SEQ ID NO: 1895634
ugcaaacaaggaaacaggc

SEQ ID NO: 1895636 - RNA, 19 nt, Artificial Sequence
  Description of Artificial Sequence: Synthetic oligonucleotide
  Sense strand starting at position 2752 of SEQ ID NO: 1879275
cuuacaggcuccuuugaga

SEQ ID NO: 1895637 - RNA, 19 nt, Artificial Sequence
  Description of Artificial Sequence: Synthetic oligonucleotide
  Antisense strand to SEQ ID NO: 1895636
ucucaaaggagccuguaag

SEQ ID NO: 1895638 - RNA, 19 nt, Artificial Sequence
  Description of Artificial Sequence: Synthetic oligonucleotide
  Sense strand starting at position 3074 of SEQ ID NO: 1879275
gcuggagucuucucaggga

SEQ ID NO: 1895639 - RNA, 19 nt, Artificial Sequence
  Description of Artificial Sequence: Synthetic oligonucleotide
  Antisense strand to SEQ ID NO: 1895638
ucccugagaagacuccagc

SEQ ID NO: 1895640 - RNA, 19 nt, Artificial Sequence
  Description of Artificial Sequence: Synthetic oligonucleotide
  Sense strand starting at position 3364 of SEQ ID NO: 1879275
cuccuuuguccuuggacau

SEQ ID NO: 1895641 - RNA, 19 nt, Artificial Sequence
  Description of Artificial Sequence: Synthetic oligonucleotide
  Antisense strand to SEQ ID NO: 1895640
auguccaaggacaaaggag

SEQ ID NO: 1895642 - RNA, 19 nt, Artificial Sequence
  Description of Artificial Sequence: Synthetic oligonucleotide
  Sense strand starting at position 3365 of SEQ ID NO: 1879275
uccuuuguccuuggacauu

SEQ ID NO: 1895643 - RNA, 19 nt, Artificial Sequence
  Description of Artificial Sequence: Synthetic oligonucleotide
  Antisense strand to SEQ ID NO: 1895642
aauguccaaggacaaagga

SEQ ID NO: 1895644 - RNA, 19 nt, Artificial Sequence
  Description of Artificial Sequence: Synthetic oligonucleotide
  Sense strand starting at position 3462 of SEQ ID NO: 1879275
gugugaaauccuggagaaa

SEQ ID NO: 1895645 - RNA, 19 nt, Artificial Sequence
  Description of Artificial Sequence: Synthetic oligonucleotide
  Antisense strand to SEQ ID NO: 1895644
uuucuccaggauuucacac

SEQ ID NO: 1895646 - RNA, 19 nt, Artificial Sequence
  Description of Artificial Sequence: Synthetic oligonucleotide
  Sense strand starting at position 3509 of SEQ ID NO: 1879275
ggaucuuccuuccuggaga

SEQ ID NO: 1895647 - RNA, 19 nt, Artificial Sequence
  Description of Artificial Sequence: Synthetic oligonucleotide
  Antisense strand to SEQ ID NO: 1895646
ucuccaggaaggaagaucc

SEQ ID NO: 1895648 - RNA, 19 nt, Artificial Sequence
  Description of Artificial Sequence: Synthetic oligonucleotide
  Sense strand starting at position 3711 of SEQ ID NO: 1879275
gguggcuuggucuaucaag

SEQ ID NO: 1895649 - RNA, 19 nt, Artificial Sequence
  Description of Artificial Sequence: Synthetic oligonucleotide
  Antisense strand to SEQ ID NO: 1895648
cuugauagaccaagccacc

SEQ ID NO: 1895650 - RNA, 19 nt, Artificial Sequence
  Description of Artificial Sequence: Synthetic oligonucleotide
  Sense strand starting at position 3797 of SEQ ID NO: 1879275
aagaguauuucuggaauga

SEQ ID NO: 1895651 - RNA, 19 nt, Artificial Sequence
  Description of Artificial Sequence: Synthetic oligonucleotide
  Antisense strand to SEQ ID NO: 1895650
ucauuccagaaauacucuu

SEQ ID NO: 1895652 - RNA, 19 nt, Artificial Sequence
  Description of Artificial Sequence: Synthetic oligonucleotide
  Sense strand starting at position 3839 of SEQ ID NO: 1879275
ucuaucagccucugcaaga

SEQ ID NO: 1895653 - RNA, 19 nt, Artificial Sequence
  Description of Artificial Sequence: Synthetic oligonucleotide
  Antisense strand to SEQ ID NO: 1895652
ucuugcagaggcugauaga

SEQ ID NO: 1895654 - RNA, 19 nt, Artificial Sequence
  Description of Artificial Sequence: Synthetic oligonucleotide
  Sense strand starting at position 3840 of SEQ ID NO: 1879275
cuaucagccucugcaagaa

SEQ ID NO: 1895655 - RNA, 19 nt, Artificial Sequence
  Description of Artificial Sequence: Synthetic oligonucleotide
  Antisense strand to SEQ ID NO: 1895654
uucuugcagaggcugauag

SEQ ID NO: 1895656 - RNA, 19 nt, Artificial Sequence
  Description of Artificial Sequence: Synthetic oligonucleotide
  Sense strand starting at position 1 of SEQ ID NO: 1879276
cuuguauuuagcuguaguc

SEQ ID NO: 1895657 - RNA, 19 nt, Artificial Sequence
  Description of Artificial Sequence: Synthetic oligonucleotide
  Antisense strand to SEQ ID NO: 1895656
gacuacagcuaaauacaag

SEQ ID NO: 1895658 - RNA, 19 nt, Artificial Sequence
  Description of Artificial Sequence: Synthetic oligonucleotide
  Sense strand starting at position 319 of SEQ ID NO: 1879276
gugccugacccucaggaau

SEQ ID NO: 1895659 - RNA, 19 nt, Artificial Sequence
  Description of Artificial Sequence: Synthetic oligonucleotide
  Antisense strand to SEQ ID NO: 1895658
auuccugagggucaggcac

SEQ ID NO: 1895660 - RNA, 19 nt, Artificial Sequence
  Description of Artificial Sequence: Synthetic oligonucleotide
  Sense strand starting at position 325 of SEQ ID NO: 1879276
gacccucaggaauguguau

SEQ ID NO: 1895661 - RNA, 19 nt, Artificial Sequence
  Description of Artificial Sequence: Synthetic oligonucleotide
  Antisense strand to SEQ ID NO: 1895660
auacacauuccugaggguc

SEQ ID NO: 1895662 - RNA, 19 nt, Artificial Sequence
  Description of Artificial Sequence: Synthetic oligonucleotide
  Sense strand starting at position 331 of SEQ ID NO: 1879276
caggaauguguaugaugca

SEQ ID NO: 1895663 - RNA, 19 nt, Artificial Sequence
  Description of Artificial Sequence: Synthetic oligonucleotide
  Antisense strand to SEQ ID NO: 1895662
ugcaucauacacauuccug

SEQ ID NO: 1895664 - RNA, 19 nt, Artificial Sequence
  Description of Artificial Sequence: Synthetic oligonucleotide
  Sense strand starting at position 336 of SEQ ID NO: 1879276
auguguaugaugcaacaga

SEQ ID NO: 1895665 - RNA, 19 nt, Artificial Sequence
  Description of Artificial Sequence: Synthetic oligonucleotide
  Antisense strand to SEQ ID NO: 1895664
ucuguugcaucauacacau

SEQ ID NO: 1895666 - RNA, 19 nt, Artificial Sequence
  Description of Artificial Sequence: Synthetic oligonucleotide
  Sense strand starting at position 402 of SEQ ID NO: 1879276
guuggagauuccuuucuuu

SEQ ID NO: 1895667 - RNA, 19 nt, Artificial Sequence
  Description of Artificial Sequence: Synthetic oligonucleotide
  Antisense strand to SEQ ID NO: 1895666
aaagaaaggaaucuccaac

SEQ ID NO: 1895668 - RNA, 19 nt, Artificial Sequence
  Description of Artificial Sequence: Synthetic oligonucleotide
  Sense strand starting at position 405 of SEQ ID NO: 1879276
ggagauuccuuucuuuaug

SEQ ID NO: 1895669 - RNA, 19 nt, Artificial Sequence
  Description of Artificial Sequence: Synthetic oligonucleotide
  Antisense strand to SEQ ID NO: 1895668
cauaaagaaaggaaucucc

SEQ ID NO: 1895670 - RNA, 19 nt, Artificial Sequence
  Description of Artificial Sequence: Synthetic oligonucleotide
  Sense strand starting at position 496 of SEQ ID NO: 1879276
augggcucauacucauaau

SEQ ID NO: 1895671 - RNA, 19 nt, Artificial Sequence
  Description of Artificial Sequence: Synthetic oligonucleotide
  Antisense strand to SEQ ID NO: 1895670
auuaugaguaugagcccau

SEQ ID NO: 1895672 - RNA, 19 nt, Artificial Sequence
  Description of Artificial Sequence: Synthetic oligonucleotide
  Sense strand starting at position 626 of SEQ ID NO: 1879276
uuggguauuccugagacuu

SEQ ID NO: 1895673 - RNA, 19 nt, Artificial Sequence
  Description of Artificial Sequence: Synthetic oligonucleotide
  Antisense strand to SEQ ID NO: 1895672
aagucucaggaauacccaa

SEQ ID NO: 1895674 - RNA, 19 nt, Artificial Sequence
  Description of Artificial Sequence: Synthetic oligonucleotide
  Sense strand starting at position 739 of SEQ ID NO: 1879276
uuugguaauguauaagcaa

SEQ ID NO: 1895675 - RNA, 19 nt, Artificial Sequence
  Description of Artificial Sequence: Synthetic oligonucleotide
  Antisense strand to SEQ ID NO: 1895674
uugcuuauacauuaccaaa

SEQ ID NO: 1895676 - RNA, 19 nt, Artificial Sequence
  Description of Artificial Sequence: Synthetic oligonucleotide
  Sense strand starting at position 784 of SEQ ID NO: 1879276
ggguuuccaugacuugauu

SEQ ID NO: 1895677 - RNA, 19 nt, Artificial Sequence
  Description of Artificial Sequence: Synthetic oligonucleotide
  Antisense strand to SEQ ID NO: 1895676
aaucaagucauggaaaccc

SEQ ID NO: 1895678 - RNA, 19 nt, Artificial Sequence
  Description of Artificial Sequence: Synthetic oligonucleotide
  Sense strand starting at position 798 of SEQ ID NO: 1879276
ugauuugagcuuugcauau

SEQ ID NO: 1895679 - RNA, 19 nt, Artificial Sequence
  Description of Artificial Sequence: Synthetic oligonucleotide
  Antisense strand to SEQ ID NO: 1895678
auaugcaaagcucaaauca

SEQ ID NO: 1895680 - RNA, 19 nt, Artificial Sequence
  Description of Artificial Sequence: Synthetic oligonucleotide
  Sense strand starting at position 872 of SEQ ID NO: 1879276
cucucaaugugucugacua

SEQ ID NO: 1895681 - RNA, 19 nt, Artificial Sequence
  Description of Artificial Sequence: Synthetic oligonucleotide
  Antisense strand to SEQ ID NO: 1895680
uagucagacacauugagag

SEQ ID NO: 1895682 - RNA, 19 nt, Artificial Sequence
  Description of Artificial Sequence: Synthetic oligonucleotide
  Sense strand starting at position 873 of SEQ ID NO: 1879276
ucucaaugugucugacuaa

SEQ ID NO: 1895683 - RNA, 19 nt, Artificial Sequence
  Description of Artificial Sequence: Synthetic oligonucleotide
  Antisense strand to SEQ ID NO: 1895682
uuagucagacacauugaga

SEQ ID NO: 1895684 - RNA, 19 nt, Artificial Sequence
  Description of Artificial Sequence: Synthetic oligonucleotide
  Sense strand starting at position 1011 of SEQ ID NO: 1879276
uuaagagucugccuuaagg

SEQ ID NO: 1895685 - RNA, 19 nt, Artificial Sequence
  Description of Artificial Sequence: Synthetic oligonucleotide
  Antisense strand to SEQ ID NO: 1895684
ccuuaaggcagacucuuaa

SEQ ID NO: 1895686 - RNA, 19 nt, Artificial Sequence
  Description of Artificial Sequence: Synthetic oligonucleotide
  Sense strand starting at position 1013 of SEQ ID NO: 1879276
aagagucugccuuaaggac

SEQ ID NO: 1895687 - RNA, 19 nt, Artificial Sequence
  Description of Artificial Sequence: Synthetic oligonucleotide
  Antisense strand to SEQ ID NO: 1895686
guccuuaaggcagacucuu

SEQ ID NO: 1895688 - RNA, 19 nt, Artificial Sequence
  Description of Artificial Sequence: Synthetic oligonucleotide
  Sense strand starting at position 1020 of SEQ ID NO: 1879276
ugccuuaaggacugcaaua

SEQ ID NO: 1895689 - RNA, 19 nt, Artificial Sequence
  Description of Artificial Sequence: Synthetic oligonucleotide
  Antisense strand to SEQ ID NO: 1895688
uauugcaguccuuaaggca

SEQ ID NO: 1895690 - RNA, 19 nt, Artificial Sequence
  Description of Artificial Sequence: Synthetic oligonucleotide
  Sense strand starting at position 1022 of SEQ ID NO: 1879276
ccuuaaggacugcaauauu

SEQ ID NO: 1895691 - RNA, 19 nt, Artificial Sequence
  Description of Artificial Sequence: Synthetic oligonucleotide
  Antisense strand to SEQ ID NO: 1895690
aauauugcaguccuuaagg

SEQ ID NO: 1895692 - RNA, 19 nt, Artificial Sequence
  Description of Artificial Sequence: Synthetic oligonucleotide
  Sense strand starting at position 1300 of SEQ ID NO: 1879276
acucuacauguuugcuaga

SEQ ID NO: 1895693 - RNA, 19 nt, Artificial Sequence
  Description of Artificial Sequence: Synthetic oligonucleotide
  Antisense strand to SEQ ID NO: 1895692
ucuagcaaacauguagagu

SEQ ID NO: 1895694 - RNA, 19 nt, Artificial Sequence
  Description of Artificial Sequence: Synthetic oligonucleotide
  Sense strand starting at position 1305 of SEQ ID NO: 1879276
acauguuugcuagauucug

SEQ ID NO: 1895695 - RNA, 19 nt, Artificial Sequence
  Description of Artificial Sequence: Synthetic oligonucleotide
  Antisense strand to SEQ ID NO: 1895694
cagaaucuagcaaacaugu

SEQ ID NO: 1895696 - RNA, 19 nt, Artificial Sequence
  Description of Artificial Sequence: Synthetic oligonucleotide
  Sense strand starting at position 1370 of SEQ ID NO: 1879276
cucagucauuauguaaaug

SEQ ID NO: 1895697 - RNA, 19 nt, Artificial Sequence
  Description of Artificial Sequence: Synthetic oligonucleotide
  Antisense strand to SEQ ID NO: 1895696
cauuuacauaaugacugag

SEQ ID NO: 1895698 - RNA, 19 nt, Artificial Sequence
  Description of Artificial Sequence: Synthetic oligonucleotide
  Sense strand starting at position 1461 of SEQ ID NO: 1879276
acacauauccugugauaga

SEQ ID NO: 1895699 - RNA, 19 nt, Artificial Sequence
  Description of Artificial Sequence: Synthetic oligonucleotide
  Antisense strand to SEQ ID NO: 1895698
ucuaucacaggauaugugu

SEQ ID NO: 1895700 - RNA, 19 nt, Artificial Sequence
  Description of Artificial Sequence: Synthetic oligonucleotide
  Sense strand starting at position 1482 of SEQ ID NO: 1879276
ugggcuuucuuaccucaaa

SEQ ID NO: 1895701 - RNA, 19 nt, Artificial Sequence
  Description of Artificial Sequence: Synthetic oligonucleotide
  Antisense strand to SEQ ID NO: 1895700
uuugagguaagaaagccca

SEQ ID NO: 1895702 - RNA, 19 nt, Artificial Sequence
  Description of Artificial Sequence: Synthetic oligonucleotide
  Sense strand starting at position 1570 of SEQ ID NO: 1879276
uuaauauucccauguggug

SEQ ID NO: 1895703 - RNA, 19 nt, Artificial Sequence
  Description of Artificial Sequence: Synthetic oligonucleotide
  Antisense strand to SEQ ID NO: 1895702
caccacaugggaauauuaa

SEQ ID NO: 1895704 - RNA, 19 nt, Artificial Sequence
  Description of Artificial Sequence: Synthetic oligonucleotide
  Sense strand starting at position 1577 of SEQ ID NO: 1879276
ucccaugugguggaucuua

SEQ ID NO: 1895705 - RNA, 19 nt, Artificial Sequence
  Description of Artificial Sequence: Synthetic oligonucleotide
  Antisense strand to SEQ ID NO: 1895704
uaagauccaccacauggga

SEQ ID NO: 1895706 - RNA, 19 nt, Artificial Sequence
  Description of Artificial Sequence: Synthetic oligonucleotide
  Sense strand starting at position 1641 of SEQ ID NO: 1879276
auggauauaugucuacgua

SEQ ID NO: 1895707 - RNA, 19 nt, Artificial Sequence
  Description of Artificial Sequence: Synthetic oligonucleotide
  Antisense strand to SEQ ID NO: 1895706
uacguagacauauauccau

SEQ ID NO: 1895708 - RNA, 19 nt, Artificial Sequence
  Description of Artificial Sequence: Synthetic oligonucleotide
  Sense strand starting at position 1642 of SEQ ID NO: 1879276
uggauauaugucuacguau

SEQ ID NO: 1895709 - RNA, 19 nt, Artificial Sequence
  Description of Artificial Sequence: Synthetic oligonucleotide
  Antisense strand to SEQ ID NO: 1895708
auacguagacauauaucca

SEQ ID NO: 1895710 - RNA, 19 nt, Artificial Sequence
  Description of Artificial Sequence: Synthetic oligonucleotide
  Sense strand starting at position 1644 of SEQ ID NO: 1879276
gauauaugucuacguauaa

SEQ ID NO: 1895711 - RNA, 19 nt, Artificial Sequence
  Description of Artificial Sequence: Synthetic oligonucleotide
  Antisense strand to SEQ ID NO: 1895710
uuauacguagacauauauc

SEQ ID NO: 1895712 - RNA, 19 nt, Artificial Sequence
  Description of Artificial Sequence: Synthetic oligonucleotide
  Sense strand starting at position 1764 of SEQ ID NO: 1879276
cacgacauaucauuaggga

SEQ ID NO: 1895713 - RNA, 19 nt, Artificial Sequence
  Description of Artificial Sequence: Synthetic oligonucleotide
  Antisense strand to SEQ ID NO: 1895712
ucccuaaugauaugucgug

SEQ ID NO: 1895714 - RNA, 19 nt, Artificial Sequence
  Description of Artificial Sequence: Synthetic oligonucleotide
  Sense strand starting at position 1802 of SEQ ID NO: 1879276
gugggaagaucaguaccuu

SEQ ID NO: 1895715 - RNA, 19 nt, Artificial Sequence
  Description of Artificial Sequence: Synthetic oligonucleotide
  Antisense strand to SEQ ID NO: 1895714
aagguacugaucuucccac

SEQ ID NO: 1895716 - RNA, 19 nt, Artificial Sequence
  Description of Artificial Sequence: Synthetic oligonucleotide
  Sense strand starting at position 1806 of SEQ ID NO: 1879276
gaagaucaguaccuuugau

SEQ ID NO: 1895717 - RNA, 19 nt, Artificial Sequence
  Description of Artificial Sequence: Synthetic oligonucleotide
  Antisense strand to SEQ ID NO: 1895716
aucaaagguacugaucuuc

SEQ ID NO: 1895718 - RNA, 19 nt, Artificial Sequence
  Description of Artificial Sequence: Synthetic oligonucleotide
  Sense strand starting at position 2023 of SEQ ID NO: 1879276
acguaagagcugcauacau

SEQ ID NO: 1895719 - RNA, 19 nt, Artificial Sequence
  Description of Artificial Sequence: Synthetic oligonucleotide
  Antisense strand to SEQ ID NO: 1895718
auguaugcagcucuuacgu

SEQ ID NO: 1895720 - RNA, 19 nt, Artificial Sequence
  Description of Artificial Sequence: Synthetic oligonucleotide
  Sense strand starting at position 2025 of SEQ ID NO: 1879276
guaagagcugcauacauca

SEQ ID NO: 1895721 - RNA, 19 nt, Artificial Sequence
  Description of Artificial Sequence: Synthetic oligonucleotide
  Antisense strand to SEQ ID NO: 1895720
ugauguaugcagcucuuac

SEQ ID NO: 1895722 - RNA, 19 nt, Artificial Sequence
  Description of Artificial Sequence: Synthetic oligonucleotide
  Sense strand starting at position 2030 of SEQ ID NO: 1879276
agcugcauacaucauagau

SEQ ID NO: 1895723 - RNA, 19 nt, Artificial Sequence
  Description of Artificial Sequence: Synthetic oligonucleotide
  Antisense strand to SEQ ID NO: 1895722
aucuaugauguaugcagcu

SEQ ID NO: 1895724 - RNA, 19 nt, Artificial Sequence
  Description of Artificial Sequence: Synthetic oligonucleotide
  Sense strand starting at position 2120 of SEQ ID NO: 1879276
ugacauagcgacuguaaau

SEQ ID NO: 1895725 - RNA, 19 nt, Artificial Sequence
  Description of Artificial Sequence: Synthetic oligonucleotide
  Antisense strand to SEQ ID NO: 1895724
auuuacagucgcuauguca

SEQ ID NO: 1895726 - RNA, 19 nt, Artificial Sequence
  Description of Artificial Sequence: Synthetic oligonucleotide
  Sense strand starting at position 2268 of SEQ ID NO: 1879276
gagggauauugaguccauc

SEQ ID NO: 1895727 - RNA, 19 nt, Artificial Sequence
  Description of Artificial Sequence: Synthetic oligonucleotide
  Antisense strand to SEQ ID NO: 1895726
gauggacucaauaucccuc

SEQ ID NO: 1895728 - RNA, 19 nt, Artificial Sequence
  Description of Artificial Sequence: Synthetic oligonucleotide
  Sense strand starting at position 3865 of SEQ ID NO: 1879276
gauaguaucuucucugguu

SEQ ID NO: 1895729 - RNA, 19 nt, Artificial Sequence
  Description of Artificial Sequence: Synthetic oligonucleotide
  Antisense strand to SEQ ID NO: 1895728
aaccagagaagauacuauc

SEQ ID NO: 1895730 - RNA, 19 nt, Artificial Sequence
  Description of Artificial Sequence: Synthetic oligonucleotide
  Sense strand starting at position 3872 of SEQ ID NO: 1879276
ucuucucugguugaucaga

SEQ ID NO: 1895731 - RNA, 19 nt, Artificial Sequence
  Description of Artificial Sequence: Synthetic oligonucleotide
  Antisense strand to SEQ ID NO: 1895730
ucugaucaaccagagaaga

SEQ ID NO: 1895732 - RNA, 19 nt, Artificial Sequence
  Description of Artificial Sequence: Synthetic oligonucleotide
  Sense strand starting at position 3883 of SEQ ID NO: 1879276
ugaucagagcauggucuuu

SEQ ID NO: 1895733 - RNA, 19 nt, Artificial Sequence
  Description of Artificial Sequence: Synthetic oligonucleotide
  Antisense strand to SEQ ID NO: 1895732
aaagaccaugcucugauca

SEQ ID NO: 1895734 - RNA, 19 nt, Artificial Sequence
  Description of Artificial Sequence: Synthetic oligonucleotide
  Sense strand starting at position 3927 of SEQ ID NO: 1879276
agaguagacuaucuccuaa

SEQ ID NO: 1895735 - RNA, 19 nt, Artificial Sequence
  Description of Artificial Sequence: Synthetic oligonucleotide
  Antisense strand to SEQ ID NO: 1895734
uuaggagauagucuacucu

SEQ ID NO: 1895736 - RNA, 19 nt, Artificial Sequence
  Description of Artificial Sequence: Synthetic oligonucleotide
  Sense strand starting at position 57 of SEQ ID NO: 1879277
aguagaaugccuuaucuac

SEQ ID NO: 1895737 - RNA, 19 nt, Artificial Sequence
  Description of Artificial Sequence: Synthetic oligonucleotide
  Antisense strand to SEQ ID NO: 1895736
guagauaaggcauucuacu

SEQ ID NO: 1895738 - RNA, 19 nt, Artificial Sequence
  Description of Artificial Sequence: Synthetic oligonucleotide
  Sense strand starting at position 74 of SEQ ID NO: 1879277
acauaauggcauugaauau

SEQ ID NO: 1895739 - RNA, 19 nt, Artificial Sequence
  Description of Artificial Sequence: Synthetic oligonucleotide
  Antisense strand to SEQ ID NO: 1895738
auauucaaugccauuaugu

SEQ ID NO: 1895740 - RNA, 19 nt, Artificial Sequence
  Description of Artificial Sequence: Synthetic oligonucleotide
  Sense strand starting at position 129 of SEQ ID NO: 1879277
ucauuacuucuaugaguua

SEQ ID NO: 1895741 - RNA, 19 nt, Artificial Sequence
  Description of Artificial Sequence: Synthetic oligonucleotide
  Antisense strand to SEQ ID NO: 1895740
uaacucauagaaguaauga

SEQ ID NO: 1895742 - RNA, 19 nt, Artificial Sequence
  Description of Artificial Sequence: Synthetic oligonucleotide
  Sense strand starting at position 136 of SEQ ID NO: 1879277
uucuaugaguuaucgacaa

SEQ ID NO: 1895743 - RNA, 19 nt, Artificial Sequence
  Description of Artificial Sequence: Synthetic oligonucleotide
  Antisense strand to SEQ ID NO: 1895742
uugucgauaacucauagaa

SEQ ID NO: 1895744 - RNA, 19 nt, Artificial Sequence
  Description of Artificial Sequence: Synthetic oligonucleotide
  Sense strand starting at position 333 of SEQ ID NO: 1879277
gcuaguuuaucuccuaaug

SEQ ID NO: 1895745 - RNA, 19 nt, Artificial Sequence
  Description of Artificial Sequence: Synthetic oligonucleotide
  Antisense strand to SEQ ID NO: 1895744
cauuaggagauaaacuagc

SEQ ID NO: 1895746 - RNA, 19 nt, Artificial Sequence
  Description of Artificial Sequence: Synthetic oligonucleotide
  Sense strand starting at position 480 of SEQ ID NO: 1879277
ggcuucucagauuaauauu

SEQ ID NO: 1895747 - RNA, 19 nt, Artificial Sequence
  Description of Artificial Sequence: Synthetic oligonucleotide
  Antisense strand to SEQ ID NO: 1895746
aauauuaaucugagaagcc

SEQ ID NO: 1895748 - RNA, 19 nt, Artificial Sequence
  Description of Artificial Sequence: Synthetic oligonucleotide
  Sense strand starting at position 510 of SEQ ID NO: 1879277
acgguauccuuguuaucaa

SEQ ID NO: 1895749 - RNA, 19 nt, Artificial Sequence
  Description of Artificial Sequence: Synthetic oligonucleotide
  Antisense strand to SEQ ID NO: 1895748
uugauaacaaggauaccgu

SEQ ID NO: 1895750 - RNA, 19 nt, Artificial Sequence
  Description of Artificial Sequence: Synthetic oligonucleotide
  Sense strand starting at position 513 of SEQ ID NO: 1879277
guauccuuguuaucaauag

SEQ ID NO: 1895751 - RNA, 19 nt, Artificial Sequence
  Description of Artificial Sequence: Synthetic oligonucleotide
  Antisense strand to SEQ ID NO: 1895750
cuauugauaacaaggauac

SEQ ID NO: 1895752 - RNA, 19 nt, Artificial Sequence
  Description of Artificial Sequence: Synthetic oligonucleotide
  Sense strand starting at position 529 of SEQ ID NO: 1879277
uagagagaucguuggcagu

SEQ ID NO: 1895753 - RNA, 19 nt, Artificial Sequence
  Description of Artificial Sequence: Synthetic oligonucleotide
  Antisense strand to SEQ ID NO: 1895752
acugccaacgaucucucua

SEQ ID NO: 1895754 - RNA, 19 nt, Artificial Sequence
  Description of Artificial Sequence: Synthetic oligonucleotide
  Sense strand starting at position 531 of SEQ ID NO: 1879277
gagagaucguuggcaguuu

SEQ ID NO: 1895755 - RNA, 19 nt, Artificial Sequence
  Description of Artificial Sequence: Synthetic oligonucleotide
  Antisense strand to SEQ ID NO: 1895754
aaacugccaacgaucucuc

SEQ ID NO: 1895756 - RNA, 19 nt, Artificial Sequence
  Description of Artificial Sequence: Synthetic oligonucleotide
  Sense strand starting at position 552 of SEQ ID NO: 1879277
uguguuucuucgccgauuu

SEQ ID NO: 1895757 - RNA, 19 nt, Artificial Sequence
  Description of Artificial Sequence: Synthetic oligonucleotide
  Antisense strand to SEQ ID NO: 1895756
aaaucggcgaagaaacaca

SEQ ID NO: 1895758 - RNA, 19 nt, Artificial Sequence
  Description of Artificial Sequence: Synthetic oligonucleotide
  Sense strand starting at position 570 of SEQ ID NO: 1879277
uucugugaucaccggaaca

SEQ ID NO: 1895759 - RNA, 19 nt, Artificial Sequence
  Description of Artificial Sequence: Synthetic oligonucleotide
  Antisense strand to SEQ ID NO: 1895758
uguuccggugaucacagaa

SEQ ID NO: 1895760 - RNA, 19 nt, Artificial Sequence
  Description of Artificial Sequence: Synthetic oligonucleotide
  Sense strand starting at position 595 of SEQ ID NO: 1879277
uaaauaucucaggguucgu

SEQ ID NO: 1895761 - RNA, 19 nt, Artificial Sequence
  Description of Artificial Sequence: Synthetic oligonucleotide
  Antisense strand to SEQ ID NO: 1895760
acgaacccugagauauuua

SEQ ID NO: 1895762 - RNA, 19 nt, Artificial Sequence
  Description of Artificial Sequence: Synthetic oligonucleotide
  Sense strand starting at position 633 of SEQ ID NO: 1879277
agcuguuaaccugaccaca

SEQ ID NO: 1895763 - RNA, 19 nt, Artificial Sequence
  Description of Artificial Sequence: Synthetic oligonucleotide
  Antisense strand to SEQ ID NO: 1895762
uguggucagguuaacagcu

SEQ ID NO: 1895764 - RNA, 19 nt, Artificial Sequence
  Description of Artificial Sequence: Synthetic oligonucleotide
  Sense strand starting at position 672 of SEQ ID NO: 1879277
aaugguuugagaggguguu

SEQ ID NO: 1895765 - RNA, 19 nt, Artificial Sequence
  Description of Artificial Sequence: Synthetic oligonucleotide
  Antisense strand to SEQ ID NO: 1895764
aacacccucucaaaccauu

SEQ ID NO: 1895766 - RNA, 19 nt, Artificial Sequence
  Description of Artificial Sequence: Synthetic oligonucleotide
  Sense strand starting at position 833 of SEQ ID NO: 1879277
guaacaaaggaucggguuu

SEQ ID NO: 1895767 - RNA, 19 nt, Artificial Sequence
  Description of Artificial Sequence: Synthetic oligonucleotide
  Antisense strand to SEQ ID NO: 1895766
aaacccgauccuuuguuac

SEQ ID NO: 1895768 - RNA, 19 nt, Artificial Sequence
  Description of Artificial Sequence: Synthetic oligonucleotide
  Sense strand starting at position 883 of SEQ ID NO: 1879277
cggucuugcaaauaaacgu

SEQ ID NO: 1895769 - RNA, 19 nt, Artificial Sequence
  Description of Artificial Sequence: Synthetic oligonucleotide
  Antisense strand to SEQ ID NO: 1895768
acguuuauuugcaagaccg

SEQ ID NO: 1895770 - RNA, 19 nt, Artificial Sequence
  Description of Artificial Sequence: Synthetic oligonucleotide
  Sense strand starting at position 913 of SEQ ID NO: 1879277
ggcuucuccgcacagacaa

SEQ ID NO: 1895771 - RNA, 19 nt, Artificial Sequence
  Description of Artificial Sequence: Synthetic oligonucleotide
  Antisense strand to SEQ ID NO: 1895770
uugucugugcggagaagcc

SEQ ID NO: 1895772 - RNA, 19 nt, Artificial Sequence
  Description of Artificial Sequence: Synthetic oligonucleotide
  Sense strand starting at position 1309 of SEQ ID NO: 1879277
agaggaucccgucagauuc

SEQ ID NO: 1895773 - RNA, 19 nt, Artificial Sequence
  Description of Artificial Sequence: Synthetic oligonucleotide
  Antisense strand to SEQ ID NO: 1895772
gaaucugacgggauccucu

SEQ ID NO: 1895774 - RNA, 19 nt, Artificial Sequence
  Description of Artificial Sequence: Synthetic oligonucleotide
  Sense strand starting at position 2532 of SEQ ID NO: 1879277
cguccuuucccagagaaag

SEQ ID NO: 1895775 - RNA, 19 nt, Artificial Sequence
  Description of Artificial Sequence: Synthetic oligonucleotide
  Antisense strand to SEQ ID NO: 1895774
cuuucucugggaaaggacg

SEQ ID NO: 1895776 - RNA, 19 nt, Artificial Sequence
  Description of Artificial Sequence: Synthetic oligonucleotide
  Sense strand starting at position 2617 of SEQ ID NO: 1879277
gagccauucgacuauugcu

SEQ ID NO: 1895777 - RNA, 19 nt, Artificial Sequence
  Description of Artificial Sequence: Synthetic oligonucleotide
  Antisense strand to SEQ ID NO: 1895776
agcaauagucgaauggcuc

SEQ ID NO: 1895778 - RNA, 19 nt, Artificial Sequence
  Description of Artificial Sequence: Synthetic oligonucleotide
  Sense strand starting at position 2696 of SEQ ID NO: 1879277
ggcugcaaugucuaauaca

SEQ ID NO: 1895779 - RNA, 19 nt, Artificial Sequence
  Description of Artificial Sequence: Synthetic oligonucleotide
  Antisense strand to SEQ ID NO: 1895778
uguauuagacauugcagcc

SEQ ID NO: 1895780 - RNA, 19 nt, Artificial Sequence
  Description of Artificial Sequence: Synthetic oligonucleotide
  Sense strand starting at position 2746 of SEQ ID NO: 1879277
gcccauguugugcucagua

SEQ ID NO: 1895781 - RNA, 19 nt, Artificial Sequence
  Description of Artificial Sequence: Synthetic oligonucleotide
  Antisense strand to SEQ ID NO: 1895780
uacugagcacaacaugggc

SEQ ID NO: 1895782 - RNA, 19 nt, Artificial Sequence
  Description of Artificial Sequence: Synthetic oligonucleotide
  Sense strand starting at position 2748 of SEQ ID NO: 1879277
ccauguugugcucaguauu

SEQ ID NO: 1895783 - RNA, 19 nt, Artificial Sequence
  Description of Artificial Sequence: Synthetic oligonucleotide
  Antisense strand to SEQ ID NO: 1895782
aauacugagcacaacaugg

SEQ ID NO: 1895784 - RNA, 19 nt, Artificial Sequence
  Description of Artificial Sequence: Synthetic oligonucleotide
  Sense strand starting at position 2751 of SEQ ID NO: 1879277
uguugugcucaguauuaca

SEQ ID NO: 1895785 - RNA, 19 nt, Artificial Sequence
  Description of Artificial Sequence: Synthetic oligonucleotide
  Antisense strand to SEQ ID NO: 1895784
uguaauacugagcacaaca

SEQ ID NO: 1895786 - RNA, 19 nt, Artificial Sequence
  Description of Artificial Sequence: Synthetic oligonucleotide
  Sense strand starting at position 2781 of SEQ ID NO: 1879277
guucuuaguugugaaauuu

SEQ ID NO: 1895787 - RNA, 19 nt, Artificial Sequence
  Description of Artificial Sequence: Synthetic oligonucleotide
  Antisense strand to SEQ ID NO: 1895786
aaauuucacaacuaagaac

SEQ ID NO: 1895788 - RNA, 19 nt, Artificial Sequence
  Description of Artificial Sequence: Synthetic oligonucleotide
  Sense strand starting at position 2799 of SEQ ID NO: 1879277
ugacaugaccgcuaguuaa

SEQ ID NO: 1895789 - RNA, 19 nt, Artificial Sequence
  Description of Artificial Sequence: Synthetic oligonucleotide
  Antisense strand to SEQ ID NO: 1895788
uuaacuagcggucauguca

SEQ ID NO: 1895790 - RNA, 19 nt, Artificial Sequence
  Description of Artificial Sequence: Synthetic oligonucleotide
  Sense strand starting at position 2802 of SEQ ID NO: 1879277
caugaccgcuaguuaaagu

SEQ ID NO: 1895791 - RNA, 19 nt, Artificial Sequence
  Description of Artificial Sequence: Synthetic oligonucleotide
  Antisense strand to SEQ ID NO: 1895790
acuuuaacuagcggucaug

SEQ ID NO: 1895792 - RNA, 19 nt, Artificial Sequence
  Description of Artificial Sequence: Synthetic oligonucleotide
  Sense strand starting at position 2859 of SEQ ID NO: 1879277
gcagcuauagcaugaaguu

SEQ ID NO: 1895793 - RNA, 19 nt, Artificial Sequence
  Description of Artificial Sequence: Synthetic oligonucleotide
  Antisense strand to SEQ ID NO: 1895792
aacuucaugcuauagcugc

SEQ ID NO: 1895794 - RNA, 19 nt, Artificial Sequence
  Description of Artificial Sequence: Synthetic oligonucleotide
  Sense strand starting at position 2860 of SEQ ID NO: 1879277
cagcuauagcaugaaguua

SEQ ID NO: 1895795 - RNA, 19 nt, Artificial Sequence
  Description of Artificial Sequence: Synthetic oligonucleotide
  Antisense strand to SEQ ID NO: 1895794
uaacuucaugcuauagcug

SEQ ID NO: 1895796 - RNA, 19 nt, Artificial Sequence
  Description of Artificial Sequence: Synthetic oligonucleotide
  Sense strand starting at position 2897 of SEQ ID NO: 1879277
uggauaaguuuacuauacu

SEQ ID NO: 1895797 - RNA, 19 nt, Artificial Sequence
  Description of Artificial Sequence: Synthetic oligonucleotide
  Antisense strand to SEQ ID NO: 1895796
aguauaguaaacuuaucca

SEQ ID NO: 1895798 - RNA, 19 nt, Artificial Sequence
  Description of Artificial Sequence: Synthetic oligonucleotide
  Sense strand starting at position 2962 of SEQ ID NO: 1879277
uaaugaugugguugaaacg

SEQ ID NO: 1895799 - RNA, 19 nt, Artificial Sequence
  Description of Artificial Sequence: Synthetic oligonucleotide
  Antisense strand to SEQ ID NO: 1895798
cguuucaaccacaucauua

SEQ ID NO: 1895800 - RNA, 19 nt, Artificial Sequence
  Description of Artificial Sequence: Synthetic oligonucleotide
  Sense strand starting at position 2963 of SEQ ID NO: 1879277
aaugaugugguugaaacga

SEQ ID NO: 1895801 - RNA, 19 nt, Artificial Sequence
  Description of Artificial Sequence: Synthetic oligonucleotide
  Antisense strand to SEQ ID NO: 1895800
ucguuucaaccacaucauu

SEQ ID NO: 1895802 - RNA, 19 nt, Artificial Sequence
  Description of Artificial Sequence: Synthetic oligonucleotide
  Sense strand starting at position 3081 of SEQ ID NO: 1879277
acucguauuuaaugacuua

SEQ ID NO: 1895803 - RNA, 19 nt, Artificial Sequence
  Description of Artificial Sequence: Synthetic oligonucleotide
  Antisense strand to SEQ ID NO: 1895802
uaagucauuaaauacgagu

SEQ ID NO: 1895804 - RNA, 19 nt, Artificial Sequence
  Description of Artificial Sequence: Synthetic oligonucleotide
  Sense strand starting at position 3196 of SEQ ID NO: 1879277
cccauuuggcgcugugauc

SEQ ID NO: 1895805 - RNA, 19 nt, Artificial Sequence
  Description of Artificial Sequence: Synthetic oligonucleotide
  Antisense strand to SEQ ID NO: 1895804
gaucacagcgccaaauggg

SEQ ID NO: 1895806 - RNA, 19 nt, Artificial Sequence
  Description of Artificial Sequence: Synthetic oligonucleotide
  Sense strand starting at position 3205 of SEQ ID NO: 1879277
cgcugugaucagcauucua

SEQ ID NO: 1895807 - RNA, 19 nt, Artificial Sequence
  Description of Artificial Sequence: Synthetic oligonucleotide
  Antisense strand to SEQ ID NO: 1895806
uagaaugcugaucacagcg

SEQ ID NO: 1895808 - RNA, 19 nt, Artificial Sequence
  Description of Artificial Sequence: Synthetic oligonucleotide
  Sense strand starting at position 3427 of SEQ ID NO: 1879277
agggcuuugaaauaagugu

SEQ ID NO: 1895809 - RNA, 19 nt, Artificial Sequence
  Description of Artificial Sequence: Synthetic oligonucleotide
  Antisense strand to SEQ ID NO: 1895808
acacuuauuucaaagcccu

SEQ ID NO: 1895810 - RNA, 19 nt, Artificial Sequence
  Description of Artificial Sequence: Synthetic oligonucleotide
  Sense strand starting at position 3431 of SEQ ID NO: 1879277
cuuugaaauaaguguagga

SEQ ID NO: 1895811 - RNA, 19 nt, Artificial Sequence
  Description of Artificial Sequence: Synthetic oligonucleotide
  Antisense strand to SEQ ID NO: 1895810
uccuacacuuauuucaaag

SEQ ID NO: 1895812 - RNA, 19 nt, Artificial Sequence
  Description of Artificial Sequence: Synthetic oligonucleotide
  Sense strand starting at position 3944 of SEQ ID NO: 1879277
gaagucaccuagucauuga

SEQ ID NO: 1895813 - RNA, 19 nt, Artificial Sequence
  Description of Artificial Sequence: Synthetic oligonucleotide
  Antisense strand to SEQ ID NO: 1895812
ucaaugacuaggugacuuc

SEQ ID NO: 1895814 - RNA, 19 nt, Artificial Sequence
  Description of Artificial Sequence: Synthetic oligonucleotide
  Sense strand starting at position 3948 of SEQ ID NO: 1879277
ucaccuagucauugaagcu

SEQ ID NO: 1895815 - RNA, 19 nt, Artificial Sequence
  Description of Artificial Sequence: Synthetic oligonucleotide
  Antisense strand to SEQ ID NO: 1895814
agcuucaaugacuagguga

SEQ ID NO: 1895816 - RNA, 19 nt, Artificial Sequence
  Description of Artificial Sequence: Synthetic oligonucleotide
  Sense strand starting at position 109 of SEQ ID NO: 1879278
agaaccuuauccucggauu

SEQ ID NO: 1895817 - RNA, 19 nt, Artificial Sequence
  Description of Artificial Sequence: Synthetic oligonucleotide
  Antisense strand to SEQ ID NO: 1895816
aauccgaggauaagguucu

SEQ ID NO: 1895818 - RNA, 19 nt, Artificial Sequence
  Description of Artificial Sequence: Synthetic oligonucleotide
  Sense strand starting at position 147 of SEQ ID NO: 1879278
acacuuaugucccuacgau

SEQ ID NO: 1895819 - RNA, 19 nt, Artificial Sequence
  Description of Artificial Sequence: Synthetic oligonucleotide
  Antisense strand to SEQ ID NO: 1895818
aucguagggacauaagugu

SEQ ID NO: 1895820 - RNA, 19 nt, Artificial Sequence
  Description of Artificial Sequence: Synthetic oligonucleotide
  Sense strand starting at position 472 of SEQ ID NO: 1879278
gagcuaagguccuagauuc

SEQ ID NO: 1895821 - RNA, 19 nt, Artificial Sequence
  Description of Artificial Sequence: Synthetic oligonucleotide
  Antisense strand to SEQ ID NO: 1895820
gaaucuaggaccuuagcuc

SEQ ID NO: 1895822 - RNA, 19 nt, Artificial Sequence
  Description of Artificial Sequence: Synthetic oligonucleotide
  Sense strand starting at position 479 of SEQ ID NO: 1879278
gguccuagauucugagcca

SEQ ID NO: 1895823 - RNA, 19 nt, Artificial Sequence
  Description of Artificial Sequence: Synthetic oligonucleotide
  Antisense strand to SEQ ID NO: 1895822
uggcucagaaucuaggacc

SEQ ID NO: 1895824 - RNA, 19 nt, Artificial Sequence
  Description of Artificial Sequence: Synthetic oligonucleotide
  Sense strand starting at position 482 of SEQ ID NO: 1879278
ccuagauucugagccagaa

SEQ ID NO: 1895825 - RNA, 19 nt, Artificial Sequence
  Description of Artificial Sequence: Synthetic oligonucleotide
  Antisense strand to SEQ ID NO: 1895824
uucuggcucagaaucuagg

SEQ ID NO: 1895826 - RNA, 19 nt, Artificial Sequence
  Description of Artificial Sequence: Synthetic oligonucleotide
  Sense strand starting at position 582 of SEQ ID NO: 1879278
ggccauaacugcucaguuu

SEQ ID NO: 1895827 - RNA, 19 nt, Artificial Sequence
  Description of Artificial Sequence: Synthetic oligonucleotide
  Antisense strand to SEQ ID NO: 1895826
aaacugagcaguuauggcc

SEQ ID NO: 1895828 - RNA, 19 nt, Artificial Sequence
  Description of Artificial Sequence: Synthetic oligonucleotide
  Sense strand starting at position 845 of SEQ ID NO: 1879278
aaggcauucuuggaacaga

SEQ ID NO: 1895829 - RNA, 19 nt, Artificial Sequence
  Description of Artificial Sequence: Synthetic oligonucleotide
  Antisense strand to SEQ ID NO: 1895828
ucuguuccaagaaugccuu

SEQ ID NO: 1895830 - RNA, 19 nt, Artificial Sequence
  Description of Artificial Sequence: Synthetic oligonucleotide
  Sense strand starting at position 1099 of SEQ ID NO: 1879278
acgucuccugccugacaca

SEQ ID NO: 1895831 - RNA, 19 nt, Artificial Sequence
  Description of Artificial Sequence: Synthetic oligonucleotide
  Antisense strand to SEQ ID NO: 1895830
ugugucaggcaggagacgu

SEQ ID NO: 1895832 - RNA, 19 nt, Artificial Sequence
  Description of Artificial Sequence: Synthetic oligonucleotide
  Sense strand starting at position 1336 of SEQ ID NO: 1879278
agguuccucccugacacau

SEQ ID NO: 1895833 - RNA, 19 nt, Artificial Sequence
  Description of Artificial Sequence: Synthetic oligonucleotide
  Antisense strand to SEQ ID NO: 1895832
augugucagggaggaaccu

SEQ ID NO: 1895834 - RNA, 19 nt, Artificial Sequence
  Description of Artificial Sequence: Synthetic oligonucleotide
  Sense strand starting at position 1537 of SEQ ID NO: 1879278
aaaggugccuggcaaaguu

SEQ ID NO: 1895835 - RNA, 19 nt, Artificial Sequence
  Description of Artificial Sequence: Synthetic oligonucleotide
  Antisense strand to SEQ ID NO: 1895834
aacuuugccaggcaccuuu

SEQ ID NO: 1895836 - RNA, 19 nt, Artificial Sequence
  Description of Artificial Sequence: Synthetic oligonucleotide
  Sense strand starting at position 1944 of SEQ ID NO: 1879278
ccgacuuucugucaccaga

SEQ ID NO: 1895837 - RNA, 19 nt, Artificial Sequence
  Description of Artificial Sequence: Synthetic oligonucleotide
  Antisense strand to SEQ ID NO: 1895836
ucuggugacagaaagucgg

SEQ ID NO: 1895838 - RNA, 19 nt, Artificial Sequence
  Description of Artificial Sequence: Synthetic oligonucleotide
  Sense strand starting at position 2366 of SEQ ID NO: 1879278
uggucuuagcgggagggaa

SEQ ID NO: 1895839 - RNA, 19 nt, Artificial Sequence
  Description of Artificial Sequence: Synthetic oligonucleotide
  Antisense strand to SEQ ID NO: 1895838
uucccucccgcuaagacca

SEQ ID NO: 1895840 - RNA, 19 nt, Artificial Sequence
  Description of Artificial Sequence: Synthetic oligonucleotide
  Sense strand starting at position 2485 of SEQ ID NO: 1879278
cauagugaaucacuggcua

SEQ ID NO: 1895841 - RNA, 19 nt, Artificial Sequence
  Description of Artificial Sequence: Synthetic oligonucleotide
  Antisense strand to SEQ ID NO: 1895840
uagccagugauucacuaug

SEQ ID NO: 1895842 - RNA, 19 nt, Artificial Sequence
  Description of Artificial Sequence: Synthetic oligonucleotide
  Sense strand starting at position 2489 of SEQ ID NO: 1879278
gugaaucacuggcuaaucu

SEQ ID NO: 1895843 - RNA, 19 nt, Artificial Sequence
  Description of Artificial Sequence: Synthetic oligonucleotide
  Antisense strand to SEQ ID NO: 1895842
agauuagccagugauucac

SEQ ID NO: 1895844 - RNA, 19 nt, Artificial Sequence
  Description of Artificial Sequence: Synthetic oligonucleotide
  Sense strand starting at position 2498 of SEQ ID NO: 1879278
uggcuaaucuggccuucga

SEQ ID NO: 1895845 - RNA, 19 nt, Artificial Sequence
  Description of Artificial Sequence: Synthetic oligonucleotide
  Antisense strand to SEQ ID NO: 1895844
ucgaaggccagauuagcca

SEQ ID NO: 1895846 - RNA, 19 nt, Artificial Sequence
  Description of Artificial Sequence: Synthetic oligonucleotide
  Sense strand starting at position 2502 of SEQ ID NO: 1879278
uaaucuggccuucgaggua

SEQ ID NO: 1895847 - RNA, 19 nt, Artificial Sequence
  Description of Artificial Sequence: Synthetic oligonucleotide
  Antisense strand to SEQ ID NO: 1895846
uaccucgaaggccagauua

SEQ ID NO: 1895848 - RNA, 19 nt, Artificial Sequence
  Description of Artificial Sequence: Synthetic oligonucleotide
  Sense strand starting at position 2507 of SEQ ID NO: 1879278
uggccuucgagguagugaa

SEQ ID NO: 1895849 - RNA, 19 nt, Artificial Sequence
  Description of Artificial Sequence: Synthetic oligonucleotide
  Antisense strand to SEQ ID NO: 1895848
uucacuaccucgaaggcca

SEQ ID NO: 1895850 - RNA, 19 nt, Artificial Sequence
  Description of Artificial Sequence: Synthetic oligonucleotide
  Sense strand starting at position 2535 of SEQ ID NO: 1879278
gggaaaugaagcugacugu

SEQ ID NO: 1895851 - RNA, 19 nt, Artificial Sequence
  Description of Artificial Sequence: Synthetic oligonucleotide
  Antisense strand to SEQ ID NO: 1895850
acagucagcuucauuuccc

SEQ ID NO: 1895852 - RNA, 19 nt, Artificial Sequence
  Description of Artificial Sequence: Synthetic oligonucleotide
  Sense strand starting at position 2565 of SEQ ID NO: 1879278
guaggucuugaaggccaaa

SEQ ID NO: 1895853 - RNA, 19 nt, Artificial Sequence
  Description of Artificial Sequence: Synthetic oligonucleotide
  Antisense strand to SEQ ID NO: 1895852
uuuggccuucaagaccuac

SEQ ID NO: 1895854 - RNA, 19 nt, Artificial Sequence
  Description of Artificial Sequence: Synthetic oligonucleotide
  Sense strand starting at position 2649 of SEQ ID NO: 1879278
ucaagcuuguaucauuagu

SEQ ID NO: 1895855 - RNA, 19 nt, Artificial Sequence
  Description of Artificial Sequence: Synthetic oligonucleotide
  Antisense strand to SEQ ID NO: 1895854
acuaaugauacaagcuuga

SEQ ID NO: 1895856 - RNA, 19 nt, Artificial Sequence
  Description of Artificial Sequence: Synthetic oligonucleotide
  Sense strand starting at position 2718 of SEQ ID NO: 1879278
agucuaucuggcugaauca

SEQ ID NO: 1895857 - RNA, 19 nt, Artificial Sequence
  Description of Artificial Sequence: Synthetic oligonucleotide
  Antisense strand to SEQ ID NO: 1895856
ugauucagccagauagacu

SEQ ID NO: 1895858 - RNA, 19 nt, Artificial Sequence
  Description of Artificial Sequence: Synthetic oligonucleotide
  Sense strand starting at position 2855 of SEQ ID NO: 1879278
uggacuggcucucuauaua

SEQ ID NO: 1895859 - RNA, 19 nt, Artificial Sequence
  Description of Artificial Sequence: Synthetic oligonucleotide
  Antisense strand to SEQ ID NO: 1895858
uauauagagagccagucca

SEQ ID NO: 1895860 - RNA, 19 nt, Artificial Sequence
  Description of Artificial Sequence: Synthetic oligonucleotide
  Sense strand starting at position 3016 of SEQ ID NO: 1879278
cuaacaacugcuuguauga

SEQ ID NO: 1895861 - RNA, 19 nt, Artificial Sequence
  Description of Artificial Sequence: Synthetic oligonucleotide
  Antisense strand to SEQ ID NO: 1895860
ucauacaagcaguuguuag

SEQ ID NO: 1895862 - RNA, 19 nt, Artificial Sequence
  Description of Artificial Sequence: Synthetic oligonucleotide
  Sense strand starting at position 3025 of SEQ ID NO: 1879278
gcuuguaugauuggauggu

SEQ ID NO: 1895863 - RNA, 19 nt, Artificial Sequence
  Description of Artificial Sequence: Synthetic oligonucleotide
  Antisense strand to SEQ ID NO: 1895862
accauccaaucauacaagc

SEQ ID NO: 1895864 - RNA, 19 nt, Artificial Sequence
  Description of Artificial Sequence: Synthetic oligonucleotide
  Sense strand starting at position 3029 of SEQ ID NO: 1879278
guaugauuggaugguguaa

SEQ ID NO: 1895865 - RNA, 19 nt, Artificial Sequence
  Description of Artificial Sequence: Synthetic oligonucleotide
  Antisense strand to SEQ ID NO: 1895864
uuacaccauccaaucauac

SEQ ID NO: 1895866 - RNA, 19 nt, Artificial Sequence
  Description of Artificial Sequence: Synthetic oligonucleotide
  Sense strand starting at position 3031 of SEQ ID NO: 1879278
augauuggaugguguaagu

SEQ ID NO: 1895867 - RNA, 19 nt, Artificial Sequence
  Description of Artificial Sequence: Synthetic oligonucleotide
  Antisense strand to SEQ ID NO: 1895866
acuuacaccauccaaucau

SEQ ID NO: 1895868 - RNA, 19 nt, Artificial Sequence
  Description of Artificial Sequence: Synthetic oligonucleotide
  Sense strand starting at position 3041 of SEQ ID NO: 1879278
gguguaagugcggacagaa

SEQ ID NO: 1895869 - RNA, 19 nt, Artificial Sequence
  Description of Artificial Sequence: Synthetic oligonucleotide
  Antisense strand to SEQ ID NO: 1895868
uucuguccgcacuuacacc

SEQ ID NO: 1895870 - RNA, 19 nt, Artificial Sequence
  Description of Artificial Sequence: Synthetic oligonucleotide
  Sense strand starting at position 3051 of SEQ ID NO: 1879278
cggacagaauuagggaauu

SEQ ID NO: 1895871 - RNA, 19 nt, Artificial Sequence
  Description of Artificial Sequence: Synthetic oligonucleotide
  Antisense strand to SEQ ID NO: 1895870
aauucccuaauucuguccg

SEQ ID NO: 1895872 - RNA, 19 nt, Artificial Sequence
  Description of Artificial Sequence: Synthetic oligonucleotide
  Sense strand starting at position 3947 of SEQ ID NO: 1879278
gagcaagacucgucuccag

SEQ ID NO: 1895873 - RNA, 19 nt, Artificial Sequence
  Description of Artificial Sequence: Synthetic oligonucleotide
  Antisense strand to SEQ ID NO: 1895872
cuggagacgagucuugcuc

SEQ ID NO: 1895874 - RNA, 19 nt, Artificial Sequence
  Description of Artificial Sequence: Synthetic oligonucleotide
  Sense strand starting at position 3950 of SEQ ID NO: 1879278
caagacucgucuccagaaa

SEQ ID NO: 1895875 - RNA, 19 nt, Artificial Sequence
  Description of Artificial Sequence: Synthetic oligonucleotide
  Antisense strand to SEQ ID NO: 1895874
uuucuggagacgagucuug

SEQ ID NO: 1895876 - RNA, 19 nt, Artificial Sequence
  Description of Artificial Sequence: Synthetic oligonucleotide
  Sense strand starting at position 36 of SEQ ID NO: 1879279
aaacuuugggcugaagcaa

SEQ ID NO: 1895877 - RNA, 19 nt, Artificial Sequence
  Description of Artificial Sequence: Synthetic oligonucleotide
  Antisense strand to SEQ ID NO: 1895876
uugcuucagcccaaaguuu

SEQ ID NO: 1895878 - RNA, 19 nt, Artificial Sequence
  Description of Artificial Sequence: Synthetic oligonucleotide
  Sense strand starting at position 233 of SEQ ID NO: 1879279
uggaccauucuuuauaagu

SEQ ID NO: 1895879 - RNA, 19 nt, Artificial Sequence
  Description of Artificial Sequence: Synthetic oligonucleotide
  Antisense strand to SEQ ID NO: 1895878
acuuauaaagaauggucca

SEQ ID NO: 1895880 - RNA, 19 nt, Artificial Sequence
  Description of Artificial Sequence: Synthetic oligonucleotide
  Sense strand starting at position 302 of SEQ ID NO: 1879279
ccaagauguucuguccaag

SEQ ID NO: 1895881 - RNA, 19 nt, Artificial Sequence
  Description of Artificial Sequence: Synthetic oligonucleotide
  Antisense strand to SEQ ID NO: 1895880
cuuggacagaacaucuugg

SEQ ID NO: 1895882 - RNA, 19 nt, Artificial Sequence
  Description of Artificial Sequence: Synthetic oligonucleotide
  Sense strand starting at position 312 of SEQ ID NO: 1879279
cuguccaaguuguuaacaa

SEQ ID NO: 1895883 - RNA, 19 nt, Artificial Sequence
  Description of Artificial Sequence: Synthetic oligonucleotide
  Antisense strand to SEQ ID NO: 1895882
uuguuaacaacuuggacag

SEQ ID NO: 1895884 - RNA, 19 nt, Artificial Sequence
  Description of Artificial Sequence: Synthetic oligonucleotide
  Sense strand starting at position 391 of SEQ ID NO: 1879279
ucucuaugguguguuacaa

SEQ ID NO: 1895885 - RNA, 19 nt, Artificial Sequence
  Description of Artificial Sequence: Synthetic oligonucleotide
  Antisense strand to SEQ ID NO: 1895884
uuguaacacaccauagaga

SEQ ID NO: 1895886 - RNA, 19 nt, Artificial Sequence
  Description of Artificial Sequence: Synthetic oligonucleotide
  Sense strand starting at position 469 of SEQ ID NO: 1879279
gcagaauaaugucccaauu

SEQ ID NO: 1895887 - RNA, 19 nt, Artificial Sequence
  Description of Artificial Sequence: Synthetic oligonucleotide
  Antisense strand to SEQ ID NO: 1895886
aauugggacauuauucugc

SEQ ID NO: 1895888 - RNA, 19 nt, Artificial Sequence
  Description of Artificial Sequence: Synthetic oligonucleotide
  Sense strand starting at position 491 of SEQ ID NO: 1879279
guuacugguggccaauauu

SEQ ID NO: 1895889 - RNA, 19 nt, Artificial Sequence
  Description of Artificial Sequence: Synthetic oligonucleotide
  Antisense strand to SEQ ID NO: 1895888
aauauuggccaccaguaac

SEQ ID NO: 1895890 - RNA, 19 nt, Artificial Sequence
  Description of Artificial Sequence: Synthetic oligonucleotide
  Sense strand starting at position 643 of SEQ ID NO: 1879279
uuucguguuggcuuuggua

SEQ ID NO: 1895891 - RNA, 19 nt, Artificial Sequence
  Description of Artificial Sequence: Synthetic oligonucleotide
  Antisense strand to SEQ ID NO: 1895890
uaccaaagccaacacgaaa

SEQ ID NO: 1895892 - RNA, 19 nt, Artificial Sequence
  Description of Artificial Sequence: Synthetic oligonucleotide
  Sense strand starting at position 682 of SEQ ID NO: 1879279
cugucaaagugucuuaaau

SEQ ID NO: 1895893 - RNA, 19 nt, Artificial Sequence
  Description of Artificial Sequence: Synthetic oligonucleotide
  Antisense strand to SEQ ID NO: 1895892
auuuaagacacuuugacag

SEQ ID NO: 1895894 - RNA, 19 nt, Artificial Sequence
  Description of Artificial Sequence: Synthetic oligonucleotide
  Sense strand starting at position 783 of SEQ ID NO: 1879279
cacguuauccuuuaaguug

SEQ ID NO: 1895895 - RNA, 19 nt, Artificial Sequence
  Description of Artificial Sequence: Synthetic oligonucleotide
  Antisense strand to SEQ ID NO: 1895894
caacuuaaaggauaacgug

SEQ ID NO: 1895896 - RNA, 19 nt, Artificial Sequence
  Description of Artificial Sequence: Synthetic oligonucleotide
  Sense strand starting at position 792 of SEQ ID NO: 1879279
cuuuaaguuguggaucuuu

SEQ ID NO: 1895897 - RNA, 19 nt, Artificial Sequence
  Description of Artificial Sequence: Synthetic oligonucleotide
  Antisense strand to SEQ ID NO: 1895896
aaagauccacaacuuaaag

SEQ ID NO: 1895898 - RNA, 19 nt, Artificial Sequence
  Description of Artificial Sequence: Synthetic oligonucleotide
  Sense strand starting at position 814 of SEQ ID NO: 1879279
uggcuaguugguuaugaug

SEQ ID NO: 1895899 - RNA, 19 nt, Artificial Sequence
  Description of Artificial Sequence: Synthetic oligonucleotide
  Antisense strand to SEQ ID NO: 1895898
caucauaaccaacuagcca

SEQ ID NO: 1895900 - RNA, 19 nt, Artificial Sequence
  Description of Artificial Sequence: Synthetic oligonucleotide
  Sense strand starting at position 1223 of SEQ ID NO: 1879279
agccucacucucgaaucaa

SEQ ID NO: 1895901 - RNA, 19 nt, Artificial Sequence
  Description of Artificial Sequence: Synthetic oligonucleotide
  Antisense strand to SEQ ID NO: 1895900
uugauucgagagugaggcu

SEQ ID NO: 1895902 - RNA, 19 nt, Artificial Sequence
  Description of Artificial Sequence: Synthetic oligonucleotide
  Sense strand starting at position 1345 of SEQ ID NO: 1879279
gccgucuuccuaggaaaca

SEQ ID NO: 1895903 - RNA, 19 nt, Artificial Sequence
  Description of Artificial Sequence: Synthetic oligonucleotide
  Antisense strand to SEQ ID NO: 1895902
uguuuccuaggaagacggc

SEQ ID NO: 1895904 - RNA, 19 nt, Artificial Sequence
  Description of Artificial Sequence: Synthetic oligonucleotide
  Sense strand starting at position 2121 of SEQ ID NO: 1879279
gguugaaacuaucccugca

SEQ ID NO: 1895905 - RNA, 19 nt, Artificial Sequence
  Description of Artificial Sequence: Synthetic oligonucleotide
  Antisense strand to SEQ ID NO: 1895904
ugcagggauaguuucaacc

SEQ ID NO: 1895906 - RNA, 19 nt, Artificial Sequence
  Description of Artificial Sequence: Synthetic oligonucleotide
  Sense strand starting at position 2123 of SEQ ID NO: 1879279
uugaaacuaucccugcaga

SEQ ID NO: 1895907 - RNA, 19 nt, Artificial Sequence
  Description of Artificial Sequence: Synthetic oligonucleotide
  Antisense strand to SEQ ID NO: 1895906
ucugcagggauaguuucaa

SEQ ID NO: 1895908 - RNA, 19 nt, Artificial Sequence
  Description of Artificial Sequence: Synthetic oligonucleotide
  Sense strand starting at position 2348 of SEQ ID NO: 1879279
ucuucuagccugugaagac

SEQ ID NO: 1895909 - RNA, 19 nt, Artificial Sequence
  Description of Artificial Sequence: Synthetic oligonucleotide
  Antisense strand to SEQ ID NO: 1895908
gucuucacaggcuagaaga

SEQ ID NO: 1895910 - RNA, 19 nt, Artificial Sequence
  Description of Artificial Sequence: Synthetic oligonucleotide
  Sense strand starting at position 2472 of SEQ ID NO: 1879279
cguagagcucaagaagcaa

SEQ ID NO: 1895911 - RNA, 19 nt, Artificial Sequence
  Description of Artificial Sequence: Synthetic oligonucleotide
  Antisense strand to SEQ ID NO: 1895910
uugcuucuugagcucuacg

SEQ ID NO: 1895912 - RNA, 19 nt, Artificial Sequence
  Description of Artificial Sequence: Synthetic oligonucleotide
  Sense strand starting at position 2502 of SEQ ID NO: 1879279
aguagaugcuauguaaacu

SEQ ID NO: 1895913 - RNA, 19 nt, Artificial Sequence
  Description of Artificial Sequence: Synthetic oligonucleotide
  Antisense strand to SEQ ID NO: 1895912
aguuuacauagcaucuacu

SEQ ID NO: 1895914 - RNA, 19 nt, Artificial Sequence
  Description of Artificial Sequence: Synthetic oligonucleotide
  Sense strand starting at position 2510 of SEQ ID NO: 1879279
cuauguaaacugcacaaga

SEQ ID NO: 1895915 - RNA, 19 nt, Artificial Sequence
  Description of Artificial Sequence: Synthetic oligonucleotide
  Antisense strand to SEQ ID NO: 1895914
ucuugugcaguuuacauag

SEQ ID NO: 1895916 - RNA, 19 nt, Artificial Sequence
  Description of Artificial Sequence: Synthetic oligonucleotide
  Sense strand starting at position 2527 of SEQ ID NO: 1879279
gacguugaccuuuguuaaa

SEQ ID NO: 1895917 - RNA, 19 nt, Artificial Sequence
  Description of Artificial Sequence: Synthetic oligonucleotide
  Antisense strand to SEQ ID NO: 1895916
uuuaacaaaggucaacguc

SEQ ID NO: 1895918 - RNA, 19 nt, Artificial Sequence
  Description of Artificial Sequence: Synthetic oligonucleotide
  Sense strand starting at position 2540 of SEQ ID NO: 1879279
guuaaauccgaacacuguu

SEQ ID NO: 1895919 - RNA, 19 nt, Artificial Sequence
  Description of Artificial Sequence: Synthetic oligonucleotide
  Antisense strand to SEQ ID NO: 1895918
aacaguguucggauuuaac

SEQ ID NO: 1895920 - RNA, 19 nt, Artificial Sequence
  Description of Artificial Sequence: Synthetic oligonucleotide
  Sense strand starting at position 2546 of SEQ ID NO: 1879279
uccgaacacuguuuaagau

SEQ ID NO: 1895921 - RNA, 19 nt, Artificial Sequence
  Description of Artificial Sequence: Synthetic oligonucleotide
  Antisense strand to SEQ ID NO: 1895920
aucuuaaacaguguucgga

SEQ ID NO: 1895922 - RNA, 19 nt, Artificial Sequence
  Description of Artificial Sequence: Synthetic oligonucleotide
  Sense strand starting at position 2547 of SEQ ID NO: 1879279
ccgaacacuguuuaagaua

SEQ ID NO: 1895923 - RNA, 19 nt, Artificial Sequence
  Description of Artificial Sequence: Synthetic oligonucleotide
  Antisense strand to SEQ ID NO: 1895922
uaucuuaaacaguguucgg

SEQ ID NO: 1895924 - RNA, 19 nt, Artificial Sequence
  Description of Artificial Sequence: Synthetic oligonucleotide
  Sense strand starting at position 2584 of SEQ ID NO: 1879279
gaggcuguagcuuggaaua

SEQ ID NO: 1895925 - RNA, 19 nt, Artificial Sequence
  Description of Artificial Sequence: Synthetic oligonucleotide
  Antisense strand to SEQ ID NO: 1895924
uauuccaagcuacagccuc

SEQ ID NO: 1895926 - RNA, 19 nt, Artificial Sequence
  Description of Artificial Sequence: Synthetic oligonucleotide
  Sense strand starting at position 2695 of SEQ ID NO: 1879279
uucucuccaggauguuaua

SEQ ID NO: 1895927 - RNA, 19 nt, Artificial Sequence
  Description of Artificial Sequence: Synthetic oligonucleotide
  Antisense strand to SEQ ID NO: 1895926
uauaacauccuggagagaa

SEQ ID NO: 1895928 - RNA, 19 nt, Artificial Sequence
  Description of Artificial Sequence: Synthetic oligonucleotide
  Sense strand starting at position 2889 of SEQ ID NO: 1879279
augcuuauuccaggcagga

SEQ ID NO: 1895929 - RNA, 19 nt, Artificial Sequence
  Description of Artificial Sequence: Synthetic oligonucleotide
  Antisense strand to SEQ ID NO: 1895928
uccugccuggaauaagcau

SEQ ID NO: 1895930 - RNA, 19 nt, Artificial Sequence
  Description of Artificial Sequence: Synthetic oligonucleotide
  Sense strand starting at position 2891 of SEQ ID NO: 1879279
gcuuauuccaggcaggaau

SEQ ID NO: 1895931 - RNA, 19 nt, Artificial Sequence
  Description of Artificial Sequence: Synthetic oligonucleotide
  Antisense strand to SEQ ID NO: 1895930
auuccugccuggaauaagc

SEQ ID NO: 1895932 - RNA, 19 nt, Artificial Sequence
  Description of Artificial Sequence: Synthetic oligonucleotide
  Sense strand starting at position 2919 of SEQ ID NO: 1879279
guaauugguacguauuacu

SEQ ID NO: 1895933 - RNA, 19 nt, Artificial Sequence
  Description of Artificial Sequence: Synthetic oligonucleotide
  Antisense strand to SEQ ID NO: 1895932
aguaauacguaccaauuac

SEQ ID NO: 1895934 - RNA, 19 nt, Artificial Sequence
  Description of Artificial Sequence: Synthetic oligonucleotide
  Sense strand starting at position 3001 of SEQ ID NO: 1879279
ucaaguuggcagugagaga

SEQ ID NO: 1895935 - RNA, 19 nt, Artificial Sequence
  Description of Artificial Sequence: Synthetic oligonucleotide
  Antisense strand to SEQ ID NO: 1895934
ucucucacugccaacuuga

SEQ ID NO: 1895936 - RNA, 19 nt, Artificial Sequence
  Description of Artificial Sequence: Synthetic oligonucleotide
  Sense strand starting at position 3002 of SEQ ID NO: 1879279
caaguuggcagugagagaa

SEQ ID NO: 1895937 - RNA, 19 nt, Artificial Sequence
  Description of Artificial Sequence: Synthetic oligonucleotide
  Antisense strand to SEQ ID NO: 1895936
uucucucacugccaacuug

SEQ ID NO: 1895938 - RNA, 19 nt, Artificial Sequence
  Description of Artificial Sequence: Synthetic oligonucleotide
  Sense strand starting at position 3012 of SEQ ID NO: 1879279
gugagagaauaugaauaau

SEQ ID NO: 1895939 - RNA, 19 nt, Artificial Sequence
  Description of Artificial Sequence: Synthetic oligonucleotide
  Antisense strand to SEQ ID NO: 1895938
auuauucauauucucucac

SEQ ID NO: 1895940 - RNA, 19 nt, Artificial Sequence
  Description of Artificial Sequence: Synthetic oligonucleotide
  Sense strand starting at position 3293 of SEQ ID NO: 1879279
auugacugggcuugcuaaa

SEQ ID NO: 1895941 - RNA, 19 nt, Artificial Sequence
  Description of Artificial Sequence: Synthetic oligonucleotide
  Antisense strand to SEQ ID NO: 1895940
uuuagcaagcccagucaau

SEQ ID NO: 1895942 - RNA, 19 nt, Artificial Sequence
  Description of Artificial Sequence: Synthetic oligonucleotide
  Sense strand starting at position 3392 of SEQ ID NO: 1879279
guuucccuauaauuaggua

SEQ ID NO: 1895943 - RNA, 19 nt, Artificial Sequence
  Description of Artificial Sequence: Synthetic oligonucleotide
  Antisense strand to SEQ ID NO: 1895942
uaccuaauuauagggaaac

SEQ ID NO: 1895944 - RNA, 19 nt, Artificial Sequence
  Description of Artificial Sequence: Synthetic oligonucleotide
  Sense strand starting at position 3396 of SEQ ID NO: 1879279
cccuauaauuagguagagu

SEQ ID NO: 1895945 - RNA, 19 nt, Artificial Sequence
  Description of Artificial Sequence: Synthetic oligonucleotide
  Antisense strand to SEQ ID NO: 1895944
acucuaccuaauuauaggg

SEQ ID NO: 1895946 - RNA, 19 nt, Artificial Sequence
  Description of Artificial Sequence: Synthetic oligonucleotide
  Sense strand starting at position 3460 of SEQ ID NO: 1879279
uuucccaguuagucucaua

SEQ ID NO: 1895947 - RNA, 19 nt, Artificial Sequence
  Description of Artificial Sequence: Synthetic oligonucleotide
  Antisense strand to SEQ ID NO: 1895946
uaugagacuaacugggaaa

SEQ ID NO: 1895948 - RNA, 19 nt, Artificial Sequence
  Description of Artificial Sequence: Synthetic oligonucleotide
  Sense strand starting at position 3542 of SEQ ID NO: 1879279
ucaguugaaucagccuauu

SEQ ID NO: 1895949 - RNA, 19 nt, Artificial Sequence
  Description of Artificial Sequence: Synthetic oligonucleotide
  Antisense strand to SEQ ID NO: 1895948
aauaggcugauucaacuga

SEQ ID NO: 1895950 - RNA, 19 nt, Artificial Sequence
  Description of Artificial Sequence: Synthetic oligonucleotide
  Sense strand starting at position 3554 of SEQ ID NO: 1879279
gccuauuuaugacaagaaa

SEQ ID NO: 1895951 - RNA, 19 nt, Artificial Sequence
  Description of Artificial Sequence: Synthetic oligonucleotide
  Antisense strand to SEQ ID NO: 1895950
uuucuugucauaaauaggc

SEQ ID NO: 1895952 - RNA, 19 nt, Artificial Sequence
  Description of Artificial Sequence: Synthetic oligonucleotide
  Sense strand starting at position 3834 of SEQ ID NO: 1879279
uuccuccuuggugaaauaa

SEQ ID NO: 1895953 - RNA, 19 nt, Artificial Sequence
  Description of Artificial Sequence: Synthetic oligonucleotide
  Antisense strand to SEQ ID NO: 1895952
uuauuucaccaaggaggaa

SEQ ID NO: 1895954 - RNA, 19 nt, Artificial Sequence
  Description of Artificial Sequence: Synthetic oligonucleotide
  Sense strand starting at position 3905 of SEQ ID NO: 1879279
gaauaaggguccuuuguuu

SEQ ID NO: 1895955 - RNA, 19 nt, Artificial Sequence
  Description of Artificial Sequence: Synthetic oligonucleotide
  Antisense strand to SEQ ID NO: 1895954
aaacaaaggacccuuauuc

SEQ ID NO: 1895956 - RNA, 19 nt, Artificial Sequence
  Description of Artificial Sequence: Synthetic oligonucleotide
  Sense strand starting at position 78 of SEQ ID NO: 1879280
agacaccaugcauguguua

SEQ ID NO: 1895957 - RNA, 19 nt, Artificial Sequence
  Description of Artificial Sequence: Synthetic oligonucleotide
  Antisense strand to SEQ ID NO: 1895956
uaacacaugcauggugucu

SEQ ID NO: 1895958 - RNA, 19 nt, Artificial Sequence
  Description of Artificial Sequence: Synthetic oligonucleotide
  Sense strand starting at position 87 of SEQ ID NO: 1879280
gcauguguuaccuacagug

SEQ ID NO: 1895959 - RNA, 19 nt, Artificial Sequence
  Description of Artificial Sequence: Synthetic oligonucleotide
  Antisense strand to SEQ ID NO: 1895958
cacuguagguaacacaugc

SEQ ID NO: 1895960 - RNA, 19 nt, Artificial Sequence
  Description of Artificial Sequence: Synthetic oligonucleotide
  Sense strand starting at position 118 of SEQ ID NO: 1879280
guauucugauagcuuugga

SEQ ID NO: 1895961 - RNA, 19 nt, Artificial Sequence
  Description of Artificial Sequence: Synthetic oligonucleotide
  Antisense strand to SEQ ID NO: 1895960
uccaaagcuaucagaauac

SEQ ID NO: 1895962 - RNA, 19 nt, Artificial Sequence
  Description of Artificial Sequence: Synthetic oligonucleotide
  Sense strand starting at position 121 of SEQ ID NO: 1879280
uucugauagcuuuggacag

SEQ ID NO: 1895963 - RNA, 19 nt, Artificial Sequence
  Description of Artificial Sequence: Synthetic oligonucleotide
  Antisense strand to SEQ ID NO: 1895962
cuguccaaagcuaucagaa

SEQ ID NO: 1895964 - RNA, 19 nt, Artificial Sequence
  Description of Artificial Sequence: Synthetic oligonucleotide
  Sense strand starting at position 125 of SEQ ID NO: 1879280
gauagcuuuggacaguuau

SEQ ID NO: 1895965 - RNA, 19 nt, Artificial Sequence
  Description of Artificial Sequence: Synthetic oligonucleotide
  Antisense strand to SEQ ID NO: 1895964
auaacuguccaaagcuauc

SEQ ID NO: 1895966 - RNA, 19 nt, Artificial Sequence
  Description of Artificial Sequence: Synthetic oligonucleotide
  Sense strand starting at position 181 of SEQ ID NO: 1879280
gcuuacagcaagugagaaa

SEQ ID NO: 1895967 - RNA, 19 nt, Artificial Sequence
  Description of Artificial Sequence: Synthetic oligonucleotide
  Antisense strand to SEQ ID NO: 1895966
uuucucacuugcuguaagc

SEQ ID NO: 1895968 - RNA, 19 nt, Artificial Sequence
  Description of Artificial Sequence: Synthetic oligonucleotide
  Sense strand starting at position 297 of SEQ ID NO: 1879280
uuuggcagccugugaauuu

SEQ ID NO: 1895969 - RNA, 19 nt, Artificial Sequence
  Description of Artificial Sequence: Synthetic oligonucleotide
  Antisense strand to SEQ ID NO: 1895968
aaauucacaggcugccaaa

SEQ ID NO: 1895970 - RNA, 19 nt, Artificial Sequence
  Description of Artificial Sequence: Synthetic oligonucleotide
  Sense strand starting at position 425 of SEQ ID NO: 1879280
gcagcaguccgggaucaug

SEQ ID NO: 1895971 - RNA, 19 nt, Artificial Sequence
  Description of Artificial Sequence: Synthetic oligonucleotide
  Antisense strand to SEQ ID NO: 1895970
caugaucccggacugcugc

SEQ ID NO: 1895972 - RNA, 19 nt, Artificial Sequence
  Description of Artificial Sequence: Synthetic oligonucleotide
  Sense strand starting at position 452 of SEQ ID NO: 1879280
cugauuuccugcuagauuu

SEQ ID NO: 1895973 - RNA, 19 nt, Artificial Sequence
  Description of Artificial Sequence: Synthetic oligonucleotide
  Antisense strand to SEQ ID NO: 1895972
aaaucuagcaggaaaucag

SEQ ID NO: 1895974 - RNA, 19 nt, Artificial Sequence
  Description of Artificial Sequence: Synthetic oligonucleotide
  Sense strand starting at position 486 of SEQ ID NO: 1879280
agcagaguaucuuuaucuc

SEQ ID NO: 1895975 - RNA, 19 nt, Artificial Sequence
  Description of Artificial Sequence: Synthetic oligonucleotide
  Antisense strand to SEQ ID NO: 1895974
gagauaaagauacucugcu

SEQ ID NO: 1895976 - RNA, 19 nt, Artificial Sequence
  Description of Artificial Sequence: Synthetic oligonucleotide
  Sense strand starting at position 489 of SEQ ID NO: 1879280
agaguaucuuuaucucucu

SEQ ID NO: 1895977 - RNA, 19 nt, Artificial Sequence
  Description of Artificial Sequence: Synthetic oligonucleotide
  Antisense strand to SEQ ID NO: 1895976
agagagauaaagauacucu

SEQ ID NO: 1895978 - RNA, 19 nt, Artificial Sequence
  Description of Artificial Sequence: Synthetic oligonucleotide
  Sense strand starting at position 548 of SEQ ID NO: 1879280
agggccacgccuuagaauu

SEQ ID NO: 1895979 - RNA, 19 nt, Artificial Sequence
  Description of Artificial Sequence: Synthetic oligonucleotide
  Antisense strand to SEQ ID NO: 1895978
aauucuaaggcguggcccu

SEQ ID NO: 1895980 - RNA, 19 nt, Artificial Sequence
  Description of Artificial Sequence: Synthetic oligonucleotide
  Sense strand starting at position 559 of SEQ ID NO: 1879280
uuagaauugcucugagagu

SEQ ID NO: 1895981 - RNA, 19 nt, Artificial Sequence
  Description of Artificial Sequence: Synthetic oligonucleotide
  Antisense strand to SEQ ID NO: 1895980
acucucagagcaauucuaa

SEQ ID NO: 1895982 - RNA, 19 nt, Artificial Sequence
  Description of Artificial Sequence: Synthetic oligonucleotide
  Sense strand starting at position 576 of SEQ ID NO: 1879280
guaccaagugccugauuuc

SEQ ID NO: 1895983 - RNA, 19 nt, Artificial Sequence
  Description of Artificial Sequence: Synthetic oligonucleotide
  Antisense strand to SEQ ID NO: 1895982
gaaaucaggcacuugguac

SEQ ID NO: 1895984 - RNA, 19 nt, Artificial Sequence
  Description of Artificial Sequence: Synthetic oligonucleotide
  Sense strand starting at position 579 of SEQ ID NO: 1879280
ccaagugccugauuucuua

SEQ ID NO: 1895985 - RNA, 19 nt, Artificial Sequence
  Description of Artificial Sequence: Synthetic oligonucleotide
  Antisense strand to SEQ ID NO: 1895984
uaagaaaucaggcacuugg

SEQ ID NO: 1895986 - RNA, 19 nt, Artificial Sequence
  Description of Artificial Sequence: Synthetic oligonucleotide
  Sense strand starting at position 583 of SEQ ID NO: 1879280
gugccugauuucuuagagu

SEQ ID NO: 1895987 - RNA, 19 nt, Artificial Sequence
  Description of Artificial Sequence: Synthetic oligonucleotide
  Antisense strand to SEQ ID NO: 1895986
acucuaagaaaucaggcac

SEQ ID NO: 1895988 - RNA, 19 nt, Artificial Sequence
  Description of Artificial Sequence: Synthetic oligonucleotide
  Sense strand starting at position 586 of SEQ ID NO: 1879280
ccugauuucuuagaguccu

SEQ ID NO: 1895989 - RNA, 19 nt, Artificial Sequence
  Description of Artificial Sequence: Synthetic oligonucleotide
  Antisense strand to SEQ ID NO: 1895988
aggacucuaagaaaucagg

SEQ ID NO: 1895990 - RNA, 19 nt, Artificial Sequence
  Description of Artificial Sequence: Synthetic oligonucleotide
  Sense strand starting at position 592 of SEQ ID NO: 1879280
uucuuagaguccuuaccag

SEQ ID NO: 1895991 - RNA, 19 nt, Artificial Sequence
  Description of Artificial Sequence: Synthetic oligonucleotide
  Antisense strand to SEQ ID NO: 1895990
cugguaaggacucuaagaa

SEQ ID NO: 1895992 - RNA, 19 nt, Artificial Sequence
  Description of Artificial Sequence: Synthetic oligonucleotide
  Sense strand starting at position 612 of SEQ ID NO: 1879280
aggagauguuggcuguuga

SEQ ID NO: 1895993 - RNA, 19 nt, Artificial Sequence
  Description of Artificial Sequence: Synthetic oligonucleotide
  Antisense strand to SEQ ID NO: 1895992
ucaacagccaacaucuccu

SEQ ID NO: 1895994 - RNA, 19 nt, Artificial Sequence
  Description of Artificial Sequence: Synthetic oligonucleotide
  Sense strand starting at position 613 of SEQ ID NO: 1879280
ggagauguuggcuguugau

SEQ ID NO: 1895995 - RNA, 19 nt, Artificial Sequence
  Description of Artificial Sequence: Synthetic oligonucleotide
  Antisense strand to SEQ ID NO: 1895994
aucaacagccaacaucucc

SEQ ID NO: 1895996 - RNA, 19 nt, Artificial Sequence
  Description of Artificial Sequence: Synthetic oligonucleotide
  Sense strand starting at position 688 of SEQ ID NO: 1879280
uguguugcuggugaaauca

SEQ ID NO: 1895997 - RNA, 19 nt, Artificial Sequence
  Description of Artificial Sequence: Synthetic oligonucleotide
  Antisense strand to SEQ ID NO: 1895996
ugauuucaccagcaacaca

SEQ ID NO: 1895998 - RNA, 19 nt, Artificial Sequence
  Description of Artificial Sequence: Synthetic oligonucleotide
  Sense strand starting at position 774 of SEQ ID NO: 1879280
gcuucuuacucacuggaaa

SEQ ID NO: 1895999 - RNA, 19 nt, Artificial Sequence
  Description of Artificial Sequence: Synthetic oligonucleotide
  Antisense strand to SEQ ID NO: 1895998
uuuccagugaguaagaagc

SEQ ID NO: 1896000 - RNA, 19 nt, Artificial Sequence
  Description of Artificial Sequence: Synthetic oligonucleotide
  Sense strand starting at position 775 of SEQ ID NO: 1879280
cuucuuacucacuggaaag

SEQ ID NO: 1896001 - RNA, 19 nt, Artificial Sequence
  Description of Artificial Sequence: Synthetic oligonucleotide
  Antisense strand to SEQ ID NO: 1896000
cuuuccagugaguaagaag

SEQ ID NO: 1896002 - RNA, 19 nt, Artificial Sequence
  Description of Artificial Sequence: Synthetic oligonucleotide
  Sense strand starting at position 839 of SEQ ID NO: 1879280
ggaaaccugucuguagcua

SEQ ID NO: 1896003 - RNA, 19 nt, Artificial Sequence
  Description of Artificial Sequence: Synthetic oligonucleotide
  Antisense strand to SEQ ID NO: 1896002
uagcuacagacagguuucc

SEQ ID NO: 1896004 - RNA, 19 nt, Artificial Sequence
  Description of Artificial Sequence: Synthetic oligonucleotide
  Sense strand starting at position 840 of SEQ ID NO: 1879280
gaaaccugucuguagcuaa

SEQ ID NO: 1896005 - RNA, 19 nt, Artificial Sequence
  Description of Artificial Sequence: Synthetic oligonucleotide
  Antisense strand to SEQ ID NO: 1896004
uuagcuacagacagguuuc

SEQ ID NO: 1896006 - RNA, 19 nt, Artificial Sequence
  Description of Artificial Sequence: Synthetic oligonucleotide
  Sense strand starting at position 1259 of SEQ ID NO: 1879280
uugaucuaguucccuagau

SEQ ID NO: 1896007 - RNA, 19 nt, Artificial Sequence
  Description of Artificial Sequence: Synthetic oligonucleotide
  Antisense strand to SEQ ID NO: 1896006
aucuagggaacuagaucaa

SEQ ID NO: 1896008 - RNA, 19 nt, Artificial Sequence
  Description of Artificial Sequence: Synthetic oligonucleotide
  Sense strand starting at position 1260 of SEQ ID NO: 1879280
ugaucuaguucccuagaug

SEQ ID NO: 1896009 - RNA, 19 nt, Artificial Sequence
  Description of Artificial Sequence: Synthetic oligonucleotide
  Antisense strand to SEQ ID NO: 1896008
caucuagggaacuagauca

SEQ ID NO: 1896010 - RNA, 19 nt, Artificial Sequence
  Description of Artificial Sequence: Synthetic oligonucleotide
  Sense strand starting at position 2039 of SEQ ID NO: 1879280
gacggcucucccgacgaau

SEQ ID NO: 1896011 - RNA, 19 nt, Artificial Sequence
  Description of Artificial Sequence: Synthetic oligonucleotide
  Antisense strand to SEQ ID NO: 1896010
auucgucgggagagccguc

SEQ ID NO: 1896012 - RNA, 19 nt, Artificial Sequence
  Description of Artificial Sequence: Synthetic oligonucleotide
  Sense strand starting at position 2145 of SEQ ID NO: 1879280
cggacaguaucugugggua

SEQ ID NO: 1896013 - RNA, 19 nt, Artificial Sequence
  Description of Artificial Sequence: Synthetic oligonucleotide
  Antisense strand to SEQ ID NO: 1896012
uacccacagauacuguccg

SEQ ID NO: 1896014 - RNA, 19 nt, Artificial Sequence
  Description of Artificial Sequence: Synthetic oligonucleotide
  Sense strand starting at position 2494 of SEQ ID NO: 1879280
ugcagaucaacacgugauu

SEQ ID NO: 1896015 - RNA, 19 nt, Artificial Sequence
  Description of Artificial Sequence: Synthetic oligonucleotide
  Antisense strand to SEQ ID NO: 1896014
aaucacguguugaucugca

SEQ ID NO: 1896016 - RNA, 19 nt, Artificial Sequence
  Description of Artificial Sequence: Synthetic oligonucleotide
  Sense strand starting at position 2631 of SEQ ID NO: 1879280
uugggauagacgcagacuu

SEQ ID NO: 1896017 - RNA, 19 nt, Artificial Sequence
  Description of Artificial Sequence: Synthetic oligonucleotide
  Antisense strand to SEQ ID NO: 1896016
aagucugcgucuaucccaa

SEQ ID NO: 1896018 - RNA, 19 nt, Artificial Sequence
  Description of Artificial Sequence: Synthetic oligonucleotide
  Sense strand starting at position 2787 of SEQ ID NO: 1879280
cuaguaagcggugacucau

SEQ ID NO: 1896019 - RNA, 19 nt, Artificial Sequence
  Description of Artificial Sequence: Synthetic oligonucleotide
  Antisense strand to SEQ ID NO: 1896018
augagucaccgcuuacuag

SEQ ID NO: 1896020 - RNA, 19 nt, Artificial Sequence
  Description of Artificial Sequence: Synthetic oligonucleotide
  Sense strand starting at position 2793 of SEQ ID NO: 1879280
agcggugacucauuuaacu

SEQ ID NO: 1896021 - RNA, 19 nt, Artificial Sequence
  Description of Artificial Sequence: Synthetic oligonucleotide
  Antisense strand to SEQ ID NO: 1896020
aguuaaaugagucaccgcu

SEQ ID NO: 1896022 - RNA, 19 nt, Artificial Sequence
  Description of Artificial Sequence: Synthetic oligonucleotide
  Sense strand starting at position 2802 of SEQ ID NO: 1879280
ucauuuaacuccgagaagg

SEQ ID NO: 1896023 - RNA, 19 nt, Artificial Sequence
  Description of Artificial Sequence: Synthetic oligonucleotide
  Antisense strand to SEQ ID NO: 1896022
ccuucucggaguuaaauga

SEQ ID NO: 1896024 - RNA, 19 nt, Artificial Sequence
  Description of Artificial Sequence: Synthetic oligonucleotide
  Sense strand starting at position 2820 of SEQ ID NO: 1879280
gcaccucuugaggaaccua

SEQ ID NO: 1896025 - RNA, 19 nt, Artificial Sequence
  Description of Artificial Sequence: Synthetic oligonucleotide
  Antisense strand to SEQ ID NO: 1896024
uagguuccucaagaggugc

SEQ ID NO: 1896026 - RNA, 19 nt, Artificial Sequence
  Description of Artificial Sequence: Synthetic oligonucleotide
  Sense strand starting at position 2847 of SEQ ID NO: 1879280
ccguuagaucauuggcaag

SEQ ID NO: 1896027 - RNA, 19 nt, Artificial Sequence
  Description of Artificial Sequence: Synthetic oligonucleotide
  Antisense strand to SEQ ID NO: 1896026
cuugccaaugaucuaacgg

SEQ ID NO: 1896028 - RNA, 19 nt, Artificial Sequence
  Description of Artificial Sequence: Synthetic oligonucleotide
  Sense strand starting at position 2849 of SEQ ID NO: 1879280
guuagaucauuggcaaguc

SEQ ID NO: 1896029 - RNA, 19 nt, Artificial Sequence
  Description of Artificial Sequence: Synthetic oligonucleotide
  Antisense strand to SEQ ID NO: 1896028
gacuugccaaugaucuaac

SEQ ID NO: 1896030 - RNA, 19 nt, Artificial Sequence
  Description of Artificial Sequence: Synthetic oligonucleotide
  Sense strand starting at position 2990 of SEQ ID NO: 1879280
gcaauugcgcgaucucgga

SEQ ID NO: 1896031 - RNA, 19 nt, Artificial Sequence
  Description of Artificial Sequence: Synthetic oligonucleotide
  Antisense strand to SEQ ID NO: 1896030
uccgagaucgcgcaauugc

SEQ ID NO: 1896032 - RNA, 19 nt, Artificial Sequence
  Description of Artificial Sequence: Synthetic oligonucleotide
  Sense strand starting at position 3253 of SEQ ID NO: 1879280
gcgcuaggccaagaaggau

SEQ ID NO: 1896033 - RNA, 19 nt, Artificial Sequence
  Description of Artificial Sequence: Synthetic oligonucleotide
  Antisense strand to SEQ ID NO: 1896032
auccuucuuggccuagcgc

SEQ ID NO: 1896034 - RNA, 19 nt, Artificial Sequence
  Description of Artificial Sequence: Synthetic oligonucleotide
  Sense strand starting at position 3326 of SEQ ID NO: 1879280
gcgguaggguccauugcuu

SEQ ID NO: 1896035 - RNA, 19 nt, Artificial Sequence
  Description of Artificial Sequence: Synthetic oligonucleotide
  Antisense strand to SEQ ID NO: 1896034
aagcaauggacccuaccgc

SEQ ID NO: 1896036 - RNA, 19 nt, Artificial Sequence
  Description of Artificial Sequence: Synthetic oligonucleotide
  Sense strand starting at position 109 of SEQ ID NO: 1879281
cucucuaguugagccagaa

SEQ ID NO: 1896037 - RNA, 19 nt, Artificial Sequence
  Description of Artificial Sequence: Synthetic oligonucleotide
  Antisense strand to SEQ ID NO: 1896036
uucuggcucaacuagagag

SEQ ID NO: 1896038 - RNA, 19 nt, Artificial Sequence
  Description of Artificial Sequence: Synthetic oligonucleotide
  Sense strand starting at position 239 of SEQ ID NO: 1879281
gcuagaugucauggagaaa

SEQ ID NO: 1896039 - RNA, 19 nt, Artificial Sequence
  Description of Artificial Sequence: Synthetic oligonucleotide
  Antisense strand to SEQ ID NO: 1896038
uuucuccaugacaucuagc

SEQ ID NO: 1896040 - RNA, 19 nt, Artificial Sequence
  Description of Artificial Sequence: Synthetic oligonucleotide
  Sense strand starting at position 745 of SEQ ID NO: 1879281
uaaugagaucugugucaca

SEQ ID NO: 1896041 - RNA, 19 nt, Artificial Sequence
  Description of Artificial Sequence: Synthetic oligonucleotide
  Antisense strand to SEQ ID NO: 1896040
ugugacacagaucucauua

SEQ ID NO: 1896042 - RNA, 19 nt, Artificial Sequence
  Description of Artificial Sequence: Synthetic oligonucleotide
  Sense strand starting at position 1077 of SEQ ID NO: 1879281
cugugaggccuccaaguua

SEQ ID NO: 1896043 - RNA, 19 nt, Artificial Sequence
  Description of Artificial Sequence: Synthetic oligonucleotide
  Antisense strand to SEQ ID NO: 1896042
uaacuuggaggccucacag

SEQ ID NO: 1896044 - RNA, 19 nt, Artificial Sequence
  Description of Artificial Sequence: Synthetic oligonucleotide
  Sense strand starting at position 1092 of SEQ ID NO: 1879281
guuacaauagcaggugaga

SEQ ID NO: 1896045 - RNA, 19 nt, Artificial Sequence
  Description of Artificial Sequence: Synthetic oligonucleotide
  Antisense strand to SEQ ID NO: 1896044
ucucaccugcuauuguaac

SEQ ID NO: 1896046 - RNA, 19 nt, Artificial Sequence
  Description of Artificial Sequence: Synthetic oligonucleotide
  Sense strand starting at position 1186 of SEQ ID NO: 1879281
gugcguagggccagaucau

SEQ ID NO: 1896047 - RNA, 19 nt, Artificial Sequence
  Description of Artificial Sequence: Synthetic oligonucleotide
  Antisense strand to SEQ ID NO: 1896046
augaucuggcccuacgcac

SEQ ID NO: 1896048 - RNA, 19 nt, Artificial Sequence
  Description of Artificial Sequence: Synthetic oligonucleotide
  Sense strand starting at position 1187 of SEQ ID NO: 1879281
ugcguagggccagaucauu

SEQ ID NO: 1896049 - RNA, 19 nt, Artificial Sequence
  Description of Artificial Sequence: Synthetic oligonucleotide
  Antisense strand to SEQ ID NO: 1896048
aaugaucuggcccuacgca

SEQ ID NO: 1896050 - RNA, 19 nt, Artificial Sequence
  Description of Artificial Sequence: Synthetic oligonucleotide
  Sense strand starting at position 1195 of SEQ ID NO: 1879281
gccagaucauuaccucuga

SEQ ID NO: 1896051 - RNA, 19 nt, Artificial Sequence
  Description of Artificial Sequence: Synthetic oligonucleotide
  Antisense strand to SEQ ID NO: 1896050
ucagagguaaugaucuggc

SEQ ID NO: 1896052 - RNA, 19 nt, Artificial Sequence
  Description of Artificial Sequence: Synthetic oligonucleotide
  Sense strand starting at position 1308 of SEQ ID NO: 1879281
gaacuuuccugggccauga

SEQ ID NO: 1896053 - RNA, 19 nt, Artificial Sequence
  Description of Artificial Sequence: Synthetic oligonucleotide
  Antisense strand to SEQ ID NO: 1896052
ucauggcccaggaaaguuc

SEQ ID NO: 1896054 - RNA, 19 nt, Artificial Sequence
  Description of Artificial Sequence: Synthetic oligonucleotide
  Sense strand starting at position 1368 of SEQ ID NO: 1879281
gaggucagaugccaacaau

SEQ ID NO: 1896055 - RNA, 19 nt, Artificial Sequence
  Description of Artificial Sequence: Synthetic oligonucleotide
  Antisense strand to SEQ ID NO: 1896054
auuguuggcaucugaccuc

SEQ ID NO: 1896056 - RNA, 19 nt, Artificial Sequence
  Description of Artificial Sequence: Synthetic oligonucleotide
  Sense strand starting at position 1590 of SEQ ID NO: 1879281
auaguuccacagugauaac

SEQ ID NO: 1896057 - RNA, 19 nt, Artificial Sequence
  Description of Artificial Sequence: Synthetic oligonucleotide
  Antisense strand to SEQ ID NO: 1896056
guuaucacuguggaacuau

SEQ ID NO: 1896058 - RNA, 19 nt, Artificial Sequence
  Description of Artificial Sequence: Synthetic oligonucleotide
  Sense strand starting at position 1875 of SEQ ID NO: 1879281
gagccugugguccaaacua

SEQ ID NO: 1896059 - RNA, 19 nt, Artificial Sequence
  Description of Artificial Sequence: Synthetic oligonucleotide
  Antisense strand to SEQ ID NO: 1896058
uaguuuggaccacaggcuc

SEQ ID NO: 1896060 - RNA, 19 nt, Artificial Sequence
  Description of Artificial Sequence: Synthetic oligonucleotide
  Sense strand starting at position 1928 of SEQ ID NO: 1879281
ucagcaguucuagaugcau

SEQ ID NO: 1896061 - RNA, 19 nt, Artificial Sequence
  Description of Artificial Sequence: Synthetic oligonucleotide
  Antisense strand to SEQ ID NO: 1896060
augcaucuagaacugcuga

SEQ ID NO: 1896062 - RNA, 19 nt, Artificial Sequence
  Description of Artificial Sequence: Synthetic oligonucleotide
  Sense strand starting at position 2231 of SEQ ID NO: 1879281
cuaccaugguuccugauau

SEQ ID NO: 1896063 - RNA, 19 nt, Artificial Sequence
  Description of Artificial Sequence: Synthetic oligonucleotide
  Antisense strand to SEQ ID NO: 1896062
auaucaggaaccaugguag

SEQ ID NO: 1896064 - RNA, 19 nt, Artificial Sequence
  Description of Artificial Sequence: Synthetic oligonucleotide
  Sense strand starting at position 2237 of SEQ ID NO: 1879281
ugguuccugauauauggua

SEQ ID NO: 1896065 - RNA, 19 nt, Artificial Sequence
  Description of Artificial Sequence: Synthetic oligonucleotide
  Antisense strand to SEQ ID NO: 1896064
uaccauauaucaggaacca

SEQ ID NO: 1896066 - RNA, 19 nt, Artificial Sequence
  Description of Artificial Sequence: Synthetic oligonucleotide
  Sense strand starting at position 2244 of SEQ ID NO: 1879281
ugauauaugguagguccaa

SEQ ID NO: 1896067 - RNA, 19 nt, Artificial Sequence
  Description of Artificial Sequence: Synthetic oligonucleotide
  Antisense strand to SEQ ID NO: 1896066
uuggaccuaccauauauca

SEQ ID NO: 1896068 - RNA, 19 nt, Artificial Sequence
  Description of Artificial Sequence: Synthetic oligonucleotide
  Sense strand starting at position 2245 of SEQ ID NO: 1879281
gauauaugguagguccaag

SEQ ID NO: 1896069 - RNA, 19 nt, Artificial Sequence
  Description of Artificial Sequence: Synthetic oligonucleotide
  Antisense strand to SEQ ID NO: 1896068
cuuggaccuaccauauauc

SEQ ID NO: 1896070 - RNA, 19 nt, Artificial Sequence
  Description of Artificial Sequence: Synthetic oligonucleotide
  Sense strand starting at position 2260 of SEQ ID NO: 1879281
caagguaguguguacugaa

SEQ ID NO: 1896071 - RNA, 19 nt, Artificial Sequence
  Description of Artificial Sequence: Synthetic oligonucleotide
  Antisense strand to SEQ ID NO: 1896070
uucaguacacacuaccuug

SEQ ID NO: 1896072 - RNA, 19 nt, Artificial Sequence
  Description of Artificial Sequence: Synthetic oligonucleotide
  Sense strand starting at position 2267 of SEQ ID NO: 1879281
guguguacugaaugaaaga

SEQ ID NO: 1896073 - RNA, 19 nt, Artificial Sequence
  Description of Artificial Sequence: Synthetic oligonucleotide
  Antisense strand to SEQ ID NO: 1896072
ucuuucauucaguacacac

SEQ ID NO: 1896074 - RNA, 19 nt, Artificial Sequence
  Description of Artificial Sequence: Synthetic oligonucleotide
  Sense strand starting at position 2319 of SEQ ID NO: 1879281
ggccgaugcacucuugcuu

SEQ ID NO: 1896075 - RNA, 19 nt, Artificial Sequence
  Description of Artificial Sequence: Synthetic oligonucleotide
  Antisense strand to SEQ ID NO: 1896074
aagcaagagugcaucggcc

SEQ ID NO: 1896076 - RNA, 19 nt, Artificial Sequence
  Description of Artificial Sequence: Synthetic oligonucleotide
  Sense strand starting at position 2320 of SEQ ID NO: 1879281
gccgaugcacucuugcuua

SEQ ID NO: 1896077 - RNA, 19 nt, Artificial Sequence
  Description of Artificial Sequence: Synthetic oligonucleotide
  Antisense strand to SEQ ID NO: 1896076
uaagcaagagugcaucggc

SEQ ID NO: 1896078 - RNA, 19 nt, Artificial Sequence
  Description of Artificial Sequence: Synthetic oligonucleotide
  Sense strand starting at position 2405 of SEQ ID NO: 1879281
cuaugagcauccucugacu

SEQ ID NO: 1896079 - RNA, 19 nt, Artificial Sequence
  Description of Artificial Sequence: Synthetic oligonucleotide
  Antisense strand to SEQ ID NO: 1896078
agucagaggaugcucauag

SEQ ID NO: 1896080 - RNA, 19 nt, Artificial Sequence
  Description of Artificial Sequence: Synthetic oligonucleotide
  Sense strand starting at position 2407 of SEQ ID NO: 1879281
augagcauccucugacuga

SEQ ID NO: 1896081 - RNA, 19 nt, Artificial Sequence
  Description of Artificial Sequence: Synthetic oligonucleotide
  Antisense strand to SEQ ID NO: 1896080
ucagucagaggaugcucau

SEQ ID NO: 1896082 - RNA, 19 nt, Artificial Sequence
  Description of Artificial Sequence: Synthetic oligonucleotide
  Sense strand starting at position 2468 of SEQ ID NO: 1879281
acagcuuucccacgcacaa

SEQ ID NO: 1896083 - RNA, 19 nt, Artificial Sequence
  Description of Artificial Sequence: Synthetic oligonucleotide
  Antisense strand to SEQ ID NO: 1896082
uugugcgugggaaagcugu

SEQ ID NO: 1896084 - RNA, 19 nt, Artificial Sequence
  Description of Artificial Sequence: Synthetic oligonucleotide
  Sense strand starting at position 2745 of SEQ ID NO: 1879281
guuaauuagcaccauguca

SEQ ID NO: 1896085 - RNA, 19 nt, Artificial Sequence
  Description of Artificial Sequence: Synthetic oligonucleotide
  Antisense strand to SEQ ID NO: 1896084
ugacauggugcuaauuaac

SEQ ID NO: 1896086 - RNA, 19 nt, Artificial Sequence
  Description of Artificial Sequence: Synthetic oligonucleotide
  Sense strand starting at position 2820 of SEQ ID NO: 1879281
ggaagcaguccacgucaaa

SEQ ID NO: 1896087 - RNA, 19 nt, Artificial Sequence
  Description of Artificial Sequence: Synthetic oligonucleotide
  Antisense strand to SEQ ID NO: 1896086
uuugacguggacugcuucc

SEQ ID NO: 1896088 - RNA, 19 nt, Artificial Sequence
  Description of Artificial Sequence: Synthetic oligonucleotide
  Sense strand starting at position 2886 of SEQ ID NO: 1879281
ccagcugaagcucauuaaa

SEQ ID NO: 1896089 - RNA, 19 nt, Artificial Sequence
  Description of Artificial Sequence: Synthetic oligonucleotide
  Antisense strand to SEQ ID NO: 1896088
uuuaaugagcuucagcugg

SEQ ID NO: 1896090 - RNA, 19 nt, Artificial Sequence
  Description of Artificial Sequence: Synthetic oligonucleotide
  Sense strand starting at position 2889 of SEQ ID NO: 1879281
gcugaagcucauuaaagcu

SEQ ID NO: 1896091 - RNA, 19 nt, Artificial Sequence
  Description of Artificial Sequence: Synthetic oligonucleotide
  Antisense strand to SEQ ID NO: 1896090
agcuuuaaugagcuucagc

SEQ ID NO: 1896092 - RNA, 19 nt, Artificial Sequence
  Description of Artificial Sequence: Synthetic oligonucleotide
  Sense strand starting at position 3258 of SEQ ID NO: 1879281
caggguucuggguggaaga

SEQ ID NO: 1896093 - RNA, 19 nt, Artificial Sequence
  Description of Artificial Sequence: Synthetic oligonucleotide
  Antisense strand to SEQ ID NO: 1896092
ucuuccacccagaacccug

SEQ ID NO: 1896094 - RNA, 19 nt, Artificial Sequence
  Description of Artificial Sequence: Synthetic oligonucleotide
  Sense strand starting at position 3259 of SEQ ID NO: 1879281
aggguucuggguggaagaa

SEQ ID NO: 1896095 - RNA, 19 nt, Artificial Sequence
  Description of Artificial Sequence: Synthetic oligonucleotide
  Antisense strand to SEQ ID NO: 1896094
uucuuccacccagaacccu

SEQ ID NO: 1896096 - RNA, 19 nt, Artificial Sequence
  Description of Artificial Sequence: Synthetic oligonucleotide
  Sense strand starting at position 3432 of SEQ ID NO: 1879281
gggcauugcugagucucaa

SEQ ID NO: 1896097 - RNA, 19 nt, Artificial Sequence
  Description of Artificial Sequence: Synthetic oligonucleotide
  Antisense strand to SEQ ID NO: 1896096
uugagacucagcaaugccc

SEQ ID NO: 1896098 - RNA, 19 nt, Artificial Sequence
  Description of Artificial Sequence: Synthetic oligonucleotide
  Sense strand starting at position 3740 of SEQ ID NO: 1879281
cugccucauugauucugaa

SEQ ID NO: 1896099 - RNA, 19 nt, Artificial Sequence
  Description of Artificial Sequence: Synthetic oligonucleotide
  Antisense strand to SEQ ID NO: 1896098
uucagaaucaaugaggcag

SEQ ID NO: 1896100 - RNA, 19 nt, Artificial Sequence
  Description of Artificial Sequence: Synthetic oligonucleotide
  Sense strand starting at position 3744 of SEQ ID NO: 1879281
cucauugauucugaaucag

SEQ ID NO: 1896101 - RNA, 19 nt, Artificial Sequence
  Description of Artificial Sequence: Synthetic oligonucleotide
  Antisense strand to SEQ ID NO: 1896100
cugauucagaaucaaugag

SEQ ID NO: 1896102 - RNA, 19 nt, Artificial Sequence
  Description of Artificial Sequence: Synthetic oligonucleotide
  Sense strand starting at position 3756 of SEQ ID NO: 1879281
gaaucagggcuuugaucac

SEQ ID NO: 1896103 - RNA, 19 nt, Artificial Sequence
  Description of Artificial Sequence: Synthetic oligonucleotide
  Antisense strand to SEQ ID NO: 1896102
gugaucaaagcccugauuc

SEQ ID NO: 1896104 - RNA, 19 nt, Artificial Sequence
  Description of Artificial Sequence: Synthetic oligonucleotide
  Sense strand starting at position 3856 of SEQ ID NO: 1879281
cugcuuauaucucuguuua

SEQ ID NO: 1896105 - RNA, 19 nt, Artificial Sequence
  Description of Artificial Sequence: Synthetic oligonucleotide
  Antisense strand to SEQ ID NO: 1896104
uaaacagagauauaagcag

SEQ ID NO: 1896106 - RNA, 19 nt, Artificial Sequence
  Description of Artificial Sequence: Synthetic oligonucleotide
  Sense strand starting at position 3857 of SEQ ID NO: 1879281
ugcuuauaucucuguuuau

SEQ ID NO: 1896107 - RNA, 19 nt, Artificial Sequence
  Description of Artificial Sequence: Synthetic oligonucleotide
  Antisense strand to SEQ ID NO: 1896106
auaaacagagauauaagca

SEQ ID NO: 1896108 - RNA, 19 nt, Artificial Sequence
  Description of Artificial Sequence: Synthetic oligonucleotide
  Sense strand starting at position 3858 of SEQ ID NO: 1879281
gcuuauaucucuguuuauu

SEQ ID NO: 1896109 - RNA, 19 nt, Artificial Sequence
  Description of Artificial Sequence: Synthetic oligonucleotide
  Antisense strand to SEQ ID NO: 1896108
aauaaacagagauauaagc

SEQ ID NO: 1896110 - RNA, 19 nt, Artificial Sequence
  Description of Artificial Sequence: Synthetic oligonucleotide
  Sense strand starting at position 3906 of SEQ ID NO: 1879281
acucuagucaugggaagcu

SEQ ID NO: 1896111 - RNA, 19 nt, Artificial Sequence
  Description of Artificial Sequence: Synthetic oligonucleotide
  Antisense strand to SEQ ID NO: 1896110
agcuucccaugacuagagu

SEQ ID NO: 1896112 - RNA, 19 nt, Artificial Sequence
  Description of Artificial Sequence: Synthetic oligonucleotide
  Sense strand starting at position 3922 of SEQ ID NO: 1879281
gcuucuuguaggugucuga

SEQ ID NO: 1896113 - RNA, 19 nt, Artificial Sequence
  Description of Artificial Sequence: Synthetic oligonucleotide
  Antisense strand to SEQ ID NO: 1896112
ucagacaccuacaagaagc

SEQ ID NO: 1896114 - RNA, 19 nt, Artificial Sequence
  Description of Artificial Sequence: Synthetic oligonucleotide
  Sense strand starting at position 3935 of SEQ ID NO: 1879281
gucugaacuuguccucaac

SEQ ID NO: 1896115 - RNA, 19 nt, Artificial Sequence
  Description of Artificial Sequence: Synthetic oligonucleotide
  Antisense strand to SEQ ID NO: 1896114
guugaggacaaguucagac

SEQ ID NO: 1896116 - RNA, 19 nt, Artificial Sequence
  Description of Artificial Sequence: Synthetic oligonucleotide
  Sense strand starting at position 20 of SEQ ID NO: 1879283
agauucaguguguauggua

SEQ ID NO: 1896117 - RNA, 19 nt, Artificial Sequence
  Description of Artificial Sequence: Synthetic oligonucleotide
  Antisense strand to SEQ ID NO: 1896116
uaccauacacacugaaucu

SEQ ID NO: 1896118 - RNA, 19 nt, Artificial Sequence
  Description of Artificial Sequence: Synthetic oligonucleotide
  Sense strand starting at position 32 of SEQ ID NO: 1879283
uaugguacuuuacuggaaa

SEQ ID NO: 1896119 - RNA, 19 nt, Artificial Sequence
  Description of Artificial Sequence: Synthetic oligonucleotide
  Antisense strand to SEQ ID NO: 1896118
uuuccaguaaaguaccaua

SEQ ID NO: 1896120 - RNA, 19 nt, Artificial Sequence
  Description of Artificial Sequence: Synthetic oligonucleotide
  Sense strand starting at position 138 of SEQ ID NO: 1879283
cugccuagaucucccagaa

SEQ ID NO: 1896121 - RNA, 19 nt, Artificial Sequence
  Description of Artificial Sequence: Synthetic oligonucleotide
  Antisense strand to SEQ ID NO: 1896120
uucugggagaucuaggcag

SEQ ID NO: 1896122 - RNA, 19 nt, Artificial Sequence
  Description of Artificial Sequence: Synthetic oligonucleotide
  Sense strand starting at position 212 of SEQ ID NO: 1879283
agaggacugcccuggacua

SEQ ID NO: 1896123 - RNA, 19 nt, Artificial Sequence
  Description of Artificial Sequence: Synthetic oligonucleotide
  Antisense strand to SEQ ID NO: 1896122
uaguccagggcaguccucu

SEQ ID NO: 1896124 - RNA, 19 nt, Artificial Sequence
  Description of Artificial Sequence: Synthetic oligonucleotide
  Sense strand starting at position 252 of SEQ ID NO: 1879283
acucaaagagccuggaaau

SEQ ID NO: 1896125 - RNA, 19 nt, Artificial Sequence
  Description of Artificial Sequence: Synthetic oligonucleotide
  Antisense strand to SEQ ID NO: 1896124
auuuccaggcucuuugagu

SEQ ID NO: 1896126 - RNA, 19 nt, Artificial Sequence
  Description of Artificial Sequence: Synthetic oligonucleotide
  Sense strand starting at position 383 of SEQ ID NO: 1879283
gucagaagugcccauggga

SEQ ID NO: 1896127 - RNA, 19 nt, Artificial Sequence
  Description of Artificial Sequence: Synthetic oligonucleotide
  Antisense strand to SEQ ID NO: 1896126
ucccaugggcacuucugac

SEQ ID NO: 1896128 - RNA, 19 nt, Artificial Sequence
  Description of Artificial Sequence: Synthetic oligonucleotide
  Sense strand starting at position 396 of SEQ ID NO: 1879283
augggaucagguugagauu

SEQ ID NO: 1896129 - RNA, 19 nt, Artificial Sequence
  Description of Artificial Sequence: Synthetic oligonucleotide
  Antisense strand to SEQ ID NO: 1896128
aaucucaaccugaucccau

SEQ ID NO: 1896130 - RNA, 19 nt, Artificial Sequence
  Description of Artificial Sequence: Synthetic oligonucleotide
  Sense strand starting at position 398 of SEQ ID NO: 1879283
gggaucagguugagauuga

SEQ ID NO: 1896131 - RNA, 19 nt, Artificial Sequence
  Description of Artificial Sequence: Synthetic oligonucleotide
  Antisense strand to SEQ ID NO: 1896130
ucaaucucaaccugauccc

SEQ ID NO: 1896132 - RNA, 19 nt, Artificial Sequence
  Description of Artificial Sequence: Synthetic oligonucleotide
  Sense strand starting at position 471 of SEQ ID NO: 1879283
cugcuacucccuuaagagu

SEQ ID NO: 1896133 - RNA, 19 nt, Artificial Sequence
  Description of Artificial Sequence: Synthetic oligonucleotide
  Antisense strand to SEQ ID NO: 1896132
acucuuaagggaguagcag

SEQ ID NO: 1896134 - RNA, 19 nt, Artificial Sequence
  Description of Artificial Sequence: Synthetic oligonucleotide
  Sense strand starting at position 485 of SEQ ID NO: 1879283
agaguucuccuggagcaca

SEQ ID NO: 1896135 - RNA, 19 nt, Artificial Sequence
  Description of Artificial Sequence: Synthetic oligonucleotide
  Antisense strand to SEQ ID NO: 1896134
ugugcuccaggagaacucu

SEQ ID NO: 1896136 - RNA, 19 nt, Artificial Sequence
  Description of Artificial Sequence: Synthetic oligonucleotide
  Sense strand starting at position 724 of SEQ ID NO: 1879283
cacagaauacuguggugau

SEQ ID NO: 1896137 - RNA, 19 nt, Artificial Sequence
  Description of Artificial Sequence: Synthetic oligonucleotide
  Antisense strand to SEQ ID NO: 1896136
aucaccacaguauucugug

SEQ ID NO: 1896138 - RNA, 19 nt, Artificial Sequence
  Description of Artificial Sequence: Synthetic oligonucleotide
  Sense strand starting at position 878 of SEQ ID NO: 1879283
gaugguugauaguuaaaug

SEQ ID NO: 1896139 - RNA, 19 nt, Artificial Sequence
  Description of Artificial Sequence: Synthetic oligonucleotide
  Antisense strand to SEQ ID NO: 1896138
cauuuaacuaucaaccauc

SEQ ID NO: 1896140 - RNA, 19 nt, Artificial Sequence
  Description of Artificial Sequence: Synthetic oligonucleotide
  Sense strand starting at position 879 of SEQ ID NO: 1879283
augguugauaguuaaaugu

SEQ ID NO: 1896141 - RNA, 19 nt, Artificial Sequence
  Description of Artificial Sequence: Synthetic oligonucleotide
  Antisense strand to SEQ ID NO: 1896140
acauuuaacuaucaaccau

SEQ ID NO: 1896142 - RNA, 19 nt, Artificial Sequence
  Description of Artificial Sequence: Synthetic oligonucleotide
  Sense strand starting at position 888 of SEQ ID NO: 1879283
aguuaaaugugaucucuug

SEQ ID NO: 1896143 - RNA, 19 nt, Artificial Sequence
  Description of Artificial Sequence: Synthetic oligonucleotide
  Antisense strand to SEQ ID NO: 1896142
caagagaucacauuuaacu

SEQ ID NO: 1896144 - RNA, 19 nt, Artificial Sequence
  Description of Artificial Sequence: Synthetic oligonucleotide
  Sense strand starting at position 1138 of SEQ ID NO: 1879283
ccuguuagaucaguggaaa

SEQ ID NO: 1896145 - RNA, 19 nt, Artificial Sequence
  Description of Artificial Sequence: Synthetic oligonucleotide
  Antisense strand to SEQ ID NO: 1896144
uuuccacugaucuaacagg

SEQ ID NO: 1896146 - RNA, 19 nt, Artificial Sequence
  Description of Artificial Sequence: Synthetic oligonucleotide
  Sense strand starting at position 1139 of SEQ ID NO: 1879283
cuguuagaucaguggaaac

SEQ ID NO: 1896147 - RNA, 19 nt, Artificial Sequence
  Description of Artificial Sequence: Synthetic oligonucleotide
  Antisense strand to SEQ ID NO: 1896146
guuuccacugaucuaacag

SEQ ID NO: 1896148 - RNA, 19 nt, Artificial Sequence
  Description of Artificial Sequence: Synthetic oligonucleotide
  Sense strand starting at position 1380 of SEQ ID NO: 1879283
auggaaauaacgugcacaa

SEQ ID NO: 1896149 - RNA, 19 nt, Artificial Sequence
  Description of Artificial Sequence: Synthetic oligonucleotide
  Antisense strand to SEQ ID NO: 1896148
uugugcacguuauuuccau

SEQ ID NO: 1896150 - RNA, 19 nt, Artificial Sequence
  Description of Artificial Sequence: Synthetic oligonucleotide
  Sense strand starting at position 1382 of SEQ ID NO: 1879283
ggaaauaacgugcacaaua

SEQ ID NO: 1896151 - RNA, 19 nt, Artificial Sequence
  Description of Artificial Sequence: Synthetic oligonucleotide
  Antisense strand to SEQ ID NO: 1896150
uauugugcacguuauuucc

SEQ ID NO: 1896152 - RNA, 19 nt, Artificial Sequence
  Description of Artificial Sequence: Synthetic oligonucleotide
  Sense strand starting at position 1777 of SEQ ID NO: 1879283
aaggucaucuucucaggaa

SEQ ID NO: 1896153 - RNA, 19 nt, Artificial Sequence
  Description of Artificial Sequence: Synthetic oligonucleotide
  Antisense strand to SEQ ID NO: 1896152
uuccugagaagaugaccuu

SEQ ID NO: 1896154 - RNA, 19 nt, Artificial Sequence
  Description of Artificial Sequence: Synthetic oligonucleotide
  Sense strand starting at position 1995 of SEQ ID NO: 1879283
ggaaacauguuucugcaga

SEQ ID NO: 1896155 - RNA, 19 nt, Artificial Sequence
  Description of Artificial Sequence: Synthetic oligonucleotide
  Antisense strand to SEQ ID NO: 1896154
ucugcagaaacauguuucc

SEQ ID NO: 1896156 - RNA, 19 nt, Artificial Sequence
  Description of Artificial Sequence: Synthetic oligonucleotide
  Sense strand starting at position 1997 of SEQ ID NO: 1879283
aaacauguuucugcagaag

SEQ ID NO: 1896157 - RNA, 19 nt, Artificial Sequence
  Description of Artificial Sequence: Synthetic oligonucleotide
  Antisense strand to SEQ ID NO: 1896156
cuucugcagaaacauguuu

SEQ ID NO: 1896158 - RNA, 19 nt, Artificial Sequence
  Description of Artificial Sequence: Synthetic oligonucleotide
  Sense strand starting at position 2000 of SEQ ID NO: 1879283
cauguuucugcagaagaaa

SEQ ID NO: 1896159 - RNA, 19 nt, Artificial Sequence
  Description of Artificial Sequence: Synthetic oligonucleotide
  Antisense strand to SEQ ID NO: 1896158
uuucuucugcagaaacaug

SEQ ID NO: 1896160 - RNA, 19 nt, Artificial Sequence
  Description of Artificial Sequence: Synthetic oligonucleotide
  Sense strand starting at position 2030 of SEQ ID NO: 1879283
aagaguaagcuuugggaag

SEQ ID NO: 1896161 - RNA, 19 nt, Artificial Sequence
  Description of Artificial Sequence: Synthetic oligonucleotide
  Antisense strand to SEQ ID NO: 1896160
cuucccaaagcuuacucuu

SEQ ID NO: 1896162 - RNA, 19 nt, Artificial Sequence
  Description of Artificial Sequence: Synthetic oligonucleotide
  Sense strand starting at position 2106 of SEQ ID NO: 1879283
guaaguauggccguugagu

SEQ ID NO: 1896163 - RNA, 19 nt, Artificial Sequence
  Description of Artificial Sequence: Synthetic oligonucleotide
  Antisense strand to SEQ ID NO: 1896162
acucaacggccauacuuac

SEQ ID NO: 1896164 - RNA, 19 nt, Artificial Sequence
  Description of Artificial Sequence: Synthetic oligonucleotide
  Sense strand starting at position 2174 of SEQ ID NO: 1879283
augccaaagcuugggaaau

SEQ ID NO: 1896165 - RNA, 19 nt, Artificial Sequence
  Description of Artificial Sequence: Synthetic oligonucleotide
  Antisense strand to SEQ ID NO: 1896164
auuucccaagcuuuggcau

SEQ ID NO: 1896166 - RNA, 19 nt, Artificial Sequence
  Description of Artificial Sequence: Synthetic oligonucleotide
  Sense strand starting at position 2199 of SEQ ID NO: 1879283
gugacaaugcuuuagggau

SEQ ID NO: 1896167 - RNA, 19 nt, Artificial Sequence
  Description of Artificial Sequence: Synthetic oligonucleotide
  Antisense strand to SEQ ID NO: 1896166
aucccuaaagcauugucac

SEQ ID NO: 1896168 - RNA, 19 nt, Artificial Sequence
  Description of Artificial Sequence: Synthetic oligonucleotide
  Sense strand starting at position 2479 of SEQ ID NO: 1879283
ucagauauauagcuaaugu

SEQ ID NO: 1896169 - RNA, 19 nt, Artificial Sequence
  Description of Artificial Sequence: Synthetic oligonucleotide
  Antisense strand to SEQ ID NO: 1896168
acauuagcuauauaucuga

SEQ ID NO: 1896170 - RNA, 19 nt, Artificial Sequence
  Description of Artificial Sequence: Synthetic oligonucleotide
  Sense strand starting at position 2639 of SEQ ID NO: 1879283
gcuuccaaagguuaaauaa

SEQ ID NO: 1896171 - RNA, 19 nt, Artificial Sequence
  Description of Artificial Sequence: Synthetic oligonucleotide
  Antisense strand to SEQ ID NO: 1896170
uuauuuaaccuuuggaagc

SEQ ID NO: 1896172 - RNA, 19 nt, Artificial Sequence
  Description of Artificial Sequence: Synthetic oligonucleotide
  Sense strand starting at position 2683 of SEQ ID NO: 1879283
gaggcauuccuaggauaug

SEQ ID NO: 1896173 - RNA, 19 nt, Artificial Sequence
  Description of Artificial Sequence: Synthetic oligonucleotide
  Antisense strand to SEQ ID NO: 1896172
cauauccuaggaaugccuc

SEQ ID NO: 1896174 - RNA, 19 nt, Artificial Sequence
  Description of Artificial Sequence: Synthetic oligonucleotide
  Sense strand starting at position 2711 of SEQ ID NO: 1879283
agaguuguuccagaacuua

SEQ ID NO: 1896175 - RNA, 19 nt, Artificial Sequence
  Description of Artificial Sequence: Synthetic oligonucleotide
  Antisense strand to SEQ ID NO: 1896174
uaaguucuggaacaacucu

SEQ ID NO: 1896176 - RNA, 19 nt, Artificial Sequence
  Description of Artificial Sequence: Synthetic oligonucleotide
  Sense strand starting at position 2811 of SEQ ID NO: 1879283
cccuuugaguucucugaaa

SEQ ID NO: 1896177 - RNA, 19 nt, Artificial Sequence
  Description of Artificial Sequence: Synthetic oligonucleotide
  Antisense strand to SEQ ID NO: 1896176
uuucagagaacucaaaggg

SEQ ID NO: 1896178 - RNA, 19 nt, Artificial Sequence
  Description of Artificial Sequence: Synthetic oligonucleotide
  Sense strand starting at position 2813 of SEQ ID NO: 1879283
cuuugaguucucugaaacu

SEQ ID NO: 1896179 - RNA, 19 nt, Artificial Sequence
  Description of Artificial Sequence: Synthetic oligonucleotide
  Antisense strand to SEQ ID NO: 1896178
aguuucagagaacucaaag

SEQ ID NO: 1896180 - RNA, 19 nt, Artificial Sequence
  Description of Artificial Sequence: Synthetic oligonucleotide
  Sense strand starting at position 2822 of SEQ ID NO: 1879283
cucugaaacugaguuacuu

SEQ ID NO: 1896181 - RNA, 19 nt, Artificial Sequence
  Description of Artificial Sequence: Synthetic oligonucleotide
  Antisense strand to SEQ ID NO: 1896180
aaguaacucaguuucagag

SEQ ID NO: 1896182 - RNA, 19 nt, Artificial Sequence
  Description of Artificial Sequence: Synthetic oligonucleotide
  Sense strand starting at position 3262 of SEQ ID NO: 1879283
auugaagaugucgaauagu

SEQ ID NO: 1896183 - RNA, 19 nt, Artificial Sequence
  Description of Artificial Sequence: Synthetic oligonucleotide
  Antisense strand to SEQ ID NO: 1896182
acuauucgacaucuucaau

SEQ ID NO: 1896184 - RNA, 19 nt, Artificial Sequence
  Description of Artificial Sequence: Synthetic oligonucleotide
  Sense strand starting at position 3265 of SEQ ID NO: 1879283
gaagaugucgaauaguuau

SEQ ID NO: 1896185 - RNA, 19 nt, Artificial Sequence
  Description of Artificial Sequence: Synthetic oligonucleotide
  Antisense strand to SEQ ID NO: 1896184
auaacuauucgacaucuuc

SEQ ID NO: 1896186 - RNA, 19 nt, Artificial Sequence
  Description of Artificial Sequence: Synthetic oligonucleotide
  Sense strand starting at position 3583 of SEQ ID NO: 1879283
gauaguggaguauagcaau

SEQ ID NO: 1896187 - RNA, 19 nt, Artificial Sequence
  Description of Artificial Sequence: Synthetic oligonucleotide
  Antisense strand to SEQ ID NO: 1896186
auugcuauacuccacuauc

SEQ ID NO: 1896188 - RNA, 19 nt, Artificial Sequence
  Description of Artificial Sequence: Synthetic oligonucleotide
  Sense strand starting at position 3602 of SEQ ID NO: 1879283
gcauaugaccuuugaauaa

SEQ ID NO: 1896189 - RNA, 19 nt, Artificial Sequence
  Description of Artificial Sequence: Synthetic oligonucleotide
  Antisense strand to SEQ ID NO: 1896188
uuauucaaaggucauaugc

SEQ ID NO: 1896190 - RNA, 19 nt, Artificial Sequence
  Description of Artificial Sequence: Synthetic oligonucleotide
  Sense strand starting at position 3668 of SEQ ID NO: 1879283
gggccaaaccacuacuauu

SEQ ID NO: 1896191 - RNA, 19 nt, Artificial Sequence
  Description of Artificial Sequence: Synthetic oligonucleotide
  Antisense strand to SEQ ID NO: 1896190
aauaguagugguuuggccc

SEQ ID NO: 1896192 - RNA, 19 nt, Artificial Sequence
  Description of Artificial Sequence: Synthetic oligonucleotide
  Sense strand starting at position 3707 of SEQ ID NO: 1879283
ccugcaagccaagaaugau

SEQ ID NO: 1896193 - RNA, 19 nt, Artificial Sequence
  Description of Artificial Sequence: Synthetic oligonucleotide
  Antisense strand to SEQ ID NO: 1896192
aucauucuuggcuugcagg

SEQ ID NO: 1896194 - RNA, 19 nt, Artificial Sequence
  Description of Artificial Sequence: Synthetic oligonucleotide
  Sense strand starting at position 3817 of SEQ ID NO: 1879283
augcaaagacccugaacau

SEQ ID NO: 1896195 - RNA, 19 nt, Artificial Sequence
  Description of Artificial Sequence: Synthetic oligonucleotide
  Antisense strand to SEQ ID NO: 1896194
auguucagggucuuugcau

SEQ ID NO: 1896196 - RNA, 19 nt, Artificial Sequence
  Description of Artificial Sequence: Synthetic oligonucleotide
  Sense strand starting at position 174 of SEQ ID NO: 1879282
ugucuuagcacugauggaa

SEQ ID NO: 1896197 - RNA, 19 nt, Artificial Sequence
  Description of Artificial Sequence: Synthetic oligonucleotide
  Antisense strand to SEQ ID NO: 1896196
uuccaucagugcuaagaca

SEQ ID NO: 1896198 - RNA, 19 nt, Artificial Sequence
  Description of Artificial Sequence: Synthetic oligonucleotide
  Sense strand starting at position 415 of SEQ ID NO: 1879282
uguuauauuggaugaauga

SEQ ID NO: 1896199 - RNA, 19 nt, Artificial Sequence
  Description of Artificial Sequence: Synthetic oligonucleotide
  Antisense strand to SEQ ID NO: 1896198
ucauucauccaauauaaca

SEQ ID NO: 1896200 - RNA, 19 nt, Artificial Sequence
  Description of Artificial Sequence: Synthetic oligonucleotide
  Sense strand starting at position 674 of SEQ ID NO: 1879282
ccguuauauccguuguaac

SEQ ID NO: 1896201 - RNA, 19 nt, Artificial Sequence
  Description of Artificial Sequence: Synthetic oligonucleotide
  Antisense strand to SEQ ID NO: 1896200
guuacaacggauauaacgg

SEQ ID NO: 1896202 - RNA, 19 nt, Artificial Sequence
  Description of Artificial Sequence: Synthetic oligonucleotide
  Sense strand starting at position 933 of SEQ ID NO: 1879282
uguuaacaaggaggugaua

SEQ ID NO: 1896203 - RNA, 19 nt, Artificial Sequence
  Description of Artificial Sequence: Synthetic oligonucleotide
  Antisense strand to SEQ ID NO: 1896202
uaucaccuccuuguuaaca

SEQ ID NO: 1896204 - RNA, 19 nt, Artificial Sequence
  Description of Artificial Sequence: Synthetic oligonucleotide
  Sense strand starting at position 944 of SEQ ID NO: 1879282
aggugauauaaugguaaug

SEQ ID NO: 1896205 - RNA, 19 nt, Artificial Sequence
  Description of Artificial Sequence: Synthetic oligonucleotide
  Antisense strand to SEQ ID NO: 1896204
cauuaccauuauaucaccu

SEQ ID NO: 1896206 - RNA, 19 nt, Artificial Sequence
  Description of Artificial Sequence: Synthetic oligonucleotide
  Sense strand starting at position 974 of SEQ ID NO: 1879282
uggaauucacgauaugggu

SEQ ID NO: 1896207 - RNA, 19 nt, Artificial Sequence
  Description of Artificial Sequence: Synthetic oligonucleotide
  Antisense strand to SEQ ID NO: 1896206
acccauaucgugaauucca

SEQ ID NO: 1896208 - RNA, 19 nt, Artificial Sequence
  Description of Artificial Sequence: Synthetic oligonucleotide
  Sense strand starting at position 983 of SEQ ID NO: 1879282
cgauauggguaaucagaug

SEQ ID NO: 1896209 - RNA, 19 nt, Artificial Sequence
  Description of Artificial Sequence: Synthetic oligonucleotide
  Antisense strand to SEQ ID NO: 1896208
caucugauuacccauaucg

SEQ ID NO: 1896210 - RNA, 19 nt, Artificial Sequence
  Description of Artificial Sequence: Synthetic oligonucleotide
  Sense strand starting at position 999 of SEQ ID NO: 1879282
augauaagcaagggaugua

SEQ ID NO: 1896211 - RNA, 19 nt, Artificial Sequence
  Description of Artificial Sequence: Synthetic oligonucleotide
  Antisense strand to SEQ ID NO: 1896210
uacaucccuugcuuaucau

SEQ ID NO: 1896212 - RNA, 19 nt, Artificial Sequence
  Description of Artificial Sequence: Synthetic oligonucleotide
  Sense strand starting at position 1159 of SEQ ID NO: 1879282
uuauuaagugccuagauac

SEQ ID NO: 1896213 - RNA, 19 nt, Artificial Sequence
  Description of Artificial Sequence: Synthetic oligonucleotide
  Antisense strand to SEQ ID NO: 1896212
guaucuaggcacuuaauaa

SEQ ID NO: 1896214 - RNA, 19 nt, Artificial Sequence
  Description of Artificial Sequence: Synthetic oligonucleotide
  Sense strand starting at position 1177 of SEQ ID NO: 1879282
cuugcuaauaaguggaaga

SEQ ID NO: 1896215 - RNA, 19 nt, Artificial Sequence
  Description of Artificial Sequence: Synthetic oligonucleotide
  Antisense strand to SEQ ID NO: 1896214
ucuuccacuuauuagcaag

SEQ ID NO: 1896216 - RNA, 19 nt, Artificial Sequence
  Description of Artificial Sequence: Synthetic oligonucleotide
  Sense strand starting at position 1311 of SEQ ID NO: 1879282
augugauaugguuaguaug

SEQ ID NO: 1896217 - RNA, 19 nt, Artificial Sequence
  Description of Artificial Sequence: Synthetic oligonucleotide
  Antisense strand to SEQ ID NO: 1896216
cauacuaaccauaucacau

SEQ ID NO: 1896218 - RNA, 19 nt, Artificial Sequence
  Description of Artificial Sequence: Synthetic oligonucleotide
  Sense strand starting at position 1318 of SEQ ID NO: 1879282
augguuaguauguaauaug

SEQ ID NO: 1896219 - RNA, 19 nt, Artificial Sequence
  Description of Artificial Sequence: Synthetic oligonucleotide
  Antisense strand to SEQ ID NO: 1896218
cauauuacauacuaaccau

SEQ ID NO: 1896220 - RNA, 19 nt, Artificial Sequence
  Description of Artificial Sequence: Synthetic oligonucleotide
  Sense strand starting at position 1359 of SEQ ID NO: 1879282
gauccugaagucuaugcua

SEQ ID NO: 1896221 - RNA, 19 nt, Artificial Sequence
  Description of Artificial Sequence: Synthetic oligonucleotide
  Antisense strand to SEQ ID NO: 1896220
uagcauagacuucaggauc

SEQ ID NO: 1896222 - RNA, 19 nt, Artificial Sequence
  Description of Artificial Sequence: Synthetic oligonucleotide
  Sense strand starting at position 1428 of SEQ ID NO: 1879282
cugucaaauuuauaggaau

SEQ ID NO: 1896223 - RNA, 19 nt, Artificial Sequence
  Description of Artificial Sequence: Synthetic oligonucleotide
  Antisense strand to SEQ ID NO: 1896222
auuccuauaaauuugacag

SEQ ID NO: 1896224 - RNA, 19 nt, Artificial Sequence
  Description of Artificial Sequence: Synthetic oligonucleotide
  Sense strand starting at position 1517 of SEQ ID NO: 1879282
ggaugaaaugcucauaguu

SEQ ID NO: 1896225 - RNA, 19 nt, Artificial Sequence
  Description of Artificial Sequence: Synthetic oligonucleotide
  Antisense strand to SEQ ID NO: 1896224
aacuaugagcauuucaucc

SEQ ID NO: 1896226 - RNA, 19 nt, Artificial Sequence
  Description of Artificial Sequence: Synthetic oligonucleotide
  Sense strand starting at position 1715 of SEQ ID NO: 1879282
gcaaguauuucucugcaug

SEQ ID NO: 1896227 - RNA, 19 nt, Artificial Sequence
  Description of Artificial Sequence: Synthetic oligonucleotide
  Antisense strand to SEQ ID NO: 1896226
caugcagagaaauacuugc

SEQ ID NO: 1896228 - RNA, 19 nt, Artificial Sequence
  Description of Artificial Sequence: Synthetic oligonucleotide
  Sense strand starting at position 1779 of SEQ ID NO: 1879282
uugaaaucauagcuuggga

SEQ ID NO: 1896229 - RNA, 19 nt, Artificial Sequence
  Description of Artificial Sequence: Synthetic oligonucleotide
  Antisense strand to SEQ ID NO: 1896228
ucccaagcuaugauuucaa

SEQ ID NO: 1896230 - RNA, 19 nt, Artificial Sequence
  Description of Artificial Sequence: Synthetic oligonucleotide
  Sense strand starting at position 1781 of SEQ ID NO: 1879282
gaaaucauagcuugggagu

SEQ ID NO: 1896231 - RNA, 19 nt, Artificial Sequence
  Description of Artificial Sequence: Synthetic oligonucleotide
  Antisense strand to SEQ ID NO: 1896230
acucccaagcuaugauuuc

SEQ ID NO: 1896232 - RNA, 19 nt, Artificial Sequence
  Description of Artificial Sequence: Synthetic oligonucleotide
  Sense strand starting at position 1880 of SEQ ID NO: 1879282
ugugaaauagcucagcaau

SEQ ID NO: 1896233 - RNA, 19 nt, Artificial Sequence
  Description of Artificial Sequence: Synthetic oligonucleotide
  Antisense strand to SEQ ID NO: 1896232
auugcugagcuauuucaca

SEQ ID NO: 1896234 - RNA, 19 nt, Artificial Sequence
  Description of Artificial Sequence: Synthetic oligonucleotide
  Sense strand starting at position 1883 of SEQ ID NO: 1879282
gaaauagcucagcaauguu

SEQ ID NO: 1896235 - RNA, 19 nt, Artificial Sequence
  Description of Artificial Sequence: Synthetic oligonucleotide
  Antisense strand to SEQ ID NO: 1896234
aacauugcugagcuauuuc

SEQ ID NO: 1896236 - RNA, 19 nt, Artificial Sequence
  Description of Artificial Sequence: Synthetic oligonucleotide
  Sense strand starting at position 2084 of SEQ ID NO: 1879282
gcacaucauuaccuaggaa

SEQ ID NO: 1896237 - RNA, 19 nt, Artificial Sequence
  Description of Artificial Sequence: Synthetic oligonucleotide
  Antisense strand to SEQ ID NO: 1896236
uuccuagguaaugaugugc

SEQ ID NO: 1896238 - RNA, 19 nt, Artificial Sequence
  Description of Artificial Sequence: Synthetic oligonucleotide
  Sense strand starting at position 2282 of SEQ ID NO: 1879282
auauauugaugucuaggau

SEQ ID NO: 1896239 - RNA, 19 nt, Artificial Sequence
  Description of Artificial Sequence: Synthetic oligonucleotide
  Antisense strand to SEQ ID NO: 1896238
auccuagacaucaauauau

SEQ ID NO: 1896240 - RNA, 19 nt, Artificial Sequence
  Description of Artificial Sequence: Synthetic oligonucleotide
  Sense strand starting at position 2285 of SEQ ID NO: 1879282
uauugaugucuaggauuaa

SEQ ID NO: 1896241 - RNA, 19 nt, Artificial Sequence
  Description of Artificial Sequence: Synthetic oligonucleotide
  Antisense strand to SEQ ID NO: 1896240
uuaauccuagacaucaaua

SEQ ID NO: 1896242 - RNA, 19 nt, Artificial Sequence
  Description of Artificial Sequence: Synthetic oligonucleotide
  Sense strand starting at position 2428 of SEQ ID NO: 1879282
ggagaaccaugguacauuu

SEQ ID NO: 1896243 - RNA, 19 nt, Artificial Sequence
  Description of Artificial Sequence: Synthetic oligonucleotide
  Antisense strand to SEQ ID NO: 1896242
aaauguaccaugguucucc

SEQ ID NO: 1896244 - RNA, 19 nt, Artificial Sequence
  Description of Artificial Sequence: Synthetic oligonucleotide
  Sense strand starting at position 2559 of SEQ ID NO: 1879282
guccaauuagagugaucca

SEQ ID NO: 1896245 - RNA, 19 nt, Artificial Sequence
  Description of Artificial Sequence: Synthetic oligonucleotide
  Antisense strand to SEQ ID NO: 1896244
uggaucacucuaauuggac

SEQ ID NO: 1896246 - RNA, 19 nt, Artificial Sequence
  Description of Artificial Sequence: Synthetic oligonucleotide
  Sense strand starting at position 2617 of SEQ ID NO: 1879282
ucuugaaaucacuaggcuu

SEQ ID NO: 1896247 - RNA, 19 nt, Artificial Sequence
  Description of Artificial Sequence: Synthetic oligonucleotide
  Antisense strand to SEQ ID NO: 1896246
aagccuagugauuucaaga

SEQ ID NO: 1896248 - RNA, 19 nt, Artificial Sequence
  Description of Artificial Sequence: Synthetic oligonucleotide
  Sense strand starting at position 2632 of SEQ ID NO: 1879282
gcuuucuaguauuuauuga

SEQ ID NO: 1896249 - RNA, 19 nt, Artificial Sequence
  Description of Artificial Sequence: Synthetic oligonucleotide
  Antisense strand to SEQ ID NO: 1896248
ucaauaaauacuagaaagc

SEQ ID NO: 1896250 - RNA, 19 nt, Artificial Sequence
  Description of Artificial Sequence: Synthetic oligonucleotide
  Sense strand starting at position 2756 of SEQ ID NO: 1879282
aguaauugucaucaagcac

SEQ ID NO: 1896251 - RNA, 19 nt, Artificial Sequence
  Description of Artificial Sequence: Synthetic oligonucleotide
  Antisense strand to SEQ ID NO: 1896250
gugcuugaugacaauuacu

SEQ ID NO: 1896252 - RNA, 19 nt, Artificial Sequence
  Description of Artificial Sequence: Synthetic oligonucleotide
  Sense strand starting at position 3013 of SEQ ID NO: 1879282
gaggcaccaugaucuuaga

SEQ ID NO: 1896253 - RNA, 19 nt, Artificial Sequence
  Description of Artificial Sequence: Synthetic oligonucleotide
  Antisense strand to SEQ ID NO: 1896252
ucuaagaucauggugccuc

SEQ ID NO: 1896254 - RNA, 19 nt, Artificial Sequence
  Description of Artificial Sequence: Synthetic oligonucleotide
  Sense strand starting at position 3107 of SEQ ID NO: 1879282
cagagauacugguuguuau

SEQ ID NO: 1896255 - RNA, 19 nt, Artificial Sequence
  Description of Artificial Sequence: Synthetic oligonucleotide
  Antisense strand to SEQ ID NO: 1896254
auaacaaccaguaucucug

SEQ ID NO: 1896256 - RNA, 19 nt, Artificial Sequence
  Description of Artificial Sequence: Synthetic oligonucleotide
  Sense strand starting at position 3110 of SEQ ID NO: 1879282
agauacugguuguuauuga

SEQ ID NO: 1896257 - RNA, 19 nt, Artificial Sequence
  Description of Artificial Sequence: Synthetic oligonucleotide
  Antisense strand to SEQ ID NO: 1896256
ucaauaacaaccaguaucu

SEQ ID NO: 1896258 - RNA, 19 nt, Artificial Sequence
  Description of Artificial Sequence: Synthetic oligonucleotide
  Sense strand starting at position 3118 of SEQ ID NO: 1879282
guuguuauugaucaaauug

SEQ ID NO: 1896259 - RNA, 19 nt, Artificial Sequence
  Description of Artificial Sequence: Synthetic oligonucleotide
  Antisense strand to SEQ ID NO: 1896258
caauuugaucaauaacaac

SEQ ID NO: 1896260 - RNA, 19 nt, Artificial Sequence
  Description of Artificial Sequence: Synthetic oligonucleotide
  Sense strand starting at position 3169 of SEQ ID NO: 1879282
caaugaaaggugugcacaa

SEQ ID NO: 1896261 - RNA, 19 nt, Artificial Sequence
  Description of Artificial Sequence: Synthetic oligonucleotide
  Antisense strand to SEQ ID NO: 1896260
uugugcacaccuuucauug

SEQ ID NO: 1896262 - RNA, 19 nt, Artificial Sequence
  Description of Artificial Sequence: Synthetic oligonucleotide
  Sense strand starting at position 3264 of SEQ ID NO: 1879282
ggauucugugaguacagca

SEQ ID NO: 1896263 - RNA, 19 nt, Artificial Sequence
  Description of Artificial Sequence: Synthetic oligonucleotide
  Antisense strand to SEQ ID NO: 1896262
ugcuguacucacagaaucc

SEQ ID NO: 1896264 - RNA, 19 nt, Artificial Sequence
  Description of Artificial Sequence: Synthetic oligonucleotide
  Sense strand starting at position 3316 of SEQ ID NO: 1879282
agauuagagagguguuauu

SEQ ID NO: 1896265 - RNA, 19 nt, Artificial Sequence
  Description of Artificial Sequence: Synthetic oligonucleotide
  Antisense strand to SEQ ID NO: 1896264
aauaacaccucucuaaucu

SEQ ID NO: 1896266 - RNA, 19 nt, Artificial Sequence
  Description of Artificial Sequence: Synthetic oligonucleotide
  Sense strand starting at position 3325 of SEQ ID NO: 1879282
agguguuauuucccaguuu

SEQ ID NO: 1896267 - RNA, 19 nt, Artificial Sequence
  Description of Artificial Sequence: Synthetic oligonucleotide
  Antisense strand to SEQ ID NO: 1896266
aaacugggaaauaacaccu

SEQ ID NO: 1896268 - RNA, 19 nt, Artificial Sequence
  Description of Artificial Sequence: Synthetic oligonucleotide
  Sense strand starting at position 3577 of SEQ ID NO: 1879282
gucugacacccuuauagug

SEQ ID NO: 1896269 - RNA, 19 nt, Artificial Sequence
  Description of Artificial Sequence: Synthetic oligonucleotide
  Antisense strand to SEQ ID NO: 1896268
cacuauaagggugucagac

SEQ ID NO: 1896270 - RNA, 19 nt, Artificial Sequence
  Description of Artificial Sequence: Synthetic oligonucleotide
  Sense strand starting at position 3923 of SEQ ID NO: 1879282
ggaccauauucucucaggu

SEQ ID NO: 1896271 - RNA, 19 nt, Artificial Sequence
  Description of Artificial Sequence: Synthetic oligonucleotide
  Antisense strand to SEQ ID NO: 1896270
accugagagaauauggucc

SEQ ID NO: 1896272 - RNA, 19 nt, Artificial Sequence
  Description of Artificial Sequence: Synthetic oligonucleotide
  Sense strand starting at position 3938 of SEQ ID NO: 1879282
aggugaauuggcuauaugu

SEQ ID NO: 1896273 - RNA, 19 nt, Artificial Sequence
  Description of Artificial Sequence: Synthetic oligonucleotide
  Antisense strand to SEQ ID NO: 1896272
acauauagccaauucaccu

SEQ ID NO: 1896274 - RNA, 19 nt, Artificial Sequence
  Description of Artificial Sequence: Synthetic oligonucleotide
  Sense strand starting at position 3953 of SEQ ID NO: 1879282
auguucugugaacaaauau

SEQ ID NO: 1896275 - RNA, 19 nt, Artificial Sequence
  Description of Artificial Sequence: Synthetic oligonucleotide
  Antisense strand to SEQ ID NO: 1896274
auauuuguucacagaacau

SEQ ID NO: 1896276 - RNA, 19 nt, Artificial Sequence
  Description of Artificial Sequence: Synthetic oligonucleotide
  Sense strand starting at position 158 of SEQ ID NO: 1879284
gagggaucguggcuucuca

SEQ ID NO: 1896277 - RNA, 19 nt, Artificial Sequence
  Description of Artificial Sequence: Synthetic oligonucleotide
  Antisense strand to SEQ ID NO: 1896276
ugagaagccacgaucccuc

SEQ ID NO: 1896278 - RNA, 19 nt, Artificial Sequence
  Description of Artificial Sequence: Synthetic oligonucleotide
  Sense strand starting at position 166 of SEQ ID NO: 1879284
guggcuucucagugaggaa

SEQ ID NO: 1896279 - RNA, 19 nt, Artificial Sequence
  Description of Artificial Sequence: Synthetic oligonucleotide
  Antisense strand to SEQ ID NO: 1896278
uuccucacugagaagccac

SEQ ID NO: 1896280 - RNA, 19 nt, Artificial Sequence
  Description of Artificial Sequence: Synthetic oligonucleotide
  Sense strand starting at position 167 of SEQ ID NO: 1879284
uggcuucucagugaggaag

SEQ ID NO: 1896281 - RNA, 19 nt, Artificial Sequence
  Description of Artificial Sequence: Synthetic oligonucleotide
  Antisense strand to SEQ ID NO: 1896280
cuuccucacugagaagcca

SEQ ID NO: 1896282 - RNA, 19 nt, Artificial Sequence
  Description of Artificial Sequence: Synthetic oligonucleotide
  Sense strand starting at position 255 of SEQ ID NO: 1879284
gccauauuggucccgccau

SEQ ID NO: 1896283 - RNA, 19 nt, Artificial Sequence
  Description of Artificial Sequence: Synthetic oligonucleotide
  Antisense strand to SEQ ID NO: 1896282
auggcgggaccaauauggc

SEQ ID NO: 1896284 - RNA, 19 nt, Artificial Sequence
  Description of Artificial Sequence: Synthetic oligonucleotide
  Sense strand starting at position 458 of SEQ ID NO: 1879284
guuggaacccucuacucaa

SEQ ID NO: 1896285 - RNA, 19 nt, Artificial Sequence
  Description of Artificial Sequence: Synthetic oligonucleotide
  Antisense strand to SEQ ID NO: 1896284
uugaguagaggguuccaac

SEQ ID NO: 1896286 - RNA, 19 nt, Artificial Sequence
  Description of Artificial Sequence: Synthetic oligonucleotide
  Sense strand starting at position 486 of SEQ ID NO: 1879284
ggucccuccuagucuaaau

SEQ ID NO: 1896287 - RNA, 19 nt, Artificial Sequence
  Description of Artificial Sequence: Synthetic oligonucleotide
  Antisense strand to SEQ ID NO: 1896286
auuuagacuaggagggacc

SEQ ID NO: 1896288 - RNA, 19 nt, Artificial Sequence
  Description of Artificial Sequence: Synthetic oligonucleotide
  Sense strand starting at position 528 of SEQ ID NO: 1879284
aacccuaguuuguuuggaa

SEQ ID NO: 1896289 - RNA, 19 nt, Artificial Sequence
  Description of Artificial Sequence: Synthetic oligonucleotide
  Antisense strand to SEQ ID NO: 1896288
uuccaaacaaacuaggguu

SEQ ID NO: 1896290 - RNA, 19 nt, Artificial Sequence
  Description of Artificial Sequence: Synthetic oligonucleotide
  Sense strand starting at position 660 of SEQ ID NO: 1879284
ccuucuuagcaaggaugga

SEQ ID NO: 1896291 - RNA, 19 nt, Artificial Sequence
  Description of Artificial Sequence: Synthetic oligonucleotide
  Antisense strand to SEQ ID NO: 1896290
uccauccuugcuaagaagg

SEQ ID NO: 1896292 - RNA, 19 nt, Artificial Sequence
  Description of Artificial Sequence: Synthetic oligonucleotide
  Sense strand starting at position 1336 of SEQ ID NO: 1879284
gggccuuucucccuuaacu

SEQ ID NO: 1896293 - RNA, 19 nt, Artificial Sequence
  Description of Artificial Sequence: Synthetic oligonucleotide
  Antisense strand to SEQ ID NO: 1896292
aguuaagggagaaaggccc

SEQ ID NO: 1896294 - RNA, 19 nt, Artificial Sequence
  Description of Artificial Sequence: Synthetic oligonucleotide
  Sense strand starting at position 1345 of SEQ ID NO: 1879284
ucccuuaacugcuugguaa

SEQ ID NO: 1896295 - RNA, 19 nt, Artificial Sequence
  Description of Artificial Sequence: Synthetic oligonucleotide
  Antisense strand to SEQ ID NO: 1896294
uuaccaagcaguuaaggga

SEQ ID NO: 1896296 - RNA, 19 nt, Artificial Sequence
  Description of Artificial Sequence: Synthetic oligonucleotide
  Sense strand starting at position 1346 of SEQ ID NO: 1879284
cccuuaacugcuugguaac

SEQ ID NO: 1896297 - RNA, 19 nt, Artificial Sequence
  Description of Artificial Sequence: Synthetic oligonucleotide
  Antisense strand to SEQ ID NO: 1896296
guuaccaagcaguuaaggg

SEQ ID NO: 1896298 - RNA, 19 nt, Artificial Sequence
  Description of Artificial Sequence: Synthetic oligonucleotide
  Sense strand starting at position 1347 of SEQ ID NO: 1879284
ccuuaacugcuugguaacu

SEQ ID NO: 1896299 - RNA, 19 nt, Artificial Sequence
  Description of Artificial Sequence: Synthetic oligonucleotide
  Antisense strand to SEQ ID NO: 1896298
aguuaccaagcaguuaagg

SEQ ID NO: 1896300 - RNA, 19 nt, Artificial Sequence
  Description of Artificial Sequence: Synthetic oligonucleotide
  Sense strand starting at position 1348 of SEQ ID NO: 1879284
cuuaacugcuugguaacua

SEQ ID NO: 1896301 - RNA, 19 nt, Artificial Sequence
  Description of Artificial Sequence: Synthetic oligonucleotide
  Antisense strand to SEQ ID NO: 1896300
uaguuaccaagcaguuaag

SEQ ID NO: 1896302 - RNA, 19 nt, Artificial Sequence
  Description of Artificial Sequence: Synthetic oligonucleotide
  Sense strand starting at position 1701 of SEQ ID NO: 1879284
gagggaucauugcccugga

SEQ ID NO: 1896303 - RNA, 19 nt, Artificial Sequence
  Description of Artificial Sequence: Synthetic oligonucleotide
  Antisense strand to SEQ ID NO: 1896302
uccagggcaaugaucccuc

SEQ ID NO: 1896304 - RNA, 19 nt, Artificial Sequence
  Description of Artificial Sequence: Synthetic oligonucleotide
  Sense strand starting at position 1704 of SEQ ID NO: 1879284
ggaucauugcccuggagug

SEQ ID NO: 1896305 - RNA, 19 nt, Artificial Sequence
  Description of Artificial Sequence: Synthetic oligonucleotide
  Antisense strand to SEQ ID NO: 1896304
cacuccagggcaaugaucc

SEQ ID NO: 1896306 - RNA, 19 nt, Artificial Sequence
  Description of Artificial Sequence: Synthetic oligonucleotide
  Sense strand starting at position 1714 of SEQ ID NO: 1879284
ccuggagugccagagaagu

SEQ ID NO: 1896307 - RNA, 19 nt, Artificial Sequence
  Description of Artificial Sequence: Synthetic oligonucleotide
  Antisense strand to SEQ ID NO: 1896306
acuucucuggcacuccagg

SEQ ID NO: 1896308 - RNA, 19 nt, Artificial Sequence
  Description of Artificial Sequence: Synthetic oligonucleotide
  Sense strand starting at position 1720 of SEQ ID NO: 1879284
gugccagagaaguguggaa

SEQ ID NO: 1896309 - RNA, 19 nt, Artificial Sequence
  Description of Artificial Sequence: Synthetic oligonucleotide
  Antisense strand to SEQ ID NO: 1896308
uuccacacuucucuggcac

SEQ ID NO: 1896310 - RNA, 19 nt, Artificial Sequence
  Description of Artificial Sequence: Synthetic oligonucleotide
  Sense strand starting at position 1786 of SEQ ID NO: 1879284
ccuuaagaggagugaucuu

SEQ ID NO: 1896311 - RNA, 19 nt, Artificial Sequence
  Description of Artificial Sequence: Synthetic oligonucleotide
  Antisense strand to SEQ ID NO: 1896310
aagaucacuccucuuaagg

SEQ ID NO: 1896312 - RNA, 19 nt, Artificial Sequence
  Description of Artificial Sequence: Synthetic oligonucleotide
  Sense strand starting at position 1795 of SEQ ID NO: 1879284
gagugaucuuacucagggu

SEQ ID NO: 1896313 - RNA, 19 nt, Artificial Sequence
  Description of Artificial Sequence: Synthetic oligonucleotide
  Antisense strand to SEQ ID NO: 1896312
acccugaguaagaucacuc

SEQ ID NO: 1896314 - RNA, 19 nt, Artificial Sequence
  Description of Artificial Sequence: Synthetic oligonucleotide
  Sense strand starting at position 1796 of SEQ ID NO: 1879284
agugaucuuacucagggua

SEQ ID NO: 1896315 - RNA, 19 nt, Artificial Sequence
  Description of Artificial Sequence: Synthetic oligonucleotide
  Antisense strand to SEQ ID NO: 1896314
uacccugaguaagaucacu

SEQ ID NO: 1896316 - RNA, 19 nt, Artificial Sequence
  Description of Artificial Sequence: Synthetic oligonucleotide
  Sense strand starting at position 1981 of SEQ ID NO: 1879284
ggaccagaauugucuuugu

SEQ ID NO: 1896317 - RNA, 19 nt, Artificial Sequence
  Description of Artificial Sequence: Synthetic oligonucleotide
  Antisense strand to SEQ ID NO: 1896316
acaaagacaauucuggucc

SEQ ID NO: 1896318 - RNA, 19 nt, Artificial Sequence
  Description of Artificial Sequence: Synthetic oligonucleotide
  Sense strand starting at position 1984 of SEQ ID NO: 1879284
ccagaauugucuuuguccu

SEQ ID NO: 1896319 - RNA, 19 nt, Artificial Sequence
  Description of Artificial Sequence: Synthetic oligonucleotide
  Antisense strand to SEQ ID NO: 1896318
aggacaaagacaauucugg

SEQ ID NO: 1896320 - RNA, 19 nt, Artificial Sequence
  Description of Artificial Sequence: Synthetic oligonucleotide
  Sense strand starting at position 1985 of SEQ ID NO: 1879284
cagaauugucuuuguccug

SEQ ID NO: 1896321 - RNA, 19 nt, Artificial Sequence
  Description of Artificial Sequence: Synthetic oligonucleotide
  Antisense strand to SEQ ID NO: 1896320
caggacaaagacaauucug

SEQ ID NO: 1896322 - RNA, 19 nt, Artificial Sequence
  Description of Artificial Sequence: Synthetic oligonucleotide
  Sense strand starting at position 2104 of SEQ ID NO: 1879284
ucugucuucccuggaagaa

SEQ ID NO: 1896323 - RNA, 19 nt, Artificial Sequence
  Description of Artificial Sequence: Synthetic oligonucleotide
  Antisense strand to SEQ ID NO: 1896322
uucuuccagggaagacaga

SEQ ID NO: 1896324 - RNA, 19 nt, Artificial Sequence
  Description of Artificial Sequence: Synthetic oligonucleotide
  Sense strand starting at position 2105 of SEQ ID NO: 1879284
cugucuucccuggaagaau

SEQ ID NO: 1896325 - RNA, 19 nt, Artificial Sequence
  Description of Artificial Sequence: Synthetic oligonucleotide
  Antisense strand to SEQ ID NO: 1896324
auucuuccagggaagacag

SEQ ID NO: 1896326 - RNA, 19 nt, Artificial Sequence
  Description of Artificial Sequence: Synthetic oligonucleotide
  Sense strand starting at position 2116 of SEQ ID NO: 1879284
ggaagaauuggccaggccu

SEQ ID NO: 1896327 - RNA, 19 nt, Artificial Sequence
  Description of Artificial Sequence: Synthetic oligonucleotide
  Antisense strand to SEQ ID NO: 1896326
aggccuggccaauucuucc

SEQ ID NO: 1896328 - RNA, 19 nt, Artificial Sequence
  Description of Artificial Sequence: Synthetic oligonucleotide
  Sense strand starting at position 2161 of SEQ ID NO: 1879284
agcggauccuggguuugaa

SEQ ID NO: 1896329 - RNA, 19 nt, Artificial Sequence
  Description of Artificial Sequence: Synthetic oligonucleotide
  Antisense strand to SEQ ID NO: 1896328
uucaaacccaggauccgcu

SEQ ID NO: 1896330 - RNA, 19 nt, Artificial Sequence
  Description of Artificial Sequence: Synthetic oligonucleotide
  Sense strand starting at position 2302 of SEQ ID NO: 1879284
ccugguugucauggcagga

SEQ ID NO: 1896331 - RNA, 19 nt, Artificial Sequence
  Description of Artificial Sequence: Synthetic oligonucleotide
  Antisense strand to SEQ ID NO: 1896330
uccugccaugacaaccagg

SEQ ID NO: 1896332 - RNA, 19 nt, Artificial Sequence
  Description of Artificial Sequence: Synthetic oligonucleotide
  Sense strand starting at position 2438 of SEQ ID NO: 1879284
ccaagcuagcaucaggauu

SEQ ID NO: 1896333 - RNA, 19 nt, Artificial Sequence
  Description of Artificial Sequence: Synthetic oligonucleotide
  Antisense strand to SEQ ID NO: 1896332
aauccugaugcuagcuugg

SEQ ID NO: 1896334 - RNA, 19 nt, Artificial Sequence
  Description of Artificial Sequence: Synthetic oligonucleotide
  Sense strand starting at position 2568 of SEQ ID NO: 1879284
gccuuagucaggcaauaag

SEQ ID NO: 1896335 - RNA, 19 nt, Artificial Sequence
  Description of Artificial Sequence: Synthetic oligonucleotide
  Antisense strand to SEQ ID NO: 1896334
cuuauugccugacuaaggc

SEQ ID NO: 1896336 - RNA, 19 nt, Artificial Sequence
  Description of Artificial Sequence: Synthetic oligonucleotide
  Sense strand starting at position 2595 of SEQ ID NO: 1879284
ggacugguuuggguaggaa

SEQ ID NO: 1896337 - RNA, 19 nt, Artificial Sequence
  Description of Artificial Sequence: Synthetic oligonucleotide
  Antisense strand to SEQ ID NO: 1896336
uuccuacccaaaccagucc

SEQ ID NO: 1896338 - RNA, 19 nt, Artificial Sequence
  Description of Artificial Sequence: Synthetic oligonucleotide
  Sense strand starting at position 2742 of SEQ ID NO: 1879284
ugugaauguggugauucuu

SEQ ID NO: 1896339 - RNA, 19 nt, Artificial Sequence
  Description of Artificial Sequence: Synthetic oligonucleotide
  Antisense strand to SEQ ID NO: 1896338
aagaaucaccacauucaca

SEQ ID NO: 1896340 - RNA, 19 nt, Artificial Sequence
  Description of Artificial Sequence: Synthetic oligonucleotide
  Sense strand starting at position 2750 of SEQ ID NO: 1879284
uggugauucuucucuuccu

SEQ ID NO: 1896341 - RNA, 19 nt, Artificial Sequence
  Description of Artificial Sequence: Synthetic oligonucleotide
  Antisense strand to SEQ ID NO: 1896340
aggaagagaagaaucacca

SEQ ID NO: 1896342 - RNA, 19 nt, Artificial Sequence
  Description of Artificial Sequence: Synthetic oligonucleotide
  Sense strand starting at position 2755 of SEQ ID NO: 1879284
auucuucucuuccugagga

SEQ ID NO: 1896343 - RNA, 19 nt, Artificial Sequence
  Description of Artificial Sequence: Synthetic oligonucleotide
  Antisense strand to SEQ ID NO: 1896342
uccucaggaagagaagaau

SEQ ID NO: 1896344 - RNA, 19 nt, Artificial Sequence
  Description of Artificial Sequence: Synthetic oligonucleotide
  Sense strand starting at position 2859 of SEQ ID NO: 1879284
uuaagauaucugggcgcaa

SEQ ID NO: 1896345 - RNA, 19 nt, Artificial Sequence
  Description of Artificial Sequence: Synthetic oligonucleotide
  Antisense strand to SEQ ID NO: 1896344
uugcgcccagauaucuuaa

SEQ ID NO: 1896346 - RNA, 19 nt, Artificial Sequence
  Description of Artificial Sequence: Synthetic oligonucleotide
  Sense strand starting at position 2860 of SEQ ID NO: 1879284
uaagauaucugggcgcaaa

SEQ ID NO: 1896347 - RNA, 19 nt, Artificial Sequence
  Description of Artificial Sequence: Synthetic oligonucleotide
  Antisense strand to SEQ ID NO: 1896346
uuugcgcccagauaucuua

SEQ ID NO: 1896348 - RNA, 19 nt, Artificial Sequence
  Description of Artificial Sequence: Synthetic oligonucleotide
  Sense strand starting at position 2861 of SEQ ID NO: 1879284
aagauaucugggcgcaaag

SEQ ID NO: 1896349 - RNA, 19 nt, Artificial Sequence
  Description of Artificial Sequence: Synthetic oligonucleotide
  Antisense strand to SEQ ID NO: 1896348
cuuugcgcccagauaucuu

SEQ ID NO: 1896350 - RNA, 19 nt, Artificial Sequence
  Description of Artificial Sequence: Synthetic oligonucleotide
  Sense strand starting at position 3533 of SEQ ID NO: 1879284
gcaccuuucuauuucucga

SEQ ID NO: 1896351 - RNA, 19 nt, Artificial Sequence
  Description of Artificial Sequence: Synthetic oligonucleotide
  Antisense strand to SEQ ID NO: 1896350
ucgagaaauagaaaggugc

SEQ ID NO: 1896352 - RNA, 19 nt, Artificial Sequence
  Description of Artificial Sequence: Synthetic oligonucleotide
  Sense strand starting at position 3766 of SEQ ID NO: 1879284
cugucuguccaauaugaau

SEQ ID NO: 1896353 - RNA, 19 nt, Artificial Sequence
  Description of Artificial Sequence: Synthetic oligonucleotide
  Antisense strand to SEQ ID NO: 1896352
auucauauuggacagacag

SEQ ID NO: 1896354 - RNA, 19 nt, Artificial Sequence
  Description of Artificial Sequence: Synthetic oligonucleotide
  Sense strand starting at position 3777 of SEQ ID NO: 1879284
auaugaaucuuacuacguc

SEQ ID NO: 1896355 - RNA, 19 nt, Artificial Sequence
  Description of Artificial Sequence: Synthetic oligonucleotide
  Antisense strand to SEQ ID NO: 1896354
gacguaguaagauucauau

SEQ ID NO: 1896356 - RNA, 19 nt, Artificial Sequence
  Description of Artificial Sequence: Synthetic oligonucleotide
  Sense strand starting at position 58 of SEQ ID NO: 1879285
uaagaauucugauugguga

SEQ ID NO: 1896357 - RNA, 19 nt, Artificial Sequence
  Description of Artificial Sequence: Synthetic oligonucleotide
  Antisense strand to SEQ ID NO: 1896356
ucaccaaucagaauucuua

SEQ ID NO: 1896358 - RNA, 19 nt, Artificial Sequence
  Description of Artificial Sequence: Synthetic oligonucleotide
  Sense strand starting at position 59 of SEQ ID NO: 1879285
aagaauucugauuggugac

SEQ ID NO: 1896359 - RNA, 19 nt, Artificial Sequence
  Description of Artificial Sequence: Synthetic oligonucleotide
  Antisense strand to SEQ ID NO: 1896358
gucaccaaucagaauucuu

SEQ ID NO: 1896360 - RNA, 19 nt, Artificial Sequence
  Description of Artificial Sequence: Synthetic oligonucleotide
  Sense strand starting at position 60 of SEQ ID NO: 1879285
agaauucugauuggugacu

SEQ ID NO: 1896361 - RNA, 19 nt, Artificial Sequence
  Description of Artificial Sequence: Synthetic oligonucleotide
  Antisense strand to SEQ ID NO: 1896360
agucaccaaucagaauucu

SEQ ID NO: 1896362 - RNA, 19 nt, Artificial Sequence
  Description of Artificial Sequence: Synthetic oligonucleotide
  Sense strand starting at position 61 of SEQ ID NO: 1879285
gaauucugauuggugacuu

SEQ ID NO: 1896363 - RNA, 19 nt, Artificial Sequence
  Description of Artificial Sequence: Synthetic oligonucleotide
  Antisense strand to SEQ ID NO: 1896362
aagucaccaaucagaauuc

SEQ ID NO: 1896364 - RNA, 19 nt, Artificial Sequence
  Description of Artificial Sequence: Synthetic oligonucleotide
  Sense strand starting at position 65 of SEQ ID NO: 1879285
ucugauuggugacuugcaa

SEQ ID NO: 1896365 - RNA, 19 nt, Artificial Sequence
  Description of Artificial Sequence: Synthetic oligonucleotide
  Antisense strand to SEQ ID NO: 1896364
uugcaagucaccaaucaga

SEQ ID NO: 1896366 - RNA, 19 nt, Artificial Sequence
  Description of Artificial Sequence: Synthetic oligonucleotide
  Sense strand starting at position 72 of SEQ ID NO: 1879285
ggugacuugcaagauacca

SEQ ID NO: 1896367 - RNA, 19 nt, Artificial Sequence
  Description of Artificial Sequence: Synthetic oligonucleotide
  Antisense strand to SEQ ID NO: 1896366
ugguaucuugcaagucacc

SEQ ID NO: 1896368 - RNA, 19 nt, Artificial Sequence
  Description of Artificial Sequence: Synthetic oligonucleotide
  Sense strand starting at position 158 of SEQ ID NO: 1879285
cuuaguauuuauggaaaga

SEQ ID NO: 1896369 - RNA, 19 nt, Artificial Sequence
  Description of Artificial Sequence: Synthetic oligonucleotide
  Antisense strand to SEQ ID NO: 1896368
ucuuuccauaaauacuaag

SEQ ID NO: 1896370 - RNA, 19 nt, Artificial Sequence
  Description of Artificial Sequence: Synthetic oligonucleotide
  Sense strand starting at position 212 of SEQ ID NO: 1879285
aagggcaucccuuguguaa

SEQ ID NO: 1896371 - RNA, 19 nt, Artificial Sequence
  Description of Artificial Sequence: Synthetic oligonucleotide
  Antisense strand to SEQ ID NO: 1896370
uuacacaagggaugcccuu

SEQ ID NO: 1896372 - RNA, 19 nt, Artificial Sequence
  Description of Artificial Sequence: Synthetic oligonucleotide
  Sense strand starting at position 399 of SEQ ID NO: 1879285
ucauuaaaugacuguugaa

SEQ ID NO: 1896373 - RNA, 19 nt, Artificial Sequence
  Description of Artificial Sequence: Synthetic oligonucleotide
  Antisense strand to SEQ ID NO: 1896372
uucaacagucauuuaauga

SEQ ID NO: 1896374 - RNA, 19 nt, Artificial Sequence
  Description of Artificial Sequence: Synthetic oligonucleotide
  Sense strand starting at position 545 of SEQ ID NO: 1879285
uuuaaauaguguccaccua

SEQ ID NO: 1896375 - RNA, 19 nt, Artificial Sequence
  Description of Artificial Sequence: Synthetic oligonucleotide
  Antisense strand to SEQ ID NO: 1896374
uagguggacacuauuuaaa

SEQ ID NO: 1896376 - RNA, 19 nt, Artificial Sequence
  Description of Artificial Sequence: Synthetic oligonucleotide
  Sense strand starting at position 614 of SEQ ID NO: 1879285
gcucuuuaagacugaaaga

SEQ ID NO: 1896377 - RNA, 19 nt, Artificial Sequence
  Description of Artificial Sequence: Synthetic oligonucleotide
  Antisense strand to SEQ ID NO: 1896376
ucuuucagucuuaaagagc

SEQ ID NO: 1896378 - RNA, 19 nt, Artificial Sequence
  Description of Artificial Sequence: Synthetic oligonucleotide
  Sense strand starting at position 624 of SEQ ID NO: 1879285
acugaaagaugugaagaca

SEQ ID NO: 1896379 - RNA, 19 nt, Artificial Sequence
  Description of Artificial Sequence: Synthetic oligonucleotide
  Antisense strand to SEQ ID NO: 1896378
ugucuucacaucuuucagu

SEQ ID NO: 1896380 - RNA, 19 nt, Artificial Sequence
  Description of Artificial Sequence: Synthetic oligonucleotide
  Sense strand starting at position 727 of SEQ ID NO: 1879285
gucucuggaaacugaugua

SEQ ID NO: 1896381 - RNA, 19 nt, Artificial Sequence
  Description of Artificial Sequence: Synthetic oligonucleotide
  Antisense strand to SEQ ID NO: 1896380
uacaucaguuuccagagac

SEQ ID NO: 1896382 - RNA, 19 nt, Artificial Sequence
  Description of Artificial Sequence: Synthetic oligonucleotide
  Sense strand starting at position 832 of SEQ ID NO: 1879285
auuucugauuuguagcaau

SEQ ID NO: 1896383 - RNA, 19 nt, Artificial Sequence
  Description of Artificial Sequence: Synthetic oligonucleotide
  Antisense strand to SEQ ID NO: 1896382
auugcuacaaaucagaaau

SEQ ID NO: 1896384 - RNA, 19 nt, Artificial Sequence
  Description of Artificial Sequence: Synthetic oligonucleotide
  Sense strand starting at position 906 of SEQ ID NO: 1879285
gcagcugaccuugaugagu

SEQ ID NO: 1896385 - RNA, 19 nt, Artificial Sequence
  Description of Artificial Sequence: Synthetic oligonucleotide
  Antisense strand to SEQ ID NO: 1896384
acucaucaaggucagcugc

SEQ ID NO: 1896386 - RNA, 19 nt, Artificial Sequence
  Description of Artificial Sequence: Synthetic oligonucleotide
  Sense strand starting at position 911 of SEQ ID NO: 1879285
ugaccuugaugaguuagga

SEQ ID NO: 1896387 - RNA, 19 nt, Artificial Sequence
  Description of Artificial Sequence: Synthetic oligonucleotide
  Antisense strand to SEQ ID NO: 1896386
uccuaacucaucaagguca

SEQ ID NO: 1896388 - RNA, 19 nt, Artificial Sequence
  Description of Artificial Sequence: Synthetic oligonucleotide
  Sense strand starting at position 925 of SEQ ID NO: 1879285
uaggauuaugcuggaaauc

SEQ ID NO: 1896389 - RNA, 19 nt, Artificial Sequence
  Description of Artificial Sequence: Synthetic oligonucleotide
  Antisense strand to SEQ ID NO: 1896388
gauuuccagcauaauccua

SEQ ID NO: 1896390 - RNA, 19 nt, Artificial Sequence
  Description of Artificial Sequence: Synthetic oligonucleotide
  Sense strand starting at position 935 of SEQ ID NO: 1879285
cuggaaaucaguugcugaa

SEQ ID NO: 1896391 - RNA, 19 nt, Artificial Sequence
  Description of Artificial Sequence: Synthetic oligonucleotide
  Antisense strand to SEQ ID NO: 1896390
uucagcaacugauuuccag

SEQ ID NO: 1896392 - RNA, 19 nt, Artificial Sequence
  Description of Artificial Sequence: Synthetic oligonucleotide
  Sense strand starting at position 937 of SEQ ID NO: 1879285
ggaaaucaguugcugaaau

SEQ ID NO: 1896393 - RNA, 19 nt, Artificial Sequence
  Description of Artificial Sequence: Synthetic oligonucleotide
  Antisense strand to SEQ ID NO: 1896392
auuucagcaacugauuucc

SEQ ID NO: 1896394 - RNA, 19 nt, Artificial Sequence
  Description of Artificial Sequence: Synthetic oligonucleotide
  Sense strand starting at position 1499 of SEQ ID NO: 1879285
gcagcuuaguuaucauaaa

SEQ ID NO: 1896395 - RNA, 19 nt, Artificial Sequence
  Description of Artificial Sequence: Synthetic oligonucleotide
  Antisense strand to SEQ ID NO: 1896394
uuuaugauaacuaagcugc

SEQ ID NO: 1896396 - RNA, 19 nt, Artificial Sequence
  Description of Artificial Sequence: Synthetic oligonucleotide
  Sense strand starting at position 1585 of SEQ ID NO: 1879285
ucuccauuagcuggauuaa

SEQ ID NO: 1896397 - RNA, 19 nt, Artificial Sequence
  Description of Artificial Sequence: Synthetic oligonucleotide
  Antisense strand to SEQ ID NO: 1896396
uuaauccagcuaauggaga

SEQ ID NO: 1896398 - RNA, 19 nt, Artificial Sequence
  Description of Artificial Sequence: Synthetic oligonucleotide
  Sense strand starting at position 1586 of SEQ ID NO: 1879285
cuccauuagcuggauuaac

SEQ ID NO: 1896399 - RNA, 19 nt, Artificial Sequence
  Description of Artificial Sequence: Synthetic oligonucleotide
  Antisense strand to SEQ ID NO: 1896398
guuaauccagcuaauggag

SEQ ID NO: 1896400 - RNA, 19 nt, Artificial Sequence
  Description of Artificial Sequence: Synthetic oligonucleotide
  Sense strand starting at position 2052 of SEQ ID NO: 1879285
gcacgaauucuagaguuuc

SEQ ID NO: 1896401 - RNA, 19 nt, Artificial Sequence
  Description of Artificial Sequence: Synthetic oligonucleotide
  Antisense strand to SEQ ID NO: 1896400
gaaacucuagaauucgugc

SEQ ID NO: 1896402 - RNA, 19 nt, Artificial Sequence
  Description of Artificial Sequence: Synthetic oligonucleotide
  Sense strand starting at position 2086 of SEQ ID NO: 1879285
ugagauuguacgggaaaca

SEQ ID NO: 1896403 - RNA, 19 nt, Artificial Sequence
  Description of Artificial Sequence: Synthetic oligonucleotide
  Antisense strand to SEQ ID NO: 1896402
uguuucccguacaaucuca

SEQ ID NO: 1896404 - RNA, 19 nt, Artificial Sequence
  Description of Artificial Sequence: Synthetic oligonucleotide
  Sense strand starting at position 2135 of SEQ ID NO: 1879285
acacgucugguagaaccua

SEQ ID NO: 1896405 - RNA, 19 nt, Artificial Sequence
  Description of Artificial Sequence: Synthetic oligonucleotide
  Antisense strand to SEQ ID NO: 1896404
uagguucuaccagacgugu

SEQ ID NO: 1896406 - RNA, 19 nt, Artificial Sequence
  Description of Artificial Sequence: Synthetic oligonucleotide
  Sense strand starting at position 2444 of SEQ ID NO: 1879285
cuaagauuugggcgcccau

SEQ ID NO: 1896407 - RNA, 19 nt, Artificial Sequence
  Description of Artificial Sequence: Synthetic oligonucleotide
  Antisense strand to SEQ ID NO: 1896406
augggcgcccaaaucuuag

SEQ ID NO: 1896408 - RNA, 19 nt, Artificial Sequence
  Description of Artificial Sequence: Synthetic oligonucleotide
  Sense strand starting at position 2612 of SEQ ID NO: 1879285
ccaugcauccgggaacacu

SEQ ID NO: 1896409 - RNA, 19 nt, Artificial Sequence
  Description of Artificial Sequence: Synthetic oligonucleotide
  Antisense strand to SEQ ID NO: 1896408
aguguucccggaugcaugg

SEQ ID NO: 1896410 - RNA, 19 nt, Artificial Sequence
  Description of Artificial Sequence: Synthetic oligonucleotide
  Sense strand starting at position 3378 of SEQ ID NO: 1879285
guaucauucccaggucuau

SEQ ID NO: 1896411 - RNA, 19 nt, Artificial Sequence
  Description of Artificial Sequence: Synthetic oligonucleotide
  Antisense strand to SEQ ID NO: 1896410
auagaccugggaaugauac

SEQ ID NO: 1896412 - RNA, 19 nt, Artificial Sequence
  Description of Artificial Sequence: Synthetic oligonucleotide
  Sense strand starting at position 3550 of SEQ ID NO: 1879285
guuugcuuaaugccacgua

SEQ ID NO: 1896413 - RNA, 19 nt, Artificial Sequence
  Description of Artificial Sequence: Synthetic oligonucleotide
  Antisense strand to SEQ ID NO: 1896412
uacguggcauuaagcaaac

SEQ ID NO: 1896414 - RNA, 19 nt, Artificial Sequence
  Description of Artificial Sequence: Synthetic oligonucleotide
  Sense strand starting at position 3653 of SEQ ID NO: 1879285
gggcuacaguucuugagua

SEQ ID NO: 1896415 - RNA, 19 nt, Artificial Sequence
  Description of Artificial Sequence: Synthetic oligonucleotide
  Antisense strand to SEQ ID NO: 1896414
uacucaagaacuguagccc

SEQ ID NO: 1896416 - RNA, 19 nt, Artificial Sequence
  Description of Artificial Sequence: Synthetic oligonucleotide
  Sense strand starting at position 3655 of SEQ ID NO: 1879285
gcuacaguucuugaguaag

SEQ ID NO: 1896417 - RNA, 19 nt, Artificial Sequence
  Description of Artificial Sequence: Synthetic oligonucleotide
  Antisense strand to SEQ ID NO: 1896416
cuuacucaagaacuguagc

SEQ ID NO: 1896418 - RNA, 19 nt, Artificial Sequence
  Description of Artificial Sequence: Synthetic oligonucleotide
  Sense strand starting at position 3657 of SEQ ID NO: 1879285
uacaguucuugaguaagau

SEQ ID NO: 1896419 - RNA, 19 nt, Artificial Sequence
  Description of Artificial Sequence: Synthetic oligonucleotide
  Antisense strand to SEQ ID NO: 1896418
aucuuacucaagaacugua

SEQ ID NO: 1896420 - RNA, 19 nt, Artificial Sequence
  Description of Artificial Sequence: Synthetic oligonucleotide
  Sense strand starting at position 3658 of SEQ ID NO: 1879285
acaguucuugaguaagauc

SEQ ID NO: 1896421 - RNA, 19 nt, Artificial Sequence
  Description of Artificial Sequence: Synthetic oligonucleotide
  Antisense strand to SEQ ID NO: 1896420
gaucuuacucaagaacugu

SEQ ID NO: 1896422 - RNA, 19 nt, Artificial Sequence
  Description of Artificial Sequence: Synthetic oligonucleotide
  Sense strand starting at position 3667 of SEQ ID NO: 1879285
gaguaagaucugggccuau

SEQ ID NO: 1896423 - RNA, 19 nt, Artificial Sequence
  Description of Artificial Sequence: Synthetic oligonucleotide
  Antisense strand to SEQ ID NO: 1896422
auaggcccagaucuuacuc

SEQ ID NO: 1896424 - RNA, 19 nt, Artificial Sequence
  Description of Artificial Sequence: Synthetic oligonucleotide
  Sense strand starting at position 3808 of SEQ ID NO: 1879285
cuuuguuggaauugggaga

SEQ ID NO: 1896425 - RNA, 19 nt, Artificial Sequence
  Description of Artificial Sequence: Synthetic oligonucleotide
  Antisense strand to SEQ ID NO: 1896424
ucucccaauuccaacaaag

SEQ ID NO: 1896426 - RNA, 19 nt, Artificial Sequence
  Description of Artificial Sequence: Synthetic oligonucleotide
  Sense strand starting at position 3809 of SEQ ID NO: 1879285
uuuguuggaauugggagaa

SEQ ID NO: 1896427 - RNA, 19 nt, Artificial Sequence
  Description of Artificial Sequence: Synthetic oligonucleotide
  Antisense strand to SEQ ID NO: 1896426
uucucccaauuccaacaaa

SEQ ID NO: 1896428 - RNA, 19 nt, Artificial Sequence
  Description of Artificial Sequence: Synthetic oligonucleotide
  Sense strand starting at position 3821 of SEQ ID NO: 1879285
gggagaaacuuguuugcug

SEQ ID NO: 1896429 - RNA, 19 nt, Artificial Sequence
  Description of Artificial Sequence: Synthetic oligonucleotide
  Antisense strand to SEQ ID NO: 1896428
cagcaaacaaguuucuccc

SEQ ID NO: 1896430 - RNA, 19 nt, Artificial Sequence
  Description of Artificial Sequence: Synthetic oligonucleotide
  Sense strand starting at position 3948 of SEQ ID NO: 1879285
uaaagugauaucgggagga

SEQ ID NO: 1896431 - RNA, 19 nt, Artificial Sequence
  Description of Artificial Sequence: Synthetic oligonucleotide
  Antisense strand to SEQ ID NO: 1896430
uccucccgauaucacuuua

SEQ ID NO: 1896432 - RNA, 19 nt, Artificial Sequence
  Description of Artificial Sequence: Synthetic oligonucleotide
  Sense strand starting at position 3952 of SEQ ID NO: 1879285
gugauaucgggaggaauau

SEQ ID NO: 1896433 - RNA, 19 nt, Artificial Sequence
  Description of Artificial Sequence: Synthetic oligonucleotide
  Antisense strand to SEQ ID NO: 1896432
auauuccucccgauaucac

SEQ ID NO: 1896434 - RNA, 19 nt, Artificial Sequence
  Description of Artificial Sequence: Synthetic oligonucleotide
  Sense strand starting at position 3961 of SEQ ID NO: 1879285
ggaggaauaugugucauuc

SEQ ID NO: 1896435 - RNA, 19 nt, Artificial Sequence
  Description of Artificial Sequence: Synthetic oligonucleotide
  Antisense strand to SEQ ID NO: 1896434
gaaugacacauauuccucc

SEQ ID NO: 1896436 - RNA, 19 nt, Artificial Sequence
  Description of Artificial Sequence: Synthetic oligonucleotide
  Sense strand starting at position 16 of SEQ ID NO: 1879286
cuggcauucccauggcuua

SEQ ID NO: 1896437 - RNA, 19 nt, Artificial Sequence
  Description of Artificial Sequence: Synthetic oligonucleotide
  Antisense strand to SEQ ID NO: 1896436
uaagccaugggaaugccag

SEQ ID NO: 1896438 - RNA, 19 nt, Artificial Sequence
  Description of Artificial Sequence: Synthetic oligonucleotide
  Sense strand starting at position 17 of SEQ ID NO: 1879286
uggcauucccauggcuuaa

SEQ ID NO: 1896439 - RNA, 19 nt, Artificial Sequence
  Description of Artificial Sequence: Synthetic oligonucleotide
  Antisense strand to SEQ ID NO: 1896438
uuaagccaugggaaugcca

SEQ ID NO: 1896440 - RNA, 19 nt, Artificial Sequence
  Description of Artificial Sequence: Synthetic oligonucleotide
  Sense strand starting at position 19 of SEQ ID NO: 1879286
gcauucccauggcuuaaau

SEQ ID NO: 1896441 - RNA, 19 nt, Artificial Sequence
  Description of Artificial Sequence: Synthetic oligonucleotide
  Antisense strand to SEQ ID NO: 1896440
auuuaagccaugggaaugc

SEQ ID NO: 1896442 - RNA, 19 nt, Artificial Sequence
  Description of Artificial Sequence: Synthetic oligonucleotide
  Sense strand starting at position 21 of SEQ ID NO: 1879286
auucccauggcuuaaauga

SEQ ID NO: 1896443 - RNA, 19 nt, Artificial Sequence
  Description of Artificial Sequence: Synthetic oligonucleotide
  Antisense strand to SEQ ID NO: 1896442
ucauuuaagccaugggaau

SEQ ID NO: 1896444 - RNA, 19 nt, Artificial Sequence
  Description of Artificial Sequence: Synthetic oligonucleotide
  Sense strand starting at position 70 of SEQ ID NO: 1879286
uggaguaagccauacacau

SEQ ID NO: 1896445 - RNA, 19 nt, Artificial Sequence
  Description of Artificial Sequence: Synthetic oligonucleotide
  Antisense strand to SEQ ID NO: 1896444
auguguauggcuuacucca

SEQ ID NO: 1896446 - RNA, 19 nt, Artificial Sequence
  Description of Artificial Sequence: Synthetic oligonucleotide
  Sense strand starting at position 194 of SEQ ID NO: 1879286
gcaguuagauaaguccuga

SEQ ID NO: 1896447 - RNA, 19 nt, Artificial Sequence
  Description of Artificial Sequence: Synthetic oligonucleotide
  Antisense strand to SEQ ID NO: 1896446
ucaggacuuaucuaacugc

SEQ ID NO: 1896448 - RNA, 19 nt, Artificial Sequence
  Description of Artificial Sequence: Synthetic oligonucleotide
  Sense strand starting at position 264 of SEQ ID NO: 1879286
gcuccaaaguccuuugcua

SEQ ID NO: 1896449 - RNA, 19 nt, Artificial Sequence
  Description of Artificial Sequence: Synthetic oligonucleotide
  Antisense strand to SEQ ID NO: 1896448
uagcaaaggacuuuggagc

SEQ ID NO: 1896450 - RNA, 19 nt, Artificial Sequence
  Description of Artificial Sequence: Synthetic oligonucleotide
  Sense strand starting at position 396 of SEQ ID NO: 1879286
ggugcucaaagcuguauuu

SEQ ID NO: 1896451 - RNA, 19 nt, Artificial Sequence
  Description of Artificial Sequence: Synthetic oligonucleotide
  Antisense strand to SEQ ID NO: 1896450
aaauacagcuuugagcacc

SEQ ID NO: 1896452 - RNA, 19 nt, Artificial Sequence
  Description of Artificial Sequence: Synthetic oligonucleotide
  Sense strand starting at position 484 of SEQ ID NO: 1879286
gcugcaaucaagugcuaga

SEQ ID NO: 1896453 - RNA, 19 nt, Artificial Sequence
  Description of Artificial Sequence: Synthetic oligonucleotide
  Antisense strand to SEQ ID NO: 1896452
ucuagcacuugauugcagc

SEQ ID NO: 1896454 - RNA, 19 nt, Artificial Sequence
  Description of Artificial Sequence: Synthetic oligonucleotide
  Sense strand starting at position 747 of SEQ ID NO: 1879286
auguacuucuaaguaaugu

SEQ ID NO: 1896455 - RNA, 19 nt, Artificial Sequence
  Description of Artificial Sequence: Synthetic oligonucleotide
  Antisense strand to SEQ ID NO: 1896454
acauuacuuagaaguacau

SEQ ID NO: 1896456 - RNA, 19 nt, Artificial Sequence
  Description of Artificial Sequence: Synthetic oligonucleotide
  Sense strand starting at position 770 of SEQ ID NO: 1879286
cuaaguaaagucuggcuaa

SEQ ID NO: 1896457 - RNA, 19 nt, Artificial Sequence
  Description of Artificial Sequence: Synthetic oligonucleotide
  Antisense strand to SEQ ID NO: 1896456
uuagccagacuuuacuuag

SEQ ID NO: 1896458 - RNA, 19 nt, Artificial Sequence
  Description of Artificial Sequence: Synthetic oligonucleotide
  Sense strand starting at position 773 of SEQ ID NO: 1879286
aguaaagucuggcuaauga

SEQ ID NO: 1896459 - RNA, 19 nt, Artificial Sequence
  Description of Artificial Sequence: Synthetic oligonucleotide
  Antisense strand to SEQ ID NO: 1896458
ucauuagccagacuuuacu

SEQ ID NO: 1896460 - RNA, 19 nt, Artificial Sequence
  Description of Artificial Sequence: Synthetic oligonucleotide
  Sense strand starting at position 840 of SEQ ID NO: 1879286
ugcauaugugcauacuaag

SEQ ID NO: 1896461 - RNA, 19 nt, Artificial Sequence
  Description of Artificial Sequence: Synthetic oligonucleotide
  Antisense strand to SEQ ID NO: 1896460
cuuaguaugcacauaugca

SEQ ID NO: 1896462 - RNA, 19 nt, Artificial Sequence
  Description of Artificial Sequence: Synthetic oligonucleotide
  Sense strand starting at position 846 of SEQ ID NO: 1879286
ugugcauacuaaguuuaaa

SEQ ID NO: 1896463 - RNA, 19 nt, Artificial Sequence
  Description of Artificial Sequence: Synthetic oligonucleotide
  Antisense strand to SEQ ID NO: 1896462
uuuaaacuuaguaugcaca

SEQ ID NO: 1896464 - RNA, 19 nt, Artificial Sequence
  Description of Artificial Sequence: Synthetic oligonucleotide
  Sense strand starting at position 849 of SEQ ID NO: 1879286
gcauacuaaguuuaaagau

SEQ ID NO: 1896465 - RNA, 19 nt, Artificial Sequence
  Description of Artificial Sequence: Synthetic oligonucleotide
  Antisense strand to SEQ ID NO: 1896464
aucuuuaaacuuaguaugc

SEQ ID NO: 1896466 - RNA, 19 nt, Artificial Sequence
  Description of Artificial Sequence: Synthetic oligonucleotide
  Sense strand starting at position 942 of SEQ ID NO: 1879286
ggcuaaugaucucuccaca

SEQ ID NO: 1896467 - RNA, 19 nt, Artificial Sequence
  Description of Artificial Sequence: Synthetic oligonucleotide
  Antisense strand to SEQ ID NO: 1896466
uguggagagaucauuagcc

SEQ ID NO: 1896468 - RNA, 19 nt, Artificial Sequence
  Description of Artificial Sequence: Synthetic oligonucleotide
  Sense strand starting at position 967 of SEQ ID NO: 1879286
guccucuaucaucacaagu

SEQ ID NO: 1896469 - RNA, 19 nt, Artificial Sequence
  Description of Artificial Sequence: Synthetic oligonucleotide
  Antisense strand to SEQ ID NO: 1896468
acuugugaugauagaggac

SEQ ID NO: 1896470 - RNA, 19 nt, Artificial Sequence
  Description of Artificial Sequence: Synthetic oligonucleotide
  Sense strand starting at position 980 of SEQ ID NO: 1879286
acaaguguccuguaagaag

SEQ ID NO: 1896471 - RNA, 19 nt, Artificial Sequence
  Description of Artificial Sequence: Synthetic oligonucleotide
  Antisense strand to SEQ ID NO: 1896470
cuucuuacaggacacuugu

SEQ ID NO: 1896472 - RNA, 19 nt, Artificial Sequence
  Description of Artificial Sequence: Synthetic oligonucleotide
  Sense strand starting at position 1062 of SEQ ID NO: 1879286
auccauucucaugggaaca

SEQ ID NO: 1896473 - RNA, 19 nt, Artificial Sequence
  Description of Artificial Sequence: Synthetic oligonucleotide
  Antisense strand to SEQ ID NO: 1896472
uguucccaugagaauggau

SEQ ID NO: 1896474 - RNA, 19 nt, Artificial Sequence
  Description of Artificial Sequence: Synthetic oligonucleotide
  Sense strand starting at position 1064 of SEQ ID NO: 1879286
ccauucucaugggaacaca

SEQ ID NO: 1896475 - RNA, 19 nt, Artificial Sequence
  Description of Artificial Sequence: Synthetic oligonucleotide
  Antisense strand to SEQ ID NO: 1896474
uguguucccaugagaaugg

SEQ ID NO: 1896476 - RNA, 19 nt, Artificial Sequence
  Description of Artificial Sequence: Synthetic oligonucleotide
  Sense strand starting at position 1213 of SEQ ID NO: 1879286
uaggaacgccuuuguugua

SEQ ID NO: 1896477 - RNA, 19 nt, Artificial Sequence
  Description of Artificial Sequence: Synthetic oligonucleotide
  Antisense strand to SEQ ID NO: 1896476
uacaacaaaggcguuccua

SEQ ID NO: 1896478 - RNA, 19 nt, Artificial Sequence
  Description of Artificial Sequence: Synthetic oligonucleotide
  Sense strand starting at position 1223 of SEQ ID NO: 1879286
uuuguuguacccuaacuau

SEQ ID NO: 1896479 - RNA, 19 nt, Artificial Sequence
  Description of Artificial Sequence: Synthetic oligonucleotide
  Antisense strand to SEQ ID NO: 1896478
auaguuaggguacaacaaa

SEQ ID NO: 1896480 - RNA, 19 nt, Artificial Sequence
  Description of Artificial Sequence: Synthetic oligonucleotide
  Sense strand starting at position 1457 of SEQ ID NO: 1879286
ucaguuucucguggugaag

SEQ ID NO: 1896481 - RNA, 19 nt, Artificial Sequence
  Description of Artificial Sequence: Synthetic oligonucleotide
  Antisense strand to SEQ ID NO: 1896480
cuucaccacgagaaacuga

SEQ ID NO: 1896482 - RNA, 19 nt, Artificial Sequence
  Description of Artificial Sequence: Synthetic oligonucleotide
  Sense strand starting at position 1460 of SEQ ID NO: 1879286
guuucucguggugaagagu

SEQ ID NO: 1896483 - RNA, 19 nt, Artificial Sequence
  Description of Artificial Sequence: Synthetic oligonucleotide
  Antisense strand to SEQ ID NO: 1896482
acucuucaccacgagaaac

SEQ ID NO: 1896484 - RNA, 19 nt, Artificial Sequence
  Description of Artificial Sequence: Synthetic oligonucleotide
  Sense strand starting at position 1469 of SEQ ID NO: 1879286
ggugaagagugagcacaau

SEQ ID NO: 1896485 - RNA, 19 nt, Artificial Sequence
  Description of Artificial Sequence: Synthetic oligonucleotide
  Antisense strand to SEQ ID NO: 1896484
auugugcucacucuucacc

SEQ ID NO: 1896486 - RNA, 19 nt, Artificial Sequence
  Description of Artificial Sequence: Synthetic oligonucleotide
  Sense strand starting at position 1497 of SEQ ID NO: 1879286
ggccgucucgcuaggugaa

SEQ ID NO: 1896487 - RNA, 19 nt, Artificial Sequence
  Description of Artificial Sequence: Synthetic oligonucleotide
  Antisense strand to SEQ ID NO: 1896486
uucaccuagcgagacggcc

SEQ ID NO: 1896488 - RNA, 19 nt, Artificial Sequence
  Description of Artificial Sequence: Synthetic oligonucleotide
  Sense strand starting at position 1511 of SEQ ID NO: 1879286
gugaaagaacgcugagauc

SEQ ID NO: 1896489 - RNA, 19 nt, Artificial Sequence
  Description of Artificial Sequence: Synthetic oligonucleotide
  Antisense strand to SEQ ID NO: 1896488
gaucucagcguucuuucac

SEQ ID NO: 1896490 - RNA, 19 nt, Artificial Sequence
  Description of Artificial Sequence: Synthetic oligonucleotide
  Sense strand starting at position 2193 of SEQ ID NO: 1879286
ggcaguccugacgguacua

SEQ ID NO: 1896491 - RNA, 19 nt, Artificial Sequence
  Description of Artificial Sequence: Synthetic oligonucleotide
  Antisense strand to SEQ ID NO: 1896490
uaguaccgucaggacugcc

SEQ ID NO: 1896492 - RNA, 19 nt, Artificial Sequence
  Description of Artificial Sequence: Synthetic oligonucleotide
  Sense strand starting at position 2274 of SEQ ID NO: 1879286
guaagaaguguugggugca

SEQ ID NO: 1896493 - RNA, 19 nt, Artificial Sequence
  Description of Artificial Sequence: Synthetic oligonucleotide
  Antisense strand to SEQ ID NO: 1896492
ugcacccaacacuucuuac

SEQ ID NO: 1896494 - RNA, 19 nt, Artificial Sequence
  Description of Artificial Sequence: Synthetic oligonucleotide
  Sense strand starting at position 2277 of SEQ ID NO: 1879286
agaaguguugggugcauuu

SEQ ID NO: 1896495 - RNA, 19 nt, Artificial Sequence
  Description of Artificial Sequence: Synthetic oligonucleotide
  Antisense strand to SEQ ID NO: 1896494
aaaugcacccaacacuucu

SEQ ID NO: 1896496 - RNA, 19 nt, Artificial Sequence
  Description of Artificial Sequence: Synthetic oligonucleotide
  Sense strand starting at position 2286 of SEQ ID NO: 1879286
gggugcauuugguagauuu

SEQ ID NO: 1896497 - RNA, 19 nt, Artificial Sequence
  Description of Artificial Sequence: Synthetic oligonucleotide
  Antisense strand to SEQ ID NO: 1896496
aaaucuaccaaaugcaccc

SEQ ID NO: 1896498 - RNA, 19 nt, Artificial Sequence
  Description of Artificial Sequence: Synthetic oligonucleotide
  Sense strand starting at position 2320 of SEQ ID NO: 1879286
gagaaugagugggaaguuu

SEQ ID NO: 1896499 - RNA, 19 nt, Artificial Sequence
  Description of Artificial Sequence: Synthetic oligonucleotide
  Antisense strand to SEQ ID NO: 1896498
aaacuucccacucauucuc

SEQ ID NO: 1896500 - RNA, 19 nt, Artificial Sequence
  Description of Artificial Sequence: Synthetic oligonucleotide
  Sense strand starting at position 2341 of SEQ ID NO: 1879286
gaagacauuugggaggcua

SEQ ID NO: 1896501 - RNA, 19 nt, Artificial Sequence
  Description of Artificial Sequence: Synthetic oligonucleotide
  Antisense strand to SEQ ID NO: 1896500
uagccucccaaaugucuuc

SEQ ID NO: 1896502 - RNA, 19 nt, Artificial Sequence
  Description of Artificial Sequence: Synthetic oligonucleotide
  Sense strand starting at position 3115 of SEQ ID NO: 1879286
aggcuuuguggagacuuga

SEQ ID NO: 1896503 - RNA, 19 nt, Artificial Sequence
  Description of Artificial Sequence: Synthetic oligonucleotide
  Antisense strand to SEQ ID NO: 1896502
ucaagucuccacaaagccu

SEQ ID NO: 1896504 - RNA, 19 nt, Artificial Sequence
  Description of Artificial Sequence: Synthetic oligonucleotide
  Sense strand starting at position 3251 of SEQ ID NO: 1879286
ggagaucaccugggcaaca

SEQ ID NO: 1896505 - RNA, 19 nt, Artificial Sequence
  Description of Artificial Sequence: Synthetic oligonucleotide
  Antisense strand to SEQ ID NO: 1896504
uguugcccaggugaucucc

SEQ ID NO: 1896506 - RNA, 19 nt, Artificial Sequence
  Description of Artificial Sequence: Synthetic oligonucleotide
  Sense strand starting at position 3613 of SEQ ID NO: 1879286
cgaugacaacaauguacua

SEQ ID NO: 1896507 - RNA, 19 nt, Artificial Sequence
  Description of Artificial Sequence: Synthetic oligonucleotide
  Antisense strand to SEQ ID NO: 1896506
uaguacauuguugucaucg

SEQ ID NO: 1896508 - RNA, 19 nt, Artificial Sequence
  Description of Artificial Sequence: Synthetic oligonucleotide
  Sense strand starting at position 3688 of SEQ ID NO: 1879286
ucagcaaguucugcaagau

SEQ ID NO: 1896509 - RNA, 19 nt, Artificial Sequence
  Description of Artificial Sequence: Synthetic oligonucleotide
  Antisense strand to SEQ ID NO: 1896508
aucuugcagaacuugcuga

SEQ ID NO: 1896510 - RNA, 19 nt, Artificial Sequence
  Description of Artificial Sequence: Synthetic oligonucleotide
  Sense strand starting at position 3689 of SEQ ID NO: 1879286
cagcaaguucugcaagauu

SEQ ID NO: 1896511 - RNA, 19 nt, Artificial Sequence
  Description of Artificial Sequence: Synthetic oligonucleotide
  Antisense strand to SEQ ID NO: 1896510
aaucuugcagaacuugcug

SEQ ID NO: 1896512 - RNA, 19 nt, Artificial Sequence
  Description of Artificial Sequence: Synthetic oligonucleotide
  Sense strand starting at position 3742 of SEQ ID NO: 1879286
cugccuccguugguauaaa

SEQ ID NO: 1896513 - RNA, 19 nt, Artificial Sequence
  Description of Artificial Sequence: Synthetic oligonucleotide
  Antisense strand to SEQ ID NO: 1896512
uuuauaccaacggaggcag

SEQ ID NO: 1896514 - RNA, 19 nt, Artificial Sequence
  Description of Artificial Sequence: Synthetic oligonucleotide
  Sense strand starting at position 3774 of SEQ ID NO: 1879286
gacugugagugcccuauuu

SEQ ID NO: 1896515 - RNA, 19 nt, Artificial Sequence
  Description of Artificial Sequence: Synthetic oligonucleotide
  Antisense strand to SEQ ID NO: 1896514
aaauagggcacucacaguc

SEQ ID NO: 1896516 - RNA, 19 nt, Artificial Sequence
  Description of Artificial Sequence: Synthetic oligonucleotide
  Sense strand starting at position 405 of SEQ ID NO: 1879287
ggccaagagucacuggaca

SEQ ID NO: 1896517 - RNA, 19 nt, Artificial Sequence
  Description of Artificial Sequence: Synthetic oligonucleotide
  Antisense strand to SEQ ID NO: 1896516
uguccagugacucuuggcc

SEQ ID NO: 1896518 - RNA, 19 nt, Artificial Sequence
  Description of Artificial Sequence: Synthetic oligonucleotide
  Sense strand starting at position 477 of SEQ ID NO: 1879287
ggcugaucugucuggagau

SEQ ID NO: 1896519 - RNA, 19 nt, Artificial Sequence
  Description of Artificial Sequence: Synthetic oligonucleotide
  Antisense strand to SEQ ID NO: 1896518
aucuccagacagaucagcc

SEQ ID NO: 1896520 - RNA, 19 nt, Artificial Sequence
  Description of Artificial Sequence: Synthetic oligonucleotide
  Sense strand starting at position 490 of SEQ ID NO: 1879287
ggagauaugagcugagcaa

SEQ ID NO: 1896521 - RNA, 19 nt, Artificial Sequence
  Description of Artificial Sequence: Synthetic oligonucleotide
  Antisense strand to SEQ ID NO: 1896520
uugcucagcucauaucucc

SEQ ID NO: 1896522 - RNA, 19 nt, Artificial Sequence
  Description of Artificial Sequence: Synthetic oligonucleotide
  Sense strand starting at position 988 of SEQ ID NO: 1879287
gccucugaaagucaagagu

SEQ ID NO: 1896523 - RNA, 19 nt, Artificial Sequence
  Description of Artificial Sequence: Synthetic oligonucleotide
  Antisense strand to SEQ ID NO: 1896522
acucuugacuuucagaggc

SEQ ID NO: 1896524 - RNA, 19 nt, Artificial Sequence
  Description of Artificial Sequence: Synthetic oligonucleotide
  Sense strand starting at position 1098 of SEQ ID NO: 1879287
acucauuugugugucuaag

SEQ ID NO: 1896525 - RNA, 19 nt, Artificial Sequence
  Description of Artificial Sequence: Synthetic oligonucleotide
  Antisense strand to SEQ ID NO: 1896524
cuuagacacacaaaugagu

SEQ ID NO: 1896526 - RNA, 19 nt, Artificial Sequence
  Description of Artificial Sequence: Synthetic oligonucleotide
  Sense strand starting at position 1138 of SEQ ID NO: 1879287
ggguccaagaguggucuau

SEQ ID NO: 1896527 - RNA, 19 nt, Artificial Sequence
  Description of Artificial Sequence: Synthetic oligonucleotide
  Antisense strand to SEQ ID NO: 1896526
auagaccacucuuggaccc

SEQ ID NO: 1896528 - RNA, 19 nt, Artificial Sequence
  Description of Artificial Sequence: Synthetic oligonucleotide
  Sense strand starting at position 1197 of SEQ ID NO: 1879287
gguugagagauggguggau

SEQ ID NO: 1896529 - RNA, 19 nt, Artificial Sequence
  Description of Artificial Sequence: Synthetic oligonucleotide
  Antisense strand to SEQ ID NO: 1896528
auccacccaucucucaacc

SEQ ID NO: 1896530 - RNA, 19 nt, Artificial Sequence
  Description of Artificial Sequence: Synthetic oligonucleotide
  Sense strand starting at position 1352 of SEQ ID NO: 1879287
gauaaaugguuggaaggaa

SEQ ID NO: 1896531 - RNA, 19 nt, Artificial Sequence
  Description of Artificial Sequence: Synthetic oligonucleotide
  Antisense strand to SEQ ID NO: 1896530
uuccuuccaaccauuuauc

SEQ ID NO: 1896532 - RNA, 19 nt, Artificial Sequence
  Description of Artificial Sequence: Synthetic oligonucleotide
  Sense strand starting at position 1364 of SEQ ID NO: 1879287
gaaggaagaguauguguaa

SEQ ID NO: 1896533 - RNA, 19 nt, Artificial Sequence
  Description of Artificial Sequence: Synthetic oligonucleotide
  Antisense strand to SEQ ID NO: 1896532
uuacacauacucuuccuuc

SEQ ID NO: 1896534 - RNA, 19 nt, Artificial Sequence
  Description of Artificial Sequence: Synthetic oligonucleotide
  Sense strand starting at position 1367 of SEQ ID NO: 1879287
ggaagaguauguguaaguu

SEQ ID NO: 1896535 - RNA, 19 nt, Artificial Sequence
  Description of Artificial Sequence: Synthetic oligonucleotide
  Antisense strand to SEQ ID NO: 1896534
aacuuacacauacucuucc

SEQ ID NO: 1896536 - RNA, 19 nt, Artificial Sequence
  Description of Artificial Sequence: Synthetic oligonucleotide
  Sense strand starting at position 1456 of SEQ ID NO: 1879287
uugugucugacacaguaaa

SEQ ID NO: 1896537 - RNA, 19 nt, Artificial Sequence
  Description of Artificial Sequence: Synthetic oligonucleotide
  Antisense strand to SEQ ID NO: 1896536
uuuacugugucagacacaa

SEQ ID NO: 1896538 - RNA, 19 nt, Artificial Sequence
  Description of Artificial Sequence: Synthetic oligonucleotide
  Sense strand starting at position 1530 of SEQ ID NO: 1879287
gauagagacugagaugaug

SEQ ID NO: 1896539 - RNA, 19 nt, Artificial Sequence
  Description of Artificial Sequence: Synthetic oligonucleotide
  Antisense strand to SEQ ID NO: 1896538
caucaucucagucucuauc

SEQ ID NO: 1896540 - RNA, 19 nt, Artificial Sequence
  Description of Artificial Sequence: Synthetic oligonucleotide
  Sense strand starting at position 1547 of SEQ ID NO: 1879287
ugaccaugugggugauuga

SEQ ID NO: 1896541 - RNA, 19 nt, Artificial Sequence
  Description of Artificial Sequence: Synthetic oligonucleotide
  Antisense strand to SEQ ID NO: 1896540
ucaaucacccacaugguca

SEQ ID NO: 1896542 - RNA, 19 nt, Artificial Sequence
  Description of Artificial Sequence: Synthetic oligonucleotide
  Sense strand starting at position 1550 of SEQ ID NO: 1879287
ccaugugggugauugaaug

SEQ ID NO: 1896543 - RNA, 19 nt, Artificial Sequence
  Description of Artificial Sequence: Synthetic oligonucleotide
  Antisense strand to SEQ ID NO: 1896542
cauucaaucacccacaugg

SEQ ID NO: 1896544 - RNA, 19 nt, Artificial Sequence
  Description of Artificial Sequence: Synthetic oligonucleotide
  Sense strand starting at position 1621 of SEQ ID NO: 1879287
guggauggauagcuguaua

SEQ ID NO: 1896545 - RNA, 19 nt, Artificial Sequence
  Description of Artificial Sequence: Synthetic oligonucleotide
  Antisense strand to SEQ ID NO: 1896544
uauacagcuauccauccac

SEQ ID NO: 1896546 - RNA, 19 nt, Artificial Sequence
  Description of Artificial Sequence: Synthetic oligonucleotide
  Sense strand starting at position 1626 of SEQ ID NO: 1879287
uggauagcuguauagauua

SEQ ID NO: 1896547 - RNA, 19 nt, Artificial Sequence
  Description of Artificial Sequence: Synthetic oligonucleotide
  Antisense strand to SEQ ID NO: 1896546
uaaucuauacagcuaucca

SEQ ID NO: 1896548 - RNA, 19 nt, Artificial Sequence
  Description of Artificial Sequence: Synthetic oligonucleotide
  Sense strand starting at position 1663 of SEQ ID NO: 1879287
gaguuaaugaguggaaggu

SEQ ID NO: 1896549 - RNA, 19 nt, Artificial Sequence
  Description of Artificial Sequence: Synthetic oligonucleotide
  Antisense strand to SEQ ID NO: 1896548
accuuccacucauuaacuc

SEQ ID NO: 1896550 - RNA, 19 nt, Artificial Sequence
  Description of Artificial Sequence: Synthetic oligonucleotide
  Sense strand starting at position 1667 of SEQ ID NO: 1879287
uaaugaguggaaggucuau

SEQ ID NO: 1896551 - RNA, 19 nt, Artificial Sequence
  Description of Artificial Sequence: Synthetic oligonucleotide
  Antisense strand to SEQ ID NO: 1896550
auagaccuuccacucauua

SEQ ID NO: 1896552 - RNA, 19 nt, Artificial Sequence
  Description of Artificial Sequence: Synthetic oligonucleotide
  Sense strand starting at position 1722 of SEQ ID NO: 1879287
uggcuacugcaggaguuau

SEQ ID NO: 1896553 - RNA, 19 nt, Artificial Sequence
  Description of Artificial Sequence: Synthetic oligonucleotide
  Antisense strand to SEQ ID NO: 1896552
auaacuccugcaguagcca

SEQ ID NO: 1896554 - RNA, 19 nt, Artificial Sequence
  Description of Artificial Sequence: Synthetic oligonucleotide
  Sense strand starting at position 2023 of SEQ ID NO: 1879287
acaugucuucuuuaaguuc

SEQ ID NO: 1896555 - RNA, 19 nt, Artificial Sequence
  Description of Artificial Sequence: Synthetic oligonucleotide
  Antisense strand to SEQ ID NO: 1896554
gaacuuaaagaagacaugu

SEQ ID NO: 1896556 - RNA, 19 nt, Artificial Sequence
  Description of Artificial Sequence: Synthetic oligonucleotide
  Sense strand starting at position 2049 of SEQ ID NO: 1879287
ucaacaucuggccauagau

SEQ ID NO: 1896557 - RNA, 19 nt, Artificial Sequence
  Description of Artificial Sequence: Synthetic oligonucleotide
  Antisense strand to SEQ ID NO: 1896556
aucuauggccagauguuga

SEQ ID NO: 1896558 - RNA, 19 nt, Artificial Sequence
  Description of Artificial Sequence: Synthetic oligonucleotide
  Sense strand starting at position 2344 of SEQ ID NO: 1879287
agaacauguuccucacgaa

SEQ ID NO: 1896559 - RNA, 19 nt, Artificial Sequence
  Description of Artificial Sequence: Synthetic oligonucleotide
  Antisense strand to SEQ ID NO: 1896558
uucgugaggaacauguucu

SEQ ID NO: 1896560 - RNA, 19 nt, Artificial Sequence
  Description of Artificial Sequence: Synthetic oligonucleotide
  Sense strand starting at position 2345 of SEQ ID NO: 1879287
gaacauguuccucacgaaa

SEQ ID NO: 1896561 - RNA, 19 nt, Artificial Sequence
  Description of Artificial Sequence: Synthetic oligonucleotide
  Antisense strand to SEQ ID NO: 1896560
uuucgugaggaacauguuc

SEQ ID NO: 1896562 - RNA, 19 nt, Artificial Sequence
  Description of Artificial Sequence: Synthetic oligonucleotide
  Sense strand starting at position 2459 of SEQ ID NO: 1879287
gagagaaacugggauagaa

SEQ ID NO: 1896563 - RNA, 19 nt, Artificial Sequence
  Description of Artificial Sequence: Synthetic oligonucleotide
  Antisense strand to SEQ ID NO: 1896562
uucuaucccaguuucucuc

SEQ ID NO: 1896564 - RNA, 19 nt, Artificial Sequence
  Description of Artificial Sequence: Synthetic oligonucleotide
  Sense strand starting at position 2538 of SEQ ID NO: 1879287
uccacauguucugugauaa

SEQ ID NO: 1896565 - RNA, 19 nt, Artificial Sequence
  Description of Artificial Sequence: Synthetic oligonucleotide
  Antisense strand to SEQ ID NO: 1896564
uuaucacagaacaugugga

SEQ ID NO: 1896566 - RNA, 19 nt, Artificial Sequence
  Description of Artificial Sequence: Synthetic oligonucleotide
  Sense strand starting at position 2539 of SEQ ID NO: 1879287
ccacauguucugugauaaa

SEQ ID NO: 1896567 - RNA, 19 nt, Artificial Sequence
  Description of Artificial Sequence: Synthetic oligonucleotide
  Antisense strand to SEQ ID NO: 1896566
uuuaucacagaacaugugg

SEQ ID NO: 1896568 - RNA, 19 nt, Artificial Sequence
  Description of Artificial Sequence: Synthetic oligonucleotide
  Sense strand starting at position 2588 of SEQ ID NO: 1879287
gcccaagaacccuggucuu

SEQ ID NO: 1896569 - RNA, 19 nt, Artificial Sequence
  Description of Artificial Sequence: Synthetic oligonucleotide
  Antisense strand to SEQ ID NO: 1896568
aagaccaggguucuugggc

SEQ ID NO: 1896570 - RNA, 19 nt, Artificial Sequence
  Description of Artificial Sequence: Synthetic oligonucleotide
  Sense strand starting at position 2591 of SEQ ID NO: 1879287
caagaacccuggucuuuga

SEQ ID NO: 1896571 - RNA, 19 nt, Artificial Sequence
  Description of Artificial Sequence: Synthetic oligonucleotide
  Antisense strand to SEQ ID NO: 1896570
ucaaagaccaggguucuug

SEQ ID NO: 1896572 - RNA, 19 nt, Artificial Sequence
  Description of Artificial Sequence: Synthetic oligonucleotide
  Sense strand starting at position 2594 of SEQ ID NO: 1879287
gaacccuggucuuugaagu

SEQ ID NO: 1896573 - RNA, 19 nt, Artificial Sequence
  Description of Artificial Sequence: Synthetic oligonucleotide
  Antisense strand to SEQ ID NO: 1896572
acuucaaagaccaggguuc

SEQ ID NO: 1896574 - RNA, 19 nt, Artificial Sequence
  Description of Artificial Sequence: Synthetic oligonucleotide
  Sense strand starting at position 2604 of SEQ ID NO: 1879287
cuuugaagucuguaugacu

SEQ ID NO: 1896575 - RNA, 19 nt, Artificial Sequence
  Description of Artificial Sequence: Synthetic oligonucleotide
  Antisense strand to SEQ ID NO: 1896574
agucauacagacuucaaag

SEQ ID NO: 1896576 - RNA, 19 nt, Artificial Sequence
  Description of Artificial Sequence: Synthetic oligonucleotide
  Sense strand starting at position 2736 of SEQ ID NO: 1879287
gugggauguuggucuuaac

SEQ ID NO: 1896577 - RNA, 19 nt, Artificial Sequence
  Description of Artificial Sequence: Synthetic oligonucleotide
  Antisense strand to SEQ ID NO: 1896576
guuaagaccaacaucccac

SEQ ID NO: 1896578 - RNA, 19 nt, Artificial Sequence
  Description of Artificial Sequence: Synthetic oligonucleotide
  Sense strand starting at position 2998 of SEQ ID NO: 1879287
agagugugguggcugagaa

SEQ ID NO: 1896579 - RNA, 19 nt, Artificial Sequence
  Description of Artificial Sequence: Synthetic oligonucleotide
  Antisense strand to SEQ ID NO: 1896578
uucucagccaccacacucu

SEQ ID NO: 1896580 - RNA, 19 nt, Artificial Sequence
  Description of Artificial Sequence: Synthetic oligonucleotide
  Sense strand starting at position 3030 of SEQ ID NO: 1879287
acccaaauucuggguauaa

SEQ ID NO: 1896581 - RNA, 19 nt, Artificial Sequence
  Description of Artificial Sequence: Synthetic oligonucleotide
  Antisense strand to SEQ ID NO: 1896580
uuauacccagaauuugggu

SEQ ID NO: 1896582 - RNA, 19 nt, Artificial Sequence
  Description of Artificial Sequence: Synthetic oligonucleotide
  Sense strand starting at position 3031 of SEQ ID NO: 1879287
cccaaauucuggguauaaa

SEQ ID NO: 1896583 - RNA, 19 nt, Artificial Sequence
  Description of Artificial Sequence: Synthetic oligonucleotide
  Antisense strand to SEQ ID NO: 1896582
uuuauacccagaauuuggg

SEQ ID NO: 1896584 - RNA, 19 nt, Artificial Sequence
  Description of Artificial Sequence: Synthetic oligonucleotide
  Sense strand starting at position 3051 of SEQ ID NO: 1879287
cucaguuugccgcuucgua

SEQ ID NO: 1896585 - RNA, 19 nt, Artificial Sequence
  Description of Artificial Sequence: Synthetic oligonucleotide
  Antisense strand to SEQ ID NO: 1896584
uacgaagcggcaaacugag

SEQ ID NO: 1896586 - RNA, 19 nt, Artificial Sequence
  Description of Artificial Sequence: Synthetic oligonucleotide
  Sense strand starting at position 3086 of SEQ ID NO: 1879287
ugacucacccauugucaca

SEQ ID NO: 1896587 - RNA, 19 nt, Artificial Sequence
  Description of Artificial Sequence: Synthetic oligonucleotide
  Antisense strand to SEQ ID NO: 1896586
ugugacaaugggugaguca

SEQ ID NO: 1896588 - RNA, 19 nt, Artificial Sequence
  Description of Artificial Sequence: Synthetic oligonucleotide
  Sense strand starting at position 3597 of SEQ ID NO: 1879287
agaggaugcucuccagacu

SEQ ID NO: 1896589 - RNA, 19 nt, Artificial Sequence
  Description of Artificial Sequence: Synthetic oligonucleotide
  Antisense strand to SEQ ID NO: 1896588
agucuggagagcauccucu

SEQ ID NO: 1896590 - RNA, 19 nt, Artificial Sequence
  Description of Artificial Sequence: Synthetic oligonucleotide
  Sense strand starting at position 3687 of SEQ ID NO: 1879287
cuggcuccugcagaaauga

SEQ ID NO: 1896591 - RNA, 19 nt, Artificial Sequence
  Description of Artificial Sequence: Synthetic oligonucleotide
  Antisense strand to SEQ ID NO: 1896590
ucauuucugcaggagccag

SEQ ID NO: 1896592 - RNA, 19 nt, Artificial Sequence
  Description of Artificial Sequence: Synthetic oligonucleotide
  Sense strand starting at position 3712 of SEQ ID NO: 1879287
guaggcagauauccaagau

SEQ ID NO: 1896593 - RNA, 19 nt, Artificial Sequence
  Description of Artificial Sequence: Synthetic oligonucleotide
  Antisense strand to SEQ ID NO: 1896592
aucuuggauaucugccuac

SEQ ID NO: 1896594 - RNA, 19 nt, Artificial Sequence
  Description of Artificial Sequence: Synthetic oligonucleotide
  Sense strand starting at position 3861 of SEQ ID NO: 1879287
gucuccagguugucaugaa

SEQ ID NO: 1896595 - RNA, 19 nt, Artificial Sequence
  Description of Artificial Sequence: Synthetic oligonucleotide
  Antisense strand to SEQ ID NO: 1896594
uucaugacaaccuggagac

SEQ ID NO: 1896596 - RNA, 19 nt, Artificial Sequence
  Description of Artificial Sequence: Synthetic oligonucleotide
  Sense strand starting at position 10 of SEQ ID NO: 1879288
gguuaaacagcagaaaugu

SEQ ID NO: 1896597 - RNA, 19 nt, Artificial Sequence
  Description of Artificial Sequence: Synthetic oligonucleotide
  Antisense strand to SEQ ID NO: 1896596
acauuucugcuguuuaacc

SEQ ID NO: 1896598 - RNA, 19 nt, Artificial Sequence
  Description of Artificial Sequence: Synthetic oligonucleotide
  Sense strand starting at position 337 of SEQ ID NO: 1879288
gccucaaacuugguaguca

SEQ ID NO: 1896599 - RNA, 19 nt, Artificial Sequence
  Description of Artificial Sequence: Synthetic oligonucleotide
  Antisense strand to SEQ ID NO: 1896598
ugacuaccaaguuugaggc

SEQ ID NO: 1896600 - RNA, 19 nt, Artificial Sequence
  Description of Artificial Sequence: Synthetic oligonucleotide
  Sense strand starting at position 758 of SEQ ID NO: 1879288
accacacuuucuguguuau

SEQ ID NO: 1896601 - RNA, 19 nt, Artificial Sequence
  Description of Artificial Sequence: Synthetic oligonucleotide
  Antisense strand to SEQ ID NO: 1896600
auaacacagaaaguguggu

SEQ ID NO: 1896602 - RNA, 19 nt, Artificial Sequence
  Description of Artificial Sequence: Synthetic oligonucleotide
  Sense strand starting at position 759 of SEQ ID NO: 1879288
ccacacuuucuguguuauu

SEQ ID NO: 1896603 - RNA, 19 nt, Artificial Sequence
  Description of Artificial Sequence: Synthetic oligonucleotide
  Antisense strand to SEQ ID NO: 1896602
aauaacacagaaagugugg

SEQ ID NO: 1896604 - RNA, 19 nt, Artificial Sequence
  Description of Artificial Sequence: Synthetic oligonucleotide
  Sense strand starting at position 769 of SEQ ID NO: 1879288
uguguuauuuccucuuccu

SEQ ID NO: 1896605 - RNA, 19 nt, Artificial Sequence
  Description of Artificial Sequence: Synthetic oligonucleotide
  Antisense strand to SEQ ID NO: 1896604
aggaagaggaaauaacaca

SEQ ID NO: 1896606 - RNA, 19 nt, Artificial Sequence
  Description of Artificial Sequence: Synthetic oligonucleotide
  Sense strand starting at position 776 of SEQ ID NO: 1879288
uuuccucuuccuggaagau

SEQ ID NO: 1896607 - RNA, 19 nt, Artificial Sequence
  Description of Artificial Sequence: Synthetic oligonucleotide
  Antisense strand to SEQ ID NO: 1896606
aucuuccaggaagaggaaa

SEQ ID NO: 1896608 - RNA, 19 nt, Artificial Sequence
  Description of Artificial Sequence: Synthetic oligonucleotide
  Sense strand starting at position 785 of SEQ ID NO: 1879288
ccuggaagaucucccugaa

SEQ ID NO: 1896609 - RNA, 19 nt, Artificial Sequence
  Description of Artificial Sequence: Synthetic oligonucleotide
  Antisense strand to SEQ ID NO: 1896608
uucagggagaucuuccagg

SEQ ID NO: 1896610 - RNA, 19 nt, Artificial Sequence
  Description of Artificial Sequence: Synthetic oligonucleotide
  Sense strand starting at position 788 of SEQ ID NO: 1879288
ggaagaucucccugaaggc

SEQ ID NO: 1896611 - RNA, 19 nt, Artificial Sequence
  Description of Artificial Sequence: Synthetic oligonucleotide
  Antisense strand to SEQ ID NO: 1896610
gccuucagggagaucuucc

SEQ ID NO: 1896612 - RNA, 19 nt, Artificial Sequence
  Description of Artificial Sequence: Synthetic oligonucleotide
  Sense strand starting at position 811 of SEQ ID NO: 1879288
cuagguggcugucucagaa

SEQ ID NO: 1896613 - RNA, 19 nt, Artificial Sequence
  Description of Artificial Sequence: Synthetic oligonucleotide
  Antisense strand to SEQ ID NO: 1896612
uucugagacagccaccuag

SEQ ID NO: 1896614 - RNA, 19 nt, Artificial Sequence
  Description of Artificial Sequence: Synthetic oligonucleotide
  Sense strand starting at position 824 of SEQ ID NO: 1879288
ucagaauucugagaauauu

SEQ ID NO: 1896615 - RNA, 19 nt, Artificial Sequence
  Description of Artificial Sequence: Synthetic oligonucleotide
  Antisense strand to SEQ ID NO: 1896614
aauauucucagaauucuga

SEQ ID NO: 1896616 - RNA, 19 nt, Artificial Sequence
  Description of Artificial Sequence: Synthetic oligonucleotide
  Sense strand starting at position 873 of SEQ ID NO: 1879288
cgcuaaagucccugaaggu

SEQ ID NO: 1896617 - RNA, 19 nt, Artificial Sequence
  Description of Artificial Sequence: Synthetic oligonucleotide
  Antisense strand to SEQ ID NO: 1896616
accuucagggacuuuagcg

SEQ ID NO: 1896618 - RNA, 19 nt, Artificial Sequence
  Description of Artificial Sequence: Synthetic oligonucleotide
  Sense strand starting at position 892 of SEQ ID NO: 1879288
gguguuguagucuucguua

SEQ ID NO: 1896619 - RNA, 19 nt, Artificial Sequence
  Description of Artificial Sequence: Synthetic oligonucleotide
  Antisense strand to SEQ ID NO: 1896618
uaacgaagacuacaacacc

SEQ ID NO: 1896620 - RNA, 19 nt, Artificial Sequence
  Description of Artificial Sequence: Synthetic oligonucleotide
  Sense strand starting at position 895 of SEQ ID NO: 1879288
guuguagucuucguuauag

SEQ ID NO: 1896621 - RNA, 19 nt, Artificial Sequence
  Description of Artificial Sequence: Synthetic oligonucleotide
  Antisense strand to SEQ ID NO: 1896620
cuauaacgaagacuacaac

SEQ ID NO: 1896622 - RNA, 19 nt, Artificial Sequence
  Description of Artificial Sequence: Synthetic oligonucleotide
  Sense strand starting at position 903 of SEQ ID NO: 1879288
cuucguuauagccagagua

SEQ ID NO: 1896623 - RNA, 19 nt, Artificial Sequence
  Description of Artificial Sequence: Synthetic oligonucleotide
  Antisense strand to SEQ ID NO: 1896622
uacucuggcuauaacgaag

SEQ ID NO: 1896624 - RNA, 19 nt, Artificial Sequence
  Description of Artificial Sequence: Synthetic oligonucleotide
  Sense strand starting at position 950 of SEQ ID NO: 1879288
gacuguuuacuuuagcuga

SEQ ID NO: 1896625 - RNA, 19 nt, Artificial Sequence
  Description of Artificial Sequence: Synthetic oligonucleotide
  Antisense strand to SEQ ID NO: 1896624
ucagcuaaaguaaacaguc

SEQ ID NO: 1896626 - RNA, 19 nt, Artificial Sequence
  Description of Artificial Sequence: Synthetic oligonucleotide
  Sense strand starting at position 1026 of SEQ ID NO: 1879288
gcuugaauucugugaagcu

SEQ ID NO: 1896627 - RNA, 19 nt, Artificial Sequence
  Description of Artificial Sequence: Synthetic oligonucleotide
  Antisense strand to SEQ ID NO: 1896626
agcuucacagaauucaagc

SEQ ID NO: 1896628 - RNA, 19 nt, Artificial Sequence
  Description of Artificial Sequence: Synthetic oligonucleotide
  Sense strand starting at position 1050 of SEQ ID NO: 1879288
uggccucuccaauaauuag

SEQ ID NO: 1896629 - RNA, 19 nt, Artificial Sequence
  Description of Artificial Sequence: Synthetic oligonucleotide
  Antisense strand to SEQ ID NO: 1896628
cuaauuauuggagaggcca

SEQ ID NO: 1896630 - RNA, 19 nt, Artificial Sequence
  Description of Artificial Sequence: Synthetic oligonucleotide
  Sense strand starting at position 1099 of SEQ ID NO: 1879288
cccugaauugagcaaguua

SEQ ID NO: 1896631 - RNA, 19 nt, Artificial Sequence
  Description of Artificial Sequence: Synthetic oligonucleotide
  Antisense strand to SEQ ID NO: 1896630
uaacuugcucaauucaggg

SEQ ID NO: 1896632 - RNA, 19 nt, Artificial Sequence
  Description of Artificial Sequence: Synthetic oligonucleotide
  Sense strand starting at position 1136 of SEQ ID NO: 1879288
aacgaauugcagugaaugu

SEQ ID NO: 1896633 - RNA, 19 nt, Artificial Sequence
  Description of Artificial Sequence: Synthetic oligonucleotide
  Antisense strand to SEQ ID NO: 1896632
acauucacugcaauucguu

SEQ ID NO: 1896634 - RNA, 19 nt, Artificial Sequence
  Description of Artificial Sequence: Synthetic oligonucleotide
  Sense strand starting at position 1137 of SEQ ID NO: 1879288
acgaauugcagugaauguu

SEQ ID NO: 1896635 - RNA, 19 nt, Artificial Sequence
  Description of Artificial Sequence: Synthetic oligonucleotide
  Antisense strand to SEQ ID NO: 1896634
aacauucacugcaauucgu

SEQ ID NO: 1896636 - RNA, 19 nt, Artificial Sequence
  Description of Artificial Sequence: Synthetic oligonucleotide
  Sense strand starting at position 1268 of SEQ ID NO: 1879288
cucagcauuugaugcucaa

SEQ ID NO: 1896637 - RNA, 19 nt, Artificial Sequence
  Description of Artificial Sequence: Synthetic oligonucleotide
  Antisense strand to SEQ ID NO: 1896636
uugagcaucaaaugcugag

SEQ ID NO: 1896638 - RNA, 19 nt, Artificial Sequence
  Description of Artificial Sequence: Synthetic oligonucleotide
  Sense strand starting at position 1358 of SEQ ID NO: 1879288
agacuaaacugcuaggguu

SEQ ID NO: 1896639 - RNA, 19 nt, Artificial Sequence
  Description of Artificial Sequence: Synthetic oligonucleotide
  Antisense strand to SEQ ID NO: 1896638
aacccuagcaguuuagucu

SEQ ID NO: 1896640 - RNA, 19 nt, Artificial Sequence
  Description of Artificial Sequence: Synthetic oligonucleotide
  Sense strand starting at position 1453 of SEQ ID NO: 1879288
aaagcaucuccgggaagcu

SEQ ID NO: 1896641 - RNA, 19 nt, Artificial Sequence
  Description of Artificial Sequence: Synthetic oligonucleotide
  Antisense strand to SEQ ID NO: 1896640
agcuucccggagaugcuuu

SEQ ID NO: 1896642 - RNA, 19 nt, Artificial Sequence
  Description of Artificial Sequence: Synthetic oligonucleotide
  Sense strand starting at position 2352 of SEQ ID NO: 1879288
cuccgucuccgcuagaacu

SEQ ID NO: 1896643 - RNA, 19 nt, Artificial Sequence
  Description of Artificial Sequence: Synthetic oligonucleotide
  Antisense strand to SEQ ID NO: 1896642
aguucuagcggagacggag

SEQ ID NO: 1896644 - RNA, 19 nt, Artificial Sequence
  Description of Artificial Sequence: Synthetic oligonucleotide
  Sense strand starting at position 2376 of SEQ ID NO: 1879288
ggagaagucugcuuucugg

SEQ ID NO: 1896645 - RNA, 19 nt, Artificial Sequence
  Description of Artificial Sequence: Synthetic oligonucleotide
  Antisense strand to SEQ ID NO: 1896644
ccagaaagcagacuucucc

SEQ ID NO: 1896646 - RNA, 19 nt, Artificial Sequence
  Description of Artificial Sequence: Synthetic oligonucleotide
  Sense strand starting at position 2510 of SEQ ID NO: 1879288
cuuuguagggcuugagagu

SEQ ID NO: 1896647 - RNA, 19 nt, Artificial Sequence
  Description of Artificial Sequence: Synthetic oligonucleotide
  Antisense strand to SEQ ID NO: 1896646
acucucaagcccuacaaag

SEQ ID NO: 1896648 - RNA, 19 nt, Artificial Sequence
  Description of Artificial Sequence: Synthetic oligonucleotide
  Sense strand starting at position 2595 of SEQ ID NO: 1879288
ggacgacacucuuugaacu

SEQ ID NO: 1896649 - RNA, 19 nt, Artificial Sequence
  Description of Artificial Sequence: Synthetic oligonucleotide
  Antisense strand to SEQ ID NO: 1896648
aguucaaagagugucgucc

SEQ ID NO: 1896650 - RNA, 19 nt, Artificial Sequence
  Description of Artificial Sequence: Synthetic oligonucleotide
  Sense strand starting at position 2673 of SEQ ID NO: 1879288
cugggucucgcagguugaa

SEQ ID NO: 1896651 - RNA, 19 nt, Artificial Sequence
  Description of Artificial Sequence: Synthetic oligonucleotide
  Antisense strand to SEQ ID NO: 1896650
uucaaccugcgagacccag

SEQ ID NO: 1896652 - RNA, 19 nt, Artificial Sequence
  Description of Artificial Sequence: Synthetic oligonucleotide
  Sense strand starting at position 2752 of SEQ ID NO: 1879288
cggcucuccgacuagacau

SEQ ID NO: 1896653 - RNA, 19 nt, Artificial Sequence
  Description of Artificial Sequence: Synthetic oligonucleotide
  Antisense strand to SEQ ID NO: 1896652
augucuagucggagagccg

SEQ ID NO: 1896654 - RNA, 19 nt, Artificial Sequence
  Description of Artificial Sequence: Synthetic oligonucleotide
  Sense strand starting at position 2754 of SEQ ID NO: 1879288
gcucuccgacuagacauua

SEQ ID NO: 1896655 - RNA, 19 nt, Artificial Sequence
  Description of Artificial Sequence: Synthetic oligonucleotide
  Antisense strand to SEQ ID NO: 1896654
uaaugucuagucggagagc

SEQ ID NO: 1896656 - RNA, 19 nt, Artificial Sequence
  Description of Artificial Sequence: Synthetic oligonucleotide
  Sense strand starting at position 3051 of SEQ ID NO: 1879288
gugcguccggccuagacau

SEQ ID NO: 1896657 - RNA, 19 nt, Artificial Sequence
  Description of Artificial Sequence: Synthetic oligonucleotide
  Antisense strand to SEQ ID NO: 1896656
augucuaggccggacgcac

SEQ ID NO: 1896658 - RNA, 19 nt, Artificial Sequence
  Description of Artificial Sequence: Synthetic oligonucleotide
  Sense strand starting at position 3156 of SEQ ID NO: 1879288
cgggugaggcauuagugau

SEQ ID NO: 1896659 - RNA, 19 nt, Artificial Sequence
  Description of Artificial Sequence: Synthetic oligonucleotide
  Antisense strand to SEQ ID NO: 1896658
aucacuaaugccucacccg

SEQ ID NO: 1896660 - RNA, 19 nt, Artificial Sequence
  Description of Artificial Sequence: Synthetic oligonucleotide
  Sense strand starting at position 3173 of SEQ ID NO: 1879288
augagcuccugcuuaucau

SEQ ID NO: 1896661 - RNA, 19 nt, Artificial Sequence
  Description of Artificial Sequence: Synthetic oligonucleotide
  Antisense strand to SEQ ID NO: 1896660
augauaagcaggagcucau

SEQ ID NO: 1896662 - RNA, 19 nt, Artificial Sequence
  Description of Artificial Sequence: Synthetic oligonucleotide
  Sense strand starting at position 3174 of SEQ ID NO: 1879288
ugagcuccugcuuaucauu

SEQ ID NO: 1896663 - RNA, 19 nt, Artificial Sequence
  Description of Artificial Sequence: Synthetic oligonucleotide
  Antisense strand to SEQ ID NO: 1896662
aaugauaagcaggagcuca

SEQ ID NO: 1896664 - RNA, 19 nt, Artificial Sequence
  Description of Artificial Sequence: Synthetic oligonucleotide
  Sense strand starting at position 3276 of SEQ ID NO: 1879288
ucuacuucuuuacuggaga

SEQ ID NO: 1896665 - RNA, 19 nt, Artificial Sequence
  Description of Artificial Sequence: Synthetic oligonucleotide
  Antisense strand to SEQ ID NO: 1896664
ucuccaguaaagaaguaga

SEQ ID NO: 1896666 - RNA, 19 nt, Artificial Sequence
  Description of Artificial Sequence: Synthetic oligonucleotide
  Sense strand starting at position 3459 of SEQ ID NO: 1879288
guguguucuggauguguau

SEQ ID NO: 1896667 - RNA, 19 nt, Artificial Sequence
  Description of Artificial Sequence: Synthetic oligonucleotide
  Antisense strand to SEQ ID NO: 1896666
auacacauccagaacacac

SEQ ID NO: 1896668 - RNA, 19 nt, Artificial Sequence
  Description of Artificial Sequence: Synthetic oligonucleotide
  Sense strand starting at position 3802 of SEQ ID NO: 1879288
aggcaugaauucuaaggau

SEQ ID NO: 1896669 - RNA, 19 nt, Artificial Sequence
  Description of Artificial Sequence: Synthetic oligonucleotide
  Antisense strand to SEQ ID NO: 1896668
auccuuagaauucaugccu

SEQ ID NO: 1896670 - RNA, 19 nt, Artificial Sequence
  Description of Artificial Sequence: Synthetic oligonucleotide
  Sense strand starting at position 3886 of SEQ ID NO: 1879288
accauaucuucuuugaguc

SEQ ID NO: 1896671 - RNA, 19 nt, Artificial Sequence
  Description of Artificial Sequence: Synthetic oligonucleotide
  Antisense strand to SEQ ID NO: 1896670
gacucaaagaagauauggu

SEQ ID NO: 1896672 - RNA, 19 nt, Artificial Sequence
  Description of Artificial Sequence: Synthetic oligonucleotide
  Sense strand starting at position 3900 of SEQ ID NO: 1879288
gaguccugauagcuagcua

SEQ ID NO: 1896673 - RNA, 19 nt, Artificial Sequence
  Description of Artificial Sequence: Synthetic oligonucleotide
  Antisense strand to SEQ ID NO: 1896672
uagcuagcuaucaggacuc

SEQ ID NO: 1896674 - RNA, 19 nt, Artificial Sequence
  Description of Artificial Sequence: Synthetic oligonucleotide
  Sense strand starting at position 3904 of SEQ ID NO: 1879288
ccugauagcuagcuaacaa

SEQ ID NO: 1896675 - RNA, 19 nt, Artificial Sequence
  Description of Artificial Sequence: Synthetic oligonucleotide
  Antisense strand to SEQ ID NO: 1896674
uuguuagcuagcuaucagg

SEQ ID NO: 1896676 - RNA, 19 nt, Artificial Sequence
  Description of Artificial Sequence: Synthetic oligonucleotide
  Sense strand starting at position 145 of SEQ ID NO: 1879293
acaaauguuuacucagagu

SEQ ID NO: 1896677 - RNA, 19 nt, Artificial Sequence
  Description of Artificial Sequence: Synthetic oligonucleotide
  Antisense strand to SEQ ID NO: 1896676
acucugaguaaacauuugu

SEQ ID NO: 1896678 - RNA, 19 nt, Artificial Sequence
  Description of Artificial Sequence: Synthetic oligonucleotide
  Sense strand starting at position 156 of SEQ ID NO: 1879293
cucagaguuucuuacaucu

SEQ ID NO: 1896679 - RNA, 19 nt, Artificial Sequence
  Description of Artificial Sequence: Synthetic oligonucleotide
  Antisense strand to SEQ ID NO: 1896678
agauguaagaaacucugag

SEQ ID NO: 1896680 - RNA, 19 nt, Artificial Sequence
  Description of Artificial Sequence: Synthetic oligonucleotide
  Sense strand starting at position 283 of SEQ ID NO: 1879293
aaugcuggguccuuucuau

SEQ ID NO: 1896681 - RNA, 19 nt, Artificial Sequence
  Description of Artificial Sequence: Synthetic oligonucleotide
  Antisense strand to SEQ ID NO: 1896680
auagaaaggacccagcauu

SEQ ID NO: 1896682 - RNA, 19 nt, Artificial Sequence
  Description of Artificial Sequence: Synthetic oligonucleotide
  Sense strand starting at position 300 of SEQ ID NO: 1879293
aucccagucccauaguauu

SEQ ID NO: 1896683 - RNA, 19 nt, Artificial Sequence
  Description of Artificial Sequence: Synthetic oligonucleotide
  Antisense strand to SEQ ID NO: 1896682
aauacuaugggacugggau

SEQ ID NO: 1896684 - RNA, 19 nt, Artificial Sequence
  Description of Artificial Sequence: Synthetic oligonucleotide
  Sense strand starting at position 390 of SEQ ID NO: 1879293
ucuggugggucccauagaa

SEQ ID NO: 1896685 - RNA, 19 nt, Artificial Sequence
  Description of Artificial Sequence: Synthetic oligonucleotide
  Antisense strand to SEQ ID NO: 1896684
uucuaugggacccaccaga

SEQ ID NO: 1896686 - RNA, 19 nt, Artificial Sequence
  Description of Artificial Sequence: Synthetic oligonucleotide
  Sense strand starting at position 409 of SEQ ID NO: 1879293
agggaucucuuggagaauu

SEQ ID NO: 1896687 - RNA, 19 nt, Artificial Sequence
  Description of Artificial Sequence: Synthetic oligonucleotide
  Antisense strand to SEQ ID NO: 1896686
aauucuccaagagaucccu

SEQ ID NO: 1896688 - RNA, 19 nt, Artificial Sequence
  Description of Artificial Sequence: Synthetic oligonucleotide
  Sense strand starting at position 457 of SEQ ID NO: 1879293
ggccaauacugcucagacu

SEQ ID NO: 1896689 - RNA, 19 nt, Artificial Sequence
  Description of Artificial Sequence: Synthetic oligonucleotide
  Antisense strand to SEQ ID NO: 1896688
agucugagcaguauuggcc

SEQ ID NO: 1896690 - RNA, 19 nt, Artificial Sequence
  Description of Artificial Sequence: Synthetic oligonucleotide
  Sense strand starting at position 482 of SEQ ID NO: 1879293
accagaguugccugggcuu

SEQ ID NO: 1896691 - RNA, 19 nt, Artificial Sequence
  Description of Artificial Sequence: Synthetic oligonucleotide
  Antisense strand to SEQ ID NO: 1896690
aagcccaggcaacucuggu

SEQ ID NO: 1896692 - RNA, 19 nt, Artificial Sequence
  Description of Artificial Sequence: Synthetic oligonucleotide
  Sense strand starting at position 608 of SEQ ID NO: 1879293
ggcugaaagguguaggcaa

SEQ ID NO: 1896693 - RNA, 19 nt, Artificial Sequence
  Description of Artificial Sequence: Synthetic oligonucleotide
  Antisense strand to SEQ ID NO: 1896692
uugccuacaccuuucagcc

SEQ ID NO: 1896694 - RNA, 19 nt, Artificial Sequence
  Description of Artificial Sequence: Synthetic oligonucleotide
  Sense strand starting at position 626 of SEQ ID NO: 1879293
agggcuauuguguaauuga

SEQ ID NO: 1896695 - RNA, 19 nt, Artificial Sequence
  Description of Artificial Sequence: Synthetic oligonucleotide
  Antisense strand to SEQ ID NO: 1896694
ucaauuacacaauagcccu

SEQ ID NO: 1896696 - RNA, 19 nt, Artificial Sequence
  Description of Artificial Sequence: Synthetic oligonucleotide
  Sense strand starting at position 629 of SEQ ID NO: 1879293
gcuauuguguaauugagga

SEQ ID NO: 1896697 - RNA, 19 nt, Artificial Sequence
  Description of Artificial Sequence: Synthetic oligonucleotide
  Antisense strand to SEQ ID NO: 1896696
uccucaauuacacaauagc

SEQ ID NO: 1896698 - RNA, 19 nt, Artificial Sequence
  Description of Artificial Sequence: Synthetic oligonucleotide
  Sense strand starting at position 779 of SEQ ID NO: 1879293
cugugucucucuguaucua

SEQ ID NO: 1896699 - RNA, 19 nt, Artificial Sequence
  Description of Artificial Sequence: Synthetic oligonucleotide
  Antisense strand to SEQ ID NO: 1896698
uagauacagagagacacag

SEQ ID NO: 1896700 - RNA, 19 nt, Artificial Sequence
  Description of Artificial Sequence: Synthetic oligonucleotide
  Sense strand starting at position 1223 of SEQ ID NO: 1879293
cuucucugguguucuuaca

SEQ ID NO: 1896701 - RNA, 19 nt, Artificial Sequence
  Description of Artificial Sequence: Synthetic oligonucleotide
  Antisense strand to SEQ ID NO: 1896700
uguaagaacaccagagaag

SEQ ID NO: 1896702 - RNA, 19 nt, Artificial Sequence
  Description of Artificial Sequence: Synthetic oligonucleotide
  Sense strand starting at position 1312 of SEQ ID NO: 1879293
cgucgcuaauugcuuaauu

SEQ ID NO: 1896703 - RNA, 19 nt, Artificial Sequence
  Description of Artificial Sequence: Synthetic oligonucleotide
  Antisense strand to SEQ ID NO: 1896702
aauuaagcaauuagcgacg

SEQ ID NO: 1896704 - RNA, 19 nt, Artificial Sequence
  Description of Artificial Sequence: Synthetic oligonucleotide
  Sense strand starting at position 1313 of SEQ ID NO: 1879293
gucgcuaauugcuuaauua

SEQ ID NO: 1896705 - RNA, 19 nt, Artificial Sequence
  Description of Artificial Sequence: Synthetic oligonucleotide
  Antisense strand to SEQ ID NO: 1896704
uaauuaagcaauuagcgac

SEQ ID NO: 1896706 - RNA, 19 nt, Artificial Sequence
  Description of Artificial Sequence: Synthetic oligonucleotide
  Sense strand starting at position 1314 of SEQ ID NO: 1879293
ucgcuaauugcuuaauuac

SEQ ID NO: 1896707 - RNA, 19 nt, Artificial Sequence
  Description of Artificial Sequence: Synthetic oligonucleotide
  Antisense strand to SEQ ID NO: 1896706
guaauuaagcaauuagcga

SEQ ID NO: 1896708 - RNA, 19 nt, Artificial Sequence
  Description of Artificial Sequence: Synthetic oligonucleotide
  Sense strand starting at position 1569 of SEQ ID NO: 1879293
cuuagagcgcuucgccaaa

SEQ ID NO: 1896709 - RNA, 19 nt, Artificial Sequence
  Description of Artificial Sequence: Synthetic oligonucleotide
  Antisense strand to SEQ ID NO: 1896708
uuuggcgaagcgcucuaag

SEQ ID NO: 1896710 - RNA, 19 nt, Artificial Sequence
  Description of Artificial Sequence: Synthetic oligonucleotide
  Sense strand starting at position 1725 of SEQ ID NO: 1879293
cugaaauuaccgugcuuac

SEQ ID NO: 1896711 - RNA, 19 nt, Artificial Sequence
  Description of Artificial Sequence: Synthetic oligonucleotide
  Antisense strand to SEQ ID NO: 1896710
guaagcacgguaauuucag

SEQ ID NO: 1896712 - RNA, 19 nt, Artificial Sequence
  Description of Artificial Sequence: Synthetic oligonucleotide
  Sense strand starting at position 1757 of SEQ ID NO: 1879293
guguuuaccuguuuaucuu

SEQ ID NO: 1896713 - RNA, 19 nt, Artificial Sequence
  Description of Artificial Sequence: Synthetic oligonucleotide
  Antisense strand to SEQ ID NO: 1896712
aagauaaacagguaaacac

SEQ ID NO: 1896714 - RNA, 19 nt, Artificial Sequence
  Description of Artificial Sequence: Synthetic oligonucleotide
  Sense strand starting at position 2347 of SEQ ID NO: 1879293
ugcccauuggcugaagaca

SEQ ID NO: 1896715 - RNA, 19 nt, Artificial Sequence
  Description of Artificial Sequence: Synthetic oligonucleotide
  Antisense strand to SEQ ID NO: 1896714
ugucuucagccaaugggca

SEQ ID NO: 1896716 - RNA, 19 nt, Artificial Sequence
  Description of Artificial Sequence: Synthetic oligonucleotide
  Sense strand starting at position 2371 of SEQ ID NO: 1879293
ccugaauucucauuggcug

SEQ ID NO: 1896717 - RNA, 19 nt, Artificial Sequence
  Description of Artificial Sequence: Synthetic oligonucleotide
  Antisense strand to SEQ ID NO: 1896716
cagccaaugagaauucagg

SEQ ID NO: 1896718 - RNA, 19 nt, Artificial Sequence
  Description of Artificial Sequence: Synthetic oligonucleotide
  Sense strand starting at position 2372 of SEQ ID NO: 1879293
cugaauucucauuggcugu

SEQ ID NO: 1896719 - RNA, 19 nt, Artificial Sequence
  Description of Artificial Sequence: Synthetic oligonucleotide
  Antisense strand to SEQ ID NO: 1896718
acagccaaugagaauucag

SEQ ID NO: 1896720 - RNA, 19 nt, Artificial Sequence
  Description of Artificial Sequence: Synthetic oligonucleotide
  Sense strand starting at position 2806 of SEQ ID NO: 1879293
cagggcuuguccucaggaa

SEQ ID NO: 1896721 - RNA, 19 nt, Artificial Sequence
  Description of Artificial Sequence: Synthetic oligonucleotide
  Antisense strand to SEQ ID NO: 1896720
uuccugaggacaagcccug

SEQ ID NO: 1896722 - RNA, 19 nt, Artificial Sequence
  Description of Artificial Sequence: Synthetic oligonucleotide
  Sense strand starting at position 2807 of SEQ ID NO: 1879293
agggcuuguccucaggaaa

SEQ ID NO: 1896723 - RNA, 19 nt, Artificial Sequence
  Description of Artificial Sequence: Synthetic oligonucleotide
  Antisense strand to SEQ ID NO: 1896722
uuuccugaggacaagcccu

SEQ ID NO: 1896724 - RNA, 19 nt, Artificial Sequence
  Description of Artificial Sequence: Synthetic oligonucleotide
  Sense strand starting at position 2834 of SEQ ID NO: 1879293
cgaagaaacuuugagcaaa

SEQ ID NO: 1896725 - RNA, 19 nt, Artificial Sequence
  Description of Artificial Sequence: Synthetic oligonucleotide
  Antisense strand to SEQ ID NO: 1896724
uuugcucaaaguuucuucg

SEQ ID NO: 1896726 - RNA, 19 nt, Artificial Sequence
  Description of Artificial Sequence: Synthetic oligonucleotide
  Sense strand starting at position 2847 of SEQ ID NO: 1879293
agcaaagauuugugaugag

SEQ ID NO: 1896727 - RNA, 19 nt, Artificial Sequence
  Description of Artificial Sequence: Synthetic oligonucleotide
  Antisense strand to SEQ ID NO: 1896726
cucaucacaaaucuuugcu

SEQ ID NO: 1896728 - RNA, 19 nt, Artificial Sequence
  Description of Artificial Sequence: Synthetic oligonucleotide
  Sense strand starting at position 2850 of SEQ ID NO: 1879293
aaagauuugugaugagaca

SEQ ID NO: 1896729 - RNA, 19 nt, Artificial Sequence
  Description of Artificial Sequence: Synthetic oligonucleotide
  Antisense strand to SEQ ID NO: 1896728
ugucucaucacaaaucuuu

SEQ ID NO: 1896730 - RNA, 19 nt, Artificial Sequence
  Description of Artificial Sequence: Synthetic oligonucleotide
  Sense strand starting at position 3463 of SEQ ID NO: 1879293
gggagugguguucgcuaaa

SEQ ID NO: 1896731 - RNA, 19 nt, Artificial Sequence
  Description of Artificial Sequence: Synthetic oligonucleotide
  Antisense strand to SEQ ID NO: 1896730
uuuagcgaacaccacuccc

SEQ ID NO: 1896732 - RNA, 19 nt, Artificial Sequence
  Description of Artificial Sequence: Synthetic oligonucleotide
  Sense strand starting at position 3464 of SEQ ID NO: 1879293
ggagugguguucgcuaaag

SEQ ID NO: 1896733 - RNA, 19 nt, Artificial Sequence
  Description of Artificial Sequence: Synthetic oligonucleotide
  Antisense strand to SEQ ID NO: 1896732
cuuuagcgaacaccacucc

SEQ ID NO: 1896734 - RNA, 19 nt, Artificial Sequence
  Description of Artificial Sequence: Synthetic oligonucleotide
  Sense strand starting at position 3466 of SEQ ID NO: 1879293
agugguguucgcuaaagcu

SEQ ID NO: 1896735 - RNA, 19 nt, Artificial Sequence
  Description of Artificial Sequence: Synthetic oligonucleotide
  Antisense strand to SEQ ID NO: 1896734
agcuuuagcgaacaccacu

SEQ ID NO: 1896736 - RNA, 19 nt, Artificial Sequence
  Description of Artificial Sequence: Synthetic oligonucleotide
  Sense strand starting at position 3472 of SEQ ID NO: 1879293
guucgcuaaagcuauguua

SEQ ID NO: 1896737 - RNA, 19 nt, Artificial Sequence
  Description of Artificial Sequence: Synthetic oligonucleotide
  Antisense strand to SEQ ID NO: 1896736
uaacauagcuuuagcgaac

SEQ ID NO: 1896738 - RNA, 19 nt, Artificial Sequence
  Description of Artificial Sequence: Synthetic oligonucleotide
  Sense strand starting at position 3501 of SEQ ID NO: 1879293
gguugauucucacuggcuu

SEQ ID NO: 1896739 - RNA, 19 nt, Artificial Sequence
  Description of Artificial Sequence: Synthetic oligonucleotide
  Antisense strand to SEQ ID NO: 1896738
aagccagugagaaucaacc

SEQ ID NO: 1896740 - RNA, 19 nt, Artificial Sequence
  Description of Artificial Sequence: Synthetic oligonucleotide
  Sense strand starting at position 3587 of SEQ ID NO: 1879293
ggcaaauguuaugcacaua

SEQ ID NO: 1896741 - RNA, 19 nt, Artificial Sequence
  Description of Artificial Sequence: Synthetic oligonucleotide
  Antisense strand to SEQ ID NO: 1896740
uaugugcauaacauuugcc

SEQ ID NO: 1896742 - RNA, 19 nt, Artificial Sequence
  Description of Artificial Sequence: Synthetic oligonucleotide
  Sense strand starting at position 3702 of SEQ ID NO: 1879293
ggagucgacucuucucagu

SEQ ID NO: 1896743 - RNA, 19 nt, Artificial Sequence
  Description of Artificial Sequence: Synthetic oligonucleotide
  Antisense strand to SEQ ID NO: 1896742
acugagaagagucgacucc

SEQ ID NO: 1896744 - RNA, 19 nt, Artificial Sequence
  Description of Artificial Sequence: Synthetic oligonucleotide
  Sense strand starting at position 3886 of SEQ ID NO: 1879293
ggaacuuggcaguguguua

SEQ ID NO: 1896745 - RNA, 19 nt, Artificial Sequence
  Description of Artificial Sequence: Synthetic oligonucleotide
  Antisense strand to SEQ ID NO: 1896744
uaacacacugccaaguucc

SEQ ID NO: 1896746 - RNA, 19 nt, Artificial Sequence
  Description of Artificial Sequence: Synthetic oligonucleotide
  Sense strand starting at position 3945 of SEQ ID NO: 1879293
agguguucucacugaugcu

SEQ ID NO: 1896747 - RNA, 19 nt, Artificial Sequence
  Description of Artificial Sequence: Synthetic oligonucleotide
  Antisense strand to SEQ ID NO: 1896746
agcaucagugagaacaccu

SEQ ID NO: 1896748 - RNA, 19 nt, Artificial Sequence
  Description of Artificial Sequence: Synthetic oligonucleotide
  Sense strand starting at position 3946 of SEQ ID NO: 1879293
gguguucucacugaugcuu

SEQ ID NO: 1896749 - RNA, 19 nt, Artificial Sequence
  Description of Artificial Sequence: Synthetic oligonucleotide
  Antisense strand to SEQ ID NO: 1896748
aagcaucagugagaacacc

SEQ ID NO: 1896750 - RNA, 19 nt, Artificial Sequence
  Description of Artificial Sequence: Synthetic oligonucleotide
  Sense strand starting at position 3955 of SEQ ID NO: 1879293
acugaugcuuccugaccaa

SEQ ID NO: 1896751 - RNA, 19 nt, Artificial Sequence
  Description of Artificial Sequence: Synthetic oligonucleotide
  Antisense strand to SEQ ID NO: 1896750
uuggucaggaagcaucagu

SEQ ID NO: 1896752 - RNA, 19 nt, Artificial Sequence
  Description of Artificial Sequence: Synthetic oligonucleotide
  Sense strand starting at position 3958 of SEQ ID NO: 1879293
gaugcuuccugaccaagua

SEQ ID NO: 1896753 - RNA, 19 nt, Artificial Sequence
  Description of Artificial Sequence: Synthetic oligonucleotide
  Antisense strand to SEQ ID NO: 1896752
uacuuggucaggaagcauc

SEQ ID NO: 1896754 - RNA, 19 nt, Artificial Sequence
  Description of Artificial Sequence: Synthetic oligonucleotide
  Sense strand starting at position 3959 of SEQ ID NO: 1879293
augcuuccugaccaaguaa

SEQ ID NO: 1896755 - RNA, 19 nt, Artificial Sequence
  Description of Artificial Sequence: Synthetic oligonucleotide
  Antisense strand to SEQ ID NO: 1896754
uuacuuggucaggaagcau

SEQ ID NO: 1896756 - RNA, 19 nt, Artificial Sequence
  Description of Artificial Sequence: Synthetic oligonucleotide
  Sense strand starting at position 142 of SEQ ID NO: 1879294
gagaccaguuccuagguca

SEQ ID NO: 1896757 - RNA, 19 nt, Artificial Sequence
  Description of Artificial Sequence: Synthetic oligonucleotide
  Antisense strand to SEQ ID NO: 1896756
ugaccuaggaacuggucuc

SEQ ID NO: 1896758 - RNA, 19 nt, Artificial Sequence
  Description of Artificial Sequence: Synthetic oligonucleotide
  Sense strand starting at position 466 of SEQ ID NO: 1879294
cgagguggcucauuacagu

SEQ ID NO: 1896759 - RNA, 19 nt, Artificial Sequence
  Description of Artificial Sequence: Synthetic oligonucleotide
  Antisense strand to SEQ ID NO: 1896758
acuguaaugagccaccucg

SEQ ID NO: 1896760 - RNA, 19 nt, Artificial Sequence
  Description of Artificial Sequence: Synthetic oligonucleotide
  Sense strand starting at position 906 of SEQ ID NO: 1879294
ggcugagucccagaggcaa

SEQ ID NO: 1896761 - RNA, 19 nt, Artificial Sequence
  Description of Artificial Sequence: Synthetic oligonucleotide
  Antisense strand to SEQ ID NO: 1896760
uugccucugggacucagcc

SEQ ID NO: 1896762 - RNA, 19 nt, Artificial Sequence
  Description of Artificial Sequence: Synthetic oligonucleotide
  Sense strand starting at position 2386 of SEQ ID NO: 1879294
gcggcagcaucucaauuau

SEQ ID NO: 1896763 - RNA, 19 nt, Artificial Sequence
  Description of Artificial Sequence: Synthetic oligonucleotide
  Antisense strand to SEQ ID NO: 1896762
auaauugagaugcugccgc

SEQ ID NO: 1896764 - RNA, 19 nt, Artificial Sequence
  Description of Artificial Sequence: Synthetic oligonucleotide
  Sense strand starting at position 2411 of SEQ ID NO: 1879294
acgcgaugucuuuaaucau

SEQ ID NO: 1896765 - RNA, 19 nt, Artificial Sequence
  Description of Artificial Sequence: Synthetic oligonucleotide
  Antisense strand to SEQ ID NO: 1896764
augauuaaagacaucgcgu

SEQ ID NO: 1896766 - RNA, 19 nt, Artificial Sequence
  Description of Artificial Sequence: Synthetic oligonucleotide
  Sense strand starting at position 2414 of SEQ ID NO: 1879294
cgaugucuuuaaucaugaa

SEQ ID NO: 1896767 - RNA, 19 nt, Artificial Sequence
  Description of Artificial Sequence: Synthetic oligonucleotide
  Antisense strand to SEQ ID NO: 1896766
uucaugauuaaagacaucg

SEQ ID NO: 1896768 - RNA, 19 nt, Artificial Sequence
  Description of Artificial Sequence: Synthetic oligonucleotide
  Sense strand starting at position 2857 of SEQ ID NO: 1879294
ggaagucgucacuauguca

SEQ ID NO: 1896769 - RNA, 19 nt, Artificial Sequence
  Description of Artificial Sequence: Synthetic oligonucleotide
  Antisense strand to SEQ ID NO: 1896768
ugacauagugacgacuucc

SEQ ID NO: 1896770 - RNA, 19 nt, Artificial Sequence
  Description of Artificial Sequence: Synthetic oligonucleotide
  Sense strand starting at position 2860 of SEQ ID NO: 1879294
agucgucacuaugucagaa

SEQ ID NO: 1896771 - RNA, 19 nt, Artificial Sequence
  Description of Artificial Sequence: Synthetic oligonucleotide
  Antisense strand to SEQ ID NO: 1896770
uucugacauagugacgacu

SEQ ID NO: 1896772 - RNA, 19 nt, Artificial Sequence
  Description of Artificial Sequence: Synthetic oligonucleotide
  Sense strand starting at position 3290 of SEQ ID NO: 1879294
cagagacguucccagaaac

SEQ ID NO: 1896773 - RNA, 19 nt, Artificial Sequence
  Description of Artificial Sequence: Synthetic oligonucleotide
  Antisense strand to SEQ ID NO: 1896772
guuucugggaacgucucug

SEQ ID NO: 1896774 - RNA, 19 nt, Artificial Sequence
  Description of Artificial Sequence: Synthetic oligonucleotide
  Sense strand starting at position 3307 of SEQ ID NO: 1879294
acgagaaugcgagaucaau

SEQ ID NO: 1896775 - RNA, 19 nt, Artificial Sequence
  Description of Artificial Sequence: Synthetic oligonucleotide
  Antisense strand to SEQ ID NO: 1896774
auugaucucgcauucucgu

SEQ ID NO: 1896776 - RNA, 19 nt, Artificial Sequence
  Description of Artificial Sequence: Synthetic oligonucleotide
  Sense strand starting at position 3501 of SEQ ID NO: 1879294
ucagauacaugcuaugugu

SEQ ID NO: 1896777 - RNA, 19 nt, Artificial Sequence
  Description of Artificial Sequence: Synthetic oligonucleotide
  Antisense strand to SEQ ID NO: 1896776
acacauagcauguaucuga

SEQ ID NO: 1896778 - RNA, 19 nt, Artificial Sequence
  Description of Artificial Sequence: Synthetic oligonucleotide
  Sense strand starting at position 3602 of SEQ ID NO: 1879294
gacagaucaucaugccagu

SEQ ID NO: 1896779 - RNA, 19 nt, Artificial Sequence
  Description of Artificial Sequence: Synthetic oligonucleotide
  Antisense strand to SEQ ID NO: 1896778
acuggcaugaugaucuguc

SEQ ID NO: 1896780 - RNA, 19 nt, Artificial Sequence
  Description of Artificial Sequence: Synthetic oligonucleotide
  Sense strand starting at position 3605 of SEQ ID NO: 1879294
agaucaucaugccagugua

SEQ ID NO: 1896781 - RNA, 19 nt, Artificial Sequence
  Description of Artificial Sequence: Synthetic oligonucleotide
  Antisense strand to SEQ ID NO: 1896780
uacacuggcaugaugaucu

SEQ ID NO: 1896782 - RNA, 19 nt, Artificial Sequence
  Description of Artificial Sequence: Synthetic oligonucleotide
  Sense strand starting at position 3608 of SEQ ID NO: 1879294
ucaucaugccaguguauuu

SEQ ID NO: 1896783 - RNA, 19 nt, Artificial Sequence
  Description of Artificial Sequence: Synthetic oligonucleotide
  Antisense strand to SEQ ID NO: 1896782
aaauacacuggcaugauga

SEQ ID NO: 1896784 - RNA, 19 nt, Artificial Sequence
  Description of Artificial Sequence: Synthetic oligonucleotide
  Sense strand starting at position 3613 of SEQ ID NO: 1879294
augccaguguauuugauua

SEQ ID NO: 1896785 - RNA, 19 nt, Artificial Sequence
  Description of Artificial Sequence: Synthetic oligonucleotide
  Antisense strand to SEQ ID NO: 1896784
uaaucaaauacacuggcau

SEQ ID NO: 1896786 - RNA, 19 nt, Artificial Sequence
  Description of Artificial Sequence: Synthetic oligonucleotide
  Sense strand starting at position 3615 of SEQ ID NO: 1879294
gccaguguauuugauuaaa

SEQ ID NO: 1896787 - RNA, 19 nt, Artificial Sequence
  Description of Artificial Sequence: Synthetic oligonucleotide
  Antisense strand to SEQ ID NO: 1896786
uuuaaucaaauacacuggc

SEQ ID NO: 1896788 - RNA, 19 nt, Artificial Sequence
  Description of Artificial Sequence: Synthetic oligonucleotide
  Sense strand starting at position 3690 of SEQ ID NO: 1879294
agucgugugcugaguugga

SEQ ID NO: 1896789 - RNA, 19 nt, Artificial Sequence
  Description of Artificial Sequence: Synthetic oligonucleotide
  Antisense strand to SEQ ID NO: 1896788
uccaacucagcacacgacu

SEQ ID NO: 1896790 - RNA, 19 nt, Artificial Sequence
  Description of Artificial Sequence: Synthetic oligonucleotide
  Sense strand starting at position 3694 of SEQ ID NO: 1879294
gugugcugaguuggacaga

SEQ ID NO: 1896791 - RNA, 19 nt, Artificial Sequence
  Description of Artificial Sequence: Synthetic oligonucleotide
  Antisense strand to SEQ ID NO: 1896790
ucuguccaacucagcacac

SEQ ID NO: 1896792 - RNA, 19 nt, Artificial Sequence
  Description of Artificial Sequence: Synthetic oligonucleotide
  Sense strand starting at position 3707 of SEQ ID NO: 1879294
gacagagaacagugagguu

SEQ ID NO: 1896793 - RNA, 19 nt, Artificial Sequence
  Description of Artificial Sequence: Synthetic oligonucleotide
  Antisense strand to SEQ ID NO: 1896792
aaccucacuguucucuguc

SEQ ID NO: 1896794 - RNA, 19 nt, Artificial Sequence
  Description of Artificial Sequence: Synthetic oligonucleotide
  Sense strand starting at position 3714 of SEQ ID NO: 1879294
aacagugagguuugaggaa

SEQ ID NO: 1896795 - RNA, 19 nt, Artificial Sequence
  Description of Artificial Sequence: Synthetic oligonucleotide
  Antisense strand to SEQ ID NO: 1896794
uuccucaaaccucacuguu

SEQ ID NO: 1896796 - RNA, 19 nt, Artificial Sequence
  Description of Artificial Sequence: Synthetic oligonucleotide
  Sense strand starting at position 3807 of SEQ ID NO: 1879294
agcuucucauccuugagga

SEQ ID NO: 1896797 - RNA, 19 nt, Artificial Sequence
  Description of Artificial Sequence: Synthetic oligonucleotide
  Antisense strand to SEQ ID NO: 1896796
uccucaaggaugagaagcu

SEQ ID NO: 1896798 - RNA, 19 nt, Artificial Sequence
  Description of Artificial Sequence: Synthetic oligonucleotide
  Sense strand starting at position 3808 of SEQ ID NO: 1879294
gcuucucauccuugaggau

SEQ ID NO: 1896799 - RNA, 19 nt, Artificial Sequence
  Description of Artificial Sequence: Synthetic oligonucleotide
  Antisense strand to SEQ ID NO: 1896798
auccucaaggaugagaagc

SEQ ID NO: 1896800 - RNA, 19 nt, Artificial Sequence
  Description of Artificial Sequence: Synthetic oligonucleotide
  Sense strand starting at position 3817 of SEQ ID NO: 1879294
ccuugaggaucagagcuuu

SEQ ID NO: 1896801 - RNA, 19 nt, Artificial Sequence
  Description of Artificial Sequence: Synthetic oligonucleotide
  Antisense strand to SEQ ID NO: 1896800
aaagcucugauccucaagg

SEQ ID NO: 1896802 - RNA, 19 nt, Artificial Sequence
  Description of Artificial Sequence: Synthetic oligonucleotide
  Sense strand starting at position 3825 of SEQ ID NO: 1879294
aucagagcuuucuagugua

SEQ ID NO: 1896803 - RNA, 19 nt, Artificial Sequence
  Description of Artificial Sequence: Synthetic oligonucleotide
  Antisense strand to SEQ ID NO: 1896802
uacacuagaaagcucugau

SEQ ID NO: 1896804 - RNA, 19 nt, Artificial Sequence
  Description of Artificial Sequence: Synthetic oligonucleotide
  Sense strand starting at position 44 of SEQ ID NO: 1879297
aaagucucaucucagggua

SEQ ID NO: 1896805 - RNA, 19 nt, Artificial Sequence
  Description of Artificial Sequence: Synthetic oligonucleotide
  Antisense strand to SEQ ID NO: 1896804
uacccugagaugagacuuu

SEQ ID NO: 1896806 - RNA, 19 nt, Artificial Sequence
  Description of Artificial Sequence: Synthetic oligonucleotide
  Sense strand starting at position 47 of SEQ ID NO: 1879297
gucucaucucaggguagga

SEQ ID NO: 1896807 - RNA, 19 nt, Artificial Sequence
  Description of Artificial Sequence: Synthetic oligonucleotide
  Antisense strand to SEQ ID NO: 1896806
uccuacccugagaugagac

SEQ ID NO: 1896808 - RNA, 19 nt, Artificial Sequence
  Description of Artificial Sequence: Synthetic oligonucleotide
  Sense strand starting at position 213 of SEQ ID NO: 1879297
ggaaucaagcccgguguau

SEQ ID NO: 1896809 - RNA, 19 nt, Artificial Sequence
  Description of Artificial Sequence: Synthetic oligonucleotide
  Antisense strand to SEQ ID NO: 1896808
auacaccgggcuugauucc

SEQ ID NO: 1896810 - RNA, 19 nt, Artificial Sequence
  Description of Artificial Sequence: Synthetic oligonucleotide
  Sense strand starting at position 248 of SEQ ID NO: 1879297
cccuauguagaagggauua

SEQ ID NO: 1896811 - RNA, 19 nt, Artificial Sequence
  Description of Artificial Sequence: Synthetic oligonucleotide
  Antisense strand to SEQ ID NO: 1896810
uaaucccuucuacauaggg

SEQ ID NO: 1896812 - RNA, 19 nt, Artificial Sequence
  Description of Artificial Sequence: Synthetic oligonucleotide
  Sense strand starting at position 754 of SEQ ID NO: 1879297
guguguuggucucuuggua

SEQ ID NO: 1896813 - RNA, 19 nt, Artificial Sequence
  Description of Artificial Sequence: Synthetic oligonucleotide
  Antisense strand to SEQ ID NO: 1896812
uaccaagagaccaacacac

SEQ ID NO: 1896814 - RNA, 19 nt, Artificial Sequence
  Description of Artificial Sequence: Synthetic oligonucleotide
  Sense strand starting at position 758 of SEQ ID NO: 1879297
guuggucucuugguaauuc

SEQ ID NO: 1896815 - RNA, 19 nt, Artificial Sequence
  Description of Artificial Sequence: Synthetic oligonucleotide
  Antisense strand to SEQ ID NO: 1896814
gaauuaccaagagaccaac

SEQ ID NO: 1896816 - RNA, 19 nt, Artificial Sequence
  Description of Artificial Sequence: Synthetic oligonucleotide
  Sense strand starting at position 877 of SEQ ID NO: 1879297
cucugacauguccgggaaa

SEQ ID NO: 1896817 - RNA, 19 nt, Artificial Sequence
  Description of Artificial Sequence: Synthetic oligonucleotide
  Antisense strand to SEQ ID NO: 1896816
uuucccggacaugucagag

SEQ ID NO: 1896818 - RNA, 19 nt, Artificial Sequence
  Description of Artificial Sequence: Synthetic oligonucleotide
  Sense strand starting at position 878 of SEQ ID NO: 1879297
ucugacauguccgggaaag

SEQ ID NO: 1896819 - RNA, 19 nt, Artificial Sequence
  Description of Artificial Sequence: Synthetic oligonucleotide
  Antisense strand to SEQ ID NO: 1896818
cuuucccggacaugucaga

SEQ ID NO: 1896820 - RNA, 19 nt, Artificial Sequence
  Description of Artificial Sequence: Synthetic oligonucleotide
  Sense strand starting at position 880 of SEQ ID NO: 1879297
ugacauguccgggaaagca

SEQ ID NO: 1896821 - RNA, 19 nt, Artificial Sequence
  Description of Artificial Sequence: Synthetic oligonucleotide
  Antisense strand to SEQ ID NO: 1896820
ugcuuucccggacauguca

SEQ ID NO: 1896822 - RNA, 19 nt, Artificial Sequence
  Description of Artificial Sequence: Synthetic oligonucleotide
  Sense strand starting at position 969 of SEQ ID NO: 1879297
gagagugucucaucucgaa

SEQ ID NO: 1896823 - RNA, 19 nt, Artificial Sequence
  Description of Artificial Sequence: Synthetic oligonucleotide
  Antisense strand to SEQ ID NO: 1896822
uucgagaugagacacucuc

SEQ ID NO: 1896824 - RNA, 19 nt, Artificial Sequence
  Description of Artificial Sequence: Synthetic oligonucleotide
  Sense strand starting at position 972 of SEQ ID NO: 1879297
agugucucaucucgaaaga

SEQ ID NO: 1896825 - RNA, 19 nt, Artificial Sequence
  Description of Artificial Sequence: Synthetic oligonucleotide
  Antisense strand to SEQ ID NO: 1896824
ucuuucgagaugagacacu

SEQ ID NO: 1896826 - RNA, 19 nt, Artificial Sequence
  Description of Artificial Sequence: Synthetic oligonucleotide
  Sense strand starting at position 973 of SEQ ID NO: 1879297
gugucucaucucgaaagaa

SEQ ID NO: 1896827 - RNA, 19 nt, Artificial Sequence
  Description of Artificial Sequence: Synthetic oligonucleotide
  Antisense strand to SEQ ID NO: 1896826
uucuuucgagaugagacac

SEQ ID NO: 1896828 - RNA, 19 nt, Artificial Sequence
  Description of Artificial Sequence: Synthetic oligonucleotide
  Sense strand starting at position 1629 of SEQ ID NO: 1879297
cccaaacuguucucagguu

SEQ ID NO: 1896829 - RNA, 19 nt, Artificial Sequence
  Description of Artificial Sequence: Synthetic oligonucleotide
  Antisense strand to SEQ ID NO: 1896828
aaccugagaacaguuuggg

SEQ ID NO: 1896830 - RNA, 19 nt, Artificial Sequence
  Description of Artificial Sequence: Synthetic oligonucleotide
  Sense strand starting at position 1630 of SEQ ID NO: 1879297
ccaaacuguucucagguua

SEQ ID NO: 1896831 - RNA, 19 nt, Artificial Sequence
  Description of Artificial Sequence: Synthetic oligonucleotide
  Antisense strand to SEQ ID NO: 1896830
uaaccugagaacaguuugg

SEQ ID NO: 1896832 - RNA, 19 nt, Artificial Sequence
  Description of Artificial Sequence: Synthetic oligonucleotide
  Sense strand starting at position 1635 of SEQ ID NO: 1879297
cuguucucagguuaggaaa

SEQ ID NO: 1896833 - RNA, 19 nt, Artificial Sequence
  Description of Artificial Sequence: Synthetic oligonucleotide
  Antisense strand to SEQ ID NO: 1896832
uuuccuaaccugagaacag

SEQ ID NO: 1896834 - RNA, 19 nt, Artificial Sequence
  Description of Artificial Sequence: Synthetic oligonucleotide
  Sense strand starting at position 2015 of SEQ ID NO: 1879297
ggcccagguuuccaaguuu

SEQ ID NO: 1896835 - RNA, 19 nt, Artificial Sequence
  Description of Artificial Sequence: Synthetic oligonucleotide
  Antisense strand to SEQ ID NO: 1896834
aaacuuggaaaccugggcc

SEQ ID NO: 1896836 - RNA, 19 nt, Artificial Sequence
  Description of Artificial Sequence: Synthetic oligonucleotide
  Sense strand starting at position 2056 of SEQ ID NO: 1879297
gcaagcauggcguguugua

SEQ ID NO: 1896837 - RNA, 19 nt, Artificial Sequence
  Description of Artificial Sequence: Synthetic oligonucleotide
  Antisense strand to SEQ ID NO: 1896836
uacaacacgccaugcuugc

SEQ ID NO: 1896838 - RNA, 19 nt, Artificial Sequence
  Description of Artificial Sequence: Synthetic oligonucleotide
  Sense strand starting at position 2145 of SEQ ID NO: 1879297
uuguuuaccucuuggguga

SEQ ID NO: 1896839 - RNA, 19 nt, Artificial Sequence
  Description of Artificial Sequence: Synthetic oligonucleotide
  Antisense strand to SEQ ID NO: 1896838
ucacccaagagguaaacaa

SEQ ID NO: 1896840 - RNA, 19 nt, Artificial Sequence
  Description of Artificial Sequence: Synthetic oligonucleotide
  Sense strand starting at position 2147 of SEQ ID NO: 1879297
guuuaccucuugggugaga

SEQ ID NO: 1896841 - RNA, 19 nt, Artificial Sequence
  Description of Artificial Sequence: Synthetic oligonucleotide
  Antisense strand to SEQ ID NO: 1896840
ucucacccaagagguaaac

SEQ ID NO: 1896842 - RNA, 19 nt, Artificial Sequence
  Description of Artificial Sequence: Synthetic oligonucleotide
  Sense strand starting at position 2149 of SEQ ID NO: 1879297
uuaccucuugggugagagu

SEQ ID NO: 1896843 - RNA, 19 nt, Artificial Sequence
  Description of Artificial Sequence: Synthetic oligonucleotide
  Antisense strand to SEQ ID NO: 1896842
acucucacccaagagguaa

SEQ ID NO: 1896844 - RNA, 19 nt, Artificial Sequence
  Description of Artificial Sequence: Synthetic oligonucleotide
  Sense strand starting at position 2169 of SEQ ID NO: 1879297
ggcuuaggaucucaacauu

SEQ ID NO: 1896845 - RNA, 19 nt, Artificial Sequence
  Description of Artificial Sequence: Synthetic oligonucleotide
  Antisense strand to SEQ ID NO: 1896844
aauguugagauccuaagcc

SEQ ID NO: 1896846 - RNA, 19 nt, Artificial Sequence
  Description of Artificial Sequence: Synthetic oligonucleotide
  Sense strand starting at position 2388 of SEQ ID NO: 1879297
gggucugaguaguugcacu

SEQ ID NO: 1896847 - RNA, 19 nt, Artificial Sequence
  Description of Artificial Sequence: Synthetic oligonucleotide
  Antisense strand to SEQ ID NO: 1896846
agugcaacuacucagaccc

SEQ ID NO: 1896848 - RNA, 19 nt, Artificial Sequence
  Description of Artificial Sequence: Synthetic oligonucleotide
  Sense strand starting at position 3124 of SEQ ID NO: 1879297
gcaagcucauccguugaaa

SEQ ID NO: 1896849 - RNA, 19 nt, Artificial Sequence
  Description of Artificial Sequence: Synthetic oligonucleotide
  Antisense strand to SEQ ID NO: 1896848
uuucaacggaugagcuugc

SEQ ID NO: 1896850 - RNA, 19 nt, Artificial Sequence
  Description of Artificial Sequence: Synthetic oligonucleotide
  Sense strand starting at position 3145 of SEQ ID NO: 1879297
gugaguaaugcuggcaguu

SEQ ID NO: 1896851 - RNA, 19 nt, Artificial Sequence
  Description of Artificial Sequence: Synthetic oligonucleotide
  Antisense strand to SEQ ID NO: 1896850
aacugccagcauuacucac

SEQ ID NO: 1896852 - RNA, 19 nt, Artificial Sequence
  Description of Artificial Sequence: Synthetic oligonucleotide
  Sense strand starting at position 3564 of SEQ ID NO: 1879297
gguaaaugaccaugugugu

SEQ ID NO: 1896853 - RNA, 19 nt, Artificial Sequence
  Description of Artificial Sequence: Synthetic oligonucleotide
  Antisense strand to SEQ ID NO: 1896852
acacacauggucauuuacc

SEQ ID NO: 1896854 - RNA, 19 nt, Artificial Sequence
  Description of Artificial Sequence: Synthetic oligonucleotide
  Sense strand starting at position 3680 of SEQ ID NO: 1879297
augacagaguuagaagaaa

SEQ ID NO: 1896855 - RNA, 19 nt, Artificial Sequence
  Description of Artificial Sequence: Synthetic oligonucleotide
  Antisense strand to SEQ ID NO: 1896854
uuucuucuaacucugucau

SEQ ID NO: 1896856 - RNA, 19 nt, Artificial Sequence
  Description of Artificial Sequence: Synthetic oligonucleotide
  Sense strand starting at position 3774 of SEQ ID NO: 1879297
cggagcucgccugguuaau

SEQ ID NO: 1896857 - RNA, 19 nt, Artificial Sequence
  Description of Artificial Sequence: Synthetic oligonucleotide
  Antisense strand to SEQ ID NO: 1896856
auuaaccaggcgagcuccg

SEQ ID NO: 1896858 - RNA, 19 nt, Artificial Sequence
  Description of Artificial Sequence: Synthetic oligonucleotide
  Sense strand starting at position 3805 of SEQ ID NO: 1879297
uuauuugagucaggucacu

SEQ ID NO: 1896859 - RNA, 19 nt, Artificial Sequence
  Description of Artificial Sequence: Synthetic oligonucleotide
  Antisense strand to SEQ ID NO: 1896858
agugaccugacucaaauaa

SEQ ID NO: 1896860 - RNA, 19 nt, Artificial Sequence
  Description of Artificial Sequence: Synthetic oligonucleotide
  Sense strand starting at position 3810 of SEQ ID NO: 1879297
ugagucaggucacugugua

SEQ ID NO: 1896861 - RNA, 19 nt, Artificial Sequence
  Description of Artificial Sequence: Synthetic oligonucleotide
  Antisense strand to SEQ ID NO: 1896860
uacacagugaccugacuca

SEQ ID NO: 1896862 - RNA, 19 nt, Artificial Sequence
  Description of Artificial Sequence: Synthetic oligonucleotide
  Sense strand starting at position 3811 of SEQ ID NO: 1879297
gagucaggucacuguguaa

SEQ ID NO: 1896863 - RNA, 19 nt, Artificial Sequence
  Description of Artificial Sequence: Synthetic oligonucleotide
  Antisense strand to SEQ ID NO: 1896862
uuacacagugaccugacuc

SEQ ID NO: 1896864 - RNA, 19 nt, Artificial Sequence
  Description of Artificial Sequence: Synthetic oligonucleotide
  Sense strand starting at position 3824 of SEQ ID NO: 1879297
guguaaaggucauacugcu

SEQ ID NO: 1896865 - RNA, 19 nt, Artificial Sequence
  Description of Artificial Sequence: Synthetic oligonucleotide
  Antisense strand to SEQ ID NO: 1896864
agcaguaugaccuuuacac

SEQ ID NO: 1896866 - RNA, 19 nt, Artificial Sequence
  Description of Artificial Sequence: Synthetic oligonucleotide
  Sense strand starting at position 3863 of SEQ ID NO: 1879297
cugcgcagcucagauauuu

SEQ ID NO: 1896867 - RNA, 19 nt, Artificial Sequence
  Description of Artificial Sequence: Synthetic oligonucleotide
  Antisense strand to SEQ ID NO: 1896866
aaauaucugagcugcgcag

SEQ ID NO: 1896868 - RNA, 19 nt, Artificial Sequence
  Description of Artificial Sequence: Synthetic oligonucleotide
  Sense strand starting at position 641 of SEQ ID NO: 1879298
gacguugcccuagagagau

SEQ ID NO: 1896869 - RNA, 19 nt, Artificial Sequence
  Description of Artificial Sequence: Synthetic oligonucleotide
  Antisense strand to SEQ ID NO: 1896868
aucucucuagggcaacguc

SEQ ID NO: 1896870 - RNA, 19 nt, Artificial Sequence
  Description of Artificial Sequence: Synthetic oligonucleotide
  Sense strand starting at position 668 of SEQ ID NO: 1879298
gcccaauguuggcagcuau

SEQ ID NO: 1896871 - RNA, 19 nt, Artificial Sequence
  Description of Artificial Sequence: Synthetic oligonucleotide
  Antisense strand to SEQ ID NO: 1896870
auagcugccaacauugggc

SEQ ID NO: 1896872 - RNA, 19 nt, Artificial Sequence
  Description of Artificial Sequence: Synthetic oligonucleotide
  Sense strand starting at position 683 of SEQ ID NO: 1879298
cuauuccaaugugaaagaa

SEQ ID NO: 1896873 - RNA, 19 nt, Artificial Sequence
  Description of Artificial Sequence: Synthetic oligonucleotide
  Antisense strand to SEQ ID NO: 1896872
uucuuucacauuggaauag

SEQ ID NO: 1896874 - RNA, 19 nt, Artificial Sequence
  Description of Artificial Sequence: Synthetic oligonucleotide
  Sense strand starting at position 979 of SEQ ID NO: 1879298
gcaugcugcucguguguga

SEQ ID NO: 1896875 - RNA, 19 nt, Artificial Sequence
  Description of Artificial Sequence: Synthetic oligonucleotide
  Antisense strand to SEQ ID NO: 1896874
ucacacacgagcagcaugc

SEQ ID NO: 1896876 - RNA, 19 nt, Artificial Sequence
  Description of Artificial Sequence: Synthetic oligonucleotide
  Sense strand starting at position 986 of SEQ ID NO: 1879298
gcucgugugugacccauuu

SEQ ID NO: 1896877 - RNA, 19 nt, Artificial Sequence
  Description of Artificial Sequence: Synthetic oligonucleotide
  Antisense strand to SEQ ID NO: 1896876
aaaugggucacacacgagc

SEQ ID NO: 1896878 - RNA, 19 nt, Artificial Sequence
  Description of Artificial Sequence: Synthetic oligonucleotide
  Sense strand starting at position 1025 of SEQ ID NO: 1879298
acacgaauacugugaauuc

SEQ ID NO: 1896879 - RNA, 19 nt, Artificial Sequence
  Description of Artificial Sequence: Synthetic oligonucleotide
  Antisense strand to SEQ ID NO: 1896878
gaauucacaguauucgugu

SEQ ID NO: 1896880 - RNA, 19 nt, Artificial Sequence
  Description of Artificial Sequence: Synthetic oligonucleotide
  Sense strand starting at position 1064 of SEQ ID NO: 1879298
accaguccuuccugauaca

SEQ ID NO: 1896881 - RNA, 19 nt, Artificial Sequence
  Description of Artificial Sequence: Synthetic oligonucleotide
  Antisense strand to SEQ ID NO: 1896880
uguaucaggaaggacuggu

SEQ ID NO: 1896882 - RNA, 19 nt, Artificial Sequence
  Description of Artificial Sequence: Synthetic oligonucleotide
  Sense strand starting at position 1085 of SEQ ID NO: 1879298
cgaaucagaucuuucccau

SEQ ID NO: 1896883 - RNA, 19 nt, Artificial Sequence
  Description of Artificial Sequence: Synthetic oligonucleotide
  Antisense strand to SEQ ID NO: 1896882
augggaaagaucugauucg

SEQ ID NO: 1896884 - RNA, 19 nt, Artificial Sequence
  Description of Artificial Sequence: Synthetic oligonucleotide
  Sense strand starting at position 1999 of SEQ ID NO: 1879298
ggugacgugucuuugacuu

SEQ ID NO: 1896885 - RNA, 19 nt, Artificial Sequence
  Description of Artificial Sequence: Synthetic oligonucleotide
  Antisense strand to SEQ ID NO: 1896884
aagucaaagacacgucacc

SEQ ID NO: 1896886 - RNA, 19 nt, Artificial Sequence
  Description of Artificial Sequence: Synthetic oligonucleotide
  Sense strand starting at position 2085 of SEQ ID NO: 1879298
ugcauaaguucccuguaga

SEQ ID NO: 1896887 - RNA, 19 nt, Artificial Sequence
  Description of Artificial Sequence: Synthetic oligonucleotide
  Antisense strand to SEQ ID NO: 1896886
ucuacagggaacuuaugca

SEQ ID NO: 1896888 - RNA, 19 nt, Artificial Sequence
  Description of Artificial Sequence: Synthetic oligonucleotide
  Sense strand starting at position 2086 of SEQ ID NO: 1879298
gcauaaguucccuguagau

SEQ ID NO: 1896889 - RNA, 19 nt, Artificial Sequence
  Description of Artificial Sequence: Synthetic oligonucleotide
  Antisense strand to SEQ ID NO: 1896888
aucuacagggaacuuaugc

SEQ ID NO: 1896890 - RNA, 19 nt, Artificial Sequence
  Description of Artificial Sequence: Synthetic oligonucleotide
  Sense strand starting at position 2088 of SEQ ID NO: 1879298
auaaguucccuguagauuc

SEQ ID NO: 1896891 - RNA, 19 nt, Artificial Sequence
  Description of Artificial Sequence: Synthetic oligonucleotide
  Antisense strand to SEQ ID NO: 1896890
gaaucuacagggaacuuau

SEQ ID NO: 1896892 - RNA, 19 nt, Artificial Sequence
  Description of Artificial Sequence: Synthetic oligonucleotide
  Sense strand starting at position 2156 of SEQ ID NO: 1879298
uucaguagguugucuguau

SEQ ID NO: 1896893 - RNA, 19 nt, Artificial Sequence
  Description of Artificial Sequence: Synthetic oligonucleotide
  Antisense strand to SEQ ID NO: 1896892
auacagacaaccuacugaa

SEQ ID NO: 1896894 - RNA, 19 nt, Artificial Sequence
  Description of Artificial Sequence: Synthetic oligonucleotide
  Sense strand starting at position 2157 of SEQ ID NO: 1879298
ucaguagguugucuguauu

SEQ ID NO: 1896895 - RNA, 19 nt, Artificial Sequence
  Description of Artificial Sequence: Synthetic oligonucleotide
  Antisense strand to SEQ ID NO: 1896894
aauacagacaaccuacuga

SEQ ID NO: 1896896 - RNA, 19 nt, Artificial Sequence
  Description of Artificial Sequence: Synthetic oligonucleotide
  Sense strand starting at position 2167 of SEQ ID NO: 1879298
gucuguauucucugucaaa

SEQ ID NO: 1896897 - RNA, 19 nt, Artificial Sequence
  Description of Artificial Sequence: Synthetic oligonucleotide
  Antisense strand to SEQ ID NO: 1896896
uuugacagagaauacagac

SEQ ID NO: 1896898 - RNA, 19 nt, Artificial Sequence
  Description of Artificial Sequence: Synthetic oligonucleotide
  Sense strand starting at position 2168 of SEQ ID NO: 1879298
ucuguauucucugucaaac

SEQ ID NO: 1896899 - RNA, 19 nt, Artificial Sequence
  Description of Artificial Sequence: Synthetic oligonucleotide
  Antisense strand to SEQ ID NO: 1896898
guuugacagagaauacaga

SEQ ID NO: 1896900 - RNA, 19 nt, Artificial Sequence
  Description of Artificial Sequence: Synthetic oligonucleotide
  Sense strand starting at position 2170 of SEQ ID NO: 1879298
uguauucucugucaaacgu

SEQ ID NO: 1896901 - RNA, 19 nt, Artificial Sequence
  Description of Artificial Sequence: Synthetic oligonucleotide
  Antisense strand to SEQ ID NO: 1896900
acguuugacagagaauaca

SEQ ID NO: 1896902 - RNA, 19 nt, Artificial Sequence
  Description of Artificial Sequence: Synthetic oligonucleotide
  Sense strand starting at position 2294 of SEQ ID NO: 1879298
caacgucaagaagaguauu

SEQ ID NO: 1896903 - RNA, 19 nt, Artificial Sequence
  Description of Artificial Sequence: Synthetic oligonucleotide
  Antisense strand to SEQ ID NO: 1896902
aauacucuucuugacguug

SEQ ID NO: 1896904 - RNA, 19 nt, Artificial Sequence
  Description of Artificial Sequence: Synthetic oligonucleotide
  Sense strand starting at position 2316 of SEQ ID NO: 1879298
uagguuaucuuccaggauc

SEQ ID NO: 1896905 - RNA, 19 nt, Artificial Sequence
  Description of Artificial Sequence: Synthetic oligonucleotide
  Antisense strand to SEQ ID NO: 1896904
gauccuggaagauaaccua

SEQ ID NO: 1896906 - RNA, 19 nt, Artificial Sequence
  Description of Artificial Sequence: Synthetic oligonucleotide
  Sense strand starting at position 2318 of SEQ ID NO: 1879298
gguuaucuuccaggaucuu

SEQ ID NO: 1896907 - RNA, 19 nt, Artificial Sequence
  Description of Artificial Sequence: Synthetic oligonucleotide
  Antisense strand to SEQ ID NO: 1896906
aagauccuggaagauaacc

SEQ ID NO: 1896908 - RNA, 19 nt, Artificial Sequence
  Description of Artificial Sequence: Synthetic oligonucleotide
  Sense strand starting at position 2319 of SEQ ID NO: 1879298
guuaucuuccaggaucuua

SEQ ID NO: 1896909 - RNA, 19 nt, Artificial Sequence
  Description of Artificial Sequence: Synthetic oligonucleotide
  Antisense strand to SEQ ID NO: 1896908
uaagauccuggaagauaac

SEQ ID NO: 1896910 - RNA, 19 nt, Artificial Sequence
  Description of Artificial Sequence: Synthetic oligonucleotide
  Sense strand starting at position 2458 of SEQ ID NO: 1879298
uauugaauaguauggucuu

SEQ ID NO: 1896911 - RNA, 19 nt, Artificial Sequence
  Description of Artificial Sequence: Synthetic oligonucleotide
  Antisense strand to SEQ ID NO: 1896910
aagaccauacuauucaaua

SEQ ID NO: 1896912 - RNA, 19 nt, Artificial Sequence
  Description of Artificial Sequence: Synthetic oligonucleotide
  Sense strand starting at position 2459 of SEQ ID NO: 1879298
auugaauaguauggucuuu

SEQ ID NO: 1896913 - RNA, 19 nt, Artificial Sequence
  Description of Artificial Sequence: Synthetic oligonucleotide
  Antisense strand to SEQ ID NO: 1896912
aaagaccauacuauucaau

SEQ ID NO: 1896914 - RNA, 19 nt, Artificial Sequence
  Description of Artificial Sequence: Synthetic oligonucleotide
  Sense strand starting at position 2497 of SEQ ID NO: 1879298
ggccuugucaaagauugga

SEQ ID NO: 1896915 - RNA, 19 nt, Artificial Sequence
  Description of Artificial Sequence: Synthetic oligonucleotide
  Antisense strand to SEQ ID NO: 1896914
uccaaucuuugacaaggcc

SEQ ID NO: 1896916 - RNA, 19 nt, Artificial Sequence
  Description of Artificial Sequence: Synthetic oligonucleotide
  Sense strand starting at position 2722 of SEQ ID NO: 1879298
uaggauaguuucuucuugu

SEQ ID NO: 1896917 - RNA, 19 nt, Artificial Sequence
  Description of Artificial Sequence: Synthetic oligonucleotide
  Antisense strand to SEQ ID NO: 1896916
acaagaagaaacuauccua

SEQ ID NO: 1896918 - RNA, 19 nt, Artificial Sequence
  Description of Artificial Sequence: Synthetic oligonucleotide
  Sense strand starting at position 2723 of SEQ ID NO: 1879298
aggauaguuucuucuuguu

SEQ ID NO: 1896919 - RNA, 19 nt, Artificial Sequence
  Description of Artificial Sequence: Synthetic oligonucleotide
  Antisense strand to SEQ ID NO: 1896918
aacaagaagaaacuauccu

SEQ ID NO: 1896920 - RNA, 19 nt, Artificial Sequence
  Description of Artificial Sequence: Synthetic oligonucleotide
  Sense strand starting at position 2728 of SEQ ID NO: 1879298
aguuucuucuuguucuuaa

SEQ ID NO: 1896921 - RNA, 19 nt, Artificial Sequence
  Description of Artificial Sequence: Synthetic oligonucleotide
  Antisense strand to SEQ ID NO: 1896920
uuaagaacaagaagaaacu

SEQ ID NO: 1896922 - RNA, 19 nt, Artificial Sequence
  Description of Artificial Sequence: Synthetic oligonucleotide
  Sense strand starting at position 2729 of SEQ ID NO: 1879298
guuucuucuuguucuuaaa

SEQ ID NO: 1896923 - RNA, 19 nt, Artificial Sequence
  Description of Artificial Sequence: Synthetic oligonucleotide
  Antisense strand to SEQ ID NO: 1896922
uuuaagaacaagaagaaac

SEQ ID NO: 1896924 - RNA, 19 nt, Artificial Sequence
  Description of Artificial Sequence: Synthetic oligonucleotide
  Sense strand starting at position 2764 of SEQ ID NO: 1879298
cuuguuuagcucuaagaaa

SEQ ID NO: 1896925 - RNA, 19 nt, Artificial Sequence
  Description of Artificial Sequence: Synthetic oligonucleotide
  Antisense strand to SEQ ID NO: 1896924
uuucuuagagcuaaacaag

SEQ ID NO: 1896926 - RNA, 19 nt, Artificial Sequence
  Description of Artificial Sequence: Synthetic oligonucleotide
  Sense strand starting at position 2793 of SEQ ID NO: 1879298
uuuguauuggaauagcauu

SEQ ID NO: 1896927 - RNA, 19 nt, Artificial Sequence
  Description of Artificial Sequence: Synthetic oligonucleotide
  Antisense strand to SEQ ID NO: 1896926
aaugcuauuccaauacaaa

SEQ ID NO: 1896928 - RNA, 19 nt, Artificial Sequence
  Description of Artificial Sequence: Synthetic oligonucleotide
  Sense strand starting at position 2866 of SEQ ID NO: 1879298
uuuauaaaguugccuguaa

SEQ ID NO: 1896929 - RNA, 19 nt, Artificial Sequence
  Description of Artificial Sequence: Synthetic oligonucleotide
  Antisense strand to SEQ ID NO: 1896928
uuacaggcaacuuuauaaa

SEQ ID NO: 1896930 - RNA, 19 nt, Artificial Sequence
  Description of Artificial Sequence: Synthetic oligonucleotide
  Sense strand starting at position 2867 of SEQ ID NO: 1879298
uuauaaaguugccuguaau

SEQ ID NO: 1896931 - RNA, 19 nt, Artificial Sequence
  Description of Artificial Sequence: Synthetic oligonucleotide
  Antisense strand to SEQ ID NO: 1896930
auuacaggcaacuuuauaa

SEQ ID NO: 1896932 - RNA, 19 nt, Artificial Sequence
  Description of Artificial Sequence: Synthetic oligonucleotide
  Sense strand starting at position 2868 of SEQ ID NO: 1879298
uauaaaguugccuguaaug

SEQ ID NO: 1896933 - RNA, 19 nt, Artificial Sequence
  Description of Artificial Sequence: Synthetic oligonucleotide
  Antisense strand to SEQ ID NO: 1896932
cauuacaggcaacuuuaua

SEQ ID NO: 1896934 - RNA, 19 nt, Artificial Sequence
  Description of Artificial Sequence: Synthetic oligonucleotide
  Sense strand starting at position 2870 of SEQ ID NO: 1879298
uaaaguugccuguaaugau

SEQ ID NO: 1896935 - RNA, 19 nt, Artificial Sequence
  Description of Artificial Sequence: Synthetic oligonucleotide
  Antisense strand to SEQ ID NO: 1896934
aucauuacaggcaacuuua

SEQ ID NO: 1896936 - RNA, 19 nt, Artificial Sequence
  Description of Artificial Sequence: Synthetic oligonucleotide
  Sense strand starting at position 2917 of SEQ ID NO: 1879298
aggaaacauccuuguaacc

SEQ ID NO: 1896937 - RNA, 19 nt, Artificial Sequence
  Description of Artificial Sequence: Synthetic oligonucleotide
  Antisense strand to SEQ ID NO: 1896936
gguuacaaggauguuuccu

SEQ ID NO: 1896938 - RNA, 19 nt, Artificial Sequence
  Description of Artificial Sequence: Synthetic oligonucleotide
  Sense strand starting at position 3086 of SEQ ID NO: 1879298
ccaaguguauaucccuaga

SEQ ID NO: 1896939 - RNA, 19 nt, Artificial Sequence
  Description of Artificial Sequence: Synthetic oligonucleotide
  Antisense strand to SEQ ID NO: 1896938
ucuagggauauacacuugg

SEQ ID NO: 1896940 - RNA, 19 nt, Artificial Sequence
  Description of Artificial Sequence: Synthetic oligonucleotide
  Sense strand starting at position 3089 of SEQ ID NO: 1879298
aguguauaucccuagacac

SEQ ID NO: 1896941 - RNA, 19 nt, Artificial Sequence
  Description of Artificial Sequence: Synthetic oligonucleotide
  Antisense strand to SEQ ID NO: 1896940
gugucuagggauauacacu

SEQ ID NO: 1896942 - RNA, 19 nt, Artificial Sequence
  Description of Artificial Sequence: Synthetic oligonucleotide
  Sense strand starting at position 3106 of SEQ ID NO: 1879298
acuauaguuuaguguuguu

SEQ ID NO: 1896943 - RNA, 19 nt, Artificial Sequence
  Description of Artificial Sequence: Synthetic oligonucleotide
  Antisense strand to SEQ ID NO: 1896942
aacaacacuaaacuauagu

SEQ ID NO: 1896944 - RNA, 19 nt, Artificial Sequence
  Description of Artificial Sequence: Synthetic oligonucleotide
  Sense strand starting at position 3582 of SEQ ID NO: 1879298
gcaguaugguguuugauuu

SEQ ID NO: 1896945 - RNA, 19 nt, Artificial Sequence
  Description of Artificial Sequence: Synthetic oligonucleotide
  Antisense strand to SEQ ID NO: 1896944
aaaucaaacaccauacugc

SEQ ID NO: 1896946 - RNA, 19 nt, Artificial Sequence
  Description of Artificial Sequence: Synthetic oligonucleotide
  Sense strand starting at position 326 of SEQ ID NO: 1879299
uguauauguacagcgcgaa

SEQ ID NO: 1896947 - RNA, 19 nt, Artificial Sequence
  Description of Artificial Sequence: Synthetic oligonucleotide
  Antisense strand to SEQ ID NO: 1896946
uucgcgcuguacauauaca

SEQ ID NO: 1896948 - RNA, 19 nt, Artificial Sequence
  Description of Artificial Sequence: Synthetic oligonucleotide
  Sense strand starting at position 329 of SEQ ID NO: 1879299
auauguacagcgcgaauuu

SEQ ID NO: 1896949 - RNA, 19 nt, Artificial Sequence
  Description of Artificial Sequence: Synthetic oligonucleotide
  Antisense strand to SEQ ID NO: 1896948
aaauucgcgcuguacauau

SEQ ID NO: 1896950 - RNA, 19 nt, Artificial Sequence
  Description of Artificial Sequence: Synthetic oligonucleotide
  Sense strand starting at position 610 of SEQ ID NO: 1879299
cuugaaaguggagguguau

SEQ ID NO: 1896951 - RNA, 19 nt, Artificial Sequence
  Description of Artificial Sequence: Synthetic oligonucleotide
  Antisense strand to SEQ ID NO: 1896950
auacaccuccacuuucaag

SEQ ID NO: 1896952 - RNA, 19 nt, Artificial Sequence
  Description of Artificial Sequence: Synthetic oligonucleotide
  Sense strand starting at position 622 of SEQ ID NO: 1879299
gguguaugccuacaauaua

SEQ ID NO: 1896953 - RNA, 19 nt, Artificial Sequence
  Description of Artificial Sequence: Synthetic oligonucleotide
  Antisense strand to SEQ ID NO: 1896952
uauauuguaggcauacacc

SEQ ID NO: 1896954 - RNA, 19 nt, Artificial Sequence
  Description of Artificial Sequence: Synthetic oligonucleotide
  Sense strand starting at position 723 of SEQ ID NO: 1879299
uuagcuucuccauggaauc

SEQ ID NO: 1896955 - RNA, 19 nt, Artificial Sequence
  Description of Artificial Sequence: Synthetic oligonucleotide
  Antisense strand to SEQ ID NO: 1896954
gauuccauggagaagcuaa

SEQ ID NO: 1896956 - RNA, 19 nt, Artificial Sequence
  Description of Artificial Sequence: Synthetic oligonucleotide
  Sense strand starting at position 853 of SEQ ID NO: 1879299
aaaccucuggagugaagua

SEQ ID NO: 1896957 - RNA, 19 nt, Artificial Sequence
  Description of Artificial Sequence: Synthetic oligonucleotide
  Antisense strand to SEQ ID NO: 1896956
uacuucacuccagagguuu

SEQ ID NO: 1896958 - RNA, 19 nt, Artificial Sequence
  Description of Artificial Sequence: Synthetic oligonucleotide
  Sense strand starting at position 966 of SEQ ID NO: 1879299
ggcguaaaucacuaguuaa

SEQ ID NO: 1896959 - RNA, 19 nt, Artificial Sequence
  Description of Artificial Sequence: Synthetic oligonucleotide
  Antisense strand to SEQ ID NO: 1896958
uuaacuagugauuuacgcc

SEQ ID NO: 1896960 - RNA, 19 nt, Artificial Sequence
  Description of Artificial Sequence: Synthetic oligonucleotide
  Sense strand starting at position 1072 of SEQ ID NO: 1879299
gucauuucccaaggcucua

SEQ ID NO: 1896961 - RNA, 19 nt, Artificial Sequence
  Description of Artificial Sequence: Synthetic oligonucleotide
  Antisense strand to SEQ ID NO: 1896960
uagagccuugggaaaugac

SEQ ID NO: 1896962 - RNA, 19 nt, Artificial Sequence
  Description of Artificial Sequence: Synthetic oligonucleotide
  Sense strand starting at position 1088 of SEQ ID NO: 1879299
cuacuuuaguggucaauua

SEQ ID NO: 1896963 - RNA, 19 nt, Artificial Sequence
  Description of Artificial Sequence: Synthetic oligonucleotide
  Antisense strand to SEQ ID NO: 1896962
uaauugaccacuaaaguag

SEQ ID NO: 1896964 - RNA, 19 nt, Artificial Sequence
  Description of Artificial Sequence: Synthetic oligonucleotide
  Sense strand starting at position 1089 of SEQ ID NO: 1879299
uacuuuaguggucaauuag

SEQ ID NO: 1896965 - RNA, 19 nt, Artificial Sequence
  Description of Artificial Sequence: Synthetic oligonucleotide
  Antisense strand to SEQ ID NO: 1896964
cuaauugaccacuaaagua

SEQ ID NO: 1896966 - RNA, 19 nt, Artificial Sequence
  Description of Artificial Sequence: Synthetic oligonucleotide
  Sense strand starting at position 1233 of SEQ ID NO: 1879299
gggaacaauucguuauucu

SEQ ID NO: 1896967 - RNA, 19 nt, Artificial Sequence
  Description of Artificial Sequence: Synthetic oligonucleotide
  Antisense strand to SEQ ID NO: 1896966
agaauaacgaauuguuccc

SEQ ID NO: 1896968 - RNA, 19 nt, Artificial Sequence
  Description of Artificial Sequence: Synthetic oligonucleotide
  Sense strand starting at position 1234 of SEQ ID NO: 1879299
ggaacaauucguuauucuu

SEQ ID NO: 1896969 - RNA, 19 nt, Artificial Sequence
  Description of Artificial Sequence: Synthetic oligonucleotide
  Antisense strand to SEQ ID NO: 1896968
aagaauaacgaauuguucc

SEQ ID NO: 1896970 - RNA, 19 nt, Artificial Sequence
  Description of Artificial Sequence: Synthetic oligonucleotide
  Sense strand starting at position 1273 of SEQ ID NO: 1879299
cugggaucaucugccuacu

SEQ ID NO: 1896971 - RNA, 19 nt, Artificial Sequence
  Description of Artificial Sequence: Synthetic oligonucleotide
  Antisense strand to SEQ ID NO: 1896970
aguaggcagaugaucccag

SEQ ID NO: 1896972 - RNA, 19 nt, Artificial Sequence
  Description of Artificial Sequence: Synthetic oligonucleotide
  Sense strand starting at position 1276 of SEQ ID NO: 1879299
ggaucaucugccuacuucu

SEQ ID NO: 1896973 - RNA, 19 nt, Artificial Sequence
  Description of Artificial Sequence: Synthetic oligonucleotide
  Antisense strand to SEQ ID NO: 1896972
agaaguaggcagaugaucc

SEQ ID NO: 1896974 - RNA, 19 nt, Artificial Sequence
  Description of Artificial Sequence: Synthetic oligonucleotide
  Sense strand starting at position 2064 of SEQ ID NO: 1879299
gggaggagccugugggaua

SEQ ID NO: 1896975 - RNA, 19 nt, Artificial Sequence
  Description of Artificial Sequence: Synthetic oligonucleotide
  Antisense strand to SEQ ID NO: 1896974
uaucccacaggcuccuccc

SEQ ID NO: 1896976 - RNA, 19 nt, Artificial Sequence
  Description of Artificial Sequence: Synthetic oligonucleotide
  Sense strand starting at position 2143 of SEQ ID NO: 1879299
ccucaagaaagguggucau

SEQ ID NO: 1896977 - RNA, 19 nt, Artificial Sequence
  Description of Artificial Sequence: Synthetic oligonucleotide
  Antisense strand to SEQ ID NO: 1896976
augaccaccuuucuugagg

SEQ ID NO: 1896978 - RNA, 19 nt, Artificial Sequence
  Description of Artificial Sequence: Synthetic oligonucleotide
  Sense strand starting at position 2146 of SEQ ID NO: 1879299
caagaaagguggucauccu

SEQ ID NO: 1896979 - RNA, 19 nt, Artificial Sequence
  Description of Artificial Sequence: Synthetic oligonucleotide
  Antisense strand to SEQ ID NO: 1896978
aggaugaccaccuuucuug

SEQ ID NO: 1896980 - RNA, 19 nt, Artificial Sequence
  Description of Artificial Sequence: Synthetic oligonucleotide
  Sense strand starting at position 2174 of SEQ ID NO: 1879299
ugucuaagauuaguaacua

SEQ ID NO: 1896981 - RNA, 19 nt, Artificial Sequence
  Description of Artificial Sequence: Synthetic oligonucleotide
  Antisense strand to SEQ ID NO: 1896980
uaguuacuaaucuuagaca

SEQ ID NO: 1896982 - RNA, 19 nt, Artificial Sequence
  Description of Artificial Sequence: Synthetic oligonucleotide
  Sense strand starting at position 2253 of SEQ ID NO: 1879299
gcuuccugacaauggauga

SEQ ID NO: 1896983 - RNA, 19 nt, Artificial Sequence
  Description of Artificial Sequence: Synthetic oligonucleotide
  Antisense strand to SEQ ID NO: 1896982
ucauccauugucaggaagc

SEQ ID NO: 1896984 - RNA, 19 nt, Artificial Sequence
  Description of Artificial Sequence: Synthetic oligonucleotide
  Sense strand starting at position 2260 of SEQ ID NO: 1879299
gacaauggaugauaaagau

SEQ ID NO: 1896985 - RNA, 19 nt, Artificial Sequence
  Description of Artificial Sequence: Synthetic oligonucleotide
  Antisense strand to SEQ ID NO: 1896984
aucuuuaucauccauuguc

SEQ ID NO: 1896986 - RNA, 19 nt, Artificial Sequence
  Description of Artificial Sequence: Synthetic oligonucleotide
  Sense strand starting at position 2272 of SEQ ID NO: 1879299
uaaagauguugccuaguaa

SEQ ID NO: 1896987 - RNA, 19 nt, Artificial Sequence
  Description of Artificial Sequence: Synthetic oligonucleotide
  Antisense strand to SEQ ID NO: 1896986
uuacuaggcaacaucuuua

SEQ ID NO: 1896988 - RNA, 19 nt, Artificial Sequence
  Description of Artificial Sequence: Synthetic oligonucleotide
  Sense strand starting at position 2273 of SEQ ID NO: 1879299
aaagauguugccuaguaag

SEQ ID NO: 1896989 - RNA, 19 nt, Artificial Sequence
  Description of Artificial Sequence: Synthetic oligonucleotide
  Antisense strand to SEQ ID NO: 1896988
cuuacuaggcaacaucuuu

SEQ ID NO: 1896990 - RNA, 19 nt, Artificial Sequence
  Description of Artificial Sequence: Synthetic oligonucleotide
  Sense strand starting at position 2284 of SEQ ID NO: 1879299
cuaguaaguguagauggaa

SEQ ID NO: 1896991 - RNA, 19 nt, Artificial Sequence
  Description of Artificial Sequence: Synthetic oligonucleotide
  Antisense strand to SEQ ID NO: 1896990
uuccaucuacacuuacuag

SEQ ID NO: 1896992 - RNA, 19 nt, Artificial Sequence
  Description of Artificial Sequence: Synthetic oligonucleotide
  Sense strand starting at position 2287 of SEQ ID NO: 1879299
guaaguguagauggaaaua

SEQ ID NO: 1896993 - RNA, 19 nt, Artificial Sequence
  Description of Artificial Sequence: Synthetic oligonucleotide
  Antisense strand to SEQ ID NO: 1896992
uauuuccaucuacacuuac

SEQ ID NO: 1896994 - RNA, 19 nt, Artificial Sequence
  Description of Artificial Sequence: Synthetic oligonucleotide
  Sense strand starting at position 2300 of SEQ ID NO: 1879299
gaaauaauguaguuagacu

SEQ ID NO: 1896995 - RNA, 19 nt, Artificial Sequence
  Description of Artificial Sequence: Synthetic oligonucleotide
  Antisense strand to SEQ ID NO: 1896994
agucuaacuacauuauuuc

SEQ ID NO: 1896996 - RNA, 19 nt, Artificial Sequence
  Description of Artificial Sequence: Synthetic oligonucleotide
  Sense strand starting at position 2395 of SEQ ID NO: 1879299
acaugaaugaaccgugaga

SEQ ID NO: 1896997 - RNA, 19 nt, Artificial Sequence
  Description of Artificial Sequence: Synthetic oligonucleotide
  Antisense strand to SEQ ID NO: 1896996
ucucacgguucauucaugu

SEQ ID NO: 1896998 - RNA, 19 nt, Artificial Sequence
  Description of Artificial Sequence: Synthetic oligonucleotide
  Sense strand starting at position 2397 of SEQ ID NO: 1879299
augaaugaaccgugagaac

SEQ ID NO: 1896999 - RNA, 19 nt, Artificial Sequence
  Description of Artificial Sequence: Synthetic oligonucleotide
  Antisense strand to SEQ ID NO: 1896998
guucucacgguucauucau

SEQ ID NO: 1897000 - RNA, 19 nt, Artificial Sequence
  Description of Artificial Sequence: Synthetic oligonucleotide
  Sense strand starting at position 2601 of SEQ ID NO: 1879299
ggaauuagcggugaugguu

SEQ ID NO: 1897001 - RNA, 19 nt, Artificial Sequence
  Description of Artificial Sequence: Synthetic oligonucleotide
  Antisense strand to SEQ ID NO: 1897000
aaccaucaccgcuaauucc

SEQ ID NO: 1897002 - RNA, 19 nt, Artificial Sequence
  Description of Artificial Sequence: Synthetic oligonucleotide
  Sense strand starting at position 2617 of SEQ ID NO: 1879299
guuacacaaccguaugaau

SEQ ID NO: 1897003 - RNA, 19 nt, Artificial Sequence
  Description of Artificial Sequence: Synthetic oligonucleotide
  Antisense strand to SEQ ID NO: 1897002
auucauacgguuguguaac

SEQ ID NO: 1897004 - RNA, 19 nt, Artificial Sequence
  Description of Artificial Sequence: Synthetic oligonucleotide
  Sense strand starting at position 2761 of SEQ ID NO: 1879299
acaugauauuuccauaguc

SEQ ID NO: 1897005 - RNA, 19 nt, Artificial Sequence
  Description of Artificial Sequence: Synthetic oligonucleotide
  Antisense strand to SEQ ID NO: 1897004
gacuauggaaauaucaugu

SEQ ID NO: 1897006 - RNA, 19 nt, Artificial Sequence
  Description of Artificial Sequence: Synthetic oligonucleotide
  Sense strand starting at position 3135 of SEQ ID NO: 1879299
agagaaauuugguggacac

SEQ ID NO: 1897007 - RNA, 19 nt, Artificial Sequence
  Description of Artificial Sequence: Synthetic oligonucleotide
  Antisense strand to SEQ ID NO: 1897006
guguccaccaaauuucucu

SEQ ID NO: 1897008 - RNA, 19 nt, Artificial Sequence
  Description of Artificial Sequence: Synthetic oligonucleotide
  Sense strand starting at position 3173 of SEQ ID NO: 1879299
agacuaacgccacaguuau

SEQ ID NO: 1897009 - RNA, 19 nt, Artificial Sequence
  Description of Artificial Sequence: Synthetic oligonucleotide
  Antisense strand to SEQ ID NO: 1897008
auaacuguggcguuagucu

SEQ ID NO: 1897010 - RNA, 19 nt, Artificial Sequence
  Description of Artificial Sequence: Synthetic oligonucleotide
  Sense strand starting at position 3285 of SEQ ID NO: 1879299
ugagguagacaucgcuaga

SEQ ID NO: 1897011 - RNA, 19 nt, Artificial Sequence
  Description of Artificial Sequence: Synthetic oligonucleotide
  Antisense strand to SEQ ID NO: 1897010
ucuagcgaugucuaccuca

SEQ ID NO: 1897012 - RNA, 19 nt, Artificial Sequence
  Description of Artificial Sequence: Synthetic oligonucleotide
  Sense strand starting at position 3288 of SEQ ID NO: 1879299
gguagacaucgcuagauga

SEQ ID NO: 1897013 - RNA, 19 nt, Artificial Sequence
  Description of Artificial Sequence: Synthetic oligonucleotide
  Antisense strand to SEQ ID NO: 1897012
ucaucuagcgaugucuacc

SEQ ID NO: 1897014 - RNA, 19 nt, Artificial Sequence
  Description of Artificial Sequence: Synthetic oligonucleotide
  Sense strand starting at position 3358 of SEQ ID NO: 1879299
ggguuuguggcagauuaaa

SEQ ID NO: 1897015 - RNA, 19 nt, Artificial Sequence
  Description of Artificial Sequence: Synthetic oligonucleotide
  Antisense strand to SEQ ID NO: 1897014
uuuaaucugccacaaaccc

SEQ ID NO: 1897016 - RNA, 19 nt, Artificial Sequence
  Description of Artificial Sequence: Synthetic oligonucleotide
  Sense strand starting at position 3396 of SEQ ID NO: 1879299
caacuaaaucuauggguga

SEQ ID NO: 1897017 - RNA, 19 nt, Artificial Sequence
  Description of Artificial Sequence: Synthetic oligonucleotide
  Antisense strand to SEQ ID NO: 1897016
ucacccauagauuuaguug

SEQ ID NO: 1897018 - RNA, 19 nt, Artificial Sequence
  Description of Artificial Sequence: Synthetic oligonucleotide
  Sense strand starting at position 3441 of SEQ ID NO: 1879299
agaaauaacuaugaagaac

SEQ ID NO: 1897019 - RNA, 19 nt, Artificial Sequence
  Description of Artificial Sequence: Synthetic oligonucleotide
  Antisense strand to SEQ ID NO: 1897018
guucuucauaguuauuucu

SEQ ID NO: 1897020 - RNA, 19 nt, Artificial Sequence
  Description of Artificial Sequence: Synthetic oligonucleotide
  Sense strand starting at position 3568 of SEQ ID NO: 1879299
ugucuuugucuuuaggaaa

SEQ ID NO: 1897021 - RNA, 19 nt, Artificial Sequence
  Description of Artificial Sequence: Synthetic oligonucleotide
  Antisense strand to SEQ ID NO: 1897020
uuuccuaaagacaaagaca

SEQ ID NO: 1897022 - RNA, 19 nt, Artificial Sequence
  Description of Artificial Sequence: Synthetic oligonucleotide
  Sense strand starting at position 3595 of SEQ ID NO: 1879299
gaaggauaagcaugcuucu

SEQ ID NO: 1897023 - RNA, 19 nt, Artificial Sequence
  Description of Artificial Sequence: Synthetic oligonucleotide
  Antisense strand to SEQ ID NO: 1897022
agaagcaugcuuauccuuc

SEQ ID NO: 1897024 - RNA, 19 nt, Artificial Sequence
  Description of Artificial Sequence: Synthetic oligonucleotide
  Sense strand starting at position 3936 of SEQ ID NO: 1879299
gcuucucagauauugcguu

SEQ ID NO: 1897025 - RNA, 19 nt, Artificial Sequence
  Description of Artificial Sequence: Synthetic oligonucleotide
  Antisense strand to SEQ ID NO: 1897024
aacgcaauaucugagaagc

SEQ ID NO: 1897026 - RNA, 19 nt, Artificial Sequence
  Description of Artificial Sequence: Synthetic oligonucleotide
  Sense strand starting at position 197 of SEQ ID NO: 1879300
gccgaagucuuacucuaga

SEQ ID NO: 1897027 - RNA, 19 nt, Artificial Sequence
  Description of Artificial Sequence: Synthetic oligonucleotide
  Antisense strand to SEQ ID NO: 1897026
ucuagaguaagacuucggc

SEQ ID NO: 1897028 - RNA, 19 nt, Artificial Sequence
  Description of Artificial Sequence: Synthetic oligonucleotide
  Sense strand starting at position 1716 of SEQ ID NO: 1879300
ugcgguguguccaggcuua

SEQ ID NO: 1897029 - RNA, 19 nt, Artificial Sequence
  Description of Artificial Sequence: Synthetic oligonucleotide
  Antisense strand to SEQ ID NO: 1897028
uaagccuggacacaccgca

SEQ ID NO: 1897030 - RNA, 19 nt, Artificial Sequence
  Description of Artificial Sequence: Synthetic oligonucleotide
  Sense strand starting at position 2251 of SEQ ID NO: 1879300
guuucuguuucuuaggguu

SEQ ID NO: 1897031 - RNA, 19 nt, Artificial Sequence
  Description of Artificial Sequence: Synthetic oligonucleotide
  Antisense strand to SEQ ID NO: 1897030
aacccuaagaaacagaaac

SEQ ID NO: 1897032 - RNA, 19 nt, Artificial Sequence
  Description of Artificial Sequence: Synthetic oligonucleotide
  Sense strand starting at position 2254 of SEQ ID NO: 1879300
ucuguuucuuaggguuaga

SEQ ID NO: 1897033 - RNA, 19 nt, Artificial Sequence
  Description of Artificial Sequence: Synthetic oligonucleotide
  Antisense strand to SEQ ID NO: 1897032
ucuaacccuaagaaacaga

SEQ ID NO: 1897034 - RNA, 19 nt, Artificial Sequence
  Description of Artificial Sequence: Synthetic oligonucleotide
  Sense strand starting at position 2257 of SEQ ID NO: 1879300
guuucuuaggguuagaaua

SEQ ID NO: 1897035 - RNA, 19 nt, Artificial Sequence
  Description of Artificial Sequence: Synthetic oligonucleotide
  Antisense strand to SEQ ID NO: 1897034
uauucuaacccuaagaaac

SEQ ID NO: 1897036 - RNA, 19 nt, Artificial Sequence
  Description of Artificial Sequence: Synthetic oligonucleotide
  Sense strand starting at position 2259 of SEQ ID NO: 1879300
uucuuaggguuagaauaug

SEQ ID NO: 1897037 - RNA, 19 nt, Artificial Sequence
  Description of Artificial Sequence: Synthetic oligonucleotide
  Antisense strand to SEQ ID NO: 1897036
cauauucuaacccuaagaa

SEQ ID NO: 1897038 - RNA, 19 nt, Artificial Sequence
  Description of Artificial Sequence: Synthetic oligonucleotide
  Sense strand starting at position 2264 of SEQ ID NO: 1879300
aggguuagaauauggcaaa

SEQ ID NO: 1897039 - RNA, 19 nt, Artificial Sequence
  Description of Artificial Sequence: Synthetic oligonucleotide
  Antisense strand to SEQ ID NO: 1897038
uuugccauauucuaacccu

SEQ ID NO: 1897040 - RNA, 19 nt, Artificial Sequence
  Description of Artificial Sequence: Synthetic oligonucleotide
  Sense strand starting at position 2886 of SEQ ID NO: 1879300
ggguacaucucugacucuu

SEQ ID NO: 1897041 - RNA, 19 nt, Artificial Sequence
  Description of Artificial Sequence: Synthetic oligonucleotide
  Antisense strand to SEQ ID NO: 1897040
aagagucagagauguaccc

SEQ ID NO: 1897042 - RNA, 19 nt, Artificial Sequence
  Description of Artificial Sequence: Synthetic oligonucleotide
  Sense strand starting at position 2888 of SEQ ID NO: 1879300
guacaucucugacucuuga

SEQ ID NO: 1897043 - RNA, 19 nt, Artificial Sequence
  Description of Artificial Sequence: Synthetic oligonucleotide
  Antisense strand to SEQ ID NO: 1897042
ucaagagucagagauguac

SEQ ID NO: 1897044 - RNA, 19 nt, Artificial Sequence
  Description of Artificial Sequence: Synthetic oligonucleotide
  Sense strand starting at position 3177 of SEQ ID NO: 1879300
uuugaagauugcuauacaa

SEQ ID NO: 1897045 - RNA, 19 nt, Artificial Sequence
  Description of Artificial Sequence: Synthetic oligonucleotide
  Antisense strand to SEQ ID NO: 1897044
uuguauagcaaucuucaaa

SEQ ID NO: 1897046 - RNA, 19 nt, Artificial Sequence
  Description of Artificial Sequence: Synthetic oligonucleotide
  Sense strand starting at position 3179 of SEQ ID NO: 1879300
ugaagauugcuauacaagc

SEQ ID NO: 1897047 - RNA, 19 nt, Artificial Sequence
  Description of Artificial Sequence: Synthetic oligonucleotide
  Antisense strand to SEQ ID NO: 1897046
gcuuguauagcaaucuuca

SEQ ID NO: 1897048 - RNA, 19 nt, Artificial Sequence
  Description of Artificial Sequence: Synthetic oligonucleotide
  Sense strand starting at position 3616 of SEQ ID NO: 1879300
gagugcuuauuacaagcca

SEQ ID NO: 1897049 - RNA, 19 nt, Artificial Sequence
  Description of Artificial Sequence: Synthetic oligonucleotide
  Antisense strand to SEQ ID NO: 1897048
uggcuuguaauaagcacuc

SEQ ID NO: 1897050 - RNA, 19 nt, Artificial Sequence
  Description of Artificial Sequence: Synthetic oligonucleotide
  Sense strand starting at position 3747 of SEQ ID NO: 1879300
uuuguccaagguugugaaa

SEQ ID NO: 1897051 - RNA, 19 nt, Artificial Sequence
  Description of Artificial Sequence: Synthetic oligonucleotide
  Antisense strand to SEQ ID NO: 1897050
uuucacaaccuuggacaaa

SEQ ID NO: 1897052 - RNA, 19 nt, Artificial Sequence
  Description of Artificial Sequence: Synthetic oligonucleotide
  Sense strand starting at position 3849 of SEQ ID NO: 1879300
ugugauuccugcuuuguag

SEQ ID NO: 1897053 - RNA, 19 nt, Artificial Sequence
  Description of Artificial Sequence: Synthetic oligonucleotide
  Antisense strand to SEQ ID NO: 1897052
cuacaaagcaggaaucaca

SEQ ID NO: 1897054 - RNA, 19 nt, Artificial Sequence
  Description of Artificial Sequence: Synthetic oligonucleotide
  Sense strand starting at position 3851 of SEQ ID NO: 1879300
ugauuccugcuuuguagua

SEQ ID NO: 1897055 - RNA, 19 nt, Artificial Sequence
  Description of Artificial Sequence: Synthetic oligonucleotide
  Antisense strand to SEQ ID NO: 1897054
uacuacaaagcaggaauca

SEQ ID NO: 1897056 - RNA, 19 nt, Artificial Sequence
  Description of Artificial Sequence: Synthetic oligonucleotide
  Sense strand starting at position 1778 of SEQ ID NO: 1879301
gcucuaauaaaccguggaa

SEQ ID NO: 1897057 - RNA, 19 nt, Artificial Sequence
  Description of Artificial Sequence: Synthetic oligonucleotide
  Antisense strand to SEQ ID NO: 1897056
uuccacgguuuauuagagc

SEQ ID NO: 1897058 - RNA, 19 nt, Artificial Sequence
  Description of Artificial Sequence: Synthetic oligonucleotide
  Sense strand starting at position 2206 of SEQ ID NO: 1879301
aggcuaaaguuguguugac

SEQ ID NO: 1897059 - RNA, 19 nt, Artificial Sequence
  Description of Artificial Sequence: Synthetic oligonucleotide
  Antisense strand to SEQ ID NO: 1897058
gucaacacaacuuuagccu

SEQ ID NO: 1897060 - RNA, 19 nt, Artificial Sequence
  Description of Artificial Sequence: Synthetic oligonucleotide
  Sense strand starting at position 2207 of SEQ ID NO: 1879301
ggcuaaaguuguguugaca

SEQ ID NO: 1897061 - RNA, 19 nt, Artificial Sequence
  Description of Artificial Sequence: Synthetic oligonucleotide
  Antisense strand to SEQ ID NO: 1897060
ugucaacacaacuuuagcc

SEQ ID NO: 1897062 - RNA, 19 nt, Artificial Sequence
  Description of Artificial Sequence: Synthetic oligonucleotide
  Sense strand starting at position 2210 of SEQ ID NO: 1879301
uaaaguuguguugacauuc

SEQ ID NO: 1897063 - RNA, 19 nt, Artificial Sequence
  Description of Artificial Sequence: Synthetic oligonucleotide
  Antisense strand to SEQ ID NO: 1897062
gaaugucaacacaacuuua

SEQ ID NO: 1897064 - RNA, 19 nt, Artificial Sequence
  Description of Artificial Sequence: Synthetic oligonucleotide
  Sense strand starting at position 2348 of SEQ ID NO: 1879301
guaucuauaucagccucua

SEQ ID NO: 1897065 - RNA, 19 nt, Artificial Sequence
  Description of Artificial Sequence: Synthetic oligonucleotide
  Antisense strand to SEQ ID NO: 1897064
uagaggcugauauagauac

SEQ ID NO: 1897066 - RNA, 19 nt, Artificial Sequence
  Description of Artificial Sequence: Synthetic oligonucleotide
  Sense strand starting at position 2888 of SEQ ID NO: 1879301
guacgucucugacucuuga

SEQ ID NO: 1897067 - RNA, 19 nt, Artificial Sequence
  Description of Artificial Sequence: Synthetic oligonucleotide
  Antisense strand to SEQ ID NO: 1897066
ucaagagucagagacguac

SEQ ID NO: 1897068 - RNA, 19 nt, Artificial Sequence
  Description of Artificial Sequence: Synthetic oligonucleotide
  Sense strand starting at position 3177 of SEQ ID NO: 1879301
uuugaagauugcuguacaa

SEQ ID NO: 1897069 - RNA, 19 nt, Artificial Sequence
  Description of Artificial Sequence: Synthetic oligonucleotide
  Antisense strand to SEQ ID NO: 1897068
uuguacagcaaucuucaaa

SEQ ID NO: 1897070 - RNA, 19 nt, Artificial Sequence
  Description of Artificial Sequence: Synthetic oligonucleotide
  Sense strand starting at position 3179 of SEQ ID NO: 1879301
ugaagauugcuguacaagc

SEQ ID NO: 1897071 - RNA, 19 nt, Artificial Sequence
  Description of Artificial Sequence: Synthetic oligonucleotide
  Antisense strand to SEQ ID NO: 1897070
gcuuguacagcaaucuuca

SEQ ID NO: 1897072 - RNA, 19 nt, Artificial Sequence
  Description of Artificial Sequence: Synthetic oligonucleotide
  Sense strand starting at position 3566 of SEQ ID NO: 1879301
augcuaucagauugucuag

SEQ ID NO: 1897073 - RNA, 19 nt, Artificial Sequence
  Description of Artificial Sequence: Synthetic oligonucleotide
  Antisense strand to SEQ ID NO: 1897072
cuagacaaucugauagcau

SEQ ID NO: 1897074 - RNA, 19 nt, Artificial Sequence
  Description of Artificial Sequence: Synthetic oligonucleotide
  Sense strand starting at position 3568 of SEQ ID NO: 1879301
gcuaucagauugucuagga

SEQ ID NO: 1897075 - RNA, 19 nt, Artificial Sequence
  Description of Artificial Sequence: Synthetic oligonucleotide
  Antisense strand to SEQ ID NO: 1897074
uccuagacaaucugauagc

SEQ ID NO: 1897076 - RNA, 19 nt, Artificial Sequence
  Description of Artificial Sequence: Synthetic oligonucleotide
  Sense strand starting at position 3569 of SEQ ID NO: 1879301
cuaucagauugucuaggau

SEQ ID NO: 1897077 - RNA, 19 nt, Artificial Sequence
  Description of Artificial Sequence: Synthetic oligonucleotide
  Antisense strand to SEQ ID NO: 1897076
auccuagacaaucugauag

SEQ ID NO: 1897078 - RNA, 19 nt, Artificial Sequence
  Description of Artificial Sequence: Synthetic oligonucleotide
  Sense strand starting at position 3572 of SEQ ID NO: 1879301
ucagauugucuaggaucau

SEQ ID NO: 1897079 - RNA, 19 nt, Artificial Sequence
  Description of Artificial Sequence: Synthetic oligonucleotide
  Antisense strand to SEQ ID NO: 1897078
augauccuagacaaucuga

SEQ ID NO: 1897080 - RNA, 19 nt, Artificial Sequence
  Description of Artificial Sequence: Synthetic oligonucleotide
  Sense strand starting at position 3573 of SEQ ID NO: 1879301
cagauugucuaggaucauu

SEQ ID NO: 1897081 - RNA, 19 nt, Artificial Sequence
  Description of Artificial Sequence: Synthetic oligonucleotide
  Antisense strand to SEQ ID NO: 1897080
aaugauccuagacaaucug

SEQ ID NO: 1897082 - RNA, 19 nt, Artificial Sequence
  Description of Artificial Sequence: Synthetic oligonucleotide
  Sense strand starting at position 3593 of SEQ ID NO: 1879301
uccucaucgcugcauaaau

SEQ ID NO: 1897083 - RNA, 19 nt, Artificial Sequence
  Description of Artificial Sequence: Synthetic oligonucleotide
  Antisense strand to SEQ ID NO: 1897082
auuuaugcagcgaugagga

SEQ ID NO: 1897084 - RNA, 19 nt, Artificial Sequence
  Description of Artificial Sequence: Synthetic oligonucleotide
  Sense strand starting at position 3595 of SEQ ID NO: 1879301
cucaucgcugcauaaauuu

SEQ ID NO: 1897085 - RNA, 19 nt, Artificial Sequence
  Description of Artificial Sequence: Synthetic oligonucleotide
  Antisense strand to SEQ ID NO: 1897084
aaauuuaugcagcgaugag

SEQ ID NO: 1897086 - RNA, 19 nt, Artificial Sequence
  Description of Artificial Sequence: Synthetic oligonucleotide
  Sense strand starting at position 3055 of SEQ ID NO: 1879302
agugaaugcuaguucucuu

SEQ ID NO: 1897087 - RNA, 19 nt, Artificial Sequence
  Description of Artificial Sequence: Synthetic oligonucleotide
  Antisense strand to SEQ ID NO: 1897086
aagagaacuagcauucacu

SEQ ID NO: 1897088 - RNA, 19 nt, Artificial Sequence
  Description of Artificial Sequence: Synthetic oligonucleotide
  Sense strand starting at position 3768 of SEQ ID NO: 1879302
uauugucuugcucucggua

SEQ ID NO: 1897089 - RNA, 19 nt, Artificial Sequence
  Description of Artificial Sequence: Synthetic oligonucleotide
  Antisense strand to SEQ ID NO: 1897088
uaccgagagcaagacaaua

SEQ ID NO: 1897090 - RNA, 19 nt, Artificial Sequence
  Description of Artificial Sequence: Synthetic oligonucleotide
  Sense strand starting at position 3770 of SEQ ID NO: 1879302
uugucuugcucucgguaaa

SEQ ID NO: 1897091 - RNA, 19 nt, Artificial Sequence
  Description of Artificial Sequence: Synthetic oligonucleotide
  Antisense strand to SEQ ID NO: 1897090
uuuaccgagagcaagacaa

SEQ ID NO: 1897092 - RNA, 19 nt, Artificial Sequence
  Description of Artificial Sequence: Synthetic oligonucleotide
  Sense strand starting at position 51 of SEQ ID NO: 1879303
uccucauucguuuacauau

SEQ ID NO: 1897093 - RNA, 19 nt, Artificial Sequence
  Description of Artificial Sequence: Synthetic oligonucleotide
  Antisense strand to SEQ ID NO: 1897092
auauguaaacgaaugagga

SEQ ID NO: 1897094 - RNA, 19 nt, Artificial Sequence
  Description of Artificial Sequence: Synthetic oligonucleotide
  Sense strand starting at position 176 of SEQ ID NO: 1879303
gcugauuccugagcuagag

SEQ ID NO: 1897095 - RNA, 19 nt, Artificial Sequence
  Description of Artificial Sequence: Synthetic oligonucleotide
  Antisense strand to SEQ ID NO: 1897094
cucuagcucaggaaucagc

SEQ ID NO: 1897096 - RNA, 19 nt, Artificial Sequence
  Description of Artificial Sequence: Synthetic oligonucleotide
  Sense strand starting at position 220 of SEQ ID NO: 1879303
uuauucugacccugcagaa

SEQ ID NO: 1897097 - RNA, 19 nt, Artificial Sequence
  Description of Artificial Sequence: Synthetic oligonucleotide
  Antisense strand to SEQ ID NO: 1897096
uucugcagggucagaauaa

SEQ ID NO: 1897098 - RNA, 19 nt, Artificial Sequence
  Description of Artificial Sequence: Synthetic oligonucleotide
  Sense strand starting at position 475 of SEQ ID NO: 1879303
gcaagugguguuggaaaca

SEQ ID NO: 1897099 - RNA, 19 nt, Artificial Sequence
  Description of Artificial Sequence: Synthetic oligonucleotide
  Antisense strand to SEQ ID NO: 1897098
uguuuccaacaccacuugc

SEQ ID NO: 1897100 - RNA, 19 nt, Artificial Sequence
  Description of Artificial Sequence: Synthetic oligonucleotide
  Sense strand starting at position 520 of SEQ ID NO: 1879303
ccuagagggcaguaauauu

SEQ ID NO: 1897101 - RNA, 19 nt, Artificial Sequence
  Description of Artificial Sequence: Synthetic oligonucleotide
  Antisense strand to SEQ ID NO: 1897100
aauauuacugcccucuagg

SEQ ID NO: 1897102 - RNA, 19 nt, Artificial Sequence
  Description of Artificial Sequence: Synthetic oligonucleotide
  Sense strand starting at position 592 of SEQ ID NO: 1879303
gggugacugauaugccaga

SEQ ID NO: 1897103 - RNA, 19 nt, Artificial Sequence
  Description of Artificial Sequence: Synthetic oligonucleotide
  Antisense strand to SEQ ID NO: 1897102
ucuggcauaucagucaccc

SEQ ID NO: 1897104 - RNA, 19 nt, Artificial Sequence
  Description of Artificial Sequence: Synthetic oligonucleotide
  Sense strand starting at position 654 of SEQ ID NO: 1879303
gugacugcaucugugagga

SEQ ID NO: 1897105 - RNA, 19 nt, Artificial Sequence
  Description of Artificial Sequence: Synthetic oligonucleotide
  Antisense strand to SEQ ID NO: 1897104
uccucacagaugcagucac

SEQ ID NO: 1897106 - RNA, 19 nt, Artificial Sequence
  Description of Artificial Sequence: Synthetic oligonucleotide
  Sense strand starting at position 894 of SEQ ID NO: 1879303
cgagaauacccauguugga

SEQ ID NO: 1897107 - RNA, 19 nt, Artificial Sequence
  Description of Artificial Sequence: Synthetic oligonucleotide
  Antisense strand to SEQ ID NO: 1897106
uccaacauggguauucucg

SEQ ID NO: 1897108 - RNA, 19 nt, Artificial Sequence
  Description of Artificial Sequence: Synthetic oligonucleotide
  Sense strand starting at position 915 of SEQ ID NO: 1879303
uuuagugacucuccuugau

SEQ ID NO: 1897109 - RNA, 19 nt, Artificial Sequence
  Description of Artificial Sequence: Synthetic oligonucleotide
  Antisense strand to SEQ ID NO: 1897108
aucaaggagagucacuaaa

SEQ ID NO: 1897110 - RNA, 19 nt, Artificial Sequence
  Description of Artificial Sequence: Synthetic oligonucleotide
  Sense strand starting at position 1427 of SEQ ID NO: 1879303
gcacucacccaggaaucuu

SEQ ID NO: 1897111 - RNA, 19 nt, Artificial Sequence
  Description of Artificial Sequence: Synthetic oligonucleotide
  Antisense strand to SEQ ID NO: 1897110
aagauuccugggugagugc

SEQ ID NO: 1897112 - RNA, 19 nt, Artificial Sequence
  Description of Artificial Sequence: Synthetic oligonucleotide
  Sense strand starting at position 1471 of SEQ ID NO: 1879303
ccucauuguccacgauuaa

SEQ ID NO: 1897113 - RNA, 19 nt, Artificial Sequence
  Description of Artificial Sequence: Synthetic oligonucleotide
  Antisense strand to SEQ ID NO: 1897112
uuaaucguggacaaugagg

SEQ ID NO: 1897114 - RNA, 19 nt, Artificial Sequence
  Description of Artificial Sequence: Synthetic oligonucleotide
  Sense strand starting at position 1472 of SEQ ID NO: 1879303
cucauuguccacgauuaaa

SEQ ID NO: 1897115 - RNA, 19 nt, Artificial Sequence
  Description of Artificial Sequence: Synthetic oligonucleotide
  Antisense strand to SEQ ID NO: 1897114
uuuaaucguggacaaugag

SEQ ID NO: 1897116 - RNA, 19 nt, Artificial Sequence
  Description of Artificial Sequence: Synthetic oligonucleotide
  Sense strand starting at position 1574 of SEQ ID NO: 1879303
ggagaagggcauugcuaaa

SEQ ID NO: 1897117 - RNA, 19 nt, Artificial Sequence
  Description of Artificial Sequence: Synthetic oligonucleotide
  Antisense strand to SEQ ID NO: 1897116
uuuagcaaugcccuucucc

SEQ ID NO: 1897118 - RNA, 19 nt, Artificial Sequence
  Description of Artificial Sequence: Synthetic oligonucleotide
  Sense strand starting at position 1686 of SEQ ID NO: 1879303
agugguccaccuugaacau

SEQ ID NO: 1897119 - RNA, 19 nt, Artificial Sequence
  Description of Artificial Sequence: Synthetic oligonucleotide
  Antisense strand to SEQ ID NO: 1897118
auguucaagguggaccacu

SEQ ID NO: 1897120 - RNA, 19 nt, Artificial Sequence
  Description of Artificial Sequence: Synthetic oligonucleotide
  Sense strand starting at position 1687 of SEQ ID NO: 1879303
gugguccaccuugaacauu

SEQ ID NO: 1897121 - RNA, 19 nt, Artificial Sequence
  Description of Artificial Sequence: Synthetic oligonucleotide
  Antisense strand to SEQ ID NO: 1897120
aauguucaagguggaccac

SEQ ID NO: 1897122 - RNA, 19 nt, Artificial Sequence
  Description of Artificial Sequence: Synthetic oligonucleotide
  Sense strand starting at position 1713 of SEQ ID NO: 1879303
gugcuuaaugcuuaaugga

SEQ ID NO: 1897123 - RNA, 19 nt, Artificial Sequence
  Description of Artificial Sequence: Synthetic oligonucleotide
  Antisense strand to SEQ ID NO: 1897122
uccauuaagcauuaagcac

SEQ ID NO: 1897124 - RNA, 19 nt, Artificial Sequence
  Description of Artificial Sequence: Synthetic oligonucleotide
  Sense strand starting at position 1819 of SEQ ID NO: 1879303
gucccugggcuccaauaaa

SEQ ID NO: 1897125 - RNA, 19 nt, Artificial Sequence
  Description of Artificial Sequence: Synthetic oligonucleotide
  Antisense strand to SEQ ID NO: 1897124
uuuauuggagcccagggac

SEQ ID NO: 1897126 - RNA, 19 nt, Artificial Sequence
  Description of Artificial Sequence: Synthetic oligonucleotide
  Sense strand starting at position 1971 of SEQ ID NO: 1879303
auguacucuuggucaccaa

SEQ ID NO: 1897127 - RNA, 19 nt, Artificial Sequence
  Description of Artificial Sequence: Synthetic oligonucleotide
  Antisense strand to SEQ ID NO: 1897126
uuggugaccaagaguacau

SEQ ID NO: 1897128 - RNA, 19 nt, Artificial Sequence
  Description of Artificial Sequence: Synthetic oligonucleotide
  Sense strand starting at position 2083 of SEQ ID NO: 1879303
ccauuaucuuuguccugga

SEQ ID NO: 1897129 - RNA, 19 nt, Artificial Sequence
  Description of Artificial Sequence: Synthetic oligonucleotide
  Antisense strand to SEQ ID NO: 1897128
uccaggacaaagauaaugg

SEQ ID NO: 1897130 - RNA, 19 nt, Artificial Sequence
  Description of Artificial Sequence: Synthetic oligonucleotide
  Sense strand starting at position 2453 of SEQ ID NO: 1879303
agggccuguuucucauaga

SEQ ID NO: 1897131 - RNA, 19 nt, Artificial Sequence
  Description of Artificial Sequence: Synthetic oligonucleotide
  Antisense strand to SEQ ID NO: 1897130
ucuaugagaaacaggcccu

SEQ ID NO: 1897132 - RNA, 19 nt, Artificial Sequence
  Description of Artificial Sequence: Synthetic oligonucleotide
  Sense strand starting at position 2466 of SEQ ID NO: 1879303
cauagaugguguccucuau

SEQ ID NO: 1897133 - RNA, 19 nt, Artificial Sequence
  Description of Artificial Sequence: Synthetic oligonucleotide
  Antisense strand to SEQ ID NO: 1897132
auagaggacaccaucuaug

SEQ ID NO: 1897134 - RNA, 19 nt, Artificial Sequence
  Description of Artificial Sequence: Synthetic oligonucleotide
  Sense strand starting at position 2615 of SEQ ID NO: 1879303
uuacuauugcauugaggau

SEQ ID NO: 1897135 - RNA, 19 nt, Artificial Sequence
  Description of Artificial Sequence: Synthetic oligonucleotide
  Antisense strand to SEQ ID NO: 1897134
auccucaaugcaauaguaa

SEQ ID NO: 1897136 - RNA, 19 nt, Artificial Sequence
  Description of Artificial Sequence: Synthetic oligonucleotide
  Sense strand starting at position 2622 of SEQ ID NO: 1879303
ugcauugaggauuaaguau

SEQ ID NO: 1897137 - RNA, 19 nt, Artificial Sequence
  Description of Artificial Sequence: Synthetic oligonucleotide
  Antisense strand to SEQ ID NO: 1897136
auacuuaauccucaaugca

SEQ ID NO: 1897138 - RNA, 19 nt, Artificial Sequence
  Description of Artificial Sequence: Synthetic oligonucleotide
  Sense strand starting at position 2695 of SEQ ID NO: 1879303
ugaccaagaucagcuuaau

SEQ ID NO: 1897139 - RNA, 19 nt, Artificial Sequence
  Description of Artificial Sequence: Synthetic oligonucleotide
  Antisense strand to SEQ ID NO: 1897138
auuaagcugaucuugguca

SEQ ID NO: 1897140 - RNA, 19 nt, Artificial Sequence
  Description of Artificial Sequence: Synthetic oligonucleotide
  Sense strand starting at position 2712 of SEQ ID NO: 1879303
aucaauuucuaguaguaac

SEQ ID NO: 1897141 - RNA, 19 nt, Artificial Sequence
  Description of Artificial Sequence: Synthetic oligonucleotide
  Antisense strand to SEQ ID NO: 1897140
guuacuacuagaaauugau

SEQ ID NO: 1897142 - RNA, 19 nt, Artificial Sequence
  Description of Artificial Sequence: Synthetic oligonucleotide
  Sense strand starting at position 2802 of SEQ ID NO: 1879303
auauauugcuucucaaggu

SEQ ID NO: 1897143 - RNA, 19 nt, Artificial Sequence
  Description of Artificial Sequence: Synthetic oligonucleotide
  Antisense strand to SEQ ID NO: 1897142
accuugagaagcaauauau

SEQ ID NO: 1897144 - RNA, 19 nt, Artificial Sequence
  Description of Artificial Sequence: Synthetic oligonucleotide
  Sense strand starting at position 2881 of SEQ ID NO: 1879303
gucauucgaugacuuucua

SEQ ID NO: 1897145 - RNA, 19 nt, Artificial Sequence
  Description of Artificial Sequence: Synthetic oligonucleotide
  Antisense strand to SEQ ID NO: 1897144
uagaaagucaucgaaugac

SEQ ID NO: 1897146 - RNA, 19 nt, Artificial Sequence
  Description of Artificial Sequence: Synthetic oligonucleotide
  Sense strand starting at position 3046 of SEQ ID NO: 1879303
aaagcaaagcgcguguuau

SEQ ID NO: 1897147 - RNA, 19 nt, Artificial Sequence
  Description of Artificial Sequence: Synthetic oligonucleotide
  Antisense strand to SEQ ID NO: 1897146
auaacacgcgcuuugcuuu

SEQ ID NO: 1897148 - RNA, 19 nt, Artificial Sequence
  Description of Artificial Sequence: Synthetic oligonucleotide
  Sense strand starting at position 3058 of SEQ ID NO: 1879303
guguuaugugaacaccuau

SEQ ID NO: 1897149 - RNA, 19 nt, Artificial Sequence
  Description of Artificial Sequence: Synthetic oligonucleotide
  Antisense strand to SEQ ID NO: 1897148
auagguguucacauaacac

SEQ ID NO: 1897150 - RNA, 19 nt, Artificial Sequence
  Description of Artificial Sequence: Synthetic oligonucleotide
  Sense strand starting at position 3082 of SEQ ID NO: 1879303
ugcucacuuugauuagaug

SEQ ID NO: 1897151 - RNA, 19 nt, Artificial Sequence
  Description of Artificial Sequence: Synthetic oligonucleotide
  Antisense strand to SEQ ID NO: 1897150
caucuaaucaaagugagca

SEQ ID NO: 1897152 - RNA, 19 nt, Artificial Sequence
  Description of Artificial Sequence: Synthetic oligonucleotide
  Sense strand starting at position 3083 of SEQ ID NO: 1879303
gcucacuuugauuagaugu

SEQ ID NO: 1897153 - RNA, 19 nt, Artificial Sequence
  Description of Artificial Sequence: Synthetic oligonucleotide
  Antisense strand to SEQ ID NO: 1897152
acaucuaaucaaagugagc

SEQ ID NO: 1897154 - RNA, 19 nt, Artificial Sequence
  Description of Artificial Sequence: Synthetic oligonucleotide
  Sense strand starting at position 3108 of SEQ ID NO: 1879303
aguagauguugucucauca

SEQ ID NO: 1897155 - RNA, 19 nt, Artificial Sequence
  Description of Artificial Sequence: Synthetic oligonucleotide
  Antisense strand to SEQ ID NO: 1897154
ugaugagacaacaucuacu

SEQ ID NO: 1897156 - RNA, 19 nt, Artificial Sequence
  Description of Artificial Sequence: Synthetic oligonucleotide
  Sense strand starting at position 3129 of SEQ ID NO: 1879303
gaaccuuaugcaggaugaa

SEQ ID NO: 1897157 - RNA, 19 nt, Artificial Sequence
  Description of Artificial Sequence: Synthetic oligonucleotide
  Antisense strand to SEQ ID NO: 1897156
uucauccugcauaagguuc

SEQ ID NO: 1897158 - RNA, 19 nt, Artificial Sequence
  Description of Artificial Sequence: Synthetic oligonucleotide
  Sense strand starting at position 3163 of SEQ ID NO: 1879303
aucacaggugcuuauaaau

SEQ ID NO: 1897159 - RNA, 19 nt, Artificial Sequence
  Description of Artificial Sequence: Synthetic oligonucleotide
  Antisense strand to SEQ ID NO: 1897158
auuuauaagcaccugugau

SEQ ID NO: 1897160 - RNA, 19 nt, Artificial Sequence
  Description of Artificial Sequence: Synthetic oligonucleotide
  Sense strand starting at position 3169 of SEQ ID NO: 1879303
ggugcuuauaaaugaggga

SEQ ID NO: 1897161 - RNA, 19 nt, Artificial Sequence
  Description of Artificial Sequence: Synthetic oligonucleotide
  Antisense strand to SEQ ID NO: 1897160
ucccucauuuauaagcacc

SEQ ID NO: 1897162 - RNA, 19 nt, Artificial Sequence
  Description of Artificial Sequence: Synthetic oligonucleotide
  Sense strand starting at position 3332 of SEQ ID NO: 1879303
uuuauaugugauggucauu

SEQ ID NO: 1897163 - RNA, 19 nt, Artificial Sequence
  Description of Artificial Sequence: Synthetic oligonucleotide
  Antisense strand to SEQ ID NO: 1897162
aaugaccaucacauauaaa

SEQ ID NO: 1897164 - RNA, 19 nt, Artificial Sequence
  Description of Artificial Sequence: Synthetic oligonucleotide
  Sense strand starting at position 3337 of SEQ ID NO: 1879303
augugauggucauuaaagc

SEQ ID NO: 1897165 - RNA, 19 nt, Artificial Sequence
  Description of Artificial Sequence: Synthetic oligonucleotide
  Antisense strand to SEQ ID NO: 1897164
gcuuuaaugaccaucacau

SEQ ID NO: 1897166 - RNA, 19 nt, Artificial Sequence
  Description of Artificial Sequence: Synthetic oligonucleotide
  Sense strand starting at position 3399 of SEQ ID NO: 1879303
caaggagagauguguguua

SEQ ID NO: 1897167 - RNA, 19 nt, Artificial Sequence
  Description of Artificial Sequence: Synthetic oligonucleotide
  Antisense strand to SEQ ID NO: 1897166
uaacacacaucucuccuug

SEQ ID NO: 1897168 - RNA, 19 nt, Artificial Sequence
  Description of Artificial Sequence: Synthetic oligonucleotide
  Sense strand starting at position 3401 of SEQ ID NO: 1879303
aggagagauguguguuaaa

SEQ ID NO: 1897169 - RNA, 19 nt, Artificial Sequence
  Description of Artificial Sequence: Synthetic oligonucleotide
  Antisense strand to SEQ ID NO: 1897168
uuuaacacacaucucuccu

SEQ ID NO: 1897170 - RNA, 19 nt, Artificial Sequence
  Description of Artificial Sequence: Synthetic oligonucleotide
  Sense strand starting at position 3922 of SEQ ID NO: 1879303
accacagaguuacuguaau

SEQ ID NO: 1897171 - RNA, 19 nt, Artificial Sequence
  Description of Artificial Sequence: Synthetic oligonucleotide
  Antisense strand to SEQ ID NO: 1897170
auuacaguaacucuguggu

SEQ ID NO: 1897172 - RNA, 19 nt, Artificial Sequence
  Description of Artificial Sequence: Synthetic oligonucleotide
  Sense strand starting at position 60 of SEQ ID NO: 1879304
ugcacuuucccagagacua

SEQ ID NO: 1897173 - RNA, 19 nt, Artificial Sequence
  Description of Artificial Sequence: Synthetic oligonucleotide
  Antisense strand to SEQ ID NO: 1897172
uagucucugggaaagugca

SEQ ID NO: 1897174 - RNA, 19 nt, Artificial Sequence
  Description of Artificial Sequence: Synthetic oligonucleotide
  Sense strand starting at position 82 of SEQ ID NO: 1879304
caguucugggcccaaagua

SEQ ID NO: 1897175 - RNA, 19 nt, Artificial Sequence
  Description of Artificial Sequence: Synthetic oligonucleotide
  Antisense strand to SEQ ID NO: 1897174
uacuuugggcccagaacug

SEQ ID NO: 1897176 - RNA, 19 nt, Artificial Sequence
  Description of Artificial Sequence: Synthetic oligonucleotide
  Sense strand starting at position 91 of SEQ ID NO: 1879304
gcccaaaguauguggacaa

SEQ ID NO: 1897177 - RNA, 19 nt, Artificial Sequence
  Description of Artificial Sequence: Synthetic oligonucleotide
  Antisense strand to SEQ ID NO: 1897176
uuguccacauacuuugggc

SEQ ID NO: 1897178 - RNA, 19 nt, Artificial Sequence
  Description of Artificial Sequence: Synthetic oligonucleotide
  Sense strand starting at position 98 of SEQ ID NO: 1879304
guauguggacaagaugagu

SEQ ID NO: 1897179 - RNA, 19 nt, Artificial Sequence
  Description of Artificial Sequence: Synthetic oligonucleotide
  Antisense strand to SEQ ID NO: 1897178
acucaucuuguccacauac

SEQ ID NO: 1897180 - RNA, 19 nt, Artificial Sequence
  Description of Artificial Sequence: Synthetic oligonucleotide
  Sense strand starting at position 143 of SEQ ID NO: 1879304
uuuggaugaucucugacac

SEQ ID NO: 1897181 - RNA, 19 nt, Artificial Sequence
  Description of Artificial Sequence: Synthetic oligonucleotide
  Antisense strand to SEQ ID NO: 1897180
gugucagagaucauccaaa

SEQ ID NO: 1897182 - RNA, 19 nt, Artificial Sequence
  Description of Artificial Sequence: Synthetic oligonucleotide
  Sense strand starting at position 207 of SEQ ID NO: 1879304
gugagaagguaagugaucu

SEQ ID NO: 1897183 - RNA, 19 nt, Artificial Sequence
  Description of Artificial Sequence: Synthetic oligonucleotide
  Antisense strand to SEQ ID NO: 1897182
agaucacuuaccuucucac

SEQ ID NO: 1897184 - RNA, 19 nt, Artificial Sequence
  Description of Artificial Sequence: Synthetic oligonucleotide
  Sense strand starting at position 211 of SEQ ID NO: 1879304
gaagguaagugaucucugu

SEQ ID NO: 1897185 - RNA, 19 nt, Artificial Sequence
  Description of Artificial Sequence: Synthetic oligonucleotide
  Antisense strand to SEQ ID NO: 1897184
acagagaucacuuaccuuc

SEQ ID NO: 1897186 - RNA, 19 nt, Artificial Sequence
  Description of Artificial Sequence: Synthetic oligonucleotide
  Sense strand starting at position 287 of SEQ ID NO: 1879304
ccacucuggcuaggagauu

SEQ ID NO: 1897187 - RNA, 19 nt, Artificial Sequence
  Description of Artificial Sequence: Synthetic oligonucleotide
  Antisense strand to SEQ ID NO: 1897186
aaucuccuagccagagugg

SEQ ID NO: 1897188 - RNA, 19 nt, Artificial Sequence
  Description of Artificial Sequence: Synthetic oligonucleotide
  Sense strand starting at position 346 of SEQ ID NO: 1879304
cugguaauugacugugauu

SEQ ID NO: 1897189 - RNA, 19 nt, Artificial Sequence
  Description of Artificial Sequence: Synthetic oligonucleotide
  Antisense strand to SEQ ID NO: 1897188
aaucacagucaauuaccag

SEQ ID NO: 1897190 - RNA, 19 nt, Artificial Sequence
  Description of Artificial Sequence: Synthetic oligonucleotide
  Sense strand starting at position 349 of SEQ ID NO: 1879304
guaauugacugugauuuaa

SEQ ID NO: 1897191 - RNA, 19 nt, Artificial Sequence
  Description of Artificial Sequence: Synthetic oligonucleotide
  Antisense strand to SEQ ID NO: 1897190
uuaaaucacagucaauuac

SEQ ID NO: 1897192 - RNA, 19 nt, Artificial Sequence
  Description of Artificial Sequence: Synthetic oligonucleotide
  Sense strand starting at position 1062 of SEQ ID NO: 1879304
ucagacuuuggucauguca

SEQ ID NO: 1897193 - RNA, 19 nt, Artificial Sequence
  Description of Artificial Sequence: Synthetic oligonucleotide
  Antisense strand to SEQ ID NO: 1897192
ugacaugaccaaagucuga

SEQ ID NO: 1897194 - RNA, 19 nt, Artificial Sequence
  Description of Artificial Sequence: Synthetic oligonucleotide
  Sense strand starting at position 1099 of SEQ ID NO: 1879304
agaaauuuguguuaagaca

SEQ ID NO: 1897195 - RNA, 19 nt, Artificial Sequence
  Description of Artificial Sequence: Synthetic oligonucleotide
  Antisense strand to SEQ ID NO: 1897194
ugucuuaacacaaauuucu

SEQ ID NO: 1897196 - RNA, 19 nt, Artificial Sequence
  Description of Artificial Sequence: Synthetic oligonucleotide
  Sense strand starting at position 1106 of SEQ ID NO: 1879304
uguguuaagacacagaagu

SEQ ID NO: 1897197 - RNA, 19 nt, Artificial Sequence
  Description of Artificial Sequence: Synthetic oligonucleotide
  Antisense strand to SEQ ID NO: 1897196
acuucugugucuuaacaca

SEQ ID NO: 1897198 - RNA, 19 nt, Artificial Sequence
  Description of Artificial Sequence: Synthetic oligonucleotide
  Sense strand starting at position 1117 of SEQ ID NO: 1879304
acagaagugcuuuagugga

SEQ ID NO: 1897199 - RNA, 19 nt, Artificial Sequence
  Description of Artificial Sequence: Synthetic oligonucleotide
  Antisense strand to SEQ ID NO: 1897198
uccacuaaagcacuucugu

SEQ ID NO: 1897200 - RNA, 19 nt, Artificial Sequence
  Description of Artificial Sequence: Synthetic oligonucleotide
  Sense strand starting at position 1119 of SEQ ID NO: 1879304
agaagugcuuuaguggaaa

SEQ ID NO: 1897201 - RNA, 19 nt, Artificial Sequence
  Description of Artificial Sequence: Synthetic oligonucleotide
  Antisense strand to SEQ ID NO: 1897200
uuuccacuaaagcacuucu

SEQ ID NO: 1897202 - RNA, 19 nt, Artificial Sequence
  Description of Artificial Sequence: Synthetic oligonucleotide
  Sense strand starting at position 1141 of SEQ ID NO: 1879304
gcccaugaugagggaaauu

SEQ ID NO: 1897203 - RNA, 19 nt, Artificial Sequence
  Description of Artificial Sequence: Synthetic oligonucleotide
  Antisense strand to SEQ ID NO: 1897202
aauuucccucaucaugggc

SEQ ID NO: 1897204 - RNA, 19 nt, Artificial Sequence
  Description of Artificial Sequence: Synthetic oligonucleotide
  Sense strand starting at position 1615 of SEQ ID NO: 1879304
cguuuaaaucuacaagcaa

SEQ ID NO: 1897205 - RNA, 19 nt, Artificial Sequence
  Description of Artificial Sequence: Synthetic oligonucleotide
  Antisense strand to SEQ ID NO: 1897204
uugcuuguagauuuaaacg

SEQ ID NO: 1897206 - RNA, 19 nt, Artificial Sequence
  Description of Artificial Sequence: Synthetic oligonucleotide
  Sense strand starting at position 1656 of SEQ ID NO: 1879304
guagccagacgugaauuaa

SEQ ID NO: 1897207 - RNA, 19 nt, Artificial Sequence
  Description of Artificial Sequence: Synthetic oligonucleotide
  Antisense strand to SEQ ID NO: 1897206
uuaauucacgucuggcuac

SEQ ID NO: 1897208 - RNA, 19 nt, Artificial Sequence
  Description of Artificial Sequence: Synthetic oligonucleotide
  Sense strand starting at position 1670 of SEQ ID NO: 1879304
auuaaaggcuccucaaaug

SEQ ID NO: 1897209 - RNA, 19 nt, Artificial Sequence
  Description of Artificial Sequence: Synthetic oligonucleotide
  Antisense strand to SEQ ID NO: 1897208
cauuugaggagccuuuaau

SEQ ID NO: 1897210 - RNA, 19 nt, Artificial Sequence
  Description of Artificial Sequence: Synthetic oligonucleotide
  Sense strand starting at position 1774 of SEQ ID NO: 1879304
acggguuccagacaccuaa

SEQ ID NO: 1897211 - RNA, 19 nt, Artificial Sequence
  Description of Artificial Sequence: Synthetic oligonucleotide
  Antisense strand to SEQ ID NO: 1897210
uuaggugucuggaacccgu

SEQ ID NO: 1897212 - RNA, 19 nt, Artificial Sequence
  Description of Artificial Sequence: Synthetic oligonucleotide
  Sense strand starting at position 2654 of SEQ ID NO: 1879304
aagaauauugcaugguuac

SEQ ID NO: 1897213 - RNA, 19 nt, Artificial Sequence
  Description of Artificial Sequence: Synthetic oligonucleotide
  Antisense strand to SEQ ID NO: 1897212
guaaccaugcaauauucuu

SEQ ID NO: 1897214 - RNA, 19 nt, Artificial Sequence
  Description of Artificial Sequence: Synthetic oligonucleotide
  Sense strand starting at position 2655 of SEQ ID NO: 1879304
agaauauugcaugguuaca

SEQ ID NO: 1897215 - RNA, 19 nt, Artificial Sequence
  Description of Artificial Sequence: Synthetic oligonucleotide
  Antisense strand to SEQ ID NO: 1897214
uguaaccaugcaauauucu

SEQ ID NO: 1897216 - RNA, 19 nt, Artificial Sequence
  Description of Artificial Sequence: Synthetic oligonucleotide
  Sense strand starting at position 2666 of SEQ ID NO: 1879304
ugguuacaauucuugaaug

SEQ ID NO: 1897217 - RNA, 19 nt, Artificial Sequence
  Description of Artificial Sequence: Synthetic oligonucleotide
  Antisense strand to SEQ ID NO: 1897216
cauucaagaauuguaacca

SEQ ID NO: 1897218 - RNA, 19 nt, Artificial Sequence
  Description of Artificial Sequence: Synthetic oligonucleotide
  Sense strand starting at position 2668 of SEQ ID NO: 1879304
guuacaauucuugaaugcu

SEQ ID NO: 1897219 - RNA, 19 nt, Artificial Sequence
  Description of Artificial Sequence: Synthetic oligonucleotide
  Antisense strand to SEQ ID NO: 1897218
agcauucaagaauuguaac

SEQ ID NO: 1897220 - RNA, 19 nt, Artificial Sequence
  Description of Artificial Sequence: Synthetic oligonucleotide
  Sense strand starting at position 2754 of SEQ ID NO: 1879304
guaugacauucuguaaauc

SEQ ID NO: 1897221 - RNA, 19 nt, Artificial Sequence
  Description of Artificial Sequence: Synthetic oligonucleotide
  Antisense strand to SEQ ID NO: 1897220
gauuuacagaaugucauac

SEQ ID NO: 1897222 - RNA, 19 nt, Artificial Sequence
  Description of Artificial Sequence: Synthetic oligonucleotide
  Sense strand starting at position 2865 of SEQ ID NO: 1879304
ucuaauaagcugcauguua

SEQ ID NO: 1897223 - RNA, 19 nt, Artificial Sequence
  Description of Artificial Sequence: Synthetic oligonucleotide
  Antisense strand to SEQ ID NO: 1897222
uaacaugcagcuuauuaga

SEQ ID NO: 1897224 - RNA, 19 nt, Artificial Sequence
  Description of Artificial Sequence: Synthetic oligonucleotide
  Sense strand starting at position 2887 of SEQ ID NO: 1879304
aucccuauucuacagaugu

SEQ ID NO: 1897225 - RNA, 19 nt, Artificial Sequence
  Description of Artificial Sequence: Synthetic oligonucleotide
  Antisense strand to SEQ ID NO: 1897224
acaucuguagaauagggau

SEQ ID NO: 1897226 - RNA, 19 nt, Artificial Sequence
  Description of Artificial Sequence: Synthetic oligonucleotide
  Sense strand starting at position 3026 of SEQ ID NO: 1879304
gaguucgagguuugggaga

SEQ ID NO: 1897227 - RNA, 19 nt, Artificial Sequence
  Description of Artificial Sequence: Synthetic oligonucleotide
  Antisense strand to SEQ ID NO: 1897226
ucucccaaaccucgaacuc

SEQ ID NO: 1897228 - RNA, 19 nt, Artificial Sequence
  Description of Artificial Sequence: Synthetic oligonucleotide
  Sense strand starting at position 3031 of SEQ ID NO: 1879304
cgagguuugggagacaguu

SEQ ID NO: 1897229 - RNA, 19 nt, Artificial Sequence
  Description of Artificial Sequence: Synthetic oligonucleotide
  Antisense strand to SEQ ID NO: 1897228
aacugucucccaaaccucg

SEQ ID NO: 1897230 - RNA, 19 nt, Artificial Sequence
  Description of Artificial Sequence: Synthetic oligonucleotide
  Sense strand starting at position 3054 of SEQ ID NO: 1879304
agucgcugaguccaaacau

SEQ ID NO: 1897231 - RNA, 19 nt, Artificial Sequence
  Description of Artificial Sequence: Synthetic oligonucleotide
  Antisense strand to SEQ ID NO: 1897230
auguuuggacucagcgacu

SEQ ID NO: 1897232 - RNA, 19 nt, Artificial Sequence
  Description of Artificial Sequence: Synthetic oligonucleotide
  Sense strand starting at position 3229 of SEQ ID NO: 1879304
cucuuaucuuggucuuaca

SEQ ID NO: 1897233 - RNA, 19 nt, Artificial Sequence
  Description of Artificial Sequence: Synthetic oligonucleotide
  Antisense strand to SEQ ID NO: 1897232
uguaagaccaagauaagag

SEQ ID NO: 1897234 - RNA, 19 nt, Artificial Sequence
  Description of Artificial Sequence: Synthetic oligonucleotide
  Sense strand starting at position 3402 of SEQ ID NO: 1879304
uauagacucguuggaaucu

SEQ ID NO: 1897235 - RNA, 19 nt, Artificial Sequence
  Description of Artificial Sequence: Synthetic oligonucleotide
  Antisense strand to SEQ ID NO: 1897234
agauuccaacgagucuaua

SEQ ID NO: 1897236 - RNA, 19 nt, Artificial Sequence
  Description of Artificial Sequence: Synthetic oligonucleotide
  Sense strand starting at position 3413 of SEQ ID NO: 1879304
uggaaucuguuacuuagca

SEQ ID NO: 1897237 - RNA, 19 nt, Artificial Sequence
  Description of Artificial Sequence: Synthetic oligonucleotide
  Antisense strand to SEQ ID NO: 1897236
ugcuaaguaacagauucca

SEQ ID NO: 1897238 - RNA, 19 nt, Artificial Sequence
  Description of Artificial Sequence: Synthetic oligonucleotide
  Sense strand starting at position 3539 of SEQ ID NO: 1879304
guguuagaugcuuaauaca

SEQ ID NO: 1897239 - RNA, 19 nt, Artificial Sequence
  Description of Artificial Sequence: Synthetic oligonucleotide
  Antisense strand to SEQ ID NO: 1897238
uguauuaagcaucuaacac

SEQ ID NO: 1897240 - RNA, 19 nt, Artificial Sequence
  Description of Artificial Sequence: Synthetic oligonucleotide
  Sense strand starting at position 3559 of SEQ ID NO: 1879304
agaagacauugcuuccaga

SEQ ID NO: 1897241 - RNA, 19 nt, Artificial Sequence
  Description of Artificial Sequence: Synthetic oligonucleotide
  Antisense strand to SEQ ID NO: 1897240
ucuggaagcaaugucuucu

SEQ ID NO: 1897242 - RNA, 19 nt, Artificial Sequence
  Description of Artificial Sequence: Synthetic oligonucleotide
  Sense strand starting at position 3611 of SEQ ID NO: 1879304
ggaauaugcugguuucaug

SEQ ID NO: 1897243 - RNA, 19 nt, Artificial Sequence
  Description of Artificial Sequence: Synthetic oligonucleotide
  Antisense strand to SEQ ID NO: 1897242
caugaaaccagcauauucc

SEQ ID NO: 1897244 - RNA, 19 nt, Artificial Sequence
  Description of Artificial Sequence: Synthetic oligonucleotide
  Sense strand starting at position 3646 of SEQ ID NO: 1879304
ucucaucuuggcuagacuu

SEQ ID NO: 1897245 - RNA, 19 nt, Artificial Sequence
  Description of Artificial Sequence: Synthetic oligonucleotide
  Antisense strand to SEQ ID NO: 1897244
aagucuagccaagaugaga

SEQ ID NO: 1897246 - RNA, 19 nt, Artificial Sequence
  Description of Artificial Sequence: Synthetic oligonucleotide
  Sense strand starting at position 3648 of SEQ ID NO: 1879304
ucaucuuggcuagacuuga

SEQ ID NO: 1897247 - RNA, 19 nt, Artificial Sequence
  Description of Artificial Sequence: Synthetic oligonucleotide
  Antisense strand to SEQ ID NO: 1897246
ucaagucuagccaagauga

SEQ ID NO: 1897248 - RNA, 19 nt, Artificial Sequence
  Description of Artificial Sequence: Synthetic oligonucleotide
  Sense strand starting at position 3750 of SEQ ID NO: 1879304
cguguugaaccaugaaagg

SEQ ID NO: 1897249 - RNA, 19 nt, Artificial Sequence
  Description of Artificial Sequence: Synthetic oligonucleotide
  Antisense strand to SEQ ID NO: 1897248
ccuuucaugguucaacacg

SEQ ID NO: 1897250 - RNA, 19 nt, Artificial Sequence
  Description of Artificial Sequence: Synthetic oligonucleotide
  Sense strand starting at position 3809 of SEQ ID NO: 1879304
gaaagaagcguggauuccu

SEQ ID NO: 1897251 - RNA, 19 nt, Artificial Sequence
  Description of Artificial Sequence: Synthetic oligonucleotide
  Antisense strand to SEQ ID NO: 1897250
aggaauccacgcuucuuuc

SEQ ID NO: 1897252 - RNA, 19 nt, Artificial Sequence
  Description of Artificial Sequence: Synthetic oligonucleotide
  Sense strand starting at position 3 of SEQ ID NO: 1879305
gaugucuacucuccuggaa

SEQ ID NO: 1897253 - RNA, 19 nt, Artificial Sequence
  Description of Artificial Sequence: Synthetic oligonucleotide
  Antisense strand to SEQ ID NO: 1897252
uuccaggagaguagacauc

SEQ ID NO: 1897254 - RNA, 19 nt, Artificial Sequence
  Description of Artificial Sequence: Synthetic oligonucleotide
  Sense strand starting at position 126 of SEQ ID NO: 1879305
ucggcaaauccugaaggua

SEQ ID NO: 1897255 - RNA, 19 nt, Artificial Sequence
  Description of Artificial Sequence: Synthetic oligonucleotide
  Antisense strand to SEQ ID NO: 1897254
uaccuucaggauuugccga

SEQ ID NO: 1897256 - RNA, 19 nt, Artificial Sequence
  Description of Artificial Sequence: Synthetic oligonucleotide
  Sense strand starting at position 129 of SEQ ID NO: 1879305
gcaaauccugaagguaaga

SEQ ID NO: 1897257 - RNA, 19 nt, Artificial Sequence
  Description of Artificial Sequence: Synthetic oligonucleotide
  Antisense strand to SEQ ID NO: 1897256
ucuuaccuucaggauuugc

SEQ ID NO: 1897258 - RNA, 19 nt, Artificial Sequence
  Description of Artificial Sequence: Synthetic oligonucleotide
  Sense strand starting at position 140 of SEQ ID NO: 1879305
agguaagagucucugacaa

SEQ ID NO: 1897259 - RNA, 19 nt, Artificial Sequence
  Description of Artificial Sequence: Synthetic oligonucleotide
  Antisense strand to SEQ ID NO: 1897258
uugucagagacucuuaccu

SEQ ID NO: 1897260 - RNA, 19 nt, Artificial Sequence
  Description of Artificial Sequence: Synthetic oligonucleotide
  Sense strand starting at position 142 of SEQ ID NO: 1879305
guaagagucucugacaaga

SEQ ID NO: 1897261 - RNA, 19 nt, Artificial Sequence
  Description of Artificial Sequence: Synthetic oligonucleotide
  Antisense strand to SEQ ID NO: 1897260
ucuugucagagacucuuac

SEQ ID NO: 1897262 - RNA, 19 nt, Artificial Sequence
  Description of Artificial Sequence: Synthetic oligonucleotide
  Sense strand starting at position 212 of SEQ ID NO: 1879305
uugagcucuuugugaacua

SEQ ID NO: 1897263 - RNA, 19 nt, Artificial Sequence
  Description of Artificial Sequence: Synthetic oligonucleotide
  Antisense strand to SEQ ID NO: 1897262
uaguucacaaagagcucaa

SEQ ID NO: 1897264 - RNA, 19 nt, Artificial Sequence
  Description of Artificial Sequence: Synthetic oligonucleotide
  Sense strand starting at position 213 of SEQ ID NO: 1879305
ugagcucuuugugaacuau

SEQ ID NO: 1897265 - RNA, 19 nt, Artificial Sequence
  Description of Artificial Sequence: Synthetic oligonucleotide
  Antisense strand to SEQ ID NO: 1897264
auaguucacaaagagcuca

SEQ ID NO: 1897266 - RNA, 19 nt, Artificial Sequence
  Description of Artificial Sequence: Synthetic oligonucleotide
  Sense strand starting at position 293 of SEQ ID NO: 1879305
ccuauaccuggauguauau

SEQ ID NO: 1897267 - RNA, 19 nt, Artificial Sequence
  Description of Artificial Sequence: Synthetic oligonucleotide
  Antisense strand to SEQ ID NO: 1897266
auauacauccagguauagg

SEQ ID NO: 1897268 - RNA, 19 nt, Artificial Sequence
  Description of Artificial Sequence: Synthetic oligonucleotide
  Sense strand starting at position 300 of SEQ ID NO: 1879305
cuggauguauauuauaaac

SEQ ID NO: 1897269 - RNA, 19 nt, Artificial Sequence
  Description of Artificial Sequence: Synthetic oligonucleotide
  Antisense strand to SEQ ID NO: 1897268
guuuauaauauacauccag

SEQ ID NO: 1897270 - RNA, 19 nt, Artificial Sequence
  Description of Artificial Sequence: Synthetic oligonucleotide
  Sense strand starting at position 946 of SEQ ID NO: 1879305
acccucaagucuggaaaga

SEQ ID NO: 1897271 - RNA, 19 nt, Artificial Sequence
  Description of Artificial Sequence: Synthetic oligonucleotide
  Antisense strand to SEQ ID NO: 1897270
ucuuuccagacuugagggu

SEQ ID NO: 1897272 - RNA, 19 nt, Artificial Sequence
  Description of Artificial Sequence: Synthetic oligonucleotide
  Sense strand starting at position 1027 of SEQ ID NO: 1879305
gcaugaaucuaguucugaa

SEQ ID NO: 1897273 - RNA, 19 nt, Artificial Sequence
  Description of Artificial Sequence: Synthetic oligonucleotide
  Antisense strand to SEQ ID NO: 1897272
uucagaacuagauucaugc

SEQ ID NO: 1897274 - RNA, 19 nt, Artificial Sequence
  Description of Artificial Sequence: Synthetic oligonucleotide
  Sense strand starting at position 1143 of SEQ ID NO: 1879305
auacuagauuaggagacaa

SEQ ID NO: 1897275 - RNA, 19 nt, Artificial Sequence
  Description of Artificial Sequence: Synthetic oligonucleotide
  Antisense strand to SEQ ID NO: 1897274
uugucuccuaaucuaguau

SEQ ID NO: 1897276 - RNA, 19 nt, Artificial Sequence
  Description of Artificial Sequence: Synthetic oligonucleotide
  Sense strand starting at position 1208 of SEQ ID NO: 1879305
gaaggaguauaugauuaug

SEQ ID NO: 1897277 - RNA, 19 nt, Artificial Sequence
  Description of Artificial Sequence: Synthetic oligonucleotide
  Antisense strand to SEQ ID NO: 1897276
cauaaucauauacuccuuc

SEQ ID NO: 1897278 - RNA, 19 nt, Artificial Sequence
  Description of Artificial Sequence: Synthetic oligonucleotide
  Sense strand starting at position 1253 of SEQ ID NO: 1879305
uggauacaaucaggccaua

SEQ ID NO: 1897279 - RNA, 19 nt, Artificial Sequence
  Description of Artificial Sequence: Synthetic oligonucleotide
  Antisense strand to SEQ ID NO: 1897278
uauggccugauuguaucca

SEQ ID NO: 1897280 - RNA, 19 nt, Artificial Sequence
  Description of Artificial Sequence: Synthetic oligonucleotide
  Sense strand starting at position 1264 of SEQ ID NO: 1879305
aggccauauugccacauau

SEQ ID NO: 1897281 - RNA, 19 nt, Artificial Sequence
  Description of Artificial Sequence: Synthetic oligonucleotide
  Antisense strand to SEQ ID NO: 1897280
auauguggcaauauggccu

SEQ ID NO: 1897282 - RNA, 19 nt, Artificial Sequence
  Description of Artificial Sequence: Synthetic oligonucleotide
  Sense strand starting at position 1303 of SEQ ID NO: 1879305
cuaugacaccacugauagu

SEQ ID NO: 1897283 - RNA, 19 nt, Artificial Sequence
  Description of Artificial Sequence: Synthetic oligonucleotide
  Antisense strand to SEQ ID NO: 1897282
acuaucaguggugucauag

SEQ ID NO: 1897284 - RNA, 19 nt, Artificial Sequence
  Description of Artificial Sequence: Synthetic oligonucleotide
  Sense strand starting at position 1314 of SEQ ID NO: 1879305
cugauagucuauuagaaga

SEQ ID NO: 1897285 - RNA, 19 nt, Artificial Sequence
  Description of Artificial Sequence: Synthetic oligonucleotide
  Antisense strand to SEQ ID NO: 1897284
ucuucuaauagacuaucag

SEQ ID NO: 1897286 - RNA, 19 nt, Artificial Sequence
  Description of Artificial Sequence: Synthetic oligonucleotide
  Sense strand starting at position 1316 of SEQ ID NO: 1879305
gauagucuauuagaagaaa

SEQ ID NO: 1897287 - RNA, 19 nt, Artificial Sequence
  Description of Artificial Sequence: Synthetic oligonucleotide
  Antisense strand to SEQ ID NO: 1897286
uuucuucuaauagacuauc

SEQ ID NO: 1897288 - RNA, 19 nt, Artificial Sequence
  Description of Artificial Sequence: Synthetic oligonucleotide
  Sense strand starting at position 1349 of SEQ ID NO: 1879305
agaucaaggucaucugaug

SEQ ID NO: 1897289 - RNA, 19 nt, Artificial Sequence
  Description of Artificial Sequence: Synthetic oligonucleotide
  Antisense strand to SEQ ID NO: 1897288
caucagaugaccuugaucu

SEQ ID NO: 1897290 - RNA, 19 nt, Artificial Sequence
  Description of Artificial Sequence: Synthetic oligonucleotide
  Sense strand starting at position 1354 of SEQ ID NO: 1879305
aaggucaucugauggcaaa

SEQ ID NO: 1897291 - RNA, 19 nt, Artificial Sequence
  Description of Artificial Sequence: Synthetic oligonucleotide
  Antisense strand to SEQ ID NO: 1897290
uuugccaucagaugaccuu

SEQ ID NO: 1897292 - RNA, 19 nt, Artificial Sequence
  Description of Artificial Sequence: Synthetic oligonucleotide
  Sense strand starting at position 1355 of SEQ ID NO: 1879305
aggucaucugauggcaaau

SEQ ID NO: 1897293 - RNA, 19 nt, Artificial Sequence
  Description of Artificial Sequence: Synthetic oligonucleotide
  Antisense strand to SEQ ID NO: 1897292
auuugccaucagaugaccu

SEQ ID NO: 1897294 - RNA, 19 nt, Artificial Sequence
  Description of Artificial Sequence: Synthetic oligonucleotide
  Sense strand starting at position 1357 of SEQ ID NO: 1879305
gucaucugauggcaaauca

SEQ ID NO: 1897295 - RNA, 19 nt, Artificial Sequence
  Description of Artificial Sequence: Synthetic oligonucleotide
  Antisense strand to SEQ ID NO: 1897294
ugauuugccaucagaugac

SEQ ID NO: 1897296 - RNA, 19 nt, Artificial Sequence
  Description of Artificial Sequence: Synthetic oligonucleotide
  Sense strand starting at position 1367 of SEQ ID NO: 1879305
ggcaaaucaucaucucaag

SEQ ID NO: 1897297 - RNA, 19 nt, Artificial Sequence
  Description of Artificial Sequence: Synthetic oligonucleotide
  Antisense strand to SEQ ID NO: 1897296
cuugagaugaugauuugcc

SEQ ID NO: 1897298 - RNA, 19 nt, Artificial Sequence
  Description of Artificial Sequence: Synthetic oligonucleotide
  Sense strand starting at position 2167 of SEQ ID NO: 1879305
ccacgagcaaucgguaaau

SEQ ID NO: 1897299 - RNA, 19 nt, Artificial Sequence
  Description of Artificial Sequence: Synthetic oligonucleotide
  Antisense strand to SEQ ID NO: 1897298
auuuaccgauugcucgugg

SEQ ID NO: 1897300 - RNA, 19 nt, Artificial Sequence
  Description of Artificial Sequence: Synthetic oligonucleotide
  Sense strand starting at position 2169 of SEQ ID NO: 1879305
acgagcaaucgguaaauag

SEQ ID NO: 1897301 - RNA, 19 nt, Artificial Sequence
  Description of Artificial Sequence: Synthetic oligonucleotide
  Antisense strand to SEQ ID NO: 1897300
cuauuuaccgauugcucgu

SEQ ID NO: 1897302 - RNA, 19 nt, Artificial Sequence
  Description of Artificial Sequence: Synthetic oligonucleotide
  Sense strand starting at position 2180 of SEQ ID NO: 1879305
guaaauaggucuggacacu

SEQ ID NO: 1897303 - RNA, 19 nt, Artificial Sequence
  Description of Artificial Sequence: Synthetic oligonucleotide
  Antisense strand to SEQ ID NO: 1897302
aguguccagaccuauuuac

SEQ ID NO: 1897304 - RNA, 19 nt, Artificial Sequence
  Description of Artificial Sequence: Synthetic oligonucleotide
  Sense strand starting at position 2326 of SEQ ID NO: 1879305
agggucacgucaucaugaa

SEQ ID NO: 1897305 - RNA, 19 nt, Artificial Sequence
  Description of Artificial Sequence: Synthetic oligonucleotide
  Antisense strand to SEQ ID NO: 1897304
uucaugaugacgugacccu

SEQ ID NO: 1897306 - RNA, 19 nt, Artificial Sequence
  Description of Artificial Sequence: Synthetic oligonucleotide
  Sense strand starting at position 2327 of SEQ ID NO: 1879305
gggucacgucaucaugaag

SEQ ID NO: 1897307 - RNA, 19 nt, Artificial Sequence
  Description of Artificial Sequence: Synthetic oligonucleotide
  Antisense strand to SEQ ID NO: 1897306
cuucaugaugacgugaccc

SEQ ID NO: 1897308 - RNA, 19 nt, Artificial Sequence
  Description of Artificial Sequence: Synthetic oligonucleotide
  Sense strand starting at position 2330 of SEQ ID NO: 1879305
ucacgucaucaugaagcuu

SEQ ID NO: 1897309 - RNA, 19 nt, Artificial Sequence
  Description of Artificial Sequence: Synthetic oligonucleotide
  Antisense strand to SEQ ID NO: 1897308
aagcuucaugaugacguga

SEQ ID NO: 1897310 - RNA, 19 nt, Artificial Sequence
  Description of Artificial Sequence: Synthetic oligonucleotide
  Sense strand starting at position 3714 of SEQ ID NO: 1879305
caggcauuccgcgcagaca

SEQ ID NO: 1897311 - RNA, 19 nt, Artificial Sequence
  Description of Artificial Sequence: Synthetic oligonucleotide
  Antisense strand to SEQ ID NO: 1897310
ugucugcgcggaaugccug

SEQ ID NO: 1897312 - RNA, 19 nt, Artificial Sequence
  Description of Artificial Sequence: Synthetic oligonucleotide
  Sense strand starting at position 3715 of SEQ ID NO: 1879305
aggcauuccgcgcagacaa

SEQ ID NO: 1897313 - RNA, 19 nt, Artificial Sequence
  Description of Artificial Sequence: Synthetic oligonucleotide
  Antisense strand to SEQ ID NO: 1897312
uugucugcgcggaaugccu

SEQ ID NO: 1897314 - RNA, 19 nt, Artificial Sequence
  Description of Artificial Sequence: Synthetic oligonucleotide
  Sense strand starting at position 3797 of SEQ ID NO: 1879305
gagggacauucagaggagu

SEQ ID NO: 1897315 - RNA, 19 nt, Artificial Sequence
  Description of Artificial Sequence: Synthetic oligonucleotide
  Antisense strand to SEQ ID NO: 1897314
acuccucugaaugucccuc

SEQ ID NO: 1897316 - RNA, 19 nt, Artificial Sequence
  Description of Artificial Sequence: Synthetic oligonucleotide
  Sense strand starting at position 27 of SEQ ID NO: 1879306
gacuuuggaguuugaaaca

SEQ ID NO: 1897317 - RNA, 19 nt, Artificial Sequence
  Description of Artificial Sequence: Synthetic oligonucleotide
  Antisense strand to SEQ ID NO: 1897316
uguuucaaacuccaaaguc

SEQ ID NO: 1897318 - RNA, 19 nt, Artificial Sequence
  Description of Artificial Sequence: Synthetic oligonucleotide
  Sense strand starting at position 36 of SEQ ID NO: 1879306
guuugaaacagucagucuu

SEQ ID NO: 1897319 - RNA, 19 nt, Artificial Sequence
  Description of Artificial Sequence: Synthetic oligonucleotide
  Antisense strand to SEQ ID NO: 1897318
aagacugacuguuucaaac

SEQ ID NO: 1897320 - RNA, 19 nt, Artificial Sequence
  Description of Artificial Sequence: Synthetic oligonucleotide
  Sense strand starting at position 77 of SEQ ID NO: 1879306
agauauagauuccuuggca

SEQ ID NO: 1897321 - RNA, 19 nt, Artificial Sequence
  Description of Artificial Sequence: Synthetic oligonucleotide
  Antisense strand to SEQ ID NO: 1897320
ugccaaggaaucuauaucu

SEQ ID NO: 1897322 - RNA, 19 nt, Artificial Sequence
  Description of Artificial Sequence: Synthetic oligonucleotide
  Sense strand starting at position 81 of SEQ ID NO: 1879306
auagauuccuuggcaauug

SEQ ID NO: 1897323 - RNA, 19 nt, Artificial Sequence
  Description of Artificial Sequence: Synthetic oligonucleotide
  Antisense strand to SEQ ID NO: 1897322
caauugccaaggaaucuau

SEQ ID NO: 1897324 - RNA, 19 nt, Artificial Sequence
  Description of Artificial Sequence: Synthetic oligonucleotide
  Sense strand starting at position 360 of SEQ ID NO: 1879306
uaguguuugccugccauau

SEQ ID NO: 1897325 - RNA, 19 nt, Artificial Sequence
  Description of Artificial Sequence: Synthetic oligonucleotide
  Antisense strand to SEQ ID NO: 1897324
auauggcaggcaaacacua

SEQ ID NO: 1897326 - RNA, 19 nt, Artificial Sequence
  Description of Artificial Sequence: Synthetic oligonucleotide
  Sense strand starting at position 361 of SEQ ID NO: 1879306
aguguuugccugccauauc

SEQ ID NO: 1897327 - RNA, 19 nt, Artificial Sequence
  Description of Artificial Sequence: Synthetic oligonucleotide
  Antisense strand to SEQ ID NO: 1897326
gauauggcaggcaaacacu

SEQ ID NO: 1897328 - RNA, 19 nt, Artificial Sequence
  Description of Artificial Sequence: Synthetic oligonucleotide
  Sense strand starting at position 451 of SEQ ID NO: 1879306
ucaaauauggguuguuuau

SEQ ID NO: 1897329 - RNA, 19 nt, Artificial Sequence
  Description of Artificial Sequence: Synthetic oligonucleotide
  Antisense strand to SEQ ID NO: 1897328
auaaacaacccauauuuga

SEQ ID NO: 1897330 - RNA, 19 nt, Artificial Sequence
  Description of Artificial Sequence: Synthetic oligonucleotide
  Sense strand starting at position 477 of SEQ ID NO: 1879306
auuggaguuuaucuguuaa

SEQ ID NO: 1897331 - RNA, 19 nt, Artificial Sequence
  Description of Artificial Sequence: Synthetic oligonucleotide
  Antisense strand to SEQ ID NO: 1897330
uuaacagauaaacuccaau

SEQ ID NO: 1897332 - RNA, 19 nt, Artificial Sequence
  Description of Artificial Sequence: Synthetic oligonucleotide
  Sense strand starting at position 479 of SEQ ID NO: 1879306
uggaguuuaucuguuaaua

SEQ ID NO: 1897333 - RNA, 19 nt, Artificial Sequence
  Description of Artificial Sequence: Synthetic oligonucleotide
  Antisense strand to SEQ ID NO: 1897332
uauuaacagauaaacucca

SEQ ID NO: 1897334 - RNA, 19 nt, Artificial Sequence
  Description of Artificial Sequence: Synthetic oligonucleotide
  Sense strand starting at position 655 of SEQ ID NO: 1879306
cagagacauuuauaguuga

SEQ ID NO: 1897335 - RNA, 19 nt, Artificial Sequence
  Description of Artificial Sequence: Synthetic oligonucleotide
  Antisense strand to SEQ ID NO: 1897334
ucaacuauaaaugucucug

SEQ ID NO: 1897336 - RNA, 19 nt, Artificial Sequence
  Description of Artificial Sequence: Synthetic oligonucleotide
  Sense strand starting at position 693 of SEQ ID NO: 1879306
ucaacauguugucuacaaa

SEQ ID NO: 1897337 - RNA, 19 nt, Artificial Sequence
  Description of Artificial Sequence: Synthetic oligonucleotide
  Antisense strand to SEQ ID NO: 1897336
uuuguagacaacauguuga

SEQ ID NO: 1897338 - RNA, 19 nt, Artificial Sequence
  Description of Artificial Sequence: Synthetic oligonucleotide
  Sense strand starting at position 1072 of SEQ ID NO: 1879306
ugcccuaugcuauaaggaa

SEQ ID NO: 1897339 - RNA, 19 nt, Artificial Sequence
  Description of Artificial Sequence: Synthetic oligonucleotide
  Antisense strand to SEQ ID NO: 1897338
uuccuuauagcauagggca

SEQ ID NO: 1897340 - RNA, 19 nt, Artificial Sequence
  Description of Artificial Sequence: Synthetic oligonucleotide
  Sense strand starting at position 1162 of SEQ ID NO: 1879306
augacucucuagcuagaaa

SEQ ID NO: 1897341 - RNA, 19 nt, Artificial Sequence
  Description of Artificial Sequence: Synthetic oligonucleotide
  Antisense strand to SEQ ID NO: 1897340
uuucuagcuagagagucau

SEQ ID NO: 1897342 - RNA, 19 nt, Artificial Sequence
  Description of Artificial Sequence: Synthetic oligonucleotide
  Sense strand starting at position 1222 of SEQ ID NO: 1879306
ucagcaaguuuaucagaaa

SEQ ID NO: 1897343 - RNA, 19 nt, Artificial Sequence
  Description of Artificial Sequence: Synthetic oligonucleotide
  Antisense strand to SEQ ID NO: 1897342
uuucugauaaacuugcuga

SEQ ID NO: 1897344 - RNA, 19 nt, Artificial Sequence
  Description of Artificial Sequence: Synthetic oligonucleotide
  Sense strand starting at position 1778 of SEQ ID NO: 1879306
uaguaaaguggguaccaua

SEQ ID NO: 1897345 - RNA, 19 nt, Artificial Sequence
  Description of Artificial Sequence: Synthetic oligonucleotide
  Antisense strand to SEQ ID NO: 1897344
uaugguacccacuuuacua

SEQ ID NO: 1897346 - RNA, 19 nt, Artificial Sequence
  Description of Artificial Sequence: Synthetic oligonucleotide
  Sense strand starting at position 1840 of SEQ ID NO: 1879306
uggcucaugccauagauaa

SEQ ID NO: 1897347 - RNA, 19 nt, Artificial Sequence
  Description of Artificial Sequence: Synthetic oligonucleotide
  Antisense strand to SEQ ID NO: 1897346
uuaucuauggcaugagcca

SEQ ID NO: 1897348 - RNA, 19 nt, Artificial Sequence
  Description of Artificial Sequence: Synthetic oligonucleotide
  Sense strand starting at position 2157 of SEQ ID NO: 1879306
uguacuaacgucuagaaca

SEQ ID NO: 1897349 - RNA, 19 nt, Artificial Sequence
  Description of Artificial Sequence: Synthetic oligonucleotide
  Antisense strand to SEQ ID NO: 1897348
uguucuagacguuaguaca

SEQ ID NO: 1897350 - RNA, 19 nt, Artificial Sequence
  Description of Artificial Sequence: Synthetic oligonucleotide
  Sense strand starting at position 2403 of SEQ ID NO: 1879306
ucauguacuccugguaaga

SEQ ID NO: 1897351 - RNA, 19 nt, Artificial Sequence
  Description of Artificial Sequence: Synthetic oligonucleotide
  Antisense strand to SEQ ID NO: 1897350
ucuuaccaggaguacauga

SEQ ID NO: 1897352 - RNA, 19 nt, Artificial Sequence
  Description of Artificial Sequence: Synthetic oligonucleotide
  Sense strand starting at position 2426 of SEQ ID NO: 1879306
aaagcuguucuggagaguu

SEQ ID NO: 1897353 - RNA, 19 nt, Artificial Sequence
  Description of Artificial Sequence: Synthetic oligonucleotide
  Antisense strand to SEQ ID NO: 1897352
aacucuccagaacagcuuu

SEQ ID NO: 1897354 - RNA, 19 nt, Artificial Sequence
  Description of Artificial Sequence: Synthetic oligonucleotide
  Sense strand starting at position 2428 of SEQ ID NO: 1879306
agcuguucuggagaguuau

SEQ ID NO: 1897355 - RNA, 19 nt, Artificial Sequence
  Description of Artificial Sequence: Synthetic oligonucleotide
  Antisense strand to SEQ ID NO: 1897354
auaacucuccagaacagcu

SEQ ID NO: 1897356 - RNA, 19 nt, Artificial Sequence
  Description of Artificial Sequence: Synthetic oligonucleotide
  Sense strand starting at position 2434 of SEQ ID NO: 1879306
ucuggagaguuaucugaca

SEQ ID NO: 1897357 - RNA, 19 nt, Artificial Sequence
  Description of Artificial Sequence: Synthetic oligonucleotide
  Antisense strand to SEQ ID NO: 1897356
ugucagauaacucuccaga

SEQ ID NO: 1897358 - RNA, 19 nt, Artificial Sequence
  Description of Artificial Sequence: Synthetic oligonucleotide
  Sense strand starting at position 2436 of SEQ ID NO: 1879306
uggagaguuaucugacagu

SEQ ID NO: 1897359 - RNA, 19 nt, Artificial Sequence
  Description of Artificial Sequence: Synthetic oligonucleotide
  Antisense strand to SEQ ID NO: 1897358
acugucagauaacucucca

SEQ ID NO: 1897360 - RNA, 19 nt, Artificial Sequence
  Description of Artificial Sequence: Synthetic oligonucleotide
  Sense strand starting at position 2453 of SEQ ID NO: 1879306
guaucuagucaauaucaag

SEQ ID NO: 1897361 - RNA, 19 nt, Artificial Sequence
  Description of Artificial Sequence: Synthetic oligonucleotide
  Antisense strand to SEQ ID NO: 1897360
cuugauauugacuagauac

SEQ ID NO: 1897362 - RNA, 19 nt, Artificial Sequence
  Description of Artificial Sequence: Synthetic oligonucleotide
  Sense strand starting at position 2565 of SEQ ID NO: 1879306
auguucgucgcagcauuau

SEQ ID NO: 1897363 - RNA, 19 nt, Artificial Sequence
  Description of Artificial Sequence: Synthetic oligonucleotide
  Antisense strand to SEQ ID NO: 1897362
auaaugcugcgacgaacau

SEQ ID NO: 1897364 - RNA, 19 nt, Artificial Sequence
  Description of Artificial Sequence: Synthetic oligonucleotide
  Sense strand starting at position 2585 of SEQ ID NO: 1879306
uuuagugcugaggaauuaa

SEQ ID NO: 1897365 - RNA, 19 nt, Artificial Sequence
  Description of Artificial Sequence: Synthetic oligonucleotide
  Antisense strand to SEQ ID NO: 1897364
uuaauuccucagcacuaaa

SEQ ID NO: 1897366 - RNA, 19 nt, Artificial Sequence
  Description of Artificial Sequence: Synthetic oligonucleotide
  Sense strand starting at position 2642 of SEQ ID NO: 1879306
gagguauacugaguagaug

SEQ ID NO: 1897367 - RNA, 19 nt, Artificial Sequence
  Description of Artificial Sequence: Synthetic oligonucleotide
  Antisense strand to SEQ ID NO: 1897366
caucuacucaguauaccuc

SEQ ID NO: 1897368 - RNA, 19 nt, Artificial Sequence
  Description of Artificial Sequence: Synthetic oligonucleotide
  Sense strand starting at position 3028 of SEQ ID NO: 1879306
aauugauauccugagugcu

SEQ ID NO: 1897369 - RNA, 19 nt, Artificial Sequence
  Description of Artificial Sequence: Synthetic oligonucleotide
  Antisense strand to SEQ ID NO: 1897368
agcacucaggauaucaauu

SEQ ID NO: 1897370 - RNA, 19 nt, Artificial Sequence
  Description of Artificial Sequence: Synthetic oligonucleotide
  Sense strand starting at position 3079 of SEQ ID NO: 1879306
aaagucuaugaaugguuaa

SEQ ID NO: 1897371 - RNA, 19 nt, Artificial Sequence
  Description of Artificial Sequence: Synthetic oligonucleotide
  Antisense strand to SEQ ID NO: 1897370
uuaaccauucauagacuuu

SEQ ID NO: 1897372 - RNA, 19 nt, Artificial Sequence
  Description of Artificial Sequence: Synthetic oligonucleotide
  Sense strand starting at position 3127 of SEQ ID NO: 1879306
aauagaauauccuugguga

SEQ ID NO: 1897373 - RNA, 19 nt, Artificial Sequence
  Description of Artificial Sequence: Synthetic oligonucleotide
  Antisense strand to SEQ ID NO: 1897372
ucaccaaggauauucuauu

SEQ ID NO: 1897374 - RNA, 19 nt, Artificial Sequence
  Description of Artificial Sequence: Synthetic oligonucleotide
  Sense strand starting at position 3128 of SEQ ID NO: 1879306
auagaauauccuuggugaa

SEQ ID NO: 1897375 - RNA, 19 nt, Artificial Sequence
  Description of Artificial Sequence: Synthetic oligonucleotide
  Antisense strand to SEQ ID NO: 1897374
uucaccaaggauauucuau

SEQ ID NO: 1897376 - RNA, 19 nt, Artificial Sequence
  Description of Artificial Sequence: Synthetic oligonucleotide
  Sense strand starting at position 3129 of SEQ ID NO: 1879306
uagaauauccuuggugaaa

SEQ ID NO: 1897377 - RNA, 19 nt, Artificial Sequence
  Description of Artificial Sequence: Synthetic oligonucleotide
  Antisense strand to SEQ ID NO: 1897376
uuucaccaaggauauucua

SEQ ID NO: 1897378 - RNA, 19 nt, Artificial Sequence
  Description of Artificial Sequence: Synthetic oligonucleotide
  Sense strand starting at position 3182 of SEQ ID NO: 1879306
acaaacagauucuggauuu

SEQ ID NO: 1897379 - RNA, 19 nt, Artificial Sequence
  Description of Artificial Sequence: Synthetic oligonucleotide
  Antisense strand to SEQ ID NO: 1897378
aaauccagaaucuguuugu

SEQ ID NO: 1897380 - RNA, 19 nt, Artificial Sequence
  Description of Artificial Sequence: Synthetic oligonucleotide
  Sense strand starting at position 3303 of SEQ ID NO: 1879306
aguuauauuucucauagag

SEQ ID NO: 1897381 - RNA, 19 nt, Artificial Sequence
  Description of Artificial Sequence: Synthetic oligonucleotide
  Antisense strand to SEQ ID NO: 1897380
cucuaugagaaauauaacu

SEQ ID NO: 1897382 - RNA, 19 nt, Artificial Sequence
  Description of Artificial Sequence: Synthetic oligonucleotide
  Sense strand starting at position 3313 of SEQ ID NO: 1879306
cucauagaggguuacaguu

SEQ ID NO: 1897383 - RNA, 19 nt, Artificial Sequence
  Description of Artificial Sequence: Synthetic oligonucleotide
  Antisense strand to SEQ ID NO: 1897382
aacuguaacccucuaugag

SEQ ID NO: 1897384 - RNA, 19 nt, Artificial Sequence
  Description of Artificial Sequence: Synthetic oligonucleotide
  Sense strand starting at position 3319 of SEQ ID NO: 1879306
gaggguuacaguugcaaag

SEQ ID NO: 1897385 - RNA, 19 nt, Artificial Sequence
  Description of Artificial Sequence: Synthetic oligonucleotide
  Antisense strand to SEQ ID NO: 1897384
cuuugcaacuguaacccuc

SEQ ID NO: 1897386 - RNA, 19 nt, Artificial Sequence
  Description of Artificial Sequence: Synthetic oligonucleotide
  Sense strand starting at position 3435 of SEQ ID NO: 1879306
ugcugaauggguugacuaa

SEQ ID NO: 1897387 - RNA, 19 nt, Artificial Sequence
  Description of Artificial Sequence: Synthetic oligonucleotide
  Antisense strand to SEQ ID NO: 1897386
uuagucaacccauucagca

SEQ ID NO: 1897388 - RNA, 19 nt, Artificial Sequence
  Description of Artificial Sequence: Synthetic oligonucleotide
  Sense strand starting at position 3628 of SEQ ID NO: 1879306
acguaugcagccuuuguaa

SEQ ID NO: 1897389 - RNA, 19 nt, Artificial Sequence
  Description of Artificial Sequence: Synthetic oligonucleotide
  Antisense strand to SEQ ID NO: 1897388
uuacaaaggcugcauacgu

SEQ ID NO: 1897390 - RNA, 19 nt, Artificial Sequence
  Description of Artificial Sequence: Synthetic oligonucleotide
  Sense strand starting at position 3794 of SEQ ID NO: 1879306
ucauauugcuuaccugaag

SEQ ID NO: 1897391 - RNA, 19 nt, Artificial Sequence
  Description of Artificial Sequence: Synthetic oligonucleotide
  Antisense strand to SEQ ID NO: 1897390
cuucagguaagcaauauga

SEQ ID NO: 1897392 - RNA, 19 nt, Artificial Sequence
  Description of Artificial Sequence: Synthetic oligonucleotide
  Sense strand starting at position 3874 of SEQ ID NO: 1879306
auucuuuaagugcagaagu

SEQ ID NO: 1897393 - RNA, 19 nt, Artificial Sequence
  Description of Artificial Sequence: Synthetic oligonucleotide
  Antisense strand to SEQ ID NO: 1897392
acuucugcacuuaaagaau

SEQ ID NO: 1897394 - RNA, 19 nt, Artificial Sequence
  Description of Artificial Sequence: Synthetic oligonucleotide
  Sense strand starting at position 3954 of SEQ ID NO: 1879306
ccacaaagagucuguucua

SEQ ID NO: 1897395 - RNA, 19 nt, Artificial Sequence
  Description of Artificial Sequence: Synthetic oligonucleotide
  Antisense strand to SEQ ID NO: 1897394
uagaacagacucuuugugg

SEQ ID NO: 1897396 - RNA, 19 nt, Artificial Sequence
  Description of Artificial Sequence: Synthetic oligonucleotide
  Sense strand starting at position 3831 of SEQ ID NO: 1879307
agcuuccuugucugcagaa

SEQ ID NO: 1897397 - RNA, 19 nt, Artificial Sequence
  Description of Artificial Sequence: Synthetic oligonucleotide
  Antisense strand to SEQ ID NO: 1897396
uucugcagacaaggaagcu

SEQ ID NO: 1897398 - RNA, 19 nt, Artificial Sequence
  Description of Artificial Sequence: Synthetic oligonucleotide
  Sense strand starting at position 3832 of SEQ ID NO: 1879307
gcuuccuugucugcagaaa

SEQ ID NO: 1897399 - RNA, 19 nt, Artificial Sequence
  Description of Artificial Sequence: Synthetic oligonucleotide
  Antisense strand to SEQ ID NO: 1897398
uuucugcagacaaggaagc

SEQ ID NO: 1897400 - RNA, 19 nt, Artificial Sequence
  Description of Artificial Sequence: Synthetic oligonucleotide
  Sense strand starting at position 3833 of SEQ ID NO: 1879307
cuuccuugucugcagaaag

SEQ ID NO: 1897401 - RNA, 19 nt, Artificial Sequence
  Description of Artificial Sequence: Synthetic oligonucleotide
  Antisense strand to SEQ ID NO: 1897400
cuuucugcagacaaggaag

SEQ ID NO: 1897402 - RNA, 19 nt, Artificial Sequence
  Description of Artificial Sequence: Synthetic oligonucleotide
  Sense strand starting at position 3866 of SEQ ID NO: 1879307
cuuccagaggauggguaau

SEQ ID NO: 1897403 - RNA, 19 nt, Artificial Sequence
  Description of Artificial Sequence: Synthetic oligonucleotide
  Antisense strand to SEQ ID NO: 1897402
auuacccauccucuggaag

SEQ ID NO: 1897404 - RNA, 19 nt, Artificial Sequence
  Description of Artificial Sequence: Synthetic oligonucleotide
  Sense strand starting at position 202 of SEQ ID NO: 1879308
gcuuucagugaagaguagu

SEQ ID NO: 1897405 - RNA, 19 nt, Artificial Sequence
  Description of Artificial Sequence: Synthetic oligonucleotide
  Antisense strand to SEQ ID NO: 1897404
acuacucuucacugaaagc

SEQ ID NO: 1897406 - RNA, 19 nt, Artificial Sequence
  Description of Artificial Sequence: Synthetic oligonucleotide
  Sense strand starting at position 208 of SEQ ID NO: 1879308
agugaagaguaguuaagua

SEQ ID NO: 1897407 - RNA, 19 nt, Artificial Sequence
  Description of Artificial Sequence: Synthetic oligonucleotide
  Antisense strand to SEQ ID NO: 1897406
uacuuaacuacucuucacu

SEQ ID NO: 1897408 - RNA, 19 nt, Artificial Sequence
  Description of Artificial Sequence: Synthetic oligonucleotide
  Sense strand starting at position 212 of SEQ ID NO: 1879308
aagaguaguuaaguacaau

SEQ ID NO: 1897409 - RNA, 19 nt, Artificial Sequence
  Description of Artificial Sequence: Synthetic oligonucleotide
  Antisense strand to SEQ ID NO: 1897408
auuguacuuaacuacucuu

SEQ ID NO: 1897410 - RNA, 19 nt, Artificial Sequence
  Description of Artificial Sequence: Synthetic oligonucleotide
  Sense strand starting at position 215 of SEQ ID NO: 1879308
aguaguuaaguacaauagu

SEQ ID NO: 1897411 - RNA, 19 nt, Artificial Sequence
  Description of Artificial Sequence: Synthetic oligonucleotide
  Antisense strand to SEQ ID NO: 1897410
acuauuguacuuaacuacu

SEQ ID NO: 1897412 - RNA, 19 nt, Artificial Sequence
  Description of Artificial Sequence: Synthetic oligonucleotide
  Sense strand starting at position 254 of SEQ ID NO: 1879308
uuacaaagugauuggcacu

SEQ ID NO: 1897413 - RNA, 19 nt, Artificial Sequence
  Description of Artificial Sequence: Synthetic oligonucleotide
  Antisense strand to SEQ ID NO: 1897412
agugccaaucacuuuguaa

SEQ ID NO: 1897414 - RNA, 19 nt, Artificial Sequence
  Description of Artificial Sequence: Synthetic oligonucleotide
  Sense strand starting at position 314 of SEQ ID NO: 1879308
ccuguaguacuauaccuau

SEQ ID NO: 1897415 - RNA, 19 nt, Artificial Sequence
  Description of Artificial Sequence: Synthetic oligonucleotide
  Antisense strand to SEQ ID NO: 1897414
auagguauaguacuacagg

SEQ ID NO: 1897416 - RNA, 19 nt, Artificial Sequence
  Description of Artificial Sequence: Synthetic oligonucleotide
  Sense strand starting at position 437 of SEQ ID NO: 1879308
gaguacaaagucuaagguu

SEQ ID NO: 1897417 - RNA, 19 nt, Artificial Sequence
  Description of Artificial Sequence: Synthetic oligonucleotide
  Antisense strand to SEQ ID NO: 1897416
aaccuuagacuuuguacuc

SEQ ID NO: 1897418 - RNA, 19 nt, Artificial Sequence
  Description of Artificial Sequence: Synthetic oligonucleotide
  Sense strand starting at position 688 of SEQ ID NO: 1879308
cuuacaagguacuugaauu

SEQ ID NO: 1897419 - RNA, 19 nt, Artificial Sequence
  Description of Artificial Sequence: Synthetic oligonucleotide
  Antisense strand to SEQ ID NO: 1897418
aauucaaguaccuuguaag

SEQ ID NO: 1897420 - RNA, 19 nt, Artificial Sequence
  Description of Artificial Sequence: Synthetic oligonucleotide
  Sense strand starting at position 817 of SEQ ID NO: 1879308
cuuguuguagguuaauuaa

SEQ ID NO: 1897421 - RNA, 19 nt, Artificial Sequence
  Description of Artificial Sequence: Synthetic oligonucleotide
  Antisense strand to SEQ ID NO: 1897420
uuaauuaaccuacaacaag

SEQ ID NO: 1897422 - RNA, 19 nt, Artificial Sequence
  Description of Artificial Sequence: Synthetic oligonucleotide
  Sense strand starting at position 820 of SEQ ID NO: 1879308
guuguagguuaauuaagac

SEQ ID NO: 1897423 - RNA, 19 nt, Artificial Sequence
  Description of Artificial Sequence: Synthetic oligonucleotide
  Antisense strand to SEQ ID NO: 1897422
gucuuaauuaaccuacaac

SEQ ID NO: 1897424 - RNA, 19 nt, Artificial Sequence
  Description of Artificial Sequence: Synthetic oligonucleotide
  Sense strand starting at position 878 of SEQ ID NO: 1879308
gguugucuucugggaagga

SEQ ID NO: 1897425 - RNA, 19 nt, Artificial Sequence
  Description of Artificial Sequence: Synthetic oligonucleotide
  Antisense strand to SEQ ID NO: 1897424
uccuucccagaagacaacc

SEQ ID NO: 1897426 - RNA, 19 nt, Artificial Sequence
  Description of Artificial Sequence: Synthetic oligonucleotide
  Sense strand starting at position 1207 of SEQ ID NO: 1879308
cccagaagacuguguuacu

SEQ ID NO: 1897427 - RNA, 19 nt, Artificial Sequence
  Description of Artificial Sequence: Synthetic oligonucleotide
  Antisense strand to SEQ ID NO: 1897426
aguaacacagucuucuggg

SEQ ID NO: 1897428 - RNA, 19 nt, Artificial Sequence
  Description of Artificial Sequence: Synthetic oligonucleotide
  Sense strand starting at position 1208 of SEQ ID NO: 1879308
ccagaagacuguguuacuu

SEQ ID NO: 1897429 - RNA, 19 nt, Artificial Sequence
  Description of Artificial Sequence: Synthetic oligonucleotide
  Antisense strand to SEQ ID NO: 1897428
aaguaacacagucuucugg

SEQ ID NO: 1897430 - RNA, 19 nt, Artificial Sequence
  Description of Artificial Sequence: Synthetic oligonucleotide
  Sense strand starting at position 1212 of SEQ ID NO: 1879308
aagacuguguuacuuagua

SEQ ID NO: 1897431 - RNA, 19 nt, Artificial Sequence
  Description of Artificial Sequence: Synthetic oligonucleotide
  Antisense strand to SEQ ID NO: 1897430
uacuaaguaacacagucuu

SEQ ID NO: 1897432 - RNA, 19 nt, Artificial Sequence
  Description of Artificial Sequence: Synthetic oligonucleotide
  Sense strand starting at position 1465 of SEQ ID NO: 1879308
aacugagucucccuggaau

SEQ ID NO: 1897433 - RNA, 19 nt, Artificial Sequence
  Description of Artificial Sequence: Synthetic oligonucleotide
  Antisense strand to SEQ ID NO: 1897432
auuccagggagacucaguu

SEQ ID NO: 1897434 - RNA, 19 nt, Artificial Sequence
  Description of Artificial Sequence: Synthetic oligonucleotide
  Sense strand starting at position 1467 of SEQ ID NO: 1879308
cugagucucccuggaaucu

SEQ ID NO: 1897435 - RNA, 19 nt, Artificial Sequence
  Description of Artificial Sequence: Synthetic oligonucleotide
  Antisense strand to SEQ ID NO: 1897434
agauuccagggagacucag

SEQ ID NO: 1897436 - RNA, 19 nt, Artificial Sequence
  Description of Artificial Sequence: Synthetic oligonucleotide
  Sense strand starting at position 1535 of SEQ ID NO: 1879308
aaaggagacuugguuguca

SEQ ID NO: 1897437 - RNA, 19 nt, Artificial Sequence
  Description of Artificial Sequence: Synthetic oligonucleotide
  Antisense strand to SEQ ID NO: 1897436
ugacaaccaagucuccuuu

SEQ ID NO: 1897438 - RNA, 19 nt, Artificial Sequence
  Description of Artificial Sequence: Synthetic oligonucleotide
  Sense strand starting at position 1537 of SEQ ID NO: 1879308
aggagacuugguugucaag

SEQ ID NO: 1897439 - RNA, 19 nt, Artificial Sequence
  Description of Artificial Sequence: Synthetic oligonucleotide
  Antisense strand to SEQ ID NO: 1897438
cuugacaaccaagucuccu

SEQ ID NO: 1897440 - RNA, 19 nt, Artificial Sequence
  Description of Artificial Sequence: Synthetic oligonucleotide
  Sense strand starting at position 1852 of SEQ ID NO: 1879308
gguauuagacgcagccgaa

SEQ ID NO: 1897441 - RNA, 19 nt, Artificial Sequence
  Description of Artificial Sequence: Synthetic oligonucleotide
  Antisense strand to SEQ ID NO: 1897440
uucggcugcgucuaauacc

SEQ ID NO: 1897442 - RNA, 19 nt, Artificial Sequence
  Description of Artificial Sequence: Synthetic oligonucleotide
  Sense strand starting at position 2860 of SEQ ID NO: 1879308
cuccgaacccuugaaguua

SEQ ID NO: 1897443 - RNA, 19 nt, Artificial Sequence
  Description of Artificial Sequence: Synthetic oligonucleotide
  Antisense strand to SEQ ID NO: 1897442
uaacuucaaggguucggag

SEQ ID NO: 1897444 - RNA, 19 nt, Artificial Sequence
  Description of Artificial Sequence: Synthetic oligonucleotide
  Sense strand starting at position 2902 of SEQ ID NO: 1879308
uuggaagguuucucgaaga

SEQ ID NO: 1897445 - RNA, 19 nt, Artificial Sequence
  Description of Artificial Sequence: Synthetic oligonucleotide
  Antisense strand to SEQ ID NO: 1897444
ucuucgagaaaccuuccaa

SEQ ID NO: 1897446 - RNA, 19 nt, Artificial Sequence
  Description of Artificial Sequence: Synthetic oligonucleotide
  Sense strand starting at position 2907 of SEQ ID NO: 1879308
agguuucucgaagaaacgu

SEQ ID NO: 1897447 - RNA, 19 nt, Artificial Sequence
  Description of Artificial Sequence: Synthetic oligonucleotide
  Antisense strand to SEQ ID NO: 1897446
acguuucuucgagaaaccu

SEQ ID NO: 1897448 - RNA, 19 nt, Artificial Sequence
  Description of Artificial Sequence: Synthetic oligonucleotide
  Sense strand starting at position 3130 of SEQ ID NO: 1879308
auguguucuguggacacga

SEQ ID NO: 1897449 - RNA, 19 nt, Artificial Sequence
  Description of Artificial Sequence: Synthetic oligonucleotide
  Antisense strand to SEQ ID NO: 1897448
ucguguccacagaacacau

SEQ ID NO: 1897450 - RNA, 19 nt, Artificial Sequence
  Description of Artificial Sequence: Synthetic oligonucleotide
  Sense strand starting at position 3132 of SEQ ID NO: 1879308
guguucuguggacacgaau

SEQ ID NO: 1897451 - RNA, 19 nt, Artificial Sequence
  Description of Artificial Sequence: Synthetic oligonucleotide
  Antisense strand to SEQ ID NO: 1897450
auucguguccacagaacac

SEQ ID NO: 1897452 - RNA, 19 nt, Artificial Sequence
  Description of Artificial Sequence: Synthetic oligonucleotide
  Sense strand starting at position 3304 of SEQ ID NO: 1879308
gaguauuacggcuaaacuu

SEQ ID NO: 1897453 - RNA, 19 nt, Artificial Sequence
  Description of Artificial Sequence: Synthetic oligonucleotide
  Antisense strand to SEQ ID NO: 1897452
aaguuuagccguaauacuc

SEQ ID NO: 1897454 - RNA, 19 nt, Artificial Sequence
  Description of Artificial Sequence: Synthetic oligonucleotide
  Sense strand starting at position 3347 of SEQ ID NO: 1879308
auguuaaagccucagcaaa

SEQ ID NO: 1897455 - RNA, 19 nt, Artificial Sequence
  Description of Artificial Sequence: Synthetic oligonucleotide
  Antisense strand to SEQ ID NO: 1897454
uuugcugaggcuuuaacau

SEQ ID NO: 1897456 - RNA, 19 nt, Artificial Sequence
  Description of Artificial Sequence: Synthetic oligonucleotide
  Sense strand starting at position 3357 of SEQ ID NO: 1879308
cucagcaaacguuaggaaa

SEQ ID NO: 1897457 - RNA, 19 nt, Artificial Sequence
  Description of Artificial Sequence: Synthetic oligonucleotide
  Antisense strand to SEQ ID NO: 1897456
uuuccuaacguuugcugag

SEQ ID NO: 1897458 - RNA, 19 nt, Artificial Sequence
  Description of Artificial Sequence: Synthetic oligonucleotide
  Sense strand starting at position 3384 of SEQ ID NO: 1879308
gguucccauccucaaagua

SEQ ID NO: 1897459 - RNA, 19 nt, Artificial Sequence
  Description of Artificial Sequence: Synthetic oligonucleotide
  Antisense strand to SEQ ID NO: 1897458
uacuuugaggaugggaacc

SEQ ID NO: 1897460 - RNA, 19 nt, Artificial Sequence
  Description of Artificial Sequence: Synthetic oligonucleotide
  Sense strand starting at position 3416 of SEQ ID NO: 1879308
aauccaucuuuguuggagu

SEQ ID NO: 1897461 - RNA, 19 nt, Artificial Sequence
  Description of Artificial Sequence: Synthetic oligonucleotide
  Antisense strand to SEQ ID NO: 1897460
acuccaacaaagauggauu

SEQ ID NO: 1897462 - RNA, 19 nt, Artificial Sequence
  Description of Artificial Sequence: Synthetic oligonucleotide
  Sense strand starting at position 3534 of SEQ ID NO: 1879308
acuucuuucgcgguagugu

SEQ ID NO: 1897463 - RNA, 19 nt, Artificial Sequence
  Description of Artificial Sequence: Synthetic oligonucleotide
  Antisense strand to SEQ ID NO: 1897462
acacuaccgcgaaagaagu

SEQ ID NO: 1897464 - RNA, 19 nt, Artificial Sequence
  Description of Artificial Sequence: Synthetic oligonucleotide
  Sense strand starting at position 3552 of SEQ ID NO: 1879308
ugagaaacguagccuuaac

SEQ ID NO: 1897465 - RNA, 19 nt, Artificial Sequence
  Description of Artificial Sequence: Synthetic oligonucleotide
  Antisense strand to SEQ ID NO: 1897464
guuaaggcuacguuucuca

SEQ ID NO: 1897466 - RNA, 19 nt, Artificial Sequence
  Description of Artificial Sequence: Synthetic oligonucleotide
  Sense strand starting at position 3595 of SEQ ID NO: 1879308
augugaugguuucccaaag

SEQ ID NO: 1897467 - RNA, 19 nt, Artificial Sequence
  Description of Artificial Sequence: Synthetic oligonucleotide
  Antisense strand to SEQ ID NO: 1897466
cuuugggaaaccaucacau

SEQ ID NO: 1897468 - RNA, 19 nt, Artificial Sequence
  Description of Artificial Sequence: Synthetic oligonucleotide
  Sense strand starting at position 3632 of SEQ ID NO: 1879308
gugggcaggucauuaagau

SEQ ID NO: 1897469 - RNA, 19 nt, Artificial Sequence
  Description of Artificial Sequence: Synthetic oligonucleotide
  Antisense strand to SEQ ID NO: 1897468
aucuuaaugaccugcccac

SEQ ID NO: 1897470 - RNA, 19 nt, Artificial Sequence
  Description of Artificial Sequence: Synthetic oligonucleotide
  Sense strand starting at position 3633 of SEQ ID NO: 1879308
ugggcaggucauuaagaug

SEQ ID NO: 1897471 - RNA, 19 nt, Artificial Sequence
  Description of Artificial Sequence: Synthetic oligonucleotide
  Antisense strand to SEQ ID NO: 1897470
caucuuaaugaccugccca

SEQ ID NO: 1897472 - RNA, 19 nt, Artificial Sequence
  Description of Artificial Sequence: Synthetic oligonucleotide
  Sense strand starting at position 3647 of SEQ ID NO: 1879308
agaugccauuuagacgaaa

SEQ ID NO: 1897473 - RNA, 19 nt, Artificial Sequence
  Description of Artificial Sequence: Synthetic oligonucleotide
  Antisense strand to SEQ ID NO: 1897472
uuucgucuaaauggcaucu

SEQ ID NO: 1897474 - RNA, 19 nt, Artificial Sequence
  Description of Artificial Sequence: Synthetic oligonucleotide
  Sense strand starting at position 3855 of SEQ ID NO: 1879308
uguauacagcucuagucua

SEQ ID NO: 1897475 - RNA, 19 nt, Artificial Sequence
  Description of Artificial Sequence: Synthetic oligonucleotide
  Antisense strand to SEQ ID NO: 1897474
uagacuagagcuguauaca

SEQ ID NO: 1897476 - RNA, 19 nt, Artificial Sequence
  Description of Artificial Sequence: Synthetic oligonucleotide
  Sense strand starting at position 3860 of SEQ ID NO: 1879308
acagcucuagucuaggaua

SEQ ID NO: 1897477 - RNA, 19 nt, Artificial Sequence
  Description of Artificial Sequence: Synthetic oligonucleotide
  Antisense strand to SEQ ID NO: 1897476
uauccuagacuagagcugu

SEQ ID NO: 1897478 - RNA, 19 nt, Artificial Sequence
  Description of Artificial Sequence: Synthetic oligonucleotide
  Sense strand starting at position 3871 of SEQ ID NO: 1879308
cuaggauauuugcauuucu

SEQ ID NO: 1897479 - RNA, 19 nt, Artificial Sequence
  Description of Artificial Sequence: Synthetic oligonucleotide
  Antisense strand to SEQ ID NO: 1897478
agaaaugcaaauauccuag

SEQ ID NO: 1897480 - RNA, 19 nt, Artificial Sequence
  Description of Artificial Sequence: Synthetic oligonucleotide
  Sense strand starting at position 3932 of SEQ ID NO: 1879308
ugcuuuacucuggagugau

SEQ ID NO: 1897481 - RNA, 19 nt, Artificial Sequence
  Description of Artificial Sequence: Synthetic oligonucleotide
  Antisense strand to SEQ ID NO: 1897480
aucacuccagaguaaagca

SEQ ID NO: 1897482 - RNA, 19 nt, Artificial Sequence
  Description of Artificial Sequence: Synthetic oligonucleotide
  Sense strand starting at position 3935 of SEQ ID NO: 1879308
uuuacucuggagugauuaa

SEQ ID NO: 1897483 - RNA, 19 nt, Artificial Sequence
  Description of Artificial Sequence: Synthetic oligonucleotide
  Antisense strand to SEQ ID NO: 1897482
uuaaucacuccagaguaaa

SEQ ID NO: 1897484 - RNA, 19 nt, Artificial Sequence
  Description of Artificial Sequence: Synthetic oligonucleotide
  Sense strand starting at position 58 of SEQ ID NO: 1879309
ugauucuaauguccaaaug

SEQ ID NO: 1897485 - RNA, 19 nt, Artificial Sequence
  Description of Artificial Sequence: Synthetic oligonucleotide
  Antisense strand to SEQ ID NO: 1897484
cauuuggacauuagaauca

SEQ ID NO: 1897486 - RNA, 19 nt, Artificial Sequence
  Description of Artificial Sequence: Synthetic oligonucleotide
  Sense strand starting at position 86 of SEQ ID NO: 1879309
uugccaauggugcaauaaa

SEQ ID NO: 1897487 - RNA, 19 nt, Artificial Sequence
  Description of Artificial Sequence: Synthetic oligonucleotide
  Antisense strand to SEQ ID NO: 1897486
uuuauugcaccauuggcaa

SEQ ID NO: 1897488 - RNA, 19 nt, Artificial Sequence
  Description of Artificial Sequence: Synthetic oligonucleotide
  Sense strand starting at position 298 of SEQ ID NO: 1879309
cuugucaauuuguucucau

SEQ ID NO: 1897489 - RNA, 19 nt, Artificial Sequence
  Description of Artificial Sequence: Synthetic oligonucleotide
  Antisense strand to SEQ ID NO: 1897488
augagaacaaauugacaag

SEQ ID NO: 1897490 - RNA, 19 nt, Artificial Sequence
  Description of Artificial Sequence: Synthetic oligonucleotide
  Sense strand starting at position 299 of SEQ ID NO: 1879309
uugucaauuuguucucauc

SEQ ID NO: 1897491 - RNA, 19 nt, Artificial Sequence
  Description of Artificial Sequence: Synthetic oligonucleotide
  Antisense strand to SEQ ID NO: 1897490
gaugagaacaaauugacaa

SEQ ID NO: 1897492 - RNA, 19 nt, Artificial Sequence
  Description of Artificial Sequence: Synthetic oligonucleotide
  Sense strand starting at position 555 of SEQ ID NO: 1879309
aguggcauucuugauuauu

SEQ ID NO: 1897493 - RNA, 19 nt, Artificial Sequence
  Description of Artificial Sequence: Synthetic oligonucleotide
  Antisense strand to SEQ ID NO: 1897492
aauaaucaagaaugccacu

SEQ ID NO: 1897494 - RNA, 19 nt, Artificial Sequence
  Description of Artificial Sequence: Synthetic oligonucleotide
  Sense strand starting at position 603 of SEQ ID NO: 1879309
gcuuccugaauguggauaa

SEQ ID NO: 1897495 - RNA, 19 nt, Artificial Sequence
  Description of Artificial Sequence: Synthetic oligonucleotide
  Antisense strand to SEQ ID NO: 1897494
uuauccacauucaggaagc

SEQ ID NO: 1897496 - RNA, 19 nt, Artificial Sequence
  Description of Artificial Sequence: Synthetic oligonucleotide
  Sense strand starting at position 661 of SEQ ID NO: 1879309
uuguuaaagaguuggaaau

SEQ ID NO: 1897497 - RNA, 19 nt, Artificial Sequence
  Description of Artificial Sequence: Synthetic oligonucleotide
  Antisense strand to SEQ ID NO: 1897496
auuuccaacucuuuaacaa

SEQ ID NO: 1897498 - RNA, 19 nt, Artificial Sequence
  Description of Artificial Sequence: Synthetic oligonucleotide
  Sense strand starting at position 667 of SEQ ID NO: 1879309
aagaguuggaaauggguuu

SEQ ID NO: 1897499 - RNA, 19 nt, Artificial Sequence
  Description of Artificial Sequence: Synthetic oligonucleotide
  Antisense strand to SEQ ID NO: 1897498
aaacccauuuccaacucuu

SEQ ID NO: 1897500 - RNA, 19 nt, Artificial Sequence
  Description of Artificial Sequence: Synthetic oligonucleotide
  Sense strand starting at position 746 of SEQ ID NO: 1879309
ccaugagauuagucaaguu

SEQ ID NO: 1897501 - RNA, 19 nt, Artificial Sequence
  Description of Artificial Sequence: Synthetic oligonucleotide
  Antisense strand to SEQ ID NO: 1897500
aacuugacuaaucucaugg

SEQ ID NO: 1897502 - RNA, 19 nt, Artificial Sequence
  Description of Artificial Sequence: Synthetic oligonucleotide
  Sense strand starting at position 808 of SEQ ID NO: 1879309
ggccucugucuugaaacaa

SEQ ID NO: 1897503 - RNA, 19 nt, Artificial Sequence
  Description of Artificial Sequence: Synthetic oligonucleotide
  Antisense strand to SEQ ID NO: 1897502
uuguuucaagacagaggcc

SEQ ID NO: 1897504 - RNA, 19 nt, Artificial Sequence
  Description of Artificial Sequence: Synthetic oligonucleotide
  Sense strand starting at position 883 of SEQ ID NO: 1879309
gguaauggauuacuugauu

SEQ ID NO: 1897505 - RNA, 19 nt, Artificial Sequence
  Description of Artificial Sequence: Synthetic oligonucleotide
  Antisense strand to SEQ ID NO: 1897504
aaucaaguaauccauuacc

SEQ ID NO: 1897506 - RNA, 19 nt, Artificial Sequence
  Description of Artificial Sequence: Synthetic oligonucleotide
  Sense strand starting at position 892 of SEQ ID NO: 1879309
uuacuugauugacugggua

SEQ ID NO: 1897507 - RNA, 19 nt, Artificial Sequence
  Description of Artificial Sequence: Synthetic oligonucleotide
  Antisense strand to SEQ ID NO: 1897506
uacccagucaaucaaguaa

SEQ ID NO: 1897508 - RNA, 19 nt, Artificial Sequence
  Description of Artificial Sequence: Synthetic oligonucleotide
  Sense strand starting at position 895 of SEQ ID NO: 1879309
cuugauugacuggguauga

SEQ ID NO: 1897509 - RNA, 19 nt, Artificial Sequence
  Description of Artificial Sequence: Synthetic oligonucleotide
  Antisense strand to SEQ ID NO: 1897508
ucauacccagucaaucaag

SEQ ID NO: 1897510 - RNA, 19 nt, Artificial Sequence
  Description of Artificial Sequence: Synthetic oligonucleotide
  Sense strand starting at position 962 of SEQ ID NO: 1879309
ggcacagcucauuaggaua

SEQ ID NO: 1897511 - RNA, 19 nt, Artificial Sequence
  Description of Artificial Sequence: Synthetic oligonucleotide
  Antisense strand to SEQ ID NO: 1897510
uauccuaaugagcugugcc

SEQ ID NO: 1897512 - RNA, 19 nt, Artificial Sequence
  Description of Artificial Sequence: Synthetic oligonucleotide
  Sense strand starting at position 967 of SEQ ID NO: 1879309
agcucauuaggauaccauu

SEQ ID NO: 1897513 - RNA, 19 nt, Artificial Sequence
  Description of Artificial Sequence: Synthetic oligonucleotide
  Antisense strand to SEQ ID NO: 1897512
aaugguauccuaaugagcu

SEQ ID NO: 1897514 - RNA, 19 nt, Artificial Sequence
  Description of Artificial Sequence: Synthetic oligonucleotide
  Sense strand starting at position 976 of SEQ ID NO: 1879309
ggauaccauuauguuaauu

SEQ ID NO: 1897515 - RNA, 19 nt, Artificial Sequence
  Description of Artificial Sequence: Synthetic oligonucleotide
  Antisense strand to SEQ ID NO: 1897514
aauuaacauaaugguaucc

SEQ ID NO: 1897516 - RNA, 19 nt, Artificial Sequence
  Description of Artificial Sequence: Synthetic oligonucleotide
  Sense strand starting at position 1026 of SEQ ID NO: 1879309
gcuauaaugguacauugua

SEQ ID NO: 1897517 - RNA, 19 nt, Artificial Sequence
  Description of Artificial Sequence: Synthetic oligonucleotide
  Antisense strand to SEQ ID NO: 1897516
uacaauguaccauuauagc

SEQ ID NO: 1897518 - RNA, 19 nt, Artificial Sequence
  Description of Artificial Sequence: Synthetic oligonucleotide
  Sense strand starting at position 1317 of SEQ ID NO: 1879309
gggauuaacucgccaccaa

SEQ ID NO: 1897519 - RNA, 19 nt, Artificial Sequence
  Description of Artificial Sequence: Synthetic oligonucleotide
  Antisense strand to SEQ ID NO: 1897518
uugguggcgaguuaauccc

SEQ ID NO: 1897520 - RNA, 19 nt, Artificial Sequence
  Description of Artificial Sequence: Synthetic oligonucleotide
  Sense strand starting at position 1318 of SEQ ID NO: 1879309
ggauuaacucgccaccaau

SEQ ID NO: 1897521 - RNA, 19 nt, Artificial Sequence
  Description of Artificial Sequence: Synthetic oligonucleotide
  Antisense strand to SEQ ID NO: 1897520
auugguggcgaguuaaucc

SEQ ID NO: 1897522 - RNA, 19 nt, Artificial Sequence
  Description of Artificial Sequence: Synthetic oligonucleotide
  Sense strand starting at position 1456 of SEQ ID NO: 1879309
gggacaguaucguuaaaga

SEQ ID NO: 1897523 - RNA, 19 nt, Artificial Sequence
  Description of Artificial Sequence: Synthetic oligonucleotide
  Antisense strand to SEQ ID NO: 1897522
ucuuuaacgauacuguccc

SEQ ID NO: 1897524 - RNA, 19 nt, Artificial Sequence
  Description of Artificial Sequence: Synthetic oligonucleotide
  Sense strand starting at position 2108 of SEQ ID NO: 1879309
agggcuucucaguaaugga

SEQ ID NO: 1897525 - RNA, 19 nt, Artificial Sequence
  Description of Artificial Sequence: Synthetic oligonucleotide
  Antisense strand to SEQ ID NO: 1897524
uccauuacugagaagcccu

SEQ ID NO: 1897526 - RNA, 19 nt, Artificial Sequence
  Description of Artificial Sequence: Synthetic oligonucleotide
  Sense strand starting at position 2221 of SEQ ID NO: 1879309
auagauguaccaggcauau

SEQ ID NO: 1897527 - RNA, 19 nt, Artificial Sequence
  Description of Artificial Sequence: Synthetic oligonucleotide
  Antisense strand to SEQ ID NO: 1897526
auaugccugguacaucuau

SEQ ID NO: 1897528 - RNA, 19 nt, Artificial Sequence
  Description of Artificial Sequence: Synthetic oligonucleotide
  Sense strand starting at position 2279 of SEQ ID NO: 1879309
ugaguaaauagcuagagcu

SEQ ID NO: 1897529 - RNA, 19 nt, Artificial Sequence
  Description of Artificial Sequence: Synthetic oligonucleotide
  Antisense strand to SEQ ID NO: 1897528
agcucuagcuauuuacuca

SEQ ID NO: 1897530 - RNA, 19 nt, Artificial Sequence
  Description of Artificial Sequence: Synthetic oligonucleotide
  Sense strand starting at position 2281 of SEQ ID NO: 1879309
aguaaauagcuagagcuaa

SEQ ID NO: 1897531 - RNA, 19 nt, Artificial Sequence
  Description of Artificial Sequence: Synthetic oligonucleotide
  Antisense strand to SEQ ID NO: 1897530
uuagcucuagcuauuuacu

SEQ ID NO: 1897532 - RNA, 19 nt, Artificial Sequence
  Description of Artificial Sequence: Synthetic oligonucleotide
  Sense strand starting at position 2327 of SEQ ID NO: 1879309
cuuugaaggccuuaaccau

SEQ ID NO: 1897533 - RNA, 19 nt, Artificial Sequence
  Description of Artificial Sequence: Synthetic oligonucleotide
  Antisense strand to SEQ ID NO: 1897532
augguuaaggccuucaaag

SEQ ID NO: 1897534 - RNA, 19 nt, Artificial Sequence
  Description of Artificial Sequence: Synthetic oligonucleotide
  Sense strand starting at position 2334 of SEQ ID NO: 1879309
ggccuuaaccauggacagu

SEQ ID NO: 1897535 - RNA, 19 nt, Artificial Sequence
  Description of Artificial Sequence: Synthetic oligonucleotide
  Antisense strand to SEQ ID NO: 1897534
acuguccaugguuaaggcc

SEQ ID NO: 1897536 - RNA, 19 nt, Artificial Sequence
  Description of Artificial Sequence: Synthetic oligonucleotide
  Sense strand starting at position 2417 of SEQ ID NO: 1879309
acuuacuagcccuaggauu

SEQ ID NO: 1897537 - RNA, 19 nt, Artificial Sequence
  Description of Artificial Sequence: Synthetic oligonucleotide
  Antisense strand to SEQ ID NO: 1897536
aauccuagggcuaguaagu

SEQ ID NO: 1897538 - RNA, 19 nt, Artificial Sequence
  Description of Artificial Sequence: Synthetic oligonucleotide
  Sense strand starting at position 2877 of SEQ ID NO: 1879309
guguaagccacugaauaga

SEQ ID NO: 1897539 - RNA, 19 nt, Artificial Sequence
  Description of Artificial Sequence: Synthetic oligonucleotide
  Antisense strand to SEQ ID NO: 1897538
ucuauucaguggcuuacac

SEQ ID NO: 1897540 - RNA, 19 nt, Artificial Sequence
  Description of Artificial Sequence: Synthetic oligonucleotide
  Sense strand starting at position 2965 of SEQ ID NO: 1879309
acuggacugcuuuggaauu

SEQ ID NO: 1897541 - RNA, 19 nt, Artificial Sequence
  Description of Artificial Sequence: Synthetic oligonucleotide
  Antisense strand to SEQ ID NO: 1897540
aauuccaaagcaguccagu

SEQ ID NO: 1897542 - RNA, 19 nt, Artificial Sequence
  Description of Artificial Sequence: Synthetic oligonucleotide
  Sense strand starting at position 3026 of SEQ ID NO: 1879309
auuuaaucucucuguguau

SEQ ID NO: 1897543 - RNA, 19 nt, Artificial Sequence
  Description of Artificial Sequence: Synthetic oligonucleotide
  Antisense strand to SEQ ID NO: 1897542
auacacagagagauuaaau

SEQ ID NO: 1897544 - RNA, 19 nt, Artificial Sequence
  Description of Artificial Sequence: Synthetic oligonucleotide
  Sense strand starting at position 3076 of SEQ ID NO: 1879309
auaguuacuugggucauga

SEQ ID NO: 1897545 - RNA, 19 nt, Artificial Sequence
  Description of Artificial Sequence: Synthetic oligonucleotide
  Antisense strand to SEQ ID NO: 1897544
ucaugacccaaguaacuau

SEQ ID NO: 1897546 - RNA, 19 nt, Artificial Sequence
  Description of Artificial Sequence: Synthetic oligonucleotide
  Sense strand starting at position 3096 of SEQ ID NO: 1879309
gauuuagugaguuagccgu

SEQ ID NO: 1897547 - RNA, 19 nt, Artificial Sequence
  Description of Artificial Sequence: Synthetic oligonucleotide
  Antisense strand to SEQ ID NO: 1897546
acggcuaacucacuaaauc

SEQ ID NO: 1897548 - RNA, 19 nt, Artificial Sequence
  Description of Artificial Sequence: Synthetic oligonucleotide
  Sense strand starting at position 3146 of SEQ ID NO: 1879309
guaagcagucaaugaauga

SEQ ID NO: 1897549 - RNA, 19 nt, Artificial Sequence
  Description of Artificial Sequence: Synthetic oligonucleotide
  Antisense strand to SEQ ID NO: 1897548
ucauucauugacugcuuac

SEQ ID NO: 1897550 - RNA, 19 nt, Artificial Sequence
  Description of Artificial Sequence: Synthetic oligonucleotide
  Sense strand starting at position 3418 of SEQ ID NO: 1879309
cucugaguucucuauauau

SEQ ID NO: 1897551 - RNA, 19 nt, Artificial Sequence
  Description of Artificial Sequence: Synthetic oligonucleotide
  Antisense strand to SEQ ID NO: 1897550
auauauagagaacucagag

SEQ ID NO: 1897552 - RNA, 19 nt, Artificial Sequence
  Description of Artificial Sequence: Synthetic oligonucleotide
  Sense strand starting at position 3730 of SEQ ID NO: 1879309
aaucuaauuuguguuggca

SEQ ID NO: 1897553 - RNA, 19 nt, Artificial Sequence
  Description of Artificial Sequence: Synthetic oligonucleotide
  Antisense strand to SEQ ID NO: 1897552
ugccaacacaaauuagauu

SEQ ID NO: 1897554 - RNA, 19 nt, Artificial Sequence
  Description of Artificial Sequence: Synthetic oligonucleotide
  Sense strand starting at position 3733 of SEQ ID NO: 1879309
cuaauuuguguuggcagca

SEQ ID NO: 1897555 - RNA, 19 nt, Artificial Sequence
  Description of Artificial Sequence: Synthetic oligonucleotide
  Antisense strand to SEQ ID NO: 1897554
ugcugccaacacaaauuag

SEQ ID NO: 1897556 - RNA, 19 nt, Artificial Sequence
  Description of Artificial Sequence: Synthetic oligonucleotide
  Sense strand starting at position 3751 of SEQ ID NO: 1879309
agguaucuucuagaaguuu

SEQ ID NO: 1897557 - RNA, 19 nt, Artificial Sequence
  Description of Artificial Sequence: Synthetic oligonucleotide
  Antisense strand to SEQ ID NO: 1897556
aaacuucuagaagauaccu

SEQ ID NO: 1897558 - RNA, 19 nt, Artificial Sequence
  Description of Artificial Sequence: Synthetic oligonucleotide
  Sense strand starting at position 3915 of SEQ ID NO: 1879309
agucuaauaugagcaauua

SEQ ID NO: 1897559 - RNA, 19 nt, Artificial Sequence
  Description of Artificial Sequence: Synthetic oligonucleotide
  Antisense strand to SEQ ID NO: 1897558
uaauugcucauauuagacu

SEQ ID NO: 1897560 - RNA, 19 nt, Artificial Sequence
  Description of Artificial Sequence: Synthetic oligonucleotide
  Sense strand starting at position 3916 of SEQ ID NO: 1879309
gucuaauaugagcaauuau

SEQ ID NO: 1897561 - RNA, 19 nt, Artificial Sequence
  Description of Artificial Sequence: Synthetic oligonucleotide
  Antisense strand to SEQ ID NO: 1897560
auaauugcucauauuagac

SEQ ID NO: 1897562 - RNA, 19 nt, Artificial Sequence
  Description of Artificial Sequence: Synthetic oligonucleotide
  Sense strand starting at position 3946 of SEQ ID NO: 1879309
agauguaaagagugacacu

SEQ ID NO: 1897563 - RNA, 19 nt, Artificial Sequence
  Description of Artificial Sequence: Synthetic oligonucleotide
  Antisense strand to SEQ ID NO: 1897562
agugucacucuuuacaucu

SEQ ID NO: 1897564 - RNA, 19 nt, Artificial Sequence
  Description of Artificial Sequence: Synthetic oligonucleotide
  Sense strand starting at position 503 of SEQ ID NO: 1879310
agcucuuaggccuggaaag

SEQ ID NO: 1897565 - RNA, 19 nt, Artificial Sequence
  Description of Artificial Sequence: Synthetic oligonucleotide
  Antisense strand to SEQ ID NO: 1897564
cuuuccaggccuaagagcu

SEQ ID NO: 1897566 - RNA, 19 nt, Artificial Sequence
  Description of Artificial Sequence: Synthetic oligonucleotide
  Sense strand starting at position 649 of SEQ ID NO: 1879310
acgguuucgcaagauucua

SEQ ID NO: 1897567 - RNA, 19 nt, Artificial Sequence
  Description of Artificial Sequence: Synthetic oligonucleotide
  Antisense strand to SEQ ID NO: 1897566
uagaaucuugcgaaaccgu

SEQ ID NO: 1897568 - RNA, 19 nt, Artificial Sequence
  Description of Artificial Sequence: Synthetic oligonucleotide
  Sense strand starting at position 1098 of SEQ ID NO: 1879310
gaaucuaaguguccggaaa

SEQ ID NO: 1897569 - RNA, 19 nt, Artificial Sequence
  Description of Artificial Sequence: Synthetic oligonucleotide
  Antisense strand to SEQ ID NO: 1897568
uuuccggacacuuagauuc

SEQ ID NO: 1897570 - RNA, 19 nt, Artificial Sequence
  Description of Artificial Sequence: Synthetic oligonucleotide
  Sense strand starting at position 1099 of SEQ ID NO: 1879310
aaucuaaguguccggaaac

SEQ ID NO: 1897571 - RNA, 19 nt, Artificial Sequence
  Description of Artificial Sequence: Synthetic oligonucleotide
  Antisense strand to SEQ ID NO: 1897570
guuuccggacacuuagauu

SEQ ID NO: 1897572 - RNA, 19 nt, Artificial Sequence
  Description of Artificial Sequence: Synthetic oligonucleotide
  Sense strand starting at position 2456 of SEQ ID NO: 1879310
gucugacuucgggaggguu

SEQ ID NO: 1897573 - RNA, 19 nt, Artificial Sequence
  Description of Artificial Sequence: Synthetic oligonucleotide
  Antisense strand to SEQ ID NO: 1897572
aacccucccgaagucagac

SEQ ID NO: 1897574 - RNA, 19 nt, Artificial Sequence
  Description of Artificial Sequence: Synthetic oligonucleotide
  Sense strand starting at position 2787 of SEQ ID NO: 1879310
ucccgaaucaaacgguaaa

SEQ ID NO: 1897575 - RNA, 19 nt, Artificial Sequence
  Description of Artificial Sequence: Synthetic oligonucleotide
  Antisense strand to SEQ ID NO: 1897574
uuuaccguuugauucggga

SEQ ID NO: 1897576 - RNA, 19 nt, Artificial Sequence
  Description of Artificial Sequence: Synthetic oligonucleotide
  Sense strand starting at position 2881 of SEQ ID NO: 1879310
gaauaaauguugucguuga

SEQ ID NO: 1897577 - RNA, 19 nt, Artificial Sequence
  Description of Artificial Sequence: Synthetic oligonucleotide
  Antisense strand to SEQ ID NO: 1897576
ucaacgacaacauuuauuc

SEQ ID NO: 1897578 - RNA, 19 nt, Artificial Sequence
  Description of Artificial Sequence: Synthetic oligonucleotide
  Sense strand starting at position 2885 of SEQ ID NO: 1879310
aaauguugucguugauaca

SEQ ID NO: 1897579 - RNA, 19 nt, Artificial Sequence
  Description of Artificial Sequence: Synthetic oligonucleotide
  Antisense strand to SEQ ID NO: 1897578
uguaucaacgacaacauuu

SEQ ID NO: 1897580 - RNA, 19 nt, Artificial Sequence
  Description of Artificial Sequence: Synthetic oligonucleotide
  Sense strand starting at position 2886 of SEQ ID NO: 1879310
aauguugucguugauacau

SEQ ID NO: 1897581 - RNA, 19 nt, Artificial Sequence
  Description of Artificial Sequence: Synthetic oligonucleotide
  Antisense strand to SEQ ID NO: 1897580
auguaucaacgacaacauu

SEQ ID NO: 1897582 - RNA, 19 nt, Artificial Sequence
  Description of Artificial Sequence: Synthetic oligonucleotide
  Sense strand starting at position 2897 of SEQ ID NO: 1879310
ugauacaucuuauugagua

SEQ ID NO: 1897583 - RNA, 19 nt, Artificial Sequence
  Description of Artificial Sequence: Synthetic oligonucleotide
  Antisense strand to SEQ ID NO: 1897582
uacucaauaagauguauca

SEQ ID NO: 1897584 - RNA, 19 nt, Artificial Sequence
  Description of Artificial Sequence: Synthetic oligonucleotide
  Sense strand starting at position 2943 of SEQ ID NO: 1879310
gccuguguaccguaacaga

SEQ ID NO: 1897585 - RNA, 19 nt, Artificial Sequence
  Description of Artificial Sequence: Synthetic oligonucleotide
  Antisense strand to SEQ ID NO: 1897584
ucuguuacgguacacaggc

SEQ ID NO: 1897586 - RNA, 19 nt, Artificial Sequence
  Description of Artificial Sequence: Synthetic oligonucleotide
  Sense strand starting at position 2958 of SEQ ID NO: 1879310
cagauaggccuccgcauaa

SEQ ID NO: 1897587 - RNA, 19 nt, Artificial Sequence
  Description of Artificial Sequence: Synthetic oligonucleotide
  Antisense strand to SEQ ID NO: 1897586
uuaugcggaggccuaucug

SEQ ID NO: 1897588 - RNA, 19 nt, Artificial Sequence
  Description of Artificial Sequence: Synthetic oligonucleotide
  Sense strand starting at position 2991 of SEQ ID NO: 1879310
ugacgauuggcuuggacuu

SEQ ID NO: 1897589 - RNA, 19 nt, Artificial Sequence
  Description of Artificial Sequence: Synthetic oligonucleotide
  Antisense strand to SEQ ID NO: 1897588
aaguccaagccaaucguca

SEQ ID NO: 1897590 - RNA, 19 nt, Artificial Sequence
  Description of Artificial Sequence: Synthetic oligonucleotide
  Sense strand starting at position 3030 of SEQ ID NO: 1879310
auagcaaaucugugguugu

SEQ ID NO: 1897591 - RNA, 19 nt, Artificial Sequence
  Description of Artificial Sequence: Synthetic oligonucleotide
  Antisense strand to SEQ ID NO: 1897590
acaaccacagauuugcuau

SEQ ID NO: 1897592 - RNA, 19 nt, Artificial Sequence
  Description of Artificial Sequence: Synthetic oligonucleotide
  Sense strand starting at position 3057 of SEQ ID NO: 1879310
augacaguuuauuccgaua

SEQ ID NO: 1897593 - RNA, 19 nt, Artificial Sequence
  Description of Artificial Sequence: Synthetic oligonucleotide
  Antisense strand to SEQ ID NO: 1897592
uaucggaauaaacugucau

SEQ ID NO: 1897594 - RNA, 19 nt, Artificial Sequence
  Description of Artificial Sequence: Synthetic oligonucleotide
  Sense strand starting at position 3060 of SEQ ID NO: 1879310
acaguuuauuccgauauuu

SEQ ID NO: 1897595 - RNA, 19 nt, Artificial Sequence
  Description of Artificial Sequence: Synthetic oligonucleotide
  Antisense strand to SEQ ID NO: 1897594
aaauaucggaauaaacugu

SEQ ID NO: 1897596 - RNA, 19 nt, Artificial Sequence
  Description of Artificial Sequence: Synthetic oligonucleotide
  Sense strand starting at position 3118 of SEQ ID NO: 1879310
uuacuauguagugagugaa

SEQ ID NO: 1897597 - RNA, 19 nt, Artificial Sequence
  Description of Artificial Sequence: Synthetic oligonucleotide
  Antisense strand to SEQ ID NO: 1897596
uucacucacuacauaguaa

SEQ ID NO: 1897598 - RNA, 19 nt, Artificial Sequence
  Description of Artificial Sequence: Synthetic oligonucleotide
  Sense strand starting at position 3121 of SEQ ID NO: 1879310
cuauguagugagugaagga

SEQ ID NO: 1897599 - RNA, 19 nt, Artificial Sequence
  Description of Artificial Sequence: Synthetic oligonucleotide
  Antisense strand to SEQ ID NO: 1897598
uccuucacucacuacauag

SEQ ID NO: 1897600 - RNA, 19 nt, Artificial Sequence
  Description of Artificial Sequence: Synthetic oligonucleotide
  Sense strand starting at position 3143 of SEQ ID NO: 1879310
uauggagcguccucauuaa

SEQ ID NO: 1897601 - RNA, 19 nt, Artificial Sequence
  Description of Artificial Sequence: Synthetic oligonucleotide
  Antisense strand to SEQ ID NO: 1897600
uuaaugaggacgcuccaua

SEQ ID NO: 1897602 - RNA, 19 nt, Artificial Sequence
  Description of Artificial Sequence: Synthetic oligonucleotide
  Sense strand starting at position 3147 of SEQ ID NO: 1879310
gagcguccucauuaaugag

SEQ ID NO: 1897603 - RNA, 19 nt, Artificial Sequence
  Description of Artificial Sequence: Synthetic oligonucleotide
  Antisense strand to SEQ ID NO: 1897602
cucauuaaugaggacgcuc

SEQ ID NO: 1897604 - RNA, 19 nt, Artificial Sequence
  Description of Artificial Sequence: Synthetic oligonucleotide
  Sense strand starting at position 3197 of SEQ ID NO: 1879310
cuuugagccgcuuggauaa

SEQ ID NO: 1897605 - RNA, 19 nt, Artificial Sequence
  Description of Artificial Sequence: Synthetic oligonucleotide
  Antisense strand to SEQ ID NO: 1897604
uuauccaagcggcucaaag

SEQ ID NO: 1897606 - RNA, 19 nt, Artificial Sequence
  Description of Artificial Sequence: Synthetic oligonucleotide
  Sense strand starting at position 3258 of SEQ ID NO: 1879310
gaggaucauugauuguguu

SEQ ID NO: 1897607 - RNA, 19 nt, Artificial Sequence
  Description of Artificial Sequence: Synthetic oligonucleotide
  Antisense strand to SEQ ID NO: 1897606
aacacaaucaaugauccuc

SEQ ID NO: 1897608 - RNA, 19 nt, Artificial Sequence
  Description of Artificial Sequence: Synthetic oligonucleotide
  Sense strand starting at position 3502 of SEQ ID NO: 1879310
cucugugcccuaggaugaa

SEQ ID NO: 1897609 - RNA, 19 nt, Artificial Sequence
  Description of Artificial Sequence: Synthetic oligonucleotide
  Antisense strand to SEQ ID NO: 1897608
uucauccuagggcacagag

SEQ ID NO: 1897610 - RNA, 19 nt, Artificial Sequence
  Description of Artificial Sequence: Synthetic oligonucleotide
  Sense strand starting at position 3605 of SEQ ID NO: 1879310
uggcuucuccucgaguauc

SEQ ID NO: 1897611 - RNA, 19 nt, Artificial Sequence
  Description of Artificial Sequence: Synthetic oligonucleotide
  Antisense strand to SEQ ID NO: 1897610
gauacucgaggagaagcca

SEQ ID NO: 1897612 - RNA, 19 nt, Artificial Sequence
  Description of Artificial Sequence: Synthetic oligonucleotide
  Sense strand starting at position 3615 of SEQ ID NO: 1879310
ucgaguaucgucaguguuu

SEQ ID NO: 1897613 - RNA, 19 nt, Artificial Sequence
  Description of Artificial Sequence: Synthetic oligonucleotide
  Antisense strand to SEQ ID NO: 1897612
aaacacugacgauacucga

SEQ ID NO: 1897614 - RNA, 19 nt, Artificial Sequence
  Description of Artificial Sequence: Synthetic oligonucleotide
  Sense strand starting at position 3680 of SEQ ID NO: 1879310
cuuagaugugcucacuuua

SEQ ID NO: 1897615 - RNA, 19 nt, Artificial Sequence
  Description of Artificial Sequence: Synthetic oligonucleotide
  Antisense strand to SEQ ID NO: 1897614
uaaagugagcacaucuaag

SEQ ID NO: 1897616 - RNA, 19 nt, Artificial Sequence
  Description of Artificial Sequence: Synthetic oligonucleotide
  Sense strand starting at position 3706 of SEQ ID NO: 1879310
guggacuuucucuguaggu

SEQ ID NO: 1897617 - RNA, 19 nt, Artificial Sequence
  Description of Artificial Sequence: Synthetic oligonucleotide
  Antisense strand to SEQ ID NO: 1897616
accuacagagaaaguccac

SEQ ID NO: 1897618 - RNA, 19 nt, Artificial Sequence
  Description of Artificial Sequence: Synthetic oligonucleotide
  Sense strand starting at position 3708 of SEQ ID NO: 1879310
ggacuuucucuguaggucu

SEQ ID NO: 1897619 - RNA, 19 nt, Artificial Sequence
  Description of Artificial Sequence: Synthetic oligonucleotide
  Antisense strand to SEQ ID NO: 1897618
agaccuacagagaaagucc

SEQ ID NO: 1897620 - RNA, 19 nt, Artificial Sequence
  Description of Artificial Sequence: Synthetic oligonucleotide
  Sense strand starting at position 3719 of SEQ ID NO: 1879310
guaggucucugccugggaa

SEQ ID NO: 1897621 - RNA, 19 nt, Artificial Sequence
  Description of Artificial Sequence: Synthetic oligonucleotide
  Antisense strand to SEQ ID NO: 1897620
uucccaggcagagaccuac

SEQ ID NO: 1897622 - RNA, 19 nt, Artificial Sequence
  Description of Artificial Sequence: Synthetic oligonucleotide
  Sense strand starting at position 3720 of SEQ ID NO: 1879310
uaggucucugccugggaaa

SEQ ID NO: 1897623 - RNA, 19 nt, Artificial Sequence
  Description of Artificial Sequence: Synthetic oligonucleotide
  Antisense strand to SEQ ID NO: 1897622
uuucccaggcagagaccua

SEQ ID NO: 1897624 - RNA, 19 nt, Artificial Sequence
  Description of Artificial Sequence: Synthetic oligonucleotide
  Sense strand starting at position 3721 of SEQ ID NO: 1879310
aggucucugccugggaaau

SEQ ID NO: 1897625 - RNA, 19 nt, Artificial Sequence
  Description of Artificial Sequence: Synthetic oligonucleotide
  Antisense strand to SEQ ID NO: 1897624
auuucccaggcagagaccu

SEQ ID NO: 1897626 - RNA, 19 nt, Artificial Sequence
  Description of Artificial Sequence: Synthetic oligonucleotide
  Sense strand starting at position 3722 of SEQ ID NO: 1879310
ggucucugccugggaaauu

SEQ ID NO: 1897627 - RNA, 19 nt, Artificial Sequence
  Description of Artificial Sequence: Synthetic oligonucleotide
  Antisense strand to SEQ ID NO: 1897626
aauuucccaggcagagacc

SEQ ID NO: 1897628 - RNA, 19 nt, Artificial Sequence
  Description of Artificial Sequence: Synthetic oligonucleotide
  Sense strand starting at position 3734 of SEQ ID NO: 1879310
ggaaauucguaugcaccga

SEQ ID NO: 1897629 - RNA, 19 nt, Artificial Sequence
  Description of Artificial Sequence: Synthetic oligonucleotide
  Antisense strand to SEQ ID NO: 1897628
ucggugcauacgaauuucc

SEQ ID NO: 1897630 - RNA, 19 nt, Artificial Sequence
  Description of Artificial Sequence: Synthetic oligonucleotide
  Sense strand starting at position 3803 of SEQ ID NO: 1879310
cuagacgugucauuucuca

SEQ ID NO: 1897631 - RNA, 19 nt, Artificial Sequence
  Description of Artificial Sequence: Synthetic oligonucleotide
  Antisense strand to SEQ ID NO: 1897630
ugagaaaugacacgucuag

SEQ ID NO: 1897632 - RNA, 19 nt, Artificial Sequence
  Description of Artificial Sequence: Synthetic oligonucleotide
  Sense strand starting at position 3807 of SEQ ID NO: 1879310
acgugucauuucucauuau

SEQ ID NO: 1897633 - RNA, 19 nt, Artificial Sequence
  Description of Artificial Sequence: Synthetic oligonucleotide
  Antisense strand to SEQ ID NO: 1897632
auaaugagaaaugacacgu

SEQ ID NO: 1897634 - RNA, 19 nt, Artificial Sequence
  Description of Artificial Sequence: Synthetic oligonucleotide
  Sense strand starting at position 3810 of SEQ ID NO: 1879310
ugucauuucucauuaugca

SEQ ID NO: 1897635 - RNA, 19 nt, Artificial Sequence
  Description of Artificial Sequence: Synthetic oligonucleotide
  Antisense strand to SEQ ID NO: 1897634
ugcauaaugagaaaugaca

SEQ ID NO: 1897636 - RNA, 19 nt, Artificial Sequence
  Description of Artificial Sequence: Synthetic oligonucleotide
  Sense strand starting at position 3835 of SEQ ID NO: 1879310
agagacauugcaugcuuau

SEQ ID NO: 1897637 - RNA, 19 nt, Artificial Sequence
  Description of Artificial Sequence: Synthetic oligonucleotide
  Antisense strand to SEQ ID NO: 1897636
auaagcaugcaaugucucu

SEQ ID NO: 1897638 - RNA, 19 nt, Artificial Sequence
  Description of Artificial Sequence: Synthetic oligonucleotide
  Sense strand starting at position 3846 of SEQ ID NO: 1879310
augcuuauggcugggaguu

SEQ ID NO: 1897639 - RNA, 19 nt, Artificial Sequence
  Description of Artificial Sequence: Synthetic oligonucleotide
  Antisense strand to SEQ ID NO: 1897638
aacucccagccauaagcau

SEQ ID NO: 1897640 - RNA, 19 nt, Artificial Sequence
  Description of Artificial Sequence: Synthetic oligonucleotide
  Sense strand starting at position 3951 of SEQ ID NO: 1879310
gcggucuggcuugugugaa

SEQ ID NO: 1897641 - RNA, 19 nt, Artificial Sequence
  Description of Artificial Sequence: Synthetic oligonucleotide
  Antisense strand to SEQ ID NO: 1897640
uucacacaagccagaccgc

SEQ ID NO: 1897642 - RNA, 19 nt, Artificial Sequence
  Description of Artificial Sequence: Synthetic oligonucleotide
  Sense strand starting at position 3961 of SEQ ID NO: 1879310
uugugugaaugacuuucua

SEQ ID NO: 1897643 - RNA, 19 nt, Artificial Sequence
  Description of Artificial Sequence: Synthetic oligonucleotide
  Antisense strand to SEQ ID NO: 1897642
uagaaagucauucacacaa

SEQ ID NO: 1897644 - RNA, 19 nt, Artificial Sequence
  Description of Artificial Sequence: Synthetic oligonucleotide
  Sense strand starting at position 153 of SEQ ID NO: 1879311
ugcacuuauuccuuaguuu

SEQ ID NO: 1897645 - RNA, 19 nt, Artificial Sequence
  Description of Artificial Sequence: Synthetic oligonucleotide
  Antisense strand to SEQ ID NO: 1897644
aaacuaaggaauaagugca

SEQ ID NO: 1897646 - RNA, 19 nt, Artificial Sequence
  Description of Artificial Sequence: Synthetic oligonucleotide
  Sense strand starting at position 154 of SEQ ID NO: 1879311
gcacuuauuccuuaguuua

SEQ ID NO: 1897647 - RNA, 19 nt, Artificial Sequence
  Description of Artificial Sequence: Synthetic oligonucleotide
  Antisense strand to SEQ ID NO: 1897646
uaaacuaaggaauaagugc

SEQ ID NO: 1897648 - RNA, 19 nt, Artificial Sequence
  Description of Artificial Sequence: Synthetic oligonucleotide
  Sense strand starting at position 156 of SEQ ID NO: 1879311
acuuauuccuuaguuuaga

SEQ ID NO: 1897649 - RNA, 19 nt, Artificial Sequence
  Description of Artificial Sequence: Synthetic oligonucleotide
  Antisense strand to SEQ ID NO: 1897648
ucuaaacuaaggaauaagu

SEQ ID NO: 1897650 - RNA, 19 nt, Artificial Sequence
  Description of Artificial Sequence: Synthetic oligonucleotide
  Sense strand starting at position 196 of SEQ ID NO: 1879311
ccgagagaugccugauaua

SEQ ID NO: 1897651 - RNA, 19 nt, Artificial Sequence
  Description of Artificial Sequence: Synthetic oligonucleotide
  Antisense strand to SEQ ID NO: 1897650
uauaucaggcaucucucgg

SEQ ID NO: 1897652 - RNA, 19 nt, Artificial Sequence
  Description of Artificial Sequence: Synthetic oligonucleotide
  Sense strand starting at position 199 of SEQ ID NO: 1879311
agagaugccugauauauuu

SEQ ID NO: 1897653 - RNA, 19 nt, Artificial Sequence
  Description of Artificial Sequence: Synthetic oligonucleotide
  Antisense strand to SEQ ID NO: 1897652
aaauauaucaggcaucucu

SEQ ID NO: 1897654 - RNA, 19 nt, Artificial Sequence
  Description of Artificial Sequence: Synthetic oligonucleotide
  Sense strand starting at position 296 of SEQ ID NO: 1879311
agauuaaaugcaugguaag

SEQ ID NO: 1897655 - RNA, 19 nt, Artificial Sequence
  Description of Artificial Sequence: Synthetic oligonucleotide
  Antisense strand to SEQ ID NO: 1897654
cuuaccaugcauuuaaucu

SEQ ID NO: 1897656 - RNA, 19 nt, Artificial Sequence
  Description of Artificial Sequence: Synthetic oligonucleotide
  Sense strand starting at position 297 of SEQ ID NO: 1879311
gauuaaaugcaugguaaga

SEQ ID NO: 1897657 - RNA, 19 nt, Artificial Sequence
  Description of Artificial Sequence: Synthetic oligonucleotide
  Antisense strand to SEQ ID NO: 1897656
ucuuaccaugcauuuaauc

SEQ ID NO: 1897658 - RNA, 19 nt, Artificial Sequence
  Description of Artificial Sequence: Synthetic oligonucleotide
  Sense strand starting at position 355 of SEQ ID NO: 1879311
auaacaaacucuuuggagu

SEQ ID NO: 1897659 - RNA, 19 nt, Artificial Sequence
  Description of Artificial Sequence: Synthetic oligonucleotide
  Antisense strand to SEQ ID NO: 1897658
acuccaaagaguuuguuau

SEQ ID NO: 1897660 - RNA, 19 nt, Artificial Sequence
  Description of Artificial Sequence: Synthetic oligonucleotide
  Sense strand starting at position 439 of SEQ ID NO: 1879311
ucucuaguuccaggaagac

SEQ ID NO: 1897661 - RNA, 19 nt, Artificial Sequence
  Description of Artificial Sequence: Synthetic oligonucleotide
  Antisense strand to SEQ ID NO: 1897660
gucuuccuggaacuagaga

SEQ ID NO: 1897662 - RNA, 19 nt, Artificial Sequence
  Description of Artificial Sequence: Synthetic oligonucleotide
  Sense strand starting at position 462 of SEQ ID NO: 1879311
aggcuacugugcucuggau

SEQ ID NO: 1897663 - RNA, 19 nt, Artificial Sequence
  Description of Artificial Sequence: Synthetic oligonucleotide
  Antisense strand to SEQ ID NO: 1897662
auccagagcacaguagccu

SEQ ID NO: 1897664 - RNA, 19 nt, Artificial Sequence
  Description of Artificial Sequence: Synthetic oligonucleotide
  Sense strand starting at position 563 of SEQ ID NO: 1879311
ccuggaacccacugaauau

SEQ ID NO: 1897665 - RNA, 19 nt, Artificial Sequence
  Description of Artificial Sequence: Synthetic oligonucleotide
  Antisense strand to SEQ ID NO: 1897664
auauucaguggguuccagg

SEQ ID NO: 1897666 - RNA, 19 nt, Artificial Sequence
  Description of Artificial Sequence: Synthetic oligonucleotide
  Sense strand starting at position 576 of SEQ ID NO: 1879311
gaauaugcauguccaguaa

SEQ ID NO: 1897667 - RNA, 19 nt, Artificial Sequence
  Description of Artificial Sequence: Synthetic oligonucleotide
  Antisense strand to SEQ ID NO: 1897666
uuacuggacaugcauauuc

SEQ ID NO: 1897668 - RNA, 19 nt, Artificial Sequence
  Description of Artificial Sequence: Synthetic oligonucleotide
  Sense strand starting at position 580 of SEQ ID NO: 1879311
augcauguccaguaacuau

SEQ ID NO: 1897669 - RNA, 19 nt, Artificial Sequence
  Description of Artificial Sequence: Synthetic oligonucleotide
  Antisense strand to SEQ ID NO: 1897668
auaguuacuggacaugcau

SEQ ID NO: 1897670 - RNA, 19 nt, Artificial Sequence
  Description of Artificial Sequence: Synthetic oligonucleotide
  Sense strand starting at position 601 of SEQ ID NO: 1879311
acuacauguguuggugcaa

SEQ ID NO: 1897671 - RNA, 19 nt, Artificial Sequence
  Description of Artificial Sequence: Synthetic oligonucleotide
  Antisense strand to SEQ ID NO: 1897670
uugcaccaacacauguagu

SEQ ID NO: 1897672 - RNA, 19 nt, Artificial Sequence
  Description of Artificial Sequence: Synthetic oligonucleotide
  Sense strand starting at position 637 of SEQ ID NO: 1879311
ccggaucugcuccaucaua

SEQ ID NO: 1897673 - RNA, 19 nt, Artificial Sequence
  Description of Artificial Sequence: Synthetic oligonucleotide
  Antisense strand to SEQ ID NO: 1897672
uaugauggagcagauccgg

SEQ ID NO: 1897674 - RNA, 19 nt, Artificial Sequence
  Description of Artificial Sequence: Synthetic oligonucleotide
  Sense strand starting at position 1065 of SEQ ID NO: 1879311
gcauguuaaagugaguaac

SEQ ID NO: 1897675 - RNA, 19 nt, Artificial Sequence
  Description of Artificial Sequence: Synthetic oligonucleotide
  Antisense strand to SEQ ID NO: 1897674
guuacucacuuuaacaugc

SEQ ID NO: 1897676 - RNA, 19 nt, Artificial Sequence
  Description of Artificial Sequence: Synthetic oligonucleotide
  Sense strand starting at position 1067 of SEQ ID NO: 1879311
auguuaaagugaguaacua

SEQ ID NO: 1897677 - RNA, 19 nt, Artificial Sequence
  Description of Artificial Sequence: Synthetic oligonucleotide
  Antisense strand to SEQ ID NO: 1897676
uaguuacucacuuuaacau

SEQ ID NO: 1897678 - RNA, 19 nt, Artificial Sequence
  Description of Artificial Sequence: Synthetic oligonucleotide
  Sense strand starting at position 1196 of SEQ ID NO: 1879311
ccaccaagucugcggaauu

SEQ ID NO: 1897679 - RNA, 19 nt, Artificial Sequence
  Description of Artificial Sequence: Synthetic oligonucleotide
  Antisense strand to SEQ ID NO: 1897678
aauuccgcagacuuggugg

SEQ ID NO: 1897680 - RNA, 19 nt, Artificial Sequence
  Description of Artificial Sequence: Synthetic oligonucleotide
  Sense strand starting at position 1206 of SEQ ID NO: 1879311
ugcggaauuguccagaugu

SEQ ID NO: 1897681 - RNA, 19 nt, Artificial Sequence
  Description of Artificial Sequence: Synthetic oligonucleotide
  Antisense strand to SEQ ID NO: 1897680
acaucuggacaauuccgca

SEQ ID NO: 1897682 - RNA, 19 nt, Artificial Sequence
  Description of Artificial Sequence: Synthetic oligonucleotide
  Sense strand starting at position 1644 of SEQ ID NO: 1879311
agcacauuccacgauuaau

SEQ ID NO: 1897683 - RNA, 19 nt, Artificial Sequence
  Description of Artificial Sequence: Synthetic oligonucleotide
  Antisense strand to SEQ ID NO: 1897682
auuaaucguggaaugugcu

SEQ ID NO: 1897684 - RNA, 19 nt, Artificial Sequence
  Description of Artificial Sequence: Synthetic oligonucleotide
  Sense strand starting at position 1709 of SEQ ID NO: 1879311
gggaguuccuccuccugca

SEQ ID NO: 1897685 - RNA, 19 nt, Artificial Sequence
  Description of Artificial Sequence: Synthetic oligonucleotide
  Antisense strand to SEQ ID NO: 1897684
ugcaggaggaggaacuccc

SEQ ID NO: 1897686 - RNA, 19 nt, Artificial Sequence
  Description of Artificial Sequence: Synthetic oligonucleotide
  Sense strand starting at position 1930 of SEQ ID NO: 1879311
cauccuuccgggcaggaaa

SEQ ID NO: 1897687 - RNA, 19 nt, Artificial Sequence
  Description of Artificial Sequence: Synthetic oligonucleotide
  Antisense strand to SEQ ID NO: 1897686
uuuccugcccggaaggaug

SEQ ID NO: 1897688 - RNA, 19 nt, Artificial Sequence
  Description of Artificial Sequence: Synthetic oligonucleotide
  Sense strand starting at position 3059 of SEQ ID NO: 1879311
acuggagugguaggugaaa

SEQ ID NO: 1897689 - RNA, 19 nt, Artificial Sequence
  Description of Artificial Sequence: Synthetic oligonucleotide
  Antisense strand to SEQ ID NO: 1897688
uuucaccuaccacuccagu

SEQ ID NO: 1897690 - RNA, 19 nt, Artificial Sequence
  Description of Artificial Sequence: Synthetic oligonucleotide
  Sense strand starting at position 3061 of SEQ ID NO: 1879311
uggagugguaggugaaagu

SEQ ID NO: 1897691 - RNA, 19 nt, Artificial Sequence
  Description of Artificial Sequence: Synthetic oligonucleotide
  Antisense strand to SEQ ID NO: 1897690
acuuucaccuaccacucca

SEQ ID NO: 1897692 - RNA, 19 nt, Artificial Sequence
  Description of Artificial Sequence: Synthetic oligonucleotide
  Sense strand starting at position 3101 of SEQ ID NO: 1879311
aaagucauaggccgugaga

SEQ ID NO: 1897693 - RNA, 19 nt, Artificial Sequence
  Description of Artificial Sequence: Synthetic oligonucleotide
  Antisense strand to SEQ ID NO: 1897692
ucucacggccuaugacuuu

SEQ ID NO: 1897694 - RNA, 19 nt, Artificial Sequence
  Description of Artificial Sequence: Synthetic oligonucleotide
  Sense strand starting at position 3103 of SEQ ID NO: 1879311
agucauaggccgugagaac

SEQ ID NO: 1897695 - RNA, 19 nt, Artificial Sequence
  Description of Artificial Sequence: Synthetic oligonucleotide
  Antisense strand to SEQ ID NO: 1897694
guucucacggccuaugacu

SEQ ID NO: 1897696 - RNA, 19 nt, Artificial Sequence
  Description of Artificial Sequence: Synthetic oligonucleotide
  Sense strand starting at position 3104 of SEQ ID NO: 1879311
gucauaggccgugagaacu

SEQ ID NO: 1897697 - RNA, 19 nt, Artificial Sequence
  Description of Artificial Sequence: Synthetic oligonucleotide
  Antisense strand to SEQ ID NO: 1897696
aguucucacggccuaugac

SEQ ID NO: 1897698 - RNA, 19 nt, Artificial Sequence
  Description of Artificial Sequence: Synthetic oligonucleotide
  Sense strand starting at position 3115 of SEQ ID NO: 1879311
ugagaacuauggccuguau

SEQ ID NO: 1897699 - RNA, 19 nt, Artificial Sequence
  Description of Artificial Sequence: Synthetic oligonucleotide
  Antisense strand to SEQ ID NO: 1897698
auacaggccauaguucuca

SEQ ID NO: 1897700 - RNA, 19 nt, Artificial Sequence
  Description of Artificial Sequence: Synthetic oligonucleotide
  Sense strand starting at position 3119 of SEQ ID NO: 1879311
aacuauggccuguauggau

SEQ ID NO: 1897701 - RNA, 19 nt, Artificial Sequence
  Description of Artificial Sequence: Synthetic oligonucleotide
  Antisense strand to SEQ ID NO: 1897700
auccauacaggccauaguu

SEQ ID NO: 1897702 - RNA, 19 nt, Artificial Sequence
  Description of Artificial Sequence: Synthetic oligonucleotide
  Sense strand starting at position 3170 of SEQ ID NO: 1879311
aggagaugaagccguugaa

SEQ ID NO: 1897703 - RNA, 19 nt, Artificial Sequence
  Description of Artificial Sequence: Synthetic oligonucleotide
  Antisense strand to SEQ ID NO: 1897702
uucaacggcuucaucuccu

SEQ ID NO: 1897704 - RNA, 19 nt, Artificial Sequence
  Description of Artificial Sequence: Synthetic oligonucleotide
  Sense strand starting at position 3173 of SEQ ID NO: 1879311
agaugaagccguugaauag

SEQ ID NO: 1897705 - RNA, 19 nt, Artificial Sequence
  Description of Artificial Sequence: Synthetic oligonucleotide
  Antisense strand to SEQ ID NO: 1897704
cuauucaacggcuucaucu

SEQ ID NO: 1897706 - RNA, 19 nt, Artificial Sequence
  Description of Artificial Sequence: Synthetic oligonucleotide
  Sense strand starting at position 3202 of SEQ ID NO: 1879311
uggauugaagugggcuaua

SEQ ID NO: 1897707 - RNA, 19 nt, Artificial Sequence
  Description of Artificial Sequence: Synthetic oligonucleotide
  Antisense strand to SEQ ID NO: 1897706
uauagcccacuucaaucca

SEQ ID NO: 1897708 - RNA, 19 nt, Artificial Sequence
  Description of Artificial Sequence: Synthetic oligonucleotide
  Sense strand starting at position 3222 of SEQ ID NO: 1879311
auuucuuuguaaggacaaa

SEQ ID NO: 1897709 - RNA, 19 nt, Artificial Sequence
  Description of Artificial Sequence: Synthetic oligonucleotide
  Antisense strand to SEQ ID NO: 1897708
uuuguccuuacaaagaaau

SEQ ID NO: 1897710 - RNA, 19 nt, Artificial Sequence
  Description of Artificial Sequence: Synthetic oligonucleotide
  Sense strand starting at position 3256 of SEQ ID NO: 1879311
uugucaucuugcuuugaaa

SEQ ID NO: 1897711 - RNA, 19 nt, Artificial Sequence
  Description of Artificial Sequence: Synthetic oligonucleotide
  Antisense strand to SEQ ID NO: 1897710
uuucaaagcaagaugacaa

SEQ ID NO: 1897712 - RNA, 19 nt, Artificial Sequence
  Description of Artificial Sequence: Synthetic oligonucleotide
  Sense strand starting at position 3661 of SEQ ID NO: 1879311
uugucaaugcaguaacgaa

SEQ ID NO: 1897713 - RNA, 19 nt, Artificial Sequence
  Description of Artificial Sequence: Synthetic oligonucleotide
  Antisense strand to SEQ ID NO: 1897712
uucguuacugcauugacaa

SEQ ID NO: 1897714 - RNA, 19 nt, Artificial Sequence
  Description of Artificial Sequence: Synthetic oligonucleotide
  Sense strand starting at position 3707 of SEQ ID NO: 1879311
caguguauuugugaaagga

SEQ ID NO: 1897715 - RNA, 19 nt, Artificial Sequence
  Description of Artificial Sequence: Synthetic oligonucleotide
  Antisense strand to SEQ ID NO: 1897714
uccuuucacaaauacacug

SEQ ID NO: 1897716 - RNA, 19 nt, Artificial Sequence
  Description of Artificial Sequence: Synthetic oligonucleotide
  Sense strand starting at position 3733 of SEQ ID NO: 1879311
ggguucugggaagauuguu

SEQ ID NO: 1897717 - RNA, 19 nt, Artificial Sequence
  Description of Artificial Sequence: Synthetic oligonucleotide
  Antisense strand to SEQ ID NO: 1897716
aacaaucuucccagaaccc

SEQ ID NO: 1897718 - RNA, 19 nt, Artificial Sequence
  Description of Artificial Sequence: Synthetic oligonucleotide
  Sense strand starting at position 3738 of SEQ ID NO: 1879311
cugggaagauuguuuccau

SEQ ID NO: 1897719 - RNA, 19 nt, Artificial Sequence
  Description of Artificial Sequence: Synthetic oligonucleotide
  Antisense strand to SEQ ID NO: 1897718
auggaaacaaucuucccag

SEQ ID NO: 1897720 - RNA, 19 nt, Artificial Sequence
  Description of Artificial Sequence: Synthetic oligonucleotide
  Sense strand starting at position 3739 of SEQ ID NO: 1879311
ugggaagauuguuuccauu

SEQ ID NO: 1897721 - RNA, 19 nt, Artificial Sequence
  Description of Artificial Sequence: Synthetic oligonucleotide
  Antisense strand to SEQ ID NO: 1897720
aauggaaacaaucuuccca

SEQ ID NO: 1897722 - RNA, 19 nt, Artificial Sequence
  Description of Artificial Sequence: Synthetic oligonucleotide
  Sense strand starting at position 3758 of SEQ ID NO: 1879311
uugagaggucauugugaac

SEQ ID NO: 1897723 - RNA, 19 nt, Artificial Sequence
  Description of Artificial Sequence: Synthetic oligonucleotide
  Antisense strand to SEQ ID NO: 1897722
guucacaaugaccucucaa

SEQ ID NO: 1897724 - RNA, 19 nt, Artificial Sequence
  Description of Artificial Sequence: Synthetic oligonucleotide
  Sense strand starting at position 22 of SEQ ID NO: 1879312
aaauuucugccgugcaaca

SEQ ID NO: 1897725 - RNA, 19 nt, Artificial Sequence
  Description of Artificial Sequence: Synthetic oligonucleotide
  Antisense strand to SEQ ID NO: 1897724
uguugcacggcagaaauuu

SEQ ID NO: 1897726 - RNA, 19 nt, Artificial Sequence
  Description of Artificial Sequence: Synthetic oligonucleotide
  Sense strand starting at position 98 of SEQ ID NO: 1879312
agaagagguucggcuauca

SEQ ID NO: 1897727 - RNA, 19 nt, Artificial Sequence
  Description of Artificial Sequence: Synthetic oligonucleotide
  Antisense strand to SEQ ID NO: 1897726
ugauagccgaaccucuucu

SEQ ID NO: 1897728 - RNA, 19 nt, Artificial Sequence
  Description of Artificial Sequence: Synthetic oligonucleotide
  Sense strand starting at position 129 of SEQ ID NO: 1879312
cccauuugcuaucaaagga

SEQ ID NO: 1897729 - RNA, 19 nt, Artificial Sequence
  Description of Artificial Sequence: Synthetic oligonucleotide
  Antisense strand to SEQ ID NO: 1897728
uccuuugauagcaaauggg

SEQ ID NO: 1897730 - RNA, 19 nt, Artificial Sequence
  Description of Artificial Sequence: Synthetic oligonucleotide
  Sense strand starting at position 221 of SEQ ID NO: 1879312
uugucaucccaguacuuag

SEQ ID NO: 1897731 - RNA, 19 nt, Artificial Sequence
  Description of Artificial Sequence: Synthetic oligonucleotide
  Antisense strand to SEQ ID NO: 1897730
cuaaguacugggaugacaa

SEQ ID NO: 1897732 - RNA, 19 nt, Artificial Sequence
  Description of Artificial Sequence: Synthetic oligonucleotide
  Sense strand starting at position 251 of SEQ ID NO: 1879312
agaauagaugcucaagcau

SEQ ID NO: 1897733 - RNA, 19 nt, Artificial Sequence
  Description of Artificial Sequence: Synthetic oligonucleotide
  Antisense strand to SEQ ID NO: 1897732
augcuugagcaucuauucu

SEQ ID NO: 1897734 - RNA, 19 nt, Artificial Sequence
  Description of Artificial Sequence: Synthetic oligonucleotide
  Sense strand starting at position 504 of SEQ ID NO: 1879312
cuaaguuagcacugauaua

SEQ ID NO: 1897735 - RNA, 19 nt, Artificial Sequence
  Description of Artificial Sequence: Synthetic oligonucleotide
  Antisense strand to SEQ ID NO: 1897734
uauaucagugcuaacuuag

SEQ ID NO: 1897736 - RNA, 19 nt, Artificial Sequence
  Description of Artificial Sequence: Synthetic oligonucleotide
  Sense strand starting at position 623 of SEQ ID NO: 1879312
auguaucaucgacaacuga

SEQ ID NO: 1897737 - RNA, 19 nt, Artificial Sequence
  Description of Artificial Sequence: Synthetic oligonucleotide
  Antisense strand to SEQ ID NO: 1897736
ucaguugucgaugauacau

SEQ ID NO: 1897738 - RNA, 19 nt, Artificial Sequence
  Description of Artificial Sequence: Synthetic oligonucleotide
  Sense strand starting at position 630 of SEQ ID NO: 1879312
aucgacaacugauuacaau

SEQ ID NO: 1897739 - RNA, 19 nt, Artificial Sequence
  Description of Artificial Sequence: Synthetic oligonucleotide
  Antisense strand to SEQ ID NO: 1897738
auuguaaucaguugucgau

SEQ ID NO: 1897740 - RNA, 19 nt, Artificial Sequence
  Description of Artificial Sequence: Synthetic oligonucleotide
  Sense strand starting at position 642 of SEQ ID NO: 1879312
uuacaauggcugggaaauc

SEQ ID NO: 1897741 - RNA, 19 nt, Artificial Sequence
  Description of Artificial Sequence: Synthetic oligonucleotide
  Antisense strand to SEQ ID NO: 1897740
gauuucccagccauuguaa

SEQ ID NO: 1897742 - RNA, 19 nt, Artificial Sequence
  Description of Artificial Sequence: Synthetic oligonucleotide
  Sense strand starting at position 684 of SEQ ID NO: 1879312
cuccaaacuuggcuuugaa

SEQ ID NO: 1897743 - RNA, 19 nt, Artificial Sequence
  Description of Artificial Sequence: Synthetic oligonucleotide
  Antisense strand to SEQ ID NO: 1897742
uucaaagccaaguuuggag

SEQ ID NO: 1897744 - RNA, 19 nt, Artificial Sequence
  Description of Artificial Sequence: Synthetic oligonucleotide
  Sense strand starting at position 716 of SEQ ID NO: 1879312
auguguuuacaaggacuau

SEQ ID NO: 1897745 - RNA, 19 nt, Artificial Sequence
  Description of Artificial Sequence: Synthetic oligonucleotide
  Antisense strand to SEQ ID NO: 1897744
auaguccuuguaaacacau

SEQ ID NO: 1897746 - RNA, 19 nt, Artificial Sequence
  Description of Artificial Sequence: Synthetic oligonucleotide
  Sense strand starting at position 896 of SEQ ID NO: 1879312
cucugcauuugacaaauga

SEQ ID NO: 1897747 - RNA, 19 nt, Artificial Sequence
  Description of Artificial Sequence: Synthetic oligonucleotide
  Antisense strand to SEQ ID NO: 1897746
ucauuugucaaaugcagag

SEQ ID NO: 1897748 - RNA, 19 nt, Artificial Sequence
  Description of Artificial Sequence: Synthetic oligonucleotide
  Sense strand starting at position 2010 of SEQ ID NO: 1879312
guucucgaaauguggaaga

SEQ ID NO: 1897749 - RNA, 19 nt, Artificial Sequence
  Description of Artificial Sequence: Synthetic oligonucleotide
  Antisense strand to SEQ ID NO: 1897748
ucuuccacauuucgagaac

SEQ ID NO: 1897750 - RNA, 19 nt, Artificial Sequence
  Description of Artificial Sequence: Synthetic oligonucleotide
  Sense strand starting at position 2023 of SEQ ID NO: 1879312
ggaagagaauggcauuuaa

SEQ ID NO: 1897751 - RNA, 19 nt, Artificial Sequence
  Description of Artificial Sequence: Synthetic oligonucleotide
  Antisense strand to SEQ ID NO: 1897750
uuaaaugccauucucuucc

SEQ ID NO: 1897752 - RNA, 19 nt, Artificial Sequence
  Description of Artificial Sequence: Synthetic oligonucleotide
  Sense strand starting at position 2122 of SEQ ID NO: 1879312
augguauagagccauagua

SEQ ID NO: 1897753 - RNA, 19 nt, Artificial Sequence
  Description of Artificial Sequence: Synthetic oligonucleotide
  Antisense strand to SEQ ID NO: 1897752
uacuauggcucuauaccau

SEQ ID NO: 1897754 - RNA, 19 nt, Artificial Sequence
  Description of Artificial Sequence: Synthetic oligonucleotide
  Sense strand starting at position 2124 of SEQ ID NO: 1879312
gguauagagccauaguaaa

SEQ ID NO: 1897755 - RNA, 19 nt, Artificial Sequence
  Description of Artificial Sequence: Synthetic oligonucleotide
  Antisense strand to SEQ ID NO: 1897754
uuuacuauggcucuauacc

SEQ ID NO: 1897756 - RNA, 19 nt, Artificial Sequence
  Description of Artificial Sequence: Synthetic oligonucleotide
  Sense strand starting at position 2234 of SEQ ID NO: 1879312
gaaugaagucuuugguucu

SEQ ID NO: 1897757 - RNA, 19 nt, Artificial Sequence
  Description of Artificial Sequence: Synthetic oligonucleotide
  Antisense strand to SEQ ID NO: 1897756
agaaccaaagacuucauuc

SEQ ID NO: 1897758 - RNA, 19 nt, Artificial Sequence
  Description of Artificial Sequence: Synthetic oligonucleotide
  Sense strand starting at position 2292 of SEQ ID NO: 1879312
ggagcuguaaggugaaacu

SEQ ID NO: 1897759 - RNA, 19 nt, Artificial Sequence
  Description of Artificial Sequence: Synthetic oligonucleotide
  Antisense strand to SEQ ID NO: 1897758
aguuucaccuuacagcucc

SEQ ID NO: 1897760 - RNA, 19 nt, Artificial Sequence
  Description of Artificial Sequence: Synthetic oligonucleotide
  Sense strand starting at position 2302 of SEQ ID NO: 1879312
ggugaaacuccugggagau

SEQ ID NO: 1897761 - RNA, 19 nt, Artificial Sequence
  Description of Artificial Sequence: Synthetic oligonucleotide
  Antisense strand to SEQ ID NO: 1897760
aucucccaggaguuucacc

SEQ ID NO: 1897762 - RNA, 19 nt, Artificial Sequence
  Description of Artificial Sequence: Synthetic oligonucleotide
  Sense strand starting at position 2303 of SEQ ID NO: 1879312
gugaaacuccugggagauu

SEQ ID NO: 1897763 - RNA, 19 nt, Artificial Sequence
  Description of Artificial Sequence: Synthetic oligonucleotide
  Antisense strand to SEQ ID NO: 1897762
aaucucccaggaguuucac

SEQ ID NO: 1897764 - RNA, 19 nt, Artificial Sequence
  Description of Artificial Sequence: Synthetic oligonucleotide
  Sense strand starting at position 2459 of SEQ ID NO: 1879312
ccugaucugaguugcugaa

SEQ ID NO: 1897765 - RNA, 19 nt, Artificial Sequence
  Description of Artificial Sequence: Synthetic oligonucleotide
  Antisense strand to SEQ ID NO: 1897764
uucagcaacucagaucagg

SEQ ID NO: 1897766 - RNA, 19 nt, Artificial Sequence
  Description of Artificial Sequence: Synthetic oligonucleotide
  Sense strand starting at position 2461 of SEQ ID NO: 1879312
ugaucugaguugcugaacu

SEQ ID NO: 1897767 - RNA, 19 nt, Artificial Sequence
  Description of Artificial Sequence: Synthetic oligonucleotide
  Antisense strand to SEQ ID NO: 1897766
aguucagcaacucagauca

SEQ ID NO: 1897768 - RNA, 19 nt, Artificial Sequence
  Description of Artificial Sequence: Synthetic oligonucleotide
  Sense strand starting at position 2463 of SEQ ID NO: 1879312
aucugaguugcugaacuaa

SEQ ID NO: 1897769 - RNA, 19 nt, Artificial Sequence
  Description of Artificial Sequence: Synthetic oligonucleotide
  Antisense strand to SEQ ID NO: 1897768
uuaguucagcaacucagau

SEQ ID NO: 1897770 - RNA, 19 nt, Artificial Sequence
  Description of Artificial Sequence: Synthetic oligonucleotide
  Sense strand starting at position 2474 of SEQ ID NO: 1879312
ugaacuaacgcuuauagau

SEQ ID NO: 1897771 - RNA, 19 nt, Artificial Sequence
  Description of Artificial Sequence: Synthetic oligonucleotide
  Antisense strand to SEQ ID NO: 1897770
aucuauaagcguuaguuca

SEQ ID NO: 1897772 - RNA, 19 nt, Artificial Sequence
  Description of Artificial Sequence: Synthetic oligonucleotide
  Sense strand starting at position 2521 of SEQ ID NO: 1879312
acagaauuguggucucuga

SEQ ID NO: 1897773 - RNA, 19 nt, Artificial Sequence
  Description of Artificial Sequence: Synthetic oligonucleotide
  Antisense strand to SEQ ID NO: 1897772
ucagagaccacaauucugu

SEQ ID NO: 1897774 - RNA, 19 nt, Artificial Sequence
  Description of Artificial Sequence: Synthetic oligonucleotide
  Sense strand starting at position 2525 of SEQ ID NO: 1879312
aauuguggucucugaaccu

SEQ ID NO: 1897775 - RNA, 19 nt, Artificial Sequence
  Description of Artificial Sequence: Synthetic oligonucleotide
  Antisense strand to SEQ ID NO: 1897774
agguucagagaccacaauu

SEQ ID NO: 1897776 - RNA, 19 nt, Artificial Sequence
  Description of Artificial Sequence: Synthetic oligonucleotide
  Sense strand starting at position 2754 of SEQ ID NO: 1879312
ggaaguaugguucagugua

SEQ ID NO: 1897777 - RNA, 19 nt, Artificial Sequence
  Description of Artificial Sequence: Synthetic oligonucleotide
  Antisense strand to SEQ ID NO: 1897776
uacacugaaccauacuucc

SEQ ID NO: 1897778 - RNA, 19 nt, Artificial Sequence
  Description of Artificial Sequence: Synthetic oligonucleotide
  Sense strand starting at position 2767 of SEQ ID NO: 1879312
aguguagugcuagcaugua

SEQ ID NO: 1897779 - RNA, 19 nt, Artificial Sequence
  Description of Artificial Sequence: Synthetic oligonucleotide
  Antisense strand to SEQ ID NO: 1897778
uacaugcuagcacuacacu

SEQ ID NO: 1897780 - RNA, 19 nt, Artificial Sequence
  Description of Artificial Sequence: Synthetic oligonucleotide
  Sense strand starting at position 2824 of SEQ ID NO: 1879312
ggcuucaaggagugugaga

SEQ ID NO: 1897781 - RNA, 19 nt, Artificial Sequence
  Description of Artificial Sequence: Synthetic oligonucleotide
  Antisense strand to SEQ ID NO: 1897780
ucucacacuccuugaagcc

SEQ ID NO: 1897782 - RNA, 19 nt, Artificial Sequence
  Description of Artificial Sequence: Synthetic oligonucleotide
  Sense strand starting at position 3017 of SEQ ID NO: 1879312
auggguuaaacaugcagga

SEQ ID NO: 1897783 - RNA, 19 nt, Artificial Sequence
  Description of Artificial Sequence: Synthetic oligonucleotide
  Antisense strand to SEQ ID NO: 1897782
uccugcauguuuaacccau

SEQ ID NO: 1897784 - RNA, 19 nt, Artificial Sequence
  Description of Artificial Sequence: Synthetic oligonucleotide
  Sense strand starting at position 3021 of SEQ ID NO: 1879312
guuaaacaugcaggacaua

SEQ ID NO: 1897785 - RNA, 19 nt, Artificial Sequence
  Description of Artificial Sequence: Synthetic oligonucleotide
  Antisense strand to SEQ ID NO: 1897784
uauguccugcauguuuaac

SEQ ID NO: 1897786 - RNA, 19 nt, Artificial Sequence
  Description of Artificial Sequence: Synthetic oligonucleotide
  Sense strand starting at position 3247 of SEQ ID NO: 1879312
cuuaaauuagaguagcauu

SEQ ID NO: 1897787 - RNA, 19 nt, Artificial Sequence
  Description of Artificial Sequence: Synthetic oligonucleotide
  Antisense strand to SEQ ID NO: 1897786
aaugcuacucuaauuuaag

SEQ ID NO: 1897788 - RNA, 19 nt, Artificial Sequence
  Description of Artificial Sequence: Synthetic oligonucleotide
  Sense strand starting at position 3321 of SEQ ID NO: 1879312
gggaccugcugacugauua

SEQ ID NO: 1897789 - RNA, 19 nt, Artificial Sequence
  Description of Artificial Sequence: Synthetic oligonucleotide
  Antisense strand to SEQ ID NO: 1897788
uaaucagucagcagguccc

SEQ ID NO: 1897790 - RNA, 19 nt, Artificial Sequence
  Description of Artificial Sequence: Synthetic oligonucleotide
  Sense strand starting at position 3322 of SEQ ID NO: 1879312
ggaccugcugacugauuau

SEQ ID NO: 1897791 - RNA, 19 nt, Artificial Sequence
  Description of Artificial Sequence: Synthetic oligonucleotide
  Antisense strand to SEQ ID NO: 1897790
auaaucagucagcaggucc

SEQ ID NO: 1897792 - RNA, 19 nt, Artificial Sequence
  Description of Artificial Sequence: Synthetic oligonucleotide
  Sense strand starting at position 3325 of SEQ ID NO: 1879312
ccugcugacugauuauaug

SEQ ID NO: 1897793 - RNA, 19 nt, Artificial Sequence
  Description of Artificial Sequence: Synthetic oligonucleotide
  Antisense strand to SEQ ID NO: 1897792
cauauaaucagucagcagg

SEQ ID NO: 1897794 - RNA, 19 nt, Artificial Sequence
  Description of Artificial Sequence: Synthetic oligonucleotide
  Sense strand starting at position 3342 of SEQ ID NO: 1879312
ugcuuaaugccucagcaaa

SEQ ID NO: 1897795 - RNA, 19 nt, Artificial Sequence
  Description of Artificial Sequence: Synthetic oligonucleotide
  Antisense strand to SEQ ID NO: 1897794
uuugcugaggcauuaagca

SEQ ID NO: 1897796 - RNA, 19 nt, Artificial Sequence
  Description of Artificial Sequence: Synthetic oligonucleotide
  Sense strand starting at position 3396 of SEQ ID NO: 1879312
auaugcauaugcucaugau

SEQ ID NO: 1897797 - RNA, 19 nt, Artificial Sequence
  Description of Artificial Sequence: Synthetic oligonucleotide
  Antisense strand to SEQ ID NO: 1897796
aucaugagcauaugcauau

SEQ ID NO: 1897798 - RNA, 19 nt, Artificial Sequence
  Description of Artificial Sequence: Synthetic oligonucleotide
  Sense strand starting at position 3469 of SEQ ID NO: 1879312
ggaauuaggugcuugcaaa

SEQ ID NO: 1897799 - RNA, 19 nt, Artificial Sequence
  Description of Artificial Sequence: Synthetic oligonucleotide
  Antisense strand to SEQ ID NO: 1897798
uuugcaagcaccuaauucc

SEQ ID NO: 1897800 - RNA, 19 nt, Artificial Sequence
  Description of Artificial Sequence: Synthetic oligonucleotide
  Sense strand starting at position 3852 of SEQ ID NO: 1879312
aguucugucuucuuauaaa

SEQ ID NO: 1897801 - RNA, 19 nt, Artificial Sequence
  Description of Artificial Sequence: Synthetic oligonucleotide
  Antisense strand to SEQ ID NO: 1897800
uuuauaagaagacagaacu

SEQ ID NO: 1897802 - RNA, 19 nt, Artificial Sequence
  Description of Artificial Sequence: Synthetic oligonucleotide
  Sense strand starting at position 3978 of SEQ ID NO: 1879312
ccuguaagauaagcaaauu

SEQ ID NO: 1897803 - RNA, 19 nt, Artificial Sequence
  Description of Artificial Sequence: Synthetic oligonucleotide
  Antisense strand to SEQ ID NO: 1897802
aauuugcuuaucuuacagg

SEQ ID NO: 1897804 - RNA, 19 nt, Artificial Sequence
  Description of Artificial Sequence: Synthetic oligonucleotide
  Sense strand starting at position 13 of SEQ ID NO: 1879313
ucucuugcaguugagauaa

SEQ ID NO: 1897805 - RNA, 19 nt, Artificial Sequence
  Description of Artificial Sequence: Synthetic oligonucleotide
  Antisense strand to SEQ ID NO: 1897804
uuaucucaacugcaagaga

SEQ ID NO: 1897806 - RNA, 19 nt, Artificial Sequence
  Description of Artificial Sequence: Synthetic oligonucleotide
  Sense strand starting at position 145 of SEQ ID NO: 1879313
gagacaugccggcagcaau

SEQ ID NO: 1897807 - RNA, 19 nt, Artificial Sequence
  Description of Artificial Sequence: Synthetic oligonucleotide
  Antisense strand to SEQ ID NO: 1897806
auugcugccggcaugucuc

SEQ ID NO: 1897808 - RNA, 19 nt, Artificial Sequence
  Description of Artificial Sequence: Synthetic oligonucleotide
  Sense strand starting at position 347 of SEQ ID NO: 1879313
ugccgagauagugagaaua

SEQ ID NO: 1897809 - RNA, 19 nt, Artificial Sequence
  Description of Artificial Sequence: Synthetic oligonucleotide
  Antisense strand to SEQ ID NO: 1897808
uauucucacuaucucggca

SEQ ID NO: 1897810 - RNA, 19 nt, Artificial Sequence
  Description of Artificial Sequence: Synthetic oligonucleotide
  Sense strand starting at position 575 of SEQ ID NO: 1879313
ugcugaaucauuuguagug

SEQ ID NO: 1897811 - RNA, 19 nt, Artificial Sequence
  Description of Artificial Sequence: Synthetic oligonucleotide
  Antisense strand to SEQ ID NO: 1897810
cacuacaaaugauucagca

SEQ ID NO: 1897812 - RNA, 19 nt, Artificial Sequence
  Description of Artificial Sequence: Synthetic oligonucleotide
  Sense strand starting at position 645 of SEQ ID NO: 1879313
cuguuuacacugcagaagu

SEQ ID NO: 1897813 - RNA, 19 nt, Artificial Sequence
  Description of Artificial Sequence: Synthetic oligonucleotide
  Antisense strand to SEQ ID NO: 1897812
acuucugcaguguaaacag

SEQ ID NO: 1897814 - RNA, 19 nt, Artificial Sequence
  Description of Artificial Sequence: Synthetic oligonucleotide
  Sense strand starting at position 670 of SEQ ID NO: 1879313
cccuuucucuugguuauuu

SEQ ID NO: 1897815 - RNA, 19 nt, Artificial Sequence
  Description of Artificial Sequence: Synthetic oligonucleotide
  Antisense strand to SEQ ID NO: 1897814
aaauaaccaagagaaaggg

SEQ ID NO: 1897816 - RNA, 19 nt, Artificial Sequence
  Description of Artificial Sequence: Synthetic oligonucleotide
  Sense strand starting at position 678 of SEQ ID NO: 1879313
cuugguuauuuccuaugua

SEQ ID NO: 1897817 - RNA, 19 nt, Artificial Sequence
  Description of Artificial Sequence: Synthetic oligonucleotide
  Antisense strand to SEQ ID NO: 1897816
uacauaggaaauaaccaag

SEQ ID NO: 1897818 - RNA, 19 nt, Artificial Sequence
  Description of Artificial Sequence: Synthetic oligonucleotide
  Sense strand starting at position 811 of SEQ ID NO: 1879313
cugucuuaucuugauugaa

SEQ ID NO: 1897819 - RNA, 19 nt, Artificial Sequence
  Description of Artificial Sequence: Synthetic oligonucleotide
  Antisense strand to SEQ ID NO: 1897818
uucaaucaagauaagacag

SEQ ID NO: 1897820 - RNA, 19 nt, Artificial Sequence
  Description of Artificial Sequence: Synthetic oligonucleotide
  Sense strand starting at position 813 of SEQ ID NO: 1879313
gucuuaucuugauugaaua

SEQ ID NO: 1897821 - RNA, 19 nt, Artificial Sequence
  Description of Artificial Sequence: Synthetic oligonucleotide
  Antisense strand to SEQ ID NO: 1897820
uauucaaucaagauaagac

SEQ ID NO: 1897822 - RNA, 19 nt, Artificial Sequence
  Description of Artificial Sequence: Synthetic oligonucleotide
  Sense strand starting at position 846 of SEQ ID NO: 1879313
auuugagacuuauagcuaa

SEQ ID NO: 1897823 - RNA, 19 nt, Artificial Sequence
  Description of Artificial Sequence: Synthetic oligonucleotide
  Antisense strand to SEQ ID NO: 1897822
uuagcuauaagucucaaau

SEQ ID NO: 1897824 - RNA, 19 nt, Artificial Sequence
  Description of Artificial Sequence: Synthetic oligonucleotide
  Sense strand starting at position 849 of SEQ ID NO: 1879313
ugagacuuauagcuaauaa

SEQ ID NO: 1897825 - RNA, 19 nt, Artificial Sequence
  Description of Artificial Sequence: Synthetic oligonucleotide
  Antisense strand to SEQ ID NO: 1897824
uuauuagcuauaagucuca

SEQ ID NO: 1897826 - RNA, 19 nt, Artificial Sequence
  Description of Artificial Sequence: Synthetic oligonucleotide
  Sense strand starting at position 1163 of SEQ ID NO: 1879313
agauauguauagguuauca

SEQ ID NO: 1897827 - RNA, 19 nt, Artificial Sequence
  Description of Artificial Sequence: Synthetic oligonucleotide
  Antisense strand to SEQ ID NO: 1897826
ugauaaccuauacauaucu

SEQ ID NO: 1897828 - RNA, 19 nt, Artificial Sequence
  Description of Artificial Sequence: Synthetic oligonucleotide
  Sense strand starting at position 1167 of SEQ ID NO: 1879313
auguauagguuaucagauu

SEQ ID NO: 1897829 - RNA, 19 nt, Artificial Sequence
  Description of Artificial Sequence: Synthetic oligonucleotide
  Antisense strand to SEQ ID NO: 1897828
aaucugauaaccuauacau

SEQ ID NO: 1897830 - RNA, 19 nt, Artificial Sequence
  Description of Artificial Sequence: Synthetic oligonucleotide
  Sense strand starting at position 1175 of SEQ ID NO: 1879313
guuaucagauuaguuaaug

SEQ ID NO: 1897831 - RNA, 19 nt, Artificial Sequence
  Description of Artificial Sequence: Synthetic oligonucleotide
  Antisense strand to SEQ ID NO: 1897830
cauuaacuaaucugauaac

SEQ ID NO: 1897832 - RNA, 19 nt, Artificial Sequence
  Description of Artificial Sequence: Synthetic oligonucleotide
  Sense strand starting at position 1206 of SEQ ID NO: 1879313
ccaugagucuuacaauuug

SEQ ID NO: 1897833 - RNA, 19 nt, Artificial Sequence
  Description of Artificial Sequence: Synthetic oligonucleotide
  Antisense strand to SEQ ID NO: 1897832
caaauuguaagacucaugg

SEQ ID NO: 1897834 - RNA, 19 nt, Artificial Sequence
  Description of Artificial Sequence: Synthetic oligonucleotide
  Sense strand starting at position 1212 of SEQ ID NO: 1879313
gucuuacaauuuggauuua

SEQ ID NO: 1897835 - RNA, 19 nt, Artificial Sequence
  Description of Artificial Sequence: Synthetic oligonucleotide
  Antisense strand to SEQ ID NO: 1897834
uaaauccaaauuguaagac

SEQ ID NO: 1897836 - RNA, 19 nt, Artificial Sequence
  Description of Artificial Sequence: Synthetic oligonucleotide
  Sense strand starting at position 1271 of SEQ ID NO: 1879313
gucuaaugugaugguauuu

SEQ ID NO: 1897837 - RNA, 19 nt, Artificial Sequence
  Description of Artificial Sequence: Synthetic oligonucleotide
  Antisense strand to SEQ ID NO: 1897836
aaauaccaucacauuagac

SEQ ID NO: 1897838 - RNA, 19 nt, Artificial Sequence
  Description of Artificial Sequence: Synthetic oligonucleotide
  Sense strand starting at position 1600 of SEQ ID NO: 1879313
gugagagaacuaugaguga

SEQ ID NO: 1897839 - RNA, 19 nt, Artificial Sequence
  Description of Artificial Sequence: Synthetic oligonucleotide
  Antisense strand to SEQ ID NO: 1897838
ucacucauaguucucucac

SEQ ID NO: 1897840 - RNA, 19 nt, Artificial Sequence
  Description of Artificial Sequence: Synthetic oligonucleotide
  Sense strand starting at position 1604 of SEQ ID NO: 1879313
gagaacuaugagugauggu

SEQ ID NO: 1897841 - RNA, 19 nt, Artificial Sequence
  Description of Artificial Sequence: Synthetic oligonucleotide
  Antisense strand to SEQ ID NO: 1897840
accaucacucauaguucuc

SEQ ID NO: 1897842 - RNA, 19 nt, Artificial Sequence
  Description of Artificial Sequence: Synthetic oligonucleotide
  Sense strand starting at position 1736 of SEQ ID NO: 1879313
agacccacaucuuugaguu

SEQ ID NO: 1897843 - RNA, 19 nt, Artificial Sequence
  Description of Artificial Sequence: Synthetic oligonucleotide
  Antisense strand to SEQ ID NO: 1897842
aacucaaagaugugggucu

SEQ ID NO: 1897844 - RNA, 19 nt, Artificial Sequence
  Description of Artificial Sequence: Synthetic oligonucleotide
  Sense strand starting at position 1737 of SEQ ID NO: 1879313
gacccacaucuuugaguug

SEQ ID NO: 1897845 - RNA, 19 nt, Artificial Sequence
  Description of Artificial Sequence: Synthetic oligonucleotide
  Antisense strand to SEQ ID NO: 1897844
caacucaaagauguggguc

SEQ ID NO: 1897846 - RNA, 19 nt, Artificial Sequence
  Description of Artificial Sequence: Synthetic oligonucleotide
  Sense strand starting at position 1740 of SEQ ID NO: 1879313
ccacaucuuugaguugaaa

SEQ ID NO: 1897847 - RNA, 19 nt, Artificial Sequence
  Description of Artificial Sequence: Synthetic oligonucleotide
  Antisense strand to SEQ ID NO: 1897846
uuucaacucaaagaugugg

SEQ ID NO: 1897848 - RNA, 19 nt, Artificial Sequence
  Description of Artificial Sequence: Synthetic oligonucleotide
  Sense strand starting at position 1742 of SEQ ID NO: 1879313
acaucuuugaguugaaagg

SEQ ID NO: 1897849 - RNA, 19 nt, Artificial Sequence
  Description of Artificial Sequence: Synthetic oligonucleotide
  Antisense strand to SEQ ID NO: 1897848
ccuuucaacucaaagaugu

SEQ ID NO: 1897850 - RNA, 19 nt, Artificial Sequence
  Description of Artificial Sequence: Synthetic oligonucleotide
  Sense strand starting at position 1998 of SEQ ID NO: 1879313
guaugaugacuuugagaca

SEQ ID NO: 1897851 - RNA, 19 nt, Artificial Sequence
  Description of Artificial Sequence: Synthetic oligonucleotide
  Antisense strand to SEQ ID NO: 1897850
ugucucaaagucaucauac

SEQ ID NO: 1897852 - RNA, 19 nt, Artificial Sequence
  Description of Artificial Sequence: Synthetic oligonucleotide
  Sense strand starting at position 2415 of SEQ ID NO: 1879313
gugacaugguaccuauucu

SEQ ID NO: 1897853 - RNA, 19 nt, Artificial Sequence
  Description of Artificial Sequence: Synthetic oligonucleotide
  Antisense strand to SEQ ID NO: 1897852
agaauagguaccaugucac

SEQ ID NO: 1897854 - RNA, 19 nt, Artificial Sequence
  Description of Artificial Sequence: Synthetic oligonucleotide
  Sense strand starting at position 2428 of SEQ ID NO: 1879313
uauucugggcgcuaaauaa

SEQ ID NO: 1897855 - RNA, 19 nt, Artificial Sequence
  Description of Artificial Sequence: Synthetic oligonucleotide
  Antisense strand to SEQ ID NO: 1897854
uuauuuagcgcccagaaua

SEQ ID NO: 1897856 - RNA, 19 nt, Artificial Sequence
  Description of Artificial Sequence: Synthetic oligonucleotide
  Sense strand starting at position 2454 of SEQ ID NO: 1879313
uugaauugcccuuggaagu

SEQ ID NO: 1897857 - RNA, 19 nt, Artificial Sequence
  Description of Artificial Sequence: Synthetic oligonucleotide
  Antisense strand to SEQ ID NO: 1897856
acuuccaagggcaauucaa

SEQ ID NO: 1897858 - RNA, 19 nt, Artificial Sequence
  Description of Artificial Sequence: Synthetic oligonucleotide
  Sense strand starting at position 2533 of SEQ ID NO: 1879313
ggucacuagggucaucuua

SEQ ID NO: 1897859 - RNA, 19 nt, Artificial Sequence
  Description of Artificial Sequence: Synthetic oligonucleotide
  Antisense strand to SEQ ID NO: 1897858
uaagaugacccuagugacc

SEQ ID NO: 1897860 - RNA, 19 nt, Artificial Sequence
  Description of Artificial Sequence: Synthetic oligonucleotide
  Sense strand starting at position 2535 of SEQ ID NO: 1879313
ucacuagggucaucuuaga

SEQ ID NO: 1897861 - RNA, 19 nt, Artificial Sequence
  Description of Artificial Sequence: Synthetic oligonucleotide
  Antisense strand to SEQ ID NO: 1897860
ucuaagaugacccuaguga

SEQ ID NO: 1897862 - RNA, 19 nt, Artificial Sequence
  Description of Artificial Sequence: Synthetic oligonucleotide
  Sense strand starting at position 2597 of SEQ ID NO: 1879313
ucacuugcucuauauagag

SEQ ID NO: 1897863 - RNA, 19 nt, Artificial Sequence
  Description of Artificial Sequence: Synthetic oligonucleotide
  Antisense strand to SEQ ID NO: 1897862
cucuauauagagcaaguga

SEQ ID NO: 1897864 - RNA, 19 nt, Artificial Sequence
  Description of Artificial Sequence: Synthetic oligonucleotide
  Sense strand starting at position 2777 of SEQ ID NO: 1879313
acagaagcucuuugaacau

SEQ ID NO: 1897865 - RNA, 19 nt, Artificial Sequence
  Description of Artificial Sequence: Synthetic oligonucleotide
  Antisense strand to SEQ ID NO: 1897864
auguucaaagagcuucugu

SEQ ID NO: 1897866 - RNA, 19 nt, Artificial Sequence
  Description of Artificial Sequence: Synthetic oligonucleotide
  Sense strand starting at position 2962 of SEQ ID NO: 1879313
uacuuuaagguuuaaggua

SEQ ID NO: 1897867 - RNA, 19 nt, Artificial Sequence
  Description of Artificial Sequence: Synthetic oligonucleotide
  Antisense strand to SEQ ID NO: 1897866
uaccuuaaaccuuaaagua

SEQ ID NO: 1897868 - RNA, 19 nt, Artificial Sequence
  Description of Artificial Sequence: Synthetic oligonucleotide
  Sense strand starting at position 3186 of SEQ ID NO: 1879313
gugagaacauucuuucuua

SEQ ID NO: 1897869 - RNA, 19 nt, Artificial Sequence
  Description of Artificial Sequence: Synthetic oligonucleotide
  Antisense strand to SEQ ID NO: 1897868
uaagaaagaauguucucac

SEQ ID NO: 1897870 - RNA, 19 nt, Artificial Sequence
  Description of Artificial Sequence: Synthetic oligonucleotide
  Sense strand starting at position 3245 of SEQ ID NO: 1879313
gaaggacaucacugguuua

SEQ ID NO: 1897871 - RNA, 19 nt, Artificial Sequence
  Description of Artificial Sequence: Synthetic oligonucleotide
  Antisense strand to SEQ ID NO: 1897870
uaaaccagugauguccuuc

SEQ ID NO: 1897872 - RNA, 19 nt, Artificial Sequence
  Description of Artificial Sequence: Synthetic oligonucleotide
  Sense strand starting at position 3248 of SEQ ID NO: 1879313
ggacaucacugguuuauuc

SEQ ID NO: 1897873 - RNA, 19 nt, Artificial Sequence
  Description of Artificial Sequence: Synthetic oligonucleotide
  Antisense strand to SEQ ID NO: 1897872
gaauaaaccagugaugucc

SEQ ID NO: 1897874 - RNA, 19 nt, Artificial Sequence
  Description of Artificial Sequence: Synthetic oligonucleotide
  Sense strand starting at position 3380 of SEQ ID NO: 1879313
gccuuugagccauaucuac

SEQ ID NO: 1897875 - RNA, 19 nt, Artificial Sequence
  Description of Artificial Sequence: Synthetic oligonucleotide
  Antisense strand to SEQ ID NO: 1897874
guagauauggcucaaaggc

SEQ ID NO: 1897876 - RNA, 19 nt, Artificial Sequence
  Description of Artificial Sequence: Synthetic oligonucleotide
  Sense strand starting at position 3753 of SEQ ID NO: 1879313
cugcucucagcugaauuaa

SEQ ID NO: 1897877 - RNA, 19 nt, Artificial Sequence
  Description of Artificial Sequence: Synthetic oligonucleotide
  Antisense strand to SEQ ID NO: 1897876
uuaauucagcugagagcag

SEQ ID NO: 1897878 - RNA, 19 nt, Artificial Sequence
  Description of Artificial Sequence: Synthetic oligonucleotide
  Sense strand starting at position 3849 of SEQ ID NO: 1879313
ugacacagucguggaaauu

SEQ ID NO: 1897879 - RNA, 19 nt, Artificial Sequence
  Description of Artificial Sequence: Synthetic oligonucleotide
  Antisense strand to SEQ ID NO: 1897878
aauuuccacgacuguguca

SEQ ID NO: 1897880 - RNA, 19 nt, Artificial Sequence
  Description of Artificial Sequence: Synthetic oligonucleotide
  Sense strand starting at position 3860 of SEQ ID NO: 1879313
uggaaauuugcaugcuguc

SEQ ID NO: 1897881 - RNA, 19 nt, Artificial Sequence
  Description of Artificial Sequence: Synthetic oligonucleotide
  Antisense strand to SEQ ID NO: 1897880
gacagcaugcaaauuucca

SEQ ID NO: 1897882 - RNA, 19 nt, Artificial Sequence
  Description of Artificial Sequence: Synthetic oligonucleotide
  Sense strand starting at position 3918 of SEQ ID NO: 1879313
gcagaauugggcuaaaguu

SEQ ID NO: 1897883 - RNA, 19 nt, Artificial Sequence
  Description of Artificial Sequence: Synthetic oligonucleotide
  Antisense strand to SEQ ID NO: 1897882
aacuuuagcccaauucugc

SEQ ID NO: 1897884 - RNA, 19 nt, Artificial Sequence
  Description of Artificial Sequence: Synthetic oligonucleotide
  Sense strand starting at position 2 of SEQ ID NO: 1879314
agaggaaaugugggucuga

SEQ ID NO: 1897885 - RNA, 19 nt, Artificial Sequence
  Description of Artificial Sequence: Synthetic oligonucleotide
  Antisense strand to SEQ ID NO: 1897884
ucagacccacauuuccucu

SEQ ID NO: 1897886 - RNA, 19 nt, Artificial Sequence
  Description of Artificial Sequence: Synthetic oligonucleotide
  Sense strand starting at position 3 of SEQ ID NO: 1879314
gaggaaaugugggucugau

SEQ ID NO: 1897887 - RNA, 19 nt, Artificial Sequence
  Description of Artificial Sequence: Synthetic oligonucleotide
  Antisense strand to SEQ ID NO: 1897886
aucagacccacauuuccuc

SEQ ID NO: 1897888 - RNA, 19 nt, Artificial Sequence
  Description of Artificial Sequence: Synthetic oligonucleotide
  Sense strand starting at position 86 of SEQ ID NO: 1879314
ccugguuaccuauagccaa

SEQ ID NO: 1897889 - RNA, 19 nt, Artificial Sequence
  Description of Artificial Sequence: Synthetic oligonucleotide
  Antisense strand to SEQ ID NO: 1897888
uuggcuauagguaaccagg

SEQ ID NO: 1897890 - RNA, 19 nt, Artificial Sequence
  Description of Artificial Sequence: Synthetic oligonucleotide
  Sense strand starting at position 97 of SEQ ID NO: 1879314
auagccaaugcaugacaua

SEQ ID NO: 1897891 - RNA, 19 nt, Artificial Sequence
  Description of Artificial Sequence: Synthetic oligonucleotide
  Antisense strand to SEQ ID NO: 1897890
uaugucaugcauuggcuau

SEQ ID NO: 1897892 - RNA, 19 nt, Artificial Sequence
  Description of Artificial Sequence: Synthetic oligonucleotide
  Sense strand starting at position 110 of SEQ ID NO: 1879314
gacauacuccugugagcag

SEQ ID NO: 1897893 - RNA, 19 nt, Artificial Sequence
  Description of Artificial Sequence: Synthetic oligonucleotide
  Antisense strand to SEQ ID NO: 1897892
cugcucacaggaguauguc

SEQ ID NO: 1897894 - RNA, 19 nt, Artificial Sequence
  Description of Artificial Sequence: Synthetic oligonucleotide
  Sense strand starting at position 159 of SEQ ID NO: 1879314
agagaaaccuuagaaucuu

SEQ ID NO: 1897895 - RNA, 19 nt, Artificial Sequence
  Description of Artificial Sequence: Synthetic oligonucleotide
  Antisense strand to SEQ ID NO: 1897894
aagauucuaagguuucucu

SEQ ID NO: 1897896 - RNA, 19 nt, Artificial Sequence
  Description of Artificial Sequence: Synthetic oligonucleotide
  Sense strand starting at position 171 of SEQ ID NO: 1879314
gaaucuuucuuggccugga

SEQ ID NO: 1897897 - RNA, 19 nt, Artificial Sequence
  Description of Artificial Sequence: Synthetic oligonucleotide
  Antisense strand to SEQ ID NO: 1897896
uccaggccaagaaagauuc

SEQ ID NO: 1897898 - RNA, 19 nt, Artificial Sequence
  Description of Artificial Sequence: Synthetic oligonucleotide
  Sense strand starting at position 468 of SEQ ID NO: 1879314
gacaaagagccacaguguu

SEQ ID NO: 1897899 - RNA, 19 nt, Artificial Sequence
  Description of Artificial Sequence: Synthetic oligonucleotide
  Antisense strand to SEQ ID NO: 1897898
aacacuguggcucuuuguc

SEQ ID NO: 1897900 - RNA, 19 nt, Artificial Sequence
  Description of Artificial Sequence: Synthetic oligonucleotide
  Sense strand starting at position 852 of SEQ ID NO: 1879314
aggguugcauagucuuaca

SEQ ID NO: 1897901 - RNA, 19 nt, Artificial Sequence
  Description of Artificial Sequence: Synthetic oligonucleotide
  Antisense strand to SEQ ID NO: 1897900
uguaagacuaugcaacccu

SEQ ID NO: 1897902 - RNA, 19 nt, Artificial Sequence
  Description of Artificial Sequence: Synthetic oligonucleotide
  Sense strand starting at position 901 of SEQ ID NO: 1879314
ugcucagaguuucuguaag

SEQ ID NO: 1897903 - RNA, 19 nt, Artificial Sequence
  Description of Artificial Sequence: Synthetic oligonucleotide
  Antisense strand to SEQ ID NO: 1897902
cuuacagaaacucugagca

SEQ ID NO: 1897904 - RNA, 19 nt, Artificial Sequence
  Description of Artificial Sequence: Synthetic oligonucleotide
  Sense strand starting at position 903 of SEQ ID NO: 1879314
cucagaguuucuguaaggu

SEQ ID NO: 1897905 - RNA, 19 nt, Artificial Sequence
  Description of Artificial Sequence: Synthetic oligonucleotide
  Antisense strand to SEQ ID NO: 1897904
accuuacagaaacucugag

SEQ ID NO: 1897906 - RNA, 19 nt, Artificial Sequence
  Description of Artificial Sequence: Synthetic oligonucleotide
  Sense strand starting at position 911 of SEQ ID NO: 1879314
uucuguaaggucgaaaguu

SEQ ID NO: 1897907 - RNA, 19 nt, Artificial Sequence
  Description of Artificial Sequence: Synthetic oligonucleotide
  Antisense strand to SEQ ID NO: 1897906
aacuuucgaccuuacagaa

SEQ ID NO: 1897908 - RNA, 19 nt, Artificial Sequence
  Description of Artificial Sequence: Synthetic oligonucleotide
  Sense strand starting at position 1017 of SEQ ID NO: 1879314
cccuccuaucaguggagaa

SEQ ID NO: 1897909 - RNA, 19 nt, Artificial Sequence
  Description of Artificial Sequence: Synthetic oligonucleotide
  Antisense strand to SEQ ID NO: 1897908
uucuccacugauaggaggg

SEQ ID NO: 1897910 - RNA, 19 nt, Artificial Sequence
  Description of Artificial Sequence: Synthetic oligonucleotide
  Sense strand starting at position 1018 of SEQ ID NO: 1879314
ccuccuaucaguggagaag

SEQ ID NO: 1897911 - RNA, 19 nt, Artificial Sequence
  Description of Artificial Sequence: Synthetic oligonucleotide
  Antisense strand to SEQ ID NO: 1897910
cuucuccacugauaggagg

SEQ ID NO: 1897912 - RNA, 19 nt, Artificial Sequence
  Description of Artificial Sequence: Synthetic oligonucleotide
  Sense strand starting at position 1237 of SEQ ID NO: 1879314
gagagauugcagggacauc

SEQ ID NO: 1897913 - RNA, 19 nt, Artificial Sequence
  Description of Artificial Sequence: Synthetic oligonucleotide
  Antisense strand to SEQ ID NO: 1897912
gaugucccugcaaucucuc

SEQ ID NO: 1897914 - RNA, 19 nt, Artificial Sequence
  Description of Artificial Sequence: Synthetic oligonucleotide
  Sense strand starting at position 1319 of SEQ ID NO: 1879314
ggaagaagcuucccuagac

SEQ ID NO: 1897915 - RNA, 19 nt, Artificial Sequence
  Description of Artificial Sequence: Synthetic oligonucleotide
  Antisense strand to SEQ ID NO: 1897914
gucuagggaagcuucuucc

SEQ ID NO: 1897916 - RNA, 19 nt, Artificial Sequence
  Description of Artificial Sequence: Synthetic oligonucleotide
  Sense strand starting at position 1591 of SEQ ID NO: 1879314
cgacuauacuuaccucaag

SEQ ID NO: 1897917 - RNA, 19 nt, Artificial Sequence
  Description of Artificial Sequence: Synthetic oligonucleotide
  Antisense strand to SEQ ID NO: 1897916
cuugagguaaguauagucg

SEQ ID NO: 1897918 - RNA, 19 nt, Artificial Sequence
  Description of Artificial Sequence: Synthetic oligonucleotide
  Sense strand starting at position 1647 of SEQ ID NO: 1879314
gccuccuuggguuggagaa

SEQ ID NO: 1897919 - RNA, 19 nt, Artificial Sequence
  Description of Artificial Sequence: Synthetic oligonucleotide
  Antisense strand to SEQ ID NO: 1897918
uucuccaacccaaggaggc

SEQ ID NO: 1897920 - RNA, 19 nt, Artificial Sequence
  Description of Artificial Sequence: Synthetic oligonucleotide
  Sense strand starting at position 1658 of SEQ ID NO: 1879314
uuggagaacgugugagaga

SEQ ID NO: 1897921 - RNA, 19 nt, Artificial Sequence
  Description of Artificial Sequence: Synthetic oligonucleotide
  Antisense strand to SEQ ID NO: 1897920
ucucucacacguucuccaa

SEQ ID NO: 1897922 - RNA, 19 nt, Artificial Sequence
  Description of Artificial Sequence: Synthetic oligonucleotide
  Sense strand starting at position 1920 of SEQ ID NO: 1879314
gggucccuuucugcugaau

SEQ ID NO: 1897923 - RNA, 19 nt, Artificial Sequence
  Description of Artificial Sequence: Synthetic oligonucleotide
  Antisense strand to SEQ ID NO: 1897922
auucagcagaaagggaccc

SEQ ID NO: 1897924 - RNA, 19 nt, Artificial Sequence
  Description of Artificial Sequence: Synthetic oligonucleotide
  Sense strand starting at position 1926 of SEQ ID NO: 1879314
cuuucugcugaaugaguua

SEQ ID NO: 1897925 - RNA, 19 nt, Artificial Sequence
  Description of Artificial Sequence: Synthetic oligonucleotide
  Antisense strand to SEQ ID NO: 1897924
uaacucauucagcagaaag

SEQ ID NO: 1897926 - RNA, 19 nt, Artificial Sequence
  Description of Artificial Sequence: Synthetic oligonucleotide
  Sense strand starting at position 1963 of SEQ ID NO: 1879314
uuuguacagucucuuauga

SEQ ID NO: 1897927 - RNA, 19 nt, Artificial Sequence
  Description of Artificial Sequence: Synthetic oligonucleotide
  Antisense strand to SEQ ID NO: 1897926
ucauaagagacuguacaaa

SEQ ID NO: 1897928 - RNA, 19 nt, Artificial Sequence
  Description of Artificial Sequence: Synthetic oligonucleotide
  Sense strand starting at position 1976 of SEQ ID NO: 1879314
uuaugaagcgccuggauuu

SEQ ID NO: 1897929 - RNA, 19 nt, Artificial Sequence
  Description of Artificial Sequence: Synthetic oligonucleotide
  Antisense strand to SEQ ID NO: 1897928
aaauccaggcgcuucauaa

SEQ ID NO: 1897930 - RNA, 19 nt, Artificial Sequence
  Description of Artificial Sequence: Synthetic oligonucleotide
  Sense strand starting at position 1983 of SEQ ID NO: 1879314
gcgccuggauuucucauua

SEQ ID NO: 1897931 - RNA, 19 nt, Artificial Sequence
  Description of Artificial Sequence: Synthetic oligonucleotide
  Antisense strand to SEQ ID NO: 1897930
uaaugagaaauccaggcgc

SEQ ID NO: 1897932 - RNA, 19 nt, Artificial Sequence
  Description of Artificial Sequence: Synthetic oligonucleotide
  Sense strand starting at position 2094 of SEQ ID NO: 1879314
cgagaacucgcgcuucuca

SEQ ID NO: 1897933 - RNA, 19 nt, Artificial Sequence
  Description of Artificial Sequence: Synthetic oligonucleotide
  Antisense strand to SEQ ID NO: 1897932
ugagaagcgcgaguucucg

SEQ ID NO: 1897934 - RNA, 19 nt, Artificial Sequence
  Description of Artificial Sequence: Synthetic oligonucleotide
  Sense strand starting at position 2378 of SEQ ID NO: 1879314
gacuguaucaggugaugug

SEQ ID NO: 1897935 - RNA, 19 nt, Artificial Sequence
  Description of Artificial Sequence: Synthetic oligonucleotide
  Antisense strand to SEQ ID NO: 1897934
cacaucaccugauacaguc

SEQ ID NO: 1897936 - RNA, 19 nt, Artificial Sequence
  Description of Artificial Sequence: Synthetic oligonucleotide
  Sense strand starting at position 3018 of SEQ ID NO: 1879314
ggaucugauuugcauggga

SEQ ID NO: 1897937 - RNA, 19 nt, Artificial Sequence
  Description of Artificial Sequence: Synthetic oligonucleotide
  Antisense strand to SEQ ID NO: 1897936
ucccaugcaaaucagaucc

SEQ ID NO: 1897938 - RNA, 19 nt, Artificial Sequence
  Description of Artificial Sequence: Synthetic oligonucleotide
  Sense strand starting at position 3023 of SEQ ID NO: 1879314
ugauuugcaugggaucuaa

SEQ ID NO: 1897939 - RNA, 19 nt, Artificial Sequence
  Description of Artificial Sequence: Synthetic oligonucleotide
  Antisense strand to SEQ ID NO: 1897938
uuagaucccaugcaaauca

SEQ ID NO: 1897940 - RNA, 19 nt, Artificial Sequence
  Description of Artificial Sequence: Synthetic oligonucleotide
  Sense strand starting at position 3141 of SEQ ID NO: 1879314
gcagauuggacuggugcaa

SEQ ID NO: 1897941 - RNA, 19 nt, Artificial Sequence
  Description of Artificial Sequence: Synthetic oligonucleotide
  Antisense strand to SEQ ID NO: 1897940
uugcaccaguccaaucugc

SEQ ID NO: 1897942 - RNA, 19 nt, Artificial Sequence
  Description of Artificial Sequence: Synthetic oligonucleotide
  Sense strand starting at position 3268 of SEQ ID NO: 1879314
gguaacauuucuugacaug

SEQ ID NO: 1897943 - RNA, 19 nt, Artificial Sequence
  Description of Artificial Sequence: Synthetic oligonucleotide
  Antisense strand to SEQ ID NO: 1897942
caugucaagaaauguuacc

SEQ ID NO: 1897944 - RNA, 19 nt, Artificial Sequence
  Description of Artificial Sequence: Synthetic oligonucleotide
  Sense strand starting at position 3447 of SEQ ID NO: 1879314
cauuauaaugugggucaca

SEQ ID NO: 1897945 - RNA, 19 nt, Artificial Sequence
  Description of Artificial Sequence: Synthetic oligonucleotide
  Antisense strand to SEQ ID NO: 1897944
ugugacccacauuauaaug

SEQ ID NO: 1897946 - RNA, 19 nt, Artificial Sequence
  Description of Artificial Sequence: Synthetic oligonucleotide
  Sense strand starting at position 3504 of SEQ ID NO: 1879314
auguucucuccucaaguau

SEQ ID NO: 1897947 - RNA, 19 nt, Artificial Sequence
  Description of Artificial Sequence: Synthetic oligonucleotide
  Antisense strand to SEQ ID NO: 1897946
auacuugaggagagaacau

SEQ ID NO: 1897948 - RNA, 19 nt, Artificial Sequence
  Description of Artificial Sequence: Synthetic oligonucleotide
  Sense strand starting at position 3530 of SEQ ID NO: 1879314
ggcuuaugccaacaucaaa

SEQ ID NO: 1897949 - RNA, 19 nt, Artificial Sequence
  Description of Artificial Sequence: Synthetic oligonucleotide
  Antisense strand to SEQ ID NO: 1897948
uuugauguuggcauaagcc

SEQ ID NO: 1897950 - RNA, 19 nt, Artificial Sequence
  Description of Artificial Sequence: Synthetic oligonucleotide
  Sense strand starting at position 3580 of SEQ ID NO: 1879314
gagaaacccugagaugacu

SEQ ID NO: 1897951 - RNA, 19 nt, Artificial Sequence
  Description of Artificial Sequence: Synthetic oligonucleotide
  Antisense strand to SEQ ID NO: 1897950
agucaucucaggguuucuc

SEQ ID NO: 1897952 - RNA, 19 nt, Artificial Sequence
  Description of Artificial Sequence: Synthetic oligonucleotide
  Sense strand starting at position 3594 of SEQ ID NO: 1879314
ugacuugaauuugaagaau

SEQ ID NO: 1897953 - RNA, 19 nt, Artificial Sequence
  Description of Artificial Sequence: Synthetic oligonucleotide
  Antisense strand to SEQ ID NO: 1897952
auucuucaaauucaaguca

SEQ ID NO: 1897954 - RNA, 19 nt, Artificial Sequence
  Description of Artificial Sequence: Synthetic oligonucleotide
  Sense strand starting at position 3641 of SEQ ID NO: 1879314
ugguuucuccaauagguuu

SEQ ID NO: 1897955 - RNA, 19 nt, Artificial Sequence
  Description of Artificial Sequence: Synthetic oligonucleotide
  Antisense strand to SEQ ID NO: 1897954
aaaccuauuggagaaacca

SEQ ID NO: 1897956 - RNA, 19 nt, Artificial Sequence
  Description of Artificial Sequence: Synthetic oligonucleotide
  Sense strand starting at position 3647 of SEQ ID NO: 1879314
cuccaauagguuugagcuu

SEQ ID NO: 1897957 - RNA, 19 nt, Artificial Sequence
  Description of Artificial Sequence: Synthetic oligonucleotide
  Antisense strand to SEQ ID NO: 1897956
aagcucaaaccuauuggag

SEQ ID NO: 1897958 - RNA, 19 nt, Artificial Sequence
  Description of Artificial Sequence: Synthetic oligonucleotide
  Sense strand starting at position 3674 of SEQ ID NO: 1879314
gcgugugggcugucagaaa

SEQ ID NO: 1897959 - RNA, 19 nt, Artificial Sequence
  Description of Artificial Sequence: Synthetic oligonucleotide
  Antisense strand to SEQ ID NO: 1897958
uuucugacagcccacacgc

SEQ ID NO: 1897960 - RNA, 19 nt, Artificial Sequence
  Description of Artificial Sequence: Synthetic oligonucleotide
  Sense strand starting at position 3694 of SEQ ID NO: 1879314
ggccuugucagggacccau

SEQ ID NO: 1897961 - RNA, 19 nt, Artificial Sequence
  Description of Artificial Sequence: Synthetic oligonucleotide
  Antisense strand to SEQ ID NO: 1897960
augggucccugacaaggcc

SEQ ID NO: 1897962 - RNA, 19 nt, Artificial Sequence
  Description of Artificial Sequence: Synthetic oligonucleotide
  Sense strand starting at position 3791 of SEQ ID NO: 1879314
ugguuuacuuauguuauca

SEQ ID NO: 1897963 - RNA, 19 nt, Artificial Sequence
  Description of Artificial Sequence: Synthetic oligonucleotide
  Antisense strand to SEQ ID NO: 1897962
ugauaacauaaguaaacca

SEQ ID NO: 1897964 - RNA, 19 nt, Artificial Sequence
  Description of Artificial Sequence: Synthetic oligonucleotide
  Sense strand starting at position 112 of SEQ ID NO: 1879315
aaggguuacacgugaaggu

SEQ ID NO: 1897965 - RNA, 19 nt, Artificial Sequence
  Description of Artificial Sequence: Synthetic oligonucleotide
  Antisense strand to SEQ ID NO: 1897964
accuucacguguaacccuu

SEQ ID NO: 1897966 - RNA, 19 nt, Artificial Sequence
  Description of Artificial Sequence: Synthetic oligonucleotide
  Sense strand starting at position 138 of SEQ ID NO: 1879315
ugugcaugucuaugguaca

SEQ ID NO: 1897967 - RNA, 19 nt, Artificial Sequence
  Description of Artificial Sequence: Synthetic oligonucleotide
  Antisense strand to SEQ ID NO: 1897966
uguaccauagacaugcaca

SEQ ID NO: 1897968 - RNA, 19 nt, Artificial Sequence
  Description of Artificial Sequence: Synthetic oligonucleotide
  Sense strand starting at position 257 of SEQ ID NO: 1879315
guguaauugguaggaggga

SEQ ID NO: 1897969 - RNA, 19 nt, Artificial Sequence
  Description of Artificial Sequence: Synthetic oligonucleotide
  Antisense strand to SEQ ID NO: 1897968
ucccuccuaccaauuacac

SEQ ID NO: 1897970 - RNA, 19 nt, Artificial Sequence
  Description of Artificial Sequence: Synthetic oligonucleotide
  Sense strand starting at position 307 of SEQ ID NO: 1879315
cagugcgaucccugcauga

SEQ ID NO: 1897971 - RNA, 19 nt, Artificial Sequence
  Description of Artificial Sequence: Synthetic oligonucleotide
  Antisense strand to SEQ ID NO: 1897970
ucaugcagggaucgcacug

SEQ ID NO: 1897972 - RNA, 19 nt, Artificial Sequence
  Description of Artificial Sequence: Synthetic oligonucleotide
  Sense strand starting at position 309 of SEQ ID NO: 1879315
gugcgaucccugcaugaac

SEQ ID NO: 1897973 - RNA, 19 nt, Artificial Sequence
  Description of Artificial Sequence: Synthetic oligonucleotide
  Antisense strand to SEQ ID NO: 1897972
guucaugcagggaucgcac

SEQ ID NO: 1897974 - RNA, 19 nt, Artificial Sequence
  Description of Artificial Sequence: Synthetic oligonucleotide
  Sense strand starting at position 609 of SEQ ID NO: 1879315
gccacuguuguccagagga

SEQ ID NO: 1897975 - RNA, 19 nt, Artificial Sequence
  Description of Artificial Sequence: Synthetic oligonucleotide
  Antisense strand to SEQ ID NO: 1897974
uccucuggacaacaguggc

SEQ ID NO: 1897976 - RNA, 19 nt, Artificial Sequence
  Description of Artificial Sequence: Synthetic oligonucleotide
  Sense strand starting at position 611 of SEQ ID NO: 1879315
cacuguuguccagaggaca

SEQ ID NO: 1897977 - RNA, 19 nt, Artificial Sequence
  Description of Artificial Sequence: Synthetic oligonucleotide
  Antisense strand to SEQ ID NO: 1897976
uguccucuggacaacagug

SEQ ID NO: 1897978 - RNA, 19 nt, Artificial Sequence
  Description of Artificial Sequence: Synthetic oligonucleotide
  Sense strand starting at position 688 of SEQ ID NO: 1879315
cgcacuuagacaugaaguu

SEQ ID NO: 1897979 - RNA, 19 nt, Artificial Sequence
  Description of Artificial Sequence: Synthetic oligonucleotide
  Antisense strand to SEQ ID NO: 1897978
aacuucaugucuaagugcg

SEQ ID NO: 1897980 - RNA, 19 nt, Artificial Sequence
  Description of Artificial Sequence: Synthetic oligonucleotide
  Sense strand starting at position 788 of SEQ ID NO: 1879315
ccgggaacucugugaucuu

SEQ ID NO: 1897981 - RNA, 19 nt, Artificial Sequence
  Description of Artificial Sequence: Synthetic oligonucleotide
  Antisense strand to SEQ ID NO: 1897980
aagaucacagaguucccgg

SEQ ID NO: 1897982 - RNA, 19 nt, Artificial Sequence
  Description of Artificial Sequence: Synthetic oligonucleotide
  Sense strand starting at position 919 of SEQ ID NO: 1879315
cgcaguacuugggugcuua

SEQ ID NO: 1897983 - RNA, 19 nt, Artificial Sequence
  Description of Artificial Sequence: Synthetic oligonucleotide
  Antisense strand to SEQ ID NO: 1897982
uaagcacccaaguacugcg

SEQ ID NO: 1897984 - RNA, 19 nt, Artificial Sequence
  Description of Artificial Sequence: Synthetic oligonucleotide
  Sense strand starting at position 1096 of SEQ ID NO: 1879315
gcaggugggcuucagaguu

SEQ ID NO: 1897985 - RNA, 19 nt, Artificial Sequence
  Description of Artificial Sequence: Synthetic oligonucleotide
  Antisense strand to SEQ ID NO: 1897984
aacucugaagcccaccugc

SEQ ID NO: 1897986 - RNA, 19 nt, Artificial Sequence
  Description of Artificial Sequence: Synthetic oligonucleotide
  Sense strand starting at position 1224 of SEQ ID NO: 1879315
gggagcugaucgcuucuga

SEQ ID NO: 1897987 - RNA, 19 nt, Artificial Sequence
  Description of Artificial Sequence: Synthetic oligonucleotide
  Antisense strand to SEQ ID NO: 1897986
ucagaagcgaucagcuccc

SEQ ID NO: 1897988 - RNA, 19 nt, Artificial Sequence
  Description of Artificial Sequence: Synthetic oligonucleotide
  Sense strand starting at position 1248 of SEQ ID NO: 1879315
cgaagauccggguggagaa

SEQ ID NO: 1897989 - RNA, 19 nt, Artificial Sequence
  Description of Artificial Sequence: Synthetic oligonucleotide
  Antisense strand to SEQ ID NO: 1897988
uucuccacccggaucuucg

SEQ ID NO: 1897990 - RNA, 19 nt, Artificial Sequence
  Description of Artificial Sequence: Synthetic oligonucleotide
  Sense strand starting at position 1298 of SEQ ID NO: 1879315
acagcuaucucgcuuugga

SEQ ID NO: 1897991 - RNA, 19 nt, Artificial Sequence
  Description of Artificial Sequence: Synthetic oligonucleotide
  Antisense strand to SEQ ID NO: 1897990
uccaaagcgagauagcugu

SEQ ID NO: 1897992 - RNA, 19 nt, Artificial Sequence
  Description of Artificial Sequence: Synthetic oligonucleotide
  Sense strand starting at position 1400 of SEQ ID NO: 1879315
uagagaaaucugcgggcgu

SEQ ID NO: 1897993 - RNA, 19 nt, Artificial Sequence
  Description of Artificial Sequence: Synthetic oligonucleotide
  Antisense strand to SEQ ID NO: 1897992
acgcccgcagauuucucua

SEQ ID NO: 1897994 - RNA, 19 nt, Artificial Sequence
  Description of Artificial Sequence: Synthetic oligonucleotide
  Sense strand starting at position 1402 of SEQ ID NO: 1879315
gagaaaucugcgggcguag

SEQ ID NO: 1897995 - RNA, 19 nt, Artificial Sequence
  Description of Artificial Sequence: Synthetic oligonucleotide
  Antisense strand to SEQ ID NO: 1897994
cuacgcccgcagauuucuc

SEQ ID NO: 1897996 - RNA, 19 nt, Artificial Sequence
  Description of Artificial Sequence: Synthetic oligonucleotide
  Sense strand starting at position 1552 of SEQ ID NO: 1879315
gcaguuuccugauugacuu

SEQ ID NO: 1897997 - RNA, 19 nt, Artificial Sequence
  Description of Artificial Sequence: Synthetic oligonucleotide
  Antisense strand to SEQ ID NO: 1897996
aagucaaucaggaaacugc

SEQ ID NO: 1897998 - RNA, 19 nt, Artificial Sequence
  Description of Artificial Sequence: Synthetic oligonucleotide
  Sense strand starting at position 1569 of SEQ ID NO: 1879315
uuaauuagauccgcauaau

SEQ ID NO: 1897999 - RNA, 19 nt, Artificial Sequence
  Description of Artificial Sequence: Synthetic oligonucleotide
  Antisense strand to SEQ ID NO: 1897998
auuaugcggaucuaauuaa

SEQ ID NO: 1898000 - RNA, 19 nt, Artificial Sequence
  Description of Artificial Sequence: Synthetic oligonucleotide
  Sense strand starting at position 2020 of SEQ ID NO: 1879315
aaguaagggucacagaaga

SEQ ID NO: 1898001 - RNA, 19 nt, Artificial Sequence
  Description of Artificial Sequence: Synthetic oligonucleotide
  Antisense strand to SEQ ID NO: 1898000
ucuucugugacccuuacuu

SEQ ID NO: 1898002 - RNA, 19 nt, Artificial Sequence
  Description of Artificial Sequence: Synthetic oligonucleotide
  Sense strand starting at position 2149 of SEQ ID NO: 1879315
aggagaggcuacuagaaau

SEQ ID NO: 1898003 - RNA, 19 nt, Artificial Sequence
  Description of Artificial Sequence: Synthetic oligonucleotide
  Antisense strand to SEQ ID NO: 1898002
auuucuaguagccucuccu

SEQ ID NO: 1898004 - RNA, 19 nt, Artificial Sequence
  Description of Artificial Sequence: Synthetic oligonucleotide
  Sense strand starting at position 2308 of SEQ ID NO: 1879315
cucaguuuccgcuccugua

SEQ ID NO: 1898005 - RNA, 19 nt, Artificial Sequence
  Description of Artificial Sequence: Synthetic oligonucleotide
  Antisense strand to SEQ ID NO: 1898004
uacaggagcggaaacugag

SEQ ID NO: 1898006 - RNA, 19 nt, Artificial Sequence
  Description of Artificial Sequence: Synthetic oligonucleotide
  Sense strand starting at position 2331 of SEQ ID NO: 1879315
guauguaugugaagggucu

SEQ ID NO: 1898007 - RNA, 19 nt, Artificial Sequence
  Description of Artificial Sequence: Synthetic oligonucleotide
  Antisense strand to SEQ ID NO: 1898006
agacccuucacauacauac

SEQ ID NO: 1898008 - RNA, 19 nt, Artificial Sequence
  Description of Artificial Sequence: Synthetic oligonucleotide
  Sense strand starting at position 2481 of SEQ ID NO: 1879315
gguagaacuucucugaagc

SEQ ID NO: 1898009 - RNA, 19 nt, Artificial Sequence
  Description of Artificial Sequence: Synthetic oligonucleotide
  Antisense strand to SEQ ID NO: 1898008
gcuucagagaaguucuacc

SEQ ID NO: 1898010 - RNA, 19 nt, Artificial Sequence
  Description of Artificial Sequence: Synthetic oligonucleotide
  Sense strand starting at position 2482 of SEQ ID NO: 1879315
guagaacuucucugaagca

SEQ ID NO: 1898011 - RNA, 19 nt, Artificial Sequence
  Description of Artificial Sequence: Synthetic oligonucleotide
  Antisense strand to SEQ ID NO: 1898010
ugcuucagagaaguucuac

SEQ ID NO: 1898012 - RNA, 19 nt, Artificial Sequence
  Description of Artificial Sequence: Synthetic oligonucleotide
  Sense strand starting at position 2489 of SEQ ID NO: 1879315
uucucugaagcaggaaauu

SEQ ID NO: 1898013 - RNA, 19 nt, Artificial Sequence
  Description of Artificial Sequence: Synthetic oligonucleotide
  Antisense strand to SEQ ID NO: 1898012
aauuuccugcuucagagaa

SEQ ID NO: 1898014 - RNA, 19 nt, Artificial Sequence
  Description of Artificial Sequence: Synthetic oligonucleotide
  Sense strand starting at position 3003 of SEQ ID NO: 1879315
cucuccacuuguuuagaua

SEQ ID NO: 1898015 - RNA, 19 nt, Artificial Sequence
  Description of Artificial Sequence: Synthetic oligonucleotide
  Antisense strand to SEQ ID NO: 1898014
uaucuaaacaaguggagag

SEQ ID NO: 1898016 - RNA, 19 nt, Artificial Sequence
  Description of Artificial Sequence: Synthetic oligonucleotide
  Sense strand starting at position 3006 of SEQ ID NO: 1879315
uccacuuguuuagauacua

SEQ ID NO: 1898017 - RNA, 19 nt, Artificial Sequence
  Description of Artificial Sequence: Synthetic oligonucleotide
  Antisense strand to SEQ ID NO: 1898016
uaguaucuaaacaagugga

SEQ ID NO: 1898018 - RNA, 19 nt, Artificial Sequence
  Description of Artificial Sequence: Synthetic oligonucleotide
  Sense strand starting at position 3084 of SEQ ID NO: 1879315
ggguucugggagugugaga

SEQ ID NO: 1898019 - RNA, 19 nt, Artificial Sequence
  Description of Artificial Sequence: Synthetic oligonucleotide
  Antisense strand to SEQ ID NO: 1898018
ucucacacucccagaaccc

SEQ ID NO: 1898020 - RNA, 19 nt, Artificial Sequence
  Description of Artificial Sequence: Synthetic oligonucleotide
  Sense strand starting at position 3101 of SEQ ID NO: 1879315
gacagauauccauguaguc

SEQ ID NO: 1898021 - RNA, 19 nt, Artificial Sequence
  Description of Artificial Sequence: Synthetic oligonucleotide
  Antisense strand to SEQ ID NO: 1898020
gacuacauggauaucuguc

SEQ ID NO: 1898022 - RNA, 19 nt, Artificial Sequence
  Description of Artificial Sequence: Synthetic oligonucleotide
  Sense strand starting at position 3124 of SEQ ID NO: 1879315
gcaagcuugagguaugugu

SEQ ID NO: 1898023 - RNA, 19 nt, Artificial Sequence
  Description of Artificial Sequence: Synthetic oligonucleotide
  Antisense strand to SEQ ID NO: 1898022
acacauaccucaagcuugc

SEQ ID NO: 1898024 - RNA, 19 nt, Artificial Sequence
  Description of Artificial Sequence: Synthetic oligonucleotide
  Sense strand starting at position 3138 of SEQ ID NO: 1879315
uguguaggguugccagaua

SEQ ID NO: 1898025 - RNA, 19 nt, Artificial Sequence
  Description of Artificial Sequence: Synthetic oligonucleotide
  Antisense strand to SEQ ID NO: 1898024
uaucuggcaacccuacaca

SEQ ID NO: 1898026 - RNA, 19 nt, Artificial Sequence
  Description of Artificial Sequence: Synthetic oligonucleotide
  Sense strand starting at position 3180 of SEQ ID NO: 1879315
acccuagguaugugaguuu

SEQ ID NO: 1898027 - RNA, 19 nt, Artificial Sequence
  Description of Artificial Sequence: Synthetic oligonucleotide
  Antisense strand to SEQ ID NO: 1898026
aaacucacauaccuagggu

SEQ ID NO: 1898028 - RNA, 19 nt, Artificial Sequence
  Description of Artificial Sequence: Synthetic oligonucleotide
  Sense strand starting at position 3187 of SEQ ID NO: 1879315
guaugugaguuuccuugga

SEQ ID NO: 1898029 - RNA, 19 nt, Artificial Sequence
  Description of Artificial Sequence: Synthetic oligonucleotide
  Antisense strand to SEQ ID NO: 1898028
uccaaggaaacucacauac

SEQ ID NO: 1898030 - RNA, 19 nt, Artificial Sequence
  Description of Artificial Sequence: Synthetic oligonucleotide
  Sense strand starting at position 3189 of SEQ ID NO: 1879315
augugaguuuccuuggacu

SEQ ID NO: 1898031 - RNA, 19 nt, Artificial Sequence
  Description of Artificial Sequence: Synthetic oligonucleotide
  Antisense strand to SEQ ID NO: 1898030
aguccaaggaaacucacau

SEQ ID NO: 1898032 - RNA, 19 nt, Artificial Sequence
  Description of Artificial Sequence: Synthetic oligonucleotide
  Sense strand starting at position 3191 of SEQ ID NO: 1879315
gugaguuuccuuggacuca

SEQ ID NO: 1898033 - RNA, 19 nt, Artificial Sequence
  Description of Artificial Sequence: Synthetic oligonucleotide
  Antisense strand to SEQ ID NO: 1898032
ugaguccaaggaaacucac

SEQ ID NO: 1898034 - RNA, 19 nt, Artificial Sequence
  Description of Artificial Sequence: Synthetic oligonucleotide
  Sense strand starting at position 3203 of SEQ ID NO: 1879315
ggacucaugcaagaagcuu

SEQ ID NO: 1898035 - RNA, 19 nt, Artificial Sequence
  Description of Artificial Sequence: Synthetic oligonucleotide
  Antisense strand to SEQ ID NO: 1898034
aagcuucuugcaugagucc

SEQ ID NO: 1898036 - RNA, 19 nt, Artificial Sequence
  Description of Artificial Sequence: Synthetic oligonucleotide
  Sense strand starting at position 3248 of SEQ ID NO: 1879315
gucugucacccaggaaauu

SEQ ID NO: 1898037 - RNA, 19 nt, Artificial Sequence
  Description of Artificial Sequence: Synthetic oligonucleotide
  Antisense strand to SEQ ID NO: 1898036
aauuuccugggugacagac

SEQ ID NO: 1898038 - RNA, 19 nt, Artificial Sequence
  Description of Artificial Sequence: Synthetic oligonucleotide
  Sense strand starting at position 3278 of SEQ ID NO: 1879315
gcuacuagucccuguccaa

SEQ ID NO: 1898039 - RNA, 19 nt, Artificial Sequence
  Description of Artificial Sequence: Synthetic oligonucleotide
  Antisense strand to SEQ ID NO: 1898038
uuggacagggacuaguagc

SEQ ID NO: 1898040 - RNA, 19 nt, Artificial Sequence
  Description of Artificial Sequence: Synthetic oligonucleotide
  Sense strand starting at position 3307 of SEQ ID NO: 1879315
augguuugaggacgagauu

SEQ ID NO: 1898041 - RNA, 19 nt, Artificial Sequence
  Description of Artificial Sequence: Synthetic oligonucleotide
  Antisense strand to SEQ ID NO: 1898040
aaucucguccucaaaccau

SEQ ID NO: 1898042 - RNA, 19 nt, Artificial Sequence
  Description of Artificial Sequence: Synthetic oligonucleotide
  Sense strand starting at position 3339 of SEQ ID NO: 1879315
augacaguuuaugcuggaa

SEQ ID NO: 1898043 - RNA, 19 nt, Artificial Sequence
  Description of Artificial Sequence: Synthetic oligonucleotide
  Antisense strand to SEQ ID NO: 1898042
uuccagcauaaacugucau

SEQ ID NO: 1898044 - RNA, 19 nt, Artificial Sequence
  Description of Artificial Sequence: Synthetic oligonucleotide
  Sense strand starting at position 134 of SEQ ID NO: 1879316
gucgguuucgcggaaagcu

SEQ ID NO: 1898045 - RNA, 19 nt, Artificial Sequence
  Description of Artificial Sequence: Synthetic oligonucleotide
  Antisense strand to SEQ ID NO: 1898044
agcuuuccgcgaaaccgac

SEQ ID NO: 1898046 - RNA, 19 nt, Artificial Sequence
  Description of Artificial Sequence: Synthetic oligonucleotide
  Sense strand starting at position 215 of SEQ ID NO: 1879316
ucaacucugagaugcguuu

SEQ ID NO: 1898047 - RNA, 19 nt, Artificial Sequence
  Description of Artificial Sequence: Synthetic oligonucleotide
  Antisense strand to SEQ ID NO: 1898046
aaacgcaucucagaguuga

SEQ ID NO: 1898048 - RNA, 19 nt, Artificial Sequence
  Description of Artificial Sequence: Synthetic oligonucleotide
  Sense strand starting at position 242 of SEQ ID NO: 1879316
ugugcaaccucgggaucau

SEQ ID NO: 1898049 - RNA, 19 nt, Artificial Sequence
  Description of Artificial Sequence: Synthetic oligonucleotide
  Antisense strand to SEQ ID NO: 1898048
augaucccgagguugcaca

SEQ ID NO: 1898050 - RNA, 19 nt, Artificial Sequence
  Description of Artificial Sequence: Synthetic oligonucleotide
  Sense strand starting at position 243 of SEQ ID NO: 1879316
gugcaaccucgggaucauu

SEQ ID NO: 1898051 - RNA, 19 nt, Artificial Sequence
  Description of Artificial Sequence: Synthetic oligonucleotide
  Antisense strand to SEQ ID NO: 1898050
aaugaucccgagguugcac

SEQ ID NO: 1898052 - RNA, 19 nt, Artificial Sequence
  Description of Artificial Sequence: Synthetic oligonucleotide
  Sense strand starting at position 252 of SEQ ID NO: 1879316
cgggaucauuuagauaaag

SEQ ID NO: 1898053 - RNA, 19 nt, Artificial Sequence
  Description of Artificial Sequence: Synthetic oligonucleotide
  Antisense strand to SEQ ID NO: 1898052
cuuuaucuaaaugaucccg

SEQ ID NO: 1898054 - RNA, 19 nt, Artificial Sequence
  Description of Artificial Sequence: Synthetic oligonucleotide
  Sense strand starting at position 332 of SEQ ID NO: 1879316
gccucagaugaguaguguu

SEQ ID NO: 1898055 - RNA, 19 nt, Artificial Sequence
  Description of Artificial Sequence: Synthetic oligonucleotide
  Antisense strand to SEQ ID NO: 1898054
aacacuacucaucugaggc

SEQ ID NO: 1898056 - RNA, 19 nt, Artificial Sequence
  Description of Artificial Sequence: Synthetic oligonucleotide
  Sense strand starting at position 335 of SEQ ID NO: 1879316
ucagaugaguaguguuaua

SEQ ID NO: 1898057 - RNA, 19 nt, Artificial Sequence
  Description of Artificial Sequence: Synthetic oligonucleotide
  Antisense strand to SEQ ID NO: 1898056
uauaacacuacucaucuga

SEQ ID NO: 1898058 - RNA, 19 nt, Artificial Sequence
  Description of Artificial Sequence: Synthetic oligonucleotide
  Sense strand starting at position 340 of SEQ ID NO: 1879316
ugaguaguguuauauccug

SEQ ID NO: 1898059 - RNA, 19 nt, Artificial Sequence
  Description of Artificial Sequence: Synthetic oligonucleotide
  Antisense strand to SEQ ID NO: 1898058
caggauauaacacuacuca

SEQ ID NO: 1898060 - RNA, 19 nt, Artificial Sequence
  Description of Artificial Sequence: Synthetic oligonucleotide
  Sense strand starting at position 345 of SEQ ID NO: 1879316
aguguuauauccugggaaa

SEQ ID NO: 1898061 - RNA, 19 nt, Artificial Sequence
  Description of Artificial Sequence: Synthetic oligonucleotide
  Antisense strand to SEQ ID NO: 1898060
uuucccaggauauaacacu

SEQ ID NO: 1898062 - RNA, 19 nt, Artificial Sequence
  Description of Artificial Sequence: Synthetic oligonucleotide
  Sense strand starting at position 346 of SEQ ID NO: 1879316
guguuauauccugggaaac

SEQ ID NO: 1898063 - RNA, 19 nt, Artificial Sequence
  Description of Artificial Sequence: Synthetic oligonucleotide
  Antisense strand to SEQ ID NO: 1898062
guuucccaggauauaacac

SEQ ID NO: 1898064 - RNA, 19 nt, Artificial Sequence
  Description of Artificial Sequence: Synthetic oligonucleotide
  Sense strand starting at position 347 of SEQ ID NO: 1879316
uguuauauccugggaaacu

SEQ ID NO: 1898065 - RNA, 19 nt, Artificial Sequence
  Description of Artificial Sequence: Synthetic oligonucleotide
  Antisense strand to SEQ ID NO: 1898064
aguuucccaggauauaaca

SEQ ID NO: 1898066 - RNA, 19 nt, Artificial Sequence
  Description of Artificial Sequence: Synthetic oligonucleotide
  Sense strand starting at position 348 of SEQ ID NO: 1879316
guuauauccugggaaacug

SEQ ID NO: 1898067 - RNA, 19 nt, Artificial Sequence
  Description of Artificial Sequence: Synthetic oligonucleotide
  Antisense strand to SEQ ID NO: 1898066
caguuucccaggauauaac

SEQ ID NO: 1898068 - RNA, 19 nt, Artificial Sequence
  Description of Artificial Sequence: Synthetic oligonucleotide
  Sense strand starting at position 382 of SEQ ID NO: 1879316
agucaaucugugugucuca

SEQ ID NO: 1898069 - RNA, 19 nt, Artificial Sequence
  Description of Artificial Sequence: Synthetic oligonucleotide
  Antisense strand to SEQ ID NO: 1898068
ugagacacacagauugacu

SEQ ID NO: 1898070 - RNA, 19 nt, Artificial Sequence
  Description of Artificial Sequence: Synthetic oligonucleotide
  Sense strand starting at position 383 of SEQ ID NO: 1879316
gucaaucugugugucucaa

SEQ ID NO: 1898071 - RNA, 19 nt, Artificial Sequence
  Description of Artificial Sequence: Synthetic oligonucleotide
  Antisense strand to SEQ ID NO: 1898070
uugagacacacagauugac

SEQ ID NO: 1898072 - RNA, 19 nt, Artificial Sequence
  Description of Artificial Sequence: Synthetic oligonucleotide
  Sense strand starting at position 391 of SEQ ID NO: 1879316
gugugucucaaugccugua

SEQ ID NO: 1898073 - RNA, 19 nt, Artificial Sequence
  Description of Artificial Sequence: Synthetic oligonucleotide
  Antisense strand to SEQ ID NO: 1898072
uacaggcauugagacacac

SEQ ID NO: 1898074 - RNA, 19 nt, Artificial Sequence
  Description of Artificial Sequence: Synthetic oligonucleotide
  Sense strand starting at position 394 of SEQ ID NO: 1879316
ugucucaaugccuguaaug

SEQ ID NO: 1898075 - RNA, 19 nt, Artificial Sequence
  Description of Artificial Sequence: Synthetic oligonucleotide
  Antisense strand to SEQ ID NO: 1898074
cauuacaggcauugagaca

SEQ ID NO: 1898076 - RNA, 19 nt, Artificial Sequence
  Description of Artificial Sequence: Synthetic oligonucleotide
  Sense strand starting at position 396 of SEQ ID NO: 1879316
ucucaaugccuguaaugaa

SEQ ID NO: 1898077 - RNA, 19 nt, Artificial Sequence
  Description of Artificial Sequence: Synthetic oligonucleotide
  Antisense strand to SEQ ID NO: 1898076
uucauuacaggcauugaga

SEQ ID NO: 1898078 - RNA, 19 nt, Artificial Sequence
  Description of Artificial Sequence: Synthetic oligonucleotide
  Sense strand starting at position 763 of SEQ ID NO: 1879316
gcugauucaccgcgucaag

SEQ ID NO: 1898079 - RNA, 19 nt, Artificial Sequence
  Description of Artificial Sequence: Synthetic oligonucleotide
  Antisense strand to SEQ ID NO: 1898078
cuugacgcggugaaucagc

SEQ ID NO: 1898080 - RNA, 19 nt, Artificial Sequence
  Description of Artificial Sequence: Synthetic oligonucleotide
  Sense strand starting at position 775 of SEQ ID NO: 1879316
cgucaagagcacugacuuu

SEQ ID NO: 1898081 - RNA, 19 nt, Artificial Sequence
  Description of Artificial Sequence: Synthetic oligonucleotide
  Antisense strand to SEQ ID NO: 1898080
aaagucagugcucuugacg

SEQ ID NO: 1898082 - RNA, 19 nt, Artificial Sequence
  Description of Artificial Sequence: Synthetic oligonucleotide
  Sense strand starting at position 787 of SEQ ID NO: 1879316
ugacuuuccuuggaggugu

SEQ ID NO: 1898083 - RNA, 19 nt, Artificial Sequence
  Description of Artificial Sequence: Synthetic oligonucleotide
  Antisense strand to SEQ ID NO: 1898082
acaccuccaaggaaaguca

SEQ ID NO: 1898084 - RNA, 19 nt, Artificial Sequence
  Description of Artificial Sequence: Synthetic oligonucleotide
  Sense strand starting at position 1187 of SEQ ID NO: 1879316
cccggauccacucgacuua

SEQ ID NO: 1898085 - RNA, 19 nt, Artificial Sequence
  Description of Artificial Sequence: Synthetic oligonucleotide
  Antisense strand to SEQ ID NO: 1898084
uaagucgaguggauccggg

SEQ ID NO: 1898086 - RNA, 19 nt, Artificial Sequence
  Description of Artificial Sequence: Synthetic oligonucleotide
  Sense strand starting at position 1309 of SEQ ID NO: 1879316
auuuauagguucccugcua

SEQ ID NO: 1898087 - RNA, 19 nt, Artificial Sequence
  Description of Artificial Sequence: Synthetic oligonucleotide
  Antisense strand to SEQ ID NO: 1898086
uagcagggaaccuauaaau

SEQ ID NO: 1898088 - RNA, 19 nt, Artificial Sequence
  Description of Artificial Sequence: Synthetic oligonucleotide
  Sense strand starting at position 1310 of SEQ ID NO: 1879316
uuuauagguucccugcuau

SEQ ID NO: 1898089 - RNA, 19 nt, Artificial Sequence
  Description of Artificial Sequence: Synthetic oligonucleotide
  Antisense strand to SEQ ID NO: 1898088
auagcagggaaccuauaaa

SEQ ID NO: 1898090 - RNA, 19 nt, Artificial Sequence
  Description of Artificial Sequence: Synthetic oligonucleotide
  Sense strand starting at position 1340 of SEQ ID NO: 1879316
uuuauuucucucggcaacu

SEQ ID NO: 1898091 - RNA, 19 nt, Artificial Sequence
  Description of Artificial Sequence: Synthetic oligonucleotide
  Antisense strand to SEQ ID NO: 1898090
aguugccgagagaaauaaa

SEQ ID NO: 1898092 - RNA, 19 nt, Artificial Sequence
  Description of Artificial Sequence: Synthetic oligonucleotide
  Sense strand starting at position 1341 of SEQ ID NO: 1879316
uuauuucucucggcaacua

SEQ ID NO: 1898093 - RNA, 19 nt, Artificial Sequence
  Description of Artificial Sequence: Synthetic oligonucleotide
  Antisense strand to SEQ ID NO: 1898092
uaguugccgagagaaauaa

SEQ ID NO: 1898094 - RNA, 19 nt, Artificial Sequence
  Description of Artificial Sequence: Synthetic oligonucleotide
  Sense strand starting at position 1349 of SEQ ID NO: 1879316
cucggcaacuauucuagua

SEQ ID NO: 1898095 - RNA, 19 nt, Artificial Sequence
  Description of Artificial Sequence: Synthetic oligonucleotide
  Antisense strand to SEQ ID NO: 1898094
uacuagaauaguugccgag

SEQ ID NO: 1898096 - RNA, 19 nt, Artificial Sequence
  Description of Artificial Sequence: Synthetic oligonucleotide
  Sense strand starting at position 1351 of SEQ ID NO: 1879316
cggcaacuauucuaguaga

SEQ ID NO: 1898097 - RNA, 19 nt, Artificial Sequence
  Description of Artificial Sequence: Synthetic oligonucleotide
  Antisense strand to SEQ ID NO: 1898096
ucuacuagaauaguugccg

SEQ ID NO: 1898098 - RNA, 19 nt, Artificial Sequence
  Description of Artificial Sequence: Synthetic oligonucleotide
  Sense strand starting at position 1483 of SEQ ID NO: 1879316
ggaccugagugguuugguu

SEQ ID NO: 1898099 - RNA, 19 nt, Artificial Sequence
  Description of Artificial Sequence: Synthetic oligonucleotide
  Antisense strand to SEQ ID NO: 1898098
aaccaaaccacucaggucc

SEQ ID NO: 1898100 - RNA, 19 nt, Artificial Sequence
  Description of Artificial Sequence: Synthetic oligonucleotide
  Sense strand starting at position 1569 of SEQ ID NO: 1879316
ucugaaaucuaauuagcag

SEQ ID NO: 1898101 - RNA, 19 nt, Artificial Sequence
  Description of Artificial Sequence: Synthetic oligonucleotide
  Antisense strand to SEQ ID NO: 1898100
cugcuaauuagauuucaga

SEQ ID NO: 1898102 - RNA, 19 nt, Artificial Sequence
  Description of Artificial Sequence: Synthetic oligonucleotide
  Sense strand starting at position 1602 of SEQ ID NO: 1879316
cgcugcucuuacucuuuaa

SEQ ID NO: 1898103 - RNA, 19 nt, Artificial Sequence
  Description of Artificial Sequence: Synthetic oligonucleotide
  Antisense strand to SEQ ID NO: 1898102
uuaaagaguaagagcagcg

SEQ ID NO: 1898104 - RNA, 19 nt, Artificial Sequence
  Description of Artificial Sequence: Synthetic oligonucleotide
  Sense strand starting at position 1712 of SEQ ID NO: 1879316
cugucuaaggagugugaca

SEQ ID NO: 1898105 - RNA, 19 nt, Artificial Sequence
  Description of Artificial Sequence: Synthetic oligonucleotide
  Antisense strand to SEQ ID NO: 1898104
ugucacacuccuuagacag

SEQ ID NO: 1898106 - RNA, 19 nt, Artificial Sequence
  Description of Artificial Sequence: Synthetic oligonucleotide
  Sense strand starting at position 1714 of SEQ ID NO: 1879316
gucuaaggagugugacaaa

SEQ ID NO: 1898107 - RNA, 19 nt, Artificial Sequence
  Description of Artificial Sequence: Synthetic oligonucleotide
  Antisense strand to SEQ ID NO: 1898106
uuugucacacuccuuagac

SEQ ID NO: 1898108 - RNA, 19 nt, Artificial Sequence
  Description of Artificial Sequence: Synthetic oligonucleotide
  Sense strand starting at position 1977 of SEQ ID NO: 1879316
ucgucccuuuguugacaau

SEQ ID NO: 1898109 - RNA, 19 nt, Artificial Sequence
  Description of Artificial Sequence: Synthetic oligonucleotide
  Antisense strand to SEQ ID NO: 1898108
auugucaacaaagggacga

SEQ ID NO: 1898110 - RNA, 19 nt, Artificial Sequence
  Description of Artificial Sequence: Synthetic oligonucleotide
  Sense strand starting at position 1978 of SEQ ID NO: 1879316
cgucccuuuguugacaauu

SEQ ID NO: 1898111 - RNA, 19 nt, Artificial Sequence
  Description of Artificial Sequence: Synthetic oligonucleotide
  Antisense strand to SEQ ID NO: 1898110
aauugucaacaaagggacg

SEQ ID NO: 1898112 - RNA, 19 nt, Artificial Sequence
  Description of Artificial Sequence: Synthetic oligonucleotide
  Sense strand starting at position 2068 of SEQ ID NO: 1879316
cccgcuggaucuuuaagua

SEQ ID NO: 1898113 - RNA, 19 nt, Artificial Sequence
  Description of Artificial Sequence: Synthetic oligonucleotide
  Antisense strand to SEQ ID NO: 1898112
uacuuaaagauccagcggg

SEQ ID NO: 1898114 - RNA, 19 nt, Artificial Sequence
  Description of Artificial Sequence: Synthetic oligonucleotide
  Sense strand starting at position 2072 of SEQ ID NO: 1879316
cuggaucuuuaaguagaaa

SEQ ID NO: 1898115 - RNA, 19 nt, Artificial Sequence
  Description of Artificial Sequence: Synthetic oligonucleotide
  Antisense strand to SEQ ID NO: 1898114
uuucuacuuaaagauccag

SEQ ID NO: 1898116 - RNA, 19 nt, Artificial Sequence
  Description of Artificial Sequence: Synthetic oligonucleotide
  Sense strand starting at position 2083 of SEQ ID NO: 1879316
aguagaaaguaaucuauca

SEQ ID NO: 1898117 - RNA, 19 nt, Artificial Sequence
  Description of Artificial Sequence: Synthetic oligonucleotide
  Antisense strand to SEQ ID NO: 1898116
ugauagauuacuuucuacu

SEQ ID NO: 1898118 - RNA, 19 nt, Artificial Sequence
  Description of Artificial Sequence: Synthetic oligonucleotide
  Sense strand starting at position 2090 of SEQ ID NO: 1879316
aguaaucuaucaggccagu

SEQ ID NO: 1898119 - RNA, 19 nt, Artificial Sequence
  Description of Artificial Sequence: Synthetic oligonucleotide
  Antisense strand to SEQ ID NO: 1898118
acuggccugauagauuacu

SEQ ID NO: 1898120 - RNA, 19 nt, Artificial Sequence
  Description of Artificial Sequence: Synthetic oligonucleotide
  Sense strand starting at position 92 of SEQ ID NO: 1879317
auuuauagguucccugcua

SEQ ID NO: 1898121 - RNA, 19 nt, Artificial Sequence
  Description of Artificial Sequence: Synthetic oligonucleotide
  Antisense strand to SEQ ID NO: 1898120
uagcagggaaccuauaaau

SEQ ID NO: 1898122 - RNA, 19 nt, Artificial Sequence
  Description of Artificial Sequence: Synthetic oligonucleotide
  Sense strand starting at position 93 of SEQ ID NO: 1879317
uuuauagguucccugcuau

SEQ ID NO: 1898123 - RNA, 19 nt, Artificial Sequence
  Description of Artificial Sequence: Synthetic oligonucleotide
  Antisense strand to SEQ ID NO: 1898122
auagcagggaaccuauaaa

SEQ ID NO: 1898124 - RNA, 19 nt, Artificial Sequence
  Description of Artificial Sequence: Synthetic oligonucleotide
  Sense strand starting at position 123 of SEQ ID NO: 1879317
uuuauuucucucggcaacu

SEQ ID NO: 1898125 - RNA, 19 nt, Artificial Sequence
  Description of Artificial Sequence: Synthetic oligonucleotide
  Antisense strand to SEQ ID NO: 1898124
aguugccgagagaaauaaa

SEQ ID NO: 1898126 - RNA, 19 nt, Artificial Sequence
  Description of Artificial Sequence: Synthetic oligonucleotide
  Sense strand starting at position 124 of SEQ ID NO: 1879317
uuauuucucucggcaacua

SEQ ID NO: 1898127 - RNA, 19 nt, Artificial Sequence
  Description of Artificial Sequence: Synthetic oligonucleotide
  Antisense strand to SEQ ID NO: 1898126
uaguugccgagagaaauaa

SEQ ID NO: 1898128 - RNA, 19 nt, Artificial Sequence
  Description of Artificial Sequence: Synthetic oligonucleotide
  Sense strand starting at position 132 of SEQ ID NO: 1879317
cucggcaacuauucuagua

SEQ ID NO: 1898129 - RNA, 19 nt, Artificial Sequence
  Description of Artificial Sequence: Synthetic oligonucleotide
  Antisense strand to SEQ ID NO: 1898128
uacuagaauaguugccgag

SEQ ID NO: 1898130 - RNA, 19 nt, Artificial Sequence
  Description of Artificial Sequence: Synthetic oligonucleotide
  Sense strand starting at position 134 of SEQ ID NO: 1879317
cggcaacuauucuaguaga

SEQ ID NO: 1898131 - RNA, 19 nt, Artificial Sequence
  Description of Artificial Sequence: Synthetic oligonucleotide
  Antisense strand to SEQ ID NO: 1898130
ucuacuagaauaguugccg

SEQ ID NO: 1898132 - RNA, 19 nt, Artificial Sequence
  Description of Artificial Sequence: Synthetic oligonucleotide
  Sense strand starting at position 266 of SEQ ID NO: 1879317
ggaccugagugguuugguu

SEQ ID NO: 1898133 - RNA, 19 nt, Artificial Sequence
  Description of Artificial Sequence: Synthetic oligonucleotide
  Antisense strand to SEQ ID NO: 1898132
aaccaaaccacucaggucc

SEQ ID NO: 1898134 - RNA, 19 nt, Artificial Sequence
  Description of Artificial Sequence: Synthetic oligonucleotide
  Sense strand starting at position 352 of SEQ ID NO: 1879317
ucugaaaucuaauuagcag

SEQ ID NO: 1898135 - RNA, 19 nt, Artificial Sequence
  Description of Artificial Sequence: Synthetic oligonucleotide
  Antisense strand to SEQ ID NO: 1898134
cugcuaauuagauuucaga

SEQ ID NO: 1898136 - RNA, 19 nt, Artificial Sequence
  Description of Artificial Sequence: Synthetic oligonucleotide
  Sense strand starting at position 385 of SEQ ID NO: 1879317
cgcugcucuuacucuuuaa

SEQ ID NO: 1898137 - RNA, 19 nt, Artificial Sequence
  Description of Artificial Sequence: Synthetic oligonucleotide
  Antisense strand to SEQ ID NO: 1898136
uuaaagaguaagagcagcg

SEQ ID NO: 1898138 - RNA, 19 nt, Artificial Sequence
  Description of Artificial Sequence: Synthetic oligonucleotide
  Sense strand starting at position 495 of SEQ ID NO: 1879317
cugucuaaggagugugaca

SEQ ID NO: 1898139 - RNA, 19 nt, Artificial Sequence
  Description of Artificial Sequence: Synthetic oligonucleotide
  Antisense strand to SEQ ID NO: 1898138
ugucacacuccuuagacag

SEQ ID NO: 1898140 - RNA, 19 nt, Artificial Sequence
  Description of Artificial Sequence: Synthetic oligonucleotide
  Sense strand starting at position 497 of SEQ ID NO: 1879317
gucuaaggagugugacaaa

SEQ ID NO: 1898141 - RNA, 19 nt, Artificial Sequence
  Description of Artificial Sequence: Synthetic oligonucleotide
  Antisense strand to SEQ ID NO: 1898140
uuugucacacuccuuagac

SEQ ID NO: 1898142 - RNA, 19 nt, Artificial Sequence
  Description of Artificial Sequence: Synthetic oligonucleotide
  Sense strand starting at position 760 of SEQ ID NO: 1879317
ucgucccuuuguugacaau

SEQ ID NO: 1898143 - RNA, 19 nt, Artificial Sequence
  Description of Artificial Sequence: Synthetic oligonucleotide
  Antisense strand to SEQ ID NO: 1898142
auugucaacaaagggacga

SEQ ID NO: 1898144 - RNA, 19 nt, Artificial Sequence
  Description of Artificial Sequence: Synthetic oligonucleotide
  Sense strand starting at position 761 of SEQ ID NO: 1879317
cgucccuuuguugacaauu

SEQ ID NO: 1898145 - RNA, 19 nt, Artificial Sequence
  Description of Artificial Sequence: Synthetic oligonucleotide
  Antisense strand to SEQ ID NO: 1898144
aauugucaacaaagggacg

SEQ ID NO: 1898146 - RNA, 19 nt, Artificial Sequence
  Description of Artificial Sequence: Synthetic oligonucleotide
  Sense strand starting at position 851 of SEQ ID NO: 1879317
cccgcuggaucuuuaagua

SEQ ID NO: 1898147 - RNA, 19 nt, Artificial Sequence
  Description of Artificial Sequence: Synthetic oligonucleotide
  Antisense strand to SEQ ID NO: 1898146
uacuuaaagauccagcggg

SEQ ID NO: 1898148 - RNA, 19 nt, Artificial Sequence
  Description of Artificial Sequence: Synthetic oligonucleotide
  Sense strand starting at position 855 of SEQ ID NO: 1879317
cuggaucuuuaaguagaaa

SEQ ID NO: 1898149 - RNA, 19 nt, Artificial Sequence
  Description of Artificial Sequence: Synthetic oligonucleotide
  Antisense strand to SEQ ID NO: 1898148
uuucuacuuaaagauccag

SEQ ID NO: 1898150 - RNA, 19 nt, Artificial Sequence
  Description of Artificial Sequence: Synthetic oligonucleotide
  Sense strand starting at position 866 of SEQ ID NO: 1879317
aguagaaaguaaucuauca

SEQ ID NO: 1898151 - RNA, 19 nt, Artificial Sequence
  Description of Artificial Sequence: Synthetic oligonucleotide
  Antisense strand to SEQ ID NO: 1898150
ugauagauuacuuucuacu

SEQ ID NO: 1898152 - RNA, 19 nt, Artificial Sequence
  Description of Artificial Sequence: Synthetic oligonucleotide
  Sense strand starting at position 873 of SEQ ID NO: 1879317
aguaaucuaucaggccagu

SEQ ID NO: 1898153 - RNA, 19 nt, Artificial Sequence
  Description of Artificial Sequence: Synthetic oligonucleotide
  Antisense strand to SEQ ID NO: 1898152
acuggccugauagauuacu

SEQ ID NO: 1898154 - RNA, 19 nt, Artificial Sequence
  Description of Artificial Sequence: Synthetic oligonucleotide
  Sense strand starting at position 3464 of SEQ ID NO: 1879317
uuauuuaguugucugaagu

SEQ ID NO: 1898155 - RNA, 19 nt, Artificial Sequence
  Description of Artificial Sequence: Synthetic oligonucleotide
  Antisense strand to SEQ ID NO: 1898154
acuucagacaacuaaauaa

SEQ ID NO: 1898156 - RNA, 19 nt, Artificial Sequence
  Description of Artificial Sequence: Synthetic oligonucleotide
  Sense strand starting at position 3613 of SEQ ID NO: 1879317
aggaaauaguaugccuaau

SEQ ID NO: 1898157 - RNA, 19 nt, Artificial Sequence
  Description of Artificial Sequence: Synthetic oligonucleotide
  Antisense strand to SEQ ID NO: 1898156
auuaggcauacuauuuccu

SEQ ID NO: 1898158 - RNA, 19 nt, Artificial Sequence
  Description of Artificial Sequence: Synthetic oligonucleotide
  Sense strand starting at position 3670 of SEQ ID NO: 1879317
aaaucaggaugugagugau

SEQ ID NO: 1898159 - RNA, 19 nt, Artificial Sequence
  Description of Artificial Sequence: Synthetic oligonucleotide
  Antisense strand to SEQ ID NO: 1898158
aucacucacauccugauuu

SEQ ID NO: 1898160 - RNA, 19 nt, Artificial Sequence
  Description of Artificial Sequence: Synthetic oligonucleotide
  Sense strand starting at position 3676 of SEQ ID NO: 1879317
ggaugugagugauaucauu

SEQ ID NO: 1898161 - RNA, 19 nt, Artificial Sequence
  Description of Artificial Sequence: Synthetic oligonucleotide
  Antisense strand to SEQ ID NO: 1898160
aaugauaucacucacaucc

SEQ ID NO: 1898162 - RNA, 19 nt, Artificial Sequence
  Description of Artificial Sequence: Synthetic oligonucleotide
  Sense strand starting at position 3720 of SEQ ID NO: 1879317
accagacauuucuguagau

SEQ ID NO: 1898163 - RNA, 19 nt, Artificial Sequence
  Description of Artificial Sequence: Synthetic oligonucleotide
  Antisense strand to SEQ ID NO: 1898162
aucuacagaaaugucuggu

SEQ ID NO: 1898164 - RNA, 19 nt, Artificial Sequence
  Description of Artificial Sequence: Synthetic oligonucleotide
  Sense strand starting at position 3803 of SEQ ID NO: 1879317
ugacuagacuuguaucuuc

SEQ ID NO: 1898165 - RNA, 19 nt, Artificial Sequence
  Description of Artificial Sequence: Synthetic oligonucleotide
  Antisense strand to SEQ ID NO: 1898164
gaagauacaagucuaguca

SEQ ID NO: 1898166 - RNA, 19 nt, Artificial Sequence
  Description of Artificial Sequence: Synthetic oligonucleotide
  Sense strand starting at position 3841 of SEQ ID NO: 1879317
augagagaguucuugguca

SEQ ID NO: 1898167 - RNA, 19 nt, Artificial Sequence
  Description of Artificial Sequence: Synthetic oligonucleotide
  Antisense strand to SEQ ID NO: 1898166
ugaccaagaacucucucau

SEQ ID NO: 1898168 - RNA, 19 nt, Artificial Sequence
  Description of Artificial Sequence: Synthetic oligonucleotide
  Sense strand starting at position 3843 of SEQ ID NO: 1879317
gagagaguucuuggucauu

SEQ ID NO: 1898169 - RNA, 19 nt, Artificial Sequence
  Description of Artificial Sequence: Synthetic oligonucleotide
  Antisense strand to SEQ ID NO: 1898168
aaugaccaagaacucucuc

SEQ ID NO: 1898170 - RNA, 19 nt, Artificial Sequence
  Description of Artificial Sequence: Synthetic oligonucleotide
  Sense strand starting at position 3952 of SEQ ID NO: 1879317
uuaaguggaagugguaaau

SEQ ID NO: 1898171 - RNA, 19 nt, Artificial Sequence
  Description of Artificial Sequence: Synthetic oligonucleotide
  Antisense strand to SEQ ID NO: 1898170
auuuaccacuuccacuuaa

SEQ ID NO: 1898172 - RNA, 19 nt, Artificial Sequence
  Description of Artificial Sequence: Synthetic oligonucleotide
  Sense strand starting at position 85 of SEQ ID NO: 1879318
cccgcuggaucuuuaagua

SEQ ID NO: 1898173 - RNA, 19 nt, Artificial Sequence
  Description of Artificial Sequence: Synthetic oligonucleotide
  Antisense strand to SEQ ID NO: 1898172
uacuuaaagauccagcggg

SEQ ID NO: 1898174 - RNA, 19 nt, Artificial Sequence
  Description of Artificial Sequence: Synthetic oligonucleotide
  Sense strand starting at position 89 of SEQ ID NO: 1879318
cuggaucuuuaaguagaaa

SEQ ID NO: 1898175 - RNA, 19 nt, Artificial Sequence
  Description of Artificial Sequence: Synthetic oligonucleotide
  Antisense strand to SEQ ID NO: 1898174
uuucuacuuaaagauccag

SEQ ID NO: 1898176 - RNA, 19 nt, Artificial Sequence
  Description of Artificial Sequence: Synthetic oligonucleotide
  Sense strand starting at position 100 of SEQ ID NO: 1879318
aguagaaaguaaucuauca

SEQ ID NO: 1898177 - RNA, 19 nt, Artificial Sequence
  Description of Artificial Sequence: Synthetic oligonucleotide
  Antisense strand to SEQ ID NO: 1898176
ugauagauuacuuucuacu

SEQ ID NO: 1898178 - RNA, 19 nt, Artificial Sequence
  Description of Artificial Sequence: Synthetic oligonucleotide
  Sense strand starting at position 107 of SEQ ID NO: 1879318
aguaaucuaucaggccagu

SEQ ID NO: 1898179 - RNA, 19 nt, Artificial Sequence
  Description of Artificial Sequence: Synthetic oligonucleotide
  Antisense strand to SEQ ID NO: 1898178
acuggccugauagauuacu

SEQ ID NO: 1898180 - RNA, 19 nt, Artificial Sequence
  Description of Artificial Sequence: Synthetic oligonucleotide
  Sense strand starting at position 2698 of SEQ ID NO: 1879318
uuauuuaguugucugaagu

SEQ ID NO: 1898181 - RNA, 19 nt, Artificial Sequence
  Description of Artificial Sequence: Synthetic oligonucleotide
  Antisense strand to SEQ ID NO: 1898180
acuucagacaacuaaauaa

SEQ ID NO: 1898182 - RNA, 19 nt, Artificial Sequence
  Description of Artificial Sequence: Synthetic oligonucleotide
  Sense strand starting at position 2847 of SEQ ID NO: 1879318
aggaaauaguaugccuaau

SEQ ID NO: 1898183 - RNA, 19 nt, Artificial Sequence
  Description of Artificial Sequence: Synthetic oligonucleotide
  Antisense strand to SEQ ID NO: 1898182
auuaggcauacuauuuccu

SEQ ID NO: 1898184 - RNA, 19 nt, Artificial Sequence
  Description of Artificial Sequence: Synthetic oligonucleotide
  Sense strand starting at position 2904 of SEQ ID NO: 1879318
aaaucaggaugugagugau

SEQ ID NO: 1898185 - RNA, 19 nt, Artificial Sequence
  Description of Artificial Sequence: Synthetic oligonucleotide
  Antisense strand to SEQ ID NO: 1898184
aucacucacauccugauuu

SEQ ID NO: 1898186 - RNA, 19 nt, Artificial Sequence
  Description of Artificial Sequence: Synthetic oligonucleotide
  Sense strand starting at position 2910 of SEQ ID NO: 1879318
ggaugugagugauaucauu

SEQ ID NO: 1898187 - RNA, 19 nt, Artificial Sequence
  Description of Artificial Sequence: Synthetic oligonucleotide
  Antisense strand to SEQ ID NO: 1898186
aaugauaucacucacaucc

SEQ ID NO: 1898188 - RNA, 19 nt, Artificial Sequence
  Description of Artificial Sequence: Synthetic oligonucleotide
  Sense strand starting at position 2954 of SEQ ID NO: 1879318
accagacauuucuguagau

SEQ ID NO: 1898189 - RNA, 19 nt, Artificial Sequence
  Description of Artificial Sequence: Synthetic oligonucleotide
  Antisense strand to SEQ ID NO: 1898188
aucuacagaaaugucuggu

SEQ ID NO: 1898190 - RNA, 19 nt, Artificial Sequence
  Description of Artificial Sequence: Synthetic oligonucleotide
  Sense strand starting at position 3037 of SEQ ID NO: 1879318
ugacuagacuuguaucuuc

SEQ ID NO: 1898191 - RNA, 19 nt, Artificial Sequence
  Description of Artificial Sequence: Synthetic oligonucleotide
  Antisense strand to SEQ ID NO: 1898190
gaagauacaagucuaguca

SEQ ID NO: 1898192 - RNA, 19 nt, Artificial Sequence
  Description of Artificial Sequence: Synthetic oligonucleotide
  Sense strand starting at position 3075 of SEQ ID NO: 1879318
augagagaguucuugguca

SEQ ID NO: 1898193 - RNA, 19 nt, Artificial Sequence
  Description of Artificial Sequence: Synthetic oligonucleotide
  Antisense strand to SEQ ID NO: 1898192
ugaccaagaacucucucau

SEQ ID NO: 1898194 - RNA, 19 nt, Artificial Sequence
  Description of Artificial Sequence: Synthetic oligonucleotide
  Sense strand starting at position 3077 of SEQ ID NO: 1879318
gagagaguucuuggucauu

SEQ ID NO: 1898195 - RNA, 19 nt, Artificial Sequence
  Description of Artificial Sequence: Synthetic oligonucleotide
  Antisense strand to SEQ ID NO: 1898194
aaugaccaagaacucucuc

SEQ ID NO: 1898196 - RNA, 19 nt, Artificial Sequence
  Description of Artificial Sequence: Synthetic oligonucleotide
  Sense strand starting at position 3186 of SEQ ID NO: 1879318
uuaaguggaagugguaaau

SEQ ID NO: 1898197 - RNA, 19 nt, Artificial Sequence
  Description of Artificial Sequence: Synthetic oligonucleotide
  Antisense strand to SEQ ID NO: 1898196
auuuaccacuuccacuuaa

SEQ ID NO: 1898198 - RNA, 19 nt, Artificial Sequence
  Description of Artificial Sequence: Synthetic oligonucleotide
  Sense strand starting at position 3425 of SEQ ID NO: 1879318
aaggaaugguggccuuaau

SEQ ID NO: 1898199 - RNA, 19 nt, Artificial Sequence
  Description of Artificial Sequence: Synthetic oligonucleotide
  Antisense strand to SEQ ID NO: 1898198
auuaaggccaccauuccuu

SEQ ID NO: 1898200 - RNA, 19 nt, Artificial Sequence
  Description of Artificial Sequence: Synthetic oligonucleotide
  Sense strand starting at position 3498 of SEQ ID NO: 1879318
aggcuagguuagugugaaa

SEQ ID NO: 1898201 - RNA, 19 nt, Artificial Sequence
  Description of Artificial Sequence: Synthetic oligonucleotide
  Antisense strand to SEQ ID NO: 1898200
uuucacacuaaccuagccu

SEQ ID NO: 1898202 - RNA, 19 nt, Artificial Sequence
  Description of Artificial Sequence: Synthetic oligonucleotide
  Sense strand starting at position 3503 of SEQ ID NO: 1879318
agguuagugugaaaugcga

SEQ ID NO: 1898203 - RNA, 19 nt, Artificial Sequence
  Description of Artificial Sequence: Synthetic oligonucleotide
  Antisense strand to SEQ ID NO: 1898202
ucgcauuucacacuaaccu

SEQ ID NO: 1898204 - RNA, 19 nt, Artificial Sequence
  Description of Artificial Sequence: Synthetic oligonucleotide
  Sense strand starting at position 3505 of SEQ ID NO: 1879318
guuagugugaaaugcgaca

SEQ ID NO: 1898205 - RNA, 19 nt, Artificial Sequence
  Description of Artificial Sequence: Synthetic oligonucleotide
  Antisense strand to SEQ ID NO: 1898204
ugucgcauuucacacuaac

SEQ ID NO: 1898206 - RNA, 19 nt, Artificial Sequence
  Description of Artificial Sequence: Synthetic oligonucleotide
  Sense strand starting at position 3510 of SEQ ID NO: 1879318
ugugaaaugcgacaucaua

SEQ ID NO: 1898207 - RNA, 19 nt, Artificial Sequence
  Description of Artificial Sequence: Synthetic oligonucleotide
  Antisense strand to SEQ ID NO: 1898206
uaugaugucgcauuucaca

SEQ ID NO: 1898208 - RNA, 19 nt, Artificial Sequence
  Description of Artificial Sequence: Synthetic oligonucleotide
  Sense strand starting at position 3543 of SEQ ID NO: 1879318
aagguccuuguagauuauu

SEQ ID NO: 1898209 - RNA, 19 nt, Artificial Sequence
  Description of Artificial Sequence: Synthetic oligonucleotide
  Antisense strand to SEQ ID NO: 1898208
aauaaucuacaaggaccuu

SEQ ID NO: 1898210 - RNA, 19 nt, Artificial Sequence
  Description of Artificial Sequence: Synthetic oligonucleotide
  Sense strand starting at position 3615 of SEQ ID NO: 1879318
aaugaaacaucuugaugug

SEQ ID NO: 1898211 - RNA, 19 nt, Artificial Sequence
  Description of Artificial Sequence: Synthetic oligonucleotide
  Antisense strand to SEQ ID NO: 1898210
cacaucaagauguuucauu

SEQ ID NO: 1898212 - RNA, 19 nt, Artificial Sequence
  Description of Artificial Sequence: Synthetic oligonucleotide
  Sense strand starting at position 3618 of SEQ ID NO: 1879318
gaaacaucuugauguggaa

SEQ ID NO: 1898213 - RNA, 19 nt, Artificial Sequence
  Description of Artificial Sequence: Synthetic oligonucleotide
  Antisense strand to SEQ ID NO: 1898212
uuccacaucaagauguuuc

SEQ ID NO: 1898214 - RNA, 19 nt, Artificial Sequence
  Description of Artificial Sequence: Synthetic oligonucleotide
  Sense strand starting at position 3708 of SEQ ID NO: 1879318
guuacaauuacuugugcga

SEQ ID NO: 1898215 - RNA, 19 nt, Artificial Sequence
  Description of Artificial Sequence: Synthetic oligonucleotide
  Antisense strand to SEQ ID NO: 1898214
ucgcacaaguaauuguaac

SEQ ID NO: 1898216 - RNA, 19 nt, Artificial Sequence
  Description of Artificial Sequence: Synthetic oligonucleotide
  Sense strand starting at position 3710 of SEQ ID NO: 1879318
uacaauuacuugugcgaaa

SEQ ID NO: 1898217 - RNA, 19 nt, Artificial Sequence
  Description of Artificial Sequence: Synthetic oligonucleotide
  Antisense strand to SEQ ID NO: 1898216
uuucgcacaaguaauugua

SEQ ID NO: 1898218 - RNA, 19 nt, Artificial Sequence
  Description of Artificial Sequence: Synthetic oligonucleotide
  Sense strand starting at position 3711 of SEQ ID NO: 1879318
acaauuacuugugcgaaau

SEQ ID NO: 1898219 - RNA, 19 nt, Artificial Sequence
  Description of Artificial Sequence: Synthetic oligonucleotide
  Antisense strand to SEQ ID NO: 1898218
auuucgcacaaguaauugu

SEQ ID NO: 1898220 - RNA, 19 nt, Artificial Sequence
  Description of Artificial Sequence: Synthetic oligonucleotide
  Sense strand starting at position 3712 of SEQ ID NO: 1879318
caauuacuugugcgaaauc

SEQ ID NO: 1898221 - RNA, 19 nt, Artificial Sequence
  Description of Artificial Sequence: Synthetic oligonucleotide
  Antisense strand to SEQ ID NO: 1898220
gauuucgcacaaguaauug

SEQ ID NO: 1898222 - RNA, 19 nt, Artificial Sequence
  Description of Artificial Sequence: Synthetic oligonucleotide
  Sense strand starting at position 3717 of SEQ ID NO: 1879318
acuugugcgaaaucgcuuu

SEQ ID NO: 1898223 - RNA, 19 nt, Artificial Sequence
  Description of Artificial Sequence: Synthetic oligonucleotide
  Antisense strand to SEQ ID NO: 1898222
aaagcgauuucgcacaagu

SEQ ID NO: 1898224 - RNA, 19 nt, Artificial Sequence
  Description of Artificial Sequence: Synthetic oligonucleotide
  Sense strand starting at position 3788 of SEQ ID NO: 1879318
uugguuaaucccggccagu

SEQ ID NO: 1898225 - RNA, 19 nt, Artificial Sequence
  Description of Artificial Sequence: Synthetic oligonucleotide
  Antisense strand to SEQ ID NO: 1898224
acuggccgggauuaaccaa

SEQ ID NO: 1898226 - RNA, 19 nt, Artificial Sequence
  Description of Artificial Sequence: Synthetic oligonucleotide
  Sense strand starting at position 3810 of SEQ ID NO: 1879318
cgguguugucguccacuuu

SEQ ID NO: 1898227 - RNA, 19 nt, Artificial Sequence
  Description of Artificial Sequence: Synthetic oligonucleotide
  Antisense strand to SEQ ID NO: 1898226
aaaguggacgacaacaccg

SEQ ID NO: 1898228 - RNA, 19 nt, Artificial Sequence
  Description of Artificial Sequence: Synthetic oligonucleotide
  Sense strand starting at position 3945 of SEQ ID NO: 1879318
ccugguaaacgguaaacau

SEQ ID NO: 1898229 - RNA, 19 nt, Artificial Sequence
  Description of Artificial Sequence: Synthetic oligonucleotide
  Antisense strand to SEQ ID NO: 1898228
auguuuaccguuuaccagg

SEQ ID NO: 1898230 - RNA, 19 nt, Artificial Sequence
  Description of Artificial Sequence: Synthetic oligonucleotide
  Sense strand starting at position 3960 of SEQ ID NO: 1879318
acauuauugugucuugagu

SEQ ID NO: 1898231 - RNA, 19 nt, Artificial Sequence
  Description of Artificial Sequence: Synthetic oligonucleotide
  Antisense strand to SEQ ID NO: 1898230
acucaagacacaauaaugu

SEQ ID NO: 1898232 - RNA, 19 nt, Artificial Sequence
  Description of Artificial Sequence: Synthetic oligonucleotide
  Sense strand starting at position 3966 of SEQ ID NO: 1879318
uugugucuugaguaaacau

SEQ ID NO: 1898233 - RNA, 19 nt, Artificial Sequence
  Description of Artificial Sequence: Synthetic oligonucleotide
  Antisense strand to SEQ ID NO: 1898232
auguuuacucaagacacaa

SEQ ID NO: 1898234 - RNA, 19 nt, Artificial Sequence
  Description of Artificial Sequence: Synthetic oligonucleotide
  Sense strand starting at position 3976 of SEQ ID NO: 1879318
aguaaacauuccuucggga

SEQ ID NO: 1898235 - RNA, 19 nt, Artificial Sequence
  Description of Artificial Sequence: Synthetic oligonucleotide
  Antisense strand to SEQ ID NO: 1898234
ucccgaaggaauguuuacu

SEQ ID NO: 1898236 - RNA, 19 nt, Artificial Sequence
  Description of Artificial Sequence: Synthetic oligonucleotide
  Sense strand starting at position 52 of SEQ ID NO: 1879319
gcacgcuugcucuuucuaa

SEQ ID NO: 1898237 - RNA, 19 nt, Artificial Sequence
  Description of Artificial Sequence: Synthetic oligonucleotide
  Antisense strand to SEQ ID NO: 1898236
uuagaaagagcaagcgugc

SEQ ID NO: 1898238 - RNA, 19 nt, Artificial Sequence
  Description of Artificial Sequence: Synthetic oligonucleotide
  Sense strand starting at position 66 of SEQ ID NO: 1879319
ucuaaucacguguacuaau

SEQ ID NO: 1898239 - RNA, 19 nt, Artificial Sequence
  Description of Artificial Sequence: Synthetic oligonucleotide
  Antisense strand to SEQ ID NO: 1898238
auuaguacacgugauuaga

SEQ ID NO: 1898240 - RNA, 19 nt, Artificial Sequence
  Description of Artificial Sequence: Synthetic oligonucleotide
  Sense strand starting at position 120 of SEQ ID NO: 1879319
guggcuuauguguuugguu

SEQ ID NO: 1898241 - RNA, 19 nt, Artificial Sequence
  Description of Artificial Sequence: Synthetic oligonucleotide
  Antisense strand to SEQ ID NO: 1898240
aaccaaacacauaagccac

SEQ ID NO: 1898242 - RNA, 19 nt, Artificial Sequence
  Description of Artificial Sequence: Synthetic oligonucleotide
  Sense strand starting at position 209 of SEQ ID NO: 1879319
cacaguuuaccgggaagca

SEQ ID NO: 1898243 - RNA, 19 nt, Artificial Sequence
  Description of Artificial Sequence: Synthetic oligonucleotide
  Antisense strand to SEQ ID NO: 1898242
ugcuucccgguaaacugug

SEQ ID NO: 1898244 - RNA, 19 nt, Artificial Sequence
  Description of Artificial Sequence: Synthetic oligonucleotide
  Sense strand starting at position 210 of SEQ ID NO: 1879319
acaguuuaccgggaagcaa

SEQ ID NO: 1898245 - RNA, 19 nt, Artificial Sequence
  Description of Artificial Sequence: Synthetic oligonucleotide
  Antisense strand to SEQ ID NO: 1898244
uugcuucccgguaaacugu

SEQ ID NO: 1898246 - RNA, 19 nt, Artificial Sequence
  Description of Artificial Sequence: Synthetic oligonucleotide
  Sense strand starting at position 253 of SEQ ID NO: 1879319
acacgauuauaucucugaa

SEQ ID NO: 1898247 - RNA, 19 nt, Artificial Sequence
  Description of Artificial Sequence: Synthetic oligonucleotide
  Antisense strand to SEQ ID NO: 1898246
uucagagauauaaucgugu

SEQ ID NO: 1898248 - RNA, 19 nt, Artificial Sequence
  Description of Artificial Sequence: Synthetic oligonucleotide
  Sense strand starting at position 255 of SEQ ID NO: 1879319
acgauuauaucucugaaug

SEQ ID NO: 1898249 - RNA, 19 nt, Artificial Sequence
  Description of Artificial Sequence: Synthetic oligonucleotide
  Antisense strand to SEQ ID NO: 1898248
cauucagagauauaaucgu

SEQ ID NO: 1898250 - RNA, 19 nt, Artificial Sequence
  Description of Artificial Sequence: Synthetic oligonucleotide
  Sense strand starting at position 256 of SEQ ID NO: 1879319
cgauuauaucucugaaugg

SEQ ID NO: 1898251 - RNA, 19 nt, Artificial Sequence
  Description of Artificial Sequence: Synthetic oligonucleotide
  Antisense strand to SEQ ID NO: 1898250
ccauucagagauauaaucg

SEQ ID NO: 1898252 - RNA, 19 nt, Artificial Sequence
  Description of Artificial Sequence: Synthetic oligonucleotide
  Sense strand starting at position 379 of SEQ ID NO: 1879319
aguacaaugucagcucaga

SEQ ID NO: 1898253 - RNA, 19 nt, Artificial Sequence
  Description of Artificial Sequence: Synthetic oligonucleotide
  Antisense strand to SEQ ID NO: 1898252
ucugagcugacauuguacu

SEQ ID NO: 1898254 - RNA, 19 nt, Artificial Sequence
  Description of Artificial Sequence: Synthetic oligonucleotide
  Sense strand starting at position 501 of SEQ ID NO: 1879319
cuaacaucuucggcuauga

SEQ ID NO: 1898255 - RNA, 19 nt, Artificial Sequence
  Description of Artificial Sequence: Synthetic oligonucleotide
  Antisense strand to SEQ ID NO: 1898254
ucauagccgaagauguuag

SEQ ID NO: 1898256 - RNA, 19 nt, Artificial Sequence
  Description of Artificial Sequence: Synthetic oligonucleotide
  Sense strand starting at position 505 of SEQ ID NO: 1879319
caucuucggcuaugaauga

SEQ ID NO: 1898257 - RNA, 19 nt, Artificial Sequence
  Description of Artificial Sequence: Synthetic oligonucleotide
  Antisense strand to SEQ ID NO: 1898256
ucauucauagccgaagaug

SEQ ID NO: 1898258 - RNA, 19 nt, Artificial Sequence
  Description of Artificial Sequence: Synthetic oligonucleotide
  Sense strand starting at position 671 of SEQ ID NO: 1879319
cguaguccaucuccauuaa

SEQ ID NO: 1898259 - RNA, 19 nt, Artificial Sequence
  Description of Artificial Sequence: Synthetic oligonucleotide
  Antisense strand to SEQ ID NO: 1898258
uuaauggagauggacuacg

SEQ ID NO: 1898260 - RNA, 19 nt, Artificial Sequence
  Description of Artificial Sequence: Synthetic oligonucleotide
  Sense strand starting at position 726 of SEQ ID NO: 1879319
cacaguaacgaggguuaca

SEQ ID NO: 1898261 - RNA, 19 nt, Artificial Sequence
  Description of Artificial Sequence: Synthetic oligonucleotide
  Antisense strand to SEQ ID NO: 1898260
uguaacccucguuacugug

SEQ ID NO: 1898262 - RNA, 19 nt, Artificial Sequence
  Description of Artificial Sequence: Synthetic oligonucleotide
  Sense strand starting at position 1036 of SEQ ID NO: 1879319
gagggauucucccugaagc

SEQ ID NO: 1898263 - RNA, 19 nt, Artificial Sequence
  Description of Artificial Sequence: Synthetic oligonucleotide
  Antisense strand to SEQ ID NO: 1898262
gcuucagggagaaucccuc

SEQ ID NO: 1898264 - RNA, 19 nt, Artificial Sequence
  Description of Artificial Sequence: Synthetic oligonucleotide
  Sense strand starting at position 1444 of SEQ ID NO: 1879319
cccuuuguguuucccaaca

SEQ ID NO: 1898265 - RNA, 19 nt, Artificial Sequence
  Description of Artificial Sequence: Synthetic oligonucleotide
  Antisense strand to SEQ ID NO: 1898264
uguugggaaacacaaaggg

SEQ ID NO: 1898266 - RNA, 19 nt, Artificial Sequence
  Description of Artificial Sequence: Synthetic oligonucleotide
  Sense strand starting at position 1509 of SEQ ID NO: 1879319
ccggacaagacucgaauua

SEQ ID NO: 1898267 - RNA, 19 nt, Artificial Sequence
  Description of Artificial Sequence: Synthetic oligonucleotide
  Antisense strand to SEQ ID NO: 1898266
uaauucgagucuuguccgg

SEQ ID NO: 1898268 - RNA, 19 nt, Artificial Sequence
  Description of Artificial Sequence: Synthetic oligonucleotide
  Sense strand starting at position 1520 of SEQ ID NO: 1879319
ucgaauuacgacgagcaga

SEQ ID NO: 1898269 - RNA, 19 nt, Artificial Sequence
  Description of Artificial Sequence: Synthetic oligonucleotide
  Antisense strand to SEQ ID NO: 1898268
ucugcucgucguaauucga

SEQ ID NO: 1898270 - RNA, 19 nt, Artificial Sequence
  Description of Artificial Sequence: Synthetic oligonucleotide
  Sense strand starting at position 2519 of SEQ ID NO: 1879319
gcucuuauuggccaacuga

SEQ ID NO: 1898271 - RNA, 19 nt, Artificial Sequence
  Description of Artificial Sequence: Synthetic oligonucleotide
  Antisense strand to SEQ ID NO: 1898270
ucaguuggccaauaagagc

SEQ ID NO: 1898272 - RNA, 19 nt, Artificial Sequence
  Description of Artificial Sequence: Synthetic oligonucleotide
  Sense strand starting at position 2528 of SEQ ID NO: 1879319
ggccaacugaccugaguuu

SEQ ID NO: 1898273 - RNA, 19 nt, Artificial Sequence
  Description of Artificial Sequence: Synthetic oligonucleotide
  Antisense strand to SEQ ID NO: 1898272
aaacucaggucaguuggcc

SEQ ID NO: 1898274 - RNA, 19 nt, Artificial Sequence
  Description of Artificial Sequence: Synthetic oligonucleotide
  Sense strand starting at position 2733 of SEQ ID NO: 1879319
cagagcuaucaaugguaga

SEQ ID NO: 1898275 - RNA, 19 nt, Artificial Sequence
  Description of Artificial Sequence: Synthetic oligonucleotide
  Antisense strand to SEQ ID NO: 1898274
ucuaccauugauagcucug

SEQ ID NO: 1898276 - RNA, 19 nt, Artificial Sequence
  Description of Artificial Sequence: Synthetic oligonucleotide
  Sense strand starting at position 2734 of SEQ ID NO: 1879319
agagcuaucaaugguagag

SEQ ID NO: 1898277 - RNA, 19 nt, Artificial Sequence
  Description of Artificial Sequence: Synthetic oligonucleotide
  Antisense strand to SEQ ID NO: 1898276
cucuaccauugauagcucu

SEQ ID NO: 1898278 - RNA, 19 nt, Artificial Sequence
  Description of Artificial Sequence: Synthetic oligonucleotide
  Sense strand starting at position 2738 of SEQ ID NO: 1879319
cuaucaaugguagaguugu

SEQ ID NO: 1898279 - RNA, 19 nt, Artificial Sequence
  Description of Artificial Sequence: Synthetic oligonucleotide
  Antisense strand to SEQ ID NO: 1898278
acaacucuaccauugauag

SEQ ID NO: 1898280 - RNA, 19 nt, Artificial Sequence
  Description of Artificial Sequence: Synthetic oligonucleotide
  Sense strand starting at position 2824 of SEQ ID NO: 1879319
ucauucguugcguucuuua

SEQ ID NO: 1898281 - RNA, 19 nt, Artificial Sequence
  Description of Artificial Sequence: Synthetic oligonucleotide
  Antisense strand to SEQ ID NO: 1898280
uaaagaacgcaacgaauga

SEQ ID NO: 1898282 - RNA, 19 nt, Artificial Sequence
  Description of Artificial Sequence: Synthetic oligonucleotide
  Sense strand starting at position 2826 of SEQ ID NO: 1879319
auucguugcguucuuuaaa

SEQ ID NO: 1898283 - RNA, 19 nt, Artificial Sequence
  Description of Artificial Sequence: Synthetic oligonucleotide
  Antisense strand to SEQ ID NO: 1898282
uuuaaagaacgcaacgaau

SEQ ID NO: 1898284 - RNA, 19 nt, Artificial Sequence
  Description of Artificial Sequence: Synthetic oligonucleotide
  Sense strand starting at position 2887 of SEQ ID NO: 1879319
cuuguaacauaaucuaugu

SEQ ID NO: 1898285 - RNA, 19 nt, Artificial Sequence
  Description of Artificial Sequence: Synthetic oligonucleotide
  Antisense strand to SEQ ID NO: 1898284
acauagauuauguuacaag

SEQ ID NO: 1898286 - RNA, 19 nt, Artificial Sequence
  Description of Artificial Sequence: Synthetic oligonucleotide
  Sense strand starting at position 2900 of SEQ ID NO: 1879319
cuauguaaccuuggugaug

SEQ ID NO: 1898287 - RNA, 19 nt, Artificial Sequence
  Description of Artificial Sequence: Synthetic oligonucleotide
  Antisense strand to SEQ ID NO: 1898286
caucaccaagguuacauag

SEQ ID NO: 1898288 - RNA, 19 nt, Artificial Sequence
  Description of Artificial Sequence: Synthetic oligonucleotide
  Sense strand starting at position 2937 of SEQ ID NO: 1879319
cuuccaguguuccuaagaa

SEQ ID NO: 1898289 - RNA, 19 nt, Artificial Sequence
  Description of Artificial Sequence: Synthetic oligonucleotide
  Antisense strand to SEQ ID NO: 1898288
uucuuaggaacacuggaag

SEQ ID NO: 1898290 - RNA, 19 nt, Artificial Sequence
  Description of Artificial Sequence: Synthetic oligonucleotide
  Sense strand starting at position 3000 of SEQ ID NO: 1879319
gagcuucucggucagagga

SEQ ID NO: 1898291 - RNA, 19 nt, Artificial Sequence
  Description of Artificial Sequence: Synthetic oligonucleotide
  Antisense strand to SEQ ID NO: 1898290
uccucugaccgagaagcuc

SEQ ID NO: 1898292 - RNA, 19 nt, Artificial Sequence
  Description of Artificial Sequence: Synthetic oligonucleotide
  Sense strand starting at position 3033 of SEQ ID NO: 1879319
ugauauaaguccguaccca

SEQ ID NO: 1898293 - RNA, 19 nt, Artificial Sequence
  Description of Artificial Sequence: Synthetic oligonucleotide
  Antisense strand to SEQ ID NO: 1898292
uggguacggacuuauauca

SEQ ID NO: 1898294 - RNA, 19 nt, Artificial Sequence
  Description of Artificial Sequence: Synthetic oligonucleotide
  Sense strand starting at position 3034 of SEQ ID NO: 1879319
gauauaaguccguacccau

SEQ ID NO: 1898295 - RNA, 19 nt, Artificial Sequence
  Description of Artificial Sequence: Synthetic oligonucleotide
  Antisense strand to SEQ ID NO: 1898294
auggguacggacuuauauc

SEQ ID NO: 1898296 - RNA, 19 nt, Artificial Sequence
  Description of Artificial Sequence: Synthetic oligonucleotide
  Sense strand starting at position 3045 of SEQ ID NO: 1879319
guacccauauccucaacga

SEQ ID NO: 1898297 - RNA, 19 nt, Artificial Sequence
  Description of Artificial Sequence: Synthetic oligonucleotide
  Antisense strand to SEQ ID NO: 1898296
ucguugaggauauggguac

SEQ ID NO: 1898298 - RNA, 19 nt, Artificial Sequence
  Description of Artificial Sequence: Synthetic oligonucleotide
  Sense strand starting at position 3175 of SEQ ID NO: 1879319
uugccaaggacuuaaguga

SEQ ID NO: 1898299 - RNA, 19 nt, Artificial Sequence
  Description of Artificial Sequence: Synthetic oligonucleotide
  Antisense strand to SEQ ID NO: 1898298
ucacuuaaguccuuggcaa

SEQ ID NO: 1898300 - RNA, 19 nt, Artificial Sequence
  Description of Artificial Sequence: Synthetic oligonucleotide
  Sense strand starting at position 3202 of SEQ ID NO: 1879319
guugucaccucuuuauaaa

SEQ ID NO: 1898301 - RNA, 19 nt, Artificial Sequence
  Description of Artificial Sequence: Synthetic oligonucleotide
  Antisense strand to SEQ ID NO: 1898300
uuuauaaagaggugacaac

SEQ ID NO: 1898302 - RNA, 19 nt, Artificial Sequence
  Description of Artificial Sequence: Synthetic oligonucleotide
  Sense strand starting at position 3260 of SEQ ID NO: 1879319
ucaggugccuuauugauca

SEQ ID NO: 1898303 - RNA, 19 nt, Artificial Sequence
  Description of Artificial Sequence: Synthetic oligonucleotide
  Antisense strand to SEQ ID NO: 1898302
ugaucaauaaggcaccuga

SEQ ID NO: 1898304 - RNA, 19 nt, Artificial Sequence
  Description of Artificial Sequence: Synthetic oligonucleotide
  Sense strand starting at position 3326 of SEQ ID NO: 1879319
ggagccuuguuucugggaa

SEQ ID NO: 1898305 - RNA, 19 nt, Artificial Sequence
  Description of Artificial Sequence: Synthetic oligonucleotide
  Antisense strand to SEQ ID NO: 1898304
uucccagaaacaaggcucc

SEQ ID NO: 1898306 - RNA, 19 nt, Artificial Sequence
  Description of Artificial Sequence: Synthetic oligonucleotide
  Sense strand starting at position 3703 of SEQ ID NO: 1879319
auuguaauaccacauguca

SEQ ID NO: 1898307 - RNA, 19 nt, Artificial Sequence
  Description of Artificial Sequence: Synthetic oligonucleotide
  Antisense strand to SEQ ID NO: 1898306
ugacaugugguauuacaau

SEQ ID NO: 1898308 - RNA, 19 nt, Artificial Sequence
  Description of Artificial Sequence: Synthetic oligonucleotide
  Sense strand starting at position 3732 of SEQ ID NO: 1879319
agugucacguauuuguaua

SEQ ID NO: 1898309 - RNA, 19 nt, Artificial Sequence
  Description of Artificial Sequence: Synthetic oligonucleotide
  Antisense strand to SEQ ID NO: 1898308
uauacaaauacgugacacu

SEQ ID NO: 1898310 - RNA, 19 nt, Artificial Sequence
  Description of Artificial Sequence: Synthetic oligonucleotide
  Sense strand starting at position 3733 of SEQ ID NO: 1879319
gugucacguauuuguauac

SEQ ID NO: 1898311 - RNA, 19 nt, Artificial Sequence
  Description of Artificial Sequence: Synthetic oligonucleotide
  Antisense strand to SEQ ID NO: 1898310
guauacaaauacgugacac

SEQ ID NO: 1898312 - RNA, 19 nt, Artificial Sequence
  Description of Artificial Sequence: Synthetic oligonucleotide
  Sense strand starting at position 3766 of SEQ ID NO: 1879319
acacauaucuaggauaaga

SEQ ID NO: 1898313 - RNA, 19 nt, Artificial Sequence
  Description of Artificial Sequence: Synthetic oligonucleotide
  Antisense strand to SEQ ID NO: 1898312
ucuuauccuagauaugugu

SEQ ID NO: 1898314 - RNA, 19 nt, Artificial Sequence
  Description of Artificial Sequence: Synthetic oligonucleotide
  Sense strand starting at position 3954 of SEQ ID NO: 1879319
acugaagaauggcaagaaa

SEQ ID NO: 1898315 - RNA, 19 nt, Artificial Sequence
  Description of Artificial Sequence: Synthetic oligonucleotide
  Antisense strand to SEQ ID NO: 1898314
uuucuugccauucuucagu

SEQ ID NO: 1898316 - RNA, 19 nt, Artificial Sequence
  Description of Artificial Sequence: Synthetic oligonucleotide
  Sense strand starting at position 15 of SEQ ID NO: 1879320
gucagcauuugcuuaucau

SEQ ID NO: 1898317 - RNA, 19 nt, Artificial Sequence
  Description of Artificial Sequence: Synthetic oligonucleotide
  Antisense strand to SEQ ID NO: 1898316
augauaagcaaaugcugac

SEQ ID NO: 1898318 - RNA, 19 nt, Artificial Sequence
  Description of Artificial Sequence: Synthetic oligonucleotide
  Sense strand starting at position 158 of SEQ ID NO: 1879320
uuaccugcuuacuuggaua

SEQ ID NO: 1898319 - RNA, 19 nt, Artificial Sequence
  Description of Artificial Sequence: Synthetic oligonucleotide
  Antisense strand to SEQ ID NO: 1898318
uauccaaguaagcagguaa

SEQ ID NO: 1898320 - RNA, 19 nt, Artificial Sequence
  Description of Artificial Sequence: Synthetic oligonucleotide
  Sense strand starting at position 160 of SEQ ID NO: 1879320
accugcuuacuuggauaca

SEQ ID NO: 1898321 - RNA, 19 nt, Artificial Sequence
  Description of Artificial Sequence: Synthetic oligonucleotide
  Antisense strand to SEQ ID NO: 1898320
uguauccaaguaagcaggu

SEQ ID NO: 1898322 - RNA, 19 nt, Artificial Sequence
  Description of Artificial Sequence: Synthetic oligonucleotide
  Sense strand starting at position 163 of SEQ ID NO: 1879320
ugcuuacuuggauacaguu

SEQ ID NO: 1898323 - RNA, 19 nt, Artificial Sequence
  Description of Artificial Sequence: Synthetic oligonucleotide
  Antisense strand to SEQ ID NO: 1898322
aacuguauccaaguaagca

SEQ ID NO: 1898324 - RNA, 19 nt, Artificial Sequence
  Description of Artificial Sequence: Synthetic oligonucleotide
  Sense strand starting at position 344 of SEQ ID NO: 1879320
augauuaaaucugcugaac

SEQ ID NO: 1898325 - RNA, 19 nt, Artificial Sequence
  Description of Artificial Sequence: Synthetic oligonucleotide
  Antisense strand to SEQ ID NO: 1898324
guucagcagauuuaaucau

SEQ ID NO: 1898326 - RNA, 19 nt, Artificial Sequence
  Description of Artificial Sequence: Synthetic oligonucleotide
  Sense strand starting at position 644 of SEQ ID NO: 1879320
gggugccucaguuaagaua

SEQ ID NO: 1898327 - RNA, 19 nt, Artificial Sequence
  Description of Artificial Sequence: Synthetic oligonucleotide
  Antisense strand to SEQ ID NO: 1898326
uaucuuaacugaggcaccc

SEQ ID NO: 1898328 - RNA, 19 nt, Artificial Sequence
  Description of Artificial Sequence: Synthetic oligonucleotide
  Sense strand starting at position 658 of SEQ ID NO: 1879320
agauaauggugguuaagau

SEQ ID NO: 1898329 - RNA, 19 nt, Artificial Sequence
  Description of Artificial Sequence: Synthetic oligonucleotide
  Antisense strand to SEQ ID NO: 1898328
aucuuaaccaccauuaucu

SEQ ID NO: 1898330 - RNA, 19 nt, Artificial Sequence
  Description of Artificial Sequence: Synthetic oligonucleotide
  Sense strand starting at position 667 of SEQ ID NO: 1879320
ugguuaagauccucaucau

SEQ ID NO: 1898331 - RNA, 19 nt, Artificial Sequence
  Description of Artificial Sequence: Synthetic oligonucleotide
  Antisense strand to SEQ ID NO: 1898330
augaugaggaucuuaacca

SEQ ID NO: 1898332 - RNA, 19 nt, Artificial Sequence
  Description of Artificial Sequence: Synthetic oligonucleotide
  Sense strand starting at position 668 of SEQ ID NO: 1879320
gguuaagauccucaucauu

SEQ ID NO: 1898333 - RNA, 19 nt, Artificial Sequence
  Description of Artificial Sequence: Synthetic oligonucleotide
  Antisense strand to SEQ ID NO: 1898332
aaugaugaggaucuuaacc

SEQ ID NO: 1898334 - RNA, 19 nt, Artificial Sequence
  Description of Artificial Sequence: Synthetic oligonucleotide
  Sense strand starting at position 689 of SEQ ID NO: 1879320
agcacucaagaguagcaaa

SEQ ID NO: 1898335 - RNA, 19 nt, Artificial Sequence
  Description of Artificial Sequence: Synthetic oligonucleotide
  Antisense strand to SEQ ID NO: 1898334
uuugcuacucuugagugcu

SEQ ID NO: 1898336 - RNA, 19 nt, Artificial Sequence
  Description of Artificial Sequence: Synthetic oligonucleotide
  Sense strand starting at position 1146 of SEQ ID NO: 1879320
accaaugaugcagguaaca

SEQ ID NO: 1898337 - RNA, 19 nt, Artificial Sequence
  Description of Artificial Sequence: Synthetic oligonucleotide
  Antisense strand to SEQ ID NO: 1898336
uguuaccugcaucauuggu

SEQ ID NO: 1898338 - RNA, 19 nt, Artificial Sequence
  Description of Artificial Sequence: Synthetic oligonucleotide
  Sense strand starting at position 1171 of SEQ ID NO: 1879320
ucauuaucuagcgacaggu

SEQ ID NO: 1898339 - RNA, 19 nt, Artificial Sequence
  Description of Artificial Sequence: Synthetic oligonucleotide
  Antisense strand to SEQ ID NO: 1898338
accugucgcuagauaauga

SEQ ID NO: 1898340 - RNA, 19 nt, Artificial Sequence
  Description of Artificial Sequence: Synthetic oligonucleotide
  Sense strand starting at position 1173 of SEQ ID NO: 1879320
auuaucuagcgacagguaa

SEQ ID NO: 1898341 - RNA, 19 nt, Artificial Sequence
  Description of Artificial Sequence: Synthetic oligonucleotide
  Antisense strand to SEQ ID NO: 1898340
uuaccugucgcuagauaau

SEQ ID NO: 1898342 - RNA, 19 nt, Artificial Sequence
  Description of Artificial Sequence: Synthetic oligonucleotide
  Sense strand starting at position 1261 of SEQ ID NO: 1879320
guggcucacggcuuguaau

SEQ ID NO: 1898343 - RNA, 19 nt, Artificial Sequence
  Description of Artificial Sequence: Synthetic oligonucleotide
  Antisense strand to SEQ ID NO: 1898342
auuacaagccgugagccac

SEQ ID NO: 1898344 - RNA, 19 nt, Artificial Sequence
  Description of Artificial Sequence: Synthetic oligonucleotide
  Sense strand starting at position 1273 of SEQ ID NO: 1879320
uuguaaucccaguauguug

SEQ ID NO: 1898345 - RNA, 19 nt, Artificial Sequence
  Description of Artificial Sequence: Synthetic oligonucleotide
  Antisense strand to SEQ ID NO: 1898344
caacauacugggauuacaa

SEQ ID NO: 1898346 - RNA, 19 nt, Artificial Sequence
  Description of Artificial Sequence: Synthetic oligonucleotide
  Sense strand starting at position 1457 of SEQ ID NO: 1879320
ggagguugccauuaaccga

SEQ ID NO: 1898347 - RNA, 19 nt, Artificial Sequence
  Description of Artificial Sequence: Synthetic oligonucleotide
  Antisense strand to SEQ ID NO: 1898346
ucgguuaauggcaaccucc

SEQ ID NO: 1898348 - RNA, 19 nt, Artificial Sequence
  Description of Artificial Sequence: Synthetic oligonucleotide
  Sense strand starting at position 1642 of SEQ ID NO: 1879320
ggucacggcccuuaacaau

SEQ ID NO: 1898349 - RNA, 19 nt, Artificial Sequence
  Description of Artificial Sequence: Synthetic oligonucleotide
  Antisense strand to SEQ ID NO: 1898348
auuguuaagggccgugacc

SEQ ID NO: 1898350 - RNA, 19 nt, Artificial Sequence
  Description of Artificial Sequence: Synthetic oligonucleotide
  Sense strand starting at position 1648 of SEQ ID NO: 1879320
ggcccuuaacaauagcuua

SEQ ID NO: 1898351 - RNA, 19 nt, Artificial Sequence
  Description of Artificial Sequence: Synthetic oligonucleotide
  Antisense strand to SEQ ID NO: 1898350
uaagcuauuguuaagggcc

SEQ ID NO: 1898352 - RNA, 19 nt, Artificial Sequence
  Description of Artificial Sequence: Synthetic oligonucleotide
  Sense strand starting at position 2016 of SEQ ID NO: 1879320
ugggcuccuguauauaaga

SEQ ID NO: 1898353 - RNA, 19 nt, Artificial Sequence
  Description of Artificial Sequence: Synthetic oligonucleotide
  Antisense strand to SEQ ID NO: 1898352
ucuuauauacaggagccca

SEQ ID NO: 1898354 - RNA, 19 nt, Artificial Sequence
  Description of Artificial Sequence: Synthetic oligonucleotide
  Sense strand starting at position 2018 of SEQ ID NO: 1879320
ggcuccuguauauaagagu

SEQ ID NO: 1898355 - RNA, 19 nt, Artificial Sequence
  Description of Artificial Sequence: Synthetic oligonucleotide
  Antisense strand to SEQ ID NO: 1898354
acucuuauauacaggagcc

SEQ ID NO: 1898356 - RNA, 19 nt, Artificial Sequence
  Description of Artificial Sequence: Synthetic oligonucleotide
  Sense strand starting at position 2305 of SEQ ID NO: 1879320
guguaaggcugagugauuu

SEQ ID NO: 1898357 - RNA, 19 nt, Artificial Sequence
  Description of Artificial Sequence: Synthetic oligonucleotide
  Antisense strand to SEQ ID NO: 1898356
aaaucacucagccuuacac

SEQ ID NO: 1898358 - RNA, 19 nt, Artificial Sequence
  Description of Artificial Sequence: Synthetic oligonucleotide
  Sense strand starting at position 2812 of SEQ ID NO: 1879320
gaaguuccucagugacauu

SEQ ID NO: 1898359 - RNA, 19 nt, Artificial Sequence
  Description of Artificial Sequence: Synthetic oligonucleotide
  Antisense strand to SEQ ID NO: 1898358
aaugucacugaggaacuuc

SEQ ID NO: 1898360 - RNA, 19 nt, Artificial Sequence
  Description of Artificial Sequence: Synthetic oligonucleotide
  Sense strand starting at position 2862 of SEQ ID NO: 1879320
cuuccuaacgcagaagaaa

SEQ ID NO: 1898361 - RNA, 19 nt, Artificial Sequence
  Description of Artificial Sequence: Synthetic oligonucleotide
  Antisense strand to SEQ ID NO: 1898360
uuucuucugcguuaggaag

SEQ ID NO: 1898362 - RNA, 19 nt, Artificial Sequence
  Description of Artificial Sequence: Synthetic oligonucleotide
  Sense strand starting at position 2874 of SEQ ID NO: 1879320
gaagaaagcugcucaagug

SEQ ID NO: 1898363 - RNA, 19 nt, Artificial Sequence
  Description of Artificial Sequence: Synthetic oligonucleotide
  Antisense strand to SEQ ID NO: 1898362
cacuugagcagcuuucuuc

SEQ ID NO: 1898364 - RNA, 19 nt, Artificial Sequence
  Description of Artificial Sequence: Synthetic oligonucleotide
  Sense strand starting at position 3132 of SEQ ID NO: 1879320
aggucagauuggcuaaagu

SEQ ID NO: 1898365 - RNA, 19 nt, Artificial Sequence
  Description of Artificial Sequence: Synthetic oligonucleotide
  Antisense strand to SEQ ID NO: 1898364
acuuuagccaaucugaccu

SEQ ID NO: 1898366 - RNA, 19 nt, Artificial Sequence
  Description of Artificial Sequence: Synthetic oligonucleotide
  Sense strand starting at position 3227 of SEQ ID NO: 1879320
cagaguaaguuccugaagu

SEQ ID NO: 1898367 - RNA, 19 nt, Artificial Sequence
  Description of Artificial Sequence: Synthetic oligonucleotide
  Antisense strand to SEQ ID NO: 1898366
acuucaggaacuuacucug

SEQ ID NO: 1898368 - RNA, 19 nt, Artificial Sequence
  Description of Artificial Sequence: Synthetic oligonucleotide
  Sense strand starting at position 3229 of SEQ ID NO: 1879320
gaguaaguuccugaaguuu

SEQ ID NO: 1898369 - RNA, 19 nt, Artificial Sequence
  Description of Artificial Sequence: Synthetic oligonucleotide
  Antisense strand to SEQ ID NO: 1898368
aaacuucaggaacuuacuc

SEQ ID NO: 1898370 - RNA, 19 nt, Artificial Sequence
  Description of Artificial Sequence: Synthetic oligonucleotide
  Sense strand starting at position 3247 of SEQ ID NO: 1879320
ucaggugugguguaacuau

SEQ ID NO: 1898371 - RNA, 19 nt, Artificial Sequence
  Description of Artificial Sequence: Synthetic oligonucleotide
  Antisense strand to SEQ ID NO: 1898370
auaguuacaccacaccuga

SEQ ID NO: 1898372 - RNA, 19 nt, Artificial Sequence
  Description of Artificial Sequence: Synthetic oligonucleotide
  Sense strand starting at position 3254 of SEQ ID NO: 1879320
ugguguaacuauguaauau

SEQ ID NO: 1898373 - RNA, 19 nt, Artificial Sequence
  Description of Artificial Sequence: Synthetic oligonucleotide
  Antisense strand to SEQ ID NO: 1898372
auauuacauaguuacacca

SEQ ID NO: 1898374 - RNA, 19 nt, Artificial Sequence
  Description of Artificial Sequence: Synthetic oligonucleotide
  Sense strand starting at position 3274 of SEQ ID NO: 1879320
uagauaagugaacgcacau

SEQ ID NO: 1898375 - RNA, 19 nt, Artificial Sequence
  Description of Artificial Sequence: Synthetic oligonucleotide
  Antisense strand to SEQ ID NO: 1898374
augugcguucacuuaucua

SEQ ID NO: 1898376 - RNA, 19 nt, Artificial Sequence
  Description of Artificial Sequence: Synthetic oligonucleotide
  Sense strand starting at position 3287 of SEQ ID NO: 1879320
gcacauugggcuuaaguaa

SEQ ID NO: 1898377 - RNA, 19 nt, Artificial Sequence
  Description of Artificial Sequence: Synthetic oligonucleotide
  Antisense strand to SEQ ID NO: 1898376
uuacuuaagcccaaugugc

SEQ ID NO: 1898378 - RNA, 19 nt, Artificial Sequence
  Description of Artificial Sequence: Synthetic oligonucleotide
  Sense strand starting at position 3431 of SEQ ID NO: 1879320
uuggcauacuugguaaaug

SEQ ID NO: 1898379 - RNA, 19 nt, Artificial Sequence
  Description of Artificial Sequence: Synthetic oligonucleotide
  Antisense strand to SEQ ID NO: 1898378
cauuuaccaaguaugccaa

SEQ ID NO: 1898380 - RNA, 19 nt, Artificial Sequence
  Description of Artificial Sequence: Synthetic oligonucleotide
  Sense strand starting at position 3523 of SEQ ID NO: 1879320
cuucgaauuuggcagauuu

SEQ ID NO: 1898381 - RNA, 19 nt, Artificial Sequence
  Description of Artificial Sequence: Synthetic oligonucleotide
  Antisense strand to SEQ ID NO: 1898380
aaaucugccaaauucgaag

SEQ ID NO: 1898382 - RNA, 19 nt, Artificial Sequence
  Description of Artificial Sequence: Synthetic oligonucleotide
  Sense strand starting at position 3673 of SEQ ID NO: 1879320
ucugauucuuaagcuuaga

SEQ ID NO: 1898383 - RNA, 19 nt, Artificial Sequence
  Description of Artificial Sequence: Synthetic oligonucleotide
  Antisense strand to SEQ ID NO: 1898382
ucuaagcuuaagaaucaga

SEQ ID NO: 1898384 - RNA, 19 nt, Artificial Sequence
  Description of Artificial Sequence: Synthetic oligonucleotide
  Sense strand starting at position 3782 of SEQ ID NO: 1879320
gauaucaagcuauguagaa

SEQ ID NO: 1898385 - RNA, 19 nt, Artificial Sequence
  Description of Artificial Sequence: Synthetic oligonucleotide
  Antisense strand to SEQ ID NO: 1898384
uucuacauagcuugauauc

SEQ ID NO: 1898386 - RNA, 19 nt, Artificial Sequence
  Description of Artificial Sequence: Synthetic oligonucleotide
  Sense strand starting at position 3783 of SEQ ID NO: 1879320
auaucaagcuauguagaau

SEQ ID NO: 1898387 - RNA, 19 nt, Artificial Sequence
  Description of Artificial Sequence: Synthetic oligonucleotide
  Antisense strand to SEQ ID NO: 1898386
auucuacauagcuugauau

SEQ ID NO: 1898388 - RNA, 19 nt, Artificial Sequence
  Description of Artificial Sequence: Synthetic oligonucleotide
  Sense strand starting at position 3818 of SEQ ID NO: 1879320
gcuuuccuccuccagagaa

SEQ ID NO: 1898389 - RNA, 19 nt, Artificial Sequence
  Description of Artificial Sequence: Synthetic oligonucleotide
  Antisense strand to SEQ ID NO: 1898388
uucucuggaggaggaaagc

SEQ ID NO: 1898390 - RNA, 19 nt, Artificial Sequence
  Description of Artificial Sequence: Synthetic oligonucleotide
  Sense strand starting at position 3869 of SEQ ID NO: 1879320
cugcaaguaccuuauaguu

SEQ ID NO: 1898391 - RNA, 19 nt, Artificial Sequence
  Description of Artificial Sequence: Synthetic oligonucleotide
  Antisense strand to SEQ ID NO: 1898390
aacuauaagguacuugcag

SEQ ID NO: 1898392 - RNA, 19 nt, Artificial Sequence
  Description of Artificial Sequence: Synthetic oligonucleotide
  Sense strand starting at position 3954 of SEQ ID NO: 1879320
uaaggaaagcauggucaua

SEQ ID NO: 1898393 - RNA, 19 nt, Artificial Sequence
  Description of Artificial Sequence: Synthetic oligonucleotide
  Antisense strand to SEQ ID NO: 1898392
uaugaccaugcuuuccuua

SEQ ID NO: 1898394 - RNA, 19 nt, Artificial Sequence
  Description of Artificial Sequence: Synthetic oligonucleotide
  Sense strand starting at position 3956 of SEQ ID NO: 1879320
aggaaagcauggucauaac

SEQ ID NO: 1898395 - RNA, 19 nt, Artificial Sequence
  Description of Artificial Sequence: Synthetic oligonucleotide
  Antisense strand to SEQ ID NO: 1898394
guuaugaccaugcuuuccu

SEQ ID NO: 1898396 - RNA, 19 nt, Artificial Sequence
  Description of Artificial Sequence: Synthetic oligonucleotide
  Sense strand starting at position 64 of SEQ ID NO: 1879321
ucuagcucuugcccagaau

SEQ ID NO: 1898397 - RNA, 19 nt, Artificial Sequence
  Description of Artificial Sequence: Synthetic oligonucleotide
  Antisense strand to SEQ ID NO: 1898396
auucugggcaagagcuaga

SEQ ID NO: 1898398 - RNA, 19 nt, Artificial Sequence
  Description of Artificial Sequence: Synthetic oligonucleotide
  Sense strand starting at position 67 of SEQ ID NO: 1879321
agcucuugcccagaaugga

SEQ ID NO: 1898399 - RNA, 19 nt, Artificial Sequence
  Description of Artificial Sequence: Synthetic oligonucleotide
  Antisense strand to SEQ ID NO: 1898398
uccauucugggcaagagcu

SEQ ID NO: 1898400 - RNA, 19 nt, Artificial Sequence
  Description of Artificial Sequence: Synthetic oligonucleotide
  Sense strand starting at position 331 of SEQ ID NO: 1879321
uguuguaaagccgauacaa

SEQ ID NO: 1898401 - RNA, 19 nt, Artificial Sequence
  Description of Artificial Sequence: Synthetic oligonucleotide
  Antisense strand to SEQ ID NO: 1898400
uuguaucggcuuuacaaca

SEQ ID NO: 1898402 - RNA, 19 nt, Artificial Sequence
  Description of Artificial Sequence: Synthetic oligonucleotide
  Sense strand starting at position 375 of SEQ ID NO: 1879321
aacgcugaugagcaauauu

SEQ ID NO: 1898403 - RNA, 19 nt, Artificial Sequence
  Description of Artificial Sequence: Synthetic oligonucleotide
  Antisense strand to SEQ ID NO: 1898402
aauauugcucaucagcguu

SEQ ID NO: 1898404 - RNA, 19 nt, Artificial Sequence
  Description of Artificial Sequence: Synthetic oligonucleotide
  Sense strand starting at position 378 of SEQ ID NO: 1879321
gcugaugagcaauauuaag

SEQ ID NO: 1898405 - RNA, 19 nt, Artificial Sequence
  Description of Artificial Sequence: Synthetic oligonucleotide
  Antisense strand to SEQ ID NO: 1898404
cuuaauauugcucaucagc

SEQ ID NO: 1898406 - RNA, 19 nt, Artificial Sequence
  Description of Artificial Sequence: Synthetic oligonucleotide
  Sense strand starting at position 413 of SEQ ID NO: 1879321
gauguaucuggcgguaaca

SEQ ID NO: 1898407 - RNA, 19 nt, Artificial Sequence
  Description of Artificial Sequence: Synthetic oligonucleotide
  Antisense strand to SEQ ID NO: 1898406
uguuaccgccagauacauc

SEQ ID NO: 1898408 - RNA, 19 nt, Artificial Sequence
  Description of Artificial Sequence: Synthetic oligonucleotide
  Sense strand starting at position 415 of SEQ ID NO: 1879321
uguaucuggcgguaacauu

SEQ ID NO: 1898409 - RNA, 19 nt, Artificial Sequence
  Description of Artificial Sequence: Synthetic oligonucleotide
  Antisense strand to SEQ ID NO: 1898408
aauguuaccgccagauaca

SEQ ID NO: 1898410 - RNA, 19 nt, Artificial Sequence
  Description of Artificial Sequence: Synthetic oligonucleotide
  Sense strand starting at position 466 of SEQ ID NO: 1879321
auucuauaauguuuggaga

SEQ ID NO: 1898411 - RNA, 19 nt, Artificial Sequence
  Description of Artificial Sequence: Synthetic oligonucleotide
  Antisense strand to SEQ ID NO: 1898410
ucuccaaacauuauagaau

SEQ ID NO: 1898412 - RNA, 19 nt, Artificial Sequence
  Description of Artificial Sequence: Synthetic oligonucleotide
  Sense strand starting at position 467 of SEQ ID NO: 1879321
uucuauaauguuuggagau

SEQ ID NO: 1898413 - RNA, 19 nt, Artificial Sequence
  Description of Artificial Sequence: Synthetic oligonucleotide
  Antisense strand to SEQ ID NO: 1898412
aucuccaaacauuauagaa

SEQ ID NO: 1898414 - RNA, 19 nt, Artificial Sequence
  Description of Artificial Sequence: Synthetic oligonucleotide
  Sense strand starting at position 469 of SEQ ID NO: 1879321
cuauaauguuuggagauuu

SEQ ID NO: 1898415 - RNA, 19 nt, Artificial Sequence
  Description of Artificial Sequence: Synthetic oligonucleotide
  Antisense strand to SEQ ID NO: 1898414
aaaucuccaaacauuauag

SEQ ID NO: 1898416 - RNA, 19 nt, Artificial Sequence
  Description of Artificial Sequence: Synthetic oligonucleotide
  Sense strand starting at position 495 of SEQ ID NO: 1879321
cuccuaauuguaugcaagu

SEQ ID NO: 1898417 - RNA, 19 nt, Artificial Sequence
  Description of Artificial Sequence: Synthetic oligonucleotide
  Antisense strand to SEQ ID NO: 1898416
acuugcauacaauuaggag

SEQ ID NO: 1898418 - RNA, 19 nt, Artificial Sequence
  Description of Artificial Sequence: Synthetic oligonucleotide
  Sense strand starting at position 496 of SEQ ID NO: 1879321
uccuaauuguaugcaaguu

SEQ ID NO: 1898419 - RNA, 19 nt, Artificial Sequence
  Description of Artificial Sequence: Synthetic oligonucleotide
  Antisense strand to SEQ ID NO: 1898418
aacuugcauacaauuagga

SEQ ID NO: 1898420 - RNA, 19 nt, Artificial Sequence
  Description of Artificial Sequence: Synthetic oligonucleotide
  Sense strand starting at position 519 of SEQ ID NO: 1879321
uacuguguauugucccuua

SEQ ID NO: 1898421 - RNA, 19 nt, Artificial Sequence
  Description of Artificial Sequence: Synthetic oligonucleotide
  Antisense strand to SEQ ID NO: 1898420
uaagggacaauacacagua

SEQ ID NO: 1898422 - RNA, 19 nt, Artificial Sequence
  Description of Artificial Sequence: Synthetic oligonucleotide
  Sense strand starting at position 522 of SEQ ID NO: 1879321
uguguauugucccuuaauu

SEQ ID NO: 1898423 - RNA, 19 nt, Artificial Sequence
  Description of Artificial Sequence: Synthetic oligonucleotide
  Antisense strand to SEQ ID NO: 1898422
aauuaagggacaauacaca

SEQ ID NO: 1898424 - RNA, 19 nt, Artificial Sequence
  Description of Artificial Sequence: Synthetic oligonucleotide
  Sense strand starting at position 562 of SEQ ID NO: 1879321
ugaagaaaugcagguuagu

SEQ ID NO: 1898425 - RNA, 19 nt, Artificial Sequence
  Description of Artificial Sequence: Synthetic oligonucleotide
  Antisense strand to SEQ ID NO: 1898424
acuaaccugcauuucuuca

SEQ ID NO: 1898426 - RNA, 19 nt, Artificial Sequence
  Description of Artificial Sequence: Synthetic oligonucleotide
  Sense strand starting at position 565 of SEQ ID NO: 1879321
agaaaugcagguuaguuua

SEQ ID NO: 1898427 - RNA, 19 nt, Artificial Sequence
  Description of Artificial Sequence: Synthetic oligonucleotide
  Antisense strand to SEQ ID NO: 1898426
uaaacuaaccugcauuucu

SEQ ID NO: 1898428 - RNA, 19 nt, Artificial Sequence
  Description of Artificial Sequence: Synthetic oligonucleotide
  Sense strand starting at position 567 of SEQ ID NO: 1879321
aaaugcagguuaguuuaaa

SEQ ID NO: 1898429 - RNA, 19 nt, Artificial Sequence
  Description of Artificial Sequence: Synthetic oligonucleotide
  Antisense strand to SEQ ID NO: 1898428
uuuaaacuaaccugcauuu

SEQ ID NO: 1898430 - RNA, 19 nt, Artificial Sequence
  Description of Artificial Sequence: Synthetic oligonucleotide
  Sense strand starting at position 577 of SEQ ID NO: 1879321
uaguuuaaacuuugaagga

SEQ ID NO: 1898431 - RNA, 19 nt, Artificial Sequence
  Description of Artificial Sequence: Synthetic oligonucleotide
  Antisense strand to SEQ ID NO: 1898430
uccuucaaaguuuaaacua

SEQ ID NO: 1898432 - RNA, 19 nt, Artificial Sequence
  Description of Artificial Sequence: Synthetic oligonucleotide
  Sense strand starting at position 578 of SEQ ID NO: 1879321
aguuuaaacuuugaaggaa

SEQ ID NO: 1898433 - RNA, 19 nt, Artificial Sequence
  Description of Artificial Sequence: Synthetic oligonucleotide
  Antisense strand to SEQ ID NO: 1898432
uuccuucaaaguuuaaacu

SEQ ID NO: 1898434 - RNA, 19 nt, Artificial Sequence
  Description of Artificial Sequence: Synthetic oligonucleotide
  Sense strand starting at position 631 of SEQ ID NO: 1879321
acaccuuaaucuguagaug

SEQ ID NO: 1898435 - RNA, 19 nt, Artificial Sequence
  Description of Artificial Sequence: Synthetic oligonucleotide
  Antisense strand to SEQ ID NO: 1898434
caucuacagauuaaggugu

SEQ ID NO: 1898436 - RNA, 19 nt, Artificial Sequence
  Description of Artificial Sequence: Synthetic oligonucleotide
  Sense strand starting at position 642 of SEQ ID NO: 1879321
uguagaugggagugauuag

SEQ ID NO: 1898437 - RNA, 19 nt, Artificial Sequence
  Description of Artificial Sequence: Synthetic oligonucleotide
  Antisense strand to SEQ ID NO: 1898436
cuaaucacucccaucuaca

SEQ ID NO: 1898438 - RNA, 19 nt, Artificial Sequence
  Description of Artificial Sequence: Synthetic oligonucleotide
  Sense strand starting at position 649 of SEQ ID NO: 1879321
gggagugauuagcuguuua

SEQ ID NO: 1898439 - RNA, 19 nt, Artificial Sequence
  Description of Artificial Sequence: Synthetic oligonucleotide
  Antisense strand to SEQ ID NO: 1898438
uaaacagcuaaucacuccc

SEQ ID NO: 1898440 - RNA, 19 nt, Artificial Sequence
  Description of Artificial Sequence: Synthetic oligonucleotide
  Sense strand starting at position 675 of SEQ ID NO: 1879321
aaaugugacugagaaggaa

SEQ ID NO: 1898441 - RNA, 19 nt, Artificial Sequence
  Description of Artificial Sequence: Synthetic oligonucleotide
  Antisense strand to SEQ ID NO: 1898440
uuccuucucagucacauuu

SEQ ID NO: 1898442 - RNA, 19 nt, Artificial Sequence
  Description of Artificial Sequence: Synthetic oligonucleotide
  Sense strand starting at position 743 of SEQ ID NO: 1879321
gcagaccuguuauccuaaa

SEQ ID NO: 1898443 - RNA, 19 nt, Artificial Sequence
  Description of Artificial Sequence: Synthetic oligonucleotide
  Antisense strand to SEQ ID NO: 1898442
uuuaggauaacaggucugc

SEQ ID NO: 1898444 - RNA, 19 nt, Artificial Sequence
  Description of Artificial Sequence: Synthetic oligonucleotide
  Sense strand starting at position 798 of SEQ ID NO: 1879321
caguguaaccaaugaugua

SEQ ID NO: 1898445 - RNA, 19 nt, Artificial Sequence
  Description of Artificial Sequence: Synthetic oligonucleotide
  Antisense strand to SEQ ID NO: 1898444
uacaucauugguuacacug

SEQ ID NO: 1898446 - RNA, 19 nt, Artificial Sequence
  Description of Artificial Sequence: Synthetic oligonucleotide
  Sense strand starting at position 813 of SEQ ID NO: 1879321
uguaaugauucugccaaau

SEQ ID NO: 1898447 - RNA, 19 nt, Artificial Sequence
  Description of Artificial Sequence: Synthetic oligonucleotide
  Antisense strand to SEQ ID NO: 1898446
auuuggcagaaucauuaca

SEQ ID NO: 1898448 - RNA, 19 nt, Artificial Sequence
  Description of Artificial Sequence: Synthetic oligonucleotide
  Sense strand starting at position 868 of SEQ ID NO: 1879321
ugauucugagguuacucua

SEQ ID NO: 1898449 - RNA, 19 nt, Artificial Sequence
  Description of Artificial Sequence: Synthetic oligonucleotide
  Antisense strand to SEQ ID NO: 1898448
uagaguaaccucagaauca

SEQ ID NO: 1898450 - RNA, 19 nt, Artificial Sequence
  Description of Artificial Sequence: Synthetic oligonucleotide
  Sense strand starting at position 871 of SEQ ID NO: 1879321
uucugagguuacucuacua

SEQ ID NO: 1898451 - RNA, 19 nt, Artificial Sequence
  Description of Artificial Sequence: Synthetic oligonucleotide
  Antisense strand to SEQ ID NO: 1898450
uaguagaguaaccucagaa

SEQ ID NO: 1898452 - RNA, 19 nt, Artificial Sequence
  Description of Artificial Sequence: Synthetic oligonucleotide
  Sense strand starting at position 974 of SEQ ID NO: 1879321
gcagcuuacugcuugaaag

SEQ ID NO: 1898453 - RNA, 19 nt, Artificial Sequence
  Description of Artificial Sequence: Synthetic oligonucleotide
  Antisense strand to SEQ ID NO: 1898452
cuuucaagcaguaagcugc

SEQ ID NO: 1898454 - RNA, 19 nt, Artificial Sequence
  Description of Artificial Sequence: Synthetic oligonucleotide
  Sense strand starting at position 975 of SEQ ID NO: 1879321
cagcuuacugcuugaaagg

SEQ ID NO: 1898455 - RNA, 19 nt, Artificial Sequence
  Description of Artificial Sequence: Synthetic oligonucleotide
  Antisense strand to SEQ ID NO: 1898454
ccuuucaagcaguaagcug

SEQ ID NO: 1898456 - RNA, 19 nt, Artificial Sequence
  Description of Artificial Sequence: Synthetic oligonucleotide
  Sense strand starting at position 976 of SEQ ID NO: 1879321
agcuuacugcuugaaaggu

SEQ ID NO: 1898457 - RNA, 19 nt, Artificial Sequence
  Description of Artificial Sequence: Synthetic oligonucleotide
  Antisense strand to SEQ ID NO: 1898456
accuuucaagcaguaagcu

SEQ ID NO: 1898458 - RNA, 19 nt, Artificial Sequence
  Description of Artificial Sequence: Synthetic oligonucleotide
  Sense strand starting at position 982 of SEQ ID NO: 1879321
cugcuugaaaggugaggau

SEQ ID NO: 1898459 - RNA, 19 nt, Artificial Sequence
  Description of Artificial Sequence: Synthetic oligonucleotide
  Antisense strand to SEQ ID NO: 1898458
auccucaccuuucaagcag

SEQ ID NO: 1898460 - RNA, 19 nt, Artificial Sequence
  Description of Artificial Sequence: Synthetic oligonucleotide
  Sense strand starting at position 1012 of SEQ ID NO: 1879321
ggacuauuauaauugcaga

SEQ ID NO: 1898461 - RNA, 19 nt, Artificial Sequence
  Description of Artificial Sequence: Synthetic oligonucleotide
  Antisense strand to SEQ ID NO: 1898460
ucugcaauuauaauagucc

SEQ ID NO: 1898462 - RNA, 19 nt, Artificial Sequence
  Description of Artificial Sequence: Synthetic oligonucleotide
  Sense strand starting at position 1123 of SEQ ID NO: 1879321
aauugaagucuguaaaugu

SEQ ID NO: 1898463 - RNA, 19 nt, Artificial Sequence
  Description of Artificial Sequence: Synthetic oligonucleotide
  Antisense strand to SEQ ID NO: 1898462
acauuuacagacuucaauu

SEQ ID NO: 1898464 - RNA, 19 nt, Artificial Sequence
  Description of Artificial Sequence: Synthetic oligonucleotide
  Sense strand starting at position 1205 of SEQ ID NO: 1879321
gccuuugaagcuuacuaca

SEQ ID NO: 1898465 - RNA, 19 nt, Artificial Sequence
  Description of Artificial Sequence: Synthetic oligonucleotide
  Antisense strand to SEQ ID NO: 1898464
uguaguaagcuucaaaggc

SEQ ID NO: 1898466 - RNA, 19 nt, Artificial Sequence
  Description of Artificial Sequence: Synthetic oligonucleotide
  Sense strand starting at position 2258 of SEQ ID NO: 1879321
ggcccuucccauugucauu

SEQ ID NO: 1898467 - RNA, 19 nt, Artificial Sequence
  Description of Artificial Sequence: Synthetic oligonucleotide
  Antisense strand to SEQ ID NO: 1898466
aaugacaaugggaagggcc

SEQ ID NO: 1898468 - RNA, 19 nt, Artificial Sequence
  Description of Artificial Sequence: Synthetic oligonucleotide
  Sense strand starting at position 2287 of SEQ ID NO: 1879321
auugaaaugucagcuuaug

SEQ ID NO: 1898469 - RNA, 19 nt, Artificial Sequence
  Description of Artificial Sequence: Synthetic oligonucleotide
  Antisense strand to SEQ ID NO: 1898468
cauaagcugacauuucaau

SEQ ID NO: 1898470 - RNA, 19 nt, Artificial Sequence
  Description of Artificial Sequence: Synthetic oligonucleotide
  Sense strand starting at position 2307 of SEQ ID NO: 1879321
acuaaaugcguguaaguug

SEQ ID NO: 1898471 - RNA, 19 nt, Artificial Sequence
  Description of Artificial Sequence: Synthetic oligonucleotide
  Antisense strand to SEQ ID NO: 1898470
caacuuacacgcauuuagu

SEQ ID NO: 1898472 - RNA, 19 nt, Artificial Sequence
  Description of Artificial Sequence: Synthetic oligonucleotide
  Sense strand starting at position 2958 of SEQ ID NO: 1879321
cggcgagacuuggucucaa

SEQ ID NO: 1898473 - RNA, 19 nt, Artificial Sequence
  Description of Artificial Sequence: Synthetic oligonucleotide
  Antisense strand to SEQ ID NO: 1898472
uugagaccaagucucgccg

SEQ ID NO: 1898474 - RNA, 19 nt, Artificial Sequence
  Description of Artificial Sequence: Synthetic oligonucleotide
  Sense strand starting at position 3137 of SEQ ID NO: 1879321
gcaaauguaguagaucagu

SEQ ID NO: 1898475 - RNA, 19 nt, Artificial Sequence
  Description of Artificial Sequence: Synthetic oligonucleotide
  Antisense strand to SEQ ID NO: 1898474
acugaucuacuacauuugc

SEQ ID NO: 1898476 - RNA, 19 nt, Artificial Sequence
  Description of Artificial Sequence: Synthetic oligonucleotide
  Sense strand starting at position 324 of SEQ ID NO: 1879322
ggaggaucgccugaauuga

SEQ ID NO: 1898477 - RNA, 19 nt, Artificial Sequence
  Description of Artificial Sequence: Synthetic oligonucleotide
  Antisense strand to SEQ ID NO: 1898476
ucaauucaggcgauccucc

SEQ ID NO: 1898478 - RNA, 19 nt, Artificial Sequence
  Description of Artificial Sequence: Synthetic oligonucleotide
  Sense strand starting at position 328 of SEQ ID NO: 1879322
gaucgccugaauugaggua

SEQ ID NO: 1898479 - RNA, 19 nt, Artificial Sequence
  Description of Artificial Sequence: Synthetic oligonucleotide
  Antisense strand to SEQ ID NO: 1898478
uaccucaauucaggcgauc

SEQ ID NO: 1898480 - RNA, 19 nt, Artificial Sequence
  Description of Artificial Sequence: Synthetic oligonucleotide
  Sense strand starting at position 884 of SEQ ID NO: 1879322
gugugagugagauggauag

SEQ ID NO: 1898481 - RNA, 19 nt, Artificial Sequence
  Description of Artificial Sequence: Synthetic oligonucleotide
  Antisense strand to SEQ ID NO: 1898480
cuauccaucucacucacac

SEQ ID NO: 1898482 - RNA, 19 nt, Artificial Sequence
  Description of Artificial Sequence: Synthetic oligonucleotide
  Sense strand starting at position 984 of SEQ ID NO: 1879322
uuguucuaagauggaaauu

SEQ ID NO: 1898483 - RNA, 19 nt, Artificial Sequence
  Description of Artificial Sequence: Synthetic oligonucleotide
  Antisense strand to SEQ ID NO: 1898482
aauuuccaucuuagaacaa

SEQ ID NO: 1898484 - RNA, 19 nt, Artificial Sequence
  Description of Artificial Sequence: Synthetic oligonucleotide
  Sense strand starting at position 1010 of SEQ ID NO: 1879322
gaguuuggugcugggaagu

SEQ ID NO: 1898485 - RNA, 19 nt, Artificial Sequence
  Description of Artificial Sequence: Synthetic oligonucleotide
  Antisense strand to SEQ ID NO: 1898484
acuucccagcaccaaacuc

SEQ ID NO: 1898486 - RNA, 19 nt, Artificial Sequence
  Description of Artificial Sequence: Synthetic oligonucleotide
  Sense strand starting at position 1063 of SEQ ID NO: 1879322
uugggugcuguguagaaau

SEQ ID NO: 1898487 - RNA, 19 nt, Artificial Sequence
  Description of Artificial Sequence: Synthetic oligonucleotide
  Antisense strand to SEQ ID NO: 1898486
auuucuacacagcacccaa

SEQ ID NO: 1898488 - RNA, 19 nt, Artificial Sequence
  Description of Artificial Sequence: Synthetic oligonucleotide
  Sense strand starting at position 1065 of SEQ ID NO: 1879322
gggugcuguguagaaauca

SEQ ID NO: 1898489 - RNA, 19 nt, Artificial Sequence
  Description of Artificial Sequence: Synthetic oligonucleotide
  Antisense strand to SEQ ID NO: 1898488
ugauuucuacacagcaccc

SEQ ID NO: 1898490 - RNA, 19 nt, Artificial Sequence
  Description of Artificial Sequence: Synthetic oligonucleotide
  Sense strand starting at position 1186 of SEQ ID NO: 1879322
caccgcuuagccuaguuaa

SEQ ID NO: 1898491 - RNA, 19 nt, Artificial Sequence
  Description of Artificial Sequence: Synthetic oligonucleotide
  Antisense strand to SEQ ID NO: 1898490
uuaacuaggcuaagcggug

SEQ ID NO: 1898492 - RNA, 19 nt, Artificial Sequence
  Description of Artificial Sequence: Synthetic oligonucleotide
  Sense strand starting at position 1229 of SEQ ID NO: 1879322
ggaugucacuuucucuaag

SEQ ID NO: 1898493 - RNA, 19 nt, Artificial Sequence
  Description of Artificial Sequence: Synthetic oligonucleotide
  Antisense strand to SEQ ID NO: 1898492
cuuagagaaagugacaucc

SEQ ID NO: 1898494 - RNA, 19 nt, Artificial Sequence
  Description of Artificial Sequence: Synthetic oligonucleotide
  Sense strand starting at position 1448 of SEQ ID NO: 1879322
cacuguugugauuaauugu

SEQ ID NO: 1898495 - RNA, 19 nt, Artificial Sequence
  Description of Artificial Sequence: Synthetic oligonucleotide
  Antisense strand to SEQ ID NO: 1898494
acaauuaaucacaacagug

SEQ ID NO: 1898496 - RNA, 19 nt, Artificial Sequence
  Description of Artificial Sequence: Synthetic oligonucleotide
  Sense strand starting at position 1451 of SEQ ID NO: 1879322
uguugugauuaauuguaca

SEQ ID NO: 1898497 - RNA, 19 nt, Artificial Sequence
  Description of Artificial Sequence: Synthetic oligonucleotide
  Antisense strand to SEQ ID NO: 1898496
uguacaauuaaucacaaca

SEQ ID NO: 1898498 - RNA, 19 nt, Artificial Sequence
  Description of Artificial Sequence: Synthetic oligonucleotide
  Sense strand starting at position 1628 of SEQ ID NO: 1879322
uugucacauguccgaagaa

SEQ ID NO: 1898499 - RNA, 19 nt, Artificial Sequence
  Description of Artificial Sequence: Synthetic oligonucleotide
  Antisense strand to SEQ ID NO: 1898498
uucuucggacaugugacaa

SEQ ID NO: 1898500 - RNA, 19 nt, Artificial Sequence
  Description of Artificial Sequence: Synthetic oligonucleotide
  Sense strand starting at position 2167 of SEQ ID NO: 1879322
gugccagacgcgagaacua

SEQ ID NO: 1898501 - RNA, 19 nt, Artificial Sequence
  Description of Artificial Sequence: Synthetic oligonucleotide
  Antisense strand to SEQ ID NO: 1898500
uaguucucgcgucuggcac

SEQ ID NO: 1898502 - RNA, 19 nt, Artificial Sequence
  Description of Artificial Sequence: Synthetic oligonucleotide
  Sense strand starting at position 2336 of SEQ ID NO: 1879322
aaagcugcccugugggaau

SEQ ID NO: 1898503 - RNA, 19 nt, Artificial Sequence
  Description of Artificial Sequence: Synthetic oligonucleotide
  Antisense strand to SEQ ID NO: 1898502
auucccacagggcagcuuu

SEQ ID NO: 1898504 - RNA, 19 nt, Artificial Sequence
  Description of Artificial Sequence: Synthetic oligonucleotide
  Sense strand starting at position 2419 of SEQ ID NO: 1879322
ggguuguuacgauggugaa

SEQ ID NO: 1898505 - RNA, 19 nt, Artificial Sequence
  Description of Artificial Sequence: Synthetic oligonucleotide
  Antisense strand to SEQ ID NO: 1898504
uucaccaucguaacaaccc

SEQ ID NO: 1898506 - RNA, 19 nt, Artificial Sequence
  Description of Artificial Sequence: Synthetic oligonucleotide
  Sense strand starting at position 2420 of SEQ ID NO: 1879322
gguuguuacgauggugaau

SEQ ID NO: 1898507 - RNA, 19 nt, Artificial Sequence
  Description of Artificial Sequence: Synthetic oligonucleotide
  Antisense strand to SEQ ID NO: 1898506
auucaccaucguaacaacc

SEQ ID NO: 1898508 - RNA, 19 nt, Artificial Sequence
  Description of Artificial Sequence: Synthetic oligonucleotide
  Sense strand starting at position 2423 of SEQ ID NO: 1879322
uguuacgauggugaauuau

SEQ ID NO: 1898509 - RNA, 19 nt, Artificial Sequence
  Description of Artificial Sequence: Synthetic oligonucleotide
  Antisense strand to SEQ ID NO: 1898508
auaauucaccaucguaaca

SEQ ID NO: 1898510 - RNA, 19 nt, Artificial Sequence
  Description of Artificial Sequence: Synthetic oligonucleotide
  Sense strand starting at position 2587 of SEQ ID NO: 1879322
cgaguguuuguugaggaag

SEQ ID NO: 1898511 - RNA, 19 nt, Artificial Sequence
  Description of Artificial Sequence: Synthetic oligonucleotide
  Antisense strand to SEQ ID NO: 1898510
cuuccucaacaaacacucg

SEQ ID NO: 1898512 - RNA, 19 nt, Artificial Sequence
  Description of Artificial Sequence: Synthetic oligonucleotide
  Sense strand starting at position 2599 of SEQ ID NO: 1879322
gaggaagcacuguguguua

SEQ ID NO: 1898513 - RNA, 19 nt, Artificial Sequence
  Description of Artificial Sequence: Synthetic oligonucleotide
  Antisense strand to SEQ ID NO: 1898512
uaacacacagugcuuccuc

SEQ ID NO: 1898514 - RNA, 19 nt, Artificial Sequence
  Description of Artificial Sequence: Synthetic oligonucleotide
  Sense strand starting at position 2601 of SEQ ID NO: 1879322
ggaagcacuguguguuaga

SEQ ID NO: 1898515 - RNA, 19 nt, Artificial Sequence
  Description of Artificial Sequence: Synthetic oligonucleotide
  Antisense strand to SEQ ID NO: 1898514
ucuaacacacagugcuucc

SEQ ID NO: 1898516 - RNA, 19 nt, Artificial Sequence
  Description of Artificial Sequence: Synthetic oligonucleotide
  Sense strand starting at position 2610 of SEQ ID NO: 1879322
guguguuagacccagugca

SEQ ID NO: 1898517 - RNA, 19 nt, Artificial Sequence
  Description of Artificial Sequence: Synthetic oligonucleotide
  Antisense strand to SEQ ID NO: 1898516
ugcacugggucuaacacac

SEQ ID NO: 1898518 - RNA, 19 nt, Artificial Sequence
  Description of Artificial Sequence: Synthetic oligonucleotide
  Sense strand starting at position 2630 of SEQ ID NO: 1879322
ugagcaagucccugaucuu

SEQ ID NO: 1898519 - RNA, 19 nt, Artificial Sequence
  Description of Artificial Sequence: Synthetic oligonucleotide
  Antisense strand to SEQ ID NO: 1898518
aagaucagggacuugcuca

SEQ ID NO: 1898520 - RNA, 19 nt, Artificial Sequence
  Description of Artificial Sequence: Synthetic oligonucleotide
  Sense strand starting at position 2631 of SEQ ID NO: 1879322
gagcaagucccugaucuug

SEQ ID NO: 1898521 - RNA, 19 nt, Artificial Sequence
  Description of Artificial Sequence: Synthetic oligonucleotide
  Antisense strand to SEQ ID NO: 1898520
caagaucagggacuugcuc

SEQ ID NO: 1898522 - RNA, 19 nt, Artificial Sequence
  Description of Artificial Sequence: Synthetic oligonucleotide
  Sense strand starting at position 2641 of SEQ ID NO: 1879322
cugaucuugugaccuuaca

SEQ ID NO: 1898523 - RNA, 19 nt, Artificial Sequence
  Description of Artificial Sequence: Synthetic oligonucleotide
  Antisense strand to SEQ ID NO: 1898522
uguaaggucacaagaucag

SEQ ID NO: 1898524 - RNA, 19 nt, Artificial Sequence
  Description of Artificial Sequence: Synthetic oligonucleotide
  Sense strand starting at position 2667 of SEQ ID NO: 1879322
ggacgacacaaacguauaa

SEQ ID NO: 1898525 - RNA, 19 nt, Artificial Sequence
  Description of Artificial Sequence: Synthetic oligonucleotide
  Antisense strand to SEQ ID NO: 1898524
uuauacguuugugucgucc

SEQ ID NO: 1898526 - RNA, 19 nt, Artificial Sequence
  Description of Artificial Sequence: Synthetic oligonucleotide
  Sense strand starting at position 3039 of SEQ ID NO: 1879322
aaauaaagcuaugugauag

SEQ ID NO: 1898527 - RNA, 19 nt, Artificial Sequence
  Description of Artificial Sequence: Synthetic oligonucleotide
  Antisense strand to SEQ ID NO: 1898526
cuaucacauagcuuuauuu

SEQ ID NO: 1898528 - RNA, 19 nt, Artificial Sequence
  Description of Artificial Sequence: Synthetic oligonucleotide
  Sense strand starting at position 3071 of SEQ ID NO: 1879322
gggauuagguccucacuga

SEQ ID NO: 1898529 - RNA, 19 nt, Artificial Sequence
  Description of Artificial Sequence: Synthetic oligonucleotide
  Antisense strand to SEQ ID NO: 1898528
ucagugaggaccuaauccc

SEQ ID NO: 1898530 - RNA, 19 nt, Artificial Sequence
  Description of Artificial Sequence: Synthetic oligonucleotide
  Sense strand starting at position 3075 of SEQ ID NO: 1879322
uuagguccucacugaaaug

SEQ ID NO: 1898531 - RNA, 19 nt, Artificial Sequence
  Description of Artificial Sequence: Synthetic oligonucleotide
  Antisense strand to SEQ ID NO: 1898530
cauuucagugaggaccuaa

SEQ ID NO: 1898532 - RNA, 19 nt, Artificial Sequence
  Description of Artificial Sequence: Synthetic oligonucleotide
  Sense strand starting at position 3090 of SEQ ID NO: 1879322
aauggugagaguggaguua

SEQ ID NO: 1898533 - RNA, 19 nt, Artificial Sequence
  Description of Artificial Sequence: Synthetic oligonucleotide
  Antisense strand to SEQ ID NO: 1898532
uaacuccacucucaccauu

SEQ ID NO: 1898534 - RNA, 19 nt, Artificial Sequence
  Description of Artificial Sequence: Synthetic oligonucleotide
  Sense strand starting at position 3092 of SEQ ID NO: 1879322
uggugagaguggaguuaaa

SEQ ID NO: 1898535 - RNA, 19 nt, Artificial Sequence
  Description of Artificial Sequence: Synthetic oligonucleotide
  Antisense strand to SEQ ID NO: 1898534
uuuaacuccacucucacca

SEQ ID NO: 1898536 - RNA, 19 nt, Artificial Sequence
  Description of Artificial Sequence: Synthetic oligonucleotide
  Sense strand starting at position 3123 of SEQ ID NO: 1879322
gugacagcaccagauauau

SEQ ID NO: 1898537 - RNA, 19 nt, Artificial Sequence
  Description of Artificial Sequence: Synthetic oligonucleotide
  Antisense strand to SEQ ID NO: 1898536
auauaucuggugcugucac

SEQ ID NO: 1898538 - RNA, 19 nt, Artificial Sequence
  Description of Artificial Sequence: Synthetic oligonucleotide
  Sense strand starting at position 3135 of SEQ ID NO: 1879322
gauauaucugcccgagggu

SEQ ID NO: 1898539 - RNA, 19 nt, Artificial Sequence
  Description of Artificial Sequence: Synthetic oligonucleotide
  Antisense strand to SEQ ID NO: 1898538
acccucgggcagauauauc

SEQ ID NO: 1898540 - RNA, 19 nt, Artificial Sequence
  Description of Artificial Sequence: Synthetic oligonucleotide
  Sense strand starting at position 3136 of SEQ ID NO: 1879322
auauaucugcccgaggguu

SEQ ID NO: 1898541 - RNA, 19 nt, Artificial Sequence
  Description of Artificial Sequence: Synthetic oligonucleotide
  Antisense strand to SEQ ID NO: 1898540
aacccucgggcagauauau

SEQ ID NO: 1898542 - RNA, 19 nt, Artificial Sequence
  Description of Artificial Sequence: Synthetic oligonucleotide
  Sense strand starting at position 3149 of SEQ ID NO: 1879322
aggguuucgugcuuggaaa

SEQ ID NO: 1898543 - RNA, 19 nt, Artificial Sequence
  Description of Artificial Sequence: Synthetic oligonucleotide
  Antisense strand to SEQ ID NO: 1898542
uuuccaagcacgaaacccu

SEQ ID NO: 1898544 - RNA, 19 nt, Artificial Sequence
  Description of Artificial Sequence: Synthetic oligonucleotide
  Sense strand starting at position 3443 of SEQ ID NO: 1879322
ucaagauaggauugguugu

SEQ ID NO: 1898545 - RNA, 19 nt, Artificial Sequence
  Description of Artificial Sequence: Synthetic oligonucleotide
  Antisense strand to SEQ ID NO: 1898544
acaaccaauccuaucuuga

SEQ ID NO: 1898546 - RNA, 19 nt, Artificial Sequence
  Description of Artificial Sequence: Synthetic oligonucleotide
  Sense strand starting at position 3575 of SEQ ID NO: 1879322
gaaugaagagcucaguugu

SEQ ID NO: 1898547 - RNA, 19 nt, Artificial Sequence
  Description of Artificial Sequence: Synthetic oligonucleotide
  Antisense strand to SEQ ID NO: 1898546
acaacugagcucuucauuc

SEQ ID NO: 1898548 - RNA, 19 nt, Artificial Sequence
  Description of Artificial Sequence: Synthetic oligonucleotide
  Sense strand starting at position 3945 of SEQ ID NO: 1879322
cagauaugcugaguuggau

SEQ ID NO: 1898549 - RNA, 19 nt, Artificial Sequence
  Description of Artificial Sequence: Synthetic oligonucleotide
  Antisense strand to SEQ ID NO: 1898548
auccaacucagcauaucug

SEQ ID NO: 1898550 - RNA, 19 nt, Artificial Sequence
  Description of Artificial Sequence: Synthetic oligonucleotide
  Sense strand starting at position 3958 of SEQ ID NO: 1879322
uuggauggcgcucaagaga

SEQ ID NO: 1898551 - RNA, 19 nt, Artificial Sequence
  Description of Artificial Sequence: Synthetic oligonucleotide
  Antisense strand to SEQ ID NO: 1898550
ucucuugagcgccauccaa

SEQ ID NO: 1898552 - RNA, 19 nt, Artificial Sequence
  Description of Artificial Sequence: Synthetic oligonucleotide
  Sense strand starting at position 3975 of SEQ ID NO: 1879322
gaggucaaggcuggacuua

SEQ ID NO: 1898553 - RNA, 19 nt, Artificial Sequence
  Description of Artificial Sequence: Synthetic oligonucleotide
  Antisense strand to SEQ ID NO: 1898552
uaaguccagccuugaccuc

SEQ ID NO: 1898554 - RNA, 19 nt, Artificial Sequence
  Description of Artificial Sequence: Synthetic oligonucleotide
  Sense strand starting at position 3976 of SEQ ID NO: 1879322
aggucaaggcuggacuuau

SEQ ID NO: 1898555 - RNA, 19 nt, Artificial Sequence
  Description of Artificial Sequence: Synthetic oligonucleotide
  Antisense strand to SEQ ID NO: 1898554
auaaguccagccuugaccu

SEQ ID NO: 1898556 - RNA, 19 nt, Artificial Sequence
  Description of Artificial Sequence: Synthetic oligonucleotide
  Sense strand starting at position 419 of SEQ ID NO: 1879323
uuugauguuuacccuuaga

SEQ ID NO: 1898557 - RNA, 19 nt, Artificial Sequence
  Description of Artificial Sequence: Synthetic oligonucleotide
  Antisense strand to SEQ ID NO: 1898556
ucuaaggguaaacaucaaa

SEQ ID NO: 1898558 - RNA, 19 nt, Artificial Sequence
  Description of Artificial Sequence: Synthetic oligonucleotide
  Sense strand starting at position 594 of SEQ ID NO: 1879323
augugaaacacauggcuga

SEQ ID NO: 1898559 - RNA, 19 nt, Artificial Sequence
  Description of Artificial Sequence: Synthetic oligonucleotide
  Antisense strand to SEQ ID NO: 1898558
ucagccauguguuucacau

SEQ ID NO: 1898560 - RNA, 19 nt, Artificial Sequence
  Description of Artificial Sequence: Synthetic oligonucleotide
  Sense strand starting at position 670 of SEQ ID NO: 1879323
cugcguuagagucacaaua

SEQ ID NO: 1898561 - RNA, 19 nt, Artificial Sequence
  Description of Artificial Sequence: Synthetic oligonucleotide
  Antisense strand to SEQ ID NO: 1898560
uauugugacucuaacgcag

SEQ ID NO: 1898562 - RNA, 19 nt, Artificial Sequence
  Description of Artificial Sequence: Synthetic oligonucleotide
  Sense strand starting at position 696 of SEQ ID NO: 1879323
cucuaacucagugagggua

SEQ ID NO: 1898563 - RNA, 19 nt, Artificial Sequence
  Description of Artificial Sequence: Synthetic oligonucleotide
  Antisense strand to SEQ ID NO: 1898562
uacccucacugaguuagag

SEQ ID NO: 1898564 - RNA, 19 nt, Artificial Sequence
  Description of Artificial Sequence: Synthetic oligonucleotide
  Sense strand starting at position 791 of SEQ ID NO: 1879323
gagagcuaccuaggaaguu

SEQ ID NO: 1898565 - RNA, 19 nt, Artificial Sequence
  Description of Artificial Sequence: Synthetic oligonucleotide
  Antisense strand to SEQ ID NO: 1898564
aacuuccuagguagcucuc

SEQ ID NO: 1898566 - RNA, 19 nt, Artificial Sequence
  Description of Artificial Sequence: Synthetic oligonucleotide
  Sense strand starting at position 832 of SEQ ID NO: 1879323
gcgauacagcuuuaggauu

SEQ ID NO: 1898567 - RNA, 19 nt, Artificial Sequence
  Description of Artificial Sequence: Synthetic oligonucleotide
  Antisense strand to SEQ ID NO: 1898566
aauccuaaagcuguaucgc

SEQ ID NO: 1898568 - RNA, 19 nt, Artificial Sequence
  Description of Artificial Sequence: Synthetic oligonucleotide
  Sense strand starting at position 1025 of SEQ ID NO: 1879323
gcgagaaagagcuaucaga

SEQ ID NO: 1898569 - RNA, 19 nt, Artificial Sequence
  Description of Artificial Sequence: Synthetic oligonucleotide
  Antisense strand to SEQ ID NO: 1898568
ucugauagcucuuucucgc

SEQ ID NO: 1898570 - RNA, 19 nt, Artificial Sequence
  Description of Artificial Sequence: Synthetic oligonucleotide
  Sense strand starting at position 1109 of SEQ ID NO: 1879323
ggauuaaaguagucugauu

SEQ ID NO: 1898571 - RNA, 19 nt, Artificial Sequence
  Description of Artificial Sequence: Synthetic oligonucleotide
  Antisense strand to SEQ ID NO: 1898570
aaucagacuacuuuaaucc

SEQ ID NO: 1898572 - RNA, 19 nt, Artificial Sequence
  Description of Artificial Sequence: Synthetic oligonucleotide
  Sense strand starting at position 1114 of SEQ ID NO: 1879323
aaaguagucugauugcaua

SEQ ID NO: 1898573 - RNA, 19 nt, Artificial Sequence
  Description of Artificial Sequence: Synthetic oligonucleotide
  Antisense strand to SEQ ID NO: 1898572
uaugcaaucagacuacuuu

SEQ ID NO: 1898574 - RNA, 19 nt, Artificial Sequence
  Description of Artificial Sequence: Synthetic oligonucleotide
  Sense strand starting at position 1125 of SEQ ID NO: 1879323
auugcauagagagguuaaa

SEQ ID NO: 1898575 - RNA, 19 nt, Artificial Sequence
  Description of Artificial Sequence: Synthetic oligonucleotide
  Antisense strand to SEQ ID NO: 1898574
uuuaaccucucuaugcaau

SEQ ID NO: 1898576 - RNA, 19 nt, Artificial Sequence
  Description of Artificial Sequence: Synthetic oligonucleotide
  Sense strand starting at position 1234 of SEQ ID NO: 1879323
uuggaagcacuuuagugaa

SEQ ID NO: 1898577 - RNA, 19 nt, Artificial Sequence
  Description of Artificial Sequence: Synthetic oligonucleotide
  Antisense strand to SEQ ID NO: 1898576
uucacuaaagugcuuccaa

SEQ ID NO: 1898578 - RNA, 19 nt, Artificial Sequence
  Description of Artificial Sequence: Synthetic oligonucleotide
  Sense strand starting at position 1302 of SEQ ID NO: 1879323
ggaaauuagugagucugga

SEQ ID NO: 1898579 - RNA, 19 nt, Artificial Sequence
  Description of Artificial Sequence: Synthetic oligonucleotide
  Antisense strand to SEQ ID NO: 1898578
uccagacucacuaauuucc

SEQ ID NO: 1898580 - RNA, 19 nt, Artificial Sequence
  Description of Artificial Sequence: Synthetic oligonucleotide
  Sense strand starting at position 1316 of SEQ ID NO: 1879323
cuggacuauuucuaaagaa

SEQ ID NO: 1898581 - RNA, 19 nt, Artificial Sequence
  Description of Artificial Sequence: Synthetic oligonucleotide
  Antisense strand to SEQ ID NO: 1898580
uucuuuagaaauaguccag

SEQ ID NO: 1898582 - RNA, 19 nt, Artificial Sequence
  Description of Artificial Sequence: Synthetic oligonucleotide
  Sense strand starting at position 1500 of SEQ ID NO: 1879323
auuuguagcucuuuccauu

SEQ ID NO: 1898583 - RNA, 19 nt, Artificial Sequence
  Description of Artificial Sequence: Synthetic oligonucleotide
  Antisense strand to SEQ ID NO: 1898582
aauggaaagagcuacaaau

SEQ ID NO: 1898584 - RNA, 19 nt, Artificial Sequence
  Description of Artificial Sequence: Synthetic oligonucleotide
  Sense strand starting at position 1564 of SEQ ID NO: 1879323
auggaaauguaaucauguc

SEQ ID NO: 1898585 - RNA, 19 nt, Artificial Sequence
  Description of Artificial Sequence: Synthetic oligonucleotide
  Antisense strand to SEQ ID NO: 1898584
gacaugauuacauuuccau

SEQ ID NO: 1898586 - RNA, 19 nt, Artificial Sequence
  Description of Artificial Sequence: Synthetic oligonucleotide
  Sense strand starting at position 1778 of SEQ ID NO: 1879323
uucugacgauguuuaagaa

SEQ ID NO: 1898587 - RNA, 19 nt, Artificial Sequence
  Description of Artificial Sequence: Synthetic oligonucleotide
  Antisense strand to SEQ ID NO: 1898586
uucuuaaacaucgucagaa

SEQ ID NO: 1898588 - RNA, 19 nt, Artificial Sequence
  Description of Artificial Sequence: Synthetic oligonucleotide
  Sense strand starting at position 1848 of SEQ ID NO: 1879323
uuccauaucccugagcuga

SEQ ID NO: 1898589 - RNA, 19 nt, Artificial Sequence
  Description of Artificial Sequence: Synthetic oligonucleotide
  Antisense strand to SEQ ID NO: 1898588
ucagcucagggauauggaa

SEQ ID NO: 1898590 - RNA, 19 nt, Artificial Sequence
  Description of Artificial Sequence: Synthetic oligonucleotide
  Sense strand starting at position 1850 of SEQ ID NO: 1879323
ccauaucccugagcugaga

SEQ ID NO: 1898591 - RNA, 19 nt, Artificial Sequence
  Description of Artificial Sequence: Synthetic oligonucleotide
  Antisense strand to SEQ ID NO: 1898590
ucucagcucagggauaugg

SEQ ID NO: 1898592 - RNA, 19 nt, Artificial Sequence
  Description of Artificial Sequence: Synthetic oligonucleotide
  Sense strand starting at position 2147 of SEQ ID NO: 1879323
gugggaggguuuaaugauu

SEQ ID NO: 1898593 - RNA, 19 nt, Artificial Sequence
  Description of Artificial Sequence: Synthetic oligonucleotide
  Antisense strand to SEQ ID NO: 1898592
aaucauuaaacccucccac

SEQ ID NO: 1898594 - RNA, 19 nt, Artificial Sequence
  Description of Artificial Sequence: Synthetic oligonucleotide
  Sense strand starting at position 2152 of SEQ ID NO: 1879323
aggguuuaaugauugcuca

SEQ ID NO: 1898595 - RNA, 19 nt, Artificial Sequence
  Description of Artificial Sequence: Synthetic oligonucleotide
  Antisense strand to SEQ ID NO: 1898594
ugagcaaucauuaaacccu

SEQ ID NO: 1898596 - RNA, 19 nt, Artificial Sequence
  Description of Artificial Sequence: Synthetic oligonucleotide
  Sense strand starting at position 2153 of SEQ ID NO: 1879323
ggguuuaaugauugcucaa

SEQ ID NO: 1898597 - RNA, 19 nt, Artificial Sequence
  Description of Artificial Sequence: Synthetic oligonucleotide
  Antisense strand to SEQ ID NO: 1898596
uugagcaaucauuaaaccc

SEQ ID NO: 1898598 - RNA, 19 nt, Artificial Sequence
  Description of Artificial Sequence: Synthetic oligonucleotide
  Sense strand starting at position 2260 of SEQ ID NO: 1879323
ugucucauggauugaguca

SEQ ID NO: 1898599 - RNA, 19 nt, Artificial Sequence
  Description of Artificial Sequence: Synthetic oligonucleotide
  Antisense strand to SEQ ID NO: 1898598
ugacucaauccaugagaca

SEQ ID NO: 1898600 - RNA, 19 nt, Artificial Sequence
  Description of Artificial Sequence: Synthetic oligonucleotide
  Sense strand starting at position 2517 of SEQ ID NO: 1879323
ugguuugcagucuauggaa

SEQ ID NO: 1898601 - RNA, 19 nt, Artificial Sequence
  Description of Artificial Sequence: Synthetic oligonucleotide
  Antisense strand to SEQ ID NO: 1898600
uuccauagacugcaaacca

SEQ ID NO: 1898602 - RNA, 19 nt, Artificial Sequence
  Description of Artificial Sequence: Synthetic oligonucleotide
  Sense strand starting at position 2540 of SEQ ID NO: 1879323
ucuaguagauagucacaga

SEQ ID NO: 1898603 - RNA, 19 nt, Artificial Sequence
  Description of Artificial Sequence: Synthetic oligonucleotide
  Antisense strand to SEQ ID NO: 1898602
ucugugacuaucuacuaga

SEQ ID NO: 1898604 - RNA, 19 nt, Artificial Sequence
  Description of Artificial Sequence: Synthetic oligonucleotide
  Sense strand starting at position 2579 of SEQ ID NO: 1879323
guauuauuacaugaugcaa

SEQ ID NO: 1898605 - RNA, 19 nt, Artificial Sequence
  Description of Artificial Sequence: Synthetic oligonucleotide
  Antisense strand to SEQ ID NO: 1898604
uugcaucauguaauaauac

SEQ ID NO: 1898606 - RNA, 19 nt, Artificial Sequence
  Description of Artificial Sequence: Synthetic oligonucleotide
  Sense strand starting at position 2832 of SEQ ID NO: 1879323
uguacauguguguauagag

SEQ ID NO: 1898607 - RNA, 19 nt, Artificial Sequence
  Description of Artificial Sequence: Synthetic oligonucleotide
  Antisense strand to SEQ ID NO: 1898606
cucuauacacacauguaca

SEQ ID NO: 1898608 - RNA, 19 nt, Artificial Sequence
  Description of Artificial Sequence: Synthetic oligonucleotide
  Sense strand starting at position 2841 of SEQ ID NO: 1879323
guguauagagagcaaauau

SEQ ID NO: 1898609 - RNA, 19 nt, Artificial Sequence
  Description of Artificial Sequence: Synthetic oligonucleotide
  Antisense strand to SEQ ID NO: 1898608
auauuugcucucuauacac

SEQ ID NO: 1898610 - RNA, 19 nt, Artificial Sequence
  Description of Artificial Sequence: Synthetic oligonucleotide
  Sense strand starting at position 2877 of SEQ ID NO: 1879323
guacuaggugcugagaagu

SEQ ID NO: 1898611 - RNA, 19 nt, Artificial Sequence
  Description of Artificial Sequence: Synthetic oligonucleotide
  Antisense strand to SEQ ID NO: 1898610
acuucucagcaccuaguac

SEQ ID NO: 1898612 - RNA, 19 nt, Artificial Sequence
  Description of Artificial Sequence: Synthetic oligonucleotide
  Sense strand starting at position 2885 of SEQ ID NO: 1879323
ugcugagaaguguaugaag

SEQ ID NO: 1898613 - RNA, 19 nt, Artificial Sequence
  Description of Artificial Sequence: Synthetic oligonucleotide
  Antisense strand to SEQ ID NO: 1898612
cuucauacacuucucagca

SEQ ID NO: 1898614 - RNA, 19 nt, Artificial Sequence
  Description of Artificial Sequence: Synthetic oligonucleotide
  Sense strand starting at position 2887 of SEQ ID NO: 1879323
cugagaaguguaugaagau

SEQ ID NO: 1898615 - RNA, 19 nt, Artificial Sequence
  Description of Artificial Sequence: Synthetic oligonucleotide
  Antisense strand to SEQ ID NO: 1898614
aucuucauacacuucucag

SEQ ID NO: 1898616 - RNA, 19 nt, Artificial Sequence
  Description of Artificial Sequence: Synthetic oligonucleotide
  Sense strand starting at position 2893 of SEQ ID NO: 1879323
aguguaugaagaugaauua

SEQ ID NO: 1898617 - RNA, 19 nt, Artificial Sequence
  Description of Artificial Sequence: Synthetic oligonucleotide
  Antisense strand to SEQ ID NO: 1898616
uaauucaucuucauacacu

SEQ ID NO: 1898618 - RNA, 19 nt, Artificial Sequence
  Description of Artificial Sequence: Synthetic oligonucleotide
  Sense strand starting at position 2937 of SEQ ID NO: 1879323
cuuacucuagaggguaaga

SEQ ID NO: 1898619 - RNA, 19 nt, Artificial Sequence
  Description of Artificial Sequence: Synthetic oligonucleotide
  Antisense strand to SEQ ID NO: 1898618
ucuuacccucuagaguaag

SEQ ID NO: 1898620 - RNA, 19 nt, Artificial Sequence
  Description of Artificial Sequence: Synthetic oligonucleotide
  Sense strand starting at position 3022 of SEQ ID NO: 1879323
ugaaauauguagcccaaga

SEQ ID NO: 1898621 - RNA, 19 nt, Artificial Sequence
  Description of Artificial Sequence: Synthetic oligonucleotide
  Antisense strand to SEQ ID NO: 1898620
ucuugggcuacauauuuca

SEQ ID NO: 1898622 - RNA, 19 nt, Artificial Sequence
  Description of Artificial Sequence: Synthetic oligonucleotide
  Sense strand starting at position 3089 of SEQ ID NO: 1879323
augucacuuaugugaagug

SEQ ID NO: 1898623 - RNA, 19 nt, Artificial Sequence
  Description of Artificial Sequence: Synthetic oligonucleotide
  Antisense strand to SEQ ID NO: 1898622
cacuucacauaagugacau

SEQ ID NO: 1898624 - RNA, 19 nt, Artificial Sequence
  Description of Artificial Sequence: Synthetic oligonucleotide
  Sense strand starting at position 3249 of SEQ ID NO: 1879323
gggaauguauguuuacaau

SEQ ID NO: 1898625 - RNA, 19 nt, Artificial Sequence
  Description of Artificial Sequence: Synthetic oligonucleotide
  Antisense strand to SEQ ID NO: 1898624
auuguaaacauacauuccc

SEQ ID NO: 1898626 - RNA, 19 nt, Artificial Sequence
  Description of Artificial Sequence: Synthetic oligonucleotide
  Sense strand starting at position 3284 of SEQ ID NO: 1879323
ggauauuaauaugccauau

SEQ ID NO: 1898627 - RNA, 19 nt, Artificial Sequence
  Description of Artificial Sequence: Synthetic oligonucleotide
  Antisense strand to SEQ ID NO: 1898626
auauggcauauuaauaucc

SEQ ID NO: 1898628 - RNA, 19 nt, Artificial Sequence
  Description of Artificial Sequence: Synthetic oligonucleotide
  Sense strand starting at position 3385 of SEQ ID NO: 1879323
cagacaucuguccaggcaa

SEQ ID NO: 1898629 - RNA, 19 nt, Artificial Sequence
  Description of Artificial Sequence: Synthetic oligonucleotide
  Antisense strand to SEQ ID NO: 1898628
uugccuggacagaugucug

SEQ ID NO: 1898630 - RNA, 19 nt, Artificial Sequence
  Description of Artificial Sequence: Synthetic oligonucleotide
  Sense strand starting at position 3387 of SEQ ID NO: 1879323
gacaucuguccaggcaaca

SEQ ID NO: 1898631 - RNA, 19 nt, Artificial Sequence
  Description of Artificial Sequence: Synthetic oligonucleotide
  Antisense strand to SEQ ID NO: 1898630
uguugccuggacagauguc

SEQ ID NO: 1898632 - RNA, 19 nt, Artificial Sequence
  Description of Artificial Sequence: Synthetic oligonucleotide
  Sense strand starting at position 3526 of SEQ ID NO: 1879323
ugcguaaugggauaaugua

SEQ ID NO: 1898633 - RNA, 19 nt, Artificial Sequence
  Description of Artificial Sequence: Synthetic oligonucleotide
  Antisense strand to SEQ ID NO: 1898632
uacauuaucccauuacgca

SEQ ID NO: 1898634 - RNA, 19 nt, Artificial Sequence
  Description of Artificial Sequence: Synthetic oligonucleotide
  Sense strand starting at position 3706 of SEQ ID NO: 1879323
ugcuuaacaugucuuagau

SEQ ID NO: 1898635 - RNA, 19 nt, Artificial Sequence
  Description of Artificial Sequence: Synthetic oligonucleotide
  Antisense strand to SEQ ID NO: 1898634
aucuaagacauguuaagca

SEQ ID NO: 1898636 - RNA, 19 nt, Artificial Sequence
  Description of Artificial Sequence: Synthetic oligonucleotide
  Sense strand starting at position 51 of SEQ ID NO: 1879324
gaagauaucugucugacau

SEQ ID NO: 1898637 - RNA, 19 nt, Artificial Sequence
  Description of Artificial Sequence: Synthetic oligonucleotide
  Antisense strand to SEQ ID NO: 1898636
augucagacagauaucuuc

SEQ ID NO: 1898638 - RNA, 19 nt, Artificial Sequence
  Description of Artificial Sequence: Synthetic oligonucleotide
  Sense strand starting at position 176 of SEQ ID NO: 1879324
gcucauugagccuaugaga

SEQ ID NO: 1898639 - RNA, 19 nt, Artificial Sequence
  Description of Artificial Sequence: Synthetic oligonucleotide
  Antisense strand to SEQ ID NO: 1898638
ucucauaggcucaaugagc

SEQ ID NO: 1898640 - RNA, 19 nt, Artificial Sequence
  Description of Artificial Sequence: Synthetic oligonucleotide
  Sense strand starting at position 223 of SEQ ID NO: 1879324
uaugaaugggcucagcauu

SEQ ID NO: 1898641 - RNA, 19 nt, Artificial Sequence
  Description of Artificial Sequence: Synthetic oligonucleotide
  Antisense strand to SEQ ID NO: 1898640
aaugcugagcccauucaua

SEQ ID NO: 1898642 - RNA, 19 nt, Artificial Sequence
  Description of Artificial Sequence: Synthetic oligonucleotide
  Sense strand starting at position 229 of SEQ ID NO: 1879324
ugggcucagcauuaugaca

SEQ ID NO: 1898643 - RNA, 19 nt, Artificial Sequence
  Description of Artificial Sequence: Synthetic oligonucleotide
  Antisense strand to SEQ ID NO: 1898642
ugucauaaugcugagccca

SEQ ID NO: 1898644 - RNA, 19 nt, Artificial Sequence
  Description of Artificial Sequence: Synthetic oligonucleotide
  Sense strand starting at position 262 of SEQ ID NO: 1879324
guuagcaugugauuuggca

SEQ ID NO: 1898645 - RNA, 19 nt, Artificial Sequence
  Description of Artificial Sequence: Synthetic oligonucleotide
  Antisense strand to SEQ ID NO: 1898644
ugccaaaucacaugcuaac

SEQ ID NO: 1898646 - RNA, 19 nt, Artificial Sequence
  Description of Artificial Sequence: Synthetic oligonucleotide
  Sense strand starting at position 266 of SEQ ID NO: 1879324
gcaugugauuuggcacuau

SEQ ID NO: 1898647 - RNA, 19 nt, Artificial Sequence
  Description of Artificial Sequence: Synthetic oligonucleotide
  Antisense strand to SEQ ID NO: 1898646
auagugccaaaucacaugc

SEQ ID NO: 1898648 - RNA, 19 nt, Artificial Sequence
  Description of Artificial Sequence: Synthetic oligonucleotide
  Sense strand starting at position 291 of SEQ ID NO: 1879324
gcgucuggcuggacuagua

SEQ ID NO: 1898649 - RNA, 19 nt, Artificial Sequence
  Description of Artificial Sequence: Synthetic oligonucleotide
  Antisense strand to SEQ ID NO: 1898648
uacuaguccagccagacgc

SEQ ID NO: 1898650 - RNA, 19 nt, Artificial Sequence
  Description of Artificial Sequence: Synthetic oligonucleotide
  Sense strand starting at position 301 of SEQ ID NO: 1879324
ggacuaguagcauagugau

SEQ ID NO: 1898651 - RNA, 19 nt, Artificial Sequence
  Description of Artificial Sequence: Synthetic oligonucleotide
  Antisense strand to SEQ ID NO: 1898650
aucacuaugcuacuagucc

SEQ ID NO: 1898652 - RNA, 19 nt, Artificial Sequence
  Description of Artificial Sequence: Synthetic oligonucleotide
  Sense strand starting at position 313 of SEQ ID NO: 1879324
uagugauuacucuggacuc

SEQ ID NO: 1898653 - RNA, 19 nt, Artificial Sequence
  Description of Artificial Sequence: Synthetic oligonucleotide
  Antisense strand to SEQ ID NO: 1898652
gaguccagaguaaucacua

SEQ ID NO: 1898654 - RNA, 19 nt, Artificial Sequence
  Description of Artificial Sequence: Synthetic oligonucleotide
  Sense strand starting at position 315 of SEQ ID NO: 1879324
gugauuacucuggacuccu

SEQ ID NO: 1898655 - RNA, 19 nt, Artificial Sequence
  Description of Artificial Sequence: Synthetic oligonucleotide
  Antisense strand to SEQ ID NO: 1898654
aggaguccagaguaaucac

SEQ ID NO: 1898656 - RNA, 19 nt, Artificial Sequence
  Description of Artificial Sequence: Synthetic oligonucleotide
  Sense strand starting at position 326 of SEQ ID NO: 1879324
ggacuccuuugagcauaga

SEQ ID NO: 1898657 - RNA, 19 nt, Artificial Sequence
  Description of Artificial Sequence: Synthetic oligonucleotide
  Antisense strand to SEQ ID NO: 1898656
ucuaugcucaaaggagucc

SEQ ID NO: 1898658 - RNA, 19 nt, Artificial Sequence
  Description of Artificial Sequence: Synthetic oligonucleotide
  Sense strand starting at position 350 of SEQ ID NO: 1879324
caauguuagucuuuauagg

SEQ ID NO: 1898659 - RNA, 19 nt, Artificial Sequence
  Description of Artificial Sequence: Synthetic oligonucleotide
  Antisense strand to SEQ ID NO: 1898658
ccuauaaagacuaacauug

SEQ ID NO: 1898660 - RNA, 19 nt, Artificial Sequence
  Description of Artificial Sequence: Synthetic oligonucleotide
  Sense strand starting at position 568 of SEQ ID NO: 1879324
gugggcuugacugaaugau

SEQ ID NO: 1898661 - RNA, 19 nt, Artificial Sequence
  Description of Artificial Sequence: Synthetic oligonucleotide
  Antisense strand to SEQ ID NO: 1898660
aucauucagucaagcccac

SEQ ID NO: 1898662 - RNA, 19 nt, Artificial Sequence
  Description of Artificial Sequence: Synthetic oligonucleotide
  Sense strand starting at position 580 of SEQ ID NO: 1879324
gaaugauggaaugggcuuu

SEQ ID NO: 1898663 - RNA, 19 nt, Artificial Sequence
  Description of Artificial Sequence: Synthetic oligonucleotide
  Antisense strand to SEQ ID NO: 1898662
aaagcccauuccaucauuc

SEQ ID NO: 1898664 - RNA, 19 nt, Artificial Sequence
  Description of Artificial Sequence: Synthetic oligonucleotide
  Sense strand starting at position 593 of SEQ ID NO: 1879324
ggcuuuauugaaugaugga

SEQ ID NO: 1898665 - RNA, 19 nt, Artificial Sequence
  Description of Artificial Sequence: Synthetic oligonucleotide
  Antisense strand to SEQ ID NO: 1898664
uccaucauucaauaaagcc

SEQ ID NO: 1898666 - RNA, 19 nt, Artificial Sequence
  Description of Artificial Sequence: Synthetic oligonucleotide
  Sense strand starting at position 606 of SEQ ID NO: 1879324
gauggaauggccugcugaa

SEQ ID NO: 1898667 - RNA, 19 nt, Artificial Sequence
  Description of Artificial Sequence: Synthetic oligonucleotide
  Antisense strand to SEQ ID NO: 1898666
uucagcaggccauuccauc

SEQ ID NO: 1898668 - RNA, 19 nt, Artificial Sequence
  Description of Artificial Sequence: Synthetic oligonucleotide
  Sense strand starting at position 630 of SEQ ID NO: 1879324
aguuauugaagcugagaaa

SEQ ID NO: 1898669 - RNA, 19 nt, Artificial Sequence
  Description of Artificial Sequence: Synthetic oligonucleotide
  Antisense strand to SEQ ID NO: 1898668
uuucucagcuucaauaacu

SEQ ID NO: 1898670 - RNA, 19 nt, Artificial Sequence
  Description of Artificial Sequence: Synthetic oligonucleotide
  Sense strand starting at position 719 of SEQ ID NO: 1879324
ccugauacaugaguccaga

SEQ ID NO: 1898671 - RNA, 19 nt, Artificial Sequence
  Description of Artificial Sequence: Synthetic oligonucleotide
  Antisense strand to SEQ ID NO: 1898670
ucuggacucauguaucagg

SEQ ID NO: 1898672 - RNA, 19 nt, Artificial Sequence
  Description of Artificial Sequence: Synthetic oligonucleotide
  Sense strand starting at position 763 of SEQ ID NO: 1879324
guacaugaugcauaauaau

SEQ ID NO: 1898673 - RNA, 19 nt, Artificial Sequence
  Description of Artificial Sequence: Synthetic oligonucleotide
  Antisense strand to SEQ ID NO: 1898672
auuauuaugcaucauguac

SEQ ID NO: 1898674 - RNA, 19 nt, Artificial Sequence
  Description of Artificial Sequence: Synthetic oligonucleotide
  Sense strand starting at position 1007 of SEQ ID NO: 1879324
gucucaucccaucaguuga

SEQ ID NO: 1898675 - RNA, 19 nt, Artificial Sequence
  Description of Artificial Sequence: Synthetic oligonucleotide
  Antisense strand to SEQ ID NO: 1898674
ucaacugaugggaugagac

SEQ ID NO: 1898676 - RNA, 19 nt, Artificial Sequence
  Description of Artificial Sequence: Synthetic oligonucleotide
  Sense strand starting at position 1173 of SEQ ID NO: 1879324
gugugagccuauuucuuaa

SEQ ID NO: 1898677 - RNA, 19 nt, Artificial Sequence
  Description of Artificial Sequence: Synthetic oligonucleotide
  Antisense strand to SEQ ID NO: 1898676
uuaagaaauaggcucacac

SEQ ID NO: 1898678 - RNA, 19 nt, Artificial Sequence
  Description of Artificial Sequence: Synthetic oligonucleotide
  Sense strand starting at position 1175 of SEQ ID NO: 1879324
gugagccuauuucuuaacu

SEQ ID NO: 1898679 - RNA, 19 nt, Artificial Sequence
  Description of Artificial Sequence: Synthetic oligonucleotide
  Antisense strand to SEQ ID NO: 1898678
aguuaagaaauaggcucac

SEQ ID NO: 1898680 - RNA, 19 nt, Artificial Sequence
  Description of Artificial Sequence: Synthetic oligonucleotide
  Sense strand starting at position 1298 of SEQ ID NO: 1879324
ugacuaauacagugaauug

SEQ ID NO: 1898681 - RNA, 19 nt, Artificial Sequence
  Description of Artificial Sequence: Synthetic oligonucleotide
  Antisense strand to SEQ ID NO: 1898680
caauucacuguauuaguca

SEQ ID NO: 1898682 - RNA, 19 nt, Artificial Sequence
  Description of Artificial Sequence: Synthetic oligonucleotide
  Sense strand starting at position 1448 of SEQ ID NO: 1879324
gaaugagguuacucuauug

SEQ ID NO: 1898683 - RNA, 19 nt, Artificial Sequence
  Description of Artificial Sequence: Synthetic oligonucleotide
  Antisense strand to SEQ ID NO: 1898682
caauagaguaaccucauuc

SEQ ID NO: 1898684 - RNA, 19 nt, Artificial Sequence
  Description of Artificial Sequence: Synthetic oligonucleotide
  Sense strand starting at position 1460 of SEQ ID NO: 1879324
ucuauugauagaggugaac

SEQ ID NO: 1898685 - RNA, 19 nt, Artificial Sequence
  Description of Artificial Sequence: Synthetic oligonucleotide
  Antisense strand to SEQ ID NO: 1898684
guucaccucuaucaauaga

SEQ ID NO: 1898686 - RNA, 19 nt, Artificial Sequence
  Description of Artificial Sequence: Synthetic oligonucleotide
  Sense strand starting at position 1473 of SEQ ID NO: 1879324
gugaacucuagugauaggu

SEQ ID NO: 1898687 - RNA, 19 nt, Artificial Sequence
  Description of Artificial Sequence: Synthetic oligonucleotide
  Antisense strand to SEQ ID NO: 1898686
accuaucacuagaguucac

SEQ ID NO: 1898688 - RNA, 19 nt, Artificial Sequence
  Description of Artificial Sequence: Synthetic oligonucleotide
  Sense strand starting at position 1482 of SEQ ID NO: 1879324
agugauagguuacucuauu

SEQ ID NO: 1898689 - RNA, 19 nt, Artificial Sequence
  Description of Artificial Sequence: Synthetic oligonucleotide
  Antisense strand to SEQ ID NO: 1898688
aauagaguaaccuaucacu

SEQ ID NO: 1898690 - RNA, 19 nt, Artificial Sequence
  Description of Artificial Sequence: Synthetic oligonucleotide
  Sense strand starting at position 2401 of SEQ ID NO: 1879324
agcgucgucaaaguuuauu

SEQ ID NO: 1898691 - RNA, 19 nt, Artificial Sequence
  Description of Artificial Sequence: Synthetic oligonucleotide
  Antisense strand to SEQ ID NO: 1898690
aauaaacuuugacgacgcu

SEQ ID NO: 1898692 - RNA, 19 nt, Artificial Sequence
  Description of Artificial Sequence: Synthetic oligonucleotide
  Sense strand starting at position 2410 of SEQ ID NO: 1879324
aaaguuuauuauccacgga

SEQ ID NO: 1898693 - RNA, 19 nt, Artificial Sequence
  Description of Artificial Sequence: Synthetic oligonucleotide
  Antisense strand to SEQ ID NO: 1898692
uccguggauaauaaacuuu

SEQ ID NO: 1898694 - RNA, 19 nt, Artificial Sequence
  Description of Artificial Sequence: Synthetic oligonucleotide
  Sense strand starting at position 2506 of SEQ ID NO: 1879324
agucaacauguguauauau

SEQ ID NO: 1898695 - RNA, 19 nt, Artificial Sequence
  Description of Artificial Sequence: Synthetic oligonucleotide
  Antisense strand to SEQ ID NO: 1898694
auauauacacauguugacu

SEQ ID NO: 1898696 - RNA, 19 nt, Artificial Sequence
  Description of Artificial Sequence: Synthetic oligonucleotide
  Sense strand starting at position 2714 of SEQ ID NO: 1879324
ugaucuuccuucucagaag

SEQ ID NO: 1898697 - RNA, 19 nt, Artificial Sequence
  Description of Artificial Sequence: Synthetic oligonucleotide
  Antisense strand to SEQ ID NO: 1898696
cuucugagaaggaagauca

SEQ ID NO: 1898698 - RNA, 19 nt, Artificial Sequence
  Description of Artificial Sequence: Synthetic oligonucleotide
  Sense strand starting at position 2824 of SEQ ID NO: 1879324
uuccucaggguguaaauaa

SEQ ID NO: 1898699 - RNA, 19 nt, Artificial Sequence
  Description of Artificial Sequence: Synthetic oligonucleotide
  Antisense strand to SEQ ID NO: 1898698
uuauuuacacccugaggaa

SEQ ID NO: 1898700 - RNA, 19 nt, Artificial Sequence
  Description of Artificial Sequence: Synthetic oligonucleotide
  Sense strand starting at position 2873 of SEQ ID NO: 1879324
agaacagagcuaugaacuu

SEQ ID NO: 1898701 - RNA, 19 nt, Artificial Sequence
  Description of Artificial Sequence: Synthetic oligonucleotide
  Antisense strand to SEQ ID NO: 1898700
aaguucauagcucuguucu

SEQ ID NO: 1898702 - RNA, 19 nt, Artificial Sequence
  Description of Artificial Sequence: Synthetic oligonucleotide
  Sense strand starting at position 3171 of SEQ ID NO: 1879324
aaagaaguggucgaugcaa

SEQ ID NO: 1898703 - RNA, 19 nt, Artificial Sequence
  Description of Artificial Sequence: Synthetic oligonucleotide
  Antisense strand to SEQ ID NO: 1898702
uugcaucgaccacuucuuu

SEQ ID NO: 1898704 - RNA, 19 nt, Artificial Sequence
  Description of Artificial Sequence: Synthetic oligonucleotide
  Sense strand starting at position 3458 of SEQ ID NO: 1879324
ccaggagcugugggacaau

SEQ ID NO: 1898705 - RNA, 19 nt, Artificial Sequence
  Description of Artificial Sequence: Synthetic oligonucleotide
  Antisense strand to SEQ ID NO: 1898704
auugucccacagcuccugg

SEQ ID NO: 1898706 - RNA, 19 nt, Artificial Sequence
  Description of Artificial Sequence: Synthetic oligonucleotide
  Sense strand starting at position 3542 of SEQ ID NO: 1879324
ggugcacaucuguauggga

SEQ ID NO: 1898707 - RNA, 19 nt, Artificial Sequence
  Description of Artificial Sequence: Synthetic oligonucleotide
  Antisense strand to SEQ ID NO: 1898706
ucccauacagaugugcacc

SEQ ID NO: 1898708 - RNA, 19 nt, Artificial Sequence
  Description of Artificial Sequence: Synthetic oligonucleotide
  Sense strand starting at position 3544 of SEQ ID NO: 1879324
ugcacaucuguaugggaga

SEQ ID NO: 1898709 - RNA, 19 nt, Artificial Sequence
  Description of Artificial Sequence: Synthetic oligonucleotide
  Antisense strand to SEQ ID NO: 1898708
ucucccauacagaugugca

SEQ ID NO: 1898710 - RNA, 19 nt, Artificial Sequence
  Description of Artificial Sequence: Synthetic oligonucleotide
  Sense strand starting at position 3582 of SEQ ID NO: 1879324
gcccaagaucgauaccaug

SEQ ID NO: 1898711 - RNA, 19 nt, Artificial Sequence
  Description of Artificial Sequence: Synthetic oligonucleotide
  Antisense strand to SEQ ID NO: 1898710
caugguaucgaucuugggc

SEQ ID NO: 1898712 - RNA, 19 nt, Artificial Sequence
  Description of Artificial Sequence: Synthetic oligonucleotide
  Sense strand starting at position 3623 of SEQ ID NO: 1879324
agaggacaguuucuaguga

SEQ ID NO: 1898713 - RNA, 19 nt, Artificial Sequence
  Description of Artificial Sequence: Synthetic oligonucleotide
  Antisense strand to SEQ ID NO: 1898712
ucacuagaaacuguccucu

SEQ ID NO: 1898714 - RNA, 19 nt, Artificial Sequence
  Description of Artificial Sequence: Synthetic oligonucleotide
  Sense strand starting at position 3762 of SEQ ID NO: 1879324
gggcaugagacaugaagca

SEQ ID NO: 1898715 - RNA, 19 nt, Artificial Sequence
  Description of Artificial Sequence: Synthetic oligonucleotide
  Antisense strand to SEQ ID NO: 1898714
ugcuucaugucucaugccc

SEQ ID NO: 1898716 - RNA, 19 nt, Artificial Sequence
  Description of Artificial Sequence: Synthetic oligonucleotide
  Sense strand starting at position 216 of SEQ ID NO: 1879325
uuaugaaagugcucaagaa

SEQ ID NO: 1898717 - RNA, 19 nt, Artificial Sequence
  Description of Artificial Sequence: Synthetic oligonucleotide
  Antisense strand to SEQ ID NO: 1898716
uucuugagcacuuucauaa

SEQ ID NO: 1898718 - RNA, 19 nt, Artificial Sequence
  Description of Artificial Sequence: Synthetic oligonucleotide
  Sense strand starting at position 226 of SEQ ID NO: 1879325
gcucaagaauuuggagaua

SEQ ID NO: 1898719 - RNA, 19 nt, Artificial Sequence
  Description of Artificial Sequence: Synthetic oligonucleotide
  Antisense strand to SEQ ID NO: 1898718
uaucuccaaauucuugagc

SEQ ID NO: 1898720 - RNA, 19 nt, Artificial Sequence
  Description of Artificial Sequence: Synthetic oligonucleotide
  Sense strand starting at position 348 of SEQ ID NO: 1879325
auugaacuguuacugacaa

SEQ ID NO: 1898721 - RNA, 19 nt, Artificial Sequence
  Description of Artificial Sequence: Synthetic oligonucleotide
  Antisense strand to SEQ ID NO: 1898720
uugucaguaacaguucaau

SEQ ID NO: 1898722 - RNA, 19 nt, Artificial Sequence
  Description of Artificial Sequence: Synthetic oligonucleotide
  Sense strand starting at position 424 of SEQ ID NO: 1879325
ucauguuggcaacagaaua

SEQ ID NO: 1898723 - RNA, 19 nt, Artificial Sequence
  Description of Artificial Sequence: Synthetic oligonucleotide
  Antisense strand to SEQ ID NO: 1898722
uauucuguugccaacauga

SEQ ID NO: 1898724 - RNA, 19 nt, Artificial Sequence
  Description of Artificial Sequence: Synthetic oligonucleotide
  Sense strand starting at position 670 of SEQ ID NO: 1879325
ggaucacagugcuugucaa

SEQ ID NO: 1898725 - RNA, 19 nt, Artificial Sequence
  Description of Artificial Sequence: Synthetic oligonucleotide
  Antisense strand to SEQ ID NO: 1898724
uugacaagcacugugaucc

SEQ ID NO: 1898726 - RNA, 19 nt, Artificial Sequence
  Description of Artificial Sequence: Synthetic oligonucleotide
  Sense strand starting at position 671 of SEQ ID NO: 1879325
gaucacagugcuugucaaa

SEQ ID NO: 1898727 - RNA, 19 nt, Artificial Sequence
  Description of Artificial Sequence: Synthetic oligonucleotide
  Antisense strand to SEQ ID NO: 1898726
uuugacaagcacugugauc

SEQ ID NO: 1898728 - RNA, 19 nt, Artificial Sequence
  Description of Artificial Sequence: Synthetic oligonucleotide
  Sense strand starting at position 925 of SEQ ID NO: 1879325
cggagcucuucggugauuu

SEQ ID NO: 1898729 - RNA, 19 nt, Artificial Sequence
  Description of Artificial Sequence: Synthetic oligonucleotide
  Antisense strand to SEQ ID NO: 1898728
aaaucaccgaagagcuccg

SEQ ID NO: 1898730 - RNA, 19 nt, Artificial Sequence
  Description of Artificial Sequence: Synthetic oligonucleotide
  Sense strand starting at position 926 of SEQ ID NO: 1879325
ggagcucuucggugauuuc

SEQ ID NO: 1898731 - RNA, 19 nt, Artificial Sequence
  Description of Artificial Sequence: Synthetic oligonucleotide
  Antisense strand to SEQ ID NO: 1898730
gaaaucaccgaagagcucc

SEQ ID NO: 1898732 - RNA, 19 nt, Artificial Sequence
  Description of Artificial Sequence: Synthetic oligonucleotide
  Sense strand starting at position 929 of SEQ ID NO: 1879325
gcucuucggugauuuccau

SEQ ID NO: 1898733 - RNA, 19 nt, Artificial Sequence
  Description of Artificial Sequence: Synthetic oligonucleotide
  Antisense strand to SEQ ID NO: 1898732
auggaaaucaccgaagagc

SEQ ID NO: 1898734 - RNA, 19 nt, Artificial Sequence
  Description of Artificial Sequence: Synthetic oligonucleotide
  Sense strand starting at position 1003 of SEQ ID NO: 1879325
uuggauaaggcuuggucuu

SEQ ID NO: 1898735 - RNA, 19 nt, Artificial Sequence
  Description of Artificial Sequence: Synthetic oligonucleotide
  Antisense strand to SEQ ID NO: 1898734
aagaccaagccuuauccaa

SEQ ID NO: 1898736 - RNA, 19 nt, Artificial Sequence
  Description of Artificial Sequence: Synthetic oligonucleotide
  Sense strand starting at position 1291 of SEQ ID NO: 1879325
gcauauacuggaugagaau

SEQ ID NO: 1898737 - RNA, 19 nt, Artificial Sequence
  Description of Artificial Sequence: Synthetic oligonucleotide
  Antisense strand to SEQ ID NO: 1898736
auucucauccaguauaugc

SEQ ID NO: 1898738 - RNA, 19 nt, Artificial Sequence
  Description of Artificial Sequence: Synthetic oligonucleotide
  Sense strand starting at position 1640 of SEQ ID NO: 1879325
ugcuuuguccuuuaagaaa

SEQ ID NO: 1898739 - RNA, 19 nt, Artificial Sequence
  Description of Artificial Sequence: Synthetic oligonucleotide
  Antisense strand to SEQ ID NO: 1898738
uuucuuaaaggacaaagca

SEQ ID NO: 1898740 - RNA, 19 nt, Artificial Sequence
  Description of Artificial Sequence: Synthetic oligonucleotide
  Sense strand starting at position 1664 of SEQ ID NO: 1879325
uugacauagcgauaaucag

SEQ ID NO: 1898741 - RNA, 19 nt, Artificial Sequence
  Description of Artificial Sequence: Synthetic oligonucleotide
  Antisense strand to SEQ ID NO: 1898740
cugauuaucgcuaugucaa

SEQ ID NO: 1898742 - RNA, 19 nt, Artificial Sequence
  Description of Artificial Sequence: Synthetic oligonucleotide
  Sense strand starting at position 1750 of SEQ ID NO: 1879325
cugugucuccauggaggaa

SEQ ID NO: 1898743 - RNA, 19 nt, Artificial Sequence
  Description of Artificial Sequence: Synthetic oligonucleotide
  Antisense strand to SEQ ID NO: 1898742
uuccuccauggagacacag

SEQ ID NO: 1898744 - RNA, 19 nt, Artificial Sequence
  Description of Artificial Sequence: Synthetic oligonucleotide
  Sense strand starting at position 1751 of SEQ ID NO: 1879325
ugugucuccauggaggaaa

SEQ ID NO: 1898745 - RNA, 19 nt, Artificial Sequence
  Description of Artificial Sequence: Synthetic oligonucleotide
  Antisense strand to SEQ ID NO: 1898744
uuuccuccauggagacaca

SEQ ID NO: 1898746 - RNA, 19 nt, Artificial Sequence
  Description of Artificial Sequence: Synthetic oligonucleotide
  Sense strand starting at position 1842 of SEQ ID NO: 1879325
uuauuaguuugggcaggaa

SEQ ID NO: 1898747 - RNA, 19 nt, Artificial Sequence
  Description of Artificial Sequence: Synthetic oligonucleotide
  Antisense strand to SEQ ID NO: 1898746
uuccugcccaaacuaauaa

SEQ ID NO: 1898748 - RNA, 19 nt, Artificial Sequence
  Description of Artificial Sequence: Synthetic oligonucleotide
  Sense strand starting at position 1845 of SEQ ID NO: 1879325
uuaguuugggcaggaagaa

SEQ ID NO: 1898749 - RNA, 19 nt, Artificial Sequence
  Description of Artificial Sequence: Synthetic oligonucleotide
  Antisense strand to SEQ ID NO: 1898748
uucuuccugcccaaacuaa

SEQ ID NO: 1898750 - RNA, 19 nt, Artificial Sequence
  Description of Artificial Sequence: Synthetic oligonucleotide
  Sense strand starting at position 2734 of SEQ ID NO: 1879325
gguuacuucuugccagaua

SEQ ID NO: 1898751 - RNA, 19 nt, Artificial Sequence
  Description of Artificial Sequence: Synthetic oligonucleotide
  Antisense strand to SEQ ID NO: 1898750
uaucuggcaagaaguaacc

SEQ ID NO: 1898752 - RNA, 19 nt, Artificial Sequence
  Description of Artificial Sequence: Synthetic oligonucleotide
  Sense strand starting at position 2794 of SEQ ID NO: 1879325
ccgguuuaagaugaguuga

SEQ ID NO: 1898753 - RNA, 19 nt, Artificial Sequence
  Description of Artificial Sequence: Synthetic oligonucleotide
  Antisense strand to SEQ ID NO: 1898752
ucaacucaucuuaaaccgg

SEQ ID NO: 1898754 - RNA, 19 nt, Artificial Sequence
  Description of Artificial Sequence: Synthetic oligonucleotide
  Sense strand starting at position 2796 of SEQ ID NO: 1879325
gguuuaagaugaguugaaa

SEQ ID NO: 1898755 - RNA, 19 nt, Artificial Sequence
  Description of Artificial Sequence: Synthetic oligonucleotide
  Antisense strand to SEQ ID NO: 1898754
uuucaacucaucuuaaacc

SEQ ID NO: 1898756 - RNA, 19 nt, Artificial Sequence
  Description of Artificial Sequence: Synthetic oligonucleotide
  Sense strand starting at position 2823 of SEQ ID NO: 1879325
guaagugauauguauagau

SEQ ID NO: 1898757 - RNA, 19 nt, Artificial Sequence
  Description of Artificial Sequence: Synthetic oligonucleotide
  Antisense strand to SEQ ID NO: 1898756
aucuauacauaucacuuac

SEQ ID NO: 1898758 - RNA, 19 nt, Artificial Sequence
  Description of Artificial Sequence: Synthetic oligonucleotide
  Sense strand starting at position 2868 of SEQ ID NO: 1879325
gauguuuccugguuaguaa

SEQ ID NO: 1898759 - RNA, 19 nt, Artificial Sequence
  Description of Artificial Sequence: Synthetic oligonucleotide
  Antisense strand to SEQ ID NO: 1898758
uuacuaaccaggaaacauc

SEQ ID NO: 1898760 - RNA, 19 nt, Artificial Sequence
  Description of Artificial Sequence: Synthetic oligonucleotide
  Sense strand starting at position 2869 of SEQ ID NO: 1879325
auguuuccugguuaguaaa

SEQ ID NO: 1898761 - RNA, 19 nt, Artificial Sequence
  Description of Artificial Sequence: Synthetic oligonucleotide
  Antisense strand to SEQ ID NO: 1898760
uuuacuaaccaggaaacau

SEQ ID NO: 1898762 - RNA, 19 nt, Artificial Sequence
  Description of Artificial Sequence: Synthetic oligonucleotide
  Sense strand starting at position 3059 of SEQ ID NO: 1879325
aaguguuugacuuacggau

SEQ ID NO: 1898763 - RNA, 19 nt, Artificial Sequence
  Description of Artificial Sequence: Synthetic oligonucleotide
  Antisense strand to SEQ ID NO: 1898762
auccguaagucaaacacuu

SEQ ID NO: 1898764 - RNA, 19 nt, Artificial Sequence
  Description of Artificial Sequence: Synthetic oligonucleotide
  Sense strand starting at position 3063 of SEQ ID NO: 1879325
guuugacuuacggauuaaa

SEQ ID NO: 1898765 - RNA, 19 nt, Artificial Sequence
  Description of Artificial Sequence: Synthetic oligonucleotide
  Antisense strand to SEQ ID NO: 1898764
uuuaauccguaagucaaac

SEQ ID NO: 1898766 - RNA, 19 nt, Artificial Sequence
  Description of Artificial Sequence: Synthetic oligonucleotide
  Sense strand starting at position 3186 of SEQ ID NO: 1879325
ucaaaccuugcuuggaauu

SEQ ID NO: 1898767 - RNA, 19 nt, Artificial Sequence
  Description of Artificial Sequence: Synthetic oligonucleotide
  Antisense strand to SEQ ID NO: 1898766
aauuccaagcaagguuuga

SEQ ID NO: 1898768 - RNA, 19 nt, Artificial Sequence
  Description of Artificial Sequence: Synthetic oligonucleotide
  Sense strand starting at position 3209 of SEQ ID NO: 1879325
ucaagauaaagugguaugu

SEQ ID NO: 1898769 - RNA, 19 nt, Artificial Sequence
  Description of Artificial Sequence: Synthetic oligonucleotide
  Antisense strand to SEQ ID NO: 1898768
acauaccacuuuaucuuga

SEQ ID NO: 1898770 - RNA, 19 nt, Artificial Sequence
  Description of Artificial Sequence: Synthetic oligonucleotide
  Sense strand starting at position 3213 of SEQ ID NO: 1879325
gauaaagugguauguagug

SEQ ID NO: 1898771 - RNA, 19 nt, Artificial Sequence
  Description of Artificial Sequence: Synthetic oligonucleotide
  Antisense strand to SEQ ID NO: 1898770
cacuacauaccacuuuauc

SEQ ID NO: 1898772 - RNA, 19 nt, Artificial Sequence
  Description of Artificial Sequence: Synthetic oligonucleotide
  Sense strand starting at position 3219 of SEQ ID NO: 1879325
gugguauguagugacaaca

SEQ ID NO: 1898773 - RNA, 19 nt, Artificial Sequence
  Description of Artificial Sequence: Synthetic oligonucleotide
  Antisense strand to SEQ ID NO: 1898772
uguugucacuacauaccac

SEQ ID NO: 1898774 - RNA, 19 nt, Artificial Sequence
  Description of Artificial Sequence: Synthetic oligonucleotide
  Sense strand starting at position 3256 of SEQ ID NO: 1879325
ggacuuaugugauuaaacu

SEQ ID NO: 1898775 - RNA, 19 nt, Artificial Sequence
  Description of Artificial Sequence: Synthetic oligonucleotide
  Antisense strand to SEQ ID NO: 1898774
aguuuaaucacauaagucc

SEQ ID NO: 1898776 - RNA, 19 nt, Artificial Sequence
  Description of Artificial Sequence: Synthetic oligonucleotide
  Sense strand starting at position 3286 of SEQ ID NO: 1879325
ugaguaaccaggcaugcuu

SEQ ID NO: 1898777 - RNA, 19 nt, Artificial Sequence
  Description of Artificial Sequence: Synthetic oligonucleotide
  Antisense strand to SEQ ID NO: 1898776
aagcaugccugguuacuca

SEQ ID NO: 1898778 - RNA, 19 nt, Artificial Sequence
  Description of Artificial Sequence: Synthetic oligonucleotide
  Sense strand starting at position 3321 of SEQ ID NO: 1879325
cuaaguaggcuguaaacuu

SEQ ID NO: 1898779 - RNA, 19 nt, Artificial Sequence
  Description of Artificial Sequence: Synthetic oligonucleotide
  Antisense strand to SEQ ID NO: 1898778
aaguuuacagccuacuuag

SEQ ID NO: 1898780 - RNA, 19 nt, Artificial Sequence
  Description of Artificial Sequence: Synthetic oligonucleotide
  Sense strand starting at position 3362 of SEQ ID NO: 1879325
cuuuaaaugaggugugauc

SEQ ID NO: 1898781 - RNA, 19 nt, Artificial Sequence
  Description of Artificial Sequence: Synthetic oligonucleotide
  Antisense strand to SEQ ID NO: 1898780
gaucacaccucauuuaaag

SEQ ID NO: 1898782 - RNA, 19 nt, Artificial Sequence
  Description of Artificial Sequence: Synthetic oligonucleotide
  Sense strand starting at position 3375 of SEQ ID NO: 1879325
gugaucucagcauaugucu

SEQ ID NO: 1898783 - RNA, 19 nt, Artificial Sequence
  Description of Artificial Sequence: Synthetic oligonucleotide
  Antisense strand to SEQ ID NO: 1898782
agacauaugcugagaucac

SEQ ID NO: 1898784 - RNA, 19 nt, Artificial Sequence
  Description of Artificial Sequence: Synthetic oligonucleotide
  Sense strand starting at position 3386 of SEQ ID NO: 1879325
auaugucuuacucgaugag

SEQ ID NO: 1898785 - RNA, 19 nt, Artificial Sequence
  Description of Artificial Sequence: Synthetic oligonucleotide
  Antisense strand to SEQ ID NO: 1898784
cucaucgaguaagacauau

SEQ ID NO: 1898786 - RNA, 19 nt, Artificial Sequence
  Description of Artificial Sequence: Synthetic oligonucleotide
  Sense strand starting at position 3459 of SEQ ID NO: 1879325
gguacagauuugugaaagg

SEQ ID NO: 1898787 - RNA, 19 nt, Artificial Sequence
  Description of Artificial Sequence: Synthetic oligonucleotide
  Antisense strand to SEQ ID NO: 1898786
ccuuucacaaaucuguacc

SEQ ID NO: 1898788 - RNA, 19 nt, Artificial Sequence
  Description of Artificial Sequence: Synthetic oligonucleotide
  Sense strand starting at position 3533 of SEQ ID NO: 1879325
agcucuuaagaguagcaca

SEQ ID NO: 1898789 - RNA, 19 nt, Artificial Sequence
  Description of Artificial Sequence: Synthetic oligonucleotide
  Antisense strand to SEQ ID NO: 1898788
ugugcuacucuuaagagcu

SEQ ID NO: 1898790 - RNA, 19 nt, Artificial Sequence
  Description of Artificial Sequence: Synthetic oligonucleotide
  Sense strand starting at position 3594 of SEQ ID NO: 1879325
ugauguagauaccuuuaaa

SEQ ID NO: 1898791 - RNA, 19 nt, Artificial Sequence
  Description of Artificial Sequence: Synthetic oligonucleotide
  Antisense strand to SEQ ID NO: 1898790
uuuaaagguaucuacauca

SEQ ID NO: 1898792 - RNA, 19 nt, Artificial Sequence
  Description of Artificial Sequence: Synthetic oligonucleotide
  Sense strand starting at position 3757 of SEQ ID NO: 1879325
gagccaaacuucgucugaa

SEQ ID NO: 1898793 - RNA, 19 nt, Artificial Sequence
  Description of Artificial Sequence: Synthetic oligonucleotide
  Antisense strand to SEQ ID NO: 1898792
uucagacgaaguuuggcuc

SEQ ID NO: 1898794 - RNA, 19 nt, Artificial Sequence
  Description of Artificial Sequence: Synthetic oligonucleotide
  Sense strand starting at position 3758 of SEQ ID NO: 1879325
agccaaacuucgucugaaa

SEQ ID NO: 1898795 - RNA, 19 nt, Artificial Sequence
  Description of Artificial Sequence: Synthetic oligonucleotide
  Antisense strand to SEQ ID NO: 1898794
uuucagacgaaguuuggcu

SEQ ID NO: 1898796 - RNA, 19 nt, Artificial Sequence
  Description of Artificial Sequence: Synthetic oligonucleotide
  Sense strand starting at position 56 of SEQ ID NO: 1879326
uugugucuuucuucugaaa

SEQ ID NO: 1898797 - RNA, 19 nt, Artificial Sequence
  Description of Artificial Sequence: Synthetic oligonucleotide
  Antisense strand to SEQ ID NO: 1898796
uuucagaagaaagacacaa

SEQ ID NO: 1898798 - RNA, 19 nt, Artificial Sequence
  Description of Artificial Sequence: Synthetic oligonucleotide
  Sense strand starting at position 351 of SEQ ID NO: 1879326
ccgccuugugucuucuuaa

SEQ ID NO: 1898799 - RNA, 19 nt, Artificial Sequence
  Description of Artificial Sequence: Synthetic oligonucleotide
  Antisense strand to SEQ ID NO: 1898798
uuaagaagacacaaggcgg

SEQ ID NO: 1898800 - RNA, 19 nt, Artificial Sequence
  Description of Artificial Sequence: Synthetic oligonucleotide
  Sense strand starting at position 354 of SEQ ID NO: 1879326
ccuugugucuucuuaagag

SEQ ID NO: 1898801 - RNA, 19 nt, Artificial Sequence
  Description of Artificial Sequence: Synthetic oligonucleotide
  Antisense strand to SEQ ID NO: 1898800
cucuuaagaagacacaagg

SEQ ID NO: 1898802 - RNA, 19 nt, Artificial Sequence
  Description of Artificial Sequence: Synthetic oligonucleotide
  Sense strand starting at position 454 of SEQ ID NO: 1879326
uuuaucacagcuggaaauu

SEQ ID NO: 1898803 - RNA, 19 nt, Artificial Sequence
  Description of Artificial Sequence: Synthetic oligonucleotide
  Antisense strand to SEQ ID NO: 1898802
aauuuccagcugugauaaa

SEQ ID NO: 1898804 - RNA, 19 nt, Artificial Sequence
  Description of Artificial Sequence: Synthetic oligonucleotide
  Sense strand starting at position 492 of SEQ ID NO: 1879326
guuaaauguaaagaggcau

SEQ ID NO: 1898805 - RNA, 19 nt, Artificial Sequence
  Description of Artificial Sequence: Synthetic oligonucleotide
  Antisense strand to SEQ ID NO: 1898804
augccucuuuacauuuaac

SEQ ID NO: 1898806 - RNA, 19 nt, Artificial Sequence
  Description of Artificial Sequence: Synthetic oligonucleotide
  Sense strand starting at position 563 of SEQ ID NO: 1879326
agaauaccucagugagagu

SEQ ID NO: 1898807 - RNA, 19 nt, Artificial Sequence
  Description of Artificial Sequence: Synthetic oligonucleotide
  Antisense strand to SEQ ID NO: 1898806
acucucacugagguauucu

SEQ ID NO: 1898808 - RNA, 19 nt, Artificial Sequence
  Description of Artificial Sequence: Synthetic oligonucleotide
  Sense strand starting at position 678 of SEQ ID NO: 1879326
ugugaacuacuacggcaau

SEQ ID NO: 1898809 - RNA, 19 nt, Artificial Sequence
  Description of Artificial Sequence: Synthetic oligonucleotide
  Antisense strand to SEQ ID NO: 1898808
auugccguaguaguucaca

SEQ ID NO: 1898810 - RNA, 19 nt, Artificial Sequence
  Description of Artificial Sequence: Synthetic oligonucleotide
  Sense strand starting at position 1099 of SEQ ID NO: 1879326
cuccuaucaccguggaacu

SEQ ID NO: 1898811 - RNA, 19 nt, Artificial Sequence
  Description of Artificial Sequence: Synthetic oligonucleotide
  Antisense strand to SEQ ID NO: 1898810
aguuccacggugauaggag

SEQ ID NO: 1898812 - RNA, 19 nt, Artificial Sequence
  Description of Artificial Sequence: Synthetic oligonucleotide
  Sense strand starting at position 1225 of SEQ ID NO: 1879326
gcucaacacccaugaagaa

SEQ ID NO: 1898813 - RNA, 19 nt, Artificial Sequence
  Description of Artificial Sequence: Synthetic oligonucleotide
  Antisense strand to SEQ ID NO: 1898812
uucuucauggguguugagc

SEQ ID NO: 1898814 - RNA, 19 nt, Artificial Sequence
  Description of Artificial Sequence: Synthetic oligonucleotide
  Sense strand starting at position 1254 of SEQ ID NO: 1879326
cuucuaacgcguuagacga

SEQ ID NO: 1898815 - RNA, 19 nt, Artificial Sequence
  Description of Artificial Sequence: Synthetic oligonucleotide
  Antisense strand to SEQ ID NO: 1898814
ucgucuaacgcguuagaag

SEQ ID NO: 1898816 - RNA, 19 nt, Artificial Sequence
  Description of Artificial Sequence: Synthetic oligonucleotide
  Sense strand starting at position 1288 of SEQ ID NO: 1879326
caaccuugcgucuaagaag

SEQ ID NO: 1898817 - RNA, 19 nt, Artificial Sequence
  Description of Artificial Sequence: Synthetic oligonucleotide
  Antisense strand to SEQ ID NO: 1898816
cuucuuagacgcaagguug

SEQ ID NO: 1898818 - RNA, 19 nt, Artificial Sequence
  Description of Artificial Sequence: Synthetic oligonucleotide
  Sense strand starting at position 1295 of SEQ ID NO: 1879326
gcgucuaagaagugaacau

SEQ ID NO: 1898819 - RNA, 19 nt, Artificial Sequence
  Description of Artificial Sequence: Synthetic oligonucleotide
  Antisense strand to SEQ ID NO: 1898818
auguucacuucuuagacgc

SEQ ID NO: 1898820 - RNA, 19 nt, Artificial Sequence
  Description of Artificial Sequence: Synthetic oligonucleotide
  Sense strand starting at position 1339 of SEQ ID NO: 1879326
aagggccugguuugagaau

SEQ ID NO: 1898821 - RNA, 19 nt, Artificial Sequence
  Description of Artificial Sequence: Synthetic oligonucleotide
  Antisense strand to SEQ ID NO: 1898820
auucucaaaccaggcccuu

SEQ ID NO: 1898822 - RNA, 19 nt, Artificial Sequence
  Description of Artificial Sequence: Synthetic oligonucleotide
  Sense strand starting at position 1374 of SEQ ID NO: 1879326
augugaagcgcauacugaa

SEQ ID NO: 1898823 - RNA, 19 nt, Artificial Sequence
  Description of Artificial Sequence: Synthetic oligonucleotide
  Antisense strand to SEQ ID NO: 1898822
uucaguaugcgcuucacau

SEQ ID NO: 1898824 - RNA, 19 nt, Artificial Sequence
  Description of Artificial Sequence: Synthetic oligonucleotide
  Sense strand starting at position 1419 of SEQ ID NO: 1879326
gacgauggaucugaaagaa

SEQ ID NO: 1898825 - RNA, 19 nt, Artificial Sequence
  Description of Artificial Sequence: Synthetic oligonucleotide
  Antisense strand to SEQ ID NO: 1898824
uucuuucagauccaucguc

SEQ ID NO: 1898826 - RNA, 19 nt, Artificial Sequence
  Description of Artificial Sequence: Synthetic oligonucleotide
  Sense strand starting at position 1432 of SEQ ID NO: 1879326
aaagaagccgccugauaua

SEQ ID NO: 1898827 - RNA, 19 nt, Artificial Sequence
  Description of Artificial Sequence: Synthetic oligonucleotide
  Antisense strand to SEQ ID NO: 1898826
uauaucaggcggcuucuuu

SEQ ID NO: 1898828 - RNA, 19 nt, Artificial Sequence
  Description of Artificial Sequence: Synthetic oligonucleotide
  Sense strand starting at position 2151 of SEQ ID NO: 1879326
agccuugaggcguaacuuu

SEQ ID NO: 1898829 - RNA, 19 nt, Artificial Sequence
  Description of Artificial Sequence: Synthetic oligonucleotide
  Antisense strand to SEQ ID NO: 1898828
aaaguuacgccucaaggcu

SEQ ID NO: 1898830 - RNA, 19 nt, Artificial Sequence
  Description of Artificial Sequence: Synthetic oligonucleotide
  Sense strand starting at position 2162 of SEQ ID NO: 1879326
guaacuuucuguuuccaua

SEQ ID NO: 1898831 - RNA, 19 nt, Artificial Sequence
  Description of Artificial Sequence: Synthetic oligonucleotide
  Antisense strand to SEQ ID NO: 1898830
uauggaaacagaaaguuac

SEQ ID NO: 1898832 - RNA, 19 nt, Artificial Sequence
  Description of Artificial Sequence: Synthetic oligonucleotide
  Sense strand starting at position 2206 of SEQ ID NO: 1879326
guuuguauccagggaccaa

SEQ ID NO: 1898833 - RNA, 19 nt, Artificial Sequence
  Description of Artificial Sequence: Synthetic oligonucleotide
  Antisense strand to SEQ ID NO: 1898832
uuggucccuggauacaaac

SEQ ID NO: 1898834 - RNA, 19 nt, Artificial Sequence
  Description of Artificial Sequence: Synthetic oligonucleotide
  Sense strand starting at position 2241 of SEQ ID NO: 1879326
gcggguucuaaagaacuuu

SEQ ID NO: 1898835 - RNA, 19 nt, Artificial Sequence
  Description of Artificial Sequence: Synthetic oligonucleotide
  Antisense strand to SEQ ID NO: 1898834
aaaguucuuuagaacccgc

SEQ ID NO: 1898836 - RNA, 19 nt, Artificial Sequence
  Description of Artificial Sequence: Synthetic oligonucleotide
  Sense strand starting at position 2264 of SEQ ID NO: 1879326
aauccaaggucgucuaaga

SEQ ID NO: 1898837 - RNA, 19 nt, Artificial Sequence
  Description of Artificial Sequence: Synthetic oligonucleotide
  Antisense strand to SEQ ID NO: 1898836
ucuuagacgaccuuggauu

SEQ ID NO: 1898838 - RNA, 19 nt, Artificial Sequence
  Description of Artificial Sequence: Synthetic oligonucleotide
  Sense strand starting at position 2372 of SEQ ID NO: 1879326
cgauguuugcccgucaguc

SEQ ID NO: 1898839 - RNA, 19 nt, Artificial Sequence
  Description of Artificial Sequence: Synthetic oligonucleotide
  Antisense strand to SEQ ID NO: 1898838
gacugacgggcaaacaucg

SEQ ID NO: 1898840 - RNA, 19 nt, Artificial Sequence
  Description of Artificial Sequence: Synthetic oligonucleotide
  Sense strand starting at position 2471 of SEQ ID NO: 1879326
ggaccuuugcccggaggga

SEQ ID NO: 1898841 - RNA, 19 nt, Artificial Sequence
  Description of Artificial Sequence: Synthetic oligonucleotide
  Antisense strand to SEQ ID NO: 1898840
ucccuccgggcaaaggucc

SEQ ID NO: 1898842 - RNA, 19 nt, Artificial Sequence
  Description of Artificial Sequence: Synthetic oligonucleotide
  Sense strand starting at position 2767 of SEQ ID NO: 1879326
agaucucgccuccgaggaa

SEQ ID NO: 1898843 - RNA, 19 nt, Artificial Sequence
  Description of Artificial Sequence: Synthetic oligonucleotide
  Antisense strand to SEQ ID NO: 1898842
uuccucggaggcgagaucu

SEQ ID NO: 1898844 - RNA, 19 nt, Artificial Sequence
  Description of Artificial Sequence: Synthetic oligonucleotide
  Sense strand starting at position 3302 of SEQ ID NO: 1879326
uugugaguuucuucucuga

SEQ ID NO: 1898845 - RNA, 19 nt, Artificial Sequence
  Description of Artificial Sequence: Synthetic oligonucleotide
  Antisense strand to SEQ ID NO: 1898844
ucagagaagaaacucacaa

SEQ ID NO: 1898846 - RNA, 19 nt, Artificial Sequence
  Description of Artificial Sequence: Synthetic oligonucleotide
  Sense strand starting at position 3304 of SEQ ID NO: 1879326
gugaguuucuucucugaca

SEQ ID NO: 1898847 - RNA, 19 nt, Artificial Sequence
  Description of Artificial Sequence: Synthetic oligonucleotide
  Antisense strand to SEQ ID NO: 1898846
ugucagagaagaaacucac

SEQ ID NO: 1898848 - RNA, 19 nt, Artificial Sequence
  Description of Artificial Sequence: Synthetic oligonucleotide
  Sense strand starting at position 3305 of SEQ ID NO: 1879326
ugaguuucuucucugacag

SEQ ID NO: 1898849 - RNA, 19 nt, Artificial Sequence
  Description of Artificial Sequence: Synthetic oligonucleotide
  Antisense strand to SEQ ID NO: 1898848
cugucagagaagaaacuca

SEQ ID NO: 1898850 - RNA, 19 nt, Artificial Sequence
  Description of Artificial Sequence: Synthetic oligonucleotide
  Sense strand starting at position 3306 of SEQ ID NO: 1879326
gaguuucuucucugacaga

SEQ ID NO: 1898851 - RNA, 19 nt, Artificial Sequence
  Description of Artificial Sequence: Synthetic oligonucleotide
  Antisense strand to SEQ ID NO: 1898850
ucugucagagaagaaacuc

SEQ ID NO: 1898852 - RNA, 19 nt, Artificial Sequence
  Description of Artificial Sequence: Synthetic oligonucleotide
  Sense strand starting at position 3321 of SEQ ID NO: 1879326
cagaaauggcgucauuguc

SEQ ID NO: 1898853 - RNA, 19 nt, Artificial Sequence
  Description of Artificial Sequence: Synthetic oligonucleotide
  Antisense strand to SEQ ID NO: 1898852
gacaaugacgccauuucug

SEQ ID NO: 1898854 - RNA, 19 nt, Artificial Sequence
  Description of Artificial Sequence: Synthetic oligonucleotide
  Sense strand starting at position 3333 of SEQ ID NO: 1879326
cauugucguagacgggaaa

SEQ ID NO: 1898855 - RNA, 19 nt, Artificial Sequence
  Description of Artificial Sequence: Synthetic oligonucleotide
  Antisense strand to SEQ ID NO: 1898854
uuucccgucuacgacaaug

SEQ ID NO: 1898856 - RNA, 19 nt, Artificial Sequence
  Description of Artificial Sequence: Synthetic oligonucleotide
  Sense strand starting at position 3622 of SEQ ID NO: 1879326
gucccagagucaucaugaa

SEQ ID NO: 1898857 - RNA, 19 nt, Artificial Sequence
  Description of Artificial Sequence: Synthetic oligonucleotide
  Antisense strand to SEQ ID NO: 1898856
uucaugaugacucugggac

SEQ ID NO: 1898858 - RNA, 19 nt, Artificial Sequence
  Description of Artificial Sequence: Synthetic oligonucleotide
  Sense strand starting at position 3629 of SEQ ID NO: 1879326
agucaucaugaagguaaga

SEQ ID NO: 1898859 - RNA, 19 nt, Artificial Sequence
  Description of Artificial Sequence: Synthetic oligonucleotide
  Antisense strand to SEQ ID NO: 1898858
ucuuaccuucaugaugacu

SEQ ID NO: 1898860 - RNA, 19 nt, Artificial Sequence
  Description of Artificial Sequence: Synthetic oligonucleotide
  Sense strand starting at position 3813 of SEQ ID NO: 1879326
uggaguuggaggcaguuau

SEQ ID NO: 1898861 - RNA, 19 nt, Artificial Sequence
  Description of Artificial Sequence: Synthetic oligonucleotide
  Antisense strand to SEQ ID NO: 1898860
auaacugccuccaacucca

SEQ ID NO: 1898862 - RNA, 19 nt, Artificial Sequence
  Description of Artificial Sequence: Synthetic oligonucleotide
  Sense strand starting at position 3817 of SEQ ID NO: 1879326
guuggaggcaguuauagga

SEQ ID NO: 1898863 - RNA, 19 nt, Artificial Sequence
  Description of Artificial Sequence: Synthetic oligonucleotide
  Antisense strand to SEQ ID NO: 1898862
uccuauaacugccuccaac

SEQ ID NO: 1898864 - RNA, 19 nt, Artificial Sequence
  Description of Artificial Sequence: Synthetic oligonucleotide
  Sense strand starting at position 3824 of SEQ ID NO: 1879326
gcaguuauaggaugucuca

SEQ ID NO: 1898865 - RNA, 19 nt, Artificial Sequence
  Description of Artificial Sequence: Synthetic oligonucleotide
  Antisense strand to SEQ ID NO: 1898864
ugagacauccuauaacugc

SEQ ID NO: 1898866 - RNA, 19 nt, Artificial Sequence
  Description of Artificial Sequence: Synthetic oligonucleotide
  Sense strand starting at position 3827 of SEQ ID NO: 1879326
guuauaggaugucucaacu

SEQ ID NO: 1898867 - RNA, 19 nt, Artificial Sequence
  Description of Artificial Sequence: Synthetic oligonucleotide
  Antisense strand to SEQ ID NO: 1898866
aguugagacauccuauaac

SEQ ID NO: 1898868 - RNA, 19 nt, Artificial Sequence
  Description of Artificial Sequence: Synthetic oligonucleotide
  Sense strand starting at position 3833 of SEQ ID NO: 1879326
ggaugucucaacugaagau

SEQ ID NO: 1898869 - RNA, 19 nt, Artificial Sequence
  Description of Artificial Sequence: Synthetic oligonucleotide
  Antisense strand to SEQ ID NO: 1898868
aucuucaguugagacaucc

SEQ ID NO: 1898870 - RNA, 19 nt, Artificial Sequence
  Description of Artificial Sequence: Synthetic oligonucleotide
  Sense strand starting at position 3893 of SEQ ID NO: 1879326
ggaauaacggcaugaauua

SEQ ID NO: 1898871 - RNA, 19 nt, Artificial Sequence
  Description of Artificial Sequence: Synthetic oligonucleotide
  Antisense strand to SEQ ID NO: 1898870
uaauucaugccguuauucc

SEQ ID NO: 1898872 - RNA, 19 nt, Artificial Sequence
  Description of Artificial Sequence: Synthetic oligonucleotide
  Sense strand starting at position 3944 of SEQ ID NO: 1879326
cagguaaucugacccuaga

SEQ ID NO: 1898873 - RNA, 19 nt, Artificial Sequence
  Description of Artificial Sequence: Synthetic oligonucleotide
  Antisense strand to SEQ ID NO: 1898872
ucuagggucagauuaccug

SEQ ID NO: 1898874 - RNA, 19 nt, Artificial Sequence
  Description of Artificial Sequence: Synthetic oligonucleotide
  Sense strand starting at position 3969 of SEQ ID NO: 1879326
acuguauugugguucuauc

SEQ ID NO: 1898875 - RNA, 19 nt, Artificial Sequence
  Description of Artificial Sequence: Synthetic oligonucleotide
  Antisense strand to SEQ ID NO: 1898874
gauagaaccacaauacagu

SEQ ID NO: 1898876 - RNA, 19 nt, Artificial Sequence
  Description of Artificial Sequence: Synthetic oligonucleotide
  Sense strand starting at position 430 of SEQ ID NO: 1879327
auaguuguauuccugaaau

SEQ ID NO: 1898877 - RNA, 19 nt, Artificial Sequence
  Description of Artificial Sequence: Synthetic oligonucleotide
  Antisense strand to SEQ ID NO: 1898876
auuucaggaauacaacuau

SEQ ID NO: 1898878 - RNA, 19 nt, Artificial Sequence
  Description of Artificial Sequence: Synthetic oligonucleotide
  Sense strand starting at position 432 of SEQ ID NO: 1879327
aguuguauuccugaaauag

SEQ ID NO: 1898879 - RNA, 19 nt, Artificial Sequence
  Description of Artificial Sequence: Synthetic oligonucleotide
  Antisense strand to SEQ ID NO: 1898878
cuauuucaggaauacaacu

SEQ ID NO: 1898880 - RNA, 19 nt, Artificial Sequence
  Description of Artificial Sequence: Synthetic oligonucleotide
  Sense strand starting at position 1289 of SEQ ID NO: 1879327
cugguuaaauaaucgacua

SEQ ID NO: 1898881 - RNA, 19 nt, Artificial Sequence
  Description of Artificial Sequence: Synthetic oligonucleotide
  Antisense strand to SEQ ID NO: 1898880
uagucgauuauuuaaccag

SEQ ID NO: 1898882 - RNA, 19 nt, Artificial Sequence
  Description of Artificial Sequence: Synthetic oligonucleotide
  Sense strand starting at position 1324 of SEQ ID NO: 1879327
cuaugcaaccaguagaaau

SEQ ID NO: 1898883 - RNA, 19 nt, Artificial Sequence
  Description of Artificial Sequence: Synthetic oligonucleotide
  Antisense strand to SEQ ID NO: 1898882
auuucuacugguugcauag

SEQ ID NO: 1898884 - RNA, 19 nt, Artificial Sequence
  Description of Artificial Sequence: Synthetic oligonucleotide
  Sense strand starting at position 1481 of SEQ ID NO: 1879327
aaauauuaacggugauuag

SEQ ID NO: 1898885 - RNA, 19 nt, Artificial Sequence
  Description of Artificial Sequence: Synthetic oligonucleotide
  Antisense strand to SEQ ID NO: 1898884
cuaaucaccguuaauauuu

SEQ ID NO: 1898886 - RNA, 19 nt, Artificial Sequence
  Description of Artificial Sequence: Synthetic oligonucleotide
  Sense strand starting at position 1805 of SEQ ID NO: 1879327
ccuuucuuaguuuagguaa

SEQ ID NO: 1898887 - RNA, 19 nt, Artificial Sequence
  Description of Artificial Sequence: Synthetic oligonucleotide
  Antisense strand to SEQ ID NO: 1898886
uuaccuaaacuaagaaagg

SEQ ID NO: 1898888 - RNA, 19 nt, Artificial Sequence
  Description of Artificial Sequence: Synthetic oligonucleotide
  Sense strand starting at position 1808 of SEQ ID NO: 1879327
uucuuaguuuagguaaauc

SEQ ID NO: 1898889 - RNA, 19 nt, Artificial Sequence
  Description of Artificial Sequence: Synthetic oligonucleotide
  Antisense strand to SEQ ID NO: 1898888
gauuuaccuaaacuaagaa

SEQ ID NO: 1898890 - RNA, 19 nt, Artificial Sequence
  Description of Artificial Sequence: Synthetic oligonucleotide
  Sense strand starting at position 1833 of SEQ ID NO: 1879327
gcaaaccauguuuagaagu

SEQ ID NO: 1898891 - RNA, 19 nt, Artificial Sequence
  Description of Artificial Sequence: Synthetic oligonucleotide
  Antisense strand to SEQ ID NO: 1898890
acuucuaaacaugguuugc

SEQ ID NO: 1898892 - RNA, 19 nt, Artificial Sequence
  Description of Artificial Sequence: Synthetic oligonucleotide
  Sense strand starting at position 1880 of SEQ ID NO: 1879327
cugaauuugucccuuugcu

SEQ ID NO: 1898893 - RNA, 19 nt, Artificial Sequence
  Description of Artificial Sequence: Synthetic oligonucleotide
  Antisense strand to SEQ ID NO: 1898892
agcaaagggacaaauucag

SEQ ID NO: 1898894 - RNA, 19 nt, Artificial Sequence
  Description of Artificial Sequence: Synthetic oligonucleotide
  Sense strand starting at position 1924 of SEQ ID NO: 1879327
gaauguagugagugaguca

SEQ ID NO: 1898895 - RNA, 19 nt, Artificial Sequence
  Description of Artificial Sequence: Synthetic oligonucleotide
  Antisense strand to SEQ ID NO: 1898894
ugacucacucacuacauuc

SEQ ID NO: 1898896 - RNA, 19 nt, Artificial Sequence
  Description of Artificial Sequence: Synthetic oligonucleotide
  Sense strand starting at position 1925 of SEQ ID NO: 1879327
aauguagugagugagucau

SEQ ID NO: 1898897 - RNA, 19 nt, Artificial Sequence
  Description of Artificial Sequence: Synthetic oligonucleotide
  Antisense strand to SEQ ID NO: 1898896
augacucacucacuacauu

SEQ ID NO: 1898898 - RNA, 19 nt, Artificial Sequence
  Description of Artificial Sequence: Synthetic oligonucleotide
  Sense strand starting at position 1931 of SEQ ID NO: 1879327
gugagugagucauccauca

SEQ ID NO: 1898899 - RNA, 19 nt, Artificial Sequence
  Description of Artificial Sequence: Synthetic oligonucleotide
  Antisense strand to SEQ ID NO: 1898898
ugauggaugacucacucac

SEQ ID NO: 1898900 - RNA, 19 nt, Artificial Sequence
  Description of Artificial Sequence: Synthetic oligonucleotide
  Sense strand starting at position 2260 of SEQ ID NO: 1879327
aaauuaagcugagugaaug

SEQ ID NO: 1898901 - RNA, 19 nt, Artificial Sequence
  Description of Artificial Sequence: Synthetic oligonucleotide
  Antisense strand to SEQ ID NO: 1898900
cauucacucagcuuaauuu

SEQ ID NO: 1898902 - RNA, 19 nt, Artificial Sequence
  Description of Artificial Sequence: Synthetic oligonucleotide
  Sense strand starting at position 2261 of SEQ ID NO: 1879327
aauuaagcugagugaauga

SEQ ID NO: 1898903 - RNA, 19 nt, Artificial Sequence
  Description of Artificial Sequence: Synthetic oligonucleotide
  Antisense strand to SEQ ID NO: 1898902
ucauucacucagcuuaauu

SEQ ID NO: 1898904 - RNA, 19 nt, Artificial Sequence
  Description of Artificial Sequence: Synthetic oligonucleotide
  Sense strand starting at position 2271 of SEQ ID NO: 1879327
agugaaugauuccuccaua

SEQ ID NO: 1898905 - RNA, 19 nt, Artificial Sequence
  Description of Artificial Sequence: Synthetic oligonucleotide
  Antisense strand to SEQ ID NO: 1898904
uauggaggaaucauucacu

SEQ ID NO: 1898906 - RNA, 19 nt, Artificial Sequence
  Description of Artificial Sequence: Synthetic oligonucleotide
  Sense strand starting at position 2272 of SEQ ID NO: 1879327
gugaaugauuccuccauaa

SEQ ID NO: 1898907 - RNA, 19 nt, Artificial Sequence
  Description of Artificial Sequence: Synthetic oligonucleotide
  Antisense strand to SEQ ID NO: 1898906
uuauggaggaaucauucac

SEQ ID NO: 1898908 - RNA, 19 nt, Artificial Sequence
  Description of Artificial Sequence: Synthetic oligonucleotide
  Sense strand starting at position 2318 of SEQ ID NO: 1879327
ggagguauuugugugcugu

SEQ ID NO: 1898909 - RNA, 19 nt, Artificial Sequence
  Description of Artificial Sequence: Synthetic oligonucleotide
  Antisense strand to SEQ ID NO: 1898908
acagcacacaaauaccucc

SEQ ID NO: 1898910 - RNA, 19 nt, Artificial Sequence
  Description of Artificial Sequence: Synthetic oligonucleotide
  Sense strand starting at position 2448 of SEQ ID NO: 1879327
ggucaucugccuuaauaaa

SEQ ID NO: 1898911 - RNA, 19 nt, Artificial Sequence
  Description of Artificial Sequence: Synthetic oligonucleotide
  Antisense strand to SEQ ID NO: 1898910
uuuauuaaggcagaugacc

SEQ ID NO: 1898912 - RNA, 19 nt, Artificial Sequence
  Description of Artificial Sequence: Synthetic oligonucleotide
  Sense strand starting at position 2488 of SEQ ID NO: 1879327
gauagauccugauucuguc

SEQ ID NO: 1898913 - RNA, 19 nt, Artificial Sequence
  Description of Artificial Sequence: Synthetic oligonucleotide
  Antisense strand to SEQ ID NO: 1898912
gacagaaucaggaucuauc

SEQ ID NO: 1898914 - RNA, 19 nt, Artificial Sequence
  Description of Artificial Sequence: Synthetic oligonucleotide
  Sense strand starting at position 2578 of SEQ ID NO: 1879327
gcagguugagcauaacaga

SEQ ID NO: 1898915 - RNA, 19 nt, Artificial Sequence
  Description of Artificial Sequence: Synthetic oligonucleotide
  Antisense strand to SEQ ID NO: 1898914
ucuguuaugcucaaccugc

SEQ ID NO: 1898916 - RNA, 19 nt, Artificial Sequence
  Description of Artificial Sequence: Synthetic oligonucleotide
  Sense strand starting at position 2830 of SEQ ID NO: 1879327
auuacauauguguaacuca

SEQ ID NO: 1898917 - RNA, 19 nt, Artificial Sequence
  Description of Artificial Sequence: Synthetic oligonucleotide
  Antisense strand to SEQ ID NO: 1898916
ugaguuacacauauguaau

SEQ ID NO: 1898918 - RNA, 19 nt, Artificial Sequence
  Description of Artificial Sequence: Synthetic oligonucleotide
  Sense strand starting at position 2833 of SEQ ID NO: 1879327
acauauguguaacucauaa

SEQ ID NO: 1898919 - RNA, 19 nt, Artificial Sequence
  Description of Artificial Sequence: Synthetic oligonucleotide
  Antisense strand to SEQ ID NO: 1898918
uuaugaguuacacauaugu

SEQ ID NO: 1898920 - RNA, 19 nt, Artificial Sequence
  Description of Artificial Sequence: Synthetic oligonucleotide
  Sense strand starting at position 2882 of SEQ ID NO: 1879327
ucgguagucagagaauaca

SEQ ID NO: 1898921 - RNA, 19 nt, Artificial Sequence
  Description of Artificial Sequence: Synthetic oligonucleotide
  Antisense strand to SEQ ID NO: 1898920
uguauucucugacuaccga

SEQ ID NO: 1898922 - RNA, 19 nt, Artificial Sequence
  Description of Artificial Sequence: Synthetic oligonucleotide
  Sense strand starting at position 2982 of SEQ ID NO: 1879327
agacacuguuacucucaua

SEQ ID NO: 1898923 - RNA, 19 nt, Artificial Sequence
  Description of Artificial Sequence: Synthetic oligonucleotide
  Antisense strand to SEQ ID NO: 1898922
uaugagaguaacagugucu

SEQ ID NO: 1898924 - RNA, 19 nt, Artificial Sequence
  Description of Artificial Sequence: Synthetic oligonucleotide
  Sense strand starting at position 2994 of SEQ ID NO: 1879327
ucucauauccuguagguaa

SEQ ID NO: 1898925 - RNA, 19 nt, Artificial Sequence
  Description of Artificial Sequence: Synthetic oligonucleotide
  Antisense strand to SEQ ID NO: 1898924
uuaccuacaggauaugaga

SEQ ID NO: 1898926 - RNA, 19 nt, Artificial Sequence
  Description of Artificial Sequence: Synthetic oligonucleotide
  Sense strand starting at position 2996 of SEQ ID NO: 1879327
ucauauccuguagguaaga

SEQ ID NO: 1898927 - RNA, 19 nt, Artificial Sequence
  Description of Artificial Sequence: Synthetic oligonucleotide
  Antisense strand to SEQ ID NO: 1898926
ucuuaccuacaggauauga

SEQ ID NO: 1898928 - RNA, 19 nt, Artificial Sequence
  Description of Artificial Sequence: Synthetic oligonucleotide
  Sense strand starting at position 2997 of SEQ ID NO: 1879327
cauauccuguagguaagaa

SEQ ID NO: 1898929 - RNA, 19 nt, Artificial Sequence
  Description of Artificial Sequence: Synthetic oligonucleotide
  Antisense strand to SEQ ID NO: 1898928
uucuuaccuacaggauaug

SEQ ID NO: 1898930 - RNA, 19 nt, Artificial Sequence
  Description of Artificial Sequence: Synthetic oligonucleotide
  Sense strand starting at position 3184 of SEQ ID NO: 1879327
auuuaaaugucugacagag

SEQ ID NO: 1898931 - RNA, 19 nt, Artificial Sequence
  Description of Artificial Sequence: Synthetic oligonucleotide
  Antisense strand to SEQ ID NO: 1898930
cucugucagacauuuaaau

SEQ ID NO: 1898932 - RNA, 19 nt, Artificial Sequence
  Description of Artificial Sequence: Synthetic oligonucleotide
  Sense strand starting at position 3201 of SEQ ID NO: 1879327
aggaaugguuaucuauggu

SEQ ID NO: 1898933 - RNA, 19 nt, Artificial Sequence
  Description of Artificial Sequence: Synthetic oligonucleotide
  Antisense strand to SEQ ID NO: 1898932
accauagauaaccauuccu

SEQ ID NO: 1898934 - RNA, 19 nt, Artificial Sequence
  Description of Artificial Sequence: Synthetic oligonucleotide
  Sense strand starting at position 3204 of SEQ ID NO: 1879327
aaugguuaucuaugguaca

SEQ ID NO: 1898935 - RNA, 19 nt, Artificial Sequence
  Description of Artificial Sequence: Synthetic oligonucleotide
  Antisense strand to SEQ ID NO: 1898934
uguaccauagauaaccauu

SEQ ID NO: 1898936 - RNA, 19 nt, Artificial Sequence
  Description of Artificial Sequence: Synthetic oligonucleotide
  Sense strand starting at position 3209 of SEQ ID NO: 1879327
uuaucuaugguacaucuau

SEQ ID NO: 1898937 - RNA, 19 nt, Artificial Sequence
  Description of Artificial Sequence: Synthetic oligonucleotide
  Antisense strand to SEQ ID NO: 1898936
auagauguaccauagauaa

SEQ ID NO: 1898938 - RNA, 19 nt, Artificial Sequence
  Description of Artificial Sequence: Synthetic oligonucleotide
  Sense strand starting at position 3375 of SEQ ID NO: 1879327
ugggcucaugucuauaauc

SEQ ID NO: 1898939 - RNA, 19 nt, Artificial Sequence
  Description of Artificial Sequence: Synthetic oligonucleotide
  Antisense strand to SEQ ID NO: 1898938
gauuauagacaugagccca

SEQ ID NO: 1898940 - RNA, 19 nt, Artificial Sequence
  Description of Artificial Sequence: Synthetic oligonucleotide
  Sense strand starting at position 3780 of SEQ ID NO: 1879327
ugaugcuuaggaggaguua

SEQ ID NO: 1898941 - RNA, 19 nt, Artificial Sequence
  Description of Artificial Sequence: Synthetic oligonucleotide
  Antisense strand to SEQ ID NO: 1898940
uaacuccuccuaagcauca

SEQ ID NO: 1898942 - RNA, 19 nt, Artificial Sequence
  Description of Artificial Sequence: Synthetic oligonucleotide
  Sense strand starting at position 3781 of SEQ ID NO: 1879327
gaugcuuaggaggaguuau

SEQ ID NO: 1898943 - RNA, 19 nt, Artificial Sequence
  Description of Artificial Sequence: Synthetic oligonucleotide
  Antisense strand to SEQ ID NO: 1898942
auaacuccuccuaagcauc

SEQ ID NO: 1898944 - RNA, 19 nt, Artificial Sequence
  Description of Artificial Sequence: Synthetic oligonucleotide
  Sense strand starting at position 3792 of SEQ ID NO: 1879327
ggaguuauaccauggacac

SEQ ID NO: 1898945 - RNA, 19 nt, Artificial Sequence
  Description of Artificial Sequence: Synthetic oligonucleotide
  Antisense strand to SEQ ID NO: 1898944
guguccaugguauaacucc

SEQ ID NO: 1898946 - RNA, 19 nt, Artificial Sequence
  Description of Artificial Sequence: Synthetic oligonucleotide
  Sense strand starting at position 3849 of SEQ ID NO: 1879327
agagcagauucagugaagu

SEQ ID NO: 1898947 - RNA, 19 nt, Artificial Sequence
  Description of Artificial Sequence: Synthetic oligonucleotide
  Antisense strand to SEQ ID NO: 1898946
acuucacugaaucugcucu

SEQ ID NO: 1898948 - RNA, 19 nt, Artificial Sequence
  Description of Artificial Sequence: Synthetic oligonucleotide
  Sense strand starting at position 3884 of SEQ ID NO: 1879327
guuggacauuaacuuaaau

SEQ ID NO: 1898949 - RNA, 19 nt, Artificial Sequence
  Description of Artificial Sequence: Synthetic oligonucleotide
  Antisense strand to SEQ ID NO: 1898948
auuuaaguuaauguccaac

SEQ ID NO: 1898950 - RNA, 19 nt, Artificial Sequence
  Description of Artificial Sequence: Synthetic oligonucleotide
  Sense strand starting at position 3934 of SEQ ID NO: 1879327
aaaugucugcaaggauaca

SEQ ID NO: 1898951 - RNA, 19 nt, Artificial Sequence
  Description of Artificial Sequence: Synthetic oligonucleotide
  Antisense strand to SEQ ID NO: 1898950
uguauccuugcagacauuu

SEQ ID NO: 1898952 - RNA, 19 nt, Artificial Sequence
  Description of Artificial Sequence: Synthetic oligonucleotide
  Sense strand starting at position 3958 of SEQ ID NO: 1879327
uacuguugugaccacugau

SEQ ID NO: 1898953 - RNA, 19 nt, Artificial Sequence
  Description of Artificial Sequence: Synthetic oligonucleotide
  Antisense strand to SEQ ID NO: 1898952
aucaguggucacaacagua

SEQ ID NO: 1898954 - RNA, 19 nt, Artificial Sequence
  Description of Artificial Sequence: Synthetic oligonucleotide
  Sense strand starting at position 3961 of SEQ ID NO: 1879327
uguugugaccacugaugau

SEQ ID NO: 1898955 - RNA, 19 nt, Artificial Sequence
  Description of Artificial Sequence: Synthetic oligonucleotide
  Antisense strand to SEQ ID NO: 1898954
aucaucaguggucacaaca

SEQ ID NO: 1898956 - RNA, 19 nt, Artificial Sequence
  Description of Artificial Sequence: Synthetic oligonucleotide
  Sense strand starting at position 33 of SEQ ID NO: 1879328
ggguaaacuuuguugauug

SEQ ID NO: 1898957 - RNA, 19 nt, Artificial Sequence
  Description of Artificial Sequence: Synthetic oligonucleotide
  Antisense strand to SEQ ID NO: 1898956
caaucaacaaaguuuaccc

SEQ ID NO: 1898958 - RNA, 19 nt, Artificial Sequence
  Description of Artificial Sequence: Synthetic oligonucleotide
  Sense strand starting at position 41 of SEQ ID NO: 1879328
uuuguugauuguucuccau

SEQ ID NO: 1898959 - RNA, 19 nt, Artificial Sequence
  Description of Artificial Sequence: Synthetic oligonucleotide
  Antisense strand to SEQ ID NO: 1898958
auggagaacaaucaacaaa

SEQ ID NO: 1898960 - RNA, 19 nt, Artificial Sequence
  Description of Artificial Sequence: Synthetic oligonucleotide
  Sense strand starting at position 45 of SEQ ID NO: 1879328
uugauuguucuccaugugu

SEQ ID NO: 1898961 - RNA, 19 nt, Artificial Sequence
  Description of Artificial Sequence: Synthetic oligonucleotide
  Antisense strand to SEQ ID NO: 1898960
acacauggagaacaaucaa

SEQ ID NO: 1898962 - RNA, 19 nt, Artificial Sequence
  Description of Artificial Sequence: Synthetic oligonucleotide
  Sense strand starting at position 267 of SEQ ID NO: 1879328
ugcaucucccugugacuau

SEQ ID NO: 1898963 - RNA, 19 nt, Artificial Sequence
  Description of Artificial Sequence: Synthetic oligonucleotide
  Antisense strand to SEQ ID NO: 1898962
auagucacagggagaugca

SEQ ID NO: 1898964 - RNA, 19 nt, Artificial Sequence
  Description of Artificial Sequence: Synthetic oligonucleotide
  Sense strand starting at position 521 of SEQ ID NO: 1879328
uagagauggcaugguagaa

SEQ ID NO: 1898965 - RNA, 19 nt, Artificial Sequence
  Description of Artificial Sequence: Synthetic oligonucleotide
  Antisense strand to SEQ ID NO: 1898964
uucuaccaugccaucucua

SEQ ID NO: 1898966 - RNA, 19 nt, Artificial Sequence
  Description of Artificial Sequence: Synthetic oligonucleotide
  Sense strand starting at position 1400 of SEQ ID NO: 1879328
uugccuguguaauuaaaca

SEQ ID NO: 1898967 - RNA, 19 nt, Artificial Sequence
  Description of Artificial Sequence: Synthetic oligonucleotide
  Antisense strand to SEQ ID NO: 1898966
uguuuaauuacacaggcaa

SEQ ID NO: 1898968 - RNA, 19 nt, Artificial Sequence
  Description of Artificial Sequence: Synthetic oligonucleotide
  Sense strand starting at position 1453 of SEQ ID NO: 1879328
uccugacuggcagagugau

SEQ ID NO: 1898969 - RNA, 19 nt, Artificial Sequence
  Description of Artificial Sequence: Synthetic oligonucleotide
  Antisense strand to SEQ ID NO: 1898968
aucacucugccagucagga

SEQ ID NO: 1898970 - RNA, 19 nt, Artificial Sequence
  Description of Artificial Sequence: Synthetic oligonucleotide
  Sense strand starting at position 1461 of SEQ ID NO: 1879328
ggcagagugauuugugcaa

SEQ ID NO: 1898971 - RNA, 19 nt, Artificial Sequence
  Description of Artificial Sequence: Synthetic oligonucleotide
  Antisense strand to SEQ ID NO: 1898970
uugcacaaaucacucugcc

SEQ ID NO: 1898972 - RNA, 19 nt, Artificial Sequence
  Description of Artificial Sequence: Synthetic oligonucleotide
  Sense strand starting at position 1477 of SEQ ID NO: 1879328
caagaucacauggguggua

SEQ ID NO: 1898973 - RNA, 19 nt, Artificial Sequence
  Description of Artificial Sequence: Synthetic oligonucleotide
  Antisense strand to SEQ ID NO: 1898972
uaccacccaugugaucuug

SEQ ID NO: 1898974 - RNA, 19 nt, Artificial Sequence
  Description of Artificial Sequence: Synthetic oligonucleotide
  Sense strand starting at position 1780 of SEQ ID NO: 1879328
guuuauuugugugcaagaa

SEQ ID NO: 1898975 - RNA, 19 nt, Artificial Sequence
  Description of Artificial Sequence: Synthetic oligonucleotide
  Antisense strand to SEQ ID NO: 1898974
uucuugcacacaaauaaac

SEQ ID NO: 1898976 - RNA, 19 nt, Artificial Sequence
  Description of Artificial Sequence: Synthetic oligonucleotide
  Sense strand starting at position 1853 of SEQ ID NO: 1879328
aucuucugggcuggaaaga

SEQ ID NO: 1898977 - RNA, 19 nt, Artificial Sequence
  Description of Artificial Sequence: Synthetic oligonucleotide
  Antisense strand to SEQ ID NO: 1898976
ucuuuccagcccagaagau

SEQ ID NO: 1898978 - RNA, 19 nt, Artificial Sequence
  Description of Artificial Sequence: Synthetic oligonucleotide
  Sense strand starting at position 1998 of SEQ ID NO: 1879328
ccauaauugguuugggugu

SEQ ID NO: 1898979 - RNA, 19 nt, Artificial Sequence
  Description of Artificial Sequence: Synthetic oligonucleotide
  Antisense strand to SEQ ID NO: 1898978
acacccaaaccaauuaugg

SEQ ID NO: 1898980 - RNA, 19 nt, Artificial Sequence
  Description of Artificial Sequence: Synthetic oligonucleotide
  Sense strand starting at position 2031 of SEQ ID NO: 1879328
uucucuugcugggugauaa

SEQ ID NO: 1898981 - RNA, 19 nt, Artificial Sequence
  Description of Artificial Sequence: Synthetic oligonucleotide
  Antisense strand to SEQ ID NO: 1898980
uuaucacccagcaagagaa

SEQ ID NO: 1898982 - RNA, 19 nt, Artificial Sequence
  Description of Artificial Sequence: Synthetic oligonucleotide
  Sense strand starting at position 2032 of SEQ ID NO: 1879328
ucucuugcugggugauaau

SEQ ID NO: 1898983 - RNA, 19 nt, Artificial Sequence
  Description of Artificial Sequence: Synthetic oligonucleotide
  Antisense strand to SEQ ID NO: 1898982
auuaucacccagcaagaga

SEQ ID NO: 1898984 - RNA, 19 nt, Artificial Sequence
  Description of Artificial Sequence: Synthetic oligonucleotide
  Sense strand starting at position 2081 of SEQ ID NO: 1879328
cagguagcucaacgugaaa

SEQ ID NO: 1898985 - RNA, 19 nt, Artificial Sequence
  Description of Artificial Sequence: Synthetic oligonucleotide
  Antisense strand to SEQ ID NO: 1898984
uuucacguugagcuaccug

SEQ ID NO: 1898986 - RNA, 19 nt, Artificial Sequence
  Description of Artificial Sequence: Synthetic oligonucleotide
  Sense strand starting at position 2083 of SEQ ID NO: 1879328
gguagcucaacgugaaaca

SEQ ID NO: 1898987 - RNA, 19 nt, Artificial Sequence
  Description of Artificial Sequence: Synthetic oligonucleotide
  Antisense strand to SEQ ID NO: 1898986
uguuucacguugagcuacc

SEQ ID NO: 1898988 - RNA, 19 nt, Artificial Sequence
  Description of Artificial Sequence: Synthetic oligonucleotide
  Sense strand starting at position 2315 of SEQ ID NO: 1879328
cuggacaguuucccuagua

SEQ ID NO: 1898989 - RNA, 19 nt, Artificial Sequence
  Description of Artificial Sequence: Synthetic oligonucleotide
  Antisense strand to SEQ ID NO: 1898988
uacuagggaaacuguccag

SEQ ID NO: 1898990 - RNA, 19 nt, Artificial Sequence
  Description of Artificial Sequence: Synthetic oligonucleotide
  Sense strand starting at position 2316 of SEQ ID NO: 1879328
uggacaguuucccuaguag

SEQ ID NO: 1898991 - RNA, 19 nt, Artificial Sequence
  Description of Artificial Sequence: Synthetic oligonucleotide
  Antisense strand to SEQ ID NO: 1898990
cuacuagggaaacugucca

SEQ ID NO: 1898992 - RNA, 19 nt, Artificial Sequence
  Description of Artificial Sequence: Synthetic oligonucleotide
  Sense strand starting at position 2364 of SEQ ID NO: 1879328
ggcuucucuuccuccagaa

SEQ ID NO: 1898993 - RNA, 19 nt, Artificial Sequence
  Description of Artificial Sequence: Synthetic oligonucleotide
  Antisense strand to SEQ ID NO: 1898992
uucuggaggaagagaagcc

SEQ ID NO: 1898994 - RNA, 19 nt, Artificial Sequence
  Description of Artificial Sequence: Synthetic oligonucleotide
  Sense strand starting at position 2494 of SEQ ID NO: 1879328
gucagaagggcaugucauu

SEQ ID NO: 1898995 - RNA, 19 nt, Artificial Sequence
  Description of Artificial Sequence: Synthetic oligonucleotide
  Antisense strand to SEQ ID NO: 1898994
aaugacaugcccuucugac

SEQ ID NO: 1898996 - RNA, 19 nt, Artificial Sequence
  Description of Artificial Sequence: Synthetic oligonucleotide
  Sense strand starting at position 2567 of SEQ ID NO: 1879328
ugggaaagcucucuacuug

SEQ ID NO: 1898997 - RNA, 19 nt, Artificial Sequence
  Description of Artificial Sequence: Synthetic oligonucleotide
  Antisense strand to SEQ ID NO: 1898996
caaguagagagcuuuccca

SEQ ID NO: 1898998 - RNA, 19 nt, Artificial Sequence
  Description of Artificial Sequence: Synthetic oligonucleotide
  Sense strand starting at position 2635 of SEQ ID NO: 1879328
uggaaagagcuuugauaca

SEQ ID NO: 1898999 - RNA, 19 nt, Artificial Sequence
  Description of Artificial Sequence: Synthetic oligonucleotide
  Antisense strand to SEQ ID NO: 1898998
uguaucaaagcucuuucca

SEQ ID NO: 1899000 - RNA, 19 nt, Artificial Sequence
  Description of Artificial Sequence: Synthetic oligonucleotide
  Sense strand starting at position 2678 of SEQ ID NO: 1879328
uuacaauagcucugccaga

SEQ ID NO: 1899001 - RNA, 19 nt, Artificial Sequence
  Description of Artificial Sequence: Synthetic oligonucleotide
  Antisense strand to SEQ ID NO: 1899000
ucuggcagagcuauuguaa

SEQ ID NO: 1899002 - RNA, 19 nt, Artificial Sequence
  Description of Artificial Sequence: Synthetic oligonucleotide
  Sense strand starting at position 2787 of SEQ ID NO: 1879328
gcacuacaaugaguuccau

SEQ ID NO: 1899003 - RNA, 19 nt, Artificial Sequence
  Description of Artificial Sequence: Synthetic oligonucleotide
  Antisense strand to SEQ ID NO: 1899002
auggaacucauuguagugc

SEQ ID NO: 1899004 - RNA, 19 nt, Artificial Sequence
  Description of Artificial Sequence: Synthetic oligonucleotide
  Sense strand starting at position 2793 of SEQ ID NO: 1879328
caaugaguuccauagcuag

SEQ ID NO: 1899005 - RNA, 19 nt, Artificial Sequence
  Description of Artificial Sequence: Synthetic oligonucleotide
  Antisense strand to SEQ ID NO: 1899004
cuagcuauggaacucauug

SEQ ID NO: 1899006 - RNA, 19 nt, Artificial Sequence
  Description of Artificial Sequence: Synthetic oligonucleotide
  Sense strand starting at position 2796 of SEQ ID NO: 1879328
ugaguuccauagcuaguua

SEQ ID NO: 1899007 - RNA, 19 nt, Artificial Sequence
  Description of Artificial Sequence: Synthetic oligonucleotide
  Antisense strand to SEQ ID NO: 1899006
uaacuagcuauggaacuca

SEQ ID NO: 1899008 - RNA, 19 nt, Artificial Sequence
  Description of Artificial Sequence: Synthetic oligonucleotide
  Sense strand starting at position 2800 of SEQ ID NO: 1879328
uuccauagcuaguuauaua

SEQ ID NO: 1899009 - RNA, 19 nt, Artificial Sequence
  Description of Artificial Sequence: Synthetic oligonucleotide
  Antisense strand to SEQ ID NO: 1899008
uauauaacuagcuauggaa

SEQ ID NO: 1899010 - RNA, 19 nt, Artificial Sequence
  Description of Artificial Sequence: Synthetic oligonucleotide
  Sense strand starting at position 3066 of SEQ ID NO: 1879328
uguugucugagguggauuu

SEQ ID NO: 1899011 - RNA, 19 nt, Artificial Sequence
  Description of Artificial Sequence: Synthetic oligonucleotide
  Antisense strand to SEQ ID NO: 1899010
aaauccaccucagacaaca

SEQ ID NO: 1899012 - RNA, 19 nt, Artificial Sequence
  Description of Artificial Sequence: Synthetic oligonucleotide
  Sense strand starting at position 3132 of SEQ ID NO: 1879328
cuggguaaccacugaugaa

SEQ ID NO: 1899013 - RNA, 19 nt, Artificial Sequence
  Description of Artificial Sequence: Synthetic oligonucleotide
  Antisense strand to SEQ ID NO: 1899012
uucaucagugguuacccag

SEQ ID NO: 1899014 - RNA, 19 nt, Artificial Sequence
  Description of Artificial Sequence: Synthetic oligonucleotide
  Sense strand starting at position 3253 of SEQ ID NO: 1879328
agcugcaagaaucgagaaa

SEQ ID NO: 1899015 - RNA, 19 nt, Artificial Sequence
  Description of Artificial Sequence: Synthetic oligonucleotide
  Antisense strand to SEQ ID NO: 1899014
uuucucgauucuugcagcu

SEQ ID NO: 1899016 - RNA, 19 nt, Artificial Sequence
  Description of Artificial Sequence: Synthetic oligonucleotide
  Sense strand starting at position 3588 of SEQ ID NO: 1879328
gcuggcucagagugaauga

SEQ ID NO: 1899017 - RNA, 19 nt, Artificial Sequence
  Description of Artificial Sequence: Synthetic oligonucleotide
  Antisense strand to SEQ ID NO: 1899016
ucauucacucugagccagc

SEQ ID NO: 1899018 - RNA, 19 nt, Artificial Sequence
  Description of Artificial Sequence: Synthetic oligonucleotide
  Sense strand starting at position 3618 of SEQ ID NO: 1879328
gugggaggugucuauguca

SEQ ID NO: 1899019 - RNA, 19 nt, Artificial Sequence
  Description of Artificial Sequence: Synthetic oligonucleotide
  Antisense strand to SEQ ID NO: 1899018
ugacauagacaccucccac

SEQ ID NO: 1899020 - RNA, 19 nt, Artificial Sequence
  Description of Artificial Sequence: Synthetic oligonucleotide
  Sense strand starting at position 3621 of SEQ ID NO: 1879328
ggaggugucuaugucaacu

SEQ ID NO: 1899021 - RNA, 19 nt, Artificial Sequence
  Description of Artificial Sequence: Synthetic oligonucleotide
  Antisense strand to SEQ ID NO: 1899020
aguugacauagacaccucc

SEQ ID NO: 1899022 - RNA, 19 nt, Artificial Sequence
  Description of Artificial Sequence: Synthetic oligonucleotide
  Sense strand starting at position 3701 of SEQ ID NO: 1879328
accagaauaaacgguugua

SEQ ID NO: 1899023 - RNA, 19 nt, Artificial Sequence
  Description of Artificial Sequence: Synthetic oligonucleotide
  Antisense strand to SEQ ID NO: 1899022
uacaaccguuuauucuggu

SEQ ID NO: 1899024 - RNA, 19 nt, Artificial Sequence
  Description of Artificial Sequence: Synthetic oligonucleotide
  Sense strand starting at position 3704 of SEQ ID NO: 1879328
agaauaaacgguuguaggu

SEQ ID NO: 1899025 - RNA, 19 nt, Artificial Sequence
  Description of Artificial Sequence: Synthetic oligonucleotide
  Antisense strand to SEQ ID NO: 1899024
accuacaaccguuuauucu

SEQ ID NO: 1899026 - RNA, 19 nt, Artificial Sequence
  Description of Artificial Sequence: Synthetic oligonucleotide
  Sense strand starting at position 3720 of SEQ ID NO: 1879328
ggugucuuugaaggaagga

SEQ ID NO: 1899027 - RNA, 19 nt, Artificial Sequence
  Description of Artificial Sequence: Synthetic oligonucleotide
  Antisense strand to SEQ ID NO: 1899026
uccuuccuucaaagacacc

SEQ ID NO: 1899028 - RNA, 19 nt, Artificial Sequence
  Description of Artificial Sequence: Synthetic oligonucleotide
  Sense strand starting at position 3757 of SEQ ID NO: 1879328
uguauaccugcagagaugu

SEQ ID NO: 1899029 - RNA, 19 nt, Artificial Sequence
  Description of Artificial Sequence: Synthetic oligonucleotide
  Antisense strand to SEQ ID NO: 1899028
acaucucugcagguauaca

SEQ ID NO: 1899030 - RNA, 19 nt, Artificial Sequence
  Description of Artificial Sequence: Synthetic oligonucleotide
  Sense strand starting at position 3805 of SEQ ID NO: 1879328
cagugaguccgggaaacua

SEQ ID NO: 1899031 - RNA, 19 nt, Artificial Sequence
  Description of Artificial Sequence: Synthetic oligonucleotide
  Antisense strand to SEQ ID NO: 1899030
uaguuucccggacucacug

SEQ ID NO: 1899032 - RNA, 19 nt, Artificial Sequence
  Description of Artificial Sequence: Synthetic oligonucleotide
  Sense strand starting at position 3953 of SEQ ID NO: 1879328
uuaugauuacuuugagaca

SEQ ID NO: 1899033 - RNA, 19 nt, Artificial Sequence
  Description of Artificial Sequence: Synthetic oligonucleotide
  Antisense strand to SEQ ID NO: 1899032
ugucucaaaguaaucauaa

SEQ ID NO: 1899034 - RNA, 19 nt, Artificial Sequence
  Description of Artificial Sequence: Synthetic oligonucleotide
  Sense strand starting at position 3966 of SEQ ID NO: 1879328
gagacauuguaauugcaca

SEQ ID NO: 1899035 - RNA, 19 nt, Artificial Sequence
  Description of Artificial Sequence: Synthetic oligonucleotide
  Antisense strand to SEQ ID NO: 1899034
ugugcaauuacaaugucuc

SEQ ID NO: 1899036 - RNA, 19 nt, Artificial Sequence
  Description of Artificial Sequence: Synthetic oligonucleotide
  Sense strand starting at position 540 of SEQ ID NO: 1879329
ggaaacuugcgaggaguca

SEQ ID NO: 1899037 - RNA, 19 nt, Artificial Sequence
  Description of Artificial Sequence: Synthetic oligonucleotide
  Antisense strand to SEQ ID NO: 1899036
ugacuccucgcaaguuucc

SEQ ID NO: 1899038 - RNA, 19 nt, Artificial Sequence
  Description of Artificial Sequence: Synthetic oligonucleotide
  Sense strand starting at position 614 of SEQ ID NO: 1879329
ucagguccuccaugagaau

SEQ ID NO: 1899039 - RNA, 19 nt, Artificial Sequence
  Description of Artificial Sequence: Synthetic oligonucleotide
  Antisense strand to SEQ ID NO: 1899038
auucucauggaggaccuga

SEQ ID NO: 1899040 - RNA, 19 nt, Artificial Sequence
  Description of Artificial Sequence: Synthetic oligonucleotide
  Sense strand starting at position 1620 of SEQ ID NO: 1879329
uguauuugcaagugguaag

SEQ ID NO: 1899041 - RNA, 19 nt, Artificial Sequence
  Description of Artificial Sequence: Synthetic oligonucleotide
  Antisense strand to SEQ ID NO: 1899040
cuuaccacuugcaaauaca

SEQ ID NO: 1899042 - RNA, 19 nt, Artificial Sequence
  Description of Artificial Sequence: Synthetic oligonucleotide
  Sense strand starting at position 1642 of SEQ ID NO: 1879329
gagguugaggcuuagucuu

SEQ ID NO: 1899043 - RNA, 19 nt, Artificial Sequence
  Description of Artificial Sequence: Synthetic oligonucleotide
  Antisense strand to SEQ ID NO: 1899042
aagacuaagccucaaccuc

SEQ ID NO: 1899044 - RNA, 19 nt, Artificial Sequence
  Description of Artificial Sequence: Synthetic oligonucleotide
  Sense strand starting at position 1806 of SEQ ID NO: 1879329
ucgcuuuguguguccugua

SEQ ID NO: 1899045 - RNA, 19 nt, Artificial Sequence
  Description of Artificial Sequence: Synthetic oligonucleotide
  Antisense strand to SEQ ID NO: 1899044
uacaggacacacaaagcga

SEQ ID NO: 1899046 - RNA, 19 nt, Artificial Sequence
  Description of Artificial Sequence: Synthetic oligonucleotide
  Sense strand starting at position 1819 of SEQ ID NO: 1879329
ccuguaaacuuggcuuaaa

SEQ ID NO: 1899047 - RNA, 19 nt, Artificial Sequence
  Description of Artificial Sequence: Synthetic oligonucleotide
  Antisense strand to SEQ ID NO: 1899046
uuuaagccaaguuuacagg

SEQ ID NO: 1899048 - RNA, 19 nt, Artificial Sequence
  Description of Artificial Sequence: Synthetic oligonucleotide
  Sense strand starting at position 1820 of SEQ ID NO: 1879329
cuguaaacuuggcuuaaau

SEQ ID NO: 1899049 - RNA, 19 nt, Artificial Sequence
  Description of Artificial Sequence: Synthetic oligonucleotide
  Antisense strand to SEQ ID NO: 1899048
auuuaagccaaguuuacag

SEQ ID NO: 1899050 - RNA, 19 nt, Artificial Sequence
  Description of Artificial Sequence: Synthetic oligonucleotide
  Sense strand starting at position 2043 of SEQ ID NO: 1879329
gugucagggcgcguuuaau

SEQ ID NO: 1899051 - RNA, 19 nt, Artificial Sequence
  Description of Artificial Sequence: Synthetic oligonucleotide
  Antisense strand to SEQ ID NO: 1899050
auuaaacgcgcccugacac

SEQ ID NO: 1899052 - RNA, 19 nt, Artificial Sequence
  Description of Artificial Sequence: Synthetic oligonucleotide
  Sense strand starting at position 2102 of SEQ ID NO: 1879329
uguggaguuggacaaacuu

SEQ ID NO: 1899053 - RNA, 19 nt, Artificial Sequence
  Description of Artificial Sequence: Synthetic oligonucleotide
  Antisense strand to SEQ ID NO: 1899052
aaguuuguccaacuccaca

SEQ ID NO: 1899054 - RNA, 19 nt, Artificial Sequence
  Description of Artificial Sequence: Synthetic oligonucleotide
  Sense strand starting at position 2216 of SEQ ID NO: 1879329
ugaauaggcuguguauaau

SEQ ID NO: 1899055 - RNA, 19 nt, Artificial Sequence
  Description of Artificial Sequence: Synthetic oligonucleotide
  Antisense strand to SEQ ID NO: 1899054
auuauacacagccuauuca

SEQ ID NO: 1899056 - RNA, 19 nt, Artificial Sequence
  Description of Artificial Sequence: Synthetic oligonucleotide
  Sense strand starting at position 2219 of SEQ ID NO: 1879329
auaggcuguguauaaugaa

SEQ ID NO: 1899057 - RNA, 19 nt, Artificial Sequence
  Description of Artificial Sequence: Synthetic oligonucleotide
  Antisense strand to SEQ ID NO: 1899056
uucauuauacacagccuau

SEQ ID NO: 1899058 - RNA, 19 nt, Artificial Sequence
  Description of Artificial Sequence: Synthetic oligonucleotide
  Sense strand starting at position 2267 of SEQ ID NO: 1879329
gcgucugugccuucucuau

SEQ ID NO: 1899059 - RNA, 19 nt, Artificial Sequence
  Description of Artificial Sequence: Synthetic oligonucleotide
  Antisense strand to SEQ ID NO: 1899058
auagagaaggcacagacgc

SEQ ID NO: 1899060 - RNA, 19 nt, Artificial Sequence
  Description of Artificial Sequence: Synthetic oligonucleotide
  Sense strand starting at position 2269 of SEQ ID NO: 1879329
gucugugccuucucuauuu

SEQ ID NO: 1899061 - RNA, 19 nt, Artificial Sequence
  Description of Artificial Sequence: Synthetic oligonucleotide
  Antisense strand to SEQ ID NO: 1899060
aaauagagaaggcacagac

SEQ ID NO: 1899062 - RNA, 19 nt, Artificial Sequence
  Description of Artificial Sequence: Synthetic oligonucleotide
  Sense strand starting at position 2709 of SEQ ID NO: 1879329
ugcgucguuagaccuuaua

SEQ ID NO: 1899063 - RNA, 19 nt, Artificial Sequence
  Description of Artificial Sequence: Synthetic oligonucleotide
  Antisense strand to SEQ ID NO: 1899062
uauaaggucuaacgacgca

SEQ ID NO: 1899064 - RNA, 19 nt, Artificial Sequence
  Description of Artificial Sequence: Synthetic oligonucleotide
  Sense strand starting at position 2712 of SEQ ID NO: 1879329
gucguuagaccuuauaaau

SEQ ID NO: 1899065 - RNA, 19 nt, Artificial Sequence
  Description of Artificial Sequence: Synthetic oligonucleotide
  Antisense strand to SEQ ID NO: 1899064
auuuauaaggucuaacgac

SEQ ID NO: 1899066 - RNA, 19 nt, Artificial Sequence
  Description of Artificial Sequence: Synthetic oligonucleotide
  Sense strand starting at position 2888 of SEQ ID NO: 1879329
uccagaaagcuccagucuu

SEQ ID NO: 1899067 - RNA, 19 nt, Artificial Sequence
  Description of Artificial Sequence: Synthetic oligonucleotide
  Antisense strand to SEQ ID NO: 1899066
aagacuggagcuuucugga

SEQ ID NO: 1899068 - RNA, 19 nt, Artificial Sequence
  Description of Artificial Sequence: Synthetic oligonucleotide
  Sense strand starting at position 2899 of SEQ ID NO: 1879329
ccagucuuacuugaaagcu

SEQ ID NO: 1899069 - RNA, 19 nt, Artificial Sequence
  Description of Artificial Sequence: Synthetic oligonucleotide
  Antisense strand to SEQ ID NO: 1899068
agcuuucaaguaagacugg

SEQ ID NO: 1899070 - RNA, 19 nt, Artificial Sequence
  Description of Artificial Sequence: Synthetic oligonucleotide
  Sense strand starting at position 2924 of SEQ ID NO: 1879329
caauuagauuuguggauuu

SEQ ID NO: 1899071 - RNA, 19 nt, Artificial Sequence
  Description of Artificial Sequence: Synthetic oligonucleotide
  Antisense strand to SEQ ID NO: 1899070
aaauccacaaaucuaauug

SEQ ID NO: 1899072 - RNA, 19 nt, Artificial Sequence
  Description of Artificial Sequence: Synthetic oligonucleotide
  Sense strand starting at position 2937 of SEQ ID NO: 1879329
ggauuuguguugucacuug

SEQ ID NO: 1899073 - RNA, 19 nt, Artificial Sequence
  Description of Artificial Sequence: Synthetic oligonucleotide
  Antisense strand to SEQ ID NO: 1899072
caagugacaacacaaaucc

SEQ ID NO: 1899074 - RNA, 19 nt, Artificial Sequence
  Description of Artificial Sequence: Synthetic oligonucleotide
  Sense strand starting at position 2957 of SEQ ID NO: 1879329
uagagaauaucggugguuu

SEQ ID NO: 1899075 - RNA, 19 nt, Artificial Sequence
  Description of Artificial Sequence: Synthetic oligonucleotide
  Antisense strand to SEQ ID NO: 1899074
aaaccaccgauauucucua

SEQ ID NO: 1899076 - RNA, 19 nt, Artificial Sequence
  Description of Artificial Sequence: Synthetic oligonucleotide
  Sense strand starting at position 2958 of SEQ ID NO: 1879329
agagaauaucggugguuua

SEQ ID NO: 1899077 - RNA, 19 nt, Artificial Sequence
  Description of Artificial Sequence: Synthetic oligonucleotide
  Antisense strand to SEQ ID NO: 1899076
uaaaccaccgauauucucu

SEQ ID NO: 1899078 - RNA, 19 nt, Artificial Sequence
  Description of Artificial Sequence: Synthetic oligonucleotide
  Sense strand starting at position 2959 of SEQ ID NO: 1879329
gagaauaucggugguuuau

SEQ ID NO: 1899079 - RNA, 19 nt, Artificial Sequence
  Description of Artificial Sequence: Synthetic oligonucleotide
  Antisense strand to SEQ ID NO: 1899078
auaaaccaccgauauucuc

SEQ ID NO: 1899080 - RNA, 19 nt, Artificial Sequence
  Description of Artificial Sequence: Synthetic oligonucleotide
  Sense strand starting at position 2961 of SEQ ID NO: 1879329
gaauaucggugguuuauua

SEQ ID NO: 1899081 - RNA, 19 nt, Artificial Sequence
  Description of Artificial Sequence: Synthetic oligonucleotide
  Antisense strand to SEQ ID NO: 1899080
uaauaaaccaccgauauuc

SEQ ID NO: 1899082 - RNA, 19 nt, Artificial Sequence
  Description of Artificial Sequence: Synthetic oligonucleotide
  Sense strand starting at position 2971 of SEQ ID NO: 1879329
gguuuauuaaagugugaga

SEQ ID NO: 1899083 - RNA, 19 nt, Artificial Sequence
  Description of Artificial Sequence: Synthetic oligonucleotide
  Antisense strand to SEQ ID NO: 1899082
ucucacacuuuaauaaacc

SEQ ID NO: 1899084 - RNA, 19 nt, Artificial Sequence
  Description of Artificial Sequence: Synthetic oligonucleotide
  Sense strand starting at position 2994 of SEQ ID NO: 1879329
agggcuucauggucagaaa

SEQ ID NO: 1899085 - RNA, 19 nt, Artificial Sequence
  Description of Artificial Sequence: Synthetic oligonucleotide
  Antisense strand to SEQ ID NO: 1899084
uuucugaccaugaagcccu

SEQ ID NO: 1899086 - RNA, 19 nt, Artificial Sequence
  Description of Artificial Sequence: Synthetic oligonucleotide
  Sense strand starting at position 3016 of SEQ ID NO: 1879329
ugaggaagugguuagccaa

SEQ ID NO: 1899087 - RNA, 19 nt, Artificial Sequence
  Description of Artificial Sequence: Synthetic oligonucleotide
  Antisense strand to SEQ ID NO: 1899086
uuggcuaaccacuuccuca

SEQ ID NO: 1899088 - RNA, 19 nt, Artificial Sequence
  Description of Artificial Sequence: Synthetic oligonucleotide
  Sense strand starting at position 3019 of SEQ ID NO: 1879329
ggaagugguuagccaauau

SEQ ID NO: 1899089 - RNA, 19 nt, Artificial Sequence
  Description of Artificial Sequence: Synthetic oligonucleotide
  Antisense strand to SEQ ID NO: 1899088
auauuggcuaaccacuucc

SEQ ID NO: 1899090 - RNA, 19 nt, Artificial Sequence
  Description of Artificial Sequence: Synthetic oligonucleotide
  Sense strand starting at position 3023 of SEQ ID NO: 1879329
gugguuagccaauaucaaa

SEQ ID NO: 1899091 - RNA, 19 nt, Artificial Sequence
  Description of Artificial Sequence: Synthetic oligonucleotide
  Antisense strand to SEQ ID NO: 1899090
uuugauauuggcuaaccac

SEQ ID NO: 1899092 - RNA, 19 nt, Artificial Sequence
  Description of Artificial Sequence: Synthetic oligonucleotide
  Sense strand starting at position 3171 of SEQ ID NO: 1879329
ggaagagaagcuuguuuaa

SEQ ID NO: 1899093 - RNA, 19 nt, Artificial Sequence
  Description of Artificial Sequence: Synthetic oligonucleotide
  Antisense strand to SEQ ID NO: 1899092
uuaaacaagcuucucuucc

SEQ ID NO: 1899094 - RNA, 19 nt, Artificial Sequence
  Description of Artificial Sequence: Synthetic oligonucleotide
  Sense strand starting at position 3174 of SEQ ID NO: 1879329
agagaagcuuguuuaacag

SEQ ID NO: 1899095 - RNA, 19 nt, Artificial Sequence
  Description of Artificial Sequence: Synthetic oligonucleotide
  Antisense strand to SEQ ID NO: 1899094
cuguuaaacaagcuucucu

SEQ ID NO: 1899096 - RNA, 19 nt, Artificial Sequence
  Description of Artificial Sequence: Synthetic oligonucleotide
  Sense strand starting at position 3259 of SEQ ID NO: 1879329
cagucugauuuauaagaug

SEQ ID NO: 1899097 - RNA, 19 nt, Artificial Sequence
  Description of Artificial Sequence: Synthetic oligonucleotide
  Antisense strand to SEQ ID NO: 1899096
caucuuauaaaucagacug

SEQ ID NO: 1899098 - RNA, 19 nt, Artificial Sequence
  Description of Artificial Sequence: Synthetic oligonucleotide
  Sense strand starting at position 3279 of SEQ ID NO: 1879329
ggauaauaauggucucuau

SEQ ID NO: 1899099 - RNA, 19 nt, Artificial Sequence
  Description of Artificial Sequence: Synthetic oligonucleotide
  Antisense strand to SEQ ID NO: 1899098
auagagaccauuauuaucc

SEQ ID NO: 1899100 - RNA, 19 nt, Artificial Sequence
  Description of Artificial Sequence: Synthetic oligonucleotide
  Sense strand starting at position 3297 of SEQ ID NO: 1879329
ucuguagggcuuuacagaa

SEQ ID NO: 1899101 - RNA, 19 nt, Artificial Sequence
  Description of Artificial Sequence: Synthetic oligonucleotide
  Antisense strand to SEQ ID NO: 1899100
uucuguaaagcccuacaga

SEQ ID NO: 1899102 - RNA, 19 nt, Artificial Sequence
  Description of Artificial Sequence: Synthetic oligonucleotide
  Sense strand starting at position 3354 of SEQ ID NO: 1879329
ggacuuaacacgcaguaca

SEQ ID NO: 1899103 - RNA, 19 nt, Artificial Sequence
  Description of Artificial Sequence: Synthetic oligonucleotide
  Antisense strand to SEQ ID NO: 1899102
uguacugcguguuaagucc

SEQ ID NO: 1899104 - RNA, 19 nt, Artificial Sequence
  Description of Artificial Sequence: Synthetic oligonucleotide
  Sense strand starting at position 3604 of SEQ ID NO: 1879329
guuacaguugcauaguaau

SEQ ID NO: 1899105 - RNA, 19 nt, Artificial Sequence
  Description of Artificial Sequence: Synthetic oligonucleotide
  Antisense strand to SEQ ID NO: 1899104
auuacuaugcaacuguaac

SEQ ID NO: 1899106 - RNA, 19 nt, Artificial Sequence
  Description of Artificial Sequence: Synthetic oligonucleotide
  Sense strand starting at position 3688 of SEQ ID NO: 1879329
guuuauuagcccuagguaa

SEQ ID NO: 1899107 - RNA, 19 nt, Artificial Sequence
  Description of Artificial Sequence: Synthetic oligonucleotide
  Antisense strand to SEQ ID NO: 1899106
uuaccuagggcuaauaaac

SEQ ID NO: 1899108 - RNA, 19 nt, Artificial Sequence
  Description of Artificial Sequence: Synthetic oligonucleotide
  Sense strand starting at position 3690 of SEQ ID NO: 1879329
uuauuagcccuagguaaga

SEQ ID NO: 1899109 - RNA, 19 nt, Artificial Sequence
  Description of Artificial Sequence: Synthetic oligonucleotide
  Antisense strand to SEQ ID NO: 1899108
ucuuaccuagggcuaauaa

SEQ ID NO: 1899110 - RNA, 19 nt, Artificial Sequence
  Description of Artificial Sequence: Synthetic oligonucleotide
  Sense strand starting at position 3855 of SEQ ID NO: 1879329
gcugauugugagucguugu

SEQ ID NO: 1899111 - RNA, 19 nt, Artificial Sequence
  Description of Artificial Sequence: Synthetic oligonucleotide
  Antisense strand to SEQ ID NO: 1899110
acaacgacucacaaucagc

SEQ ID NO: 1899112 - RNA, 19 nt, Artificial Sequence
  Description of Artificial Sequence: Synthetic oligonucleotide
  Sense strand starting at position 3889 of SEQ ID NO: 1879329
ucaugagauuggguguuca

SEQ ID NO: 1899113 - RNA, 19 nt, Artificial Sequence
  Description of Artificial Sequence: Synthetic oligonucleotide
  Antisense strand to SEQ ID NO: 1899112
ugaacacccaaucucauga

SEQ ID NO: 1899114 - RNA, 19 nt, Artificial Sequence
  Description of Artificial Sequence: Synthetic oligonucleotide
  Sense strand starting at position 3893 of SEQ ID NO: 1879329
gagauuggguguucaguua

SEQ ID NO: 1899115 - RNA, 19 nt, Artificial Sequence
  Description of Artificial Sequence: Synthetic oligonucleotide
  Antisense strand to SEQ ID NO: 1899114
uaacugaacacccaaucuc

SEQ ID NO: 1899116 - RNA, 19 nt, Artificial Sequence
  Description of Artificial Sequence: Synthetic oligonucleotide
  Sense strand starting at position 40 of SEQ ID NO: 1879330
guagaaaccacguguaaua

SEQ ID NO: 1899117 - RNA, 19 nt, Artificial Sequence
  Description of Artificial Sequence: Synthetic oligonucleotide
  Antisense strand to SEQ ID NO: 1899116
uauuacacgugguuucuac

SEQ ID NO: 1899118 - RNA, 19 nt, Artificial Sequence
  Description of Artificial Sequence: Synthetic oligonucleotide
  Sense strand starting at position 694 of SEQ ID NO: 1879330
aaggcaggcucuuaacaga

SEQ ID NO: 1899119 - RNA, 19 nt, Artificial Sequence
  Description of Artificial Sequence: Synthetic oligonucleotide
  Antisense strand to SEQ ID NO: 1899118
ucuguuaagagccugccuu

SEQ ID NO: 1899120 - RNA, 19 nt, Artificial Sequence
  Description of Artificial Sequence: Synthetic oligonucleotide
  Sense strand starting at position 1004 of SEQ ID NO: 1879330
gaggcuuacucccugagaa

SEQ ID NO: 1899121 - RNA, 19 nt, Artificial Sequence
  Description of Artificial Sequence: Synthetic oligonucleotide
  Antisense strand to SEQ ID NO: 1899120
uucucagggaguaagccuc

SEQ ID NO: 1899122 - RNA, 19 nt, Artificial Sequence
  Description of Artificial Sequence: Synthetic oligonucleotide
  Sense strand starting at position 1005 of SEQ ID NO: 1879330
aggcuuacucccugagaau

SEQ ID NO: 1899123 - RNA, 19 nt, Artificial Sequence
  Description of Artificial Sequence: Synthetic oligonucleotide
  Antisense strand to SEQ ID NO: 1899122
auucucagggaguaagccu

SEQ ID NO: 1899124 - RNA, 19 nt, Artificial Sequence
  Description of Artificial Sequence: Synthetic oligonucleotide
  Sense strand starting at position 1006 of SEQ ID NO: 1879330
ggcuuacucccugagaauu

SEQ ID NO: 1899125 - RNA, 19 nt, Artificial Sequence
  Description of Artificial Sequence: Synthetic oligonucleotide
  Antisense strand to SEQ ID NO: 1899124
aauucucagggaguaagcc

SEQ ID NO: 1899126 - RNA, 19 nt, Artificial Sequence
  Description of Artificial Sequence: Synthetic oligonucleotide
  Sense strand starting at position 1090 of SEQ ID NO: 1879330
gguccugaguccuagguca

SEQ ID NO: 1899127 - RNA, 19 nt, Artificial Sequence
  Description of Artificial Sequence: Synthetic oligonucleotide
  Antisense strand to SEQ ID NO: 1899126
ugaccuaggacucaggacc

SEQ ID NO: 1899128 - RNA, 19 nt, Artificial Sequence
  Description of Artificial Sequence: Synthetic oligonucleotide
  Sense strand starting at position 1092 of SEQ ID NO: 1879330
uccugaguccuaggucacu

SEQ ID NO: 1899129 - RNA, 19 nt, Artificial Sequence
  Description of Artificial Sequence: Synthetic oligonucleotide
  Antisense strand to SEQ ID NO: 1899128
agugaccuaggacucagga

SEQ ID NO: 1899130 - RNA, 19 nt, Artificial Sequence
  Description of Artificial Sequence: Synthetic oligonucleotide
  Sense strand starting at position 2044 of SEQ ID NO: 1879330
gcccuuggucaugaauauu

SEQ ID NO: 1899131 - RNA, 19 nt, Artificial Sequence
  Description of Artificial Sequence: Synthetic oligonucleotide
  Antisense strand to SEQ ID NO: 1899130
aauauucaugaccaagggc

SEQ ID NO: 1899132 - RNA, 19 nt, Artificial Sequence
  Description of Artificial Sequence: Synthetic oligonucleotide
  Sense strand starting at position 2171 of SEQ ID NO: 1879330
acgaguuucgcguccugaa

SEQ ID NO: 1899133 - RNA, 19 nt, Artificial Sequence
  Description of Artificial Sequence: Synthetic oligonucleotide
  Antisense strand to SEQ ID NO: 1899132
uucaggacgcgaaacucgu

SEQ ID NO: 1899134 - RNA, 19 nt, Artificial Sequence
  Description of Artificial Sequence: Synthetic oligonucleotide
  Sense strand starting at position 2172 of SEQ ID NO: 1879330
cgaguuucgcguccugaaa

SEQ ID NO: 1899135 - RNA, 19 nt, Artificial Sequence
  Description of Artificial Sequence: Synthetic oligonucleotide
  Antisense strand to SEQ ID NO: 1899134
uuucaggacgcgaaacucg

SEQ ID NO: 1899136 - RNA, 19 nt, Artificial Sequence
  Description of Artificial Sequence: Synthetic oligonucleotide
  Sense strand starting at position 2183 of SEQ ID NO: 1879330
uccugaaauuccgcuucca

SEQ ID NO: 1899137 - RNA, 19 nt, Artificial Sequence
  Description of Artificial Sequence: Synthetic oligonucleotide
  Antisense strand to SEQ ID NO: 1899136
uggaagcggaauuucagga

SEQ ID NO: 1899138 - RNA, 19 nt, Artificial Sequence
  Description of Artificial Sequence: Synthetic oligonucleotide
  Sense strand starting at position 2223 of SEQ ID NO: 1879330
uacuguuugucccucgcga

SEQ ID NO: 1899139 - RNA, 19 nt, Artificial Sequence
  Description of Artificial Sequence: Synthetic oligonucleotide
  Antisense strand to SEQ ID NO: 1899138
ucgcgagggacaaacagua

SEQ ID NO: 1899140 - RNA, 19 nt, Artificial Sequence
  Description of Artificial Sequence: Synthetic oligonucleotide
  Sense strand starting at position 2510 of SEQ ID NO: 1879330
gaccgugaggcgcagauuu

SEQ ID NO: 1899141 - RNA, 19 nt, Artificial Sequence
  Description of Artificial Sequence: Synthetic oligonucleotide
  Antisense strand to SEQ ID NO: 1899140
aaaucugcgccucacgguc

SEQ ID NO: 1899142 - RNA, 19 nt, Artificial Sequence
  Description of Artificial Sequence: Synthetic oligonucleotide
  Sense strand starting at position 2521 of SEQ ID NO: 1879330
gcagauuugagccgcuguu

SEQ ID NO: 1899143 - RNA, 19 nt, Artificial Sequence
  Description of Artificial Sequence: Synthetic oligonucleotide
  Antisense strand to SEQ ID NO: 1899142
aacagcggcucaaaucugc

SEQ ID NO: 1899144 - RNA, 19 nt, Artificial Sequence
  Description of Artificial Sequence: Synthetic oligonucleotide
  Sense strand starting at position 2530 of SEQ ID NO: 1879330
agccgcuguugagaugauu

SEQ ID NO: 1899145 - RNA, 19 nt, Artificial Sequence
  Description of Artificial Sequence: Synthetic oligonucleotide
  Antisense strand to SEQ ID NO: 1899144
aaucaucucaacagcggcu

SEQ ID NO: 1899146 - RNA, 19 nt, Artificial Sequence
  Description of Artificial Sequence: Synthetic oligonucleotide
  Sense strand starting at position 2539 of SEQ ID NO: 1879330
ugagaugauuccuuuccgu

SEQ ID NO: 1899147 - RNA, 19 nt, Artificial Sequence
  Description of Artificial Sequence: Synthetic oligonucleotide
  Antisense strand to SEQ ID NO: 1899146
acggaaaggaaucaucuca

SEQ ID NO: 1899148 - RNA, 19 nt, Artificial Sequence
  Description of Artificial Sequence: Synthetic oligonucleotide
  Sense strand starting at position 2614 of SEQ ID NO: 1879330
gguugcuguguccacauaa

SEQ ID NO: 1899149 - RNA, 19 nt, Artificial Sequence
  Description of Artificial Sequence: Synthetic oligonucleotide
  Antisense strand to SEQ ID NO: 1899148
uuauguggacacagcaacc

SEQ ID NO: 1899150 - RNA, 19 nt, Artificial Sequence
  Description of Artificial Sequence: Synthetic oligonucleotide
  Sense strand starting at position 2786 of SEQ ID NO: 1879330
ggcguuuggucuccauuca

SEQ ID NO: 1899151 - RNA, 19 nt, Artificial Sequence
  Description of Artificial Sequence: Synthetic oligonucleotide
  Antisense strand to SEQ ID NO: 1899150
ugaauggagaccaaacgcc

SEQ ID NO: 1899152 - RNA, 19 nt, Artificial Sequence
  Description of Artificial Sequence: Synthetic oligonucleotide
  Sense strand starting at position 2805 of SEQ ID NO: 1879330
gcuagagggccuugaaauc

SEQ ID NO: 1899153 - RNA, 19 nt, Artificial Sequence
  Description of Artificial Sequence: Synthetic oligonucleotide
  Antisense strand to SEQ ID NO: 1899152
gauuucaaggcccucuagc

SEQ ID NO: 1899154 - RNA, 19 nt, Artificial Sequence
  Description of Artificial Sequence: Synthetic oligonucleotide
  Sense strand starting at position 2876 of SEQ ID NO: 1879330
ccucaucgaucacguacau

SEQ ID NO: 1899155 - RNA, 19 nt, Artificial Sequence
  Description of Artificial Sequence: Synthetic oligonucleotide
  Antisense strand to SEQ ID NO: 1899154
auguacgugaucgaugagg

SEQ ID NO: 1899156 - RNA, 19 nt, Artificial Sequence
  Description of Artificial Sequence: Synthetic oligonucleotide
  Sense strand starting at position 2900 of SEQ ID NO: 1879330
cgcugaugugcuugugaug

SEQ ID NO: 1899157 - RNA, 19 nt, Artificial Sequence
  Description of Artificial Sequence: Synthetic oligonucleotide
  Antisense strand to SEQ ID NO: 1899156
caucacaagcacaucagcg

SEQ ID NO: 1899158 - RNA, 19 nt, Artificial Sequence
  Description of Artificial Sequence: Synthetic oligonucleotide
  Sense strand starting at position 2947 of SEQ ID NO: 1879330
aggccucaucauugucaaa

SEQ ID NO: 1899159 - RNA, 19 nt, Artificial Sequence
  Description of Artificial Sequence: Synthetic oligonucleotide
  Antisense strand to SEQ ID NO: 1899158
uuugacaaugaugaggccu

SEQ ID NO: 1899160 - RNA, 19 nt, Artificial Sequence
  Description of Artificial Sequence: Synthetic oligonucleotide
  Sense strand starting at position 3038 of SEQ ID NO: 1879330
cuuccucuggccuggagaa

SEQ ID NO: 1899161 - RNA, 19 nt, Artificial Sequence
  Description of Artificial Sequence: Synthetic oligonucleotide
  Antisense strand to SEQ ID NO: 1899160
uucuccaggccagaggaag

SEQ ID NO: 1899162 - RNA, 19 nt, Artificial Sequence
  Description of Artificial Sequence: Synthetic oligonucleotide
  Sense strand starting at position 3039 of SEQ ID NO: 1879330
uuccucuggccuggagaaa

SEQ ID NO: 1899163 - RNA, 19 nt, Artificial Sequence
  Description of Artificial Sequence: Synthetic oligonucleotide
  Antisense strand to SEQ ID NO: 1899162
uuucuccaggccagaggaa

SEQ ID NO: 1899164 - RNA, 19 nt, Artificial Sequence
  Description of Artificial Sequence: Synthetic oligonucleotide
  Sense strand starting at position 3040 of SEQ ID NO: 1879330
uccucuggccuggagaaau

SEQ ID NO: 1899165 - RNA, 19 nt, Artificial Sequence
  Description of Artificial Sequence: Synthetic oligonucleotide
  Antisense strand to SEQ ID NO: 1899164
auuucuccaggccagagga

SEQ ID NO: 1899166 - RNA, 19 nt, Artificial Sequence
  Description of Artificial Sequence: Synthetic oligonucleotide
  Sense strand starting at position 3090 of SEQ ID NO: 1879330
guguucucaaacugggaaa

SEQ ID NO: 1899167 - RNA, 19 nt, Artificial Sequence
  Description of Artificial Sequence: Synthetic oligonucleotide
  Antisense strand to SEQ ID NO: 1899166
uuucccaguuugagaacac

SEQ ID NO: 1899168 - RNA, 19 nt, Artificial Sequence
  Description of Artificial Sequence: Synthetic oligonucleotide
  Sense strand starting at position 3204 of SEQ ID NO: 1879330
ccaguaugcuugcucucuu

SEQ ID NO: 1899169 - RNA, 19 nt, Artificial Sequence
  Description of Artificial Sequence: Synthetic oligonucleotide
  Antisense strand to SEQ ID NO: 1899168
aagagagcaagcauacugg

SEQ ID NO: 1899170 - RNA, 19 nt, Artificial Sequence
  Description of Artificial Sequence: Synthetic oligonucleotide
  Sense strand starting at position 3207 of SEQ ID NO: 1879330
guaugcuugcucucuucuu

SEQ ID NO: 1899171 - RNA, 19 nt, Artificial Sequence
  Description of Artificial Sequence: Synthetic oligonucleotide
  Antisense strand to SEQ ID NO: 1899170
aagaagagagcaagcauac

SEQ ID NO: 1899172 - RNA, 19 nt, Artificial Sequence
  Description of Artificial Sequence: Synthetic oligonucleotide
  Sense strand starting at position 3246 of SEQ ID NO: 1879330
uggagccaguccugaguua

SEQ ID NO: 1899173 - RNA, 19 nt, Artificial Sequence
  Description of Artificial Sequence: Synthetic oligonucleotide
  Antisense strand to SEQ ID NO: 1899172
uaacucaggacuggcucca

SEQ ID NO: 1899174 - RNA, 19 nt, Artificial Sequence
  Description of Artificial Sequence: Synthetic oligonucleotide
  Sense strand starting at position 3291 of SEQ ID NO: 1879330
ccaccugagccuuggaaga

SEQ ID NO: 1899175 - RNA, 19 nt, Artificial Sequence
  Description of Artificial Sequence: Synthetic oligonucleotide
  Antisense strand to SEQ ID NO: 1899174
ucuuccaaggcucaggugg

SEQ ID NO: 1899176 - RNA, 19 nt, Artificial Sequence
  Description of Artificial Sequence: Synthetic oligonucleotide
  Sense strand starting at position 3293 of SEQ ID NO: 1879330
accugagccuuggaagaaa

SEQ ID NO: 1899177 - RNA, 19 nt, Artificial Sequence
  Description of Artificial Sequence: Synthetic oligonucleotide
  Antisense strand to SEQ ID NO: 1899176
uuucuuccaaggcucaggu

SEQ ID NO: 1899178 - RNA, 19 nt, Artificial Sequence
  Description of Artificial Sequence: Synthetic oligonucleotide
  Sense strand starting at position 3312 of SEQ ID NO: 1879330
gcguaaguaacucugucuu

SEQ ID NO: 1899179 - RNA, 19 nt, Artificial Sequence
  Description of Artificial Sequence: Synthetic oligonucleotide
  Antisense strand to SEQ ID NO: 1899178
aagacagaguuacuuacgc

SEQ ID NO: 1899180 - RNA, 19 nt, Artificial Sequence
  Description of Artificial Sequence: Synthetic oligonucleotide
  Sense strand starting at position 3413 of SEQ ID NO: 1879330
ucauuuggcucugcacuua

SEQ ID NO: 1899181 - RNA, 19 nt, Artificial Sequence
  Description of Artificial Sequence: Synthetic oligonucleotide
  Antisense strand to SEQ ID NO: 1899180
uaagugcagagccaaauga

SEQ ID NO: 1899182 - RNA, 19 nt, Artificial Sequence
  Description of Artificial Sequence: Synthetic oligonucleotide
  Sense strand starting at position 3425 of SEQ ID NO: 1879330
gcacuuacccucugcauga

SEQ ID NO: 1899183 - RNA, 19 nt, Artificial Sequence
  Description of Artificial Sequence: Synthetic oligonucleotide
  Antisense strand to SEQ ID NO: 1899182
ucaugcagaggguaagugc

SEQ ID NO: 1899184 - RNA, 19 nt, Artificial Sequence
  Description of Artificial Sequence: Synthetic oligonucleotide
  Sense strand starting at position 3442 of SEQ ID NO: 1879330
gaguccaguugagauaaga

SEQ ID NO: 1899185 - RNA, 19 nt, Artificial Sequence
  Description of Artificial Sequence: Synthetic oligonucleotide
  Antisense strand to SEQ ID NO: 1899184
ucuuaucucaacuggacuc

SEQ ID NO: 1899186 - RNA, 19 nt, Artificial Sequence
  Description of Artificial Sequence: Synthetic oligonucleotide
  Sense strand starting at position 3473 of SEQ ID NO: 1879330
ggaaguaauuaggcggacu

SEQ ID NO: 1899187 - RNA, 19 nt, Artificial Sequence
  Description of Artificial Sequence: Synthetic oligonucleotide
  Antisense strand to SEQ ID NO: 1899186
aguccgccuaauuacuucc

SEQ ID NO: 1899188 - RNA, 19 nt, Artificial Sequence
  Description of Artificial Sequence: Synthetic oligonucleotide
  Sense strand starting at position 3499 of SEQ ID NO: 1879330
augggucaaguuugagaaa

SEQ ID NO: 1899189 - RNA, 19 nt, Artificial Sequence
  Description of Artificial Sequence: Synthetic oligonucleotide
  Antisense strand to SEQ ID NO: 1899188
uuucucaaacuugacccau

SEQ ID NO: 1899190 - RNA, 19 nt, Artificial Sequence
  Description of Artificial Sequence: Synthetic oligonucleotide
  Sense strand starting at position 3598 of SEQ ID NO: 1879330
gucucucguccaggucaga

SEQ ID NO: 1899191 - RNA, 19 nt, Artificial Sequence
  Description of Artificial Sequence: Synthetic oligonucleotide
  Antisense strand to SEQ ID NO: 1899190
ucugaccuggacgagagac

SEQ ID NO: 1899192 - RNA, 19 nt, Artificial Sequence
  Description of Artificial Sequence: Synthetic oligonucleotide
  Sense strand starting at position 3863 of SEQ ID NO: 1879330
gccuguuucugcucuuuaa

SEQ ID NO: 1899193 - RNA, 19 nt, Artificial Sequence
  Description of Artificial Sequence: Synthetic oligonucleotide
  Antisense strand to SEQ ID NO: 1899192
uuaaagagcagaaacaggc

SEQ ID NO: 1899194 - RNA, 19 nt, Artificial Sequence
  Description of Artificial Sequence: Synthetic oligonucleotide
  Sense strand starting at position 3927 of SEQ ID NO: 1879330
cuguuucuguuucuuguua

SEQ ID NO: 1899195 - RNA, 19 nt, Artificial Sequence
  Description of Artificial Sequence: Synthetic oligonucleotide
  Antisense strand to SEQ ID NO: 1899194
uaacaagaaacagaaacag

SEQ ID NO: 1899196 - RNA, 19 nt, Artificial Sequence
  Description of Artificial Sequence: Synthetic oligonucleotide
  Sense strand starting at position 145 of SEQ ID NO: 1879332
uguuucuugcaguagucua

SEQ ID NO: 1899197 - RNA, 19 nt, Artificial Sequence
  Description of Artificial Sequence: Synthetic oligonucleotide
  Antisense strand to SEQ ID NO: 1899196
uagacuacugcaagaaaca

SEQ ID NO: 1899198 - RNA, 19 nt, Artificial Sequence
  Description of Artificial Sequence: Synthetic oligonucleotide
  Sense strand starting at position 150 of SEQ ID NO: 1879332
cuugcaguagucuauacau

SEQ ID NO: 1899199 - RNA, 19 nt, Artificial Sequence
  Description of Artificial Sequence: Synthetic oligonucleotide
  Antisense strand to SEQ ID NO: 1899198
auguauagacuacugcaag

SEQ ID NO: 1899200 - RNA, 19 nt, Artificial Sequence
  Description of Artificial Sequence: Synthetic oligonucleotide
  Sense strand starting at position 189 of SEQ ID NO: 1879332
cugcccuguccuuagcaaa

SEQ ID NO: 1899201 - RNA, 19 nt, Artificial Sequence
  Description of Artificial Sequence: Synthetic oligonucleotide
  Antisense strand to SEQ ID NO: 1899200
uuugcuaaggacagggcag

SEQ ID NO: 1899202 - RNA, 19 nt, Artificial Sequence
  Description of Artificial Sequence: Synthetic oligonucleotide
  Sense strand starting at position 219 of SEQ ID NO: 1879332
gcuggagaugcauauuacu

SEQ ID NO: 1899203 - RNA, 19 nt, Artificial Sequence
  Description of Artificial Sequence: Synthetic oligonucleotide
  Antisense strand to SEQ ID NO: 1899202
aguaauaugcaucuccagc

SEQ ID NO: 1899204 - RNA, 19 nt, Artificial Sequence
  Description of Artificial Sequence: Synthetic oligonucleotide
  Sense strand starting at position 371 of SEQ ID NO: 1879332
guagaaaccacguguaaua

SEQ ID NO: 1899205 - RNA, 19 nt, Artificial Sequence
  Description of Artificial Sequence: Synthetic oligonucleotide
  Antisense strand to SEQ ID NO: 1899204
uauuacacgugguuucuac

SEQ ID NO: 1899206 - RNA, 19 nt, Artificial Sequence
  Description of Artificial Sequence: Synthetic oligonucleotide
  Sense strand starting at position 1025 of SEQ ID NO: 1879332
aaggcaggcucuuaacaga

SEQ ID NO: 1899207 - RNA, 19 nt, Artificial Sequence
  Description of Artificial Sequence: Synthetic oligonucleotide
  Antisense strand to SEQ ID NO: 1899206
ucuguuaagagccugccuu

SEQ ID NO: 1899208 - RNA, 19 nt, Artificial Sequence
  Description of Artificial Sequence: Synthetic oligonucleotide
  Sense strand starting at position 1335 of SEQ ID NO: 1879332
gaggcuuacucccugagaa

SEQ ID NO: 1899209 - RNA, 19 nt, Artificial Sequence
  Description of Artificial Sequence: Synthetic oligonucleotide
  Antisense strand to SEQ ID NO: 1899208
uucucagggaguaagccuc

SEQ ID NO: 1899210 - RNA, 19 nt, Artificial Sequence
  Description of Artificial Sequence: Synthetic oligonucleotide
  Sense strand starting at position 1336 of SEQ ID NO: 1879332
aggcuuacucccugagaau

SEQ ID NO: 1899211 - RNA, 19 nt, Artificial Sequence
  Description of Artificial Sequence: Synthetic oligonucleotide
  Antisense strand to SEQ ID NO: 1899210
auucucagggaguaagccu

SEQ ID NO: 1899212 - RNA, 19 nt, Artificial Sequence
  Description of Artificial Sequence: Synthetic oligonucleotide
  Sense strand starting at position 1337 of SEQ ID NO: 1879332
ggcuuacucccugagaauu

SEQ ID NO: 1899213 - RNA, 19 nt, Artificial Sequence
  Description of Artificial Sequence: Synthetic oligonucleotide
  Antisense strand to SEQ ID NO: 1899212
aauucucagggaguaagcc

SEQ ID NO: 1899214 - RNA, 19 nt, Artificial Sequence
  Description of Artificial Sequence: Synthetic oligonucleotide
  Sense strand starting at position 1421 of SEQ ID NO: 1879332
gguccugaguccuagguca

SEQ ID NO: 1899215 - RNA, 19 nt, Artificial Sequence
  Description of Artificial Sequence: Synthetic oligonucleotide
  Antisense strand to SEQ ID NO: 1899214
ugaccuaggacucaggacc

SEQ ID NO: 1899216 - RNA, 19 nt, Artificial Sequence
  Description of Artificial Sequence: Synthetic oligonucleotide
  Sense strand starting at position 1423 of SEQ ID NO: 1879332
uccugaguccuaggucacu

SEQ ID NO: 1899217 - RNA, 19 nt, Artificial Sequence
  Description of Artificial Sequence: Synthetic oligonucleotide
  Antisense strand to SEQ ID NO: 1899216
agugaccuaggacucagga

SEQ ID NO: 1899218 - RNA, 19 nt, Artificial Sequence
  Description of Artificial Sequence: Synthetic oligonucleotide
  Sense strand starting at position 2375 of SEQ ID NO: 1879332
gcccuuggucaugaauauu

SEQ ID NO: 1899219 - RNA, 19 nt, Artificial Sequence
  Description of Artificial Sequence: Synthetic oligonucleotide
  Antisense strand to SEQ ID NO: 1899218
aauauucaugaccaagggc

SEQ ID NO: 1899220 - RNA, 19 nt, Artificial Sequence
  Description of Artificial Sequence: Synthetic oligonucleotide
  Sense strand starting at position 2502 of SEQ ID NO: 1879332
acgaguuucgcguccugaa

SEQ ID NO: 1899221 - RNA, 19 nt, Artificial Sequence
  Description of Artificial Sequence: Synthetic oligonucleotide
  Antisense strand to SEQ ID NO: 1899220
uucaggacgcgaaacucgu

SEQ ID NO: 1899222 - RNA, 19 nt, Artificial Sequence
  Description of Artificial Sequence: Synthetic oligonucleotide
  Sense strand starting at position 2503 of SEQ ID NO: 1879332
cgaguuucgcguccugaaa

SEQ ID NO: 1899223 - RNA, 19 nt, Artificial Sequence
  Description of Artificial Sequence: Synthetic oligonucleotide
  Antisense strand to SEQ ID NO: 1899222
uuucaggacgcgaaacucg

SEQ ID NO: 1899224 - RNA, 19 nt, Artificial Sequence
  Description of Artificial Sequence: Synthetic oligonucleotide
  Sense strand starting at position 2514 of SEQ ID NO: 1879332
uccugaaauuccgcuucca

SEQ ID NO: 1899225 - RNA, 19 nt, Artificial Sequence
  Description of Artificial Sequence: Synthetic oligonucleotide
  Antisense strand to SEQ ID NO: 1899224
uggaagcggaauuucagga

SEQ ID NO: 1899226 - RNA, 19 nt, Artificial Sequence
  Description of Artificial Sequence: Synthetic oligonucleotide
  Sense strand starting at position 2554 of SEQ ID NO: 1879332
uacuguuugucccucgcga

SEQ ID NO: 1899227 - RNA, 19 nt, Artificial Sequence
  Description of Artificial Sequence: Synthetic oligonucleotide
  Antisense strand to SEQ ID NO: 1899226
ucgcgagggacaaacagua

SEQ ID NO: 1899228 - RNA, 19 nt, Artificial Sequence
  Description of Artificial Sequence: Synthetic oligonucleotide
  Sense strand starting at position 2841 of SEQ ID NO: 1879332
gaccgugaggcgcagauuu

SEQ ID NO: 1899229 - RNA, 19 nt, Artificial Sequence
  Description of Artificial Sequence: Synthetic oligonucleotide
  Antisense strand to SEQ ID NO: 1899228
aaaucugcgccucacgguc

SEQ ID NO: 1899230 - RNA, 19 nt, Artificial Sequence
  Description of Artificial Sequence: Synthetic oligonucleotide
  Sense strand starting at position 2852 of SEQ ID NO: 1879332
gcagauuugagccgcuguu

SEQ ID NO: 1899231 - RNA, 19 nt, Artificial Sequence
  Description of Artificial Sequence: Synthetic oligonucleotide
  Antisense strand to SEQ ID NO: 1899230
aacagcggcucaaaucugc

SEQ ID NO: 1899232 - RNA, 19 nt, Artificial Sequence
  Description of Artificial Sequence: Synthetic oligonucleotide
  Sense strand starting at position 2870 of SEQ ID NO: 1879332
ugagaugauuccuuuccgu

SEQ ID NO: 1899233 - RNA, 19 nt, Artificial Sequence
  Description of Artificial Sequence: Synthetic oligonucleotide
  Antisense strand to SEQ ID NO: 1899232
acggaaaggaaucaucuca

SEQ ID NO: 1899234 - RNA, 19 nt, Artificial Sequence
  Description of Artificial Sequence: Synthetic oligonucleotide
  Sense strand starting at position 2945 of SEQ ID NO: 1879332
gguugcuguguccacauaa

SEQ ID NO: 1899235 - RNA, 19 nt, Artificial Sequence
  Description of Artificial Sequence: Synthetic oligonucleotide
  Antisense strand to SEQ ID NO: 1899234
uuauguggacacagcaacc

SEQ ID NO: 1899236 - RNA, 19 nt, Artificial Sequence
  Description of Artificial Sequence: Synthetic oligonucleotide
  Sense strand starting at position 3117 of SEQ ID NO: 1879332
ggcguuuggucuccauuca

SEQ ID NO: 1899237 - RNA, 19 nt, Artificial Sequence
  Description of Artificial Sequence: Synthetic oligonucleotide
  Antisense strand to SEQ ID NO: 1899236
ugaauggagaccaaacgcc

SEQ ID NO: 1899238 - RNA, 19 nt, Artificial Sequence
  Description of Artificial Sequence: Synthetic oligonucleotide
  Sense strand starting at position 3136 of SEQ ID NO: 1879332
gcuagagggccuugaaauc

SEQ ID NO: 1899239 - RNA, 19 nt, Artificial Sequence
  Description of Artificial Sequence: Synthetic oligonucleotide
  Antisense strand to SEQ ID NO: 1899238
gauuucaaggcccucuagc

SEQ ID NO: 1899240 - RNA, 19 nt, Artificial Sequence
  Description of Artificial Sequence: Synthetic oligonucleotide
  Sense strand starting at position 3231 of SEQ ID NO: 1879332
cgcugaugugcuugugaug

SEQ ID NO: 1899241 - RNA, 19 nt, Artificial Sequence
  Description of Artificial Sequence: Synthetic oligonucleotide
  Antisense strand to SEQ ID NO: 1899240
caucacaagcacaucagcg

SEQ ID NO: 1899242 - RNA, 19 nt, Artificial Sequence
  Description of Artificial Sequence: Synthetic oligonucleotide
  Sense strand starting at position 3278 of SEQ ID NO: 1879332
aggccucaucauugucaaa

SEQ ID NO: 1899243 - RNA, 19 nt, Artificial Sequence
  Description of Artificial Sequence: Synthetic oligonucleotide
  Antisense strand to SEQ ID NO: 1899242
uuugacaaugaugaggccu

SEQ ID NO: 1899244 - RNA, 19 nt, Artificial Sequence
  Description of Artificial Sequence: Synthetic oligonucleotide
  Sense strand starting at position 3369 of SEQ ID NO: 1879332
cuuccucuggccuggagaa

SEQ ID NO: 1899245 - RNA, 19 nt, Artificial Sequence
  Description of Artificial Sequence: Synthetic oligonucleotide
  Antisense strand to SEQ ID NO: 1899244
uucuccaggccagaggaag

SEQ ID NO: 1899246 - RNA, 19 nt, Artificial Sequence
  Description of Artificial Sequence: Synthetic oligonucleotide
  Sense strand starting at position 3370 of SEQ ID NO: 1879332
uuccucuggccuggagaaa

SEQ ID NO: 1899247 - RNA, 19 nt, Artificial Sequence
  Description of Artificial Sequence: Synthetic oligonucleotide
  Antisense strand to SEQ ID NO: 1899246
uuucuccaggccagaggaa

SEQ ID NO: 1899248 - RNA, 19 nt, Artificial Sequence
  Description of Artificial Sequence: Synthetic oligonucleotide
  Sense strand starting at position 3371 of SEQ ID NO: 1879332
uccucuggccuggagaaau

SEQ ID NO: 1899249 - RNA, 19 nt, Artificial Sequence
  Description of Artificial Sequence: Synthetic oligonucleotide
  Antisense strand to SEQ ID NO: 1899248
auuucuccaggccagagga

SEQ ID NO: 1899250 - RNA, 19 nt, Artificial Sequence
  Description of Artificial Sequence: Synthetic oligonucleotide
  Sense strand starting at position 3421 of SEQ ID NO: 1879332
guguucucaaacugggaaa

SEQ ID NO: 1899251 - RNA, 19 nt, Artificial Sequence
  Description of Artificial Sequence: Synthetic oligonucleotide
  Antisense strand to SEQ ID NO: 1899250
uuucccaguuugagaacac

SEQ ID NO: 1899252 - RNA, 19 nt, Artificial Sequence
  Description of Artificial Sequence: Synthetic oligonucleotide
  Sense strand starting at position 3535 of SEQ ID NO: 1879332
ccaguaugcuugcucucuu

SEQ ID NO: 1899253 - RNA, 19 nt, Artificial Sequence
  Description of Artificial Sequence: Synthetic oligonucleotide
  Antisense strand to SEQ ID NO: 1899252
aagagagcaagcauacugg

SEQ ID NO: 1899254 - RNA, 19 nt, Artificial Sequence
  Description of Artificial Sequence: Synthetic oligonucleotide
  Sense strand starting at position 3538 of SEQ ID NO: 1879332
guaugcuugcucucuucuu

SEQ ID NO: 1899255 - RNA, 19 nt, Artificial Sequence
  Description of Artificial Sequence: Synthetic oligonucleotide
  Antisense strand to SEQ ID NO: 1899254
aagaagagagcaagcauac

SEQ ID NO: 1899256 - RNA, 19 nt, Artificial Sequence
  Description of Artificial Sequence: Synthetic oligonucleotide
  Sense strand starting at position 3577 of SEQ ID NO: 1879332
uggagccaguccugaguua

SEQ ID NO: 1899257 - RNA, 19 nt, Artificial Sequence
  Description of Artificial Sequence: Synthetic oligonucleotide
  Antisense strand to SEQ ID NO: 1899256
uaacucaggacuggcucca

SEQ ID NO: 1899258 - RNA, 19 nt, Artificial Sequence
  Description of Artificial Sequence: Synthetic oligonucleotide
  Sense strand starting at position 3622 of SEQ ID NO: 1879332
ccaccugagccuuggaaga

SEQ ID NO: 1899259 - RNA, 19 nt, Artificial Sequence
  Description of Artificial Sequence: Synthetic oligonucleotide
  Antisense strand to SEQ ID NO: 1899258
ucuuccaaggcucaggugg

SEQ ID NO: 1899260 - RNA, 19 nt, Artificial Sequence
  Description of Artificial Sequence: Synthetic oligonucleotide
  Sense strand starting at position 3624 of SEQ ID NO: 1879332
accugagccuuggaagaaa

SEQ ID NO: 1899261 - RNA, 19 nt, Artificial Sequence
  Description of Artificial Sequence: Synthetic oligonucleotide
  Antisense strand to SEQ ID NO: 1899260
uuucuuccaaggcucaggu

SEQ ID NO: 1899262 - RNA, 19 nt, Artificial Sequence
  Description of Artificial Sequence: Synthetic oligonucleotide
  Sense strand starting at position 3643 of SEQ ID NO: 1879332
gcguaaguaacucugucuu

SEQ ID NO: 1899263 - RNA, 19 nt, Artificial Sequence
  Description of Artificial Sequence: Synthetic oligonucleotide
  Antisense strand to SEQ ID NO: 1899262
aagacagaguuacuuacgc

SEQ ID NO: 1899264 - RNA, 19 nt, Artificial Sequence
  Description of Artificial Sequence: Synthetic oligonucleotide
  Sense strand starting at position 3744 of SEQ ID NO: 1879332
ucauuuggcucugcacuua

SEQ ID NO: 1899265 - RNA, 19 nt, Artificial Sequence
  Description of Artificial Sequence: Synthetic oligonucleotide
  Antisense strand to SEQ ID NO: 1899264
uaagugcagagccaaauga

SEQ ID NO: 1899266 - RNA, 19 nt, Artificial Sequence
  Description of Artificial Sequence: Synthetic oligonucleotide
  Sense strand starting at position 3756 of SEQ ID NO: 1879332
gcacuuacccucugcauga

SEQ ID NO: 1899267 - RNA, 19 nt, Artificial Sequence
  Description of Artificial Sequence: Synthetic oligonucleotide
  Antisense strand to SEQ ID NO: 1899266
ucaugcagaggguaagugc

SEQ ID NO: 1899268 - RNA, 19 nt, Artificial Sequence
  Description of Artificial Sequence: Synthetic oligonucleotide
  Sense strand starting at position 3773 of SEQ ID NO: 1879332
gaguccaguugagauaaga

SEQ ID NO: 1899269 - RNA, 19 nt, Artificial Sequence
  Description of Artificial Sequence: Synthetic oligonucleotide
  Antisense strand to SEQ ID NO: 1899268
ucuuaucucaacuggacuc

SEQ ID NO: 1899270 - RNA, 19 nt, Artificial Sequence
  Description of Artificial Sequence: Synthetic oligonucleotide
  Sense strand starting at position 3804 of SEQ ID NO: 1879332
ggaaguaauuaggcggacu

SEQ ID NO: 1899271 - RNA, 19 nt, Artificial Sequence
  Description of Artificial Sequence: Synthetic oligonucleotide
  Antisense strand to SEQ ID NO: 1899270
aguccgccuaauuacuucc

SEQ ID NO: 1899272 - RNA, 19 nt, Artificial Sequence
  Description of Artificial Sequence: Synthetic oligonucleotide
  Sense strand starting at position 3830 of SEQ ID NO: 1879332
augggucaaguuugagaaa

SEQ ID NO: 1899273 - RNA, 19 nt, Artificial Sequence
  Description of Artificial Sequence: Synthetic oligonucleotide
  Antisense strand to SEQ ID NO: 1899272
uuucucaaacuugacccau

SEQ ID NO: 1899274 - RNA, 19 nt, Artificial Sequence
  Description of Artificial Sequence: Synthetic oligonucleotide
  Sense strand starting at position 3929 of SEQ ID NO: 1879332
gucucucguccaggucaga

SEQ ID NO: 1899275 - RNA, 19 nt, Artificial Sequence
  Description of Artificial Sequence: Synthetic oligonucleotide
  Antisense strand to SEQ ID NO: 1899274
ucugaccuggacgagagac

SEQ ID NO: 1899276 - RNA, 19 nt, Artificial Sequence
  Description of Artificial Sequence: Synthetic oligonucleotide
  Sense strand starting at position 35 of SEQ ID NO: 1879331
cugcccuguccuuagcaaa

SEQ ID NO: 1899277 - RNA, 19 nt, Artificial Sequence
  Description of Artificial Sequence: Synthetic oligonucleotide
  Antisense strand to SEQ ID NO: 1899276
uuugcuaaggacagggcag

SEQ ID NO: 1899278 - RNA, 19 nt, Artificial Sequence
  Description of Artificial Sequence: Synthetic oligonucleotide
  Sense strand starting at position 65 of SEQ ID NO: 1879331
gcuggagaugcauauuacu

SEQ ID NO: 1899279 - RNA, 19 nt, Artificial Sequence
  Description of Artificial Sequence: Synthetic oligonucleotide
  Antisense strand to SEQ ID NO: 1899278
aguaauaugcaucuccagc

SEQ ID NO: 1899280 - RNA, 19 nt, Artificial Sequence
  Description of Artificial Sequence: Synthetic oligonucleotide
  Sense strand starting at position 217 of SEQ ID NO: 1879331
guagaaaccacguguaaua

SEQ ID NO: 1899281 - RNA, 19 nt, Artificial Sequence
  Description of Artificial Sequence: Synthetic oligonucleotide
  Antisense strand to SEQ ID NO: 1899280
uauuacacgugguuucuac

SEQ ID NO: 1899282 - RNA, 19 nt, Artificial Sequence
  Description of Artificial Sequence: Synthetic oligonucleotide
  Sense strand starting at position 871 of SEQ ID NO: 1879331
aaggcaggcucuuaacaga

SEQ ID NO: 1899283 - RNA, 19 nt, Artificial Sequence
  Description of Artificial Sequence: Synthetic oligonucleotide
  Antisense strand to SEQ ID NO: 1899282
ucuguuaagagccugccuu

SEQ ID NO: 1899284 - RNA, 19 nt, Artificial Sequence
  Description of Artificial Sequence: Synthetic oligonucleotide
  Sense strand starting at position 1181 of SEQ ID NO: 1879331
gaggcuuacucccugagaa

SEQ ID NO: 1899285 - RNA, 19 nt, Artificial Sequence
  Description of Artificial Sequence: Synthetic oligonucleotide
  Antisense strand to SEQ ID NO: 1899284
uucucagggaguaagccuc

SEQ ID NO: 1899286 - RNA, 19 nt, Artificial Sequence
  Description of Artificial Sequence: Synthetic oligonucleotide
  Sense strand starting at position 1182 of SEQ ID NO: 1879331
aggcuuacucccugagaau

SEQ ID NO: 1899287 - RNA, 19 nt, Artificial Sequence
  Description of Artificial Sequence: Synthetic oligonucleotide
  Antisense strand to SEQ ID NO: 1899286
auucucagggaguaagccu

SEQ ID NO: 1899288 - RNA, 19 nt, Artificial Sequence
  Description of Artificial Sequence: Synthetic oligonucleotide
  Sense strand starting at position 1183 of SEQ ID NO: 1879331
ggcuuacucccugagaauu

SEQ ID NO: 1899289 - RNA, 19 nt, Artificial Sequence
  Description of Artificial Sequence: Synthetic oligonucleotide
  Antisense strand to SEQ ID NO: 1899288
aauucucagggaguaagcc

SEQ ID NO: 1899290 - RNA, 19 nt, Artificial Sequence
  Description of Artificial Sequence: Synthetic oligonucleotide
  Sense strand starting at position 1267 of SEQ ID NO: 1879331
gguccugaguccuagguca

SEQ ID NO: 1899291 - RNA, 19 nt, Artificial Sequence
  Description of Artificial Sequence: Synthetic oligonucleotide
  Antisense strand to SEQ ID NO: 1899290
ugaccuaggacucaggacc

SEQ ID NO: 1899292 - RNA, 19 nt, Artificial Sequence
  Description of Artificial Sequence: Synthetic oligonucleotide
  Sense strand starting at position 1269 of SEQ ID NO: 1879331
uccugaguccuaggucacu

SEQ ID NO: 1899293 - RNA, 19 nt, Artificial Sequence
  Description of Artificial Sequence: Synthetic oligonucleotide
  Antisense strand to SEQ ID NO: 1899292
agugaccuaggacucagga

SEQ ID NO: 1899294 - RNA, 19 nt, Artificial Sequence
  Description of Artificial Sequence: Synthetic oligonucleotide
  Sense strand starting at position 2221 of SEQ ID NO: 1879331
gcccuuggucaugaauauu

SEQ ID NO: 1899295 - RNA, 19 nt, Artificial Sequence
  Description of Artificial Sequence: Synthetic oligonucleotide
  Antisense strand to SEQ ID NO: 1899294
aauauucaugaccaagggc

SEQ ID NO: 1899296 - RNA, 19 nt, Artificial Sequence
  Description of Artificial Sequence: Synthetic oligonucleotide
  Sense strand starting at position 2348 of SEQ ID NO: 1879331
acgaguuucgcguccugaa

SEQ ID NO: 1899297 - RNA, 19 nt, Artificial Sequence
  Description of Artificial Sequence: Synthetic oligonucleotide
  Antisense strand to SEQ ID NO: 1899296
uucaggacgcgaaacucgu

SEQ ID NO: 1899298 - RNA, 19 nt, Artificial Sequence
  Description of Artificial Sequence: Synthetic oligonucleotide
  Sense strand starting at position 2349 of SEQ ID NO: 1879331
cgaguuucgcguccugaaa

SEQ ID NO: 1899299 - RNA, 19 nt, Artificial Sequence
  Description of Artificial Sequence: Synthetic oligonucleotide
  Antisense strand to SEQ ID NO: 1899298
uuucaggacgcgaaacucg

SEQ ID NO: 1899300 - RNA, 19 nt, Artificial Sequence
  Description of Artificial Sequence: Synthetic oligonucleotide
  Sense strand starting at position 2360 of SEQ ID NO: 1879331
uccugaaauuccgcuucca

SEQ ID NO: 1899301 - RNA, 19 nt, Artificial Sequence
  Description of Artificial Sequence: Synthetic oligonucleotide
  Antisense strand to SEQ ID NO: 1899300
uggaagcggaauuucagga

SEQ ID NO: 1899302 - RNA, 19 nt, Artificial Sequence
  Description of Artificial Sequence: Synthetic oligonucleotide
  Sense strand starting at position 2400 of SEQ ID NO: 1879331
uacuguuugucccucgcga

SEQ ID NO: 1899303 - RNA, 19 nt, Artificial Sequence
  Description of Artificial Sequence: Synthetic oligonucleotide
  Antisense strand to SEQ ID NO: 1899302
ucgcgagggacaaacagua

SEQ ID NO: 1899304 - RNA, 19 nt, Artificial Sequence
  Description of Artificial Sequence: Synthetic oligonucleotide
  Sense strand starting at position 2687 of SEQ ID NO: 1879331
gaccgugaggcgcagauuu

SEQ ID NO: 1899305 - RNA, 19 nt, Artificial Sequence
  Description of Artificial Sequence: Synthetic oligonucleotide
  Antisense strand to SEQ ID NO: 1899304
aaaucugcgccucacgguc

SEQ ID NO: 1899306 - RNA, 19 nt, Artificial Sequence
  Description of Artificial Sequence: Synthetic oligonucleotide
  Sense strand starting at position 2698 of SEQ ID NO: 1879331
gcagauuugagccgcuguu

SEQ ID NO: 1899307 - RNA, 19 nt, Artificial Sequence
  Description of Artificial Sequence: Synthetic oligonucleotide
  Antisense strand to SEQ ID NO: 1899306
aacagcggcucaaaucugc

SEQ ID NO: 1899308 - RNA, 19 nt, Artificial Sequence
  Description of Artificial Sequence: Synthetic oligonucleotide
  Sense strand starting at position 2707 of SEQ ID NO: 1879331
agccgcuguugagaugauu

SEQ ID NO: 1899309 - RNA, 19 nt, Artificial Sequence
  Description of Artificial Sequence: Synthetic oligonucleotide
  Antisense strand to SEQ ID NO: 1899308
aaucaucucaacagcggcu

SEQ ID NO: 1899310 - RNA, 19 nt, Artificial Sequence
  Description of Artificial Sequence: Synthetic oligonucleotide
  Sense strand starting at position 2716 of SEQ ID NO: 1879331
ugagaugauuccuuuccgu

SEQ ID NO: 1899311 - RNA, 19 nt, Artificial Sequence
  Description of Artificial Sequence: Synthetic oligonucleotide
  Antisense strand to SEQ ID NO: 1899310
acggaaaggaaucaucuca

SEQ ID NO: 1899312 - RNA, 19 nt, Artificial Sequence
  Description of Artificial Sequence: Synthetic oligonucleotide
  Sense strand starting at position 2791 of SEQ ID NO: 1879331
gguugcuguguccacauaa

SEQ ID NO: 1899313 - RNA, 19 nt, Artificial Sequence
  Description of Artificial Sequence: Synthetic oligonucleotide
  Antisense strand to SEQ ID NO: 1899312
uuauguggacacagcaacc

SEQ ID NO: 1899314 - RNA, 19 nt, Artificial Sequence
  Description of Artificial Sequence: Synthetic oligonucleotide
  Sense strand starting at position 2963 of SEQ ID NO: 1879331
ggcguuuggucuccauuca

SEQ ID NO: 1899315 - RNA, 19 nt, Artificial Sequence
  Description of Artificial Sequence: Synthetic oligonucleotide
  Antisense strand to SEQ ID NO: 1899314
ugaauggagaccaaacgcc

SEQ ID NO: 1899316 - RNA, 19 nt, Artificial Sequence
  Description of Artificial Sequence: Synthetic oligonucleotide
  Sense strand starting at position 2982 of SEQ ID NO: 1879331
gcuagagggccuugaaauc

SEQ ID NO: 1899317 - RNA, 19 nt, Artificial Sequence
  Description of Artificial Sequence: Synthetic oligonucleotide
  Antisense strand to SEQ ID NO: 1899316
gauuucaaggcccucuagc

SEQ ID NO: 1899318 - RNA, 19 nt, Artificial Sequence
  Description of Artificial Sequence: Synthetic oligonucleotide
  Sense strand starting at position 3053 of SEQ ID NO: 1879331
ccucaucgaucacguacau

SEQ ID NO: 1899319 - RNA, 19 nt, Artificial Sequence
  Description of Artificial Sequence: Synthetic oligonucleotide
  Antisense strand to SEQ ID NO: 1899318
auguacgugaucgaugagg

SEQ ID NO: 1899320 - RNA, 19 nt, Artificial Sequence
  Description of Artificial Sequence: Synthetic oligonucleotide
  Sense strand starting at position 3077 of SEQ ID NO: 1879331
cgcugaugugcuugugaug

SEQ ID NO: 1899321 - RNA, 19 nt, Artificial Sequence
  Description of Artificial Sequence: Synthetic oligonucleotide
  Antisense strand to SEQ ID NO: 1899320
caucacaagcacaucagcg

SEQ ID NO: 1899322 - RNA, 19 nt, Artificial Sequence
  Description of Artificial Sequence: Synthetic oligonucleotide
  Sense strand starting at position 3124 of SEQ ID NO: 1879331
aggccucaucauugucaaa

SEQ ID NO: 1899323 - RNA, 19 nt, Artificial Sequence
  Description of Artificial Sequence: Synthetic oligonucleotide
  Antisense strand to SEQ ID NO: 1899322
uuugacaaugaugaggccu

SEQ ID NO: 1899324 - RNA, 19 nt, Artificial Sequence
  Description of Artificial Sequence: Synthetic oligonucleotide
  Sense strand starting at position 3215 of SEQ ID NO: 1879331
cuuccucuggccuggagaa

SEQ ID NO: 1899325 - RNA, 19 nt, Artificial Sequence
  Description of Artificial Sequence: Synthetic oligonucleotide
  Antisense strand to SEQ ID NO: 1899324
uucuccaggccagaggaag

SEQ ID NO: 1899326 - RNA, 19 nt, Artificial Sequence
  Description of Artificial Sequence: Synthetic oligonucleotide
  Sense strand starting at position 3216 of SEQ ID NO: 1879331
uuccucuggccuggagaaa

SEQ ID NO: 1899327 - RNA, 19 nt, Artificial Sequence
  Description of Artificial Sequence: Synthetic oligonucleotide
  Antisense strand to SEQ ID NO: 1899326
uuucuccaggccagaggaa

SEQ ID NO: 1899328 - RNA, 19 nt, Artificial Sequence
  Description of Artificial Sequence: Synthetic oligonucleotide
  Sense strand starting at position 3217 of SEQ ID NO: 1879331
uccucuggccuggagaaau

SEQ ID NO: 1899329 - RNA, 19 nt, Artificial Sequence
  Description of Artificial Sequence: Synthetic oligonucleotide
  Antisense strand to SEQ ID NO: 1899328
auuucuccaggccagagga

SEQ ID NO: 1899330 - RNA, 19 nt, Artificial Sequence
  Description of Artificial Sequence: Synthetic oligonucleotide
  Sense strand starting at position 3267 of SEQ ID NO: 1879331
guguucucaaacugggaaa

SEQ ID NO: 1899331 - RNA, 19 nt, Artificial Sequence
  Description of Artificial Sequence: Synthetic oligonucleotide
  Antisense strand to SEQ ID NO: 1899330
uuucccaguuugagaacac

SEQ ID NO: 1899332 - RNA, 19 nt, Artificial Sequence
  Description of Artificial Sequence: Synthetic oligonucleotide
  Sense strand starting at position 3381 of SEQ ID NO: 1879331
ccaguaugcuugcucucuu

SEQ ID NO: 1899333 - RNA, 19 nt, Artificial Sequence
  Description of Artificial Sequence: Synthetic oligonucleotide
  Antisense strand to SEQ ID NO: 1899332
aagagagcaagcauacugg

SEQ ID NO: 1899334 - RNA, 19 nt, Artificial Sequence
  Description of Artificial Sequence: Synthetic oligonucleotide
  Sense strand starting at position 3384 of SEQ ID NO: 1879331
guaugcuugcucucuucuu

SEQ ID NO: 1899335 - RNA, 19 nt, Artificial Sequence
  Description of Artificial Sequence: Synthetic oligonucleotide
  Antisense strand to SEQ ID NO: 1899334
aagaagagagcaagcauac

SEQ ID NO: 1899336 - RNA, 19 nt, Artificial Sequence
  Description of Artificial Sequence: Synthetic oligonucleotide
  Sense strand starting at position 3423 of SEQ ID NO: 1879331
uggagccaguccugaguua

SEQ ID NO: 1899337 - RNA, 19 nt, Artificial Sequence
  Description of Artificial Sequence: Synthetic oligonucleotide
  Antisense strand to SEQ ID NO: 1899336
uaacucaggacuggcucca

SEQ ID NO: 1899338 - RNA, 19 nt, Artificial Sequence
  Description of Artificial Sequence: Synthetic oligonucleotide
  Sense strand starting at position 3468 of SEQ ID NO: 1879331
ccaccugagccuuggaaga

SEQ ID NO: 1899339 - RNA, 19 nt, Artificial Sequence
  Description of Artificial Sequence: Synthetic oligonucleotide
  Antisense strand to SEQ ID NO: 1899338
ucuuccaaggcucaggugg

SEQ ID NO: 1899340 - RNA, 19 nt, Artificial Sequence
  Description of Artificial Sequence: Synthetic oligonucleotide
  Sense strand starting at position 3470 of SEQ ID NO: 1879331
accugagccuuggaagaaa

SEQ ID NO: 1899341 - RNA, 19 nt, Artificial Sequence
  Description of Artificial Sequence: Synthetic oligonucleotide
  Antisense strand to SEQ ID NO: 1899340
uuucuuccaaggcucaggu

SEQ ID NO: 1899342 - RNA, 19 nt, Artificial Sequence
  Description of Artificial Sequence: Synthetic oligonucleotide
  Sense strand starting at position 3489 of SEQ ID NO: 1879331
gcguaaguaacucugucuu

SEQ ID NO: 1899343 - RNA, 19 nt, Artificial Sequence
  Description of Artificial Sequence: Synthetic oligonucleotide
  Antisense strand to SEQ ID NO: 1899342
aagacagaguuacuuacgc

SEQ ID NO: 1899344 - RNA, 19 nt, Artificial Sequence
  Description of Artificial Sequence: Synthetic oligonucleotide
  Sense strand starting at position 3590 of SEQ ID NO: 1879331
ucauuuggcucugcacuua

SEQ ID NO: 1899345 - RNA, 19 nt, Artificial Sequence
  Description of Artificial Sequence: Synthetic oligonucleotide
  Antisense strand to SEQ ID NO: 1899344
uaagugcagagccaaauga

SEQ ID NO: 1899346 - RNA, 19 nt, Artificial Sequence
  Description of Artificial Sequence: Synthetic oligonucleotide
  Sense strand starting at position 3602 of SEQ ID NO: 1879331
gcacuuacccucugcauga

SEQ ID NO: 1899347 - RNA, 19 nt, Artificial Sequence
  Description of Artificial Sequence: Synthetic oligonucleotide
  Antisense strand to SEQ ID NO: 1899346
ucaugcagaggguaagugc

SEQ ID NO: 1899348 - RNA, 19 nt, Artificial Sequence
  Description of Artificial Sequence: Synthetic oligonucleotide
  Sense strand starting at position 3619 of SEQ ID NO: 1879331
gaguccaguugagauaaga

SEQ ID NO: 1899349 - RNA, 19 nt, Artificial Sequence
  Description of Artificial Sequence: Synthetic oligonucleotide
  Antisense strand to SEQ ID NO: 1899348
ucuuaucucaacuggacuc

SEQ ID NO: 1899350 - RNA, 19 nt, Artificial Sequence
  Description of Artificial Sequence: Synthetic oligonucleotide
  Sense strand starting at position 3650 of SEQ ID NO: 1879331
ggaaguaauuaggcggacu

SEQ ID NO: 1899351 - RNA, 19 nt, Artificial Sequence
  Description of Artificial Sequence: Synthetic oligonucleotide
  Antisense strand to SEQ ID NO: 1899350
aguccgccuaauuacuucc

SEQ ID NO: 1899352 - RNA, 19 nt, Artificial Sequence
  Description of Artificial Sequence: Synthetic oligonucleotide
  Sense strand starting at position 3676 of SEQ ID NO: 1879331
augggucaaguuugagaaa

SEQ ID NO: 1899353 - RNA, 19 nt, Artificial Sequence
  Description of Artificial Sequence: Synthetic oligonucleotide
  Antisense strand to SEQ ID NO: 1899352
uuucucaaacuugacccau

SEQ ID NO: 1899354 - RNA, 19 nt, Artificial Sequence
  Description of Artificial Sequence: Synthetic oligonucleotide
  Sense strand starting at position 3775 of SEQ ID NO: 1879331
gucucucguccaggucaga

SEQ ID NO: 1899355 - RNA, 19 nt, Artificial Sequence
  Description of Artificial Sequence: Synthetic oligonucleotide
  Antisense strand to SEQ ID NO: 1899354
ucugaccuggacgagagac

SEQ ID NO: 1899356 - RNA, 19 nt, Artificial Sequence
  Description of Artificial Sequence: Synthetic oligonucleotide
  Sense strand starting at position 175 of SEQ ID NO: 1879333
agggccaaauccucuaauu

SEQ ID NO: 1899357 - RNA, 19 nt, Artificial Sequence
  Description of Artificial Sequence: Synthetic oligonucleotide
  Antisense strand to SEQ ID NO: 1899356
aauuagaggauuuggcccu

SEQ ID NO: 1899358 - RNA, 19 nt, Artificial Sequence
  Description of Artificial Sequence: Synthetic oligonucleotide
  Sense strand starting at position 236 of SEQ ID NO: 1879333
cuggaaguucuauaugcca

SEQ ID NO: 1899359 - RNA, 19 nt, Artificial Sequence
  Description of Artificial Sequence: Synthetic oligonucleotide
  Antisense strand to SEQ ID NO: 1899358
uggcauauagaacuuccag

SEQ ID NO: 1899360 - RNA, 19 nt, Artificial Sequence
  Description of Artificial Sequence: Synthetic oligonucleotide
  Sense strand starting at position 272 of SEQ ID NO: 1879333
cggguauacaaggagguua

SEQ ID NO: 1899361 - RNA, 19 nt, Artificial Sequence
  Description of Artificial Sequence: Synthetic oligonucleotide
  Antisense strand to SEQ ID NO: 1899360
uaaccuccuuguauacccg

SEQ ID NO: 1899362 - RNA, 19 nt, Artificial Sequence
  Description of Artificial Sequence: Synthetic oligonucleotide
  Sense strand starting at position 280 of SEQ ID NO: 1879333
caaggagguuaagauauuu

SEQ ID NO: 1899363 - RNA, 19 nt, Artificial Sequence
  Description of Artificial Sequence: Synthetic oligonucleotide
  Antisense strand to SEQ ID NO: 1899362
aaauaucuuaaccuccuug

SEQ ID NO: 1899364 - RNA, 19 nt, Artificial Sequence
  Description of Artificial Sequence: Synthetic oligonucleotide
  Sense strand starting at position 325 of SEQ ID NO: 1879333
gcgauuugguuuccacacu

SEQ ID NO: 1899365 - RNA, 19 nt, Artificial Sequence
  Description of Artificial Sequence: Synthetic oligonucleotide
  Antisense strand to SEQ ID NO: 1899364
aguguggaaaccaaaucgc

SEQ ID NO: 1899366 - RNA, 19 nt, Artificial Sequence
  Description of Artificial Sequence: Synthetic oligonucleotide
  Sense strand starting at position 460 of SEQ ID NO: 1879333
agucaucuuuacccuggaa

SEQ ID NO: 1899367 - RNA, 19 nt, Artificial Sequence
  Description of Artificial Sequence: Synthetic oligonucleotide
  Antisense strand to SEQ ID NO: 1899366
uuccaggguaaagaugacu

SEQ ID NO: 1899368 - RNA, 19 nt, Artificial Sequence
  Description of Artificial Sequence: Synthetic oligonucleotide
  Sense strand starting at position 607 of SEQ ID NO: 1879333
uugucuccucaugagucua

SEQ ID NO: 1899369 - RNA, 19 nt, Artificial Sequence
  Description of Artificial Sequence: Synthetic oligonucleotide
  Antisense strand to SEQ ID NO: 1899368
uagacucaugaggagacaa

SEQ ID NO: 1899370 - RNA, 19 nt, Artificial Sequence
  Description of Artificial Sequence: Synthetic oligonucleotide
  Sense strand starting at position 651 of SEQ ID NO: 1879333
acuuguacccuguauauca

SEQ ID NO: 1899371 - RNA, 19 nt, Artificial Sequence
  Description of Artificial Sequence: Synthetic oligonucleotide
  Antisense strand to SEQ ID NO: 1899370
ugauauacaggguacaagu

SEQ ID NO: 1899372 - RNA, 19 nt, Artificial Sequence
  Description of Artificial Sequence: Synthetic oligonucleotide
  Sense strand starting at position 653 of SEQ ID NO: 1879333
uuguacccuguauaucaaa

SEQ ID NO: 1899373 - RNA, 19 nt, Artificial Sequence
  Description of Artificial Sequence: Synthetic oligonucleotide
  Antisense strand to SEQ ID NO: 1899372
uuugauauacaggguacaa

SEQ ID NO: 1899374 - RNA, 19 nt, Artificial Sequence
  Description of Artificial Sequence: Synthetic oligonucleotide
  Sense strand starting at position 669 of SEQ ID NO: 1879333
aaaguaugugaauggaugu

SEQ ID NO: 1899375 - RNA, 19 nt, Artificial Sequence
  Description of Artificial Sequence: Synthetic oligonucleotide
  Antisense strand to SEQ ID NO: 1899374
acauccauucacauacuuu

SEQ ID NO: 1899376 - RNA, 19 nt, Artificial Sequence
  Description of Artificial Sequence: Synthetic oligonucleotide
  Sense strand starting at position 670 of SEQ ID NO: 1879333
aaguaugugaauggauguu

SEQ ID NO: 1899377 - RNA, 19 nt, Artificial Sequence
  Description of Artificial Sequence: Synthetic oligonucleotide
  Antisense strand to SEQ ID NO: 1899376
aacauccauucacauacuu

SEQ ID NO: 1899378 - RNA, 19 nt, Artificial Sequence
  Description of Artificial Sequence: Synthetic oligonucleotide
  Sense strand starting at position 708 of SEQ ID NO: 1879333
auuugaguauaucaagcaa

SEQ ID NO: 1899379 - RNA, 19 nt, Artificial Sequence
  Description of Artificial Sequence: Synthetic oligonucleotide
  Antisense strand to SEQ ID NO: 1899378
uugcuugauauacucaaau

SEQ ID NO: 1899380 - RNA, 19 nt, Artificial Sequence
  Description of Artificial Sequence: Synthetic oligonucleotide
  Sense strand starting at position 730 of SEQ ID NO: 1879333
agagucaguuaacuacaua

SEQ ID NO: 1899381 - RNA, 19 nt, Artificial Sequence
  Description of Artificial Sequence: Synthetic oligonucleotide
  Antisense strand to SEQ ID NO: 1899380
uauguaguuaacugacucu

SEQ ID NO: 1899382 - RNA, 19 nt, Artificial Sequence
  Description of Artificial Sequence: Synthetic oligonucleotide
  Sense strand starting at position 859 of SEQ ID NO: 1879333
acuugucugcccuagauua

SEQ ID NO: 1899383 - RNA, 19 nt, Artificial Sequence
  Description of Artificial Sequence: Synthetic oligonucleotide
  Antisense strand to SEQ ID NO: 1899382
uaaucuagggcagacaagu

SEQ ID NO: 1899384 - RNA, 19 nt, Artificial Sequence
  Description of Artificial Sequence: Synthetic oligonucleotide
  Sense strand starting at position 861 of SEQ ID NO: 1879333
uugucugcccuagauuauu

SEQ ID NO: 1899385 - RNA, 19 nt, Artificial Sequence
  Description of Artificial Sequence: Synthetic oligonucleotide
  Antisense strand to SEQ ID NO: 1899384
aauaaucuagggcagacaa

SEQ ID NO: 1899386 - RNA, 19 nt, Artificial Sequence
  Description of Artificial Sequence: Synthetic oligonucleotide
  Sense strand starting at position 989 of SEQ ID NO: 1879333
agguaccaagagugaugua

SEQ ID NO: 1899387 - RNA, 19 nt, Artificial Sequence
  Description of Artificial Sequence: Synthetic oligonucleotide
  Antisense strand to SEQ ID NO: 1899386
uacaucacucuugguaccu

SEQ ID NO: 1899388 - RNA, 19 nt, Artificial Sequence
  Description of Artificial Sequence: Synthetic oligonucleotide
  Sense strand starting at position 1015 of SEQ ID NO: 1879333
uacagaaauuguguguacu

SEQ ID NO: 1899389 - RNA, 19 nt, Artificial Sequence
  Description of Artificial Sequence: Synthetic oligonucleotide
  Antisense strand to SEQ ID NO: 1899388
aguacacacaauuucugua

SEQ ID NO: 1899390 - RNA, 19 nt, Artificial Sequence
  Description of Artificial Sequence: Synthetic oligonucleotide
  Sense strand starting at position 1016 of SEQ ID NO: 1879333
acagaaauuguguguacua

SEQ ID NO: 1899391 - RNA, 19 nt, Artificial Sequence
  Description of Artificial Sequence: Synthetic oligonucleotide
  Antisense strand to SEQ ID NO: 1899390
uaguacacacaauuucugu

SEQ ID NO: 1899392 - RNA, 19 nt, Artificial Sequence
  Description of Artificial Sequence: Synthetic oligonucleotide
  Sense strand starting at position 1017 of SEQ ID NO: 1879333
cagaaauuguguguacuac

SEQ ID NO: 1899393 - RNA, 19 nt, Artificial Sequence
  Description of Artificial Sequence: Synthetic oligonucleotide
  Antisense strand to SEQ ID NO: 1899392
guaguacacacaauuucug

SEQ ID NO: 1899394 - RNA, 19 nt, Artificial Sequence
  Description of Artificial Sequence: Synthetic oligonucleotide
  Sense strand starting at position 1029 of SEQ ID NO: 1879333
guacuaccacgauaaccau

SEQ ID NO: 1899395 - RNA, 19 nt, Artificial Sequence
  Description of Artificial Sequence: Synthetic oligonucleotide
  Antisense strand to SEQ ID NO: 1899394
augguuaucgugguaguac

SEQ ID NO: 1899396 - RNA, 19 nt, Artificial Sequence
  Description of Artificial Sequence: Synthetic oligonucleotide
  Sense strand starting at position 1202 of SEQ ID NO: 1879333
agguuagcuuacuccaaag

SEQ ID NO: 1899397 - RNA, 19 nt, Artificial Sequence
  Description of Artificial Sequence: Synthetic oligonucleotide
  Antisense strand to SEQ ID NO: 1899396
cuuuggaguaagcuaaccu

SEQ ID NO: 1899398 - RNA, 19 nt, Artificial Sequence
  Description of Artificial Sequence: Synthetic oligonucleotide
  Sense strand starting at position 1213 of SEQ ID NO: 1879333
cuccaaagucaguaagacu

SEQ ID NO: 1899399 - RNA, 19 nt, Artificial Sequence
  Description of Artificial Sequence: Synthetic oligonucleotide
  Antisense strand to SEQ ID NO: 1899398
agucuuacugacuuuggag

SEQ ID NO: 1899400 - RNA, 19 nt, Artificial Sequence
  Description of Artificial Sequence: Synthetic oligonucleotide
  Sense strand starting at position 1221 of SEQ ID NO: 1879333
ucaguaagacuguauguau

SEQ ID NO: 1899401 - RNA, 19 nt, Artificial Sequence
  Description of Artificial Sequence: Synthetic oligonucleotide
  Antisense strand to SEQ ID NO: 1899400
auacauacagucuuacuga

SEQ ID NO: 1899402 - RNA, 19 nt, Artificial Sequence
  Description of Artificial Sequence: Synthetic oligonucleotide
  Sense strand starting at position 1224 of SEQ ID NO: 1879333
guaagacuguauguauaua

SEQ ID NO: 1899403 - RNA, 19 nt, Artificial Sequence
  Description of Artificial Sequence: Synthetic oligonucleotide
  Antisense strand to SEQ ID NO: 1899402
uauauacauacagucuuac

SEQ ID NO: 1899404 - RNA, 19 nt, Artificial Sequence
  Description of Artificial Sequence: Synthetic oligonucleotide
  Sense strand starting at position 1334 of SEQ ID NO: 1879333
accagaagugaaugcaaca

SEQ ID NO: 1899405 - RNA, 19 nt, Artificial Sequence
  Description of Artificial Sequence: Synthetic oligonucleotide
  Antisense strand to SEQ ID NO: 1899404
uguugcauucacuucuggu

SEQ ID NO: 1899406 - RNA, 19 nt, Artificial Sequence
  Description of Artificial Sequence: Synthetic oligonucleotide
  Sense strand starting at position 1587 of SEQ ID NO: 1879333
agagucaaaucccuacagu

SEQ ID NO: 1899407 - RNA, 19 nt, Artificial Sequence
  Description of Artificial Sequence: Synthetic oligonucleotide
  Antisense strand to SEQ ID NO: 1899406
acuguagggauuugacucu

SEQ ID NO: 1899408 - RNA, 19 nt, Artificial Sequence
  Description of Artificial Sequence: Synthetic oligonucleotide
  Sense strand starting at position 1588 of SEQ ID NO: 1879333
gagucaaaucccuacagug

SEQ ID NO: 1899409 - RNA, 19 nt, Artificial Sequence
  Description of Artificial Sequence: Synthetic oligonucleotide
  Antisense strand to SEQ ID NO: 1899408
cacuguagggauuugacuc

SEQ ID NO: 1899410 - RNA, 19 nt, Artificial Sequence
  Description of Artificial Sequence: Synthetic oligonucleotide
  Sense strand starting at position 1603 of SEQ ID NO: 1879333
aguggauuccuggaccguu

SEQ ID NO: 1899411 - RNA, 19 nt, Artificial Sequence
  Description of Artificial Sequence: Synthetic oligonucleotide
  Antisense strand to SEQ ID NO: 1899410
aacgguccaggaauccacu

SEQ ID NO: 1899412 - RNA, 19 nt, Artificial Sequence
  Description of Artificial Sequence: Synthetic oligonucleotide
  Sense strand starting at position 2268 of SEQ ID NO: 1879333
gcggaaacgggagaucuaa

SEQ ID NO: 1899413 - RNA, 19 nt, Artificial Sequence
  Description of Artificial Sequence: Synthetic oligonucleotide
  Antisense strand to SEQ ID NO: 1899412
uuagaucucccguuuccgc

SEQ ID NO: 1899414 - RNA, 19 nt, Artificial Sequence
  Description of Artificial Sequence: Synthetic oligonucleotide
  Sense strand starting at position 2276 of SEQ ID NO: 1879333
gggagaucuaagugccuuu

SEQ ID NO: 1899415 - RNA, 19 nt, Artificial Sequence
  Description of Artificial Sequence: Synthetic oligonucleotide
  Antisense strand to SEQ ID NO: 1899414
aaaggcacuuagaucuccc

SEQ ID NO: 1899416 - RNA, 19 nt, Artificial Sequence
  Description of Artificial Sequence: Synthetic oligonucleotide
  Sense strand starting at position 3002 of SEQ ID NO: 1879333
uuaggauccugccuggaau

SEQ ID NO: 1899417 - RNA, 19 nt, Artificial Sequence
  Description of Artificial Sequence: Synthetic oligonucleotide
  Antisense strand to SEQ ID NO: 1899416
auuccaggcaggauccuaa

SEQ ID NO: 1899418 - RNA, 19 nt, Artificial Sequence
  Description of Artificial Sequence: Synthetic oligonucleotide
  Sense strand starting at position 3037 of SEQ ID NO: 1879333
ggguucugccuugaacacu

SEQ ID NO: 1899419 - RNA, 19 nt, Artificial Sequence
  Description of Artificial Sequence: Synthetic oligonucleotide
  Antisense strand to SEQ ID NO: 1899418
aguguucaaggcagaaccc

SEQ ID NO: 1899420 - RNA, 19 nt, Artificial Sequence
  Description of Artificial Sequence: Synthetic oligonucleotide
  Sense strand starting at position 3079 of SEQ ID NO: 1879333
uugaaauaugguugcaaag

SEQ ID NO: 1899421 - RNA, 19 nt, Artificial Sequence
  Description of Artificial Sequence: Synthetic oligonucleotide
  Antisense strand to SEQ ID NO: 1899420
cuuugcaaccauauuucaa

SEQ ID NO: 1899422 - RNA, 19 nt, Artificial Sequence
  Description of Artificial Sequence: Synthetic oligonucleotide
  Sense strand starting at position 3357 of SEQ ID NO: 1879333
agugaaggauguuuggaau

SEQ ID NO: 1899423 - RNA, 19 nt, Artificial Sequence
  Description of Artificial Sequence: Synthetic oligonucleotide
  Antisense strand to SEQ ID NO: 1899422
auuccaaacauccuucacu

SEQ ID NO: 1899424 - RNA, 19 nt, Artificial Sequence
  Description of Artificial Sequence: Synthetic oligonucleotide
  Sense strand starting at position 3360 of SEQ ID NO: 1879333
gaaggauguuuggaauuuc

SEQ ID NO: 1899425 - RNA, 19 nt, Artificial Sequence
  Description of Artificial Sequence: Synthetic oligonucleotide
  Antisense strand to SEQ ID NO: 1899424
gaaauuccaaacauccuuc

SEQ ID NO: 1899426 - RNA, 19 nt, Artificial Sequence
  Description of Artificial Sequence: Synthetic oligonucleotide
  Sense strand starting at position 3401 of SEQ ID NO: 1879333
aacuuaaagugguuucuga

SEQ ID NO: 1899427 - RNA, 19 nt, Artificial Sequence
  Description of Artificial Sequence: Synthetic oligonucleotide
  Antisense strand to SEQ ID NO: 1899426
ucagaaaccacuuuaaguu

SEQ ID NO: 1899428 - RNA, 19 nt, Artificial Sequence
  Description of Artificial Sequence: Synthetic oligonucleotide
  Sense strand starting at position 3529 of SEQ ID NO: 1879333
cugaauauagacuacguau

SEQ ID NO: 1899429 - RNA, 19 nt, Artificial Sequence
  Description of Artificial Sequence: Synthetic oligonucleotide
  Antisense strand to SEQ ID NO: 1899428
auacguagucuauauucag

SEQ ID NO: 1899430 - RNA, 19 nt, Artificial Sequence
  Description of Artificial Sequence: Synthetic oligonucleotide
  Sense strand starting at position 3531 of SEQ ID NO: 1879333
gaauauagacuacguauau

SEQ ID NO: 1899431 - RNA, 19 nt, Artificial Sequence
  Description of Artificial Sequence: Synthetic oligonucleotide
  Antisense strand to SEQ ID NO: 1899430
auauacguagucuauauuc

SEQ ID NO: 1899432 - RNA, 19 nt, Artificial Sequence
  Description of Artificial Sequence: Synthetic oligonucleotide
  Sense strand starting at position 3553 of SEQ ID NO: 1879333
aguuauagauuaucuagcu

SEQ ID NO: 1899433 - RNA, 19 nt, Artificial Sequence
  Description of Artificial Sequence: Synthetic oligonucleotide
  Antisense strand to SEQ ID NO: 1899432
agcuagauaaucuauaacu

SEQ ID NO: 1899434 - RNA, 19 nt, Artificial Sequence
  Description of Artificial Sequence: Synthetic oligonucleotide
  Sense strand starting at position 3814 of SEQ ID NO: 1879333
gaaagugacacgugguaaa

SEQ ID NO: 1899435 - RNA, 19 nt, Artificial Sequence
  Description of Artificial Sequence: Synthetic oligonucleotide
  Antisense strand to SEQ ID NO: 1899434
uuuaccacgugucacuuuc

SEQ ID NO: 1899436 - RNA, 19 nt, Artificial Sequence
  Description of Artificial Sequence: Synthetic oligonucleotide
  Sense strand starting at position 178 of SEQ ID NO: 1879334
uuaauuacugcauguggau

SEQ ID NO: 1899437 - RNA, 19 nt, Artificial Sequence
  Description of Artificial Sequence: Synthetic oligonucleotide
  Antisense strand to SEQ ID NO: 1899436
auccacaugcaguaauuaa

SEQ ID NO: 1899438 - RNA, 19 nt, Artificial Sequence
  Description of Artificial Sequence: Synthetic oligonucleotide
  Sense strand starting at position 190 of SEQ ID NO: 1879334
uguggaugcaugugugaag

SEQ ID NO: 1899439 - RNA, 19 nt, Artificial Sequence
  Description of Artificial Sequence: Synthetic oligonucleotide
  Antisense strand to SEQ ID NO: 1899438
cuucacacaugcauccaca

SEQ ID NO: 1899440 - RNA, 19 nt, Artificial Sequence
  Description of Artificial Sequence: Synthetic oligonucleotide
  Sense strand starting at position 193 of SEQ ID NO: 1879334
ggaugcaugugugaaguga

SEQ ID NO: 1899441 - RNA, 19 nt, Artificial Sequence
  Description of Artificial Sequence: Synthetic oligonucleotide
  Antisense strand to SEQ ID NO: 1899440
ucacuucacacaugcaucc

SEQ ID NO: 1899442 - RNA, 19 nt, Artificial Sequence
  Description of Artificial Sequence: Synthetic oligonucleotide
  Sense strand starting at position 197 of SEQ ID NO: 1879334
gcaugugugaagugaaagu

SEQ ID NO: 1899443 - RNA, 19 nt, Artificial Sequence
  Description of Artificial Sequence: Synthetic oligonucleotide
  Antisense strand to SEQ ID NO: 1899442
acuuucacuucacacaugc

SEQ ID NO: 1899444 - RNA, 19 nt, Artificial Sequence
  Description of Artificial Sequence: Synthetic oligonucleotide
  Sense strand starting at position 571 of SEQ ID NO: 1879334
aaacuauugcauuagagug

SEQ ID NO: 1899445 - RNA, 19 nt, Artificial Sequence
  Description of Artificial Sequence: Synthetic oligonucleotide
  Antisense strand to SEQ ID NO: 1899444
cacucuaaugcaauaguuu

SEQ ID NO: 1899446 - RNA, 19 nt, Artificial Sequence
  Description of Artificial Sequence: Synthetic oligonucleotide
  Sense strand starting at position 577 of SEQ ID NO: 1879334
uugcauuagagugguagga

SEQ ID NO: 1899447 - RNA, 19 nt, Artificial Sequence
  Description of Artificial Sequence: Synthetic oligonucleotide
  Antisense strand to SEQ ID NO: 1899446
uccuaccacucuaaugcaa

SEQ ID NO: 1899448 - RNA, 19 nt, Artificial Sequence
  Description of Artificial Sequence: Synthetic oligonucleotide
  Sense strand starting at position 579 of SEQ ID NO: 1879334
gcauuagagugguaggauu

SEQ ID NO: 1899449 - RNA, 19 nt, Artificial Sequence
  Description of Artificial Sequence: Synthetic oligonucleotide
  Antisense strand to SEQ ID NO: 1899448
aauccuaccacucuaaugc

SEQ ID NO: 1899450 - RNA, 19 nt, Artificial Sequence
  Description of Artificial Sequence: Synthetic oligonucleotide
  Sense strand starting at position 756 of SEQ ID NO: 1879334
gguaacugcuucuguuauu

SEQ ID NO: 1899451 - RNA, 19 nt, Artificial Sequence
  Description of Artificial Sequence: Synthetic oligonucleotide
  Antisense strand to SEQ ID NO: 1899450
aauaacagaagcaguuacc

SEQ ID NO: 1899452 - RNA, 19 nt, Artificial Sequence
  Description of Artificial Sequence: Synthetic oligonucleotide
  Sense strand starting at position 757 of SEQ ID NO: 1879334
guaacugcuucuguuauuu

SEQ ID NO: 1899453 - RNA, 19 nt, Artificial Sequence
  Description of Artificial Sequence: Synthetic oligonucleotide
  Antisense strand to SEQ ID NO: 1899452
aaauaacagaagcaguuac

SEQ ID NO: 1899454 - RNA, 19 nt, Artificial Sequence
  Description of Artificial Sequence: Synthetic oligonucleotide
  Sense strand starting at position 3029 of SEQ ID NO: 1879334
caccuauugcaguggauca

SEQ ID NO: 1899455 - RNA, 19 nt, Artificial Sequence
  Description of Artificial Sequence: Synthetic oligonucleotide
  Antisense strand to SEQ ID NO: 1899454
ugauccacugcaauaggug

SEQ ID NO: 1899456 - RNA, 19 nt, Artificial Sequence
  Description of Artificial Sequence: Synthetic oligonucleotide
  Sense strand starting at position 3031 of SEQ ID NO: 1879334
ccuauugcaguggaucaaa

SEQ ID NO: 1899457 - RNA, 19 nt, Artificial Sequence
  Description of Artificial Sequence: Synthetic oligonucleotide
  Antisense strand to SEQ ID NO: 1899456
uuugauccacugcaauagg

SEQ ID NO: 1899458 - RNA, 19 nt, Artificial Sequence
  Description of Artificial Sequence: Synthetic oligonucleotide
  Sense strand starting at position 3034 of SEQ ID NO: 1879334
auugcaguggaucaaauau

SEQ ID NO: 1899459 - RNA, 19 nt, Artificial Sequence
  Description of Artificial Sequence: Synthetic oligonucleotide
  Antisense strand to SEQ ID NO: 1899458
auauuugauccacugcaau

SEQ ID NO: 1899460 - RNA, 19 nt, Artificial Sequence
  Description of Artificial Sequence: Synthetic oligonucleotide
  Sense strand starting at position 3299 of SEQ ID NO: 1879334
auaagugaucugcagauuc

SEQ ID NO: 1899461 - RNA, 19 nt, Artificial Sequence
  Description of Artificial Sequence: Synthetic oligonucleotide
  Antisense strand to SEQ ID NO: 1899460
gaaucugcagaucacuuau

SEQ ID NO: 1899462 - RNA, 19 nt, Artificial Sequence
  Description of Artificial Sequence: Synthetic oligonucleotide
  Sense strand starting at position 3473 of SEQ ID NO: 1879334
guguccaggcuauaucuau

SEQ ID NO: 1899463 - RNA, 19 nt, Artificial Sequence
  Description of Artificial Sequence: Synthetic oligonucleotide
  Antisense strand to SEQ ID NO: 1899462
auagauauagccuggacac

SEQ ID NO: 1899464 - RNA, 19 nt, Artificial Sequence
  Description of Artificial Sequence: Synthetic oligonucleotide
  Sense strand starting at position 3480 of SEQ ID NO: 1879334
ggcuauaucuauuagguaa

SEQ ID NO: 1899465 - RNA, 19 nt, Artificial Sequence
  Description of Artificial Sequence: Synthetic oligonucleotide
  Antisense strand to SEQ ID NO: 1899464
uuaccuaauagauauagcc

SEQ ID NO: 1899466 - RNA, 19 nt, Artificial Sequence
  Description of Artificial Sequence: Synthetic oligonucleotide
  Sense strand starting at position 3709 of SEQ ID NO: 1879334
ucagaaugcucccuacugu

SEQ ID NO: 1899467 - RNA, 19 nt, Artificial Sequence
  Description of Artificial Sequence: Synthetic oligonucleotide
  Antisense strand to SEQ ID NO: 1899466
acaguagggagcauucuga

SEQ ID NO: 1899468 - RNA, 19 nt, Artificial Sequence
  Description of Artificial Sequence: Synthetic oligonucleotide
  Sense strand starting at position 3910 of SEQ ID NO: 1879334
aucucuacugcugguaaua

SEQ ID NO: 1899469 - RNA, 19 nt, Artificial Sequence
  Description of Artificial Sequence: Synthetic oligonucleotide
  Antisense strand to SEQ ID NO: 1899468
uauuaccagcaguagagau

SEQ ID NO: 1899470 - RNA, 19 nt, Artificial Sequence
  Description of Artificial Sequence: Synthetic oligonucleotide
  Sense strand starting at position 3912 of SEQ ID NO: 1879334
cucuacugcugguaauauu

SEQ ID NO: 1899471 - RNA, 19 nt, Artificial Sequence
  Description of Artificial Sequence: Synthetic oligonucleotide
  Antisense strand to SEQ ID NO: 1899470
aauauuaccagcaguagag

SEQ ID NO: 1899472 - RNA, 19 nt, Artificial Sequence
  Description of Artificial Sequence: Synthetic oligonucleotide
  Sense strand starting at position 41 of SEQ ID NO: 1879335
ucuaauuaucuugacgagu

SEQ ID NO: 1899473 - RNA, 19 nt, Artificial Sequence
  Description of Artificial Sequence: Synthetic oligonucleotide
  Antisense strand to SEQ ID NO: 1899472
acucgucaagauaauuaga

SEQ ID NO: 1899474 - RNA, 19 nt, Artificial Sequence
  Description of Artificial Sequence: Synthetic oligonucleotide
  Sense strand starting at position 44 of SEQ ID NO: 1879335
aauuaucuugacgaguuua

SEQ ID NO: 1899475 - RNA, 19 nt, Artificial Sequence
  Description of Artificial Sequence: Synthetic oligonucleotide
  Antisense strand to SEQ ID NO: 1899474
uaaacucgucaagauaauu

SEQ ID NO: 1899476 - RNA, 19 nt, Artificial Sequence
  Description of Artificial Sequence: Synthetic oligonucleotide
  Sense strand starting at position 299 of SEQ ID NO: 1879335
agcaaauauugauuacaug

SEQ ID NO: 1899477 - RNA, 19 nt, Artificial Sequence
  Description of Artificial Sequence: Synthetic oligonucleotide
  Antisense strand to SEQ ID NO: 1899476
cauguaaucaauauuugcu

SEQ ID NO: 1899478 - RNA, 19 nt, Artificial Sequence
  Description of Artificial Sequence: Synthetic oligonucleotide
  Sense strand starting at position 361 of SEQ ID NO: 1879335
gucgaaguuagauauugaa

SEQ ID NO: 1899479 - RNA, 19 nt, Artificial Sequence
  Description of Artificial Sequence: Synthetic oligonucleotide
  Antisense strand to SEQ ID NO: 1899478
uucaauaucuaacuucgac

SEQ ID NO: 1899480 - RNA, 19 nt, Artificial Sequence
  Description of Artificial Sequence: Synthetic oligonucleotide
  Sense strand starting at position 388 of SEQ ID NO: 1879335
cuauaaucacugugauaug

SEQ ID NO: 1899481 - RNA, 19 nt, Artificial Sequence
  Description of Artificial Sequence: Synthetic oligonucleotide
  Antisense strand to SEQ ID NO: 1899480
cauaucacagugauuauag

SEQ ID NO: 1899482 - RNA, 19 nt, Artificial Sequence
  Description of Artificial Sequence: Synthetic oligonucleotide
  Sense strand starting at position 397 of SEQ ID NO: 1879335
cugugauaugcugagggaa

SEQ ID NO: 1899483 - RNA, 19 nt, Artificial Sequence
  Description of Artificial Sequence: Synthetic oligonucleotide
  Antisense strand to SEQ ID NO: 1899482
uucccucagcauaucacag

SEQ ID NO: 1899484 - RNA, 19 nt, Artificial Sequence
  Description of Artificial Sequence: Synthetic oligonucleotide
  Sense strand starting at position 460 of SEQ ID NO: 1879335
gccagugaucagggaagau

SEQ ID NO: 1899485 - RNA, 19 nt, Artificial Sequence
  Description of Artificial Sequence: Synthetic oligonucleotide
  Antisense strand to SEQ ID NO: 1899484
aucuucccugaucacuggc

SEQ ID NO: 1899486 - RNA, 19 nt, Artificial Sequence
  Description of Artificial Sequence: Synthetic oligonucleotide
  Sense strand starting at position 738 of SEQ ID NO: 1879335
uccagaucagccugggaga

SEQ ID NO: 1899487 - RNA, 19 nt, Artificial Sequence
  Description of Artificial Sequence: Synthetic oligonucleotide
  Antisense strand to SEQ ID NO: 1899486
ucucccaggcugaucugga

SEQ ID NO: 1899488 - RNA, 19 nt, Artificial Sequence
  Description of Artificial Sequence: Synthetic oligonucleotide
  Sense strand starting at position 1124 of SEQ ID NO: 1879335
gggaaugaauuguugcaag

SEQ ID NO: 1899489 - RNA, 19 nt, Artificial Sequence
  Description of Artificial Sequence: Synthetic oligonucleotide
  Antisense strand to SEQ ID NO: 1899488
cuugcaacaauucauuccc

SEQ ID NO: 1899490 - RNA, 19 nt, Artificial Sequence
  Description of Artificial Sequence: Synthetic oligonucleotide
  Sense strand starting at position 1268 of SEQ ID NO: 1879335
guaaguuucguuucugguu

SEQ ID NO: 1899491 - RNA, 19 nt, Artificial Sequence
  Description of Artificial Sequence: Synthetic oligonucleotide
  Antisense strand to SEQ ID NO: 1899490
aaccagaaacgaaacuuac

SEQ ID NO: 1899492 - RNA, 19 nt, Artificial Sequence
  Description of Artificial Sequence: Synthetic oligonucleotide
  Sense strand starting at position 1287 of SEQ ID NO: 1879335
gaggcaagagguuggauau

SEQ ID NO: 1899493 - RNA, 19 nt, Artificial Sequence
  Description of Artificial Sequence: Synthetic oligonucleotide
  Antisense strand to SEQ ID NO: 1899492
auauccaaccucuugccuc

SEQ ID NO: 1899494 - RNA, 19 nt, Artificial Sequence
  Description of Artificial Sequence: Synthetic oligonucleotide
  Sense strand starting at position 1288 of SEQ ID NO: 1879335
aggcaagagguuggauaua

SEQ ID NO: 1899495 - RNA, 19 nt, Artificial Sequence
  Description of Artificial Sequence: Synthetic oligonucleotide
  Antisense strand to SEQ ID NO: 1899494
uauauccaaccucuugccu

SEQ ID NO: 1899496 - RNA, 19 nt, Artificial Sequence
  Description of Artificial Sequence: Synthetic oligonucleotide
  Sense strand starting at position 1325 of SEQ ID NO: 1879335
uguucuuuagaagagucau

SEQ ID NO: 1899497 - RNA, 19 nt, Artificial Sequence
  Description of Artificial Sequence: Synthetic oligonucleotide
  Antisense strand to SEQ ID NO: 1899496
augacucuucuaaagaaca

SEQ ID NO: 1899498 - RNA, 19 nt, Artificial Sequence
  Description of Artificial Sequence: Synthetic oligonucleotide
  Sense strand starting at position 1331 of SEQ ID NO: 1879335
uuagaagagucauuccauc

SEQ ID NO: 1899499 - RNA, 19 nt, Artificial Sequence
  Description of Artificial Sequence: Synthetic oligonucleotide
  Antisense strand to SEQ ID NO: 1899498
gauggaaugacucuucuaa

SEQ ID NO: 1899500 - RNA, 19 nt, Artificial Sequence
  Description of Artificial Sequence: Synthetic oligonucleotide
  Sense strand starting at position 1409 of SEQ ID NO: 1879335
acugaauaggccuaucuau

SEQ ID NO: 1899501 - RNA, 19 nt, Artificial Sequence
  Description of Artificial Sequence: Synthetic oligonucleotide
  Antisense strand to SEQ ID NO: 1899500
auagauaggccuauucagu

SEQ ID NO: 1899502 - RNA, 19 nt, Artificial Sequence
  Description of Artificial Sequence: Synthetic oligonucleotide
  Sense strand starting at position 1619 of SEQ ID NO: 1879335
cuaagaaucuuccuuaggu

SEQ ID NO: 1899503 - RNA, 19 nt, Artificial Sequence
  Description of Artificial Sequence: Synthetic oligonucleotide
  Antisense strand to SEQ ID NO: 1899502
accuaaggaagauucuuag

SEQ ID NO: 1899504 - RNA, 19 nt, Artificial Sequence
  Description of Artificial Sequence: Synthetic oligonucleotide
  Sense strand starting at position 1794 of SEQ ID NO: 1879335
cagaguucugaagggugga

SEQ ID NO: 1899505 - RNA, 19 nt, Artificial Sequence
  Description of Artificial Sequence: Synthetic oligonucleotide
  Antisense strand to SEQ ID NO: 1899504
uccacccuucagaacucug

SEQ ID NO: 1899506 - RNA, 19 nt, Artificial Sequence
  Description of Artificial Sequence: Synthetic oligonucleotide
  Sense strand starting at position 1795 of SEQ ID NO: 1879335
agaguucugaaggguggau

SEQ ID NO: 1899507 - RNA, 19 nt, Artificial Sequence
  Description of Artificial Sequence: Synthetic oligonucleotide
  Antisense strand to SEQ ID NO: 1899506
auccacccuucagaacucu

SEQ ID NO: 1899508 - RNA, 19 nt, Artificial Sequence
  Description of Artificial Sequence: Synthetic oligonucleotide
  Sense strand starting at position 1797 of SEQ ID NO: 1879335
aguucugaaggguggauaa

SEQ ID NO: 1899509 - RNA, 19 nt, Artificial Sequence
  Description of Artificial Sequence: Synthetic oligonucleotide
  Antisense strand to SEQ ID NO: 1899508
uuauccacccuucagaacu

SEQ ID NO: 1899510 - RNA, 19 nt, Artificial Sequence
  Description of Artificial Sequence: Synthetic oligonucleotide
  Sense strand starting at position 2077 of SEQ ID NO: 1879335
uugggaauguaacauuuaa

SEQ ID NO: 1899511 - RNA, 19 nt, Artificial Sequence
  Description of Artificial Sequence: Synthetic oligonucleotide
  Antisense strand to SEQ ID NO: 1899510
uuaaauguuacauucccaa

SEQ ID NO: 1899512 - RNA, 19 nt, Artificial Sequence
  Description of Artificial Sequence: Synthetic oligonucleotide
  Sense strand starting at position 2489 of SEQ ID NO: 1879335
guggcaauugaugagcaau

SEQ ID NO: 1899513 - RNA, 19 nt, Artificial Sequence
  Description of Artificial Sequence: Synthetic oligonucleotide
  Antisense strand to SEQ ID NO: 1899512
auugcucaucaauugccac

SEQ ID NO: 1899514 - RNA, 19 nt, Artificial Sequence
  Description of Artificial Sequence: Synthetic oligonucleotide
  Sense strand starting at position 2492 of SEQ ID NO: 1879335
gcaauugaugagcaauauc

SEQ ID NO: 1899515 - RNA, 19 nt, Artificial Sequence
  Description of Artificial Sequence: Synthetic oligonucleotide
  Antisense strand to SEQ ID NO: 1899514
gauauugcucaucaauugc

SEQ ID NO: 1899516 - RNA, 19 nt, Artificial Sequence
  Description of Artificial Sequence: Synthetic oligonucleotide
  Sense strand starting at position 2569 of SEQ ID NO: 1879335
uaaguuauacuuggaagua

SEQ ID NO: 1899517 - RNA, 19 nt, Artificial Sequence
  Description of Artificial Sequence: Synthetic oligonucleotide
  Antisense strand to SEQ ID NO: 1899516
uacuuccaaguauaacuua

SEQ ID NO: 1899518 - RNA, 19 nt, Artificial Sequence
  Description of Artificial Sequence: Synthetic oligonucleotide
  Sense strand starting at position 2666 of SEQ ID NO: 1879335
ugucaaauugugcagaaug

SEQ ID NO: 1899519 - RNA, 19 nt, Artificial Sequence
  Description of Artificial Sequence: Synthetic oligonucleotide
  Antisense strand to SEQ ID NO: 1899518
cauucugcacaauuugaca

SEQ ID NO: 1899520 - RNA, 19 nt, Artificial Sequence
  Description of Artificial Sequence: Synthetic oligonucleotide
  Sense strand starting at position 2668 of SEQ ID NO: 1879335
ucaaauugugcagaaugua

SEQ ID NO: 1899521 - RNA, 19 nt, Artificial Sequence
  Description of Artificial Sequence: Synthetic oligonucleotide
  Antisense strand to SEQ ID NO: 1899520
uacauucugcacaauuuga

SEQ ID NO: 1899522 - RNA, 19 nt, Artificial Sequence
  Description of Artificial Sequence: Synthetic oligonucleotide
  Sense strand starting at position 2701 of SEQ ID NO: 1879335
ucuagaagaaacuggugua

SEQ ID NO: 1899523 - RNA, 19 nt, Artificial Sequence
  Description of Artificial Sequence: Synthetic oligonucleotide
  Antisense strand to SEQ ID NO: 1899522
uacaccaguuucuucuaga

SEQ ID NO: 1899524 - RNA, 19 nt, Artificial Sequence
  Description of Artificial Sequence: Synthetic oligonucleotide
  Sense strand starting at position 2743 of SEQ ID NO: 1879335
uuagauuagaagugugaac

SEQ ID NO: 1899525 - RNA, 19 nt, Artificial Sequence
  Description of Artificial Sequence: Synthetic oligonucleotide
  Antisense strand to SEQ ID NO: 1899524
guucacacuucuaaucuaa

SEQ ID NO: 1899526 - RNA, 19 nt, Artificial Sequence
  Description of Artificial Sequence: Synthetic oligonucleotide
  Sense strand starting at position 2745 of SEQ ID NO: 1879335
agauuagaagugugaacuu

SEQ ID NO: 1899527 - RNA, 19 nt, Artificial Sequence
  Description of Artificial Sequence: Synthetic oligonucleotide
  Antisense strand to SEQ ID NO: 1899526
aaguucacacuucuaaucu

SEQ ID NO: 1899528 - RNA, 19 nt, Artificial Sequence
  Description of Artificial Sequence: Synthetic oligonucleotide
  Sense strand starting at position 2756 of SEQ ID NO: 1879335
gugaacuuugcagaaaugu

SEQ ID NO: 1899529 - RNA, 19 nt, Artificial Sequence
  Description of Artificial Sequence: Synthetic oligonucleotide
  Antisense strand to SEQ ID NO: 1899528
acauuucugcaaaguucac

SEQ ID NO: 1899530 - RNA, 19 nt, Artificial Sequence
  Description of Artificial Sequence: Synthetic oligonucleotide
  Sense strand starting at position 3040 of SEQ ID NO: 1879335
cucuguuacccauagggau

SEQ ID NO: 1899531 - RNA, 19 nt, Artificial Sequence
  Description of Artificial Sequence: Synthetic oligonucleotide
  Antisense strand to SEQ ID NO: 1899530
aucccuauggguaacagag

SEQ ID NO: 1899532 - RNA, 19 nt, Artificial Sequence
  Description of Artificial Sequence: Synthetic oligonucleotide
  Sense strand starting at position 3360 of SEQ ID NO: 1879335
cugggaguuuauuugcagu

SEQ ID NO: 1899533 - RNA, 19 nt, Artificial Sequence
  Description of Artificial Sequence: Synthetic oligonucleotide
  Antisense strand to SEQ ID NO: 1899532
acugcaaauaaacucccag

SEQ ID NO: 1899534 - RNA, 19 nt, Artificial Sequence
  Description of Artificial Sequence: Synthetic oligonucleotide
  Sense strand starting at position 3668 of SEQ ID NO: 1879335
augagaugcuaauccuaca

SEQ ID NO: 1899535 - RNA, 19 nt, Artificial Sequence
  Description of Artificial Sequence: Synthetic oligonucleotide
  Antisense strand to SEQ ID NO: 1899534
uguaggauuagcaucucau

SEQ ID NO: 1899536 - RNA, 19 nt, Artificial Sequence
  Description of Artificial Sequence: Synthetic oligonucleotide
  Sense strand starting at position 3673 of SEQ ID NO: 1879335
augcuaauccuacagauug

SEQ ID NO: 1899537 - RNA, 19 nt, Artificial Sequence
  Description of Artificial Sequence: Synthetic oligonucleotide
  Antisense strand to SEQ ID NO: 1899536
caaucuguaggauuagcau

SEQ ID NO: 1899538 - RNA, 19 nt, Artificial Sequence
  Description of Artificial Sequence: Synthetic oligonucleotide
  Sense strand starting at position 3744 of SEQ ID NO: 1879335
ccaacuaaugcagaagguu

SEQ ID NO: 1899539 - RNA, 19 nt, Artificial Sequence
  Description of Artificial Sequence: Synthetic oligonucleotide
  Antisense strand to SEQ ID NO: 1899538
aaccuucugcauuaguugg

SEQ ID NO: 1899540 - RNA, 19 nt, Artificial Sequence
  Description of Artificial Sequence: Synthetic oligonucleotide
  Sense strand starting at position 3877 of SEQ ID NO: 1879335
cccucauuugucugucuga

SEQ ID NO: 1899541 - RNA, 19 nt, Artificial Sequence
  Description of Artificial Sequence: Synthetic oligonucleotide
  Antisense strand to SEQ ID NO: 1899540
ucagacagacaaaugaggg

SEQ ID NO: 1899542 - RNA, 19 nt, Artificial Sequence
  Description of Artificial Sequence: Synthetic oligonucleotide
  Sense strand starting at position 3878 of SEQ ID NO: 1879335
ccucauuugucugucugaa

SEQ ID NO: 1899543 - RNA, 19 nt, Artificial Sequence
  Description of Artificial Sequence: Synthetic oligonucleotide
  Antisense strand to SEQ ID NO: 1899542
uucagacagacaaaugagg

SEQ ID NO: 1899544 - RNA, 19 nt, Artificial Sequence
  Description of Artificial Sequence: Synthetic oligonucleotide
  Sense strand starting at position 3909 of SEQ ID NO: 1879335
uugagauguuucccacaga

SEQ ID NO: 1899545 - RNA, 19 nt, Artificial Sequence
  Description of Artificial Sequence: Synthetic oligonucleotide
  Antisense strand to SEQ ID NO: 1899544
ucugugggaaacaucucaa

SEQ ID NO: 1899546 - RNA, 19 nt, Artificial Sequence
  Description of Artificial Sequence: Synthetic oligonucleotide
  Sense strand starting at position 3920 of SEQ ID NO: 1879335
cccacagauaucuggguga

SEQ ID NO: 1899547 - RNA, 19 nt, Artificial Sequence
  Description of Artificial Sequence: Synthetic oligonucleotide
  Antisense strand to SEQ ID NO: 1899546
ucacccagauaucuguggg

SEQ ID NO: 1899548 - RNA, 19 nt, Artificial Sequence
  Description of Artificial Sequence: Synthetic oligonucleotide
  Sense strand starting at position 3922 of SEQ ID NO: 1879335
cacagauaucugggugaug

SEQ ID NO: 1899549 - RNA, 19 nt, Artificial Sequence
  Description of Artificial Sequence: Synthetic oligonucleotide
  Antisense strand to SEQ ID NO: 1899548
caucacccagauaucugug

SEQ ID NO: 1899550 - RNA, 19 nt, Artificial Sequence
  Description of Artificial Sequence: Synthetic oligonucleotide
  Sense strand starting at position 3923 of SEQ ID NO: 1879335
acagauaucugggugaugu

SEQ ID NO: 1899551 - RNA, 19 nt, Artificial Sequence
  Description of Artificial Sequence: Synthetic oligonucleotide
  Antisense strand to SEQ ID NO: 1899550
acaucacccagauaucugu

SEQ ID NO: 1899552 - RNA, 19 nt, Artificial Sequence
  Description of Artificial Sequence: Synthetic oligonucleotide
  Sense strand starting at position 267 of SEQ ID NO: 1879336
uauuuauucuauccggguu

SEQ ID NO: 1899553 - RNA, 19 nt, Artificial Sequence
  Description of Artificial Sequence: Synthetic oligonucleotide
  Antisense strand to SEQ ID NO: 1899552
aacccggauagaauaaaua

SEQ ID NO: 1899554 - RNA, 19 nt, Artificial Sequence
  Description of Artificial Sequence: Synthetic oligonucleotide
  Sense strand starting at position 273 of SEQ ID NO: 1879336
uucuauccggguuaagauc

SEQ ID NO: 1899555 - RNA, 19 nt, Artificial Sequence
  Description of Artificial Sequence: Synthetic oligonucleotide
  Antisense strand to SEQ ID NO: 1899554
gaucuuaacccggauagaa

SEQ ID NO: 1899556 - RNA, 19 nt, Artificial Sequence
  Description of Artificial Sequence: Synthetic oligonucleotide
  Sense strand starting at position 445 of SEQ ID NO: 1879336
auagucaggagcuguaaga

SEQ ID NO: 1899557 - RNA, 19 nt, Artificial Sequence
  Description of Artificial Sequence: Synthetic oligonucleotide
  Antisense strand to SEQ ID NO: 1899556
ucuuacagcuccugacuau

SEQ ID NO: 1899558 - RNA, 19 nt, Artificial Sequence
  Description of Artificial Sequence: Synthetic oligonucleotide
  Sense strand starting at position 454 of SEQ ID NO: 1879336
agcuguaagagacggaauu

SEQ ID NO: 1899559 - RNA, 19 nt, Artificial Sequence
  Description of Artificial Sequence: Synthetic oligonucleotide
  Antisense strand to SEQ ID NO: 1899558
aauuccgucucuuacagcu

SEQ ID NO: 1899560 - RNA, 19 nt, Artificial Sequence
  Description of Artificial Sequence: Synthetic oligonucleotide
  Sense strand starting at position 455 of SEQ ID NO: 1879336
gcuguaagagacggaauua

SEQ ID NO: 1899561 - RNA, 19 nt, Artificial Sequence
  Description of Artificial Sequence: Synthetic oligonucleotide
  Antisense strand to SEQ ID NO: 1899560
uaauuccgucucuuacagc

SEQ ID NO: 1899562 - RNA, 19 nt, Artificial Sequence
  Description of Artificial Sequence: Synthetic oligonucleotide
  Sense strand starting at position 524 of SEQ ID NO: 1879336
aagaaaugacuugguccca

SEQ ID NO: 1899563 - RNA, 19 nt, Artificial Sequence
  Description of Artificial Sequence: Synthetic oligonucleotide
  Antisense strand to SEQ ID NO: 1899562
ugggaccaagucauuucuu

SEQ ID NO: 1899564 - RNA, 19 nt, Artificial Sequence
  Description of Artificial Sequence: Synthetic oligonucleotide
  Sense strand starting at position 525 of SEQ ID NO: 1879336
agaaaugacuuggucccaa

SEQ ID NO: 1899565 - RNA, 19 nt, Artificial Sequence
  Description of Artificial Sequence: Synthetic oligonucleotide
  Antisense strand to SEQ ID NO: 1899564
uugggaccaagucauuucu

SEQ ID NO: 1899566 - RNA, 19 nt, Artificial Sequence
  Description of Artificial Sequence: Synthetic oligonucleotide
  Sense strand starting at position 589 of SEQ ID NO: 1879336
agcccuauuugguuaagca

SEQ ID NO: 1899567 - RNA, 19 nt, Artificial Sequence
  Description of Artificial Sequence: Synthetic oligonucleotide
  Antisense strand to SEQ ID NO: 1899566
ugcuuaaccaaauagggcu

SEQ ID NO: 1899568 - RNA, 19 nt, Artificial Sequence
  Description of Artificial Sequence: Synthetic oligonucleotide
  Sense strand starting at position 652 of SEQ ID NO: 1879336
agauaaaggaugugucucu

SEQ ID NO: 1899569 - RNA, 19 nt, Artificial Sequence
  Description of Artificial Sequence: Synthetic oligonucleotide
  Antisense strand to SEQ ID NO: 1899568
agagacacauccuuuaucu

SEQ ID NO: 1899570 - RNA, 19 nt, Artificial Sequence
  Description of Artificial Sequence: Synthetic oligonucleotide
  Sense strand starting at position 653 of SEQ ID NO: 1879336
gauaaaggaugugucucua

SEQ ID NO: 1899571 - RNA, 19 nt, Artificial Sequence
  Description of Artificial Sequence: Synthetic oligonucleotide
  Antisense strand to SEQ ID NO: 1899570
uagagacacauccuuuauc

SEQ ID NO: 1899572 - RNA, 19 nt, Artificial Sequence
  Description of Artificial Sequence: Synthetic oligonucleotide
  Sense strand starting at position 810 of SEQ ID NO: 1879336
accguuucuccucauaaga

SEQ ID NO: 1899573 - RNA, 19 nt, Artificial Sequence
  Description of Artificial Sequence: Synthetic oligonucleotide
  Antisense strand to SEQ ID NO: 1899572
ucuuaugaggagaaacggu

SEQ ID NO: 1899574 - RNA, 19 nt, Artificial Sequence
  Description of Artificial Sequence: Synthetic oligonucleotide
  Sense strand starting at position 823 of SEQ ID NO: 1879336
auaagagguauccgugaac

SEQ ID NO: 1899575 - RNA, 19 nt, Artificial Sequence
  Description of Artificial Sequence: Synthetic oligonucleotide
  Antisense strand to SEQ ID NO: 1899574
guucacggauaccucuuau

SEQ ID NO: 1899576 - RNA, 19 nt, Artificial Sequence
  Description of Artificial Sequence: Synthetic oligonucleotide
  Sense strand starting at position 1213 of SEQ ID NO: 1879336
cccaguacccgagaaccau

SEQ ID NO: 1899577 - RNA, 19 nt, Artificial Sequence
  Description of Artificial Sequence: Synthetic oligonucleotide
  Antisense strand to SEQ ID NO: 1899576
augguucucggguacuggg

SEQ ID NO: 1899578 - RNA, 19 nt, Artificial Sequence
  Description of Artificial Sequence: Synthetic oligonucleotide
  Sense strand starting at position 1300 of SEQ ID NO: 1879336
ggcuuuauacccgacauaa

SEQ ID NO: 1899579 - RNA, 19 nt, Artificial Sequence
  Description of Artificial Sequence: Synthetic oligonucleotide
  Antisense strand to SEQ ID NO: 1899578
uuaugucggguauaaagcc

SEQ ID NO: 1899580 - RNA, 19 nt, Artificial Sequence
  Description of Artificial Sequence: Synthetic oligonucleotide
  Sense strand starting at position 1977 of SEQ ID NO: 1879336
cuugaagccuucucagaac

SEQ ID NO: 1899581 - RNA, 19 nt, Artificial Sequence
  Description of Artificial Sequence: Synthetic oligonucleotide
  Antisense strand to SEQ ID NO: 1899580
guucugagaaggcuucaag

SEQ ID NO: 1899582 - RNA, 19 nt, Artificial Sequence
  Description of Artificial Sequence: Synthetic oligonucleotide
  Sense strand starting at position 1999 of SEQ ID NO: 1879336
ccucuauccuggccagaag

SEQ ID NO: 1899583 - RNA, 19 nt, Artificial Sequence
  Description of Artificial Sequence: Synthetic oligonucleotide
  Antisense strand to SEQ ID NO: 1899582
cuucuggccaggauagagg

SEQ ID NO: 1899584 - RNA, 19 nt, Artificial Sequence
  Description of Artificial Sequence: Synthetic oligonucleotide
  Sense strand starting at position 2000 of SEQ ID NO: 1879336
cucuauccuggccagaaga

SEQ ID NO: 1899585 - RNA, 19 nt, Artificial Sequence
  Description of Artificial Sequence: Synthetic oligonucleotide
  Antisense strand to SEQ ID NO: 1899584
ucuucuggccaggauagag

SEQ ID NO: 1899586 - RNA, 19 nt, Artificial Sequence
  Description of Artificial Sequence: Synthetic oligonucleotide
  Sense strand starting at position 2016 of SEQ ID NO: 1879336
agaggucucuuaucuugaa

SEQ ID NO: 1899587 - RNA, 19 nt, Artificial Sequence
  Description of Artificial Sequence: Synthetic oligonucleotide
  Antisense strand to SEQ ID NO: 1899586
uucaagauaagagaccucu

SEQ ID NO: 1899588 - RNA, 19 nt, Artificial Sequence
  Description of Artificial Sequence: Synthetic oligonucleotide
  Sense strand starting at position 2017 of SEQ ID NO: 1879336
gaggucucuuaucuugaau

SEQ ID NO: 1899589 - RNA, 19 nt, Artificial Sequence
  Description of Artificial Sequence: Synthetic oligonucleotide
  Antisense strand to SEQ ID NO: 1899588
auucaagauaagagaccuc

SEQ ID NO: 1899590 - RNA, 19 nt, Artificial Sequence
  Description of Artificial Sequence: Synthetic oligonucleotide
  Sense strand starting at position 2020 of SEQ ID NO: 1879336
gucucuuaucuugaauguu

SEQ ID NO: 1899591 - RNA, 19 nt, Artificial Sequence
  Description of Artificial Sequence: Synthetic oligonucleotide
  Antisense strand to SEQ ID NO: 1899590
aacauucaagauaagagac

SEQ ID NO: 1899592 - RNA, 19 nt, Artificial Sequence
  Description of Artificial Sequence: Synthetic oligonucleotide
  Sense strand starting at position 2148 of SEQ ID NO: 1879336
ccucuuuguguaggaugga

SEQ ID NO: 1899593 - RNA, 19 nt, Artificial Sequence
  Description of Artificial Sequence: Synthetic oligonucleotide
  Antisense strand to SEQ ID NO: 1899592
uccauccuacacaaagagg

SEQ ID NO: 1899594 - RNA, 19 nt, Artificial Sequence
  Description of Artificial Sequence: Synthetic oligonucleotide
  Sense strand starting at position 2206 of SEQ ID NO: 1879336
ucaucuguccaacaauguu

SEQ ID NO: 1899595 - RNA, 19 nt, Artificial Sequence
  Description of Artificial Sequence: Synthetic oligonucleotide
  Antisense strand to SEQ ID NO: 1899594
aacauuguuggacagauga

SEQ ID NO: 1899596 - RNA, 19 nt, Artificial Sequence
  Description of Artificial Sequence: Synthetic oligonucleotide
  Sense strand starting at position 2367 of SEQ ID NO: 1879336
gguggugauacacauccua

SEQ ID NO: 1899597 - RNA, 19 nt, Artificial Sequence
  Description of Artificial Sequence: Synthetic oligonucleotide
  Antisense strand to SEQ ID NO: 1899596
uaggauguguaucaccacc

SEQ ID NO: 1899598 - RNA, 19 nt, Artificial Sequence
  Description of Artificial Sequence: Synthetic oligonucleotide
  Sense strand starting at position 2498 of SEQ ID NO: 1879336
uggagaaguuaaucuuuaa

SEQ ID NO: 1899599 - RNA, 19 nt, Artificial Sequence
  Description of Artificial Sequence: Synthetic oligonucleotide
  Antisense strand to SEQ ID NO: 1899598
uuaaagauuaacuucucca

SEQ ID NO: 1899600 - RNA, 19 nt, Artificial Sequence
  Description of Artificial Sequence: Synthetic oligonucleotide
  Sense strand starting at position 2701 of SEQ ID NO: 1879336
cuugaagccuucucagaau

SEQ ID NO: 1899601 - RNA, 19 nt, Artificial Sequence
  Description of Artificial Sequence: Synthetic oligonucleotide
  Antisense strand to SEQ ID NO: 1899600
auucugagaaggcuucaag

SEQ ID NO: 1899602 - RNA, 19 nt, Artificial Sequence
  Description of Artificial Sequence: Synthetic oligonucleotide
  Sense strand starting at position 2726 of SEQ ID NO: 1879336
cuauccuggccagaagagu

SEQ ID NO: 1899603 - RNA, 19 nt, Artificial Sequence
  Description of Artificial Sequence: Synthetic oligonucleotide
  Antisense strand to SEQ ID NO: 1899602
acucuucuggccaggauag

SEQ ID NO: 1899604 - RNA, 19 nt, Artificial Sequence
  Description of Artificial Sequence: Synthetic oligonucleotide
  Sense strand starting at position 2831 of SEQ ID NO: 1879336
aucacucuguguuugaaac

SEQ ID NO: 1899605 - RNA, 19 nt, Artificial Sequence
  Description of Artificial Sequence: Synthetic oligonucleotide
  Antisense strand to SEQ ID NO: 1899604
guuucaaacacagagugau

SEQ ID NO: 1899606 - RNA, 19 nt, Artificial Sequence
  Description of Artificial Sequence: Synthetic oligonucleotide
  Sense strand starting at position 2877 of SEQ ID NO: 1879336
gcacgaguagcagagauga

SEQ ID NO: 1899607 - RNA, 19 nt, Artificial Sequence
  Description of Artificial Sequence: Synthetic oligonucleotide
  Antisense strand to SEQ ID NO: 1899606
ucaucucugcuacucgugc

SEQ ID NO: 1899608 - RNA, 19 nt, Artificial Sequence
  Description of Artificial Sequence: Synthetic oligonucleotide
  Sense strand starting at position 2917 of SEQ ID NO: 1879336
cuggcauaucaacauguaa

SEQ ID NO: 1899609 - RNA, 19 nt, Artificial Sequence
  Description of Artificial Sequence: Synthetic oligonucleotide
  Antisense strand to SEQ ID NO: 1899608
uuacauguugauaugccag

SEQ ID NO: 1899610 - RNA, 19 nt, Artificial Sequence
  Description of Artificial Sequence: Synthetic oligonucleotide
  Sense strand starting at position 3016 of SEQ ID NO: 1879336
ccagaagccaugugaagau

SEQ ID NO: 1899611 - RNA, 19 nt, Artificial Sequence
  Description of Artificial Sequence: Synthetic oligonucleotide
  Antisense strand to SEQ ID NO: 1899610
aucuucacauggcuucugg

SEQ ID NO: 1899612 - RNA, 19 nt, Artificial Sequence
  Description of Artificial Sequence: Synthetic oligonucleotide
  Sense strand starting at position 3020 of SEQ ID NO: 1879336
aagccaugugaagauguuu

SEQ ID NO: 1899613 - RNA, 19 nt, Artificial Sequence
  Description of Artificial Sequence: Synthetic oligonucleotide
  Antisense strand to SEQ ID NO: 1899612
aaacaucuucacauggcuu

SEQ ID NO: 1899614 - RNA, 19 nt, Artificial Sequence
  Description of Artificial Sequence: Synthetic oligonucleotide
  Sense strand starting at position 3062 of SEQ ID NO: 1879336
ucaaguguggcugaucaag

SEQ ID NO: 1899615 - RNA, 19 nt, Artificial Sequence
  Description of Artificial Sequence: Synthetic oligonucleotide
  Antisense strand to SEQ ID NO: 1899614
cuugaucagccacacuuga

SEQ ID NO: 1899616 - RNA, 19 nt, Artificial Sequence
  Description of Artificial Sequence: Synthetic oligonucleotide
  Sense strand starting at position 3104 of SEQ ID NO: 1879336
gguugaauuuaggaaagua

SEQ ID NO: 1899617 - RNA, 19 nt, Artificial Sequence
  Description of Artificial Sequence: Synthetic oligonucleotide
  Antisense strand to SEQ ID NO: 1899616
uacuuuccuaaauucaacc

SEQ ID NO: 1899618 - RNA, 19 nt, Artificial Sequence
  Description of Artificial Sequence: Synthetic oligonucleotide
  Sense strand starting at position 3163 of SEQ ID NO: 1879336
cccuauagucaugggaaga

SEQ ID NO: 1899619 - RNA, 19 nt, Artificial Sequence
  Description of Artificial Sequence: Synthetic oligonucleotide
  Antisense strand to SEQ ID NO: 1899618
ucuucccaugacuauaggg

SEQ ID NO: 1899620 - RNA, 19 nt, Artificial Sequence
  Description of Artificial Sequence: Synthetic oligonucleotide
  Sense strand starting at position 3259 of SEQ ID NO: 1879336
auaggauucuaguugaaug

SEQ ID NO: 1899621 - RNA, 19 nt, Artificial Sequence
  Description of Artificial Sequence: Synthetic oligonucleotide
  Antisense strand to SEQ ID NO: 1899620
cauucaacuagaauccuau

SEQ ID NO: 1899622 - RNA, 19 nt, Artificial Sequence
  Description of Artificial Sequence: Synthetic oligonucleotide
  Sense strand starting at position 3270 of SEQ ID NO: 1879336
guugaauguggaggaguga

SEQ ID NO: 1899623 - RNA, 19 nt, Artificial Sequence
  Description of Artificial Sequence: Synthetic oligonucleotide
  Antisense strand to SEQ ID NO: 1899622
ucacuccuccacauucaac

SEQ ID NO: 1899624 - RNA, 19 nt, Artificial Sequence
  Description of Artificial Sequence: Synthetic oligonucleotide
  Sense strand starting at position 3497 of SEQ ID NO: 1879336
auuuauaaugccugugucu

SEQ ID NO: 1899625 - RNA, 19 nt, Artificial Sequence
  Description of Artificial Sequence: Synthetic oligonucleotide
  Antisense strand to SEQ ID NO: 1899624
agacacaggcauuauaaau

SEQ ID NO: 1899626 - RNA, 19 nt, Artificial Sequence
  Description of Artificial Sequence: Synthetic oligonucleotide
  Sense strand starting at position 3611 of SEQ ID NO: 1879336
uguuuacguauguuagcua

SEQ ID NO: 1899627 - RNA, 19 nt, Artificial Sequence
  Description of Artificial Sequence: Synthetic oligonucleotide
  Antisense strand to SEQ ID NO: 1899626
uagcuaacauacguaaaca

SEQ ID NO: 1899628 - RNA, 19 nt, Artificial Sequence
  Description of Artificial Sequence: Synthetic oligonucleotide
  Sense strand starting at position 3615 of SEQ ID NO: 1879336
uacguauguuagcuaauuu

SEQ ID NO: 1899629 - RNA, 19 nt, Artificial Sequence
  Description of Artificial Sequence: Synthetic oligonucleotide
  Antisense strand to SEQ ID NO: 1899628
aaauuagcuaacauacgua

SEQ ID NO: 1899630 - RNA, 19 nt, Artificial Sequence
  Description of Artificial Sequence: Synthetic oligonucleotide
  Sense strand starting at position 3660 of SEQ ID NO: 1879336
uuaggaaguagguguuaug

SEQ ID NO: 1899631 - RNA, 19 nt, Artificial Sequence
  Description of Artificial Sequence: Synthetic oligonucleotide
  Antisense strand to SEQ ID NO: 1899630
cauaacaccuacuuccuaa

SEQ ID NO: 1899632 - RNA, 19 nt, Artificial Sequence
  Description of Artificial Sequence: Synthetic oligonucleotide
  Sense strand starting at position 112 of SEQ ID NO: 1879337
gaucaauagcagugaggag

SEQ ID NO: 1899633 - RNA, 19 nt, Artificial Sequence
  Description of Artificial Sequence: Synthetic oligonucleotide
  Antisense strand to SEQ ID NO: 1899632
cuccucacugcuauugauc

SEQ ID NO: 1899634 - RNA, 19 nt, Artificial Sequence
  Description of Artificial Sequence: Synthetic oligonucleotide
  Sense strand starting at position 599 of SEQ ID NO: 1879337
gcaggccugacauagaaau

SEQ ID NO: 1899635 - RNA, 19 nt, Artificial Sequence
  Description of Artificial Sequence: Synthetic oligonucleotide
  Antisense strand to SEQ ID NO: 1899634
auuucuaugucaggccugc

SEQ ID NO: 1899636 - RNA, 19 nt, Artificial Sequence
  Description of Artificial Sequence: Synthetic oligonucleotide
  Sense strand starting at position 700 of SEQ ID NO: 1879337
gaagacuccugauccgaac

SEQ ID NO: 1899637 - RNA, 19 nt, Artificial Sequence
  Description of Artificial Sequence: Synthetic oligonucleotide
  Antisense strand to SEQ ID NO: 1899636
guucggaucaggagucuuc

SEQ ID NO: 1899638 - RNA, 19 nt, Artificial Sequence
  Description of Artificial Sequence: Synthetic oligonucleotide
  Sense strand starting at position 1269 of SEQ ID NO: 1879337
cggacacaagggugucauu

SEQ ID NO: 1899639 - RNA, 19 nt, Artificial Sequence
  Description of Artificial Sequence: Synthetic oligonucleotide
  Antisense strand to SEQ ID NO: 1899638
aaugacacccuuguguccg

SEQ ID NO: 1899640 - RNA, 19 nt, Artificial Sequence
  Description of Artificial Sequence: Synthetic oligonucleotide
  Sense strand starting at position 1380 of SEQ ID NO: 1879337
ccgcaggucgugucagaga

SEQ ID NO: 1899641 - RNA, 19 nt, Artificial Sequence
  Description of Artificial Sequence: Synthetic oligonucleotide
  Antisense strand to SEQ ID NO: 1899640
ucucugacacgaccugcgg

SEQ ID NO: 1899642 - RNA, 19 nt, Artificial Sequence
  Description of Artificial Sequence: Synthetic oligonucleotide
  Sense strand starting at position 1382 of SEQ ID NO: 1879337
gcaggucgugucagagaug

SEQ ID NO: 1899643 - RNA, 19 nt, Artificial Sequence
  Description of Artificial Sequence: Synthetic oligonucleotide
  Antisense strand to SEQ ID NO: 1899642
caucucugacacgaccugc

SEQ ID NO: 1899644 - RNA, 19 nt, Artificial Sequence
  Description of Artificial Sequence: Synthetic oligonucleotide
  Sense strand starting at position 1385 of SEQ ID NO: 1879337
ggucgugucagagauggag

SEQ ID NO: 1899645 - RNA, 19 nt, Artificial Sequence
  Description of Artificial Sequence: Synthetic oligonucleotide
  Antisense strand to SEQ ID NO: 1899644
cuccaucucugacacgacc

SEQ ID NO: 1899646 - RNA, 19 nt, Artificial Sequence
  Description of Artificial Sequence: Synthetic oligonucleotide
  Sense strand starting at position 1536 of SEQ ID NO: 1879337
aggcccuccugugagagau

SEQ ID NO: 1899647 - RNA, 19 nt, Artificial Sequence
  Description of Artificial Sequence: Synthetic oligonucleotide
  Antisense strand to SEQ ID NO: 1899646
aucucucacaggagggccu

SEQ ID NO: 1899648 - RNA, 19 nt, Artificial Sequence
  Description of Artificial Sequence: Synthetic oligonucleotide
  Sense strand starting at position 2059 of SEQ ID NO: 1879337
ggcugugcgcgugagagua

SEQ ID NO: 1899649 - RNA, 19 nt, Artificial Sequence
  Description of Artificial Sequence: Synthetic oligonucleotide
  Antisense strand to SEQ ID NO: 1899648
uacucucacgcgcacagcc

SEQ ID NO: 1899650 - RNA, 19 nt, Artificial Sequence
  Description of Artificial Sequence: Synthetic oligonucleotide
  Sense strand starting at position 2072 of SEQ ID NO: 1879337
agaguaaagccagaucgua

SEQ ID NO: 1899651 - RNA, 19 nt, Artificial Sequence
  Description of Artificial Sequence: Synthetic oligonucleotide
  Antisense strand to SEQ ID NO: 1899650
uacgaucuggcuuuacucu

SEQ ID NO: 1899652 - RNA, 19 nt, Artificial Sequence
  Description of Artificial Sequence: Synthetic oligonucleotide
  Sense strand starting at position 2077 of SEQ ID NO: 1879337
aaagccagaucguaagaga

SEQ ID NO: 1899653 - RNA, 19 nt, Artificial Sequence
  Description of Artificial Sequence: Synthetic oligonucleotide
  Antisense strand to SEQ ID NO: 1899652
ucucuuacgaucuggcuuu

SEQ ID NO: 1899654 - RNA, 19 nt, Artificial Sequence
  Description of Artificial Sequence: Synthetic oligonucleotide
  Sense strand starting at position 2248 of SEQ ID NO: 1879337
gucuuagaagucugauggu

SEQ ID NO: 1899655 - RNA, 19 nt, Artificial Sequence
  Description of Artificial Sequence: Synthetic oligonucleotide
  Antisense strand to SEQ ID NO: 1899654
accaucagacuucuaagac

SEQ ID NO: 1899656 - RNA, 19 nt, Artificial Sequence
  Description of Artificial Sequence: Synthetic oligonucleotide
  Sense strand starting at position 2301 of SEQ ID NO: 1879337
aggcuaugucaccgaagcu

SEQ ID NO: 1899657 - RNA, 19 nt, Artificial Sequence
  Description of Artificial Sequence: Synthetic oligonucleotide
  Antisense strand to SEQ ID NO: 1899656
agcuucggugacauagccu

SEQ ID NO: 1899658 - RNA, 19 nt, Artificial Sequence
  Description of Artificial Sequence: Synthetic oligonucleotide
  Sense strand starting at position 2404 of SEQ ID NO: 1879337
ggaaguggccuauguguca

SEQ ID NO: 1899659 - RNA, 19 nt, Artificial Sequence
  Description of Artificial Sequence: Synthetic oligonucleotide
  Antisense strand to SEQ ID NO: 1899658
ugacacauaggccacuucc

SEQ ID NO: 1899660 - RNA, 19 nt, Artificial Sequence
  Description of Artificial Sequence: Synthetic oligonucleotide
  Sense strand starting at position 2421 of SEQ ID NO: 1879337
caagguggauucccaugua

SEQ ID NO: 1899661 - RNA, 19 nt, Artificial Sequence
  Description of Artificial Sequence: Synthetic oligonucleotide
  Antisense strand to SEQ ID NO: 1899660
uacaugggaauccaccuug

SEQ ID NO: 1899662 - RNA, 19 nt, Artificial Sequence
  Description of Artificial Sequence: Synthetic oligonucleotide
  Sense strand starting at position 2424 of SEQ ID NO: 1879337
gguggauucccauguaggu

SEQ ID NO: 1899663 - RNA, 19 nt, Artificial Sequence
  Description of Artificial Sequence: Synthetic oligonucleotide
  Antisense strand to SEQ ID NO: 1899662
accuacaugggaauccacc

SEQ ID NO: 1899664 - RNA, 19 nt, Artificial Sequence
  Description of Artificial Sequence: Synthetic oligonucleotide
  Sense strand starting at position 2527 of SEQ ID NO: 1879337
uuaagaaugugucauucug

SEQ ID NO: 1899665 - RNA, 19 nt, Artificial Sequence
  Description of Artificial Sequence: Synthetic oligonucleotide
  Antisense strand to SEQ ID NO: 1899664
cagaaugacacauucuuaa

SEQ ID NO: 1899666 - RNA, 19 nt, Artificial Sequence
  Description of Artificial Sequence: Synthetic oligonucleotide
  Sense strand starting at position 2529 of SEQ ID NO: 1879337
aagaaugugucauucugag

SEQ ID NO: 1899667 - RNA, 19 nt, Artificial Sequence
  Description of Artificial Sequence: Synthetic oligonucleotide
  Antisense strand to SEQ ID NO: 1899666
cucagaaugacacauucuu

SEQ ID NO: 1899668 - RNA, 19 nt, Artificial Sequence
  Description of Artificial Sequence: Synthetic oligonucleotide
  Sense strand starting at position 2853 of SEQ ID NO: 1879337
cugucauucugaguuuauc

SEQ ID NO: 1899669 - RNA, 19 nt, Artificial Sequence
  Description of Artificial Sequence: Synthetic oligonucleotide
  Antisense strand to SEQ ID NO: 1899668
gauaaacucagaaugacag

SEQ ID NO: 1899670 - RNA, 19 nt, Artificial Sequence
  Description of Artificial Sequence: Synthetic oligonucleotide
  Sense strand starting at position 2856 of SEQ ID NO: 1879337
ucauucugaguuuauccau

SEQ ID NO: 1899671 - RNA, 19 nt, Artificial Sequence
  Description of Artificial Sequence: Synthetic oligonucleotide
  Antisense strand to SEQ ID NO: 1899670
auggauaaacucagaauga

SEQ ID NO: 1899672 - RNA, 19 nt, Artificial Sequence
  Description of Artificial Sequence: Synthetic oligonucleotide
  Sense strand starting at position 2859 of SEQ ID NO: 1879337
uucugaguuuauccaucuu

SEQ ID NO: 1899673 - RNA, 19 nt, Artificial Sequence
  Description of Artificial Sequence: Synthetic oligonucleotide
  Antisense strand to SEQ ID NO: 1899672
aagauggauaaacucagaa

SEQ ID NO: 1899674 - RNA, 19 nt, Artificial Sequence
  Description of Artificial Sequence: Synthetic oligonucleotide
  Sense strand starting at position 2872 of SEQ ID NO: 1879337
caucuugagcugggaaaga

SEQ ID NO: 1899675 - RNA, 19 nt, Artificial Sequence
  Description of Artificial Sequence: Synthetic oligonucleotide
  Antisense strand to SEQ ID NO: 1899674
ucuuucccagcucaagaug

SEQ ID NO: 1899676 - RNA, 19 nt, Artificial Sequence
  Description of Artificial Sequence: Synthetic oligonucleotide
  Sense strand starting at position 2900 of SEQ ID NO: 1879337
uagguccaauugugaagau

SEQ ID NO: 1899677 - RNA, 19 nt, Artificial Sequence
  Description of Artificial Sequence: Synthetic oligonucleotide
  Antisense strand to SEQ ID NO: 1899676
aucuucacaauuggaccua

SEQ ID NO: 1899678 - RNA, 19 nt, Artificial Sequence
  Description of Artificial Sequence: Synthetic oligonucleotide
  Sense strand starting at position 2932 of SEQ ID NO: 1879337
agcuaacacuuaugagaau

SEQ ID NO: 1899679 - RNA, 19 nt, Artificial Sequence
  Description of Artificial Sequence: Synthetic oligonucleotide
  Antisense strand to SEQ ID NO: 1899678
auucucauaaguguuagcu

SEQ ID NO: 1899680 - RNA, 19 nt, Artificial Sequence
  Description of Artificial Sequence: Synthetic oligonucleotide
  Sense strand starting at position 2933 of SEQ ID NO: 1879337
gcuaacacuuaugagaaua

SEQ ID NO: 1899681 - RNA, 19 nt, Artificial Sequence
  Description of Artificial Sequence: Synthetic oligonucleotide
  Antisense strand to SEQ ID NO: 1899680
uauucucauaaguguuagc

SEQ ID NO: 1899682 - RNA, 19 nt, Artificial Sequence
  Description of Artificial Sequence: Synthetic oligonucleotide
  Sense strand starting at position 3017 of SEQ ID NO: 1879337
aaacaacaguuguugagau

SEQ ID NO: 1899683 - RNA, 19 nt, Artificial Sequence
  Description of Artificial Sequence: Synthetic oligonucleotide
  Antisense strand to SEQ ID NO: 1899682
aucucaacaacuguuguuu

SEQ ID NO: 1899684 - RNA, 19 nt, Artificial Sequence
  Description of Artificial Sequence: Synthetic oligonucleotide
  Sense strand starting at position 3021 of SEQ ID NO: 1879337
aacaguuguugagauccua

SEQ ID NO: 1899685 - RNA, 19 nt, Artificial Sequence
  Description of Artificial Sequence: Synthetic oligonucleotide
  Antisense strand to SEQ ID NO: 1899684
uaggaucucaacaacuguu

SEQ ID NO: 1899686 - RNA, 19 nt, Artificial Sequence
  Description of Artificial Sequence: Synthetic oligonucleotide
  Sense strand starting at position 3103 of SEQ ID NO: 1879337
cuagaagucaggugggaac

SEQ ID NO: 1899687 - RNA, 19 nt, Artificial Sequence
  Description of Artificial Sequence: Synthetic oligonucleotide
  Antisense strand to SEQ ID NO: 1899686
guucccaccugacuucuag

SEQ ID NO: 1899688 - RNA, 19 nt, Artificial Sequence
  Description of Artificial Sequence: Synthetic oligonucleotide
  Sense strand starting at position 3105 of SEQ ID NO: 1879337
agaagucaggugggaacua

SEQ ID NO: 1899689 - RNA, 19 nt, Artificial Sequence
  Description of Artificial Sequence: Synthetic oligonucleotide
  Antisense strand to SEQ ID NO: 1899688
uaguucccaccugacuucu

SEQ ID NO: 1899690 - RNA, 19 nt, Artificial Sequence
  Description of Artificial Sequence: Synthetic oligonucleotide
  Sense strand starting at position 3451 of SEQ ID NO: 1879337
gaagaaugugcacgcuguu

SEQ ID NO: 1899691 - RNA, 19 nt, Artificial Sequence
  Description of Artificial Sequence: Synthetic oligonucleotide
  Antisense strand to SEQ ID NO: 1899690
aacagcgugcacauucuuc

SEQ ID NO: 1899692 - RNA, 19 nt, Artificial Sequence
  Description of Artificial Sequence: Synthetic oligonucleotide
  Sense strand starting at position 3482 of SEQ ID NO: 1879337
ucugcaugccugugagauc

SEQ ID NO: 1899693 - RNA, 19 nt, Artificial Sequence
  Description of Artificial Sequence: Synthetic oligonucleotide
  Antisense strand to SEQ ID NO: 1899692
gaucucacaggcaugcaga

SEQ ID NO: 1899694 - RNA, 19 nt, Artificial Sequence
  Description of Artificial Sequence: Synthetic oligonucleotide
  Sense strand starting at position 3556 of SEQ ID NO: 1879337
gccuuuccauaauugaaag

SEQ ID NO: 1899695 - RNA, 19 nt, Artificial Sequence
  Description of Artificial Sequence: Synthetic oligonucleotide
  Antisense strand to SEQ ID NO: 1899694
cuuucaauuauggaaaggc

SEQ ID NO: 1899696 - RNA, 19 nt, Artificial Sequence
  Description of Artificial Sequence: Synthetic oligonucleotide
  Sense strand starting at position 3584 of SEQ ID NO: 1879337
agagccucccauuguuaau

SEQ ID NO: 1899697 - RNA, 19 nt, Artificial Sequence
  Description of Artificial Sequence: Synthetic oligonucleotide
  Antisense strand to SEQ ID NO: 1899696
auuaacaaugggaggcucu

SEQ ID NO: 1899698 - RNA, 19 nt, Artificial Sequence
  Description of Artificial Sequence: Synthetic oligonucleotide
  Sense strand starting at position 3660 of SEQ ID NO: 1879337
uuauuccuacuaugggaau

SEQ ID NO: 1899699 - RNA, 19 nt, Artificial Sequence
  Description of Artificial Sequence: Synthetic oligonucleotide
  Antisense strand to SEQ ID NO: 1899698
auucccauaguaggaauaa

SEQ ID NO: 1899700 - RNA, 19 nt, Artificial Sequence
  Description of Artificial Sequence: Synthetic oligonucleotide
  Sense strand starting at position 3676 of SEQ ID NO: 1879337
aauugcaucuuguaugaga

SEQ ID NO: 1899701 - RNA, 19 nt, Artificial Sequence
  Description of Artificial Sequence: Synthetic oligonucleotide
  Antisense strand to SEQ ID NO: 1899700
ucucauacaagaugcaauu

SEQ ID NO: 1899702 - RNA, 19 nt, Artificial Sequence
  Description of Artificial Sequence: Synthetic oligonucleotide
  Sense strand starting at position 3678 of SEQ ID NO: 1879337
uugcaucuuguaugagaga

SEQ ID NO: 1899703 - RNA, 19 nt, Artificial Sequence
  Description of Artificial Sequence: Synthetic oligonucleotide
  Antisense strand to SEQ ID NO: 1899702
ucucucauacaagaugcaa

SEQ ID NO: 1899704 - RNA, 19 nt, Artificial Sequence
  Description of Artificial Sequence: Synthetic oligonucleotide
  Sense strand starting at position 3679 of SEQ ID NO: 1879337
ugcaucuuguaugagagaa

SEQ ID NO: 1899705 - RNA, 19 nt, Artificial Sequence
  Description of Artificial Sequence: Synthetic oligonucleotide
  Antisense strand to SEQ ID NO: 1899704
uucucucauacaagaugca

SEQ ID NO: 1899706 - RNA, 19 nt, Artificial Sequence
  Description of Artificial Sequence: Synthetic oligonucleotide
  Sense strand starting at position 3681 of SEQ ID NO: 1879337
caucuuguaugagagaaau

SEQ ID NO: 1899707 - RNA, 19 nt, Artificial Sequence
  Description of Artificial Sequence: Synthetic oligonucleotide
  Antisense strand to SEQ ID NO: 1899706
auuucucucauacaagaug

SEQ ID NO: 1899708 - RNA, 19 nt, Artificial Sequence
  Description of Artificial Sequence: Synthetic oligonucleotide
  Sense strand starting at position 3723 of SEQ ID NO: 1879337
accagauuaucugugcuuu

SEQ ID NO: 1899709 - RNA, 19 nt, Artificial Sequence
  Description of Artificial Sequence: Synthetic oligonucleotide
  Antisense strand to SEQ ID NO: 1899708
aaagcacagauaaucuggu

SEQ ID NO: 1899710 - RNA, 19 nt, Artificial Sequence
  Description of Artificial Sequence: Synthetic oligonucleotide
  Sense strand starting at position 3724 of SEQ ID NO: 1879337
ccagauuaucugugcuuuc

SEQ ID NO: 1899711 - RNA, 19 nt, Artificial Sequence
  Description of Artificial Sequence: Synthetic oligonucleotide
  Antisense strand to SEQ ID NO: 1899710
gaaagcacagauaaucugg

SEQ ID NO: 1899712 - RNA, 19 nt, Artificial Sequence
  Description of Artificial Sequence: Synthetic oligonucleotide
  Sense strand starting at position 11 of SEQ ID NO: 1879338
uccuuagaccuccagguaa

SEQ ID NO: 1899713 - RNA, 19 nt, Artificial Sequence
  Description of Artificial Sequence: Synthetic oligonucleotide
  Antisense strand to SEQ ID NO: 1899712
uuaccuggaggucuaagga

SEQ ID NO: 1899714 - RNA, 19 nt, Artificial Sequence
  Description of Artificial Sequence: Synthetic oligonucleotide
  Sense strand starting at position 13 of SEQ ID NO: 1879338
cuuagaccuccagguaaga

SEQ ID NO: 1899715 - RNA, 19 nt, Artificial Sequence
  Description of Artificial Sequence: Synthetic oligonucleotide
  Antisense strand to SEQ ID NO: 1899714
ucuuaccuggaggucuaag

SEQ ID NO: 1899716 - RNA, 19 nt, Artificial Sequence
  Description of Artificial Sequence: Synthetic oligonucleotide
  Sense strand starting at position 117 of SEQ ID NO: 1879338
guaguuaaguguucaaaug

SEQ ID NO: 1899717 - RNA, 19 nt, Artificial Sequence
  Description of Artificial Sequence: Synthetic oligonucleotide
  Antisense strand to SEQ ID NO: 1899716
cauuugaacacuuaacuac

SEQ ID NO: 1899718 - RNA, 19 nt, Artificial Sequence
  Description of Artificial Sequence: Synthetic oligonucleotide
  Sense strand starting at position 209 of SEQ ID NO: 1879338
aagagagacuuugucccau

SEQ ID NO: 1899719 - RNA, 19 nt, Artificial Sequence
  Description of Artificial Sequence: Synthetic oligonucleotide
  Antisense strand to SEQ ID NO: 1899718
augggacaaagucucucuu

SEQ ID NO: 1899720 - RNA, 19 nt, Artificial Sequence
  Description of Artificial Sequence: Synthetic oligonucleotide
  Sense strand starting at position 485 of SEQ ID NO: 1879338
uggaaauuaugaucaguau

SEQ ID NO: 1899721 - RNA, 19 nt, Artificial Sequence
  Description of Artificial Sequence: Synthetic oligonucleotide
  Antisense strand to SEQ ID NO: 1899720
auacugaucauaauuucca

SEQ ID NO: 1899722 - RNA, 19 nt, Artificial Sequence
  Description of Artificial Sequence: Synthetic oligonucleotide
  Sense strand starting at position 543 of SEQ ID NO: 1879338
gaagauuacgucuacccaa

SEQ ID NO: 1899723 - RNA, 19 nt, Artificial Sequence
  Description of Artificial Sequence: Synthetic oligonucleotide
  Antisense strand to SEQ ID NO: 1899722
uuggguagacguaaucuuc

SEQ ID NO: 1899724 - RNA, 19 nt, Artificial Sequence
  Description of Artificial Sequence: Synthetic oligonucleotide
  Sense strand starting at position 626 of SEQ ID NO: 1879338
ugccaauucugagcgacaa

SEQ ID NO: 1899725 - RNA, 19 nt, Artificial Sequence
  Description of Artificial Sequence: Synthetic oligonucleotide
  Antisense strand to SEQ ID NO: 1899724
uugucgcucagaauuggca

SEQ ID NO: 1899726 - RNA, 19 nt, Artificial Sequence
  Description of Artificial Sequence: Synthetic oligonucleotide
  Sense strand starting at position 627 of SEQ ID NO: 1879338
gccaauucugagcgacaaa

SEQ ID NO: 1899727 - RNA, 19 nt, Artificial Sequence
  Description of Artificial Sequence: Synthetic oligonucleotide
  Antisense strand to SEQ ID NO: 1899726
uuugucgcucagaauuggc

SEQ ID NO: 1899728 - RNA, 19 nt, Artificial Sequence
  Description of Artificial Sequence: Synthetic oligonucleotide
  Sense strand starting at position 704 of SEQ ID NO: 1879338
auuagaaaugucuguaaac

SEQ ID NO: 1899729 - RNA, 19 nt, Artificial Sequence
  Description of Artificial Sequence: Synthetic oligonucleotide
  Antisense strand to SEQ ID NO: 1899728
guuuacagacauuucuaau

SEQ ID NO: 1899730 - RNA, 19 nt, Artificial Sequence
  Description of Artificial Sequence: Synthetic oligonucleotide
  Sense strand starting at position 705 of SEQ ID NO: 1879338
uuagaaaugucuguaaaca

SEQ ID NO: 1899731 - RNA, 19 nt, Artificial Sequence
  Description of Artificial Sequence: Synthetic oligonucleotide
  Antisense strand to SEQ ID NO: 1899730
uguuuacagacauuucuaa

SEQ ID NO: 1899732 - RNA, 19 nt, Artificial Sequence
  Description of Artificial Sequence: Synthetic oligonucleotide
  Sense strand starting at position 842 of SEQ ID NO: 1879338
guugauggauugcuguaaa

SEQ ID NO: 1899733 - RNA, 19 nt, Artificial Sequence
  Description of Artificial Sequence: Synthetic oligonucleotide
  Antisense strand to SEQ ID NO: 1899732
uuuacagcaauccaucaac

SEQ ID NO: 1899734 - RNA, 19 nt, Artificial Sequence
  Description of Artificial Sequence: Synthetic oligonucleotide
  Sense strand starting at position 845 of SEQ ID NO: 1879338
gauggauugcuguaaauau

SEQ ID NO: 1899735 - RNA, 19 nt, Artificial Sequence
  Description of Artificial Sequence: Synthetic oligonucleotide
  Antisense strand to SEQ ID NO: 1899734
auauuuacagcaauccauc

SEQ ID NO: 1899736 - RNA, 19 nt, Artificial Sequence
  Description of Artificial Sequence: Synthetic oligonucleotide
  Sense strand starting at position 994 of SEQ ID NO: 1879338
aggcuucgcagugaaauaa

SEQ ID NO: 1899737 - RNA, 19 nt, Artificial Sequence
  Description of Artificial Sequence: Synthetic oligonucleotide
  Antisense strand to SEQ ID NO: 1899736
uuauuucacugcgaagccu

SEQ ID NO: 1899738 - RNA, 19 nt, Artificial Sequence
  Description of Artificial Sequence: Synthetic oligonucleotide
  Sense strand starting at position 1023 of SEQ ID NO: 1879338
gcacccaggcuuuaauuaa

SEQ ID NO: 1899739 - RNA, 19 nt, Artificial Sequence
  Description of Artificial Sequence: Synthetic oligonucleotide
  Antisense strand to SEQ ID NO: 1899738
uuaauuaaagccugggugc

SEQ ID NO: 1899740 - RNA, 19 nt, Artificial Sequence
  Description of Artificial Sequence: Synthetic oligonucleotide
  Sense strand starting at position 1034 of SEQ ID NO: 1879338
uuaauuaacgcacgacauc

SEQ ID NO: 1899741 - RNA, 19 nt, Artificial Sequence
  Description of Artificial Sequence: Synthetic oligonucleotide
  Antisense strand to SEQ ID NO: 1899740
gaugucgugcguuaauuaa

SEQ ID NO: 1899742 - RNA, 19 nt, Artificial Sequence
  Description of Artificial Sequence: Synthetic oligonucleotide
  Sense strand starting at position 1450 of SEQ ID NO: 1879338
uggugaagcuuagcaacaa

SEQ ID NO: 1899743 - RNA, 19 nt, Artificial Sequence
  Description of Artificial Sequence: Synthetic oligonucleotide
  Antisense strand to SEQ ID NO: 1899742
uuguugcuaagcuucacca

SEQ ID NO: 1899744 - RNA, 19 nt, Artificial Sequence
  Description of Artificial Sequence: Synthetic oligonucleotide
  Sense strand starting at position 2739 of SEQ ID NO: 1879338
acaacuugauccgcuaaga

SEQ ID NO: 1899745 - RNA, 19 nt, Artificial Sequence
  Description of Artificial Sequence: Synthetic oligonucleotide
  Antisense strand to SEQ ID NO: 1899744
ucuuagcggaucaaguugu

SEQ ID NO: 1899746 - RNA, 19 nt, Artificial Sequence
  Description of Artificial Sequence: Synthetic oligonucleotide
  Sense strand starting at position 2972 of SEQ ID NO: 1879338
guaggauugcuuuggaaag

SEQ ID NO: 1899747 - RNA, 19 nt, Artificial Sequence
  Description of Artificial Sequence: Synthetic oligonucleotide
  Antisense strand to SEQ ID NO: 1899746
cuuuccaaagcaauccuac

SEQ ID NO: 1899748 - RNA, 19 nt, Artificial Sequence
  Description of Artificial Sequence: Synthetic oligonucleotide
  Sense strand starting at position 2996 of SEQ ID NO: 1879338
gccgaauauagauagucaa

SEQ ID NO: 1899749 - RNA, 19 nt, Artificial Sequence
  Description of Artificial Sequence: Synthetic oligonucleotide
  Antisense strand to SEQ ID NO: 1899748
uugacuaucuauauucggc

SEQ ID NO: 1899750 - RNA, 19 nt, Artificial Sequence
  Description of Artificial Sequence: Synthetic oligonucleotide
  Sense strand starting at position 3026 of SEQ ID NO: 1879338
uucugcauaguuuagaaga

SEQ ID NO: 1899751 - RNA, 19 nt, Artificial Sequence
  Description of Artificial Sequence: Synthetic oligonucleotide
  Antisense strand to SEQ ID NO: 1899750
ucuucuaaacuaugcagaa

SEQ ID NO: 1899752 - RNA, 19 nt, Artificial Sequence
  Description of Artificial Sequence: Synthetic oligonucleotide
  Sense strand starting at position 3067 of SEQ ID NO: 1879338
gcaaacgugguuugggaau

SEQ ID NO: 1899753 - RNA, 19 nt, Artificial Sequence
  Description of Artificial Sequence: Synthetic oligonucleotide
  Antisense strand to SEQ ID NO: 1899752
auucccaaaccacguuugc

SEQ ID NO: 1899754 - RNA, 19 nt, Artificial Sequence
  Description of Artificial Sequence: Synthetic oligonucleotide
  Sense strand starting at position 3074 of SEQ ID NO: 1879338
ugguuugggaauuaguaca

SEQ ID NO: 1899755 - RNA, 19 nt, Artificial Sequence
  Description of Artificial Sequence: Synthetic oligonucleotide
  Antisense strand to SEQ ID NO: 1899754
uguacuaauucccaaacca

SEQ ID NO: 1899756 - RNA, 19 nt, Artificial Sequence
  Description of Artificial Sequence: Synthetic oligonucleotide
  Sense strand starting at position 3109 of SEQ ID NO: 1879338
uucucaguagcauaggaaa

SEQ ID NO: 1899757 - RNA, 19 nt, Artificial Sequence
  Description of Artificial Sequence: Synthetic oligonucleotide
  Antisense strand to SEQ ID NO: 1899756
uuuccuaugcuacugagaa

SEQ ID NO: 1899758 - RNA, 19 nt, Artificial Sequence
  Description of Artificial Sequence: Synthetic oligonucleotide
  Sense strand starting at position 3143 of SEQ ID NO: 1879338
ccaaguuauccucacgacu

SEQ ID NO: 1899759 - RNA, 19 nt, Artificial Sequence
  Description of Artificial Sequence: Synthetic oligonucleotide
  Antisense strand to SEQ ID NO: 1899758
agucgugaggauaacuugg

SEQ ID NO: 1899760 - RNA, 19 nt, Artificial Sequence
  Description of Artificial Sequence: Synthetic oligonucleotide
  Sense strand starting at position 3155 of SEQ ID NO: 1879338
cacgacuugucaguugauu

SEQ ID NO: 1899761 - RNA, 19 nt, Artificial Sequence
  Description of Artificial Sequence: Synthetic oligonucleotide
  Antisense strand to SEQ ID NO: 1899760
aaucaacugacaagucgug

SEQ ID NO: 1899762 - RNA, 19 nt, Artificial Sequence
  Description of Artificial Sequence: Synthetic oligonucleotide
  Sense strand starting at position 3254 of SEQ ID NO: 1879338
gcaaauaucccguagggua

SEQ ID NO: 1899763 - RNA, 19 nt, Artificial Sequence
  Description of Artificial Sequence: Synthetic oligonucleotide
  Antisense strand to SEQ ID NO: 1899762
uacccuacgggauauuugc

SEQ ID NO: 1899764 - RNA, 19 nt, Artificial Sequence
  Description of Artificial Sequence: Synthetic oligonucleotide
  Sense strand starting at position 3330 of SEQ ID NO: 1879338
cacaaagcggcuuagugau

SEQ ID NO: 1899765 - RNA, 19 nt, Artificial Sequence
  Description of Artificial Sequence: Synthetic oligonucleotide
  Antisense strand to SEQ ID NO: 1899764
aucacuaagccgcuuugug

SEQ ID NO: 1899766 - RNA, 19 nt, Artificial Sequence
  Description of Artificial Sequence: Synthetic oligonucleotide
  Sense strand starting at position 3332 of SEQ ID NO: 1879338
caaagcggcuuagugauaa

SEQ ID NO: 1899767 - RNA, 19 nt, Artificial Sequence
  Description of Artificial Sequence: Synthetic oligonucleotide
  Antisense strand to SEQ ID NO: 1899766
uuaucacuaagccgcuuug

SEQ ID NO: 1899768 - RNA, 19 nt, Artificial Sequence
  Description of Artificial Sequence: Synthetic oligonucleotide
  Sense strand starting at position 3345 of SEQ ID NO: 1879338
ugauaaacauuaucccgaa

SEQ ID NO: 1899769 - RNA, 19 nt, Artificial Sequence
  Description of Artificial Sequence: Synthetic oligonucleotide
  Antisense strand to SEQ ID NO: 1899768
uucgggauaauguuuauca

SEQ ID NO: 1899770 - RNA, 19 nt, Artificial Sequence
  Description of Artificial Sequence: Synthetic oligonucleotide
  Sense strand starting at position 3404 of SEQ ID NO: 1879338
uguccaaggucacuuaagu

SEQ ID NO: 1899771 - RNA, 19 nt, Artificial Sequence
  Description of Artificial Sequence: Synthetic oligonucleotide
  Antisense strand to SEQ ID NO: 1899770
acuuaagugaccuuggaca

SEQ ID NO: 1899772 - RNA, 19 nt, Artificial Sequence
  Description of Artificial Sequence: Synthetic oligonucleotide
  Sense strand starting at position 3410 of SEQ ID NO: 1879338
aggucacuuaagugaggaa

SEQ ID NO: 1899773 - RNA, 19 nt, Artificial Sequence
  Description of Artificial Sequence: Synthetic oligonucleotide
  Antisense strand to SEQ ID NO: 1899772
uuccucacuuaagugaccu

SEQ ID NO: 1899774 - RNA, 19 nt, Artificial Sequence
  Description of Artificial Sequence: Synthetic oligonucleotide
  Sense strand starting at position 3490 of SEQ ID NO: 1879338
auguuaaguguccaugguu

SEQ ID NO: 1899775 - RNA, 19 nt, Artificial Sequence
  Description of Artificial Sequence: Synthetic oligonucleotide
  Antisense strand to SEQ ID NO: 1899774
aaccauggacacuuaacau

SEQ ID NO: 1899776 - RNA, 19 nt, Artificial Sequence
  Description of Artificial Sequence: Synthetic oligonucleotide
  Sense strand starting at position 3677 of SEQ ID NO: 1879338
caggaaggcuguucugcau

SEQ ID NO: 1899777 - RNA, 19 nt, Artificial Sequence
  Description of Artificial Sequence: Synthetic oligonucleotide
  Antisense strand to SEQ ID NO: 1899776
augcagaacagccuuccug

SEQ ID NO: 1899778 - RNA, 19 nt, Artificial Sequence
  Description of Artificial Sequence: Synthetic oligonucleotide
  Sense strand starting at position 3724 of SEQ ID NO: 1879338
uguuaaaugacauggguaa

SEQ ID NO: 1899779 - RNA, 19 nt, Artificial Sequence
  Description of Artificial Sequence: Synthetic oligonucleotide
  Antisense strand to SEQ ID NO: 1899778
uuacccaugucauuuaaca

SEQ ID NO: 1899780 - RNA, 19 nt, Artificial Sequence
  Description of Artificial Sequence: Synthetic oligonucleotide
  Sense strand starting at position 3725 of SEQ ID NO: 1879338
guuaaaugacauggguaau

SEQ ID NO: 1899781 - RNA, 19 nt, Artificial Sequence
  Description of Artificial Sequence: Synthetic oligonucleotide
  Antisense strand to SEQ ID NO: 1899780
auuacccaugucauuuaac

SEQ ID NO: 1899782 - RNA, 19 nt, Artificial Sequence
  Description of Artificial Sequence: Synthetic oligonucleotide
  Sense strand starting at position 3825 of SEQ ID NO: 1879338
uagguagaguaauuaugau

SEQ ID NO: 1899783 - RNA, 19 nt, Artificial Sequence
  Description of Artificial Sequence: Synthetic oligonucleotide
  Antisense strand to SEQ ID NO: 1899782
aucauaauuacucuaccua

SEQ ID NO: 1899784 - RNA, 19 nt, Artificial Sequence
  Description of Artificial Sequence: Synthetic oligonucleotide
  Sense strand starting at position 3831 of SEQ ID NO: 1879338
gaguaauuaugaucuuaga

SEQ ID NO: 1899785 - RNA, 19 nt, Artificial Sequence
  Description of Artificial Sequence: Synthetic oligonucleotide
  Antisense strand to SEQ ID NO: 1899784
ucuaagaucauaauuacuc

SEQ ID NO: 1899786 - RNA, 19 nt, Artificial Sequence
  Description of Artificial Sequence: Synthetic oligonucleotide
  Sense strand starting at position 3844 of SEQ ID NO: 1879338
cuuagaugauuugaacuaa

SEQ ID NO: 1899787 - RNA, 19 nt, Artificial Sequence
  Description of Artificial Sequence: Synthetic oligonucleotide
  Antisense strand to SEQ ID NO: 1899786
uuaguucaaaucaucuaag

SEQ ID NO: 1899788 - RNA, 19 nt, Artificial Sequence
  Description of Artificial Sequence: Synthetic oligonucleotide
  Sense strand starting at position 3870 of SEQ ID NO: 1879338
gucuguccauuugugaaau

SEQ ID NO: 1899789 - RNA, 19 nt, Artificial Sequence
  Description of Artificial Sequence: Synthetic oligonucleotide
  Antisense strand to SEQ ID NO: 1899788
auuucacaaauggacagac

SEQ ID NO: 1899790 - RNA, 19 nt, Artificial Sequence
  Description of Artificial Sequence: Synthetic oligonucleotide
  Sense strand starting at position 3913 of SEQ ID NO: 1879338
gaaguuaggccacaaauuc

SEQ ID NO: 1899791 - RNA, 19 nt, Artificial Sequence
  Description of Artificial Sequence: Synthetic oligonucleotide
  Antisense strand to SEQ ID NO: 1899790
gaauuuguggccuaacuuc

SEQ ID NO: 1899792 - RNA, 19 nt, Artificial Sequence
  Description of Artificial Sequence: Synthetic oligonucleotide
  Sense strand starting at position 109 of SEQ ID NO: 1879339
gauggaagagcccagcuau

SEQ ID NO: 1899793 - RNA, 19 nt, Artificial Sequence
  Description of Artificial Sequence: Synthetic oligonucleotide
  Antisense strand to SEQ ID NO: 1899792
auagcugggcucuuccauc

SEQ ID NO: 1899794 - RNA, 19 nt, Artificial Sequence
  Description of Artificial Sequence: Synthetic oligonucleotide
  Sense strand starting at position 185 of SEQ ID NO: 1879339
cccagacuguguuucugaa

SEQ ID NO: 1899795 - RNA, 19 nt, Artificial Sequence
  Description of Artificial Sequence: Synthetic oligonucleotide
  Antisense strand to SEQ ID NO: 1899794
uucagaaacacagucuggg

SEQ ID NO: 1899796 - RNA, 19 nt, Artificial Sequence
  Description of Artificial Sequence: Synthetic oligonucleotide
  Sense strand starting at position 249 of SEQ ID NO: 1879339
ugagggagucaguggagua

SEQ ID NO: 1899797 - RNA, 19 nt, Artificial Sequence
  Description of Artificial Sequence: Synthetic oligonucleotide
  Antisense strand to SEQ ID NO: 1899796
uacuccacugacucccuca

SEQ ID NO: 1899798 - RNA, 19 nt, Artificial Sequence
  Description of Artificial Sequence: Synthetic oligonucleotide
  Sense strand starting at position 448 of SEQ ID NO: 1879339
gugccuuguauagacuaga

SEQ ID NO: 1899799 - RNA, 19 nt, Artificial Sequence
  Description of Artificial Sequence: Synthetic oligonucleotide
  Antisense strand to SEQ ID NO: 1899798
ucuagucuauacaaggcac

SEQ ID NO: 1899800 - RNA, 19 nt, Artificial Sequence
  Description of Artificial Sequence: Synthetic oligonucleotide
  Sense strand starting at position 453 of SEQ ID NO: 1879339
uuguauagacuagauuguu

SEQ ID NO: 1899801 - RNA, 19 nt, Artificial Sequence
  Description of Artificial Sequence: Synthetic oligonucleotide
  Antisense strand to SEQ ID NO: 1899800
aacaaucuagucuauacaa

SEQ ID NO: 1899802 - RNA, 19 nt, Artificial Sequence
  Description of Artificial Sequence: Synthetic oligonucleotide
  Sense strand starting at position 927 of SEQ ID NO: 1879339
agcugauauuguguaagga

SEQ ID NO: 1899803 - RNA, 19 nt, Artificial Sequence
  Description of Artificial Sequence: Synthetic oligonucleotide
  Antisense strand to SEQ ID NO: 1899802
uccuuacacaauaucagcu

SEQ ID NO: 1899804 - RNA, 19 nt, Artificial Sequence
  Description of Artificial Sequence: Synthetic oligonucleotide
  Sense strand starting at position 928 of SEQ ID NO: 1879339
gcugauauuguguaaggaa

SEQ ID NO: 1899805 - RNA, 19 nt, Artificial Sequence
  Description of Artificial Sequence: Synthetic oligonucleotide
  Antisense strand to SEQ ID NO: 1899804
uuccuuacacaauaucagc

SEQ ID NO: 1899806 - RNA, 19 nt, Artificial Sequence
  Description of Artificial Sequence: Synthetic oligonucleotide
  Sense strand starting at position 962 of SEQ ID NO: 1879339
guguuaucucacuaaguug

SEQ ID NO: 1899807 - RNA, 19 nt, Artificial Sequence
  Description of Artificial Sequence: Synthetic oligonucleotide
  Antisense strand to SEQ ID NO: 1899806
caacuuagugagauaacac

SEQ ID NO: 1899808 - RNA, 19 nt, Artificial Sequence
  Description of Artificial Sequence: Synthetic oligonucleotide
  Sense strand starting at position 965 of SEQ ID NO: 1879339
uuaucucacuaaguuguua

SEQ ID NO: 1899809 - RNA, 19 nt, Artificial Sequence
  Description of Artificial Sequence: Synthetic oligonucleotide
  Antisense strand to SEQ ID NO: 1899808
uaacaacuuagugagauaa

SEQ ID NO: 1899810 - RNA, 19 nt, Artificial Sequence
  Description of Artificial Sequence: Synthetic oligonucleotide
  Sense strand starting at position 1145 of SEQ ID NO: 1879339
ugauacgauuuagaguaca

SEQ ID NO: 1899811 - RNA, 19 nt, Artificial Sequence
  Description of Artificial Sequence: Synthetic oligonucleotide
  Antisense strand to SEQ ID NO: 1899810
uguacucuaaaucguauca

SEQ ID NO: 1899812 - RNA, 19 nt, Artificial Sequence
  Description of Artificial Sequence: Synthetic oligonucleotide
  Sense strand starting at position 1184 of SEQ ID NO: 1879339
agaguuaccugggaauuug

SEQ ID NO: 1899813 - RNA, 19 nt, Artificial Sequence
  Description of Artificial Sequence: Synthetic oligonucleotide
  Antisense strand to SEQ ID NO: 1899812
caaauucccagguaacucu

SEQ ID NO: 1899814 - RNA, 19 nt, Artificial Sequence
  Description of Artificial Sequence: Synthetic oligonucleotide
  Sense strand starting at position 1192 of SEQ ID NO: 1879339
cugggaauuuggcaauauu

SEQ ID NO: 1899815 - RNA, 19 nt, Artificial Sequence
  Description of Artificial Sequence: Synthetic oligonucleotide
  Antisense strand to SEQ ID NO: 1899814
aauauugccaaauucccag

SEQ ID NO: 1899816 - RNA, 19 nt, Artificial Sequence
  Description of Artificial Sequence: Synthetic oligonucleotide
  Sense strand starting at position 1299 of SEQ ID NO: 1879339
guuauuacugucuaucuca

SEQ ID NO: 1899817 - RNA, 19 nt, Artificial Sequence
  Description of Artificial Sequence: Synthetic oligonucleotide
  Antisense strand to SEQ ID NO: 1899816
ugagauagacaguaauaac

SEQ ID NO: 1899818 - RNA, 19 nt, Artificial Sequence
  Description of Artificial Sequence: Synthetic oligonucleotide
  Sense strand starting at position 1429 of SEQ ID NO: 1879339
uugaucuguuaucuaucuu

SEQ ID NO: 1899819 - RNA, 19 nt, Artificial Sequence
  Description of Artificial Sequence: Synthetic oligonucleotide
  Antisense strand to SEQ ID NO: 1899818
aagauagauaacagaucaa

SEQ ID NO: 1899820 - RNA, 19 nt, Artificial Sequence
  Description of Artificial Sequence: Synthetic oligonucleotide
  Sense strand starting at position 1495 of SEQ ID NO: 1879339
cagguugaucuguagauuc

SEQ ID NO: 1899821 - RNA, 19 nt, Artificial Sequence
  Description of Artificial Sequence: Synthetic oligonucleotide
  Antisense strand to SEQ ID NO: 1899820
gaaucuacagaucaaccug

SEQ ID NO: 1899822 - RNA, 19 nt, Artificial Sequence
  Description of Artificial Sequence: Synthetic oligonucleotide
  Sense strand starting at position 1589 of SEQ ID NO: 1879339
ggaacuacauuguuugaga

SEQ ID NO: 1899823 - RNA, 19 nt, Artificial Sequence
  Description of Artificial Sequence: Synthetic oligonucleotide
  Antisense strand to SEQ ID NO: 1899822
ucucaaacaauguaguucc

SEQ ID NO: 1899824 - RNA, 19 nt, Artificial Sequence
  Description of Artificial Sequence: Synthetic oligonucleotide
  Sense strand starting at position 1590 of SEQ ID NO: 1879339
gaacuacauuguuugagac

SEQ ID NO: 1899825 - RNA, 19 nt, Artificial Sequence
  Description of Artificial Sequence: Synthetic oligonucleotide
  Antisense strand to SEQ ID NO: 1899824
gucucaaacaauguaguuc

SEQ ID NO: 1899826 - RNA, 19 nt, Artificial Sequence
  Description of Artificial Sequence: Synthetic oligonucleotide
  Sense strand starting at position 1672 of SEQ ID NO: 1879339
ggaagcaguggucagaaua

SEQ ID NO: 1899827 - RNA, 19 nt, Artificial Sequence
  Description of Artificial Sequence: Synthetic oligonucleotide
  Antisense strand to SEQ ID NO: 1899826
uauucugaccacugcuucc

SEQ ID NO: 1899828 - RNA, 19 nt, Artificial Sequence
  Description of Artificial Sequence: Synthetic oligonucleotide
  Sense strand starting at position 1914 of SEQ ID NO: 1879339
ggaccaucuuugccaaggu

SEQ ID NO: 1899829 - RNA, 19 nt, Artificial Sequence
  Description of Artificial Sequence: Synthetic oligonucleotide
  Antisense strand to SEQ ID NO: 1899828
accuuggcaaagauggucc

SEQ ID NO: 1899830 - RNA, 19 nt, Artificial Sequence
  Description of Artificial Sequence: Synthetic oligonucleotide
  Sense strand starting at position 2208 of SEQ ID NO: 1879339
ccagcuuagcaguaaauaa

SEQ ID NO: 1899831 - RNA, 19 nt, Artificial Sequence
  Description of Artificial Sequence: Synthetic oligonucleotide
  Antisense strand to SEQ ID NO: 1899830
uuauuuacugcuaagcugg

SEQ ID NO: 1899832 - RNA, 19 nt, Artificial Sequence
  Description of Artificial Sequence: Synthetic oligonucleotide
  Sense strand starting at position 2239 of SEQ ID NO: 1879339
gagcaagguugacuuugaa

SEQ ID NO: 1899833 - RNA, 19 nt, Artificial Sequence
  Description of Artificial Sequence: Synthetic oligonucleotide
  Antisense strand to SEQ ID NO: 1899832
uucaaagucaaccuugcuc

SEQ ID NO: 1899834 - RNA, 19 nt, Artificial Sequence
  Description of Artificial Sequence: Synthetic oligonucleotide
  Sense strand starting at position 2397 of SEQ ID NO: 1879339
cucaucacagauuguuaga

SEQ ID NO: 1899835 - RNA, 19 nt, Artificial Sequence
  Description of Artificial Sequence: Synthetic oligonucleotide
  Antisense strand to SEQ ID NO: 1899834
ucuaacaaucugugaugag

SEQ ID NO: 1899836 - RNA, 19 nt, Artificial Sequence
  Description of Artificial Sequence: Synthetic oligonucleotide
  Sense strand starting at position 2633 of SEQ ID NO: 1879339
ggaaguaauuaugucuaga

SEQ ID NO: 1899837 - RNA, 19 nt, Artificial Sequence
  Description of Artificial Sequence: Synthetic oligonucleotide
  Antisense strand to SEQ ID NO: 1899836
ucuagacauaauuacuucc

SEQ ID NO: 1899838 - RNA, 19 nt, Artificial Sequence
  Description of Artificial Sequence: Synthetic oligonucleotide
  Sense strand starting at position 2646 of SEQ ID NO: 1879339
ucuagauuaauaugggagu

SEQ ID NO: 1899839 - RNA, 19 nt, Artificial Sequence
  Description of Artificial Sequence: Synthetic oligonucleotide
  Antisense strand to SEQ ID NO: 1899838
acucccauauuaaucuaga

SEQ ID NO: 1899840 - RNA, 19 nt, Artificial Sequence
  Description of Artificial Sequence: Synthetic oligonucleotide
  Sense strand starting at position 2800 of SEQ ID NO: 1879339
gucacuaauuuguccaggu

SEQ ID NO: 1899841 - RNA, 19 nt, Artificial Sequence
  Description of Artificial Sequence: Synthetic oligonucleotide
  Antisense strand to SEQ ID NO: 1899840
accuggacaaauuagugac

SEQ ID NO: 1899842 - RNA, 19 nt, Artificial Sequence
  Description of Artificial Sequence: Synthetic oligonucleotide
  Sense strand starting at position 2880 of SEQ ID NO: 1879339
gugugugaugcgcuuacga

SEQ ID NO: 1899843 - RNA, 19 nt, Artificial Sequence
  Description of Artificial Sequence: Synthetic oligonucleotide
  Antisense strand to SEQ ID NO: 1899842
ucguaagcgcaucacacac

SEQ ID NO: 1899844 - RNA, 19 nt, Artificial Sequence
  Description of Artificial Sequence: Synthetic oligonucleotide
  Sense strand starting at position 3090 of SEQ ID NO: 1879339
agcuguaccgaugaccaua

SEQ ID NO: 1899845 - RNA, 19 nt, Artificial Sequence
  Description of Artificial Sequence: Synthetic oligonucleotide
  Antisense strand to SEQ ID NO: 1899844
uauggucaucgguacagcu

SEQ ID NO: 1899846 - RNA, 19 nt, Artificial Sequence
  Description of Artificial Sequence: Synthetic oligonucleotide
  Sense strand starting at position 3131 of SEQ ID NO: 1879339
uagaaccuguaguuagaga

SEQ ID NO: 1899847 - RNA, 19 nt, Artificial Sequence
  Description of Artificial Sequence: Synthetic oligonucleotide
  Antisense strand to SEQ ID NO: 1899846
ucucuaacuacagguucua

SEQ ID NO: 1899848 - RNA, 19 nt, Artificial Sequence
  Description of Artificial Sequence: Synthetic oligonucleotide
  Sense strand starting at position 3136 of SEQ ID NO: 1879339
ccuguaguuagagagcaaa

SEQ ID NO: 1899849 - RNA, 19 nt, Artificial Sequence
  Description of Artificial Sequence: Synthetic oligonucleotide
  Antisense strand to SEQ ID NO: 1899848
uuugcucucuaacuacagg

SEQ ID NO: 1899850 - RNA, 19 nt, Artificial Sequence
  Description of Artificial Sequence: Synthetic oligonucleotide
  Sense strand starting at position 3205 of SEQ ID NO: 1879339
ggcuauuuauuuggagggu

SEQ ID NO: 1899851 - RNA, 19 nt, Artificial Sequence
  Description of Artificial Sequence: Synthetic oligonucleotide
  Antisense strand to SEQ ID NO: 1899850
acccuccaaauaaauagcc

SEQ ID NO: 1899852 - RNA, 19 nt, Artificial Sequence
  Description of Artificial Sequence: Synthetic oligonucleotide
  Sense strand starting at position 3206 of SEQ ID NO: 1879339
gcuauuuauuuggagggua

SEQ ID NO: 1899853 - RNA, 19 nt, Artificial Sequence
  Description of Artificial Sequence: Synthetic oligonucleotide
  Antisense strand to SEQ ID NO: 1899852
uacccuccaaauaaauagc

SEQ ID NO: 1899854 - RNA, 19 nt, Artificial Sequence
  Description of Artificial Sequence: Synthetic oligonucleotide
  Sense strand starting at position 3592 of SEQ ID NO: 1879339
augagaaguaagugaguua

SEQ ID NO: 1899855 - RNA, 19 nt, Artificial Sequence
  Description of Artificial Sequence: Synthetic oligonucleotide
  Antisense strand to SEQ ID NO: 1899854
uaacucacuuacuucucau

SEQ ID NO: 1899856 - RNA, 19 nt, Artificial Sequence
  Description of Artificial Sequence: Synthetic oligonucleotide
  Sense strand starting at position 3595 of SEQ ID NO: 1879339
agaaguaagugaguuaaua

SEQ ID NO: 1899857 - RNA, 19 nt, Artificial Sequence
  Description of Artificial Sequence: Synthetic oligonucleotide
  Antisense strand to SEQ ID NO: 1899856
uauuaacucacuuacuucu

SEQ ID NO: 1899858 - RNA, 19 nt, Artificial Sequence
  Description of Artificial Sequence: Synthetic oligonucleotide
  Sense strand starting at position 3703 of SEQ ID NO: 1879339
uuuaaaucugaugauugca

SEQ ID NO: 1899859 - RNA, 19 nt, Artificial Sequence
  Description of Artificial Sequence: Synthetic oligonucleotide
  Antisense strand to SEQ ID NO: 1899858
ugcaaucaucagauuuaaa

SEQ ID NO: 1899860 - RNA, 19 nt, Artificial Sequence
  Description of Artificial Sequence: Synthetic oligonucleotide
  Sense strand starting at position 3711 of SEQ ID NO: 1879339
ugaugauugcacugaguua

SEQ ID NO: 1899861 - RNA, 19 nt, Artificial Sequence
  Description of Artificial Sequence: Synthetic oligonucleotide
  Antisense strand to SEQ ID NO: 1899860
uaacucagugcaaucauca

SEQ ID NO: 1899862 - RNA, 19 nt, Artificial Sequence
  Description of Artificial Sequence: Synthetic oligonucleotide
  Sense strand starting at position 3921 of SEQ ID NO: 1879339
cuuggagaauguuucagga

SEQ ID NO: 1899863 - RNA, 19 nt, Artificial Sequence
  Description of Artificial Sequence: Synthetic oligonucleotide
  Antisense strand to SEQ ID NO: 1899862
uccugaaacauucuccaag

SEQ ID NO: 1899864 - RNA, 19 nt, Artificial Sequence
  Description of Artificial Sequence: Synthetic oligonucleotide
  Sense strand starting at position 3929 of SEQ ID NO: 1879339
auguuucaggaugagguua

SEQ ID NO: 1899865 - RNA, 19 nt, Artificial Sequence
  Description of Artificial Sequence: Synthetic oligonucleotide
  Antisense strand to SEQ ID NO: 1899864
uaaccucauccugaaacau

SEQ ID NO: 1899866 - RNA, 19 nt, Artificial Sequence
  Description of Artificial Sequence: Synthetic oligonucleotide
  Sense strand starting at position 3979 of SEQ ID NO: 1879339
uaggguacccauugagcaa

SEQ ID NO: 1899867 - RNA, 19 nt, Artificial Sequence
  Description of Artificial Sequence: Synthetic oligonucleotide
  Antisense strand to SEQ ID NO: 1899866
uugcucaauggguacccua

SEQ ID NO: 1899868 - RNA, 19 nt, Artificial Sequence
  Description of Artificial Sequence: Synthetic oligonucleotide
  Sense strand starting at position 3980 of SEQ ID NO: 1879339
aggguacccauugagcaau

SEQ ID NO: 1899869 - RNA, 19 nt, Artificial Sequence
  Description of Artificial Sequence: Synthetic oligonucleotide
  Antisense strand to SEQ ID NO: 1899868
auugcucaauggguacccu

SEQ ID NO: 1899870 - RNA, 19 nt, Artificial Sequence
  Description of Artificial Sequence: Synthetic oligonucleotide
  Sense strand starting at position 3982 of SEQ ID NO: 1879339
gguacccauugagcaauau

SEQ ID NO: 1899871 - RNA, 19 nt, Artificial Sequence
  Description of Artificial Sequence: Synthetic oligonucleotide
  Antisense strand to SEQ ID NO: 1899870
auauugcucaauggguacc

SEQ ID NO: 1899872 - RNA, 19 nt, Artificial Sequence
  Description of Artificial Sequence: Synthetic oligonucleotide
  Sense strand starting at position 85 of SEQ ID NO: 1879340
gugacauugcuguggcaga

SEQ ID NO: 1899873 - RNA, 19 nt, Artificial Sequence
  Description of Artificial Sequence: Synthetic oligonucleotide
  Antisense strand to SEQ ID NO: 1899872
ucugccacagcaaugucac

SEQ ID NO: 1899874 - RNA, 19 nt, Artificial Sequence
  Description of Artificial Sequence: Synthetic oligonucleotide
  Sense strand starting at position 215 of SEQ ID NO: 1879340
accuaaucccagugucaac

SEQ ID NO: 1899875 - RNA, 19 nt, Artificial Sequence
  Description of Artificial Sequence: Synthetic oligonucleotide
  Antisense strand to SEQ ID NO: 1899874
guugacacugggauuaggu

SEQ ID NO: 1899876 - RNA, 19 nt, Artificial Sequence
  Description of Artificial Sequence: Synthetic oligonucleotide
  Sense strand starting at position 389 of SEQ ID NO: 1879340
ggaggaauccuguauugug

SEQ ID NO: 1899877 - RNA, 19 nt, Artificial Sequence
  Description of Artificial Sequence: Synthetic oligonucleotide
  Antisense strand to SEQ ID NO: 1899876
cacaauacaggauuccucc

SEQ ID NO: 1899878 - RNA, 19 nt, Artificial Sequence
  Description of Artificial Sequence: Synthetic oligonucleotide
  Sense strand starting at position 706 of SEQ ID NO: 1879340
caagauaaugucugggucu

SEQ ID NO: 1899879 - RNA, 19 nt, Artificial Sequence
  Description of Artificial Sequence: Synthetic oligonucleotide
  Antisense strand to SEQ ID NO: 1899878
agacccagacauuaucuug

SEQ ID NO: 1899880 - RNA, 19 nt, Artificial Sequence
  Description of Artificial Sequence: Synthetic oligonucleotide
  Sense strand starting at position 708 of SEQ ID NO: 1879340
agauaaugucugggucuac

SEQ ID NO: 1899881 - RNA, 19 nt, Artificial Sequence
  Description of Artificial Sequence: Synthetic oligonucleotide
  Antisense strand to SEQ ID NO: 1899880
guagacccagacauuaucu

SEQ ID NO: 1899882 - RNA, 19 nt, Artificial Sequence
  Description of Artificial Sequence: Synthetic oligonucleotide
  Sense strand starting at position 709 of SEQ ID NO: 1879340
gauaaugucugggucuaca

SEQ ID NO: 1899883 - RNA, 19 nt, Artificial Sequence
  Description of Artificial Sequence: Synthetic oligonucleotide
  Antisense strand to SEQ ID NO: 1899882
uguagacccagacauuauc

SEQ ID NO: 1899884 - RNA, 19 nt, Artificial Sequence
  Description of Artificial Sequence: Synthetic oligonucleotide
  Sense strand starting at position 930 of SEQ ID NO: 1879340
guuccuucucugggaguca

SEQ ID NO: 1899885 - RNA, 19 nt, Artificial Sequence
  Description of Artificial Sequence: Synthetic oligonucleotide
  Antisense strand to SEQ ID NO: 1899884
ugacucccagagaaggaac

SEQ ID NO: 1899886 - RNA, 19 nt, Artificial Sequence
  Description of Artificial Sequence: Synthetic oligonucleotide
  Sense strand starting at position 1280 of SEQ ID NO: 1879340
ccggguuccugaaagagga

SEQ ID NO: 1899887 - RNA, 19 nt, Artificial Sequence
  Description of Artificial Sequence: Synthetic oligonucleotide
  Antisense strand to SEQ ID NO: 1899886
uccucuuucaggaacccgg

SEQ ID NO: 1899888 - RNA, 19 nt, Artificial Sequence
  Description of Artificial Sequence: Synthetic oligonucleotide
  Sense strand starting at position 1293 of SEQ ID NO: 1879340
agaggaaauccaggucucu

SEQ ID NO: 1899889 - RNA, 19 nt, Artificial Sequence
  Description of Artificial Sequence: Synthetic oligonucleotide
  Antisense strand to SEQ ID NO: 1899888
agagaccuggauuuccucu

SEQ ID NO: 1899890 - RNA, 19 nt, Artificial Sequence
  Description of Artificial Sequence: Synthetic oligonucleotide
  Sense strand starting at position 1299 of SEQ ID NO: 1879340
aauccaggucucuggagau

SEQ ID NO: 1899891 - RNA, 19 nt, Artificial Sequence
  Description of Artificial Sequence: Synthetic oligonucleotide
  Antisense strand to SEQ ID NO: 1899890
aucuccagagaccuggauu

SEQ ID NO: 1899892 - RNA, 19 nt, Artificial Sequence
  Description of Artificial Sequence: Synthetic oligonucleotide
  Sense strand starting at position 1383 of SEQ ID NO: 1879340
gggauacccgcccaggaau

SEQ ID NO: 1899893 - RNA, 19 nt, Artificial Sequence
  Description of Artificial Sequence: Synthetic oligonucleotide
  Antisense strand to SEQ ID NO: 1899892
auuccugggcggguauccc

SEQ ID NO: 1899894 - RNA, 19 nt, Artificial Sequence
  Description of Artificial Sequence: Synthetic oligonucleotide
  Sense strand starting at position 1395 of SEQ ID NO: 1879340
caggaauucccaggcuaga

SEQ ID NO: 1899895 - RNA, 19 nt, Artificial Sequence
  Description of Artificial Sequence: Synthetic oligonucleotide
  Antisense strand to SEQ ID NO: 1899894
ucuagccugggaauuccug

SEQ ID NO: 1899896 - RNA, 19 nt, Artificial Sequence
  Description of Artificial Sequence: Synthetic oligonucleotide
  Sense strand starting at position 1512 of SEQ ID NO: 1879340
cgagggugggauugaugua

SEQ ID NO: 1899897 - RNA, 19 nt, Artificial Sequence
  Description of Artificial Sequence: Synthetic oligonucleotide
  Antisense strand to SEQ ID NO: 1899896
uacaucaaucccacccucg

SEQ ID NO: 1899898 - RNA, 19 nt, Artificial Sequence
  Description of Artificial Sequence: Synthetic oligonucleotide
  Sense strand starting at position 2098 of SEQ ID NO: 1879340
gggcguggcuuagcaaaga

SEQ ID NO: 1899899 - RNA, 19 nt, Artificial Sequence
  Description of Artificial Sequence: Synthetic oligonucleotide
  Antisense strand to SEQ ID NO: 1899898
ucuuugcuaagccacgccc

SEQ ID NO: 1899900 - RNA, 19 nt, Artificial Sequence
  Description of Artificial Sequence: Synthetic oligonucleotide
  Sense strand starting at position 2227 of SEQ ID NO: 1879340
ggguuuguagcuugaagga

SEQ ID NO: 1899901 - RNA, 19 nt, Artificial Sequence
  Description of Artificial Sequence: Synthetic oligonucleotide
  Antisense strand to SEQ ID NO: 1899900
uccuucaagcuacaaaccc

SEQ ID NO: 1899902 - RNA, 19 nt, Artificial Sequence
  Description of Artificial Sequence: Synthetic oligonucleotide
  Sense strand starting at position 2295 of SEQ ID NO: 1879340
uugggauucuucuccacuc

SEQ ID NO: 1899903 - RNA, 19 nt, Artificial Sequence
  Description of Artificial Sequence: Synthetic oligonucleotide
  Antisense strand to SEQ ID NO: 1899902
gaguggagaagaaucccaa

SEQ ID NO: 1899904 - RNA, 19 nt, Artificial Sequence
  Description of Artificial Sequence: Synthetic oligonucleotide
  Sense strand starting at position 2296 of SEQ ID NO: 1879340
ugggauucuucuccacucu

SEQ ID NO: 1899905 - RNA, 19 nt, Artificial Sequence
  Description of Artificial Sequence: Synthetic oligonucleotide
  Antisense strand to SEQ ID NO: 1899904
agaguggagaagaauccca

SEQ ID NO: 1899906 - RNA, 19 nt, Artificial Sequence
  Description of Artificial Sequence: Synthetic oligonucleotide
  Sense strand starting at position 2506 of SEQ ID NO: 1879340
gucuuagcaucuccaugua

SEQ ID NO: 1899907 - RNA, 19 nt, Artificial Sequence
  Description of Artificial Sequence: Synthetic oligonucleotide
  Antisense strand to SEQ ID NO: 1899906
uacauggagaugcuaagac

SEQ ID NO: 1899908 - RNA, 19 nt, Artificial Sequence
  Description of Artificial Sequence: Synthetic oligonucleotide
  Sense strand starting at position 2509 of SEQ ID NO: 1879340
uuagcaucuccauguagua

SEQ ID NO: 1899909 - RNA, 19 nt, Artificial Sequence
  Description of Artificial Sequence: Synthetic oligonucleotide
  Antisense strand to SEQ ID NO: 1899908
uacuacauggagaugcuaa

SEQ ID NO: 1899910 - RNA, 19 nt, Artificial Sequence
  Description of Artificial Sequence: Synthetic oligonucleotide
  Sense strand starting at position 2606 of SEQ ID NO: 1879340
gguaaauugcagugcuaug

SEQ ID NO: 1899911 - RNA, 19 nt, Artificial Sequence
  Description of Artificial Sequence: Synthetic oligonucleotide
  Antisense strand to SEQ ID NO: 1899910
cauagcacugcaauuuacc

SEQ ID NO: 1899912 - RNA, 19 nt, Artificial Sequence
  Description of Artificial Sequence: Synthetic oligonucleotide
  Sense strand starting at position 2719 of SEQ ID NO: 1879340
cuuaaauuacuucggaaac

SEQ ID NO: 1899913 - RNA, 19 nt, Artificial Sequence
  Description of Artificial Sequence: Synthetic oligonucleotide
  Antisense strand to SEQ ID NO: 1899912
guuuccgaaguaauuuaag

SEQ ID NO: 1899914 - RNA, 19 nt, Artificial Sequence
  Description of Artificial Sequence: Synthetic oligonucleotide
  Sense strand starting at position 2809 of SEQ ID NO: 1879340
caacuauggcugugucacu

SEQ ID NO: 1899915 - RNA, 19 nt, Artificial Sequence
  Description of Artificial Sequence: Synthetic oligonucleotide
  Antisense strand to SEQ ID NO: 1899914
agugacacagccauaguug

SEQ ID NO: 1899916 - RNA, 19 nt, Artificial Sequence
  Description of Artificial Sequence: Synthetic oligonucleotide
  Sense strand starting at position 2990 of SEQ ID NO: 1879340
cugccuugucucuaugcuu

SEQ ID NO: 1899917 - RNA, 19 nt, Artificial Sequence
  Description of Artificial Sequence: Synthetic oligonucleotide
  Antisense strand to SEQ ID NO: 1899916
aagcauagagacaaggcag

SEQ ID NO: 1899918 - RNA, 19 nt, Artificial Sequence
  Description of Artificial Sequence: Synthetic oligonucleotide
  Sense strand starting at position 3052 of SEQ ID NO: 1879340
ucgaacaguugguucagau

SEQ ID NO: 1899919 - RNA, 19 nt, Artificial Sequence
  Description of Artificial Sequence: Synthetic oligonucleotide
  Antisense strand to SEQ ID NO: 1899918
aucugaaccaacuguucga

SEQ ID NO: 1899920 - RNA, 19 nt, Artificial Sequence
  Description of Artificial Sequence: Synthetic oligonucleotide
  Sense strand starting at position 3068 of SEQ ID NO: 1879340
gaucuugcuuucucuagga

SEQ ID NO: 1899921 - RNA, 19 nt, Artificial Sequence
  Description of Artificial Sequence: Synthetic oligonucleotide
  Antisense strand to SEQ ID NO: 1899920
uccuagagaaagcaagauc

SEQ ID NO: 1899922 - RNA, 19 nt, Artificial Sequence
  Description of Artificial Sequence: Synthetic oligonucleotide
  Sense strand starting at position 3070 of SEQ ID NO: 1879340
ucuugcuuucucuaggaaa

SEQ ID NO: 1899923 - RNA, 19 nt, Artificial Sequence
  Description of Artificial Sequence: Synthetic oligonucleotide
  Antisense strand to SEQ ID NO: 1899922
uuuccuagagaaagcaaga

SEQ ID NO: 1899924 - RNA, 19 nt, Artificial Sequence
  Description of Artificial Sequence: Synthetic oligonucleotide
  Sense strand starting at position 3119 of SEQ ID NO: 1879340
ucagguagggucuauucua

SEQ ID NO: 1899925 - RNA, 19 nt, Artificial Sequence
  Description of Artificial Sequence: Synthetic oligonucleotide
  Antisense strand to SEQ ID NO: 1899924
uagaauagacccuaccuga

SEQ ID NO: 1899926 - RNA, 19 nt, Artificial Sequence
  Description of Artificial Sequence: Synthetic oligonucleotide
  Sense strand starting at position 3126 of SEQ ID NO: 1879340
gggucuauucuagagcuuu

SEQ ID NO: 1899927 - RNA, 19 nt, Artificial Sequence
  Description of Artificial Sequence: Synthetic oligonucleotide
  Antisense strand to SEQ ID NO: 1899926
aaagcucuagaauagaccc

SEQ ID NO: 1899928 - RNA, 19 nt, Artificial Sequence
  Description of Artificial Sequence: Synthetic oligonucleotide
  Sense strand starting at position 3190 of SEQ ID NO: 1879340
gggcuaccauuauuauuau

SEQ ID NO: 1899929 - RNA, 19 nt, Artificial Sequence
  Description of Artificial Sequence: Synthetic oligonucleotide
  Antisense strand to SEQ ID NO: 1899928
auaauaauaaugguagccc

SEQ ID NO: 1899930 - RNA, 19 nt, Artificial Sequence
  Description of Artificial Sequence: Synthetic oligonucleotide
  Sense strand starting at position 3309 of SEQ ID NO: 1879340
gcaugagcauggucucauu

SEQ ID NO: 1899931 - RNA, 19 nt, Artificial Sequence
  Description of Artificial Sequence: Synthetic oligonucleotide
  Antisense strand to SEQ ID NO: 1899930
aaugagaccaugcucaugc

SEQ ID NO: 1899932 - RNA, 19 nt, Artificial Sequence
  Description of Artificial Sequence: Synthetic oligonucleotide
  Sense strand starting at position 3358 of SEQ ID NO: 1879340
uugugaaacucugagaaac

SEQ ID NO: 1899933 - RNA, 19 nt, Artificial Sequence
  Description of Artificial Sequence: Synthetic oligonucleotide
  Antisense strand to SEQ ID NO: 1899932
guuucucagaguuucacaa

SEQ ID NO: 1899934 - RNA, 19 nt, Artificial Sequence
  Description of Artificial Sequence: Synthetic oligonucleotide
  Sense strand starting at position 3360 of SEQ ID NO: 1879340
gugaaacucugagaaacag

SEQ ID NO: 1899935 - RNA, 19 nt, Artificial Sequence
  Description of Artificial Sequence: Synthetic oligonucleotide
  Antisense strand to SEQ ID NO: 1899934
cuguuucucagaguuucac

SEQ ID NO: 1899936 - RNA, 19 nt, Artificial Sequence
  Description of Artificial Sequence: Synthetic oligonucleotide
  Sense strand starting at position 3511 of SEQ ID NO: 1879340
auugauugcucuccauguu

SEQ ID NO: 1899937 - RNA, 19 nt, Artificial Sequence
  Description of Artificial Sequence: Synthetic oligonucleotide
  Antisense strand to SEQ ID NO: 1899936
aacauggagagcaaucaau

SEQ ID NO: 1899938 - RNA, 19 nt, Artificial Sequence
  Description of Artificial Sequence: Synthetic oligonucleotide
  Sense strand starting at position 3526 of SEQ ID NO: 1879340
uguucuauuccagggaacu

SEQ ID NO: 1899939 - RNA, 19 nt, Artificial Sequence
  Description of Artificial Sequence: Synthetic oligonucleotide
  Antisense strand to SEQ ID NO: 1899938
aguucccuggaauagaaca

SEQ ID NO: 1899940 - RNA, 19 nt, Artificial Sequence
  Description of Artificial Sequence: Synthetic oligonucleotide
  Sense strand starting at position 3527 of SEQ ID NO: 1879340
guucuauuccagggaacuu

SEQ ID NO: 1899941 - RNA, 19 nt, Artificial Sequence
  Description of Artificial Sequence: Synthetic oligonucleotide
  Antisense strand to SEQ ID NO: 1899940
aaguucccuggaauagaac

SEQ ID NO: 1899942 - RNA, 19 nt, Artificial Sequence
  Description of Artificial Sequence: Synthetic oligonucleotide
  Sense strand starting at position 3547 of SEQ ID NO: 1879340
ucuaaacuaugucugguua

SEQ ID NO: 1899943 - RNA, 19 nt, Artificial Sequence
  Description of Artificial Sequence: Synthetic oligonucleotide
  Antisense strand to SEQ ID NO: 1899942
uaaccagacauaguuuaga

SEQ ID NO: 1899944 - RNA, 19 nt, Artificial Sequence
  Description of Artificial Sequence: Synthetic oligonucleotide
  Sense strand starting at position 3548 of SEQ ID NO: 1879340
cuaaacuaugucugguuau

SEQ ID NO: 1899945 - RNA, 19 nt, Artificial Sequence
  Description of Artificial Sequence: Synthetic oligonucleotide
  Antisense strand to SEQ ID NO: 1899944
auaaccagacauaguuuag

SEQ ID NO: 1899946 - RNA, 19 nt, Artificial Sequence
  Description of Artificial Sequence: Synthetic oligonucleotide
  Sense strand starting at position 3847 of SEQ ID NO: 1879340
ucaauuccuucuguaaagu

SEQ ID NO: 1899947 - RNA, 19 nt, Artificial Sequence
  Description of Artificial Sequence: Synthetic oligonucleotide
  Antisense strand to SEQ ID NO: 1899946
acuuuacagaaggaauuga

SEQ ID NO: 1899948 - RNA, 19 nt, Artificial Sequence
  Description of Artificial Sequence: Synthetic oligonucleotide
  Sense strand starting at position 3856 of SEQ ID NO: 1879340
ucuguaaagucucuaacuc

SEQ ID NO: 1899949 - RNA, 19 nt, Artificial Sequence
  Description of Artificial Sequence: Synthetic oligonucleotide
  Antisense strand to SEQ ID NO: 1899948
gaguuagagacuuuacaga

SEQ ID NO: 1899950 - RNA, 19 nt, Artificial Sequence
  Description of Artificial Sequence: Synthetic oligonucleotide
  Sense strand starting at position 3857 of SEQ ID NO: 1879340
cuguaaagucucuaacucu

SEQ ID NO: 1899951 - RNA, 19 nt, Artificial Sequence
  Description of Artificial Sequence: Synthetic oligonucleotide
  Antisense strand to SEQ ID NO: 1899950
agaguuagagacuuuacag

SEQ ID NO: 1899952 - RNA, 19 nt, Artificial Sequence
  Description of Artificial Sequence: Synthetic oligonucleotide
  Sense strand starting at position 15 of SEQ ID NO: 1879341
cuauaaaggugauugcauu

SEQ ID NO: 1899953 - RNA, 19 nt, Artificial Sequence
  Description of Artificial Sequence: Synthetic oligonucleotide
  Antisense strand to SEQ ID NO: 1899952
aaugcaaucaccuuuauag

SEQ ID NO: 1899954 - RNA, 19 nt, Artificial Sequence
  Description of Artificial Sequence: Synthetic oligonucleotide
  Sense strand starting at position 16 of SEQ ID NO: 1879341
uauaaaggugauugcauua

SEQ ID NO: 1899955 - RNA, 19 nt, Artificial Sequence
  Description of Artificial Sequence: Synthetic oligonucleotide
  Antisense strand to SEQ ID NO: 1899954
uaaugcaaucaccuuuaua

SEQ ID NO: 1899956 - RNA, 19 nt, Artificial Sequence
  Description of Artificial Sequence: Synthetic oligonucleotide
  Sense strand starting at position 21 of SEQ ID NO: 1879341
aggugauugcauuaugcua

SEQ ID NO: 1899957 - RNA, 19 nt, Artificial Sequence
  Description of Artificial Sequence: Synthetic oligonucleotide
  Antisense strand to SEQ ID NO: 1899956
uagcauaaugcaaucaccu

SEQ ID NO: 1899958 - RNA, 19 nt, Artificial Sequence
  Description of Artificial Sequence: Synthetic oligonucleotide
  Sense strand starting at position 451 of SEQ ID NO: 1879341
acauucuagcauugaagua

SEQ ID NO: 1899959 - RNA, 19 nt, Artificial Sequence
  Description of Artificial Sequence: Synthetic oligonucleotide
  Antisense strand to SEQ ID NO: 1899958
uacuucaaugcuagaaugu

SEQ ID NO: 1899960 - RNA, 19 nt, Artificial Sequence
  Description of Artificial Sequence: Synthetic oligonucleotide
  Sense strand starting at position 463 of SEQ ID NO: 1879341
ugaaguauugggcaaguuu

SEQ ID NO: 1899961 - RNA, 19 nt, Artificial Sequence
  Description of Artificial Sequence: Synthetic oligonucleotide
  Antisense strand to SEQ ID NO: 1899960
aaacuugcccaauacuuca

SEQ ID NO: 1899962 - RNA, 19 nt, Artificial Sequence
  Description of Artificial Sequence: Synthetic oligonucleotide
  Sense strand starting at position 485 of SEQ ID NO: 1879341
uuaacugucaagugaggau

SEQ ID NO: 1899963 - RNA, 19 nt, Artificial Sequence
  Description of Artificial Sequence: Synthetic oligonucleotide
  Antisense strand to SEQ ID NO: 1899962
auccucacuugacaguuaa

SEQ ID NO: 1899964 - RNA, 19 nt, Artificial Sequence
  Description of Artificial Sequence: Synthetic oligonucleotide
  Sense strand starting at position 583 of SEQ ID NO: 1879341
gcuauuguggaagaagcaa

SEQ ID NO: 1899965 - RNA, 19 nt, Artificial Sequence
  Description of Artificial Sequence: Synthetic oligonucleotide
  Antisense strand to SEQ ID NO: 1899964
uugcuucuuccacaauagc

SEQ ID NO: 1899966 - RNA, 19 nt, Artificial Sequence
  Description of Artificial Sequence: Synthetic oligonucleotide
  Sense strand starting at position 654 of SEQ ID NO: 1879341
ugaacuguugauuggguaa

SEQ ID NO: 1899967 - RNA, 19 nt, Artificial Sequence
  Description of Artificial Sequence: Synthetic oligonucleotide
  Antisense strand to SEQ ID NO: 1899966
uuacccaaucaacaguuca

SEQ ID NO: 1899968 - RNA, 19 nt, Artificial Sequence
  Description of Artificial Sequence: Synthetic oligonucleotide
  Sense strand starting at position 728 of SEQ ID NO: 1879341
acagauuuaucugaacaga

SEQ ID NO: 1899969 - RNA, 19 nt, Artificial Sequence
  Description of Artificial Sequence: Synthetic oligonucleotide
  Antisense strand to SEQ ID NO: 1899968
ucuguucagauaaaucugu

SEQ ID NO: 1899970 - RNA, 19 nt, Artificial Sequence
  Description of Artificial Sequence: Synthetic oligonucleotide
  Sense strand starting at position 812 of SEQ ID NO: 1879341
guuuguuugcggagaugag

SEQ ID NO: 1899971 - RNA, 19 nt, Artificial Sequence
  Description of Artificial Sequence: Synthetic oligonucleotide
  Antisense strand to SEQ ID NO: 1899970
cucaucuccgcaaacaaac

SEQ ID NO: 1899972 - RNA, 19 nt, Artificial Sequence
  Description of Artificial Sequence: Synthetic oligonucleotide
  Sense strand starting at position 826 of SEQ ID NO: 1879341
augaguuagcaguaguaua

SEQ ID NO: 1899973 - RNA, 19 nt, Artificial Sequence
  Description of Artificial Sequence: Synthetic oligonucleotide
  Antisense strand to SEQ ID NO: 1899972
uauacuacugcuaacucau

SEQ ID NO: 1899974 - RNA, 19 nt, Artificial Sequence
  Description of Artificial Sequence: Synthetic oligonucleotide
  Sense strand starting at position 1211 of SEQ ID NO: 1879341
uggagaguuaaauggguga

SEQ ID NO: 1899975 - RNA, 19 nt, Artificial Sequence
  Description of Artificial Sequence: Synthetic oligonucleotide
  Antisense strand to SEQ ID NO: 1899974
ucacccauuuaacucucca

SEQ ID NO: 1899976 - RNA, 19 nt, Artificial Sequence
  Description of Artificial Sequence: Synthetic oligonucleotide
  Sense strand starting at position 1215 of SEQ ID NO: 1879341
gaguuaaaugggugaagau

SEQ ID NO: 1899977 - RNA, 19 nt, Artificial Sequence
  Description of Artificial Sequence: Synthetic oligonucleotide
  Antisense strand to SEQ ID NO: 1899976
aucuucacccauuuaacuc

SEQ ID NO: 1899978 - RNA, 19 nt, Artificial Sequence
  Description of Artificial Sequence: Synthetic oligonucleotide
  Sense strand starting at position 1436 of SEQ ID NO: 1879341
ugacaucugcccgaaauuc

SEQ ID NO: 1899979 - RNA, 19 nt, Artificial Sequence
  Description of Artificial Sequence: Synthetic oligonucleotide
  Antisense strand to SEQ ID NO: 1899978
gaauuucgggcagauguca

SEQ ID NO: 1899980 - RNA, 19 nt, Artificial Sequence
  Description of Artificial Sequence: Synthetic oligonucleotide
  Sense strand starting at position 2072 of SEQ ID NO: 1879341
gggagcucucgcgagagga

SEQ ID NO: 1899981 - RNA, 19 nt, Artificial Sequence
  Description of Artificial Sequence: Synthetic oligonucleotide
  Antisense strand to SEQ ID NO: 1899980
uccucucgcgagagcuccc

SEQ ID NO: 1899982 - RNA, 19 nt, Artificial Sequence
  Description of Artificial Sequence: Synthetic oligonucleotide
  Sense strand starting at position 2410 of SEQ ID NO: 1879341
gggagaagauccgcucacu

SEQ ID NO: 1899983 - RNA, 19 nt, Artificial Sequence
  Description of Artificial Sequence: Synthetic oligonucleotide
  Antisense strand to SEQ ID NO: 1899982
agugagcggaucuucuccc

SEQ ID NO: 1899984 - RNA, 19 nt, Artificial Sequence
  Description of Artificial Sequence: Synthetic oligonucleotide
  Sense strand starting at position 2750 of SEQ ID NO: 1879341
gcacgagugcgucuucaag

SEQ ID NO: 1899985 - RNA, 19 nt, Artificial Sequence
  Description of Artificial Sequence: Synthetic oligonucleotide
  Antisense strand to SEQ ID NO: 1899984
cuugaagacgcacucgugc

SEQ ID NO: 1899986 - RNA, 19 nt, Artificial Sequence
  Description of Artificial Sequence: Synthetic oligonucleotide
  Sense strand starting at position 2778 of SEQ ID NO: 1879341
aggagacucuccucucuca

SEQ ID NO: 1899987 - RNA, 19 nt, Artificial Sequence
  Description of Artificial Sequence: Synthetic oligonucleotide
  Antisense strand to SEQ ID NO: 1899986
ugagagaggagagucuccu

SEQ ID NO: 1899988 - RNA, 19 nt, Artificial Sequence
  Description of Artificial Sequence: Synthetic oligonucleotide
  Sense strand starting at position 2822 of SEQ ID NO: 1879341
agauaaucacggugaggag

SEQ ID NO: 1899989 - RNA, 19 nt, Artificial Sequence
  Description of Artificial Sequence: Synthetic oligonucleotide
  Antisense strand to SEQ ID NO: 1899988
cuccucaccgugauuaucu

SEQ ID NO: 1899990 - RNA, 19 nt, Artificial Sequence
  Description of Artificial Sequence: Synthetic oligonucleotide
  Sense strand starting at position 2955 of SEQ ID NO: 1879341
ucgguaaaucaugaucgac

SEQ ID NO: 1899991 - RNA, 19 nt, Artificial Sequence
  Description of Artificial Sequence: Synthetic oligonucleotide
  Antisense strand to SEQ ID NO: 1899990
gucgaucaugauuuaccga

SEQ ID NO: 1899992 - RNA, 19 nt, Artificial Sequence
  Description of Artificial Sequence: Synthetic oligonucleotide
  Sense strand starting at position 2957 of SEQ ID NO: 1879341
gguaaaucaugaucgacuc

SEQ ID NO: 1899993 - RNA, 19 nt, Artificial Sequence
  Description of Artificial Sequence: Synthetic oligonucleotide
  Antisense strand to SEQ ID NO: 1899992
gagucgaucaugauuuacc

SEQ ID NO: 1899994 - RNA, 19 nt, Artificial Sequence
  Description of Artificial Sequence: Synthetic oligonucleotide
  Sense strand starting at position 2958 of SEQ ID NO: 1879341
guaaaucaugaucgacuca

SEQ ID NO: 1899995 - RNA, 19 nt, Artificial Sequence
  Description of Artificial Sequence: Synthetic oligonucleotide
  Antisense strand to SEQ ID NO: 1899994
ugagucgaucaugauuuac

SEQ ID NO: 1899996 - RNA, 19 nt, Artificial Sequence
  Description of Artificial Sequence: Synthetic oligonucleotide
  Sense strand starting at position 2965 of SEQ ID NO: 1879341
augaucgacucaguaauag

SEQ ID NO: 1899997 - RNA, 19 nt, Artificial Sequence
  Description of Artificial Sequence: Synthetic oligonucleotide
  Antisense strand to SEQ ID NO: 1899996
cuauuacugagucgaucau

SEQ ID NO: 1899998 - RNA, 19 nt, Artificial Sequence
  Description of Artificial Sequence: Synthetic oligonucleotide
  Sense strand starting at position 3096 of SEQ ID NO: 1879341
cugauucuggacugucaga

SEQ ID NO: 1899999 - RNA, 19 nt, Artificial Sequence
  Description of Artificial Sequence: Synthetic oligonucleotide
  Antisense strand to SEQ ID NO: 1899998
ucugacaguccagaaucag

SEQ ID NO: 1900000 - RNA, 19 nt, Artificial Sequence
  Description of Artificial Sequence: Synthetic oligonucleotide
  Sense strand starting at position 3101 of SEQ ID NO: 1879341
ucuggacugucagaaauuu

SEQ ID NO: 1900001 - RNA, 19 nt, Artificial Sequence
  Description of Artificial Sequence: Synthetic oligonucleotide
  Antisense strand to SEQ ID NO: 1900000
aaauuucugacaguccaga

SEQ ID NO: 1900002 - RNA, 19 nt, Artificial Sequence
  Description of Artificial Sequence: Synthetic oligonucleotide
  Sense strand starting at position 3162 of SEQ ID NO: 1879341
ggagcuauauaucuuuauu

SEQ ID NO: 1900003 - RNA, 19 nt, Artificial Sequence
  Description of Artificial Sequence: Synthetic oligonucleotide
  Antisense strand to SEQ ID NO: 1900002
aauaaagauauauagcucc

SEQ ID NO: 1900004 - RNA, 19 nt, Artificial Sequence
  Description of Artificial Sequence: Synthetic oligonucleotide
  Sense strand starting at position 3328 of SEQ ID NO: 1879341
guaaacuuagaauguuaga

SEQ ID NO: 1900005 - RNA, 19 nt, Artificial Sequence
  Description of Artificial Sequence: Synthetic oligonucleotide
  Antisense strand to SEQ ID NO: 1900004
ucuaacauucuaaguuuac

SEQ ID NO: 1900006 - RNA, 19 nt, Artificial Sequence
  Description of Artificial Sequence: Synthetic oligonucleotide
  Sense strand starting at position 3403 of SEQ ID NO: 1879341
gugacuucucaacagccga

SEQ ID NO: 1900007 - RNA, 19 nt, Artificial Sequence
  Description of Artificial Sequence: Synthetic oligonucleotide
  Antisense strand to SEQ ID NO: 1900006
ucggcuguugagaagucac

SEQ ID NO: 1900008 - RNA, 19 nt, Artificial Sequence
  Description of Artificial Sequence: Synthetic oligonucleotide
  Sense strand starting at position 3461 of SEQ ID NO: 1879341
aguagauaauugcuaauag

SEQ ID NO: 1900009 - RNA, 19 nt, Artificial Sequence
  Description of Artificial Sequence: Synthetic oligonucleotide
  Antisense strand to SEQ ID NO: 1900008
cuauuagcaauuaucuacu

SEQ ID NO: 1900010 - RNA, 19 nt, Artificial Sequence
  Description of Artificial Sequence: Synthetic oligonucleotide
  Sense strand starting at position 3482 of SEQ ID NO: 1879341
augucucaucuugaugacu

SEQ ID NO: 1900011 - RNA, 19 nt, Artificial Sequence
  Description of Artificial Sequence: Synthetic oligonucleotide
  Antisense strand to SEQ ID NO: 1900010
agucaucaagaugagacau

SEQ ID NO: 1900012 - RNA, 19 nt, Artificial Sequence
  Description of Artificial Sequence: Synthetic oligonucleotide
  Sense strand starting at position 3488 of SEQ ID NO: 1879341
caucuugaugacugugacu

SEQ ID NO: 1900013 - RNA, 19 nt, Artificial Sequence
  Description of Artificial Sequence: Synthetic oligonucleotide
  Antisense strand to SEQ ID NO: 1900012
agucacagucaucaagaug

SEQ ID NO: 1900014 - RNA, 19 nt, Artificial Sequence
  Description of Artificial Sequence: Synthetic oligonucleotide
  Sense strand starting at position 3490 of SEQ ID NO: 1879341
ucuugaugacugugacuaa

SEQ ID NO: 1900015 - RNA, 19 nt, Artificial Sequence
  Description of Artificial Sequence: Synthetic oligonucleotide
  Antisense strand to SEQ ID NO: 1900014
uuagucacagucaucaaga

SEQ ID NO: 1900016 - RNA, 19 nt, Artificial Sequence
  Description of Artificial Sequence: Synthetic oligonucleotide
  Sense strand starting at position 3602 of SEQ ID NO: 1879341
aaauaaugugacugaguug

SEQ ID NO: 1900017 - RNA, 19 nt, Artificial Sequence
  Description of Artificial Sequence: Synthetic oligonucleotide
  Antisense strand to SEQ ID NO: 1900016
caacucagucacauuauuu

SEQ ID NO: 1900018 - RNA, 19 nt, Artificial Sequence
  Description of Artificial Sequence: Synthetic oligonucleotide
  Sense strand starting at position 3605 of SEQ ID NO: 1879341
uaaugugacugaguugacu

SEQ ID NO: 1900019 - RNA, 19 nt, Artificial Sequence
  Description of Artificial Sequence: Synthetic oligonucleotide
  Antisense strand to SEQ ID NO: 1900018
agucaacucagucacauua

SEQ ID NO: 1900020 - RNA, 19 nt, Artificial Sequence
  Description of Artificial Sequence: Synthetic oligonucleotide
  Sense strand starting at position 3607 of SEQ ID NO: 1879341
augugacugaguugacuuu

SEQ ID NO: 1900021 - RNA, 19 nt, Artificial Sequence
  Description of Artificial Sequence: Synthetic oligonucleotide
  Antisense strand to SEQ ID NO: 1900020
aaagucaacucagucacau

SEQ ID NO: 1900022 - RNA, 19 nt, Artificial Sequence
  Description of Artificial Sequence: Synthetic oligonucleotide
  Sense strand starting at position 3715 of SEQ ID NO: 1879341
auuguugaucgcucugcua

SEQ ID NO: 1900023 - RNA, 19 nt, Artificial Sequence
  Description of Artificial Sequence: Synthetic oligonucleotide
  Antisense strand to SEQ ID NO: 1900022
uagcagagcgaucaacaau

SEQ ID NO: 1900024 - RNA, 19 nt, Artificial Sequence
  Description of Artificial Sequence: Synthetic oligonucleotide
  Sense strand starting at position 3822 of SEQ ID NO: 1879341
gugaaauaagcucacuuaa

SEQ ID NO: 1900025 - RNA, 19 nt, Artificial Sequence
  Description of Artificial Sequence: Synthetic oligonucleotide
  Antisense strand to SEQ ID NO: 1900024
uuaagugagcuuauuucac

SEQ ID NO: 1900026 - RNA, 19 nt, Artificial Sequence
  Description of Artificial Sequence: Synthetic oligonucleotide
  Sense strand starting at position 3895 of SEQ ID NO: 1879341
agauuucucuuggcuguau

SEQ ID NO: 1900027 - RNA, 19 nt, Artificial Sequence
  Description of Artificial Sequence: Synthetic oligonucleotide
  Antisense strand to SEQ ID NO: 1900026
auacagccaagagaaaucu

SEQ ID NO: 1900028 - RNA, 19 nt, Artificial Sequence
  Description of Artificial Sequence: Synthetic oligonucleotide
  Sense strand starting at position 3896 of SEQ ID NO: 1879341
gauuucucuuggcuguaua

SEQ ID NO: 1900029 - RNA, 19 nt, Artificial Sequence
  Description of Artificial Sequence: Synthetic oligonucleotide
  Antisense strand to SEQ ID NO: 1900028
uauacagccaagagaaauc

SEQ ID NO: 1900030 - RNA, 19 nt, Artificial Sequence
  Description of Artificial Sequence: Synthetic oligonucleotide
  Sense strand starting at position 3897 of SEQ ID NO: 1879341
auuucucuuggcuguauaa

SEQ ID NO: 1900031 - RNA, 19 nt, Artificial Sequence
  Description of Artificial Sequence: Synthetic oligonucleotide
  Antisense strand to SEQ ID NO: 1900030
uuauacagccaagagaaau

SEQ ID NO: 1900032 - RNA, 19 nt, Artificial Sequence
  Description of Artificial Sequence: Synthetic oligonucleotide
  Sense strand starting at position 32 of SEQ ID NO: 1879342
uucuguguauccuuaauuu

SEQ ID NO: 1900033 - RNA, 19 nt, Artificial Sequence
  Description of Artificial Sequence: Synthetic oligonucleotide
  Antisense strand to SEQ ID NO: 1900032
aaauuaaggauacacagaa

SEQ ID NO: 1900034 - RNA, 19 nt, Artificial Sequence
  Description of Artificial Sequence: Synthetic oligonucleotide
  Sense strand starting at position 36 of SEQ ID NO: 1879342
guguauccuuaauuucuuu

SEQ ID NO: 1900035 - RNA, 19 nt, Artificial Sequence
  Description of Artificial Sequence: Synthetic oligonucleotide
  Antisense strand to SEQ ID NO: 1900034
aaagaaauuaaggauacac

SEQ ID NO: 1900036 - RNA, 19 nt, Artificial Sequence
  Description of Artificial Sequence: Synthetic oligonucleotide
  Sense strand starting at position 383 of SEQ ID NO: 1879342
uuauauagugccuagcaca

SEQ ID NO: 1900037 - RNA, 19 nt, Artificial Sequence
  Description of Artificial Sequence: Synthetic oligonucleotide
  Antisense strand to SEQ ID NO: 1900036
ugugcuaggcacuauauaa

SEQ ID NO: 1900038 - RNA, 19 nt, Artificial Sequence
  Description of Artificial Sequence: Synthetic oligonucleotide
  Sense strand starting at position 554 of SEQ ID NO: 1879342
cuguaaggucccugaggga

SEQ ID NO: 1900039 - RNA, 19 nt, Artificial Sequence
  Description of Artificial Sequence: Synthetic oligonucleotide
  Antisense strand to SEQ ID NO: 1900038
ucccucagggaccuuacag

SEQ ID NO: 1900040 - RNA, 19 nt, Artificial Sequence
  Description of Artificial Sequence: Synthetic oligonucleotide
  Sense strand starting at position 614 of SEQ ID NO: 1879342
cagugucuagaagagugua

SEQ ID NO: 1900041 - RNA, 19 nt, Artificial Sequence
  Description of Artificial Sequence: Synthetic oligonucleotide
  Antisense strand to SEQ ID NO: 1900040
uacacucuucuagacacug

SEQ ID NO: 1900042 - RNA, 19 nt, Artificial Sequence
  Description of Artificial Sequence: Synthetic oligonucleotide
  Sense strand starting at position 617 of SEQ ID NO: 1879342
ugucuagaagaguguauag

SEQ ID NO: 1900043 - RNA, 19 nt, Artificial Sequence
  Description of Artificial Sequence: Synthetic oligonucleotide
  Antisense strand to SEQ ID NO: 1900042
cuauacacucuucuagaca

SEQ ID NO: 1900044 - RNA, 19 nt, Artificial Sequence
  Description of Artificial Sequence: Synthetic oligonucleotide
  Sense strand starting at position 619 of SEQ ID NO: 1879342
ucuagaagaguguauagca

SEQ ID NO: 1900045 - RNA, 19 nt, Artificial Sequence
  Description of Artificial Sequence: Synthetic oligonucleotide
  Antisense strand to SEQ ID NO: 1900044
ugcuauacacucuucuaga

SEQ ID NO: 1900046 - RNA, 19 nt, Artificial Sequence
  Description of Artificial Sequence: Synthetic oligonucleotide
  Sense strand starting at position 655 of SEQ ID NO: 1879342
caguuugcuggaugaauga

SEQ ID NO: 1900047 - RNA, 19 nt, Artificial Sequence
  Description of Artificial Sequence: Synthetic oligonucleotide
  Antisense strand to SEQ ID NO: 1900046
ucauucauccagcaaacug

SEQ ID NO: 1900048 - RNA, 19 nt, Artificial Sequence
  Description of Artificial Sequence: Synthetic oligonucleotide
  Sense strand starting at position 839 of SEQ ID NO: 1879342
ggagucaaucagcaaaggu

SEQ ID NO: 1900049 - RNA, 19 nt, Artificial Sequence
  Description of Artificial Sequence: Synthetic oligonucleotide
  Antisense strand to SEQ ID NO: 1900048
accuuugcugauugacucc

SEQ ID NO: 1900050 - RNA, 19 nt, Artificial Sequence
  Description of Artificial Sequence: Synthetic oligonucleotide
  Sense strand starting at position 964 of SEQ ID NO: 1879342
gauaaacauguuugaagcu

SEQ ID NO: 1900051 - RNA, 19 nt, Artificial Sequence
  Description of Artificial Sequence: Synthetic oligonucleotide
  Antisense strand to SEQ ID NO: 1900050
agcuucaaacauguuuauc

SEQ ID NO: 1900052 - RNA, 19 nt, Artificial Sequence
  Description of Artificial Sequence: Synthetic oligonucleotide
  Sense strand starting at position 981 of SEQ ID NO: 1879342
cuuacauucugagcaggau

SEQ ID NO: 1900053 - RNA, 19 nt, Artificial Sequence
  Description of Artificial Sequence: Synthetic oligonucleotide
  Antisense strand to SEQ ID NO: 1900052
auccugcucagaauguaag

SEQ ID NO: 1900054 - RNA, 19 nt, Artificial Sequence
  Description of Artificial Sequence: Synthetic oligonucleotide
  Sense strand starting at position 1094 of SEQ ID NO: 1879342
gcccaaugugaggacuuua

SEQ ID NO: 1900055 - RNA, 19 nt, Artificial Sequence
  Description of Artificial Sequence: Synthetic oligonucleotide
  Antisense strand to SEQ ID NO: 1900054
uaaaguccucacauugggc

SEQ ID NO: 1900056 - RNA, 19 nt, Artificial Sequence
  Description of Artificial Sequence: Synthetic oligonucleotide
  Sense strand starting at position 1156 of SEQ ID NO: 1879342
ccuugugggaucgaacauu

SEQ ID NO: 1900057 - RNA, 19 nt, Artificial Sequence
  Description of Artificial Sequence: Synthetic oligonucleotide
  Antisense strand to SEQ ID NO: 1900056
aauguucgaucccacaagg

SEQ ID NO: 1900058 - RNA, 19 nt, Artificial Sequence
  Description of Artificial Sequence: Synthetic oligonucleotide
  Sense strand starting at position 1181 of SEQ ID NO: 1879342
aacccuaguucucuaggga

SEQ ID NO: 1900059 - RNA, 19 nt, Artificial Sequence
  Description of Artificial Sequence: Synthetic oligonucleotide
  Antisense strand to SEQ ID NO: 1900058
ucccuagagaacuaggguu

SEQ ID NO: 1900060 - RNA, 19 nt, Artificial Sequence
  Description of Artificial Sequence: Synthetic oligonucleotide
  Sense strand starting at position 1184 of SEQ ID NO: 1879342
ccuaguucucuagggaaau

SEQ ID NO: 1900061 - RNA, 19 nt, Artificial Sequence
  Description of Artificial Sequence: Synthetic oligonucleotide
  Antisense strand to SEQ ID NO: 1900060
auuucccuagagaacuagg

SEQ ID NO: 1900062 - RNA, 19 nt, Artificial Sequence
  Description of Artificial Sequence: Synthetic oligonucleotide
  Sense strand starting at position 1242 of SEQ ID NO: 1879342
guuguuaagccagagagaa

SEQ ID NO: 1900063 - RNA, 19 nt, Artificial Sequence
  Description of Artificial Sequence: Synthetic oligonucleotide
  Antisense strand to SEQ ID NO: 1900062
uucucucuggcuuaacaac

SEQ ID NO: 1900064 - RNA, 19 nt, Artificial Sequence
  Description of Artificial Sequence: Synthetic oligonucleotide
  Sense strand starting at position 1350 of SEQ ID NO: 1879342
agauguuaaugagugagau

SEQ ID NO: 1900065 - RNA, 19 nt, Artificial Sequence
  Description of Artificial Sequence: Synthetic oligonucleotide
  Antisense strand to SEQ ID NO: 1900064
aucucacucauuaacaucu

SEQ ID NO: 1900066 - RNA, 19 nt, Artificial Sequence
  Description of Artificial Sequence: Synthetic oligonucleotide
  Sense strand starting at position 1351 of SEQ ID NO: 1879342
gauguuaaugagugagauu

SEQ ID NO: 1900067 - RNA, 19 nt, Artificial Sequence
  Description of Artificial Sequence: Synthetic oligonucleotide
  Antisense strand to SEQ ID NO: 1900066
aaucucacucauuaacauc

SEQ ID NO: 1900068 - RNA, 19 nt, Artificial Sequence
  Description of Artificial Sequence: Synthetic oligonucleotide
  Sense strand starting at position 1354 of SEQ ID NO: 1879342
guuaaugagugagauuuga

SEQ ID NO: 1900069 - RNA, 19 nt, Artificial Sequence
  Description of Artificial Sequence: Synthetic oligonucleotide
  Antisense strand to SEQ ID NO: 1900068
ucaaaucucacucauuaac

SEQ ID NO: 1900070 - RNA, 19 nt, Artificial Sequence
  Description of Artificial Sequence: Synthetic oligonucleotide
  Sense strand starting at position 1452 of SEQ ID NO: 1879342
gacggacagucacuuucua

SEQ ID NO: 1900071 - RNA, 19 nt, Artificial Sequence
  Description of Artificial Sequence: Synthetic oligonucleotide
  Antisense strand to SEQ ID NO: 1900070
uagaaagugacuguccguc

SEQ ID NO: 1900072 - RNA, 19 nt, Artificial Sequence
  Description of Artificial Sequence: Synthetic oligonucleotide
  Sense strand starting at position 1464 of SEQ ID NO: 1879342
cuuucuagagcucagauca

SEQ ID NO: 1900073 - RNA, 19 nt, Artificial Sequence
  Description of Artificial Sequence: Synthetic oligonucleotide
  Antisense strand to SEQ ID NO: 1900072
ugaucugagcucuagaaag

SEQ ID NO: 1900074 - RNA, 19 nt, Artificial Sequence
  Description of Artificial Sequence: Synthetic oligonucleotide
  Sense strand starting at position 1579 of SEQ ID NO: 1879342
aggagauacaucggaaguc

SEQ ID NO: 1900075 - RNA, 19 nt, Artificial Sequence
  Description of Artificial Sequence: Synthetic oligonucleotide
  Antisense strand to SEQ ID NO: 1900074
gacuuccgauguaucuccu

SEQ ID NO: 1900076 - RNA, 19 nt, Artificial Sequence
  Description of Artificial Sequence: Synthetic oligonucleotide
  Sense strand starting at position 1589 of SEQ ID NO: 1879342
ucggaaguccuacagaauc

SEQ ID NO: 1900077 - RNA, 19 nt, Artificial Sequence
  Description of Artificial Sequence: Synthetic oligonucleotide
  Antisense strand to SEQ ID NO: 1900076
gauucuguaggacuuccga

SEQ ID NO: 1900078 - RNA, 19 nt, Artificial Sequence
  Description of Artificial Sequence: Synthetic oligonucleotide
  Sense strand starting at position 1687 of SEQ ID NO: 1879342
caacgcguucuguuuccua

SEQ ID NO: 1900079 - RNA, 19 nt, Artificial Sequence
  Description of Artificial Sequence: Synthetic oligonucleotide
  Antisense strand to SEQ ID NO: 1900078
uaggaaacagaacgcguug

SEQ ID NO: 1900080 - RNA, 19 nt, Artificial Sequence
  Description of Artificial Sequence: Synthetic oligonucleotide
  Sense strand starting at position 1689 of SEQ ID NO: 1879342
acgcguucuguuuccuaaa

SEQ ID NO: 1900081 - RNA, 19 nt, Artificial Sequence
  Description of Artificial Sequence: Synthetic oligonucleotide
  Antisense strand to SEQ ID NO: 1900080
uuuaggaaacagaacgcgu

SEQ ID NO: 1900082 - RNA, 19 nt, Artificial Sequence
  Description of Artificial Sequence: Synthetic oligonucleotide
  Sense strand starting at position 1898 of SEQ ID NO: 1879342
gaugucacauugcuagaac

SEQ ID NO: 1900083 - RNA, 19 nt, Artificial Sequence
  Description of Artificial Sequence: Synthetic oligonucleotide
  Antisense strand to SEQ ID NO: 1900082
guucuagcaaugugacauc

SEQ ID NO: 1900084 - RNA, 19 nt, Artificial Sequence
  Description of Artificial Sequence: Synthetic oligonucleotide
  Sense strand starting at position 2102 of SEQ ID NO: 1879342
accuuuaaaucaccgcaga

SEQ ID NO: 1900085 - RNA, 19 nt, Artificial Sequence
  Description of Artificial Sequence: Synthetic oligonucleotide
  Antisense strand to SEQ ID NO: 1900084
ucugcggugauuuaaaggu

SEQ ID NO: 1900086 - RNA, 19 nt, Artificial Sequence
  Description of Artificial Sequence: Synthetic oligonucleotide
  Sense strand starting at position 2866 of SEQ ID NO: 1879342
gggauugccuucccaggaa

SEQ ID NO: 1900087 - RNA, 19 nt, Artificial Sequence
  Description of Artificial Sequence: Synthetic oligonucleotide
  Antisense strand to SEQ ID NO: 1900086
uuccugggaaggcaauccc

SEQ ID NO: 1900088 - RNA, 19 nt, Artificial Sequence
  Description of Artificial Sequence: Synthetic oligonucleotide
  Sense strand starting at position 2947 of SEQ ID NO: 1879342
gggcguguuguccuuaagu

SEQ ID NO: 1900089 - RNA, 19 nt, Artificial Sequence
  Description of Artificial Sequence: Synthetic oligonucleotide
  Antisense strand to SEQ ID NO: 1900088
acuuaaggacaacacgccc

SEQ ID NO: 1900090 - RNA, 19 nt, Artificial Sequence
  Description of Artificial Sequence: Synthetic oligonucleotide
  Sense strand starting at position 3084 of SEQ ID NO: 1879342
uggguuauuugugcuguuu

SEQ ID NO: 1900091 - RNA, 19 nt, Artificial Sequence
  Description of Artificial Sequence: Synthetic oligonucleotide
  Antisense strand to SEQ ID NO: 1900090
aaacagcacaaauaaccca

SEQ ID NO: 1900092 - RNA, 19 nt, Artificial Sequence
  Description of Artificial Sequence: Synthetic oligonucleotide
  Sense strand starting at position 3181 of SEQ ID NO: 1879342
guagucguuaggcuuguaa

SEQ ID NO: 1900093 - RNA, 19 nt, Artificial Sequence
  Description of Artificial Sequence: Synthetic oligonucleotide
  Antisense strand to SEQ ID NO: 1900092
uuacaagccuaacgacuac

SEQ ID NO: 1900094 - RNA, 19 nt, Artificial Sequence
  Description of Artificial Sequence: Synthetic oligonucleotide
  Sense strand starting at position 3184 of SEQ ID NO: 1879342
gucguuaggcuuguaauuc

SEQ ID NO: 1900095 - RNA, 19 nt, Artificial Sequence
  Description of Artificial Sequence: Synthetic oligonucleotide
  Antisense strand to SEQ ID NO: 1900094
gaauuacaagccuaacgac

SEQ ID NO: 1900096 - RNA, 19 nt, Artificial Sequence
  Description of Artificial Sequence: Synthetic oligonucleotide
  Sense strand starting at position 3237 of SEQ ID NO: 1879342
ccuaauguauaucuguaca

SEQ ID NO: 1900097 - RNA, 19 nt, Artificial Sequence
  Description of Artificial Sequence: Synthetic oligonucleotide
  Antisense strand to SEQ ID NO: 1900096
uguacagauauacauuagg

SEQ ID NO: 1900098 - RNA, 19 nt, Artificial Sequence
  Description of Artificial Sequence: Synthetic oligonucleotide
  Sense strand starting at position 3696 of SEQ ID NO: 1879342
ugggaauucucaguaauug

SEQ ID NO: 1900099 - RNA, 19 nt, Artificial Sequence
  Description of Artificial Sequence: Synthetic oligonucleotide
  Antisense strand to SEQ ID NO: 1900098
caauuacugagaauuccca

SEQ ID NO: 1900100 - RNA, 19 nt, Artificial Sequence
  Description of Artificial Sequence: Synthetic oligonucleotide
  Sense strand starting at position 3697 of SEQ ID NO: 1879342
gggaauucucaguaauugc

SEQ ID NO: 1900101 - RNA, 19 nt, Artificial Sequence
  Description of Artificial Sequence: Synthetic oligonucleotide
  Antisense strand to SEQ ID NO: 1900100
gcaauuacugagaauuccc

SEQ ID NO: 1900102 - RNA, 19 nt, Artificial Sequence
  Description of Artificial Sequence: Synthetic oligonucleotide
  Sense strand starting at position 3799 of SEQ ID NO: 1879342
guggcuucccgcucuugau

SEQ ID NO: 1900103 - RNA, 19 nt, Artificial Sequence
  Description of Artificial Sequence: Synthetic oligonucleotide
  Antisense strand to SEQ ID NO: 1900102
aucaagagcgggaagccac

SEQ ID NO: 1900104 - RNA, 19 nt, Artificial Sequence
  Description of Artificial Sequence: Synthetic oligonucleotide
  Sense strand starting at position 3803 of SEQ ID NO: 1879342
cuucccgcucuugaugaaa

SEQ ID NO: 1900105 - RNA, 19 nt, Artificial Sequence
  Description of Artificial Sequence: Synthetic oligonucleotide
  Antisense strand to SEQ ID NO: 1900104
uuucaucaagagcgggaag

SEQ ID NO: 1900106 - RNA, 19 nt, Artificial Sequence
  Description of Artificial Sequence: Synthetic oligonucleotide
  Sense strand starting at position 3825 of SEQ ID NO: 1879342
gguuaaauuaaguggcuga

SEQ ID NO: 1900107 - RNA, 19 nt, Artificial Sequence
  Description of Artificial Sequence: Synthetic oligonucleotide
  Antisense strand to SEQ ID NO: 1900106
ucagccacuuaauuuaacc

SEQ ID NO: 1900108 - RNA, 19 nt, Artificial Sequence
  Description of Artificial Sequence: Synthetic oligonucleotide
  Sense strand starting at position 3826 of SEQ ID NO: 1879342
guuaaauuaaguggcugau

SEQ ID NO: 1900109 - RNA, 19 nt, Artificial Sequence
  Description of Artificial Sequence: Synthetic oligonucleotide
  Antisense strand to SEQ ID NO: 1900108
aucagccacuuaauuuaac

SEQ ID NO: 1900110 - RNA, 19 nt, Artificial Sequence
  Description of Artificial Sequence: Synthetic oligonucleotide
  Sense strand starting at position 3838 of SEQ ID NO: 1879342
ggcugaugcccucagcaaa

SEQ ID NO: 1900111 - RNA, 19 nt, Artificial Sequence
  Description of Artificial Sequence: Synthetic oligonucleotide
  Antisense strand to SEQ ID NO: 1900110
uuugcugagggcaucagcc

SEQ ID NO: 1900112 - RNA, 19 nt, Artificial Sequence
  Description of Artificial Sequence: Synthetic oligonucleotide
  Sense strand starting at position 116 of SEQ ID NO: 1879343
uuauauagugccuagcaca

SEQ ID NO: 1900113 - RNA, 19 nt, Artificial Sequence
  Description of Artificial Sequence: Synthetic oligonucleotide
  Antisense strand to SEQ ID NO: 1900112
ugugcuaggcacuauauaa

SEQ ID NO: 1900114 - RNA, 19 nt, Artificial Sequence
  Description of Artificial Sequence: Synthetic oligonucleotide
  Sense strand starting at position 287 of SEQ ID NO: 1879343
cuguaaggucccugaggga

SEQ ID NO: 1900115 - RNA, 19 nt, Artificial Sequence
  Description of Artificial Sequence: Synthetic oligonucleotide
  Antisense strand to SEQ ID NO: 1900114
ucccucagggaccuuacag

SEQ ID NO: 1900116 - RNA, 19 nt, Artificial Sequence
  Description of Artificial Sequence: Synthetic oligonucleotide
  Sense strand starting at position 347 of SEQ ID NO: 1879343
cagugucuagaagagugua

SEQ ID NO: 1900117 - RNA, 19 nt, Artificial Sequence
  Description of Artificial Sequence: Synthetic oligonucleotide
  Antisense strand to SEQ ID NO: 1900116
uacacucuucuagacacug

SEQ ID NO: 1900118 - RNA, 19 nt, Artificial Sequence
  Description of Artificial Sequence: Synthetic oligonucleotide
  Sense strand starting at position 350 of SEQ ID NO: 1879343
ugucuagaagaguguauag

SEQ ID NO: 1900119 - RNA, 19 nt, Artificial Sequence
  Description of Artificial Sequence: Synthetic oligonucleotide
  Antisense strand to SEQ ID NO: 1900118
cuauacacucuucuagaca

SEQ ID NO: 1900120 - RNA, 19 nt, Artificial Sequence
  Description of Artificial Sequence: Synthetic oligonucleotide
  Sense strand starting at position 352 of SEQ ID NO: 1879343
ucuagaagaguguauagca

SEQ ID NO: 1900121 - RNA, 19 nt, Artificial Sequence
  Description of Artificial Sequence: Synthetic oligonucleotide
  Antisense strand to SEQ ID NO: 1900120
ugcuauacacucuucuaga

SEQ ID NO: 1900122 - RNA, 19 nt, Artificial Sequence
  Description of Artificial Sequence: Synthetic oligonucleotide
  Sense strand starting at position 388 of SEQ ID NO: 1879343
caguuugcuggaugaauga

SEQ ID NO: 1900123 - RNA, 19 nt, Artificial Sequence
  Description of Artificial Sequence: Synthetic oligonucleotide
  Antisense strand to SEQ ID NO: 1900122
ucauucauccagcaaacug

SEQ ID NO: 1900124 - RNA, 19 nt, Artificial Sequence
  Description of Artificial Sequence: Synthetic oligonucleotide
  Sense strand starting at position 572 of SEQ ID NO: 1879343
ggagucaaucagcaaaggu

SEQ ID NO: 1900125 - RNA, 19 nt, Artificial Sequence
  Description of Artificial Sequence: Synthetic oligonucleotide
  Antisense strand to SEQ ID NO: 1900124
accuuugcugauugacucc

SEQ ID NO: 1900126 - RNA, 19 nt, Artificial Sequence
  Description of Artificial Sequence: Synthetic oligonucleotide
  Sense strand starting at position 697 of SEQ ID NO: 1879343
gauaaacauguuugaagcu

SEQ ID NO: 1900127 - RNA, 19 nt, Artificial Sequence
  Description of Artificial Sequence: Synthetic oligonucleotide
  Antisense strand to SEQ ID NO: 1900126
agcuucaaacauguuuauc

SEQ ID NO: 1900128 - RNA, 19 nt, Artificial Sequence
  Description of Artificial Sequence: Synthetic oligonucleotide
  Sense strand starting at position 714 of SEQ ID NO: 1879343
cuuacauucugagcaggau

SEQ ID NO: 1900129 - RNA, 19 nt, Artificial Sequence
  Description of Artificial Sequence: Synthetic oligonucleotide
  Antisense strand to SEQ ID NO: 1900128
auccugcucagaauguaag

SEQ ID NO: 1900130 - RNA, 19 nt, Artificial Sequence
  Description of Artificial Sequence: Synthetic oligonucleotide
  Sense strand starting at position 827 of SEQ ID NO: 1879343
gcccaaugugaggacuuua

SEQ ID NO: 1900131 - RNA, 19 nt, Artificial Sequence
  Description of Artificial Sequence: Synthetic oligonucleotide
  Antisense strand to SEQ ID NO: 1900130
uaaaguccucacauugggc

SEQ ID NO: 1900132 - RNA, 19 nt, Artificial Sequence
  Description of Artificial Sequence: Synthetic oligonucleotide
  Sense strand starting at position 889 of SEQ ID NO: 1879343
ccuugugggaucgaacauu

SEQ ID NO: 1900133 - RNA, 19 nt, Artificial Sequence
  Description of Artificial Sequence: Synthetic oligonucleotide
  Antisense strand to SEQ ID NO: 1900132
aauguucgaucccacaagg

SEQ ID NO: 1900134 - RNA, 19 nt, Artificial Sequence
  Description of Artificial Sequence: Synthetic oligonucleotide
  Sense strand starting at position 914 of SEQ ID NO: 1879343
aacccuaguucucuaggga

SEQ ID NO: 1900135 - RNA, 19 nt, Artificial Sequence
  Description of Artificial Sequence: Synthetic oligonucleotide
  Antisense strand to SEQ ID NO: 1900134
ucccuagagaacuaggguu

SEQ ID NO: 1900136 - RNA, 19 nt, Artificial Sequence
  Description of Artificial Sequence: Synthetic oligonucleotide
  Sense strand starting at position 917 of SEQ ID NO: 1879343
ccuaguucucuagggaaau

SEQ ID NO: 1900137 - RNA, 19 nt, Artificial Sequence
  Description of Artificial Sequence: Synthetic oligonucleotide
  Antisense strand to SEQ ID NO: 1900136
auuucccuagagaacuagg

SEQ ID NO: 1900138 - RNA, 19 nt, Artificial Sequence
  Description of Artificial Sequence: Synthetic oligonucleotide
  Sense strand starting at position 975 of SEQ ID NO: 1879343
guuguuaagccagagagaa

SEQ ID NO: 1900139 - RNA, 19 nt, Artificial Sequence
  Description of Artificial Sequence: Synthetic oligonucleotide
  Antisense strand to SEQ ID NO: 1900138
uucucucuggcuuaacaac

SEQ ID NO: 1900140 - RNA, 19 nt, Artificial Sequence
  Description of Artificial Sequence: Synthetic oligonucleotide
  Sense strand starting at position 1083 of SEQ ID NO: 1879343
agauguuaaugagugagau

SEQ ID NO: 1900141 - RNA, 19 nt, Artificial Sequence
  Description of Artificial Sequence: Synthetic oligonucleotide
  Antisense strand to SEQ ID NO: 1900140
aucucacucauuaacaucu

SEQ ID NO: 1900142 - RNA, 19 nt, Artificial Sequence
  Description of Artificial Sequence: Synthetic oligonucleotide
  Sense strand starting at position 1084 of SEQ ID NO: 1879343
gauguuaaugagugagauu

SEQ ID NO: 1900143 - RNA, 19 nt, Artificial Sequence
  Description of Artificial Sequence: Synthetic oligonucleotide
  Antisense strand to SEQ ID NO: 1900142
aaucucacucauuaacauc

SEQ ID NO: 1900144 - RNA, 19 nt, Artificial Sequence
  Description of Artificial Sequence: Synthetic oligonucleotide
  Sense strand starting at position 1087 of SEQ ID NO: 1879343
guuaaugagugagauuuga

SEQ ID NO: 1900145 - RNA, 19 nt, Artificial Sequence
  Description of Artificial Sequence: Synthetic oligonucleotide
  Antisense strand to SEQ ID NO: 1900144
ucaaaucucacucauuaac

SEQ ID NO: 1900146 - RNA, 19 nt, Artificial Sequence
  Description of Artificial Sequence: Synthetic oligonucleotide
  Sense strand starting at position 1185 of SEQ ID NO: 1879343
gacggacagucacuuucua

SEQ ID NO: 1900147 - RNA, 19 nt, Artificial Sequence
  Description of Artificial Sequence: Synthetic oligonucleotide
  Antisense strand to SEQ ID NO: 1900146
uagaaagugacuguccguc

SEQ ID NO: 1900148 - RNA, 19 nt, Artificial Sequence
  Description of Artificial Sequence: Synthetic oligonucleotide
  Sense strand starting at position 1197 of SEQ ID NO: 1879343
cuuucuagagcucagauca

SEQ ID NO: 1900149 - RNA, 19 nt, Artificial Sequence
  Description of Artificial Sequence: Synthetic oligonucleotide
  Antisense strand to SEQ ID NO: 1900148
ugaucugagcucuagaaag

SEQ ID NO: 1900150 - RNA, 19 nt, Artificial Sequence
  Description of Artificial Sequence: Synthetic oligonucleotide
  Sense strand starting at position 1312 of SEQ ID NO: 1879343
aggagauacaucggaaguc

SEQ ID NO: 1900151 - RNA, 19 nt, Artificial Sequence
  Description of Artificial Sequence: Synthetic oligonucleotide
  Antisense strand to SEQ ID NO: 1900150
gacuuccgauguaucuccu

SEQ ID NO: 1900152 - RNA, 19 nt, Artificial Sequence
  Description of Artificial Sequence: Synthetic oligonucleotide
  Sense strand starting at position 1322 of SEQ ID NO: 1879343
ucggaaguccuacagaauc

SEQ ID NO: 1900153 - RNA, 19 nt, Artificial Sequence
  Description of Artificial Sequence: Synthetic oligonucleotide
  Antisense strand to SEQ ID NO: 1900152
gauucuguaggacuuccga

SEQ ID NO: 1900154 - RNA, 19 nt, Artificial Sequence
  Description of Artificial Sequence: Synthetic oligonucleotide
  Sense strand starting at position 1420 of SEQ ID NO: 1879343
caacgcguucuguuuccua

SEQ ID NO: 1900155 - RNA, 19 nt, Artificial Sequence
  Description of Artificial Sequence: Synthetic oligonucleotide
  Antisense strand to SEQ ID NO: 1900154
uaggaaacagaacgcguug

SEQ ID NO: 1900156 - RNA, 19 nt, Artificial Sequence
  Description of Artificial Sequence: Synthetic oligonucleotide
  Sense strand starting at position 1422 of SEQ ID NO: 1879343
acgcguucuguuuccuaaa

SEQ ID NO: 1900157 - RNA, 19 nt, Artificial Sequence
  Description of Artificial Sequence: Synthetic oligonucleotide
  Antisense strand to SEQ ID NO: 1900156
uuuaggaaacagaacgcgu

SEQ ID NO: 1900158 - RNA, 19 nt, Artificial Sequence
  Description of Artificial Sequence: Synthetic oligonucleotide
  Sense strand starting at position 1631 of SEQ ID NO: 1879343
gaugucacauugcuagaac

SEQ ID NO: 1900159 - RNA, 19 nt, Artificial Sequence
  Description of Artificial Sequence: Synthetic oligonucleotide
  Antisense strand to SEQ ID NO: 1900158
guucuagcaaugugacauc

SEQ ID NO: 1900160 - RNA, 19 nt, Artificial Sequence
  Description of Artificial Sequence: Synthetic oligonucleotide
  Sense strand starting at position 1835 of SEQ ID NO: 1879343
accuuuaaaucaccgcaga

SEQ ID NO: 1900161 - RNA, 19 nt, Artificial Sequence
  Description of Artificial Sequence: Synthetic oligonucleotide
  Antisense strand to SEQ ID NO: 1900160
ucugcggugauuuaaaggu

SEQ ID NO: 1900162 - RNA, 19 nt, Artificial Sequence
  Description of Artificial Sequence: Synthetic oligonucleotide
  Sense strand starting at position 2599 of SEQ ID NO: 1879343
gggauugccuucccaggaa

SEQ ID NO: 1900163 - RNA, 19 nt, Artificial Sequence
  Description of Artificial Sequence: Synthetic oligonucleotide
  Antisense strand to SEQ ID NO: 1900162
uuccugggaaggcaauccc

SEQ ID NO: 1900164 - RNA, 19 nt, Artificial Sequence
  Description of Artificial Sequence: Synthetic oligonucleotide
  Sense strand starting at position 2680 of SEQ ID NO: 1879343
gggcguguuguccuuaagu

SEQ ID NO: 1900165 - RNA, 19 nt, Artificial Sequence
  Description of Artificial Sequence: Synthetic oligonucleotide
  Antisense strand to SEQ ID NO: 1900164
acuuaaggacaacacgccc

SEQ ID NO: 1900166 - RNA, 19 nt, Artificial Sequence
  Description of Artificial Sequence: Synthetic oligonucleotide
  Sense strand starting at position 2817 of SEQ ID NO: 1879343
uggguuauuugugcuguuu

SEQ ID NO: 1900167 - RNA, 19 nt, Artificial Sequence
  Description of Artificial Sequence: Synthetic oligonucleotide
  Antisense strand to SEQ ID NO: 1900166
aaacagcacaaauaaccca

SEQ ID NO: 1900168 - RNA, 19 nt, Artificial Sequence
  Description of Artificial Sequence: Synthetic oligonucleotide
  Sense strand starting at position 2914 of SEQ ID NO: 1879343
guagucguuaggcuuguaa

SEQ ID NO: 1900169 - RNA, 19 nt, Artificial Sequence
  Description of Artificial Sequence: Synthetic oligonucleotide
  Antisense strand to SEQ ID NO: 1900168
uuacaagccuaacgacuac

SEQ ID NO: 1900170 - RNA, 19 nt, Artificial Sequence
  Description of Artificial Sequence: Synthetic oligonucleotide
  Sense strand starting at position 2917 of SEQ ID NO: 1879343
gucguuaggcuuguaauuc

SEQ ID NO: 1900171 - RNA, 19 nt, Artificial Sequence
  Description of Artificial Sequence: Synthetic oligonucleotide
  Antisense strand to SEQ ID NO: 1900170
gaauuacaagccuaacgac

SEQ ID NO: 1900172 - RNA, 19 nt, Artificial Sequence
  Description of Artificial Sequence: Synthetic oligonucleotide
  Sense strand starting at position 2970 of SEQ ID NO: 1879343
ccuaauguauaucuguaca

SEQ ID NO: 1900173 - RNA, 19 nt, Artificial Sequence
  Description of Artificial Sequence: Synthetic oligonucleotide
  Antisense strand to SEQ ID NO: 1900172
uguacagauauacauuagg

SEQ ID NO: 1900174 - RNA, 19 nt, Artificial Sequence
  Description of Artificial Sequence: Synthetic oligonucleotide
  Sense strand starting at position 3429 of SEQ ID NO: 1879343
ugggaauucucaguaauug

SEQ ID NO: 1900175 - RNA, 19 nt, Artificial Sequence
  Description of Artificial Sequence: Synthetic oligonucleotide
  Antisense strand to SEQ ID NO: 1900174
caauuacugagaauuccca

SEQ ID NO: 1900176 - RNA, 19 nt, Artificial Sequence
  Description of Artificial Sequence: Synthetic oligonucleotide
  Sense strand starting at position 3430 of SEQ ID NO: 1879343
gggaauucucaguaauugc

SEQ ID NO: 1900177 - RNA, 19 nt, Artificial Sequence
  Description of Artificial Sequence: Synthetic oligonucleotide
  Antisense strand to SEQ ID NO: 1900176
gcaauuacugagaauuccc

SEQ ID NO: 1900178 - RNA, 19 nt, Artificial Sequence
  Description of Artificial Sequence: Synthetic oligonucleotide
  Sense strand starting at position 3532 of SEQ ID NO: 1879343
guggcuucccgcucuugau

SEQ ID NO: 1900179 - RNA, 19 nt, Artificial Sequence
  Description of Artificial Sequence: Synthetic oligonucleotide
  Antisense strand to SEQ ID NO: 1900178
aucaagagcgggaagccac

SEQ ID NO: 1900180 - RNA, 19 nt, Artificial Sequence
  Description of Artificial Sequence: Synthetic oligonucleotide
  Sense strand starting at position 3536 of SEQ ID NO: 1879343
cuucccgcucuugaugaaa

SEQ ID NO: 1900181 - RNA, 19 nt, Artificial Sequence
  Description of Artificial Sequence: Synthetic oligonucleotide
  Antisense strand to SEQ ID NO: 1900180
uuucaucaagagcgggaag

SEQ ID NO: 1900182 - RNA, 19 nt, Artificial Sequence
  Description of Artificial Sequence: Synthetic oligonucleotide
  Sense strand starting at position 3558 of SEQ ID NO: 1879343
gguuaaauuaaguggcuga

SEQ ID NO: 1900183 - RNA, 19 nt, Artificial Sequence
  Description of Artificial Sequence: Synthetic oligonucleotide
  Antisense strand to SEQ ID NO: 1900182
ucagccacuuaauuuaacc

SEQ ID NO: 1900184 - RNA, 19 nt, Artificial Sequence
  Description of Artificial Sequence: Synthetic oligonucleotide
  Sense strand starting at position 3559 of SEQ ID NO: 1879343
guuaaauuaaguggcugau

SEQ ID NO: 1900185 - RNA, 19 nt, Artificial Sequence
  Description of Artificial Sequence: Synthetic oligonucleotide
  Antisense strand to SEQ ID NO: 1900184
aucagccacuuaauuuaac

SEQ ID NO: 1900186 - RNA, 19 nt, Artificial Sequence
  Description of Artificial Sequence: Synthetic oligonucleotide
  Sense strand starting at position 3571 of SEQ ID NO: 1879343
ggcugaugcccucagcaaa

SEQ ID NO: 1900187 - RNA, 19 nt, Artificial Sequence
  Description of Artificial Sequence: Synthetic oligonucleotide
  Antisense strand to SEQ ID NO: 1900186
uuugcugagggcaucagcc

SEQ ID NO: 1900188 - RNA, 19 nt, Artificial Sequence
  Description of Artificial Sequence: Synthetic oligonucleotide
  Sense strand starting at position 3863 of SEQ ID NO: 1879343
uguuccuggcuugaaagau

SEQ ID NO: 1900189 - RNA, 19 nt, Artificial Sequence
  Description of Artificial Sequence: Synthetic oligonucleotide
  Antisense strand to SEQ ID NO: 1900188
aucuuucaagccaggaaca

SEQ ID NO: 1900190 - RNA, 19 nt, Artificial Sequence
  Description of Artificial Sequence: Synthetic oligonucleotide
  Sense strand starting at position 3924 of SEQ ID NO: 1879343
ccaguaaaguaucuuagaa

SEQ ID NO: 1900191 - RNA, 19 nt, Artificial Sequence
  Description of Artificial Sequence: Synthetic oligonucleotide
  Antisense strand to SEQ ID NO: 1900190
uucuaagauacuuuacugg

SEQ ID NO: 1900192 - RNA, 19 nt, Artificial Sequence
  Description of Artificial Sequence: Synthetic oligonucleotide
  Sense strand starting at position 2212 of SEQ ID NO: 1879344
guuauccaaucagaauguu

SEQ ID NO: 1900193 - RNA, 19 nt, Artificial Sequence
  Description of Artificial Sequence: Synthetic oligonucleotide
  Antisense strand to SEQ ID NO: 1900192
aacauucugauuggauaac

SEQ ID NO: 1900194 - RNA, 19 nt, Artificial Sequence
  Description of Artificial Sequence: Synthetic oligonucleotide
  Sense strand starting at position 2688 of SEQ ID NO: 1879344
ccggacaucuagccuuaaa

SEQ ID NO: 1900195 - RNA, 19 nt, Artificial Sequence
  Description of Artificial Sequence: Synthetic oligonucleotide
  Antisense strand to SEQ ID NO: 1900194
uuuaaggcuagauguccgg

SEQ ID NO: 1900196 - RNA, 19 nt, Artificial Sequence
  Description of Artificial Sequence: Synthetic oligonucleotide
  Sense strand starting at position 88 of SEQ ID NO: 1879345
aaaggugauguccaucauu

SEQ ID NO: 1900197 - RNA, 19 nt, Artificial Sequence
  Description of Artificial Sequence: Synthetic oligonucleotide
  Antisense strand to SEQ ID NO: 1900196
aaugauggacaucaccuuu

SEQ ID NO: 1900198 - RNA, 19 nt, Artificial Sequence
  Description of Artificial Sequence: Synthetic oligonucleotide
  Sense strand starting at position 91 of SEQ ID NO: 1879345
ggugauguccaucauucuc

SEQ ID NO: 1900199 - RNA, 19 nt, Artificial Sequence
  Description of Artificial Sequence: Synthetic oligonucleotide
  Antisense strand to SEQ ID NO: 1900198
gagaaugauggacaucacc

SEQ ID NO: 1900200 - RNA, 19 nt, Artificial Sequence
  Description of Artificial Sequence: Synthetic oligonucleotide
  Sense strand starting at position 93 of SEQ ID NO: 1879345
ugauguccaucauucucau

SEQ ID NO: 1900201 - RNA, 19 nt, Artificial Sequence
  Description of Artificial Sequence: Synthetic oligonucleotide
  Antisense strand to SEQ ID NO: 1900200
augagaaugauggacauca

SEQ ID NO: 1900202 - RNA, 19 nt, Artificial Sequence
  Description of Artificial Sequence: Synthetic oligonucleotide
  Sense strand starting at position 150 of SEQ ID NO: 1879345
gcuuguguugucuuuacug

SEQ ID NO: 1900203 - RNA, 19 nt, Artificial Sequence
  Description of Artificial Sequence: Synthetic oligonucleotide
  Antisense strand to SEQ ID NO: 1900202
caguaaagacaacacaagc

SEQ ID NO: 1900204 - RNA, 19 nt, Artificial Sequence
  Description of Artificial Sequence: Synthetic oligonucleotide
  Sense strand starting at position 152 of SEQ ID NO: 1879345
uuguguugucuuuacugaa

SEQ ID NO: 1900205 - RNA, 19 nt, Artificial Sequence
  Description of Artificial Sequence: Synthetic oligonucleotide
  Antisense strand to SEQ ID NO: 1900204
uucaguaaagacaacacaa

SEQ ID NO: 1900206 - RNA, 19 nt, Artificial Sequence
  Description of Artificial Sequence: Synthetic oligonucleotide
  Sense strand starting at position 273 of SEQ ID NO: 1879345
acgaauaucuucucucagu

SEQ ID NO: 1900207 - RNA, 19 nt, Artificial Sequence
  Description of Artificial Sequence: Synthetic oligonucleotide
  Antisense strand to SEQ ID NO: 1900206
acugagagaagauauucgu

SEQ ID NO: 1900208 - RNA, 19 nt, Artificial Sequence
  Description of Artificial Sequence: Synthetic oligonucleotide
  Sense strand starting at position 274 of SEQ ID NO: 1879345
cgaauaucuucucucagug

SEQ ID NO: 1900209 - RNA, 19 nt, Artificial Sequence
  Description of Artificial Sequence: Synthetic oligonucleotide
  Antisense strand to SEQ ID NO: 1900208
cacugagagaagauauucg

SEQ ID NO: 1900210 - RNA, 19 nt, Artificial Sequence
  Description of Artificial Sequence: Synthetic oligonucleotide
  Sense strand starting at position 448 of SEQ ID NO: 1879345
augucauuuauccguuguu

SEQ ID NO: 1900211 - RNA, 19 nt, Artificial Sequence
  Description of Artificial Sequence: Synthetic oligonucleotide
  Antisense strand to SEQ ID NO: 1900210
aacaacggauaaaugacau

SEQ ID NO: 1900212 - RNA, 19 nt, Artificial Sequence
  Description of Artificial Sequence: Synthetic oligonucleotide
  Sense strand starting at position 449 of SEQ ID NO: 1879345
ugucauuuauccguuguuu

SEQ ID NO: 1900213 - RNA, 19 nt, Artificial Sequence
  Description of Artificial Sequence: Synthetic oligonucleotide
  Antisense strand to SEQ ID NO: 1900212
aaacaacggauaaaugaca

SEQ ID NO: 1900214 - RNA, 19 nt, Artificial Sequence
  Description of Artificial Sequence: Synthetic oligonucleotide
  Sense strand starting at position 576 of SEQ ID NO: 1879345
gagagacuuuaagucuuaa

SEQ ID NO: 1900215 - RNA, 19 nt, Artificial Sequence
  Description of Artificial Sequence: Synthetic oligonucleotide
  Antisense strand to SEQ ID NO: 1900214
uuaagacuuaaagucucuc

SEQ ID NO: 1900216 - RNA, 19 nt, Artificial Sequence
  Description of Artificial Sequence: Synthetic oligonucleotide
  Sense strand starting at position 587 of SEQ ID NO: 1879345
agucuuaaucacuguucca

SEQ ID NO: 1900217 - RNA, 19 nt, Artificial Sequence
  Description of Artificial Sequence: Synthetic oligonucleotide
  Antisense strand to SEQ ID NO: 1900216
uggaacagugauuaagacu

SEQ ID NO: 1900218 - RNA, 19 nt, Artificial Sequence
  Description of Artificial Sequence: Synthetic oligonucleotide
  Sense strand starting at position 632 of SEQ ID NO: 1879345
auugcuuuccucgcuucua

SEQ ID NO: 1900219 - RNA, 19 nt, Artificial Sequence
  Description of Artificial Sequence: Synthetic oligonucleotide
  Antisense strand to SEQ ID NO: 1900218
uagaagcgaggaaagcaau

SEQ ID NO: 1900220 - RNA, 19 nt, Artificial Sequence
  Description of Artificial Sequence: Synthetic oligonucleotide
  Sense strand starting at position 711 of SEQ ID NO: 1879345
gaggcugugugauuccaag

SEQ ID NO: 1900221 - RNA, 19 nt, Artificial Sequence
  Description of Artificial Sequence: Synthetic oligonucleotide
  Antisense strand to SEQ ID NO: 1900220
cuuggaaucacacagccuc

SEQ ID NO: 1900222 - RNA, 19 nt, Artificial Sequence
  Description of Artificial Sequence: Synthetic oligonucleotide
  Sense strand starting at position 971 of SEQ ID NO: 1879345
guuaacuccugguuaucaa

SEQ ID NO: 1900223 - RNA, 19 nt, Artificial Sequence
  Description of Artificial Sequence: Synthetic oligonucleotide
  Antisense strand to SEQ ID NO: 1900222
uugauaaccaggaguuaac

SEQ ID NO: 1900224 - RNA, 19 nt, Artificial Sequence
  Description of Artificial Sequence: Synthetic oligonucleotide
  Sense strand starting at position 1047 of SEQ ID NO: 1879345
guguuugugaaccaaugau

SEQ ID NO: 1900225 - RNA, 19 nt, Artificial Sequence
  Description of Artificial Sequence: Synthetic oligonucleotide
  Antisense strand to SEQ ID NO: 1900224
aucauugguucacaaacac

SEQ ID NO: 1900226 - RNA, 19 nt, Artificial Sequence
  Description of Artificial Sequence: Synthetic oligonucleotide
  Sense strand starting at position 1071 of SEQ ID NO: 1879345
aaccucagguuucucgaua

SEQ ID NO: 1900227 - RNA, 19 nt, Artificial Sequence
  Description of Artificial Sequence: Synthetic oligonucleotide
  Antisense strand to SEQ ID NO: 1900226
uaucgagaaaccugagguu

SEQ ID NO: 1900228 - RNA, 19 nt, Artificial Sequence
  Description of Artificial Sequence: Synthetic oligonucleotide
  Sense strand starting at position 1076 of SEQ ID NO: 1879345
cagguuucucgauaccaua

SEQ ID NO: 1900229 - RNA, 19 nt, Artificial Sequence
  Description of Artificial Sequence: Synthetic oligonucleotide
  Antisense strand to SEQ ID NO: 1900228
uaugguaucgagaaaccug

SEQ ID NO: 1900230 - RNA, 19 nt, Artificial Sequence
  Description of Artificial Sequence: Synthetic oligonucleotide
  Sense strand starting at position 1242 of SEQ ID NO: 1879345
ugcguuucucaacaggaaa

SEQ ID NO: 1900231 - RNA, 19 nt, Artificial Sequence
  Description of Artificial Sequence: Synthetic oligonucleotide
  Antisense strand to SEQ ID NO: 1900230
uuuccuguugagaaacgca

SEQ ID NO: 1900232 - RNA, 19 nt, Artificial Sequence
  Description of Artificial Sequence: Synthetic oligonucleotide
  Sense strand starting at position 1260 of SEQ ID NO: 1879345
acaaucuccugggcacaua

SEQ ID NO: 1900233 - RNA, 19 nt, Artificial Sequence
  Description of Artificial Sequence: Synthetic oligonucleotide
  Antisense strand to SEQ ID NO: 1900232
uaugugcccaggagauugu

SEQ ID NO: 1900234 - RNA, 19 nt, Artificial Sequence
  Description of Artificial Sequence: Synthetic oligonucleotide
  Sense strand starting at position 1341 of SEQ ID NO: 1879345
cuaucuaugccauaguaag

SEQ ID NO: 1900235 - RNA, 19 nt, Artificial Sequence
  Description of Artificial Sequence: Synthetic oligonucleotide
  Antisense strand to SEQ ID NO: 1900234
cuuacuauggcauagauag

SEQ ID NO: 1900236 - RNA, 19 nt, Artificial Sequence
  Description of Artificial Sequence: Synthetic oligonucleotide
  Sense strand starting at position 1389 of SEQ ID NO: 1879345
uauagcaaugccuauguga

SEQ ID NO: 1900237 - RNA, 19 nt, Artificial Sequence
  Description of Artificial Sequence: Synthetic oligonucleotide
  Antisense strand to SEQ ID NO: 1900236
ucacauaggcauugcuaua

SEQ ID NO: 1900238 - RNA, 19 nt, Artificial Sequence
  Description of Artificial Sequence: Synthetic oligonucleotide
  Sense strand starting at position 1391 of SEQ ID NO: 1879345
uagcaaugccuaugugaaa

SEQ ID NO: 1900239 - RNA, 19 nt, Artificial Sequence
  Description of Artificial Sequence: Synthetic oligonucleotide
  Antisense strand to SEQ ID NO: 1900238
uuucacauaggcauugcua

SEQ ID NO: 1900240 - RNA, 19 nt, Artificial Sequence
  Description of Artificial Sequence: Synthetic oligonucleotide
  Sense strand starting at position 1448 of SEQ ID NO: 1879345
uaaaguuaaccagacguga

SEQ ID NO: 1900241 - RNA, 19 nt, Artificial Sequence
  Description of Artificial Sequence: Synthetic oligonucleotide
  Antisense strand to SEQ ID NO: 1900240
ucacgucugguuaacuuua

SEQ ID NO: 1900242 - RNA, 19 nt, Artificial Sequence
  Description of Artificial Sequence: Synthetic oligonucleotide
  Sense strand starting at position 1508 of SEQ ID NO: 1879345
cuuuaacugaggugguuaa

SEQ ID NO: 1900243 - RNA, 19 nt, Artificial Sequence
  Description of Artificial Sequence: Synthetic oligonucleotide
  Antisense strand to SEQ ID NO: 1900242
uuaaccaccucaguuaaag

SEQ ID NO: 1900244 - RNA, 19 nt, Artificial Sequence
  Description of Artificial Sequence: Synthetic oligonucleotide
  Sense strand starting at position 1509 of SEQ ID NO: 1879345
uuuaacugaggugguuaaa

SEQ ID NO: 1900245 - RNA, 19 nt, Artificial Sequence
  Description of Artificial Sequence: Synthetic oligonucleotide
  Antisense strand to SEQ ID NO: 1900244
uuuaaccaccucaguuaaa

SEQ ID NO: 1900246 - RNA, 19 nt, Artificial Sequence
  Description of Artificial Sequence: Synthetic oligonucleotide
  Sense strand starting at position 1519 of SEQ ID NO: 1879345
gugguuaaauggcccugaa

SEQ ID NO: 1900247 - RNA, 19 nt, Artificial Sequence
  Description of Artificial Sequence: Synthetic oligonucleotide
  Antisense strand to SEQ ID NO: 1900246
uucagggccauuuaaccac

SEQ ID NO: 1900248 - RNA, 19 nt, Artificial Sequence
  Description of Artificial Sequence: Synthetic oligonucleotide
  Sense strand starting at position 1786 of SEQ ID NO: 1879345
ucgaagaugucguugagga

SEQ ID NO: 1900249 - RNA, 19 nt, Artificial Sequence
  Description of Artificial Sequence: Synthetic oligonucleotide
  Antisense strand to SEQ ID NO: 1900248
uccucaacgacaucuucga

SEQ ID NO: 1900250 - RNA, 19 nt, Artificial Sequence
  Description of Artificial Sequence: Synthetic oligonucleotide
  Sense strand starting at position 1787 of SEQ ID NO: 1879345
cgaagaugucguugaggaa

SEQ ID NO: 1900251 - RNA, 19 nt, Artificial Sequence
  Description of Artificial Sequence: Synthetic oligonucleotide
  Antisense strand to SEQ ID NO: 1900250
uuccucaacgacaucuucg

SEQ ID NO: 1900252 - RNA, 19 nt, Artificial Sequence
  Description of Artificial Sequence: Synthetic oligonucleotide
  Sense strand starting at position 2066 of SEQ ID NO: 1879345
ggaaacgacuguguacuua

SEQ ID NO: 1900253 - RNA, 19 nt, Artificial Sequence
  Description of Artificial Sequence: Synthetic oligonucleotide
  Antisense strand to SEQ ID NO: 1900252
uaaguacacagucguuucc

SEQ ID NO: 1900254 - RNA, 19 nt, Artificial Sequence
  Description of Artificial Sequence: Synthetic oligonucleotide
  Sense strand starting at position 2070 of SEQ ID NO: 1879345
acgacuguguacuuacaga

SEQ ID NO: 1900255 - RNA, 19 nt, Artificial Sequence
  Description of Artificial Sequence: Synthetic oligonucleotide
  Antisense strand to SEQ ID NO: 1900254
ucuguaaguacacagucgu

SEQ ID NO: 1900256 - RNA, 19 nt, Artificial Sequence
  Description of Artificial Sequence: Synthetic oligonucleotide
  Sense strand starting at position 2149 of SEQ ID NO: 1879345
agacgagauuauguaaaug

SEQ ID NO: 1900257 - RNA, 19 nt, Artificial Sequence
  Description of Artificial Sequence: Synthetic oligonucleotide
  Antisense strand to SEQ ID NO: 1900256
cauuuacauaaucucgucu

SEQ ID NO: 1900258 - RNA, 19 nt, Artificial Sequence
  Description of Artificial Sequence: Synthetic oligonucleotide
  Sense strand starting at position 2157 of SEQ ID NO: 1879345
uuauguaaaugaguggauu

SEQ ID NO: 1900259 - RNA, 19 nt, Artificial Sequence
  Description of Artificial Sequence: Synthetic oligonucleotide
  Antisense strand to SEQ ID NO: 1900258
aauccacucauuuacauaa

SEQ ID NO: 1900260 - RNA, 19 nt, Artificial Sequence
  Description of Artificial Sequence: Synthetic oligonucleotide
  Sense strand starting at position 2159 of SEQ ID NO: 1879345
auguaaaugaguggauucu

SEQ ID NO: 1900261 - RNA, 19 nt, Artificial Sequence
  Description of Artificial Sequence: Synthetic oligonucleotide
  Antisense strand to SEQ ID NO: 1900260
agaauccacucauuuacau

SEQ ID NO: 1900262 - RNA, 19 nt, Artificial Sequence
  Description of Artificial Sequence: Synthetic oligonucleotide
  Sense strand starting at position 2170 of SEQ ID NO: 1879345
uggauucuggcugagcuau

SEQ ID NO: 1900263 - RNA, 19 nt, Artificial Sequence
  Description of Artificial Sequence: Synthetic oligonucleotide
  Antisense strand to SEQ ID NO: 1900262
auagcucagccagaaucca

SEQ ID NO: 1900264 - RNA, 19 nt, Artificial Sequence
  Description of Artificial Sequence: Synthetic oligonucleotide
  Sense strand starting at position 2244 of SEQ ID NO: 1879345
aucgccguucugucuauaa

SEQ ID NO: 1900265 - RNA, 19 nt, Artificial Sequence
  Description of Artificial Sequence: Synthetic oligonucleotide
  Antisense strand to SEQ ID NO: 1900264
uuauagacagaacggcgau

SEQ ID NO: 1900266 - RNA, 19 nt, Artificial Sequence
  Description of Artificial Sequence: Synthetic oligonucleotide
  Sense strand starting at position 2873 of SEQ ID NO: 1879345
cucaguagugaauagcgaa

SEQ ID NO: 1900267 - RNA, 19 nt, Artificial Sequence
  Description of Artificial Sequence: Synthetic oligonucleotide
  Antisense strand to SEQ ID NO: 1900266
uucgcuauucacuacugag

SEQ ID NO: 1900268 - RNA, 19 nt, Artificial Sequence
  Description of Artificial Sequence: Synthetic oligonucleotide
  Sense strand starting at position 3539 of SEQ ID NO: 1879345
guguguucuaaggaagcga

SEQ ID NO: 1900269 - RNA, 19 nt, Artificial Sequence
  Description of Artificial Sequence: Synthetic oligonucleotide
  Antisense strand to SEQ ID NO: 1900268
ucgcuuccuuagaacacac

SEQ ID NO: 1900270 - RNA, 19 nt, Artificial Sequence
  Description of Artificial Sequence: Synthetic oligonucleotide
  Sense strand starting at position 3567 of SEQ ID NO: 1879345
agggaacaaucugacaaag

SEQ ID NO: 1900271 - RNA, 19 nt, Artificial Sequence
  Description of Artificial Sequence: Synthetic oligonucleotide
  Antisense strand to SEQ ID NO: 1900270
cuuugucagauuguucccu

SEQ ID NO: 1900272 - RNA, 19 nt, Artificial Sequence
  Description of Artificial Sequence: Synthetic oligonucleotide
  Sense strand starting at position 3646 of SEQ ID NO: 1879345
gccaacugguaaguagaaa

SEQ ID NO: 1900273 - RNA, 19 nt, Artificial Sequence
  Description of Artificial Sequence: Synthetic oligonucleotide
  Antisense strand to SEQ ID NO: 1900272
uuucuacuuaccaguuggc

SEQ ID NO: 1900274 - RNA, 19 nt, Artificial Sequence
  Description of Artificial Sequence: Synthetic oligonucleotide
  Sense strand starting at position 3690 of SEQ ID NO: 1879345
gaggaaucugcccaagcca

SEQ ID NO: 1900275 - RNA, 19 nt, Artificial Sequence
  Description of Artificial Sequence: Synthetic oligonucleotide
  Antisense strand to SEQ ID NO: 1900274
uggcuugggcagauuccuc

SEQ ID NO: 1900276 - RNA, 19 nt, Artificial Sequence
  Description of Artificial Sequence: Synthetic oligonucleotide
  Sense strand starting at position 119 of SEQ ID NO: 1879346
agcaauuacuggcugaaag

SEQ ID NO: 1900277 - RNA, 19 nt, Artificial Sequence
  Description of Artificial Sequence: Synthetic oligonucleotide
  Antisense strand to SEQ ID NO: 1900276
cuuucagccaguaauugcu

SEQ ID NO: 1900278 - RNA, 19 nt, Artificial Sequence
  Description of Artificial Sequence: Synthetic oligonucleotide
  Sense strand starting at position 120 of SEQ ID NO: 1879346
gcaauuacuggcugaaaga

SEQ ID NO: 1900279 - RNA, 19 nt, Artificial Sequence
  Description of Artificial Sequence: Synthetic oligonucleotide
  Antisense strand to SEQ ID NO: 1900278
ucuuucagccaguaauugc

SEQ ID NO: 1900280 - RNA, 19 nt, Artificial Sequence
  Description of Artificial Sequence: Synthetic oligonucleotide
  Sense strand starting at position 142 of SEQ ID NO: 1879346
acaggagggucuucagauc

SEQ ID NO: 1900281 - RNA, 19 nt, Artificial Sequence
  Description of Artificial Sequence: Synthetic oligonucleotide
  Antisense strand to SEQ ID NO: 1900280
gaucugaagacccuccugu

SEQ ID NO: 1900282 - RNA, 19 nt, Artificial Sequence
  Description of Artificial Sequence: Synthetic oligonucleotide
  Sense strand starting at position 208 of SEQ ID NO: 1879346
aucacugaccuguauucuu

SEQ ID NO: 1900283 - RNA, 19 nt, Artificial Sequence
  Description of Artificial Sequence: Synthetic oligonucleotide
  Antisense strand to SEQ ID NO: 1900282
aagaauacaggucagugau

SEQ ID NO: 1900284 - RNA, 19 nt, Artificial Sequence
  Description of Artificial Sequence: Synthetic oligonucleotide
  Sense strand starting at position 381 of SEQ ID NO: 1879346
acgucugaucauuacauaa

SEQ ID NO: 1900285 - RNA, 19 nt, Artificial Sequence
  Description of Artificial Sequence: Synthetic oligonucleotide
  Antisense strand to SEQ ID NO: 1900284
uuauguaaugaucagacgu

SEQ ID NO: 1900286 - RNA, 19 nt, Artificial Sequence
  Description of Artificial Sequence: Synthetic oligonucleotide
  Sense strand starting at position 419 of SEQ ID NO: 1879346
agaacacugccaugcagau

SEQ ID NO: 1900287 - RNA, 19 nt, Artificial Sequence
  Description of Artificial Sequence: Synthetic oligonucleotide
  Antisense strand to SEQ ID NO: 1900286
aucugcauggcaguguucu

SEQ ID NO: 1900288 - RNA, 19 nt, Artificial Sequence
  Description of Artificial Sequence: Synthetic oligonucleotide
  Sense strand starting at position 683 of SEQ ID NO: 1879346
agggccuagccacagaaau

SEQ ID NO: 1900289 - RNA, 19 nt, Artificial Sequence
  Description of Artificial Sequence: Synthetic oligonucleotide
  Antisense strand to SEQ ID NO: 1900288
auuucuguggcuaggcccu

SEQ ID NO: 1900290 - RNA, 19 nt, Artificial Sequence
  Description of Artificial Sequence: Synthetic oligonucleotide
  Sense strand starting at position 1440 of SEQ ID NO: 1879346
cggacaccuugccuaagaa

SEQ ID NO: 1900291 - RNA, 19 nt, Artificial Sequence
  Description of Artificial Sequence: Synthetic oligonucleotide
  Antisense strand to SEQ ID NO: 1900290
uucuuaggcaagguguccg

SEQ ID NO: 1900292 - RNA, 19 nt, Artificial Sequence
  Description of Artificial Sequence: Synthetic oligonucleotide
  Sense strand starting at position 1551 of SEQ ID NO: 1879346
gaauccauccgccgaauaa

SEQ ID NO: 1900293 - RNA, 19 nt, Artificial Sequence
  Description of Artificial Sequence: Synthetic oligonucleotide
  Antisense strand to SEQ ID NO: 1900292
uuauucggcggauggauuc

SEQ ID NO: 1900294 - RNA, 19 nt, Artificial Sequence
  Description of Artificial Sequence: Synthetic oligonucleotide
  Sense strand starting at position 1779 of SEQ ID NO: 1879346
gcaugcaugcguguuugua

SEQ ID NO: 1900295 - RNA, 19 nt, Artificial Sequence
  Description of Artificial Sequence: Synthetic oligonucleotide
  Antisense strand to SEQ ID NO: 1900294
uacaaacacgcaugcaugc

SEQ ID NO: 1900296 - RNA, 19 nt, Artificial Sequence
  Description of Artificial Sequence: Synthetic oligonucleotide
  Sense strand starting at position 1780 of SEQ ID NO: 1879346
caugcaugcguguuuguau

SEQ ID NO: 1900297 - RNA, 19 nt, Artificial Sequence
  Description of Artificial Sequence: Synthetic oligonucleotide
  Antisense strand to SEQ ID NO: 1900296
auacaaacacgcaugcaug

SEQ ID NO: 1900298 - RNA, 19 nt, Artificial Sequence
  Description of Artificial Sequence: Synthetic oligonucleotide
  Sense strand starting at position 1813 of SEQ ID NO: 1879346
acggaauagccauguacau

SEQ ID NO: 1900299 - RNA, 19 nt, Artificial Sequence
  Description of Artificial Sequence: Synthetic oligonucleotide
  Antisense strand to SEQ ID NO: 1900298
auguacauggcuauuccgu

SEQ ID NO: 1900300 - RNA, 19 nt, Artificial Sequence
  Description of Artificial Sequence: Synthetic oligonucleotide
  Sense strand starting at position 1815 of SEQ ID NO: 1879346
ggaauagccauguacauug

SEQ ID NO: 1900301 - RNA, 19 nt, Artificial Sequence
  Description of Artificial Sequence: Synthetic oligonucleotide
  Antisense strand to SEQ ID NO: 1900300
caauguacauggcuauucc

SEQ ID NO: 1900302 - RNA, 19 nt, Artificial Sequence
  Description of Artificial Sequence: Synthetic oligonucleotide
  Sense strand starting at position 1901 of SEQ ID NO: 1879346
agauccacccucuguuauu

SEQ ID NO: 1900303 - RNA, 19 nt, Artificial Sequence
  Description of Artificial Sequence: Synthetic oligonucleotide
  Antisense strand to SEQ ID NO: 1900302
aauaacagaggguggaucu

SEQ ID NO: 1900304 - RNA, 19 nt, Artificial Sequence
  Description of Artificial Sequence: Synthetic oligonucleotide
  Sense strand starting at position 2371 of SEQ ID NO: 1879346
augagcuucucaguacuaa

SEQ ID NO: 1900305 - RNA, 19 nt, Artificial Sequence
  Description of Artificial Sequence: Synthetic oligonucleotide
  Antisense strand to SEQ ID NO: 1900304
uuaguacugagaagcucau

SEQ ID NO: 1900306 - RNA, 19 nt, Artificial Sequence
  Description of Artificial Sequence: Synthetic oligonucleotide
  Sense strand starting at position 2372 of SEQ ID NO: 1879346
ugagcuucucaguacuaau

SEQ ID NO: 1900307 - RNA, 19 nt, Artificial Sequence
  Description of Artificial Sequence: Synthetic oligonucleotide
  Antisense strand to SEQ ID NO: 1900306
auuaguacugagaagcuca

SEQ ID NO: 1900308 - RNA, 19 nt, Artificial Sequence
  Description of Artificial Sequence: Synthetic oligonucleotide
  Sense strand starting at position 2616 of SEQ ID NO: 1879346
gguccauguccacaaauca

SEQ ID NO: 1900309 - RNA, 19 nt, Artificial Sequence
  Description of Artificial Sequence: Synthetic oligonucleotide
  Antisense strand to SEQ ID NO: 1900308
ugauuuguggacauggacc

SEQ ID NO: 1900310 - RNA, 19 nt, Artificial Sequence
  Description of Artificial Sequence: Synthetic oligonucleotide
  Sense strand starting at position 2684 of SEQ ID NO: 1879346
aucgcauuccaagacauac

SEQ ID NO: 1900311 - RNA, 19 nt, Artificial Sequence
  Description of Artificial Sequence: Synthetic oligonucleotide
  Antisense strand to SEQ ID NO: 1900310
guaugucuuggaaugcgau

SEQ ID NO: 1900312 - RNA, 19 nt, Artificial Sequence
  Description of Artificial Sequence: Synthetic oligonucleotide
  Sense strand starting at position 2738 of SEQ ID NO: 1879346
ccugaaccuuaguuagagu

SEQ ID NO: 1900313 - RNA, 19 nt, Artificial Sequence
  Description of Artificial Sequence: Synthetic oligonucleotide
  Antisense strand to SEQ ID NO: 1900312
acucuaacuaagguucagg

SEQ ID NO: 1900314 - RNA, 19 nt, Artificial Sequence
  Description of Artificial Sequence: Synthetic oligonucleotide
  Sense strand starting at position 2747 of SEQ ID NO: 1879346
uaguuagagucuuuacgau

SEQ ID NO: 1900315 - RNA, 19 nt, Artificial Sequence
  Description of Artificial Sequence: Synthetic oligonucleotide
  Antisense strand to SEQ ID NO: 1900314
aucguaaagacucuaacua

SEQ ID NO: 1900316 - RNA, 19 nt, Artificial Sequence
  Description of Artificial Sequence: Synthetic oligonucleotide
  Sense strand starting at position 2976 of SEQ ID NO: 1879346
agagguagcgcugagaaga

SEQ ID NO: 1900317 - RNA, 19 nt, Artificial Sequence
  Description of Artificial Sequence: Synthetic oligonucleotide
  Antisense strand to SEQ ID NO: 1900316
ucuucucagcgcuaccucu

SEQ ID NO: 1900318 - RNA, 19 nt, Artificial Sequence
  Description of Artificial Sequence: Synthetic oligonucleotide
  Sense strand starting at position 3009 of SEQ ID NO: 1879346
ccuugcucacguguguuaa

SEQ ID NO: 1900319 - RNA, 19 nt, Artificial Sequence
  Description of Artificial Sequence: Synthetic oligonucleotide
  Antisense strand to SEQ ID NO: 1900318
uuaacacacgugagcaagg

SEQ ID NO: 1900320 - RNA, 19 nt, Artificial Sequence
  Description of Artificial Sequence: Synthetic oligonucleotide
  Sense strand starting at position 3019 of SEQ ID NO: 1879346
guguguuaagaaggcaaau

SEQ ID NO: 1900321 - RNA, 19 nt, Artificial Sequence
  Description of Artificial Sequence: Synthetic oligonucleotide
  Antisense strand to SEQ ID NO: 1900320
auuugccuucuuaacacac

SEQ ID NO: 1900322 - RNA, 19 nt, Artificial Sequence
  Description of Artificial Sequence: Synthetic oligonucleotide
  Sense strand starting at position 3021 of SEQ ID NO: 1879346
guguuaagaaggcaaaugu

SEQ ID NO: 1900323 - RNA, 19 nt, Artificial Sequence
  Description of Artificial Sequence: Synthetic oligonucleotide
  Antisense strand to SEQ ID NO: 1900322
acauuugccuucuuaacac

SEQ ID NO: 1900324 - RNA, 19 nt, Artificial Sequence
  Description of Artificial Sequence: Synthetic oligonucleotide
  Sense strand starting at position 3030 of SEQ ID NO: 1879346
aggcaaaugucuuugacag

SEQ ID NO: 1900325 - RNA, 19 nt, Artificial Sequence
  Description of Artificial Sequence: Synthetic oligonucleotide
  Antisense strand to SEQ ID NO: 1900324
cugucaaagacauuugccu

SEQ ID NO: 1900326 - RNA, 19 nt, Artificial Sequence
  Description of Artificial Sequence: Synthetic oligonucleotide
  Sense strand starting at position 3349 of SEQ ID NO: 1879346
augugucaucgcccaagca

SEQ ID NO: 1900327 - RNA, 19 nt, Artificial Sequence
  Description of Artificial Sequence: Synthetic oligonucleotide
  Antisense strand to SEQ ID NO: 1900326
ugcuugggcgaugacacau

SEQ ID NO: 1900328 - RNA, 19 nt, Artificial Sequence
  Description of Artificial Sequence: Synthetic oligonucleotide
  Sense strand starting at position 3404 of SEQ ID NO: 1879346
ccggaaaugucaccagcca

SEQ ID NO: 1900329 - RNA, 19 nt, Artificial Sequence
  Description of Artificial Sequence: Synthetic oligonucleotide
  Antisense strand to SEQ ID NO: 1900328
uggcuggugacauuuccgg

SEQ ID NO: 1900330 - RNA, 19 nt, Artificial Sequence
  Description of Artificial Sequence: Synthetic oligonucleotide
  Sense strand starting at position 3467 of SEQ ID NO: 1879346
ccaggaggcucugugacaa

SEQ ID NO: 1900331 - RNA, 19 nt, Artificial Sequence
  Description of Artificial Sequence: Synthetic oligonucleotide
  Antisense strand to SEQ ID NO: 1900330
uugucacagagccuccugg

SEQ ID NO: 1900332 - RNA, 19 nt, Artificial Sequence
  Description of Artificial Sequence: Synthetic oligonucleotide
  Sense strand starting at position 3595 of SEQ ID NO: 1879346
gaaggagucucagugacau

SEQ ID NO: 1900333 - RNA, 19 nt, Artificial Sequence
  Description of Artificial Sequence: Synthetic oligonucleotide
  Antisense strand to SEQ ID NO: 1900332
augucacugagacuccuuc

SEQ ID NO: 1900334 - RNA, 19 nt, Artificial Sequence
  Description of Artificial Sequence: Synthetic oligonucleotide
  Sense strand starting at position 3597 of SEQ ID NO: 1879346
aggagucucagugacauuc

SEQ ID NO: 1900335 - RNA, 19 nt, Artificial Sequence
  Description of Artificial Sequence: Synthetic oligonucleotide
  Antisense strand to SEQ ID NO: 1900334
gaaugucacugagacuccu

SEQ ID NO: 1900336 - RNA, 19 nt, Artificial Sequence
  Description of Artificial Sequence: Synthetic oligonucleotide
  Sense strand starting at position 3621 of SEQ ID NO: 1879346
uucccagcauguuugagaa

SEQ ID NO: 1900337 - RNA, 19 nt, Artificial Sequence
  Description of Artificial Sequence: Synthetic oligonucleotide
  Antisense strand to SEQ ID NO: 1900336
uucucaaacaugcugggaa

SEQ ID NO: 1900338 - RNA, 19 nt, Artificial Sequence
  Description of Artificial Sequence: Synthetic oligonucleotide
  Sense strand starting at position 3724 of SEQ ID NO: 1879346
aucaguaagacugggugaa

SEQ ID NO: 1900339 - RNA, 19 nt, Artificial Sequence
  Description of Artificial Sequence: Synthetic oligonucleotide
  Antisense strand to SEQ ID NO: 1900338
uucacccagucuuacugau

SEQ ID NO: 1900340 - RNA, 19 nt, Artificial Sequence
  Description of Artificial Sequence: Synthetic oligonucleotide
  Sense strand starting at position 3725 of SEQ ID NO: 1879346
ucaguaagacugggugaaa

SEQ ID NO: 1900341 - RNA, 19 nt, Artificial Sequence
  Description of Artificial Sequence: Synthetic oligonucleotide
  Antisense strand to SEQ ID NO: 1900340
uuucacccagucuuacuga

SEQ ID NO: 1900342 - RNA, 19 nt, Artificial Sequence
  Description of Artificial Sequence: Synthetic oligonucleotide
  Sense strand starting at position 3785 of SEQ ID NO: 1879346
gagaguuuacuagaugcug

SEQ ID NO: 1900343 - RNA, 19 nt, Artificial Sequence
  Description of Artificial Sequence: Synthetic oligonucleotide
  Antisense strand to SEQ ID NO: 1900342
cagcaucuaguaaacucuc

SEQ ID NO: 1900344 - RNA, 19 nt, Artificial Sequence
  Description of Artificial Sequence: Synthetic oligonucleotide
  Sense strand starting at position 3854 of SEQ ID NO: 1879346
agggcuguccgauaauuca

SEQ ID NO: 1900345 - RNA, 19 nt, Artificial Sequence
  Description of Artificial Sequence: Synthetic oligonucleotide
  Antisense strand to SEQ ID NO: 1900344
ugaauuaucggacagcccu

SEQ ID NO: 1900346 - RNA, 19 nt, Artificial Sequence
  Description of Artificial Sequence: Synthetic oligonucleotide
  Sense strand starting at position 3869 of SEQ ID NO: 1879346
uucagaaggugauucgagu

SEQ ID NO: 1900347 - RNA, 19 nt, Artificial Sequence
  Description of Artificial Sequence: Synthetic oligonucleotide
  Antisense strand to SEQ ID NO: 1900346
acucgaaucaccuucugaa

SEQ ID NO: 1900348 - RNA, 19 nt, Artificial Sequence
  Description of Artificial Sequence: Synthetic oligonucleotide
  Sense strand starting at position 3941 of SEQ ID NO: 1879346
ggcuuugcaauguaucaug

SEQ ID NO: 1900349 - RNA, 19 nt, Artificial Sequence
  Description of Artificial Sequence: Synthetic oligonucleotide
  Antisense strand to SEQ ID NO: 1900348
caugauacauugcaaagcc

SEQ ID NO: 1900350 - RNA, 19 nt, Artificial Sequence
  Description of Artificial Sequence: Synthetic oligonucleotide
  Sense strand starting at position 3978 of SEQ ID NO: 1879346
aggguuaaaugaucuuugu

SEQ ID NO: 1900351 - RNA, 19 nt, Artificial Sequence
  Description of Artificial Sequence: Synthetic oligonucleotide
  Antisense strand to SEQ ID NO: 1900350
acaaagaucauuuaacccu

SEQ ID NO: 1900352 - RNA, 19 nt, Artificial Sequence
  Description of Artificial Sequence: Synthetic oligonucleotide
  Sense strand starting at position 3981 of SEQ ID NO: 1879346
guuaaaugaucuuuguagu

SEQ ID NO: 1900353 - RNA, 19 nt, Artificial Sequence
  Description of Artificial Sequence: Synthetic oligonucleotide
  Antisense strand to SEQ ID NO: 1900352
acuacaaagaucauuuaac

SEQ ID NO: 1900354 - RNA, 19 nt, Artificial Sequence
  Description of Artificial Sequence: Synthetic oligonucleotide
  Sense strand starting at position 3982 of SEQ ID NO: 1879346
uuaaaugaucuuuguagug

SEQ ID NO: 1900355 - RNA, 19 nt, Artificial Sequence
  Description of Artificial Sequence: Synthetic oligonucleotide
  Antisense strand to SEQ ID NO: 1900354
cacuacaaagaucauuuaa

SEQ ID NO: 1900356 - RNA, 19 nt, Artificial Sequence
  Description of Artificial Sequence: Synthetic oligonucleotide
  Sense strand starting at position 172 of SEQ ID NO: 1879347
ucuuguuagcucugaauuu

SEQ ID NO: 1900357 - RNA, 19 nt, Artificial Sequence
  Description of Artificial Sequence: Synthetic oligonucleotide
  Antisense strand to SEQ ID NO: 1900356
aaauucagagcuaacaaga

SEQ ID NO: 1900358 - RNA, 19 nt, Artificial Sequence
  Description of Artificial Sequence: Synthetic oligonucleotide
  Sense strand starting at position 199 of SEQ ID NO: 1879347
aauaaauuagcauggguga

SEQ ID NO: 1900359 - RNA, 19 nt, Artificial Sequence
  Description of Artificial Sequence: Synthetic oligonucleotide
  Antisense strand to SEQ ID NO: 1900358
ucacccaugcuaauuuauu

SEQ ID NO: 1900360 - RNA, 19 nt, Artificial Sequence
  Description of Artificial Sequence: Synthetic oligonucleotide
  Sense strand starting at position 200 of SEQ ID NO: 1879347
auaaauuagcaugggugaa

SEQ ID NO: 1900361 - RNA, 19 nt, Artificial Sequence
  Description of Artificial Sequence: Synthetic oligonucleotide
  Antisense strand to SEQ ID NO: 1900360
uucacccaugcuaauuuau

SEQ ID NO: 1900362 - RNA, 19 nt, Artificial Sequence
  Description of Artificial Sequence: Synthetic oligonucleotide
  Sense strand starting at position 244 of SEQ ID NO: 1879347
agauuuaagugacacaaga

SEQ ID NO: 1900363 - RNA, 19 nt, Artificial Sequence
  Description of Artificial Sequence: Synthetic oligonucleotide
  Antisense strand to SEQ ID NO: 1900362
ucuugugucacuuaaaucu

SEQ ID NO: 1900364 - RNA, 19 nt, Artificial Sequence
  Description of Artificial Sequence: Synthetic oligonucleotide
  Sense strand starting at position 598 of SEQ ID NO: 1879347
uugcuuaacgagcagauaa

SEQ ID NO: 1900365 - RNA, 19 nt, Artificial Sequence
  Description of Artificial Sequence: Synthetic oligonucleotide
  Antisense strand to SEQ ID NO: 1900364
uuaucugcucguuaagcaa

SEQ ID NO: 1900366 - RNA, 19 nt, Artificial Sequence
  Description of Artificial Sequence: Synthetic oligonucleotide
  Sense strand starting at position 640 of SEQ ID NO: 1879347
agagguuaucccuaggcag

SEQ ID NO: 1900367 - RNA, 19 nt, Artificial Sequence
  Description of Artificial Sequence: Synthetic oligonucleotide
  Antisense strand to SEQ ID NO: 1900366
cugccuagggauaaccucu

SEQ ID NO: 1900368 - RNA, 19 nt, Artificial Sequence
  Description of Artificial Sequence: Synthetic oligonucleotide
  Sense strand starting at position 642 of SEQ ID NO: 1879347
agguuaucccuaggcagga

SEQ ID NO: 1900369 - RNA, 19 nt, Artificial Sequence
  Description of Artificial Sequence: Synthetic oligonucleotide
  Antisense strand to SEQ ID NO: 1900368
uccugccuagggauaaccu

SEQ ID NO: 1900370 - RNA, 19 nt, Artificial Sequence
  Description of Artificial Sequence: Synthetic oligonucleotide
  Sense strand starting at position 794 of SEQ ID NO: 1879347
ugguaaagcagacaaguau

SEQ ID NO: 1900371 - RNA, 19 nt, Artificial Sequence
  Description of Artificial Sequence: Synthetic oligonucleotide
  Antisense strand to SEQ ID NO: 1900370
auacuugucugcuuuacca

SEQ ID NO: 1900372 - RNA, 19 nt, Artificial Sequence
  Description of Artificial Sequence: Synthetic oligonucleotide
  Sense strand starting at position 801 of SEQ ID NO: 1879347
gcagacaaguauccaaacu

SEQ ID NO: 1900373 - RNA, 19 nt, Artificial Sequence
  Description of Artificial Sequence: Synthetic oligonucleotide
  Antisense strand to SEQ ID NO: 1900372
aguuuggauacuugucugc

SEQ ID NO: 1900374 - RNA, 19 nt, Artificial Sequence
  Description of Artificial Sequence: Synthetic oligonucleotide
  Sense strand starting at position 848 of SEQ ID NO: 1879347
gaggaacacucaguuaauc

SEQ ID NO: 1900375 - RNA, 19 nt, Artificial Sequence
  Description of Artificial Sequence: Synthetic oligonucleotide
  Antisense strand to SEQ ID NO: 1900374
gauuaacugaguguuccuc

SEQ ID NO: 1900376 - RNA, 19 nt, Artificial Sequence
  Description of Artificial Sequence: Synthetic oligonucleotide
  Sense strand starting at position 885 of SEQ ID NO: 1879347
uccuuucuugaaugaagaa

SEQ ID NO: 1900377 - RNA, 19 nt, Artificial Sequence
  Description of Artificial Sequence: Synthetic oligonucleotide
  Antisense strand to SEQ ID NO: 1900376
uucuucauucaagaaagga

SEQ ID NO: 1900378 - RNA, 19 nt, Artificial Sequence
  Description of Artificial Sequence: Synthetic oligonucleotide
  Sense strand starting at position 1083 of SEQ ID NO: 1879347
uuuaaagaguugccagacu

SEQ ID NO: 1900379 - RNA, 19 nt, Artificial Sequence
  Description of Artificial Sequence: Synthetic oligonucleotide
  Antisense strand to SEQ ID NO: 1900378
agucuggcaacucuuuaaa

SEQ ID NO: 1900380 - RNA, 19 nt, Artificial Sequence
  Description of Artificial Sequence: Synthetic oligonucleotide
  Sense strand starting at position 1214 of SEQ ID NO: 1879347
guccaacuggucuaaaugu

SEQ ID NO: 1900381 - RNA, 19 nt, Artificial Sequence
  Description of Artificial Sequence: Synthetic oligonucleotide
  Antisense strand to SEQ ID NO: 1900380
acauuuagaccaguuggac

SEQ ID NO: 1900382 - RNA, 19 nt, Artificial Sequence
  Description of Artificial Sequence: Synthetic oligonucleotide
  Sense strand starting at position 1230 of SEQ ID NO: 1879347
ugucaaugcuaacuuaaga

SEQ ID NO: 1900383 - RNA, 19 nt, Artificial Sequence
  Description of Artificial Sequence: Synthetic oligonucleotide
  Antisense strand to SEQ ID NO: 1900382
ucuuaaguuagcauugaca

SEQ ID NO: 1900384 - RNA, 19 nt, Artificial Sequence
  Description of Artificial Sequence: Synthetic oligonucleotide
  Sense strand starting at position 1473 of SEQ ID NO: 1879347
ucucucagacgucaacaaa

SEQ ID NO: 1900385 - RNA, 19 nt, Artificial Sequence
  Description of Artificial Sequence: Synthetic oligonucleotide
  Antisense strand to SEQ ID NO: 1900384
uuuguugacgucugagaga

SEQ ID NO: 1900386 - RNA, 19 nt, Artificial Sequence
  Description of Artificial Sequence: Synthetic oligonucleotide
  Sense strand starting at position 2139 of SEQ ID NO: 1879347
uucgauuggccucaaaggu

SEQ ID NO: 1900387 - RNA, 19 nt, Artificial Sequence
  Description of Artificial Sequence: Synthetic oligonucleotide
  Antisense strand to SEQ ID NO: 1900386
accuuugaggccaaucgaa

SEQ ID NO: 1900388 - RNA, 19 nt, Artificial Sequence
  Description of Artificial Sequence: Synthetic oligonucleotide
  Sense strand starting at position 2377 of SEQ ID NO: 1879347
aacgaacguccaggagaaa

SEQ ID NO: 1900389 - RNA, 19 nt, Artificial Sequence
  Description of Artificial Sequence: Synthetic oligonucleotide
  Antisense strand to SEQ ID NO: 1900388
uuucuccuggacguucguu

SEQ ID NO: 1900390 - RNA, 19 nt, Artificial Sequence
  Description of Artificial Sequence: Synthetic oligonucleotide
  Sense strand starting at position 2439 of SEQ ID NO: 1879347
aacugugaucugcaucaga

SEQ ID NO: 1900391 - RNA, 19 nt, Artificial Sequence
  Description of Artificial Sequence: Synthetic oligonucleotide
  Antisense strand to SEQ ID NO: 1900390
ucugaugcagaucacaguu

SEQ ID NO: 1900392 - RNA, 19 nt, Artificial Sequence
  Description of Artificial Sequence: Synthetic oligonucleotide
  Sense strand starting at position 2544 of SEQ ID NO: 1879347
ugagguauuugcagagggu

SEQ ID NO: 1900393 - RNA, 19 nt, Artificial Sequence
  Description of Artificial Sequence: Synthetic oligonucleotide
  Antisense strand to SEQ ID NO: 1900392
acccucugcaaauaccuca

SEQ ID NO: 1900394 - RNA, 19 nt, Artificial Sequence
  Description of Artificial Sequence: Synthetic oligonucleotide
  Sense strand starting at position 2559 of SEQ ID NO: 1879347
gggucuagaagaugugaag

SEQ ID NO: 1900395 - RNA, 19 nt, Artificial Sequence
  Description of Artificial Sequence: Synthetic oligonucleotide
  Antisense strand to SEQ ID NO: 1900394
cuucacaucuucuagaccc

SEQ ID NO: 1900396 - RNA, 19 nt, Artificial Sequence
  Description of Artificial Sequence: Synthetic oligonucleotide
  Sense strand starting at position 2577 of SEQ ID NO: 1879347
gggagauuagcccgcauuu

SEQ ID NO: 1900397 - RNA, 19 nt, Artificial Sequence
  Description of Artificial Sequence: Synthetic oligonucleotide
  Antisense strand to SEQ ID NO: 1900396
aaaugcgggcuaaucuccc

SEQ ID NO: 1900398 - RNA, 19 nt, Artificial Sequence
  Description of Artificial Sequence: Synthetic oligonucleotide
  Sense strand starting at position 2616 of SEQ ID NO: 1879347
gugagugaugcugaagaaa

SEQ ID NO: 1900399 - RNA, 19 nt, Artificial Sequence
  Description of Artificial Sequence: Synthetic oligonucleotide
  Antisense strand to SEQ ID NO: 1900398
uuucuucagcaucacucac

SEQ ID NO: 1900400 - RNA, 19 nt, Artificial Sequence
  Description of Artificial Sequence: Synthetic oligonucleotide
  Sense strand starting at position 2734 of SEQ ID NO: 1879347
ucaggucucgcccaacaaa

SEQ ID NO: 1900401 - RNA, 19 nt, Artificial Sequence
  Description of Artificial Sequence: Synthetic oligonucleotide
  Antisense strand to SEQ ID NO: 1900400
uuuguugggcgagaccuga

SEQ ID NO: 1900402 - RNA, 19 nt, Artificial Sequence
  Description of Artificial Sequence: Synthetic oligonucleotide
  Sense strand starting at position 2788 of SEQ ID NO: 1879347
cuagaaacaugucuguacu

SEQ ID NO: 1900403 - RNA, 19 nt, Artificial Sequence
  Description of Artificial Sequence: Synthetic oligonucleotide
  Antisense strand to SEQ ID NO: 1900402
aguacagacauguuucuag

SEQ ID NO: 1900404 - RNA, 19 nt, Artificial Sequence
  Description of Artificial Sequence: Synthetic oligonucleotide
  Sense strand starting at position 2790 of SEQ ID NO: 1879347
agaaacaugucuguacuaa

SEQ ID NO: 1900405 - RNA, 19 nt, Artificial Sequence
  Description of Artificial Sequence: Synthetic oligonucleotide
  Antisense strand to SEQ ID NO: 1900404
uuaguacagacauguuucu

SEQ ID NO: 1900406 - RNA, 19 nt, Artificial Sequence
  Description of Artificial Sequence: Synthetic oligonucleotide
  Sense strand starting at position 2864 of SEQ ID NO: 1879347
cugaauguccacugauuga

SEQ ID NO: 1900407 - RNA, 19 nt, Artificial Sequence
  Description of Artificial Sequence: Synthetic oligonucleotide
  Antisense strand to SEQ ID NO: 1900406
ucaaucaguggacauucag

SEQ ID NO: 1900408 - RNA, 19 nt, Artificial Sequence
  Description of Artificial Sequence: Synthetic oligonucleotide
  Sense strand starting at position 2868 of SEQ ID NO: 1879347
auguccacugauugacaaa

SEQ ID NO: 1900409 - RNA, 19 nt, Artificial Sequence
  Description of Artificial Sequence: Synthetic oligonucleotide
  Antisense strand to SEQ ID NO: 1900408
uuugucaaucaguggacau

SEQ ID NO: 1900410 - RNA, 19 nt, Artificial Sequence
  Description of Artificial Sequence: Synthetic oligonucleotide
  Sense strand starting at position 3298 of SEQ ID NO: 1879347
acacuauagugcucaauga

SEQ ID NO: 1900411 - RNA, 19 nt, Artificial Sequence
  Description of Artificial Sequence: Synthetic oligonucleotide
  Antisense strand to SEQ ID NO: 1900410
ucauugagcacuauagugu

SEQ ID NO: 1900412 - RNA, 19 nt, Artificial Sequence
  Description of Artificial Sequence: Synthetic oligonucleotide
  Sense strand starting at position 3302 of SEQ ID NO: 1879347
uauagugcucaaugaaaga

SEQ ID NO: 1900413 - RNA, 19 nt, Artificial Sequence
  Description of Artificial Sequence: Synthetic oligonucleotide
  Antisense strand to SEQ ID NO: 1900412
ucuuucauugagcacuaua

SEQ ID NO: 1900414 - RNA, 19 nt, Artificial Sequence
  Description of Artificial Sequence: Synthetic oligonucleotide
  Sense strand starting at position 3335 of SEQ ID NO: 1879347
acccacauaguguaugauu

SEQ ID NO: 1900415 - RNA, 19 nt, Artificial Sequence
  Description of Artificial Sequence: Synthetic oligonucleotide
  Antisense strand to SEQ ID NO: 1900414
aaucauacacuaugugggu

SEQ ID NO: 1900416 - RNA, 19 nt, Artificial Sequence
  Description of Artificial Sequence: Synthetic oligonucleotide
  Sense strand starting at position 3445 of SEQ ID NO: 1879347
acugcuuaaugaguacaaa

SEQ ID NO: 1900417 - RNA, 19 nt, Artificial Sequence
  Description of Artificial Sequence: Synthetic oligonucleotide
  Antisense strand to SEQ ID NO: 1900416
uuuguacucauuaagcagu

SEQ ID NO: 1900418 - RNA, 19 nt, Artificial Sequence
  Description of Artificial Sequence: Synthetic oligonucleotide
  Sense strand starting at position 3446 of SEQ ID NO: 1879347
cugcuuaaugaguacaaag

SEQ ID NO: 1900419 - RNA, 19 nt, Artificial Sequence
  Description of Artificial Sequence: Synthetic oligonucleotide
  Antisense strand to SEQ ID NO: 1900418
cuuuguacucauuaagcag

SEQ ID NO: 1900420 - RNA, 19 nt, Artificial Sequence
  Description of Artificial Sequence: Synthetic oligonucleotide
  Sense strand starting at position 3493 of SEQ ID NO: 1879347
ggaauuagacgguggugau

SEQ ID NO: 1900421 - RNA, 19 nt, Artificial Sequence
  Description of Artificial Sequence: Synthetic oligonucleotide
  Antisense strand to SEQ ID NO: 1900420
aucaccaccgucuaauucc

SEQ ID NO: 1900422 - RNA, 19 nt, Artificial Sequence
  Description of Artificial Sequence: Synthetic oligonucleotide
  Sense strand starting at position 3494 of SEQ ID NO: 1879347
gaauuagacgguggugaug

SEQ ID NO: 1900423 - RNA, 19 nt, Artificial Sequence
  Description of Artificial Sequence: Synthetic oligonucleotide
  Antisense strand to SEQ ID NO: 1900422
caucaccaccgucuaauuc

SEQ ID NO: 1900424 - RNA, 19 nt, Artificial Sequence
  Description of Artificial Sequence: Synthetic oligonucleotide
  Sense strand starting at position 3513 of SEQ ID NO: 1879347
acuguacaacuuugugaau

SEQ ID NO: 1900425 - RNA, 19 nt, Artificial Sequence
  Description of Artificial Sequence: Synthetic oligonucleotide
  Antisense strand to SEQ ID NO: 1900424
auucacaaaguuguacagu

SEQ ID NO: 1900426 - RNA, 19 nt, Artificial Sequence
  Description of Artificial Sequence: Synthetic oligonucleotide
  Sense strand starting at position 3751 of SEQ ID NO: 1879347
acauuagcucccuagaaug

SEQ ID NO: 1900427 - RNA, 19 nt, Artificial Sequence
  Description of Artificial Sequence: Synthetic oligonucleotide
  Antisense strand to SEQ ID NO: 1900426
cauucuagggagcuaaugu

SEQ ID NO: 1900428 - RNA, 19 nt, Artificial Sequence
  Description of Artificial Sequence: Synthetic oligonucleotide
  Sense strand starting at position 3869 of SEQ ID NO: 1879347
cguucuuugucauuugauc

SEQ ID NO: 1900429 - RNA, 19 nt, Artificial Sequence
  Description of Artificial Sequence: Synthetic oligonucleotide
  Antisense strand to SEQ ID NO: 1900428
gaucaaaugacaaagaacg

SEQ ID NO: 1900430 - RNA, 19 nt, Artificial Sequence
  Description of Artificial Sequence: Synthetic oligonucleotide
  Sense strand starting at position 3951 of SEQ ID NO: 1879347
uggcuucuuccagaauccu

SEQ ID NO: 1900431 - RNA, 19 nt, Artificial Sequence
  Description of Artificial Sequence: Synthetic oligonucleotide
  Antisense strand to SEQ ID NO: 1900430
aggauucuggaagaagcca

SEQ ID NO: 1900432 - RNA, 19 nt, Artificial Sequence
  Description of Artificial Sequence: Synthetic oligonucleotide
  Sense strand starting at position 3960 of SEQ ID NO: 1879347
ccagaauccuuccuagguu

SEQ ID NO: 1900433 - RNA, 19 nt, Artificial Sequence
  Description of Artificial Sequence: Synthetic oligonucleotide
  Antisense strand to SEQ ID NO: 1900432
aaccuaggaaggauucugg

SEQ ID NO: 1900434 - RNA, 19 nt, Artificial Sequence
  Description of Artificial Sequence: Synthetic oligonucleotide
  Sense strand starting at position 3963 of SEQ ID NO: 1879347
gaauccuuccuagguuaug

SEQ ID NO: 1900435 - RNA, 19 nt, Artificial Sequence
  Description of Artificial Sequence: Synthetic oligonucleotide
  Antisense strand to SEQ ID NO: 1900434
cauaaccuaggaaggauuc

SEQ ID NO: 1900436 - RNA, 19 nt, Artificial Sequence
  Description of Artificial Sequence: Synthetic oligonucleotide
  Sense strand starting at position 21 of SEQ ID NO: 1879348
cagaaucccuguuaggaga

SEQ ID NO: 1900437 - RNA, 19 nt, Artificial Sequence
  Description of Artificial Sequence: Synthetic oligonucleotide
  Antisense strand to SEQ ID NO: 1900436
ucuccuaacagggauucug

SEQ ID NO: 1900438 - RNA, 19 nt, Artificial Sequence
  Description of Artificial Sequence: Synthetic oligonucleotide
  Sense strand starting at position 28 of SEQ ID NO: 1879348
ccuguuaggagaugcuuau

SEQ ID NO: 1900439 - RNA, 19 nt, Artificial Sequence
  Description of Artificial Sequence: Synthetic oligonucleotide
  Antisense strand to SEQ ID NO: 1900438
auaagcaucuccuaacagg

SEQ ID NO: 1900440 - RNA, 19 nt, Artificial Sequence
  Description of Artificial Sequence: Synthetic oligonucleotide
  Sense strand starting at position 40 of SEQ ID NO: 1879348
ugcuuauuagggcaaucga

SEQ ID NO: 1900441 - RNA, 19 nt, Artificial Sequence
  Description of Artificial Sequence: Synthetic oligonucleotide
  Antisense strand to SEQ ID NO: 1900440
ucgauugcccuaauaagca

SEQ ID NO: 1900442 - RNA, 19 nt, Artificial Sequence
  Description of Artificial Sequence: Synthetic oligonucleotide
  Sense strand starting at position 139 of SEQ ID NO: 1879348
gccugugguuuguuuggga

SEQ ID NO: 1900443 - RNA, 19 nt, Artificial Sequence
  Description of Artificial Sequence: Synthetic oligonucleotide
  Antisense strand to SEQ ID NO: 1900442
ucccaaacaaaccacaggc

SEQ ID NO: 1900444 - RNA, 19 nt, Artificial Sequence
  Description of Artificial Sequence: Synthetic oligonucleotide
  Sense strand starting at position 210 of SEQ ID NO: 1879348
aauagauaugucgauguug

SEQ ID NO: 1900445 - RNA, 19 nt, Artificial Sequence
  Description of Artificial Sequence: Synthetic oligonucleotide
  Antisense strand to SEQ ID NO: 1900444
caacaucgacauaucuauu

SEQ ID NO: 1900446 - RNA, 19 nt, Artificial Sequence
  Description of Artificial Sequence: Synthetic oligonucleotide
  Sense strand starting at position 212 of SEQ ID NO: 1879348
uagauaugucgauguugca

SEQ ID NO: 1900447 - RNA, 19 nt, Artificial Sequence
  Description of Artificial Sequence: Synthetic oligonucleotide
  Antisense strand to SEQ ID NO: 1900446
ugcaacaucgacauaucua

SEQ ID NO: 1900448 - RNA, 19 nt, Artificial Sequence
  Description of Artificial Sequence: Synthetic oligonucleotide
  Sense strand starting at position 245 of SEQ ID NO: 1879348
ccacuacccugcguucuaa

SEQ ID NO: 1900449 - RNA, 19 nt, Artificial Sequence
  Description of Artificial Sequence: Synthetic oligonucleotide
  Antisense strand to SEQ ID NO: 1900448
uuagaacgcaggguagugg

SEQ ID NO: 1900450 - RNA, 19 nt, Artificial Sequence
  Description of Artificial Sequence: Synthetic oligonucleotide
  Sense strand starting at position 374 of SEQ ID NO: 1879348
acggaaaucugcucuugug

SEQ ID NO: 1900451 - RNA, 19 nt, Artificial Sequence
  Description of Artificial Sequence: Synthetic oligonucleotide
  Antisense strand to SEQ ID NO: 1900450
cacaagagcagauuuccgu

SEQ ID NO: 1900452 - RNA, 19 nt, Artificial Sequence
  Description of Artificial Sequence: Synthetic oligonucleotide
  Sense strand starting at position 415 of SEQ ID NO: 1879348
ccacgugauccggagaugu

SEQ ID NO: 1900453 - RNA, 19 nt, Artificial Sequence
  Description of Artificial Sequence: Synthetic oligonucleotide
  Antisense strand to SEQ ID NO: 1900452
acaucuccggaucacgugg

SEQ ID NO: 1900454 - RNA, 19 nt, Artificial Sequence
  Description of Artificial Sequence: Synthetic oligonucleotide
  Sense strand starting at position 547 of SEQ ID NO: 1879348
aagguuuggcugcgucuaa

SEQ ID NO: 1900455 - RNA, 19 nt, Artificial Sequence
  Description of Artificial Sequence: Synthetic oligonucleotide
  Antisense strand to SEQ ID NO: 1900454
uuagacgcagccaaaccuu

SEQ ID NO: 1900456 - RNA, 19 nt, Artificial Sequence
  Description of Artificial Sequence: Synthetic oligonucleotide
  Sense strand starting at position 551 of SEQ ID NO: 1879348
uuuggcugcgucuaagaga

SEQ ID NO: 1900457 - RNA, 19 nt, Artificial Sequence
  Description of Artificial Sequence: Synthetic oligonucleotide
  Antisense strand to SEQ ID NO: 1900456
ucucuuagacgcagccaaa

SEQ ID NO: 1900458 - RNA, 19 nt, Artificial Sequence
  Description of Artificial Sequence: Synthetic oligonucleotide
  Sense strand starting at position 558 of SEQ ID NO: 1879348
gcgucuaagagagacguuu

SEQ ID NO: 1900459 - RNA, 19 nt, Artificial Sequence
  Description of Artificial Sequence: Synthetic oligonucleotide
  Antisense strand to SEQ ID NO: 1900458
aaacgucucucuuagacgc

SEQ ID NO: 1900460 - RNA, 19 nt, Artificial Sequence
  Description of Artificial Sequence: Synthetic oligonucleotide
  Sense strand starting at position 574 of SEQ ID NO: 1879348
uuuggagccauccgucuua

SEQ ID NO: 1900461 - RNA, 19 nt, Artificial Sequence
  Description of Artificial Sequence: Synthetic oligonucleotide
  Antisense strand to SEQ ID NO: 1900460
uaagacggauggcuccaaa

SEQ ID NO: 1900462 - RNA, 19 nt, Artificial Sequence
  Description of Artificial Sequence: Synthetic oligonucleotide
  Sense strand starting at position 615 of SEQ ID NO: 1879348
ucaauuugucacuguguga

SEQ ID NO: 1900463 - RNA, 19 nt, Artificial Sequence
  Description of Artificial Sequence: Synthetic oligonucleotide
  Antisense strand to SEQ ID NO: 1900462
ucacacagugacaaauuga

SEQ ID NO: 1900464 - RNA, 19 nt, Artificial Sequence
  Description of Artificial Sequence: Synthetic oligonucleotide
  Sense strand starting at position 629 of SEQ ID NO: 1879348
ugugacagcucagaauaaa

SEQ ID NO: 1900465 - RNA, 19 nt, Artificial Sequence
  Description of Artificial Sequence: Synthetic oligonucleotide
  Antisense strand to SEQ ID NO: 1900464
uuuauucugagcugucaca

SEQ ID NO: 1900466 - RNA, 19 nt, Artificial Sequence
  Description of Artificial Sequence: Synthetic oligonucleotide
  Sense strand starting at position 887 of SEQ ID NO: 1879348
agcccuaaagagugagauu

SEQ ID NO: 1900467 - RNA, 19 nt, Artificial Sequence
  Description of Artificial Sequence: Synthetic oligonucleotide
  Antisense strand to SEQ ID NO: 1900466
aaucucacucuuuagggcu

SEQ ID NO: 1900468 - RNA, 19 nt, Artificial Sequence
  Description of Artificial Sequence: Synthetic oligonucleotide
  Sense strand starting at position 1073 of SEQ ID NO: 1879348
cugcgaugugcgcuacuaa

SEQ ID NO: 1900469 - RNA, 19 nt, Artificial Sequence
  Description of Artificial Sequence: Synthetic oligonucleotide
  Antisense strand to SEQ ID NO: 1900468
uuaguagcgcacaucgcag

SEQ ID NO: 1900470 - RNA, 19 nt, Artificial Sequence
  Description of Artificial Sequence: Synthetic oligonucleotide
  Sense strand starting at position 2560 of SEQ ID NO: 1879348
ugguguaauuaucugcuaa

SEQ ID NO: 1900471 - RNA, 19 nt, Artificial Sequence
  Description of Artificial Sequence: Synthetic oligonucleotide
  Antisense strand to SEQ ID NO: 1900470
uuagcagauaauuacacca

SEQ ID NO: 1900472 - RNA, 19 nt, Artificial Sequence
  Description of Artificial Sequence: Synthetic oligonucleotide
  Sense strand starting at position 2562 of SEQ ID NO: 1879348
guguaauuaucugcuaaca

SEQ ID NO: 1900473 - RNA, 19 nt, Artificial Sequence
  Description of Artificial Sequence: Synthetic oligonucleotide
  Antisense strand to SEQ ID NO: 1900472
uguuagcagauaauuacac

SEQ ID NO: 1900474 - RNA, 19 nt, Artificial Sequence
  Description of Artificial Sequence: Synthetic oligonucleotide
  Sense strand starting at position 2572 of SEQ ID NO: 1879348
cugcuaacaugacuuugau

SEQ ID NO: 1900475 - RNA, 19 nt, Artificial Sequence
  Description of Artificial Sequence: Synthetic oligonucleotide
  Antisense strand to SEQ ID NO: 1900474
aucaaagucauguuagcag

SEQ ID NO: 1900476 - RNA, 19 nt, Artificial Sequence
  Description of Artificial Sequence: Synthetic oligonucleotide
  Sense strand starting at position 2649 of SEQ ID NO: 1879348
ggaaacacuuucgcacuua

SEQ ID NO: 1900477 - RNA, 19 nt, Artificial Sequence
  Description of Artificial Sequence: Synthetic oligonucleotide
  Antisense strand to SEQ ID NO: 1900476
uaagugcgaaaguguuucc

SEQ ID NO: 1900478 - RNA, 19 nt, Artificial Sequence
  Description of Artificial Sequence: Synthetic oligonucleotide
  Sense strand starting at position 2657 of SEQ ID NO: 1879348
uuucgcacuuaucugauuu

SEQ ID NO: 1900479 - RNA, 19 nt, Artificial Sequence
  Description of Artificial Sequence: Synthetic oligonucleotide
  Antisense strand to SEQ ID NO: 1900478
aaaucagauaagugcgaaa

SEQ ID NO: 1900480 - RNA, 19 nt, Artificial Sequence
  Description of Artificial Sequence: Synthetic oligonucleotide
  Sense strand starting at position 2768 of SEQ ID NO: 1879348
gucuguggcguucuuggaa

SEQ ID NO: 1900481 - RNA, 19 nt, Artificial Sequence
  Description of Artificial Sequence: Synthetic oligonucleotide
  Antisense strand to SEQ ID NO: 1900480
uuccaagaacgccacagac

SEQ ID NO: 1900482 - RNA, 19 nt, Artificial Sequence
  Description of Artificial Sequence: Synthetic oligonucleotide
  Sense strand starting at position 2781 of SEQ ID NO: 1879348
uuggaagacacgugaaagu

SEQ ID NO: 1900483 - RNA, 19 nt, Artificial Sequence
  Description of Artificial Sequence: Synthetic oligonucleotide
  Antisense strand to SEQ ID NO: 1900482
acuuucacgugucuuccaa

SEQ ID NO: 1900484 - RNA, 19 nt, Artificial Sequence
  Description of Artificial Sequence: Synthetic oligonucleotide
  Sense strand starting at position 2937 of SEQ ID NO: 1879348
ucucuugacuucgcucaau

SEQ ID NO: 1900485 - RNA, 19 nt, Artificial Sequence
  Description of Artificial Sequence: Synthetic oligonucleotide
  Antisense strand to SEQ ID NO: 1900484
auugagcgaagucaagaga

SEQ ID NO: 1900486 - RNA, 19 nt, Artificial Sequence
  Description of Artificial Sequence: Synthetic oligonucleotide
  Sense strand starting at position 2987 of SEQ ID NO: 1879348
gaacaaaucagcggagagu

SEQ ID NO: 1900487 - RNA, 19 nt, Artificial Sequence
  Description of Artificial Sequence: Synthetic oligonucleotide
  Antisense strand to SEQ ID NO: 1900486
acucuccgcugauuuguuc

SEQ ID NO: 1900488 - RNA, 19 nt, Artificial Sequence
  Description of Artificial Sequence: Synthetic oligonucleotide
  Sense strand starting at position 3004 of SEQ ID NO: 1879348
gugugagugugcccgagau

SEQ ID NO: 1900489 - RNA, 19 nt, Artificial Sequence
  Description of Artificial Sequence: Synthetic oligonucleotide
  Antisense strand to SEQ ID NO: 1900488
aucucgggcacacucacac

SEQ ID NO: 1900490 - RNA, 19 nt, Artificial Sequence
  Description of Artificial Sequence: Synthetic oligonucleotide
  Sense strand starting at position 3006 of SEQ ID NO: 1879348
gugagugugcccgagaugu

SEQ ID NO: 1900491 - RNA, 19 nt, Artificial Sequence
  Description of Artificial Sequence: Synthetic oligonucleotide
  Antisense strand to SEQ ID NO: 1900490
acaucucgggcacacucac

SEQ ID NO: 1900492 - RNA, 19 nt, Artificial Sequence
  Description of Artificial Sequence: Synthetic oligonucleotide
  Sense strand starting at position 3008 of SEQ ID NO: 1879348
gagugugcccgagauguaa

SEQ ID NO: 1900493 - RNA, 19 nt, Artificial Sequence
  Description of Artificial Sequence: Synthetic oligonucleotide
  Antisense strand to SEQ ID NO: 1900492
uuacaucucgggcacacuc

SEQ ID NO: 1900494 - RNA, 19 nt, Artificial Sequence
  Description of Artificial Sequence: Synthetic oligonucleotide
  Sense strand starting at position 3017 of SEQ ID NO: 1879348
cgagauguaaccugcuauc

SEQ ID NO: 1900495 - RNA, 19 nt, Artificial Sequence
  Description of Artificial Sequence: Synthetic oligonucleotide
  Antisense strand to SEQ ID NO: 1900494
gauagcagguuacaucucg

SEQ ID NO: 1900496 - RNA, 19 nt, Artificial Sequence
  Description of Artificial Sequence: Synthetic oligonucleotide
  Sense strand starting at position 3223 of SEQ ID NO: 1879348
cacguuuccagguacggaa

SEQ ID NO: 1900497 - RNA, 19 nt, Artificial Sequence
  Description of Artificial Sequence: Synthetic oligonucleotide
  Antisense strand to SEQ ID NO: 1900496
uuccguaccuggaaacgug

SEQ ID NO: 1900498 - RNA, 19 nt, Artificial Sequence
  Description of Artificial Sequence: Synthetic oligonucleotide
  Sense strand starting at position 3282 of SEQ ID NO: 1879348
ucagaaaucucaggacuga

SEQ ID NO: 1900499 - RNA, 19 nt, Artificial Sequence
  Description of Artificial Sequence: Synthetic oligonucleotide
  Antisense strand to SEQ ID NO: 1900498
ucaguccugagauuucuga

SEQ ID NO: 1900500 - RNA, 19 nt, Artificial Sequence
  Description of Artificial Sequence: Synthetic oligonucleotide
  Sense strand starting at position 3375 of SEQ ID NO: 1879348
aaagauuucucagcgagcu

SEQ ID NO: 1900501 - RNA, 19 nt, Artificial Sequence
  Description of Artificial Sequence: Synthetic oligonucleotide
  Antisense strand to SEQ ID NO: 1900500
agcucgcugagaaaucuuu

SEQ ID NO: 1900502 - RNA, 19 nt, Artificial Sequence
  Description of Artificial Sequence: Synthetic oligonucleotide
  Sense strand starting at position 3376 of SEQ ID NO: 1879348
aagauuucucagcgagcua

SEQ ID NO: 1900503 - RNA, 19 nt, Artificial Sequence
  Description of Artificial Sequence: Synthetic oligonucleotide
  Antisense strand to SEQ ID NO: 1900502
uagcucgcugagaaaucuu

SEQ ID NO: 1900504 - RNA, 19 nt, Artificial Sequence
  Description of Artificial Sequence: Synthetic oligonucleotide
  Sense strand starting at position 3524 of SEQ ID NO: 1879348
gcaucaauguugcuuauua

SEQ ID NO: 1900505 - RNA, 19 nt, Artificial Sequence
  Description of Artificial Sequence: Synthetic oligonucleotide
  Antisense strand to SEQ ID NO: 1900504
uaauaagcaacauugaugc

SEQ ID NO: 1900506 - RNA, 19 nt, Artificial Sequence
  Description of Artificial Sequence: Synthetic oligonucleotide
  Sense strand starting at position 3531 of SEQ ID NO: 1879348
uguugcuuauuagcauaua

SEQ ID NO: 1900507 - RNA, 19 nt, Artificial Sequence
  Description of Artificial Sequence: Synthetic oligonucleotide
  Antisense strand to SEQ ID NO: 1900506
uauaugcuaauaagcaaca

SEQ ID NO: 1900508 - RNA, 19 nt, Artificial Sequence
  Description of Artificial Sequence: Synthetic oligonucleotide
  Sense strand starting at position 3577 of SEQ ID NO: 1879348
gugcuuggcgaguuuaugu

SEQ ID NO: 1900509 - RNA, 19 nt, Artificial Sequence
  Description of Artificial Sequence: Synthetic oligonucleotide
  Antisense strand to SEQ ID NO: 1900508
acauaaacucgccaagcac

SEQ ID NO: 1900510 - RNA, 19 nt, Artificial Sequence
  Description of Artificial Sequence: Synthetic oligonucleotide
  Sense strand starting at position 3605 of SEQ ID NO: 1879348
uggacacaugcgggaauaa

SEQ ID NO: 1900511 - RNA, 19 nt, Artificial Sequence
  Description of Artificial Sequence: Synthetic oligonucleotide
  Antisense strand to SEQ ID NO: 1900510
uuauucccgcaugugucca

SEQ ID NO: 1900512 - RNA, 19 nt, Artificial Sequence
  Description of Artificial Sequence: Synthetic oligonucleotide
  Sense strand starting at position 3750 of SEQ ID NO: 1879348
acgcaugagguuuauguuu

SEQ ID NO: 1900513 - RNA, 19 nt, Artificial Sequence
  Description of Artificial Sequence: Synthetic oligonucleotide
  Antisense strand to SEQ ID NO: 1900512
aaacauaaaccucaugcgu

SEQ ID NO: 1900514 - RNA, 19 nt, Artificial Sequence
  Description of Artificial Sequence: Synthetic oligonucleotide
  Sense strand starting at position 3883 of SEQ ID NO: 1879348
gggcuuucugaaugagggu

SEQ ID NO: 1900515 - RNA, 19 nt, Artificial Sequence
  Description of Artificial Sequence: Synthetic oligonucleotide
  Antisense strand to SEQ ID NO: 1900514
acccucauucagaaagccc

SEQ ID NO: 1900516 - RNA, 19 nt, Artificial Sequence
  Description of Artificial Sequence: Synthetic oligonucleotide
  Sense strand starting at position 4 of SEQ ID NO: 1879349
gucccucuaucauggaaua

SEQ ID NO: 1900517 - RNA, 19 nt, Artificial Sequence
  Description of Artificial Sequence: Synthetic oligonucleotide
  Antisense strand to SEQ ID NO: 1900516
uauuccaugauagagggac

SEQ ID NO: 1900518 - RNA, 19 nt, Artificial Sequence
  Description of Artificial Sequence: Synthetic oligonucleotide
  Sense strand starting at position 25 of SEQ ID NO: 1879349
gguccuuagagguggaguu

SEQ ID NO: 1900519 - RNA, 19 nt, Artificial Sequence
  Description of Artificial Sequence: Synthetic oligonucleotide
  Antisense strand to SEQ ID NO: 1900518
aacuccaccucuaaggacc

SEQ ID NO: 1900520 - RNA, 19 nt, Artificial Sequence
  Description of Artificial Sequence: Synthetic oligonucleotide
  Sense strand starting at position 26 of SEQ ID NO: 1879349
guccuuagagguggaguua

SEQ ID NO: 1900521 - RNA, 19 nt, Artificial Sequence
  Description of Artificial Sequence: Synthetic oligonucleotide
  Antisense strand to SEQ ID NO: 1900520
uaacuccaccucuaaggac

SEQ ID NO: 1900522 - RNA, 19 nt, Artificial Sequence
  Description of Artificial Sequence: Synthetic oligonucleotide
  Sense strand starting at position 46 of SEQ ID NO: 1879349
ggagaucuguugcauguau

SEQ ID NO: 1900523 - RNA, 19 nt, Artificial Sequence
  Description of Artificial Sequence: Synthetic oligonucleotide
  Antisense strand to SEQ ID NO: 1900522
auacaugcaacagaucucc

SEQ ID NO: 1900524 - RNA, 19 nt, Artificial Sequence
  Description of Artificial Sequence: Synthetic oligonucleotide
  Sense strand starting at position 48 of SEQ ID NO: 1879349
agaucuguugcauguauaa

SEQ ID NO: 1900525 - RNA, 19 nt, Artificial Sequence
  Description of Artificial Sequence: Synthetic oligonucleotide
  Antisense strand to SEQ ID NO: 1900524
uuauacaugcaacagaucu

SEQ ID NO: 1900526 - RNA, 19 nt, Artificial Sequence
  Description of Artificial Sequence: Synthetic oligonucleotide
  Sense strand starting at position 60 of SEQ ID NO: 1879349
uguauaaacuggugacaaa

SEQ ID NO: 1900527 - RNA, 19 nt, Artificial Sequence
  Description of Artificial Sequence: Synthetic oligonucleotide
  Antisense strand to SEQ ID NO: 1900526
uuugucaccaguuuauaca

SEQ ID NO: 1900528 - RNA, 19 nt, Artificial Sequence
  Description of Artificial Sequence: Synthetic oligonucleotide
  Sense strand starting at position 157 of SEQ ID NO: 1879349
cuuuauugauugguaugga

SEQ ID NO: 1900529 - RNA, 19 nt, Artificial Sequence
  Description of Artificial Sequence: Synthetic oligonucleotide
  Antisense strand to SEQ ID NO: 1900528
uccauaccaaucaauaaag

SEQ ID NO: 1900530 - RNA, 19 nt, Artificial Sequence
  Description of Artificial Sequence: Synthetic oligonucleotide
  Sense strand starting at position 158 of SEQ ID NO: 1879349
uuuauugauugguauggaa

SEQ ID NO: 1900531 - RNA, 19 nt, Artificial Sequence
  Description of Artificial Sequence: Synthetic oligonucleotide
  Antisense strand to SEQ ID NO: 1900530
uuccauaccaaucaauaaa

SEQ ID NO: 1900532 - RNA, 19 nt, Artificial Sequence
  Description of Artificial Sequence: Synthetic oligonucleotide
  Sense strand starting at position 160 of SEQ ID NO: 1879349
uauugauugguauggaaug

SEQ ID NO: 1900533 - RNA, 19 nt, Artificial Sequence
  Description of Artificial Sequence: Synthetic oligonucleotide
  Antisense strand to SEQ ID NO: 1900532
cauuccauaccaaucaaua

SEQ ID NO: 1900534 - RNA, 19 nt, Artificial Sequence
  Description of Artificial Sequence: Synthetic oligonucleotide
  Sense strand starting at position 171 of SEQ ID NO: 1879349
auggaauguugccuacagu

SEQ ID NO: 1900535 - RNA, 19 nt, Artificial Sequence
  Description of Artificial Sequence: Synthetic oligonucleotide
  Antisense strand to SEQ ID NO: 1900534
acuguaggcaacauuccau

SEQ ID NO: 1900536 - RNA, 19 nt, Artificial Sequence
  Description of Artificial Sequence: Synthetic oligonucleotide
  Sense strand starting at position 172 of SEQ ID NO: 1879349
uggaauguugccuacagua

SEQ ID NO: 1900537 - RNA, 19 nt, Artificial Sequence
  Description of Artificial Sequence: Synthetic oligonucleotide
  Antisense strand to SEQ ID NO: 1900536
uacuguaggcaacauucca

SEQ ID NO: 1900538 - RNA, 19 nt, Artificial Sequence
  Description of Artificial Sequence: Synthetic oligonucleotide
  Sense strand starting at position 174 of SEQ ID NO: 1879349
gaauguugccuacaguaua

SEQ ID NO: 1900539 - RNA, 19 nt, Artificial Sequence
  Description of Artificial Sequence: Synthetic oligonucleotide
  Antisense strand to SEQ ID NO: 1900538
uauacuguaggcaacauuc

SEQ ID NO: 1900540 - RNA, 19 nt, Artificial Sequence
  Description of Artificial Sequence: Synthetic oligonucleotide
  Sense strand starting at position 187 of SEQ ID NO: 1879349
aguauauucuugccugaaa

SEQ ID NO: 1900541 - RNA, 19 nt, Artificial Sequence
  Description of Artificial Sequence: Synthetic oligonucleotide
  Antisense strand to SEQ ID NO: 1900540
uuucaggcaagaauauacu

SEQ ID NO: 1900542 - RNA, 19 nt, Artificial Sequence
  Description of Artificial Sequence: Synthetic oligonucleotide
  Sense strand starting at position 239 of SEQ ID NO: 1879349
ucccauuugugucaaauua

SEQ ID NO: 1900543 - RNA, 19 nt, Artificial Sequence
  Description of Artificial Sequence: Synthetic oligonucleotide
  Antisense strand to SEQ ID NO: 1900542
uaauuugacacaaauggga

SEQ ID NO: 1900544 - RNA, 19 nt, Artificial Sequence
  Description of Artificial Sequence: Synthetic oligonucleotide
  Sense strand starting at position 246 of SEQ ID NO: 1879349
ugugucaaauuauagucaa

SEQ ID NO: 1900545 - RNA, 19 nt, Artificial Sequence
  Description of Artificial Sequence: Synthetic oligonucleotide
  Antisense strand to SEQ ID NO: 1900544
uugacuauaauuugacaca

SEQ ID NO: 1900546 - RNA, 19 nt, Artificial Sequence
  Description of Artificial Sequence: Synthetic oligonucleotide
  Sense strand starting at position 249 of SEQ ID NO: 1879349
gucaaauuauagucaagua

SEQ ID NO: 1900547 - RNA, 19 nt, Artificial Sequence
  Description of Artificial Sequence: Synthetic oligonucleotide
  Antisense strand to SEQ ID NO: 1900546
uacuugacuauaauuugac

SEQ ID NO: 1900548 - RNA, 19 nt, Artificial Sequence
  Description of Artificial Sequence: Synthetic oligonucleotide
  Sense strand starting at position 335 of SEQ ID NO: 1879349
uuaggagacuguucugaug

SEQ ID NO: 1900549 - RNA, 19 nt, Artificial Sequence
  Description of Artificial Sequence: Synthetic oligonucleotide
  Antisense strand to SEQ ID NO: 1900548
caucagaacagucuccuaa

SEQ ID NO: 1900550 - RNA, 19 nt, Artificial Sequence
  Description of Artificial Sequence: Synthetic oligonucleotide
  Sense strand starting at position 338 of SEQ ID NO: 1879349
ggagacuguucugaugcca

SEQ ID NO: 1900551 - RNA, 19 nt, Artificial Sequence
  Description of Artificial Sequence: Synthetic oligonucleotide
  Antisense strand to SEQ ID NO: 1900550
uggcaucagaacagucucc

SEQ ID NO: 1900552 - RNA, 19 nt, Artificial Sequence
  Description of Artificial Sequence: Synthetic oligonucleotide
  Sense strand starting at position 381 of SEQ ID NO: 1879349
cuucuugggcccuaugaga

SEQ ID NO: 1900553 - RNA, 19 nt, Artificial Sequence
  Description of Artificial Sequence: Synthetic oligonucleotide
  Antisense strand to SEQ ID NO: 1900552
ucucauagggcccaagaag

SEQ ID NO: 1900554 - RNA, 19 nt, Artificial Sequence
  Description of Artificial Sequence: Synthetic oligonucleotide
  Sense strand starting at position 388 of SEQ ID NO: 1879349
ggcccuaugagauggcaaa

SEQ ID NO: 1900555 - RNA, 19 nt, Artificial Sequence
  Description of Artificial Sequence: Synthetic oligonucleotide
  Antisense strand to SEQ ID NO: 1900554
uuugccaucucauagggcc

SEQ ID NO: 1900556 - RNA, 19 nt, Artificial Sequence
  Description of Artificial Sequence: Synthetic oligonucleotide
  Sense strand starting at position 389 of SEQ ID NO: 1879349
gcccuaugagauggcaaau

SEQ ID NO: 1900557 - RNA, 19 nt, Artificial Sequence
  Description of Artificial Sequence: Synthetic oligonucleotide
  Antisense strand to SEQ ID NO: 1900556
auuugccaucucauagggc

SEQ ID NO: 1900558 - RNA, 19 nt, Artificial Sequence
  Description of Artificial Sequence: Synthetic oligonucleotide
  Sense strand starting at position 527 of SEQ ID NO: 1879349
aggcgauccugcccucuua

SEQ ID NO: 1900559 - RNA, 19 nt, Artificial Sequence
  Description of Artificial Sequence: Synthetic oligonucleotide
  Antisense strand to SEQ ID NO: 1900558
uaagagggcaggaucgccu

SEQ ID NO: 1900560 - RNA, 19 nt, Artificial Sequence
  Description of Artificial Sequence: Synthetic oligonucleotide
  Sense strand starting at position 567 of SEQ ID NO: 1879349
gagucagagugcuaugaac

SEQ ID NO: 1900561 - RNA, 19 nt, Artificial Sequence
  Description of Artificial Sequence: Synthetic oligonucleotide
  Antisense strand to SEQ ID NO: 1900560
guucauagcacucugacuc

SEQ ID NO: 1900562 - RNA, 19 nt, Artificial Sequence
  Description of Artificial Sequence: Synthetic oligonucleotide
  Sense strand starting at position 569 of SEQ ID NO: 1879349
gucagagugcuaugaacaa

SEQ ID NO: 1900563 - RNA, 19 nt, Artificial Sequence
  Description of Artificial Sequence: Synthetic oligonucleotide
  Antisense strand to SEQ ID NO: 1900562
uuguucauagcacucugac

SEQ ID NO: 1900564 - RNA, 19 nt, Artificial Sequence
  Description of Artificial Sequence: Synthetic oligonucleotide
  Sense strand starting at position 698 of SEQ ID NO: 1879349
gccuccuccugauuaggga

SEQ ID NO: 1900565 - RNA, 19 nt, Artificial Sequence
  Description of Artificial Sequence: Synthetic oligonucleotide
  Antisense strand to SEQ ID NO: 1900564
ucccuaaucaggaggaggc

SEQ ID NO: 1900566 - RNA, 19 nt, Artificial Sequence
  Description of Artificial Sequence: Synthetic oligonucleotide
  Sense strand starting at position 753 of SEQ ID NO: 1879349
aucuaaguguugcuggaaa

SEQ ID NO: 1900567 - RNA, 19 nt, Artificial Sequence
  Description of Artificial Sequence: Synthetic oligonucleotide
  Antisense strand to SEQ ID NO: 1900566
uuuccagcaacacuuagau

SEQ ID NO: 1900568 - RNA, 19 nt, Artificial Sequence
  Description of Artificial Sequence: Synthetic oligonucleotide
  Sense strand starting at position 755 of SEQ ID NO: 1879349
cuaaguguugcuggaaauc

SEQ ID NO: 1900569 - RNA, 19 nt, Artificial Sequence
  Description of Artificial Sequence: Synthetic oligonucleotide
  Antisense strand to SEQ ID NO: 1900568
gauuuccagcaacacuuag

SEQ ID NO: 1900570 - RNA, 19 nt, Artificial Sequence
  Description of Artificial Sequence: Synthetic oligonucleotide
  Sense strand starting at position 826 of SEQ ID NO: 1879349
ccucaagugugagcuugaa

SEQ ID NO: 1900571 - RNA, 19 nt, Artificial Sequence
  Description of Artificial Sequence: Synthetic oligonucleotide
  Antisense strand to SEQ ID NO: 1900570
uucaagcucacacuugagg

SEQ ID NO: 1900572 - RNA, 19 nt, Artificial Sequence
  Description of Artificial Sequence: Synthetic oligonucleotide
  Sense strand starting at position 3228 of SEQ ID NO: 1879349
gauggaaacuaauaagagu

SEQ ID NO: 1900573 - RNA, 19 nt, Artificial Sequence
  Description of Artificial Sequence: Synthetic oligonucleotide
  Antisense strand to SEQ ID NO: 1900572
acucuuauuaguuuccauc

SEQ ID NO: 1900574 - RNA, 19 nt, Artificial Sequence
  Description of Artificial Sequence: Synthetic oligonucleotide
  Sense strand starting at position 3254 of SEQ ID NO: 1879349
ccugaauucuugcccagcu

SEQ ID NO: 1900575 - RNA, 19 nt, Artificial Sequence
  Description of Artificial Sequence: Synthetic oligonucleotide
  Antisense strand to SEQ ID NO: 1900574
agcugggcaagaauucagg

SEQ ID NO: 1900576 - RNA, 19 nt, Artificial Sequence
  Description of Artificial Sequence: Synthetic oligonucleotide
  Sense strand starting at position 3434 of SEQ ID NO: 1879349
caaggaagucugggcuagu

SEQ ID NO: 1900577 - RNA, 19 nt, Artificial Sequence
  Description of Artificial Sequence: Synthetic oligonucleotide
  Antisense strand to SEQ ID NO: 1900576
acuagcccagacuuccuug

SEQ ID NO: 1900578 - RNA, 19 nt, Artificial Sequence
  Description of Artificial Sequence: Synthetic oligonucleotide
  Sense strand starting at position 3435 of SEQ ID NO: 1879349
aaggaagucugggcuagua

SEQ ID NO: 1900579 - RNA, 19 nt, Artificial Sequence
  Description of Artificial Sequence: Synthetic oligonucleotide
  Antisense strand to SEQ ID NO: 1900578
uacuagcccagacuuccuu

SEQ ID NO: 1900580 - RNA, 19 nt, Artificial Sequence
  Description of Artificial Sequence: Synthetic oligonucleotide
  Sense strand starting at position 3542 of SEQ ID NO: 1879349
gagguugacucacacauuu

SEQ ID NO: 1900581 - RNA, 19 nt, Artificial Sequence
  Description of Artificial Sequence: Synthetic oligonucleotide
  Antisense strand to SEQ ID NO: 1900580
aaaugugugagucaaccuc

SEQ ID NO: 1900582 - RNA, 19 nt, Artificial Sequence
  Description of Artificial Sequence: Synthetic oligonucleotide
  Sense strand starting at position 3573 of SEQ ID NO: 1879349
cagggcugccuagaugaau

SEQ ID NO: 1900583 - RNA, 19 nt, Artificial Sequence
  Description of Artificial Sequence: Synthetic oligonucleotide
  Antisense strand to SEQ ID NO: 1900582
auucaucuaggcagcccug

SEQ ID NO: 1900584 - RNA, 19 nt, Artificial Sequence
  Description of Artificial Sequence: Synthetic oligonucleotide
  Sense strand starting at position 3593 of SEQ ID NO: 1879349
ggacacagcuccuuucuga

SEQ ID NO: 1900585 - RNA, 19 nt, Artificial Sequence
  Description of Artificial Sequence: Synthetic oligonucleotide
  Antisense strand to SEQ ID NO: 1900584
ucagaaaggagcugugucc

SEQ ID NO: 1900586 - RNA, 19 nt, Artificial Sequence
  Description of Artificial Sequence: Synthetic oligonucleotide
  Sense strand starting at position 3600 of SEQ ID NO: 1879349
gcuccuuucugagaucaaa

SEQ ID NO: 1900587 - RNA, 19 nt, Artificial Sequence
  Description of Artificial Sequence: Synthetic oligonucleotide
  Antisense strand to SEQ ID NO: 1900586
uuugaucucagaaaggagc

SEQ ID NO: 1900588 - RNA, 19 nt, Artificial Sequence
  Description of Artificial Sequence: Synthetic oligonucleotide
  Sense strand starting at position 3742 of SEQ ID NO: 1879349
gcuuaucugugccucuuaa

SEQ ID NO: 1900589 - RNA, 19 nt, Artificial Sequence
  Description of Artificial Sequence: Synthetic oligonucleotide
  Antisense strand to SEQ ID NO: 1900588
uuaagaggcacagauaagc

SEQ ID NO: 1900590 - RNA, 19 nt, Artificial Sequence
  Description of Artificial Sequence: Synthetic oligonucleotide
  Sense strand starting at position 3804 of SEQ ID NO: 1879349
aauagcuaucgggaagcua

SEQ ID NO: 1900591 - RNA, 19 nt, Artificial Sequence
  Description of Artificial Sequence: Synthetic oligonucleotide
  Antisense strand to SEQ ID NO: 1900590
uagcuucccgauagcuauu

SEQ ID NO: 1900592 - RNA, 19 nt, Artificial Sequence
  Description of Artificial Sequence: Synthetic oligonucleotide
  Sense strand starting at position 3812 of SEQ ID NO: 1879349
ucgggaagcuagcagauuu

SEQ ID NO: 1900593 - RNA, 19 nt, Artificial Sequence
  Description of Artificial Sequence: Synthetic oligonucleotide
  Antisense strand to SEQ ID NO: 1900592
aaaucugcuagcuucccga

SEQ ID NO: 1900594 - RNA, 19 nt, Artificial Sequence
  Description of Artificial Sequence: Synthetic oligonucleotide
  Sense strand starting at position 3971 of SEQ ID NO: 1879349
cugugugcuggguaucuaa

SEQ ID NO: 1900595 - RNA, 19 nt, Artificial Sequence
  Description of Artificial Sequence: Synthetic oligonucleotide
  Antisense strand to SEQ ID NO: 1900594
uuagauacccagcacacag

SEQ ID NO: 1900596 - RNA, 19 nt, Artificial Sequence
  Description of Artificial Sequence: Synthetic oligonucleotide
  Sense strand starting at position 232 of SEQ ID NO: 1879350
agggcugacguguaacaua

SEQ ID NO: 1900597 - RNA, 19 nt, Artificial Sequence
  Description of Artificial Sequence: Synthetic oligonucleotide
  Antisense strand to SEQ ID NO: 1900596
uauguuacacgucagcccu

SEQ ID NO: 1900598 - RNA, 19 nt, Artificial Sequence
  Description of Artificial Sequence: Synthetic oligonucleotide
  Sense strand starting at position 571 of SEQ ID NO: 1879350
gaacgaaagucucuccuau

SEQ ID NO: 1900599 - RNA, 19 nt, Artificial Sequence
  Description of Artificial Sequence: Synthetic oligonucleotide
  Antisense strand to SEQ ID NO: 1900598
auaggagagacuuucguuc

SEQ ID NO: 1900600 - RNA, 19 nt, Artificial Sequence
  Description of Artificial Sequence: Synthetic oligonucleotide
  Sense strand starting at position 573 of SEQ ID NO: 1879350
acgaaagucucuccuauca

SEQ ID NO: 1900601 - RNA, 19 nt, Artificial Sequence
  Description of Artificial Sequence: Synthetic oligonucleotide
  Antisense strand to SEQ ID NO: 1900600
ugauaggagagacuuucgu

SEQ ID NO: 1900602 - RNA, 19 nt, Artificial Sequence
  Description of Artificial Sequence: Synthetic oligonucleotide
  Sense strand starting at position 617 of SEQ ID NO: 1879350
cguccaaacuauuuaguuu

SEQ ID NO: 1900603 - RNA, 19 nt, Artificial Sequence
  Description of Artificial Sequence: Synthetic oligonucleotide
  Antisense strand to SEQ ID NO: 1900602
aaacuaaauaguuuggacg

SEQ ID NO: 1900604 - RNA, 19 nt, Artificial Sequence
  Description of Artificial Sequence: Synthetic oligonucleotide
  Sense strand starting at position 673 of SEQ ID NO: 1879350
ucucucuugagauggaguu

SEQ ID NO: 1900605 - RNA, 19 nt, Artificial Sequence
  Description of Artificial Sequence: Synthetic oligonucleotide
  Antisense strand to SEQ ID NO: 1900604
aacuccaucucaagagaga

SEQ ID NO: 1900606 - RNA, 19 nt, Artificial Sequence
  Description of Artificial Sequence: Synthetic oligonucleotide
  Sense strand starting at position 674 of SEQ ID NO: 1879350
cucucuugagauggaguuu

SEQ ID NO: 1900607 - RNA, 19 nt, Artificial Sequence
  Description of Artificial Sequence: Synthetic oligonucleotide
  Antisense strand to SEQ ID NO: 1900606
aaacuccaucucaagagag

SEQ ID NO: 1900608 - RNA, 19 nt, Artificial Sequence
  Description of Artificial Sequence: Synthetic oligonucleotide
  Sense strand starting at position 1138 of SEQ ID NO: 1879350
uuucuuggucaccaguauu

SEQ ID NO: 1900609 - RNA, 19 nt, Artificial Sequence
  Description of Artificial Sequence: Synthetic oligonucleotide
  Antisense strand to SEQ ID NO: 1900608
aauacuggugaccaagaaa

SEQ ID NO: 1900610 - RNA, 19 nt, Artificial Sequence
  Description of Artificial Sequence: Synthetic oligonucleotide
  Sense strand starting at position 1238 of SEQ ID NO: 1879350
ggcacaagauagucaauaa

SEQ ID NO: 1900611 - RNA, 19 nt, Artificial Sequence
  Description of Artificial Sequence: Synthetic oligonucleotide
  Antisense strand to SEQ ID NO: 1900610
uuauugacuaucuugugcc

SEQ ID NO: 1900612 - RNA, 19 nt, Artificial Sequence
  Description of Artificial Sequence: Synthetic oligonucleotide
  Sense strand starting at position 1343 of SEQ ID NO: 1879350
ggcagaucacacgguuaga

SEQ ID NO: 1900613 - RNA, 19 nt, Artificial Sequence
  Description of Artificial Sequence: Synthetic oligonucleotide
  Antisense strand to SEQ ID NO: 1900612
ucuaaccgugugaucugcc

SEQ ID NO: 1900614 - RNA, 19 nt, Artificial Sequence
  Description of Artificial Sequence: Synthetic oligonucleotide
  Sense strand starting at position 1346 of SEQ ID NO: 1879350
agaucacacgguuagaagu

SEQ ID NO: 1900615 - RNA, 19 nt, Artificial Sequence
  Description of Artificial Sequence: Synthetic oligonucleotide
  Antisense strand to SEQ ID NO: 1900614
acuucuaaccgugugaucu

SEQ ID NO: 1900616 - RNA, 19 nt, Artificial Sequence
  Description of Artificial Sequence: Synthetic oligonucleotide
  Sense strand starting at position 1723 of SEQ ID NO: 1879350
aaugucacacuaggugaua

SEQ ID NO: 1900617 - RNA, 19 nt, Artificial Sequence
  Description of Artificial Sequence: Synthetic oligonucleotide
  Antisense strand to SEQ ID NO: 1900616
uaucaccuagugugacauu

SEQ ID NO: 1900618 - RNA, 19 nt, Artificial Sequence
  Description of Artificial Sequence: Synthetic oligonucleotide
  Sense strand starting at position 1724 of SEQ ID NO: 1879350
augucacacuaggugauau

SEQ ID NO: 1900619 - RNA, 19 nt, Artificial Sequence
  Description of Artificial Sequence: Synthetic oligonucleotide
  Antisense strand to SEQ ID NO: 1900618
auaucaccuagugugacau

SEQ ID NO: 1900620 - RNA, 19 nt, Artificial Sequence
  Description of Artificial Sequence: Synthetic oligonucleotide
  Sense strand starting at position 1736 of SEQ ID NO: 1879350
gugauauagcaguagguac

SEQ ID NO: 1900621 - RNA, 19 nt, Artificial Sequence
  Description of Artificial Sequence: Synthetic oligonucleotide
  Antisense strand to SEQ ID NO: 1900620
guaccuacugcuauaucac

SEQ ID NO: 1900622 - RNA, 19 nt, Artificial Sequence
  Description of Artificial Sequence: Synthetic oligonucleotide
  Sense strand starting at position 1754 of SEQ ID NO: 1879350
ccagcuaaauagcugauua

SEQ ID NO: 1900623 - RNA, 19 nt, Artificial Sequence
  Description of Artificial Sequence: Synthetic oligonucleotide
  Antisense strand to SEQ ID NO: 1900622
uaaucagcuauuuagcugg

SEQ ID NO: 1900624 - RNA, 19 nt, Artificial Sequence
  Description of Artificial Sequence: Synthetic oligonucleotide
  Sense strand starting at position 1778 of SEQ ID NO: 1879350
gaauuaugguuauuaguag

SEQ ID NO: 1900625 - RNA, 19 nt, Artificial Sequence
  Description of Artificial Sequence: Synthetic oligonucleotide
  Antisense strand to SEQ ID NO: 1900624
cuacuaauaaccauaauuc

SEQ ID NO: 1900626 - RNA, 19 nt, Artificial Sequence
  Description of Artificial Sequence: Synthetic oligonucleotide
  Sense strand starting at position 1967 of SEQ ID NO: 1879350
cuggacuugugauuauauu

SEQ ID NO: 1900627 - RNA, 19 nt, Artificial Sequence
  Description of Artificial Sequence: Synthetic oligonucleotide
  Antisense strand to SEQ ID NO: 1900626
aauauaaucacaaguccag

SEQ ID NO: 1900628 - RNA, 19 nt, Artificial Sequence
  Description of Artificial Sequence: Synthetic oligonucleotide
  Sense strand starting at position 2008 of SEQ ID NO: 1879350
augugacuaucccuaggua

SEQ ID NO: 1900629 - RNA, 19 nt, Artificial Sequence
  Description of Artificial Sequence: Synthetic oligonucleotide
  Antisense strand to SEQ ID NO: 1900628
uaccuagggauagucacau

SEQ ID NO: 1900630 - RNA, 19 nt, Artificial Sequence
  Description of Artificial Sequence: Synthetic oligonucleotide
  Sense strand starting at position 2011 of SEQ ID NO: 1879350
ugacuaucccuagguacca

SEQ ID NO: 1900631 - RNA, 19 nt, Artificial Sequence
  Description of Artificial Sequence: Synthetic oligonucleotide
  Antisense strand to SEQ ID NO: 1900630
ugguaccuagggauaguca

SEQ ID NO: 1900632 - RNA, 19 nt, Artificial Sequence
  Description of Artificial Sequence: Synthetic oligonucleotide
  Sense strand starting at position 2083 of SEQ ID NO: 1879350
cuuugcuucgauuauauaa

SEQ ID NO: 1900633 - RNA, 19 nt, Artificial Sequence
  Description of Artificial Sequence: Synthetic oligonucleotide
  Antisense strand to SEQ ID NO: 1900632
uuauauaaucgaagcaaag

SEQ ID NO: 1900634 - RNA, 19 nt, Artificial Sequence
  Description of Artificial Sequence: Synthetic oligonucleotide
  Sense strand starting at position 2251 of SEQ ID NO: 1879350
auacacuauucuuugggua

SEQ ID NO: 1900635 - RNA, 19 nt, Artificial Sequence
  Description of Artificial Sequence: Synthetic oligonucleotide
  Antisense strand to SEQ ID NO: 1900634
uacccaaagaauaguguau

SEQ ID NO: 1900636 - RNA, 19 nt, Artificial Sequence
  Description of Artificial Sequence: Synthetic oligonucleotide
  Sense strand starting at position 2356 of SEQ ID NO: 1879350
uuuggaaguagguaucuua

SEQ ID NO: 1900637 - RNA, 19 nt, Artificial Sequence
  Description of Artificial Sequence: Synthetic oligonucleotide
  Antisense strand to SEQ ID NO: 1900636
uaagauaccuacuuccaaa

SEQ ID NO: 1900638 - RNA, 19 nt, Artificial Sequence
  Description of Artificial Sequence: Synthetic oligonucleotide
  Sense strand starting at position 2388 of SEQ ID NO: 1879350
gucaucaacccaggucaau

SEQ ID NO: 1900639 - RNA, 19 nt, Artificial Sequence
  Description of Artificial Sequence: Synthetic oligonucleotide
  Antisense strand to SEQ ID NO: 1900638
auugaccuggguugaugac

SEQ ID NO: 1900640 - RNA, 19 nt, Artificial Sequence
  Description of Artificial Sequence: Synthetic oligonucleotide
  Sense strand starting at position 2568 of SEQ ID NO: 1879350
ucauaaugugagcacuaca

SEQ ID NO: 1900641 - RNA, 19 nt, Artificial Sequence
  Description of Artificial Sequence: Synthetic oligonucleotide
  Antisense strand to SEQ ID NO: 1900640
uguagugcucacauuauga

SEQ ID NO: 1900642 - RNA, 19 nt, Artificial Sequence
  Description of Artificial Sequence: Synthetic oligonucleotide
  Sense strand starting at position 2571 of SEQ ID NO: 1879350
uaaugugagcacuacagau

SEQ ID NO: 1900643 - RNA, 19 nt, Artificial Sequence
  Description of Artificial Sequence: Synthetic oligonucleotide
  Antisense strand to SEQ ID NO: 1900642
aucuguagugcucacauua

SEQ ID NO: 1900644 - RNA, 19 nt, Artificial Sequence
  Description of Artificial Sequence: Synthetic oligonucleotide
  Sense strand starting at position 2575 of SEQ ID NO: 1879350
gugagcacuacagauguuu

SEQ ID NO: 1900645 - RNA, 19 nt, Artificial Sequence
  Description of Artificial Sequence: Synthetic oligonucleotide
  Antisense strand to SEQ ID NO: 1900644
aaacaucuguagugcucac

SEQ ID NO: 1900646 - RNA, 19 nt, Artificial Sequence
  Description of Artificial Sequence: Synthetic oligonucleotide
  Sense strand starting at position 2665 of SEQ ID NO: 1879350
uuauguugagaaggcuaca

SEQ ID NO: 1900647 - RNA, 19 nt, Artificial Sequence
  Description of Artificial Sequence: Synthetic oligonucleotide
  Antisense strand to SEQ ID NO: 1900646
uguagccuucucaacauaa

SEQ ID NO: 1900648 - RNA, 19 nt, Artificial Sequence
  Description of Artificial Sequence: Synthetic oligonucleotide
  Sense strand starting at position 2676 of SEQ ID NO: 1879350
aggcuacacugauuacauu

SEQ ID NO: 1900649 - RNA, 19 nt, Artificial Sequence
  Description of Artificial Sequence: Synthetic oligonucleotide
  Antisense strand to SEQ ID NO: 1900648
aauguaaucaguguagccu

SEQ ID NO: 1900650 - RNA, 19 nt, Artificial Sequence
  Description of Artificial Sequence: Synthetic oligonucleotide
  Sense strand starting at position 2677 of SEQ ID NO: 1879350
ggcuacacugauuacauua

SEQ ID NO: 1900651 - RNA, 19 nt, Artificial Sequence
  Description of Artificial Sequence: Synthetic oligonucleotide
  Antisense strand to SEQ ID NO: 1900650
uaauguaaucaguguagcc

SEQ ID NO: 1900652 - RNA, 19 nt, Artificial Sequence
  Description of Artificial Sequence: Synthetic oligonucleotide
  Sense strand starting at position 2745 of SEQ ID NO: 1879350
aauguaggucaauguaaug

SEQ ID NO: 1900653 - RNA, 19 nt, Artificial Sequence
  Description of Artificial Sequence: Synthetic oligonucleotide
  Antisense strand to SEQ ID NO: 1900652
cauuacauugaccuacauu

SEQ ID NO: 1900654 - RNA, 19 nt, Artificial Sequence
  Description of Artificial Sequence: Synthetic oligonucleotide
  Sense strand starting at position 2751 of SEQ ID NO: 1879350
ggucaauguaaugggugau

SEQ ID NO: 1900655 - RNA, 19 nt, Artificial Sequence
  Description of Artificial Sequence: Synthetic oligonucleotide
  Antisense strand to SEQ ID NO: 1900654
aucacccauuacauugacc

SEQ ID NO: 1900656 - RNA, 19 nt, Artificial Sequence
  Description of Artificial Sequence: Synthetic oligonucleotide
  Sense strand starting at position 2752 of SEQ ID NO: 1879350
gucaauguaaugggugaua

SEQ ID NO: 1900657 - RNA, 19 nt, Artificial Sequence
  Description of Artificial Sequence: Synthetic oligonucleotide
  Antisense strand to SEQ ID NO: 1900656
uaucacccauuacauugac

SEQ ID NO: 1900658 - RNA, 19 nt, Artificial Sequence
  Description of Artificial Sequence: Synthetic oligonucleotide
  Sense strand starting at position 2754 of SEQ ID NO: 1879350
caauguaaugggugauauc

SEQ ID NO: 1900659 - RNA, 19 nt, Artificial Sequence
  Description of Artificial Sequence: Synthetic oligonucleotide
  Antisense strand to SEQ ID NO: 1900658
gauaucacccauuacauug

SEQ ID NO: 1900660 - RNA, 19 nt, Artificial Sequence
  Description of Artificial Sequence: Synthetic oligonucleotide
  Sense strand starting at position 2871 of SEQ ID NO: 1879350
uuucuuaaaggguaaguuu

SEQ ID NO: 1900661 - RNA, 19 nt, Artificial Sequence
  Description of Artificial Sequence: Synthetic oligonucleotide
  Antisense strand to SEQ ID NO: 1900660
aaacuuacccuuuaagaaa

SEQ ID NO: 1900662 - RNA, 19 nt, Artificial Sequence
  Description of Artificial Sequence: Synthetic oligonucleotide
  Sense strand starting at position 2878 of SEQ ID NO: 1879350
aaggguaaguuuccauaga

SEQ ID NO: 1900663 - RNA, 19 nt, Artificial Sequence
  Description of Artificial Sequence: Synthetic oligonucleotide
  Antisense strand to SEQ ID NO: 1900662
ucuauggaaacuuacccuu

SEQ ID NO: 1900664 - RNA, 19 nt, Artificial Sequence
  Description of Artificial Sequence: Synthetic oligonucleotide
  Sense strand starting at position 2911 of SEQ ID NO: 1879350
ugacuucuacccugaaguc

SEQ ID NO: 1900665 - RNA, 19 nt, Artificial Sequence
  Description of Artificial Sequence: Synthetic oligonucleotide
  Antisense strand to SEQ ID NO: 1900664
gacuucaggguagaaguca

SEQ ID NO: 1900666 - RNA, 19 nt, Artificial Sequence
  Description of Artificial Sequence: Synthetic oligonucleotide
  Sense strand starting at position 2980 of SEQ ID NO: 1879350
ugaaaugaauguuuccuuu

SEQ ID NO: 1900667 - RNA, 19 nt, Artificial Sequence
  Description of Artificial Sequence: Synthetic oligonucleotide
  Antisense strand to SEQ ID NO: 1900666
aaaggaaacauucauuuca

SEQ ID NO: 1900668 - RNA, 19 nt, Artificial Sequence
  Description of Artificial Sequence: Synthetic oligonucleotide
  Sense strand starting at position 3078 of SEQ ID NO: 1879350
auugcuuuauuugugagua

SEQ ID NO: 1900669 - RNA, 19 nt, Artificial Sequence
  Description of Artificial Sequence: Synthetic oligonucleotide
  Antisense strand to SEQ ID NO: 1900668
uacucacaaauaaagcaau

SEQ ID NO: 1900670 - RNA, 19 nt, Artificial Sequence
  Description of Artificial Sequence: Synthetic oligonucleotide
  Sense strand starting at position 3123 of SEQ ID NO: 1879350
gauagcuacgucuagaauc

SEQ ID NO: 1900671 - RNA, 19 nt, Artificial Sequence
  Description of Artificial Sequence: Synthetic oligonucleotide
  Antisense strand to SEQ ID NO: 1900670
gauucuagacguagcuauc

SEQ ID NO: 1900672 - RNA, 19 nt, Artificial Sequence
  Description of Artificial Sequence: Synthetic oligonucleotide
  Sense strand starting at position 3171 of SEQ ID NO: 1879350
aaagacauucuggagcgua

SEQ ID NO: 1900673 - RNA, 19 nt, Artificial Sequence
  Description of Artificial Sequence: Synthetic oligonucleotide
  Antisense strand to SEQ ID NO: 1900672
uacgcuccagaaugucuuu

SEQ ID NO: 1900674 - RNA, 19 nt, Artificial Sequence
  Description of Artificial Sequence: Synthetic oligonucleotide
  Sense strand starting at position 3947 of SEQ ID NO: 1879350
acauuuguuugcuuuacuu

SEQ ID NO: 1900675 - RNA, 19 nt, Artificial Sequence
  Description of Artificial Sequence: Synthetic oligonucleotide
  Antisense strand to SEQ ID NO: 1900674
aaguaaagcaaacaaaugu

SEQ ID NO: 1900676 - RNA, 19 nt, Artificial Sequence
  Description of Artificial Sequence: Synthetic oligonucleotide
  Sense strand starting at position 2097 of SEQ ID NO: 1879351
ccuggaguucuauguucug

SEQ ID NO: 1900677 - RNA, 19 nt, Artificial Sequence
  Description of Artificial Sequence: Synthetic oligonucleotide
  Antisense strand to SEQ ID NO: 1900676
cagaacauagaacuccagg

SEQ ID NO: 1900678 - RNA, 19 nt, Artificial Sequence
  Description of Artificial Sequence: Synthetic oligonucleotide
  Sense strand starting at position 2204 of SEQ ID NO: 1879351
agugaccuuuaauguauau

SEQ ID NO: 1900679 - RNA, 19 nt, Artificial Sequence
  Description of Artificial Sequence: Synthetic oligonucleotide
  Antisense strand to SEQ ID NO: 1900678
auauacauuaaaggucacu

SEQ ID NO: 1900680 - RNA, 19 nt, Artificial Sequence
  Description of Artificial Sequence: Synthetic oligonucleotide
  Sense strand starting at position 2253 of SEQ ID NO: 1879351
guccaauuguaaggcugua

SEQ ID NO: 1900681 - RNA, 19 nt, Artificial Sequence
  Description of Artificial Sequence: Synthetic oligonucleotide
  Antisense strand to SEQ ID NO: 1900680
uacagccuuacaauuggac

SEQ ID NO: 1900682 - RNA, 19 nt, Artificial Sequence
  Description of Artificial Sequence: Synthetic oligonucleotide
  Sense strand starting at position 2263 of SEQ ID NO: 1879351
aaggcuguagugugguaaa

SEQ ID NO: 1900683 - RNA, 19 nt, Artificial Sequence
  Description of Artificial Sequence: Synthetic oligonucleotide
  Antisense strand to SEQ ID NO: 1900682
uuuaccacacuacagccuu

SEQ ID NO: 1900684 - RNA, 19 nt, Artificial Sequence
  Description of Artificial Sequence: Synthetic oligonucleotide
  Sense strand starting at position 2276 of SEQ ID NO: 1879351
gguaaagggucuuagguuu

SEQ ID NO: 1900685 - RNA, 19 nt, Artificial Sequence
  Description of Artificial Sequence: Synthetic oligonucleotide
  Antisense strand to SEQ ID NO: 1900684
aaaccuaagacccuuuacc

SEQ ID NO: 1900686 - RNA, 19 nt, Artificial Sequence
  Description of Artificial Sequence: Synthetic oligonucleotide
  Sense strand starting at position 2305 of SEQ ID NO: 1879351
ggacacuaguugguugauu

SEQ ID NO: 1900687 - RNA, 19 nt, Artificial Sequence
  Description of Artificial Sequence: Synthetic oligonucleotide
  Antisense strand to SEQ ID NO: 1900686
aaucaaccaacuagugucc

SEQ ID NO: 1900688 - RNA, 19 nt, Artificial Sequence
  Description of Artificial Sequence: Synthetic oligonucleotide
  Sense strand starting at position 2320 of SEQ ID NO: 1879351
gauuccaguugucugggau

SEQ ID NO: 1900689 - RNA, 19 nt, Artificial Sequence
  Description of Artificial Sequence: Synthetic oligonucleotide
  Antisense strand to SEQ ID NO: 1900688
aucccagacaacuggaauc

SEQ ID NO: 1900690 - RNA, 19 nt, Artificial Sequence
  Description of Artificial Sequence: Synthetic oligonucleotide
  Sense strand starting at position 2321 of SEQ ID NO: 1879351
auuccaguugucugggauc

SEQ ID NO: 1900691 - RNA, 19 nt, Artificial Sequence
  Description of Artificial Sequence: Synthetic oligonucleotide
  Antisense strand to SEQ ID NO: 1900690
gaucccagacaacuggaau

SEQ ID NO: 1900692 - RNA, 19 nt, Artificial Sequence
  Description of Artificial Sequence: Synthetic oligonucleotide
  Sense strand starting at position 2335 of SEQ ID NO: 1879351
ggaucugcaaucugugauc

SEQ ID NO: 1900693 - RNA, 19 nt, Artificial Sequence
  Description of Artificial Sequence: Synthetic oligonucleotide
  Antisense strand to SEQ ID NO: 1900692
gaucacagauugcagaucc

SEQ ID NO: 1900694 - RNA, 19 nt, Artificial Sequence
  Description of Artificial Sequence: Synthetic oligonucleotide
  Sense strand starting at position 2337 of SEQ ID NO: 1879351
aucugcaaucugugaucuu

SEQ ID NO: 1900695 - RNA, 19 nt, Artificial Sequence
  Description of Artificial Sequence: Synthetic oligonucleotide
  Antisense strand to SEQ ID NO: 1900694
aagaucacagauugcagau

SEQ ID NO: 1900696 - RNA, 19 nt, Artificial Sequence
  Description of Artificial Sequence: Synthetic oligonucleotide
  Sense strand starting at position 2338 of SEQ ID NO: 1879351
ucugcaaucugugaucuua

SEQ ID NO: 1900697 - RNA, 19 nt, Artificial Sequence
  Description of Artificial Sequence: Synthetic oligonucleotide
  Antisense strand to SEQ ID NO: 1900696
uaagaucacagauugcaga

SEQ ID NO: 1900698 - RNA, 19 nt, Artificial Sequence
  Description of Artificial Sequence: Synthetic oligonucleotide
  Sense strand starting at position 2340 of SEQ ID NO: 1879351
ugcaaucugugaucuuaaa

SEQ ID NO: 1900699 - RNA, 19 nt, Artificial Sequence
  Description of Artificial Sequence: Synthetic oligonucleotide
  Antisense strand to SEQ ID NO: 1900698
uuuaagaucacagauugca

SEQ ID NO: 1900700 - RNA, 19 nt, Artificial Sequence
  Description of Artificial Sequence: Synthetic oligonucleotide
  Sense strand starting at position 2408 of SEQ ID NO: 1879351
guaaauauguuuggaggga

SEQ ID NO: 1900701 - RNA, 19 nt, Artificial Sequence
  Description of Artificial Sequence: Synthetic oligonucleotide
  Antisense strand to SEQ ID NO: 1900700
ucccuccaaacauauuuac

SEQ ID NO: 1900702 - RNA, 19 nt, Artificial Sequence
  Description of Artificial Sequence: Synthetic oligonucleotide
  Sense strand starting at position 2409 of SEQ ID NO: 1879351
uaaauauguuuggagggaa

SEQ ID NO: 1900703 - RNA, 19 nt, Artificial Sequence
  Description of Artificial Sequence: Synthetic oligonucleotide
  Antisense strand to SEQ ID NO: 1900702
uucccuccaaacauauuua

SEQ ID NO: 1900704 - RNA, 19 nt, Artificial Sequence
  Description of Artificial Sequence: Synthetic oligonucleotide
  Sense strand starting at position 2449 of SEQ ID NO: 1879351
ccucucucagagugucauu

SEQ ID NO: 1900705 - RNA, 19 nt, Artificial Sequence
  Description of Artificial Sequence: Synthetic oligonucleotide
  Antisense strand to SEQ ID NO: 1900704
aaugacacucugagagagg

SEQ ID NO: 1900706 - RNA, 19 nt, Artificial Sequence
  Description of Artificial Sequence: Synthetic oligonucleotide
  Sense strand starting at position 2452 of SEQ ID NO: 1879351
cucucagagugucauuuga

SEQ ID NO: 1900707 - RNA, 19 nt, Artificial Sequence
  Description of Artificial Sequence: Synthetic oligonucleotide
  Antisense strand to SEQ ID NO: 1900706
ucaaaugacacucugagag

SEQ ID NO: 1900708 - RNA, 19 nt, Artificial Sequence
  Description of Artificial Sequence: Synthetic oligonucleotide
  Sense strand starting at position 2474 of SEQ ID NO: 1879351
gcugcugcagucuugcaaa

SEQ ID NO: 1900709 - RNA, 19 nt, Artificial Sequence
  Description of Artificial Sequence: Synthetic oligonucleotide
  Antisense strand to SEQ ID NO: 1900708
uuugcaagacugcagcagc

SEQ ID NO: 1900710 - RNA, 19 nt, Artificial Sequence
  Description of Artificial Sequence: Synthetic oligonucleotide
  Sense strand starting at position 2476 of SEQ ID NO: 1879351
ugcugcagucuugcaaagu

SEQ ID NO: 1900711 - RNA, 19 nt, Artificial Sequence
  Description of Artificial Sequence: Synthetic oligonucleotide
  Antisense strand to SEQ ID NO: 1900710
acuuugcaagacugcagca

SEQ ID NO: 1900712 - RNA, 19 nt, Artificial Sequence
  Description of Artificial Sequence: Synthetic oligonucleotide
  Sense strand starting at position 2477 of SEQ ID NO: 1879351
gcugcagucuugcaaaguu

SEQ ID NO: 1900713 - RNA, 19 nt, Artificial Sequence
  Description of Artificial Sequence: Synthetic oligonucleotide
  Antisense strand to SEQ ID NO: 1900712
aacuuugcaagacugcagc

SEQ ID NO: 1900714 - RNA, 19 nt, Artificial Sequence
  Description of Artificial Sequence: Synthetic oligonucleotide
  Sense strand starting at position 2497 of SEQ ID NO: 1879351
agaaauuuguaauggugac

SEQ ID NO: 1900715 - RNA, 19 nt, Artificial Sequence
  Description of Artificial Sequence: Synthetic oligonucleotide
  Antisense strand to SEQ ID NO: 1900714
gucaccauuacaaauuucu

SEQ ID NO: 1900716 - RNA, 19 nt, Artificial Sequence
  Description of Artificial Sequence: Synthetic oligonucleotide
  Sense strand starting at position 2669 of SEQ ID NO: 1879351
uguacuguugcugucaguu

SEQ ID NO: 1900717 - RNA, 19 nt, Artificial Sequence
  Description of Artificial Sequence: Synthetic oligonucleotide
  Antisense strand to SEQ ID NO: 1900716
aacugacagcaacaguaca

SEQ ID NO: 1900718 - RNA, 19 nt, Artificial Sequence
  Description of Artificial Sequence: Synthetic oligonucleotide
  Sense strand starting at position 2681 of SEQ ID NO: 1879351
gucaguuacuacggcauga

SEQ ID NO: 1900719 - RNA, 19 nt, Artificial Sequence
  Description of Artificial Sequence: Synthetic oligonucleotide
  Antisense strand to SEQ ID NO: 1900718
ucaugccguaguaacugac

SEQ ID NO: 1900720 - RNA, 19 nt, Artificial Sequence
  Description of Artificial Sequence: Synthetic oligonucleotide
  Sense strand starting at position 2817 of SEQ ID NO: 1879351
uuguauuuaugagguagaa

SEQ ID NO: 1900721 - RNA, 19 nt, Artificial Sequence
  Description of Artificial Sequence: Synthetic oligonucleotide
  Antisense strand to SEQ ID NO: 1900720
uucuaccucauaaauacaa

SEQ ID NO: 1900722 - RNA, 19 nt, Artificial Sequence
  Description of Artificial Sequence: Synthetic oligonucleotide
  Sense strand starting at position 2848 of SEQ ID NO: 1879351
gagagauaaugguugguca

SEQ ID NO: 1900723 - RNA, 19 nt, Artificial Sequence
  Description of Artificial Sequence: Synthetic oligonucleotide
  Antisense strand to SEQ ID NO: 1900722
ugaccaaccauuaucucuc

SEQ ID NO: 1900724 - RNA, 19 nt, Artificial Sequence
  Description of Artificial Sequence: Synthetic oligonucleotide
  Sense strand starting at position 2991 of SEQ ID NO: 1879351
gcagacauaguuugucagu

SEQ ID NO: 1900725 - RNA, 19 nt, Artificial Sequence
  Description of Artificial Sequence: Synthetic oligonucleotide
  Antisense strand to SEQ ID NO: 1900724
acugacaaacuaugucugc

SEQ ID NO: 1900726 - RNA, 19 nt, Artificial Sequence
  Description of Artificial Sequence: Synthetic oligonucleotide
  Sense strand starting at position 2992 of SEQ ID NO: 1879351
cagacauaguuugucaguu

SEQ ID NO: 1900727 - RNA, 19 nt, Artificial Sequence
  Description of Artificial Sequence: Synthetic oligonucleotide
  Antisense strand to SEQ ID NO: 1900726
aacugacaaacuaugucug

SEQ ID NO: 1900728 - RNA, 19 nt, Artificial Sequence
  Description of Artificial Sequence: Synthetic oligonucleotide
  Sense strand starting at position 2993 of SEQ ID NO: 1879351
agacauaguuugucaguuu

SEQ ID NO: 1900729 - RNA, 19 nt, Artificial Sequence
  Description of Artificial Sequence: Synthetic oligonucleotide
  Antisense strand to SEQ ID NO: 1900728
aaacugacaaacuaugucu

SEQ ID NO: 1900730 - RNA, 19 nt, Artificial Sequence
  Description of Artificial Sequence: Synthetic oligonucleotide
  Sense strand starting at position 3054 of SEQ ID NO: 1879351
aauagccuccagugguaua

SEQ ID NO: 1900731 - RNA, 19 nt, Artificial Sequence
  Description of Artificial Sequence: Synthetic oligonucleotide
  Antisense strand to SEQ ID NO: 1900730
uauaccacuggaggcuauu

SEQ ID NO: 1900732 - RNA, 19 nt, Artificial Sequence
  Description of Artificial Sequence: Synthetic oligonucleotide
  Sense strand starting at position 3223 of SEQ ID NO: 1879351
aacugaagauguugugaau

SEQ ID NO: 1900733 - RNA, 19 nt, Artificial Sequence
  Description of Artificial Sequence: Synthetic oligonucleotide
  Antisense strand to SEQ ID NO: 1900732
auucacaacaucuucaguu

SEQ ID NO: 1900734 - RNA, 19 nt, Artificial Sequence
  Description of Artificial Sequence: Synthetic oligonucleotide
  Sense strand starting at position 3226 of SEQ ID NO: 1879351
ugaagauguugugaaugcu

SEQ ID NO: 1900735 - RNA, 19 nt, Artificial Sequence
  Description of Artificial Sequence: Synthetic oligonucleotide
  Antisense strand to SEQ ID NO: 1900734
agcauucacaacaucuuca

SEQ ID NO: 1900736 - RNA, 19 nt, Artificial Sequence
  Description of Artificial Sequence: Synthetic oligonucleotide
  Sense strand starting at position 3232 of SEQ ID NO: 1879351
uguugugaaugcuccuuga

SEQ ID NO: 1900737 - RNA, 19 nt, Artificial Sequence
  Description of Artificial Sequence: Synthetic oligonucleotide
  Antisense strand to SEQ ID NO: 1900736
ucaaggagcauucacaaca

SEQ ID NO: 1900738 - RNA, 19 nt, Artificial Sequence
  Description of Artificial Sequence: Synthetic oligonucleotide
  Sense strand starting at position 3236 of SEQ ID NO: 1879351
gugaaugcuccuugagccu

SEQ ID NO: 1900739 - RNA, 19 nt, Artificial Sequence
  Description of Artificial Sequence: Synthetic oligonucleotide
  Antisense strand to SEQ ID NO: 1900738
aggcucaaggagcauucac

SEQ ID NO: 1900740 - RNA, 19 nt, Artificial Sequence
  Description of Artificial Sequence: Synthetic oligonucleotide
  Sense strand starting at position 3249 of SEQ ID NO: 1879351
gagccuaugccagagaacu

SEQ ID NO: 1900741 - RNA, 19 nt, Artificial Sequence
  Description of Artificial Sequence: Synthetic oligonucleotide
  Antisense strand to SEQ ID NO: 1900740
aguucucuggcauaggcuc

SEQ ID NO: 1900742 - RNA, 19 nt, Artificial Sequence
  Description of Artificial Sequence: Synthetic oligonucleotide
  Sense strand starting at position 3459 of SEQ ID NO: 1879351
gccuguuauuggcuaauuc

SEQ ID NO: 1900743 - RNA, 19 nt, Artificial Sequence
  Description of Artificial Sequence: Synthetic oligonucleotide
  Antisense strand to SEQ ID NO: 1900742
gaauuagccaauaacaggc

SEQ ID NO: 1900744 - RNA, 19 nt, Artificial Sequence
  Description of Artificial Sequence: Synthetic oligonucleotide
  Sense strand starting at position 1 of SEQ ID NO: 1879352
acaaauaugccaugaggua

SEQ ID NO: 1900745 - RNA, 19 nt, Artificial Sequence
  Description of Artificial Sequence: Synthetic oligonucleotide
  Antisense strand to SEQ ID NO: 1900744
uaccucauggcauauuugu

SEQ ID NO: 1900746 - RNA, 19 nt, Artificial Sequence
  Description of Artificial Sequence: Synthetic oligonucleotide
  Sense strand starting at position 212 of SEQ ID NO: 1879352
agguacauuugaggauaaa

SEQ ID NO: 1900747 - RNA, 19 nt, Artificial Sequence
  Description of Artificial Sequence: Synthetic oligonucleotide
  Antisense strand to SEQ ID NO: 1900746
uuuauccucaaauguaccu

SEQ ID NO: 1900748 - RNA, 19 nt, Artificial Sequence
  Description of Artificial Sequence: Synthetic oligonucleotide
  Sense strand starting at position 457 of SEQ ID NO: 1879352
ggguaaugggaaugagcau

SEQ ID NO: 1900749 - RNA, 19 nt, Artificial Sequence
  Description of Artificial Sequence: Synthetic oligonucleotide
  Antisense strand to SEQ ID NO: 1900748
augcucauucccauuaccc

SEQ ID NO: 1900750 - RNA, 19 nt, Artificial Sequence
  Description of Artificial Sequence: Synthetic oligonucleotide
  Sense strand starting at position 959 of SEQ ID NO: 1879352
gguuaaaugagguaauguc

SEQ ID NO: 1900751 - RNA, 19 nt, Artificial Sequence
  Description of Artificial Sequence: Synthetic oligonucleotide
  Antisense strand to SEQ ID NO: 1900750
gacauuaccucauuuaacc

SEQ ID NO: 1900752 - RNA, 19 nt, Artificial Sequence
  Description of Artificial Sequence: Synthetic oligonucleotide
  Sense strand starting at position 966 of SEQ ID NO: 1879352
ugagguaauguccaucauu

SEQ ID NO: 1900753 - RNA, 19 nt, Artificial Sequence
  Description of Artificial Sequence: Synthetic oligonucleotide
  Antisense strand to SEQ ID NO: 1900752
aaugauggacauuaccuca

SEQ ID NO: 1900754 - RNA, 19 nt, Artificial Sequence
  Description of Artificial Sequence: Synthetic oligonucleotide
  Sense strand starting at position 969 of SEQ ID NO: 1879352
gguaauguccaucauucua

SEQ ID NO: 1900755 - RNA, 19 nt, Artificial Sequence
  Description of Artificial Sequence: Synthetic oligonucleotide
  Antisense strand to SEQ ID NO: 1900754
uagaaugauggacauuacc

SEQ ID NO: 1900756 - RNA, 19 nt, Artificial Sequence
  Description of Artificial Sequence: Synthetic oligonucleotide
  Sense strand starting at position 1053 of SEQ ID NO: 1879352
ugaguuuacugacuuucua

SEQ ID NO: 1900757 - RNA, 19 nt, Artificial Sequence
  Description of Artificial Sequence: Synthetic oligonucleotide
  Antisense strand to SEQ ID NO: 1900756
uagaaagucaguaaacuca

SEQ ID NO: 1900758 - RNA, 19 nt, Artificial Sequence
  Description of Artificial Sequence: Synthetic oligonucleotide
  Sense strand starting at position 1092 of SEQ ID NO: 1879352
uucuccaagugucuagaau

SEQ ID NO: 1900759 - RNA, 19 nt, Artificial Sequence
  Description of Artificial Sequence: Synthetic oligonucleotide
  Antisense strand to SEQ ID NO: 1900758
auucuagacacuuggagaa

SEQ ID NO: 1900760 - RNA, 19 nt, Artificial Sequence
  Description of Artificial Sequence: Synthetic oligonucleotide
  Sense strand starting at position 1093 of SEQ ID NO: 1879352
ucuccaagugucuagaauu

SEQ ID NO: 1900761 - RNA, 19 nt, Artificial Sequence
  Description of Artificial Sequence: Synthetic oligonucleotide
  Antisense strand to SEQ ID NO: 1900760
aauucuagacacuuggaga

SEQ ID NO: 1900762 - RNA, 19 nt, Artificial Sequence
  Description of Artificial Sequence: Synthetic oligonucleotide
  Sense strand starting at position 1104 of SEQ ID NO: 1879352
cuagaauugcagugauuag

SEQ ID NO: 1900763 - RNA, 19 nt, Artificial Sequence
  Description of Artificial Sequence: Synthetic oligonucleotide
  Antisense strand to SEQ ID NO: 1900762
cuaaucacugcaauucuag

SEQ ID NO: 1900764 - RNA, 19 nt, Artificial Sequence
  Description of Artificial Sequence: Synthetic oligonucleotide
  Sense strand starting at position 1300 of SEQ ID NO: 1879352
agggcauauuggguuaaau

SEQ ID NO: 1900765 - RNA, 19 nt, Artificial Sequence
  Description of Artificial Sequence: Synthetic oligonucleotide
  Antisense strand to SEQ ID NO: 1900764
auuuaacccaauaugcccu

SEQ ID NO: 1900766 - RNA, 19 nt, Artificial Sequence
  Description of Artificial Sequence: Synthetic oligonucleotide
  Sense strand starting at position 1302 of SEQ ID NO: 1879352
ggcauauuggguuaaauua

SEQ ID NO: 1900767 - RNA, 19 nt, Artificial Sequence
  Description of Artificial Sequence: Synthetic oligonucleotide
  Antisense strand to SEQ ID NO: 1900766
uaauuuaacccaauaugcc

SEQ ID NO: 1900768 - RNA, 19 nt, Artificial Sequence
  Description of Artificial Sequence: Synthetic oligonucleotide
  Sense strand starting at position 1416 of SEQ ID NO: 1879352
agugcuagucaugaacaau

SEQ ID NO: 1900769 - RNA, 19 nt, Artificial Sequence
  Description of Artificial Sequence: Synthetic oligonucleotide
  Antisense strand to SEQ ID NO: 1900768
auuguucaugacuagcacu

SEQ ID NO: 1900770 - RNA, 19 nt, Artificial Sequence
  Description of Artificial Sequence: Synthetic oligonucleotide
  Sense strand starting at position 1508 of SEQ ID NO: 1879352
aagugaaaguaugugaaua

SEQ ID NO: 1900771 - RNA, 19 nt, Artificial Sequence
  Description of Artificial Sequence: Synthetic oligonucleotide
  Antisense strand to SEQ ID NO: 1900770
uauucacauacuuucacuu

SEQ ID NO: 1900772 - RNA, 19 nt, Artificial Sequence
  Description of Artificial Sequence: Synthetic oligonucleotide
  Sense strand starting at position 1509 of SEQ ID NO: 1879352
agugaaaguaugugaauaa

SEQ ID NO: 1900773 - RNA, 19 nt, Artificial Sequence
  Description of Artificial Sequence: Synthetic oligonucleotide
  Antisense strand to SEQ ID NO: 1900772
uuauucacauacuuucacu

SEQ ID NO: 1900774 - RNA, 19 nt, Artificial Sequence
  Description of Artificial Sequence: Synthetic oligonucleotide
  Sense strand starting at position 1543 of SEQ ID NO: 1879352
aggcgaccuccauaggaua

SEQ ID NO: 1900775 - RNA, 19 nt, Artificial Sequence
  Description of Artificial Sequence: Synthetic oligonucleotide
  Antisense strand to SEQ ID NO: 1900774
uauccuauggaggucgccu

SEQ ID NO: 1900776 - RNA, 19 nt, Artificial Sequence
  Description of Artificial Sequence: Synthetic oligonucleotide
  Sense strand starting at position 1545 of SEQ ID NO: 1879352
gcgaccuccauaggauaaa

SEQ ID NO: 1900777 - RNA, 19 nt, Artificial Sequence
  Description of Artificial Sequence: Synthetic oligonucleotide
  Antisense strand to SEQ ID NO: 1900776
uuuauccuauggaggucgc

SEQ ID NO: 1900778 - RNA, 19 nt, Artificial Sequence
  Description of Artificial Sequence: Synthetic oligonucleotide
  Sense strand starting at position 1568 of SEQ ID NO: 1879352
ucugcuuuagguuaauaaa

SEQ ID NO: 1900779 - RNA, 19 nt, Artificial Sequence
  Description of Artificial Sequence: Synthetic oligonucleotide
  Antisense strand to SEQ ID NO: 1900778
uuuauuaaccuaaagcaga

SEQ ID NO: 1900780 - RNA, 19 nt, Artificial Sequence
  Description of Artificial Sequence: Synthetic oligonucleotide
  Sense strand starting at position 1585 of SEQ ID NO: 1879352
aacuaauucugguugaggu

SEQ ID NO: 1900781 - RNA, 19 nt, Artificial Sequence
  Description of Artificial Sequence: Synthetic oligonucleotide
  Antisense strand to SEQ ID NO: 1900780
accucaaccagaauuaguu

SEQ ID NO: 1900782 - RNA, 19 nt, Artificial Sequence
  Description of Artificial Sequence: Synthetic oligonucleotide
  Sense strand starting at position 1600 of SEQ ID NO: 1879352
agguguuaauagcugauaa

SEQ ID NO: 1900783 - RNA, 19 nt, Artificial Sequence
  Description of Artificial Sequence: Synthetic oligonucleotide
  Antisense strand to SEQ ID NO: 1900782
uuaucagcuauuaacaccu

SEQ ID NO: 1900784 - RNA, 19 nt, Artificial Sequence
  Description of Artificial Sequence: Synthetic oligonucleotide
  Sense strand starting at position 1602 of SEQ ID NO: 1879352
guguuaauagcugauaaca

SEQ ID NO: 1900785 - RNA, 19 nt, Artificial Sequence
  Description of Artificial Sequence: Synthetic oligonucleotide
  Antisense strand to SEQ ID NO: 1900784
uguuaucagcuauuaacac

SEQ ID NO: 1900786 - RNA, 19 nt, Artificial Sequence
  Description of Artificial Sequence: Synthetic oligonucleotide
  Sense strand starting at position 1626 of SEQ ID NO: 1879352
acuuguuggcaugagucaa

SEQ ID NO: 1900787 - RNA, 19 nt, Artificial Sequence
  Description of Artificial Sequence: Synthetic oligonucleotide
  Antisense strand to SEQ ID NO: 1900786
uugacucaugccaacaagu

SEQ ID NO: 1900788 - RNA, 19 nt, Artificial Sequence
  Description of Artificial Sequence: Synthetic oligonucleotide
  Sense strand starting at position 1663 of SEQ ID NO: 1879352
auugcaacucucuagaagu

SEQ ID NO: 1900789 - RNA, 19 nt, Artificial Sequence
  Description of Artificial Sequence: Synthetic oligonucleotide
  Antisense strand to SEQ ID NO: 1900788
acuucuagagaguugcaau

SEQ ID NO: 1900790 - RNA, 19 nt, Artificial Sequence
  Description of Artificial Sequence: Synthetic oligonucleotide
  Sense strand starting at position 1665 of SEQ ID NO: 1879352
ugcaacucucuagaaguca

SEQ ID NO: 1900791 - RNA, 19 nt, Artificial Sequence
  Description of Artificial Sequence: Synthetic oligonucleotide
  Antisense strand to SEQ ID NO: 1900790
ugacuucuagagaguugca

SEQ ID NO: 1900792 - RNA, 19 nt, Artificial Sequence
  Description of Artificial Sequence: Synthetic oligonucleotide
  Sense strand starting at position 1712 of SEQ ID NO: 1879352
ugaggucuuccagaagcaa

SEQ ID NO: 1900793 - RNA, 19 nt, Artificial Sequence
  Description of Artificial Sequence: Synthetic oligonucleotide
  Antisense strand to SEQ ID NO: 1900792
uugcuucuggaagaccuca

SEQ ID NO: 1900794 - RNA, 19 nt, Artificial Sequence
  Description of Artificial Sequence: Synthetic oligonucleotide
  Sense strand starting at position 1724 of SEQ ID NO: 1879352
gaagcaagguuccuuuaga

SEQ ID NO: 1900795 - RNA, 19 nt, Artificial Sequence
  Description of Artificial Sequence: Synthetic oligonucleotide
  Antisense strand to SEQ ID NO: 1900794
ucuaaaggaaccuugcuuc

SEQ ID NO: 1900796 - RNA, 19 nt, Artificial Sequence
  Description of Artificial Sequence: Synthetic oligonucleotide
  Sense strand starting at position 1725 of SEQ ID NO: 1879352
aagcaagguuccuuuagau

SEQ ID NO: 1900797 - RNA, 19 nt, Artificial Sequence
  Description of Artificial Sequence: Synthetic oligonucleotide
  Antisense strand to SEQ ID NO: 1900796
aucuaaaggaaccuugcuu

SEQ ID NO: 1900798 - RNA, 19 nt, Artificial Sequence
  Description of Artificial Sequence: Synthetic oligonucleotide
  Sense strand starting at position 1921 of SEQ ID NO: 1879352
aaagaagucgaacgaaauc

SEQ ID NO: 1900799 - RNA, 19 nt, Artificial Sequence
  Description of Artificial Sequence: Synthetic oligonucleotide
  Antisense strand to SEQ ID NO: 1900798
gauuucguucgacuucuuu

SEQ ID NO: 1900800 - RNA, 19 nt, Artificial Sequence
  Description of Artificial Sequence: Synthetic oligonucleotide
  Sense strand starting at position 2825 of SEQ ID NO: 1879352
gcagaacccugaguaguaa

SEQ ID NO: 1900801 - RNA, 19 nt, Artificial Sequence
  Description of Artificial Sequence: Synthetic oligonucleotide
  Antisense strand to SEQ ID NO: 1900800
uuacuacucaggguucugc

SEQ ID NO: 1900802 - RNA, 19 nt, Artificial Sequence
  Description of Artificial Sequence: Synthetic oligonucleotide
  Sense strand starting at position 3070 of SEQ ID NO: 1879352
agaucccugucuuuggaga

SEQ ID NO: 1900803 - RNA, 19 nt, Artificial Sequence
  Description of Artificial Sequence: Synthetic oligonucleotide
  Antisense strand to SEQ ID NO: 1900802
ucuccaaagacagggaucu

SEQ ID NO: 1900804 - RNA, 19 nt, Artificial Sequence
  Description of Artificial Sequence: Synthetic oligonucleotide
  Sense strand starting at position 3071 of SEQ ID NO: 1879352
gaucccugucuuuggagaa

SEQ ID NO: 1900805 - RNA, 19 nt, Artificial Sequence
  Description of Artificial Sequence: Synthetic oligonucleotide
  Antisense strand to SEQ ID NO: 1900804
uucuccaaagacagggauc

SEQ ID NO: 1900806 - RNA, 19 nt, Artificial Sequence
  Description of Artificial Sequence: Synthetic oligonucleotide
  Sense strand starting at position 3188 of SEQ ID NO: 1879352
aggguaaaggagugcaauu

SEQ ID NO: 1900807 - RNA, 19 nt, Artificial Sequence
  Description of Artificial Sequence: Synthetic oligonucleotide
  Antisense strand to SEQ ID NO: 1900806
aauugcacuccuuuacccu

SEQ ID NO: 1900808 - RNA, 19 nt, Artificial Sequence
  Description of Artificial Sequence: Synthetic oligonucleotide
  Sense strand starting at position 3239 of SEQ ID NO: 1879352
ggccuuauugaugagguga

SEQ ID NO: 1900809 - RNA, 19 nt, Artificial Sequence
  Description of Artificial Sequence: Synthetic oligonucleotide
  Antisense strand to SEQ ID NO: 1900808
ucaccucaucaauaaggcc

SEQ ID NO: 1900810 - RNA, 19 nt, Artificial Sequence
  Description of Artificial Sequence: Synthetic oligonucleotide
  Sense strand starting at position 3352 of SEQ ID NO: 1879352
guguuugaggcucaucaaa

SEQ ID NO: 1900811 - RNA, 19 nt, Artificial Sequence
  Description of Artificial Sequence: Synthetic oligonucleotide
  Antisense strand to SEQ ID NO: 1900810
uuugaugagccucaaacac

SEQ ID NO: 1900812 - RNA, 19 nt, Artificial Sequence
  Description of Artificial Sequence: Synthetic oligonucleotide
  Sense strand starting at position 3477 of SEQ ID NO: 1879352
gccauuguuaaaggauuga

SEQ ID NO: 1900813 - RNA, 19 nt, Artificial Sequence
  Description of Artificial Sequence: Synthetic oligonucleotide
  Antisense strand to SEQ ID NO: 1900812
ucaauccuuuaacaauggc

SEQ ID NO: 1900814 - RNA, 19 nt, Artificial Sequence
  Description of Artificial Sequence: Synthetic oligonucleotide
  Sense strand starting at position 3481 of SEQ ID NO: 1879352
uuguuaaaggauugacuuu

SEQ ID NO: 1900815 - RNA, 19 nt, Artificial Sequence
  Description of Artificial Sequence: Synthetic oligonucleotide
  Antisense strand to SEQ ID NO: 1900814
aaagucaauccuuuaacaa

SEQ ID NO: 1900816 - RNA, 19 nt, Artificial Sequence
  Description of Artificial Sequence: Synthetic oligonucleotide
  Sense strand starting at position 3689 of SEQ ID NO: 1879352
cuuucugaccugcagauua

SEQ ID NO: 1900817 - RNA, 19 nt, Artificial Sequence
  Description of Artificial Sequence: Synthetic oligonucleotide
  Antisense strand to SEQ ID NO: 1900816
uaaucugcaggucagaaag

SEQ ID NO: 1900818 - RNA, 19 nt, Artificial Sequence
  Description of Artificial Sequence: Synthetic oligonucleotide
  Sense strand starting at position 3702 of SEQ ID NO: 1879352
agauuagagaguugguaau

SEQ ID NO: 1900819 - RNA, 19 nt, Artificial Sequence
  Description of Artificial Sequence: Synthetic oligonucleotide
  Antisense strand to SEQ ID NO: 1900818
auuaccaacucucuaaucu

SEQ ID NO: 1900820 - RNA, 19 nt, Artificial Sequence
  Description of Artificial Sequence: Synthetic oligonucleotide
  Sense strand starting at position 3704 of SEQ ID NO: 1879352
auuagagaguugguaauuc

SEQ ID NO: 1900821 - RNA, 19 nt, Artificial Sequence
  Description of Artificial Sequence: Synthetic oligonucleotide
  Antisense strand to SEQ ID NO: 1900820
gaauuaccaacucucuaau

SEQ ID NO: 1900822 - RNA, 19 nt, Artificial Sequence
  Description of Artificial Sequence: Synthetic oligonucleotide
  Sense strand starting at position 3808 of SEQ ID NO: 1879352
cccugaagcuucccagauu

SEQ ID NO: 1900823 - RNA, 19 nt, Artificial Sequence
  Description of Artificial Sequence: Synthetic oligonucleotide
  Antisense strand to SEQ ID NO: 1900822
aaucugggaagcuucaggg

SEQ ID NO: 1900824 - RNA, 19 nt, Artificial Sequence
  Description of Artificial Sequence: Synthetic oligonucleotide
  Sense strand starting at position 2415 of SEQ ID NO: 1879353
gacagugccuguuuccuua

SEQ ID NO: 1900825 - RNA, 19 nt, Artificial Sequence
  Description of Artificial Sequence: Synthetic oligonucleotide
  Antisense strand to SEQ ID NO: 1900824
uaaggaaacaggcacuguc

SEQ ID NO: 1900826 - RNA, 19 nt, Artificial Sequence
  Description of Artificial Sequence: Synthetic oligonucleotide
  Sense strand starting at position 2419 of SEQ ID NO: 1879353
gugccuguuuccuuaagga

SEQ ID NO: 1900827 - RNA, 19 nt, Artificial Sequence
  Description of Artificial Sequence: Synthetic oligonucleotide
  Antisense strand to SEQ ID NO: 1900826
uccuuaaggaaacaggcac

SEQ ID NO: 1900828 - RNA, 19 nt, Artificial Sequence
  Description of Artificial Sequence: Synthetic oligonucleotide
  Sense strand starting at position 2500 of SEQ ID NO: 1879353
gugguguagugguagacuu

SEQ ID NO: 1900829 - RNA, 19 nt, Artificial Sequence
  Description of Artificial Sequence: Synthetic oligonucleotide
  Antisense strand to SEQ ID NO: 1900828
aagucuaccacuacaccac

SEQ ID NO: 1900830 - RNA, 19 nt, Artificial Sequence
  Description of Artificial Sequence: Synthetic oligonucleotide
  Sense strand starting at position 2511 of SEQ ID NO: 1879353
guagacuucucgcccgcaa

SEQ ID NO: 1900831 - RNA, 19 nt, Artificial Sequence
  Description of Artificial Sequence: Synthetic oligonucleotide
  Antisense strand to SEQ ID NO: 1900830
uugcgggcgagaagucuac

SEQ ID NO: 1900832 - RNA, 19 nt, Artificial Sequence
  Description of Artificial Sequence: Synthetic oligonucleotide
  Sense strand starting at position 2649 of SEQ ID NO: 1879353
acuuuagguuccuccaguu

SEQ ID NO: 1900833 - RNA, 19 nt, Artificial Sequence
  Description of Artificial Sequence: Synthetic oligonucleotide
  Antisense strand to SEQ ID NO: 1900832
aacuggaggaaccuaaagu

SEQ ID NO: 1900834 - RNA, 19 nt, Artificial Sequence
  Description of Artificial Sequence: Synthetic oligonucleotide
  Sense strand starting at position 2735 of SEQ ID NO: 1879353
gagagaccucgccacucaa

SEQ ID NO: 1900835 - RNA, 19 nt, Artificial Sequence
  Description of Artificial Sequence: Synthetic oligonucleotide
  Antisense strand to SEQ ID NO: 1900834
uugaguggcgaggucucuc

SEQ ID NO: 1900836 - RNA, 19 nt, Artificial Sequence
  Description of Artificial Sequence: Synthetic oligonucleotide
  Sense strand starting at position 3024 of SEQ ID NO: 1879353
uuucuaucaggcugugacu

SEQ ID NO: 1900837 - RNA, 19 nt, Artificial Sequence
  Description of Artificial Sequence: Synthetic oligonucleotide
  Antisense strand to SEQ ID NO: 1900836
agucacagccugauagaaa

SEQ ID NO: 1900838 - RNA, 19 nt, Artificial Sequence
  Description of Artificial Sequence: Synthetic oligonucleotide
  Sense strand starting at position 3033 of SEQ ID NO: 1879353
ggcugugacuuugugaauu

SEQ ID NO: 1900839 - RNA, 19 nt, Artificial Sequence
  Description of Artificial Sequence: Synthetic oligonucleotide
  Antisense strand to SEQ ID NO: 1900838
aauucacaaagucacagcc

SEQ ID NO: 1900840 - RNA, 19 nt, Artificial Sequence
  Description of Artificial Sequence: Synthetic oligonucleotide
  Sense strand starting at position 3035 of SEQ ID NO: 1879353
cugugacuuugugaauuga

SEQ ID NO: 1900841 - RNA, 19 nt, Artificial Sequence
  Description of Artificial Sequence: Synthetic oligonucleotide
  Antisense strand to SEQ ID NO: 1900840
ucaauucacaaagucacag

SEQ ID NO: 1900842 - RNA, 19 nt, Artificial Sequence
  Description of Artificial Sequence: Synthetic oligonucleotide
  Sense strand starting at position 3298 of SEQ ID NO: 1879353
gguacagucugguguuaua

SEQ ID NO: 1900843 - RNA, 19 nt, Artificial Sequence
  Description of Artificial Sequence: Synthetic oligonucleotide
  Antisense strand to SEQ ID NO: 1900842
uauaacaccagacuguacc

SEQ ID NO: 1900844 - RNA, 19 nt, Artificial Sequence
  Description of Artificial Sequence: Synthetic oligonucleotide
  Sense strand starting at position 3301 of SEQ ID NO: 1879353
acagucugguguuauaauu

SEQ ID NO: 1900845 - RNA, 19 nt, Artificial Sequence
  Description of Artificial Sequence: Synthetic oligonucleotide
  Antisense strand to SEQ ID NO: 1900844
aauuauaacaccagacugu

SEQ ID NO: 1900846 - RNA, 19 nt, Artificial Sequence
  Description of Artificial Sequence: Synthetic oligonucleotide
  Sense strand starting at position 3314 of SEQ ID NO: 1879353
auaauuuagcaguguguua

SEQ ID NO: 1900847 - RNA, 19 nt, Artificial Sequence
  Description of Artificial Sequence: Synthetic oligonucleotide
  Antisense strand to SEQ ID NO: 1900846
uaacacacugcuaaauuau

SEQ ID NO: 1900848 - RNA, 19 nt, Artificial Sequence
  Description of Artificial Sequence: Synthetic oligonucleotide
  Sense strand starting at position 3316 of SEQ ID NO: 1879353
aauuuagcaguguguuaua

SEQ ID NO: 1900849 - RNA, 19 nt, Artificial Sequence
  Description of Artificial Sequence: Synthetic oligonucleotide
  Antisense strand to SEQ ID NO: 1900848
uauaacacacugcuaaauu

SEQ ID NO: 1900850 - RNA, 19 nt, Artificial Sequence
  Description of Artificial Sequence: Synthetic oligonucleotide
  Sense strand starting at position 3325 of SEQ ID NO: 1879353
guguguuauaaggagaaac

SEQ ID NO: 1900851 - RNA, 19 nt, Artificial Sequence
  Description of Artificial Sequence: Synthetic oligonucleotide
  Antisense strand to SEQ ID NO: 1900850
guuucuccuuauaacacac

SEQ ID NO: 1900852 - RNA, 19 nt, Artificial Sequence
  Description of Artificial Sequence: Synthetic oligonucleotide
  Sense strand starting at position 3540 of SEQ ID NO: 1879353
ggguuucuugguuaauccu

SEQ ID NO: 1900853 - RNA, 19 nt, Artificial Sequence
  Description of Artificial Sequence: Synthetic oligonucleotide
  Antisense strand to SEQ ID NO: 1900852
aggauuaaccaagaaaccc

SEQ ID NO: 1900854 - RNA, 19 nt, Artificial Sequence
  Description of Artificial Sequence: Synthetic oligonucleotide
  Sense strand starting at position 3549 of SEQ ID NO: 1879353
gguuaauccucucuccgag

SEQ ID NO: 1900855 - RNA, 19 nt, Artificial Sequence
  Description of Artificial Sequence: Synthetic oligonucleotide
  Antisense strand to SEQ ID NO: 1900854
cucggagagaggauuaacc

SEQ ID NO: 1900856 - RNA, 19 nt, Artificial Sequence
  Description of Artificial Sequence: Synthetic oligonucleotide
  Sense strand starting at position 3574 of SEQ ID NO: 1879353
agugacagcugguagagau

SEQ ID NO: 1900857 - RNA, 19 nt, Artificial Sequence
  Description of Artificial Sequence: Synthetic oligonucleotide
  Antisense strand to SEQ ID NO: 1900856
aucucuaccagcugucacu

SEQ ID NO: 1900858 - RNA, 19 nt, Artificial Sequence
  Description of Artificial Sequence: Synthetic oligonucleotide
  Sense strand starting at position 3584 of SEQ ID NO: 1879353
gguagagauugcugcuuga

SEQ ID NO: 1900859 - RNA, 19 nt, Artificial Sequence
  Description of Artificial Sequence: Synthetic oligonucleotide
  Antisense strand to SEQ ID NO: 1900858
ucaagcagcaaucucuacc

SEQ ID NO: 1900860 - RNA, 19 nt, Artificial Sequence
  Description of Artificial Sequence: Synthetic oligonucleotide
  Sense strand starting at position 3587 of SEQ ID NO: 1879353
agagauugcugcuugagag

SEQ ID NO: 1900861 - RNA, 19 nt, Artificial Sequence
  Description of Artificial Sequence: Synthetic oligonucleotide
  Antisense strand to SEQ ID NO: 1900860
cucucaagcagcaaucucu

SEQ ID NO: 1900862 - RNA, 19 nt, Artificial Sequence
  Description of Artificial Sequence: Synthetic oligonucleotide
  Sense strand starting at position 3588 of SEQ ID NO: 1879353
gagauugcugcuugagaga

SEQ ID NO: 1900863 - RNA, 19 nt, Artificial Sequence
  Description of Artificial Sequence: Synthetic oligonucleotide
  Antisense strand to SEQ ID NO: 1900862
ucucucaagcagcaaucuc

SEQ ID NO: 1900864 - RNA, 19 nt, Artificial Sequence
  Description of Artificial Sequence: Synthetic oligonucleotide
  Sense strand starting at position 3738 of SEQ ID NO: 1879353
gaaagaagcugucagcuuu

SEQ ID NO: 1900865 - RNA, 19 nt, Artificial Sequence
  Description of Artificial Sequence: Synthetic oligonucleotide
  Antisense strand to SEQ ID NO: 1900864
aaagcugacagcuucuuuc

SEQ ID NO: 1900866 - RNA, 19 nt, Artificial Sequence
  Description of Artificial Sequence: Synthetic oligonucleotide
  Sense strand starting at position 12 of SEQ ID NO: 1879354
uuggacaaaugagucauua

SEQ ID NO: 1900867 - RNA, 19 nt, Artificial Sequence
  Description of Artificial Sequence: Synthetic oligonucleotide
  Antisense strand to SEQ ID NO: 1900866
uaaugacucauuuguccaa

SEQ ID NO: 1900868 - RNA, 19 nt, Artificial Sequence
  Description of Artificial Sequence: Synthetic oligonucleotide
  Sense strand starting at position 16 of SEQ ID NO: 1879354
acaaaugagucauuaaguc

SEQ ID NO: 1900869 - RNA, 19 nt, Artificial Sequence
  Description of Artificial Sequence: Synthetic oligonucleotide
  Antisense strand to SEQ ID NO: 1900868
gacuuaaugacucauuugu

SEQ ID NO: 1900870 - RNA, 19 nt, Artificial Sequence
  Description of Artificial Sequence: Synthetic oligonucleotide
  Sense strand starting at position 677 of SEQ ID NO: 1879354
ggcgguaacgcaagugaug

SEQ ID NO: 1900871 - RNA, 19 nt, Artificial Sequence
  Description of Artificial Sequence: Synthetic oligonucleotide
  Antisense strand to SEQ ID NO: 1900870
caucacuugcguuaccgcc

SEQ ID NO: 1900872 - RNA, 19 nt, Artificial Sequence
  Description of Artificial Sequence: Synthetic oligonucleotide
  Sense strand starting at position 851 of SEQ ID NO: 1879354
cacugugguuaguccacaa

SEQ ID NO: 1900873 - RNA, 19 nt, Artificial Sequence
  Description of Artificial Sequence: Synthetic oligonucleotide
  Antisense strand to SEQ ID NO: 1900872
uuguggacuaaccacagug

SEQ ID NO: 1900874 - RNA, 19 nt, Artificial Sequence
  Description of Artificial Sequence: Synthetic oligonucleotide
  Sense strand starting at position 855 of SEQ ID NO: 1879354
gugguuaguccacaaauac

SEQ ID NO: 1900875 - RNA, 19 nt, Artificial Sequence
  Description of Artificial Sequence: Synthetic oligonucleotide
  Antisense strand to SEQ ID NO: 1900874
guauuuguggacuaaccac

SEQ ID NO: 1900876 - RNA, 19 nt, Artificial Sequence
  Description of Artificial Sequence: Synthetic oligonucleotide
  Sense strand starting at position 1099 of SEQ ID NO: 1879354
acauuagcugaucagcaaa

SEQ ID NO: 1900877 - RNA, 19 nt, Artificial Sequence
  Description of Artificial Sequence: Synthetic oligonucleotide
  Antisense strand to SEQ ID NO: 1900876
uuugcugaucagcuaaugu

SEQ ID NO: 1900878 - RNA, 19 nt, Artificial Sequence
  Description of Artificial Sequence: Synthetic oligonucleotide
  Sense strand starting at position 1101 of SEQ ID NO: 1879354
auuagcugaucagcaaauu

SEQ ID NO: 1900879 - RNA, 19 nt, Artificial Sequence
  Description of Artificial Sequence: Synthetic oligonucleotide
  Antisense strand to SEQ ID NO: 1900878
aauuugcugaucagcuaau

SEQ ID NO: 1900880 - RNA, 19 nt, Artificial Sequence
  Description of Artificial Sequence: Synthetic oligonucleotide
  Sense strand starting at position 1299 of SEQ ID NO: 1879354
gcaguuucuguugauuauc

SEQ ID NO: 1900881 - RNA, 19 nt, Artificial Sequence
  Description of Artificial Sequence: Synthetic oligonucleotide
  Antisense strand to SEQ ID NO: 1900880
gauaaucaacagaaacugc

SEQ ID NO: 1900882 - RNA, 19 nt, Artificial Sequence
  Description of Artificial Sequence: Synthetic oligonucleotide
  Sense strand starting at position 1327 of SEQ ID NO: 1879354
uuaugaaguggcugguaua

SEQ ID NO: 1900883 - RNA, 19 nt, Artificial Sequence
  Description of Artificial Sequence: Synthetic oligonucleotide
  Antisense strand to SEQ ID NO: 1900882
uauaccagccacuucauaa

SEQ ID NO: 1900884 - RNA, 19 nt, Artificial Sequence
  Description of Artificial Sequence: Synthetic oligonucleotide
  Sense strand starting at position 1646 of SEQ ID NO: 1879354
ugggccauucucuguacua

SEQ ID NO: 1900885 - RNA, 19 nt, Artificial Sequence
  Description of Artificial Sequence: Synthetic oligonucleotide
  Antisense strand to SEQ ID NO: 1900884
uaguacagagaauggccca

SEQ ID NO: 1900886 - RNA, 19 nt, Artificial Sequence
  Description of Artificial Sequence: Synthetic oligonucleotide
  Sense strand starting at position 1647 of SEQ ID NO: 1879354
gggccauucucuguacuaa

SEQ ID NO: 1900887 - RNA, 19 nt, Artificial Sequence
  Description of Artificial Sequence: Synthetic oligonucleotide
  Antisense strand to SEQ ID NO: 1900886
uuaguacagagaauggccc

SEQ ID NO: 1900888 - RNA, 19 nt, Artificial Sequence
  Description of Artificial Sequence: Synthetic oligonucleotide
  Sense strand starting at position 1648 of SEQ ID NO: 1879354
ggccauucucuguacuaaa

SEQ ID NO: 1900889 - RNA, 19 nt, Artificial Sequence
  Description of Artificial Sequence: Synthetic oligonucleotide
  Antisense strand to SEQ ID NO: 1900888
uuuaguacagagaauggcc

SEQ ID NO: 1900890 - RNA, 19 nt, Artificial Sequence
  Description of Artificial Sequence: Synthetic oligonucleotide
  Sense strand starting at position 1769 of SEQ ID NO: 1879354
gaggaagucuacccuacau

SEQ ID NO: 1900891 - RNA, 19 nt, Artificial Sequence
  Description of Artificial Sequence: Synthetic oligonucleotide
  Antisense strand to SEQ ID NO: 1900890
auguaggguagacuuccuc

SEQ ID NO: 1900892 - RNA, 19 nt, Artificial Sequence
  Description of Artificial Sequence: Synthetic oligonucleotide
  Sense strand starting at position 1808 of SEQ ID NO: 1879354
gcaacugaagacuguaaca

SEQ ID NO: 1900893 - RNA, 19 nt, Artificial Sequence
  Description of Artificial Sequence: Synthetic oligonucleotide
  Antisense strand to SEQ ID NO: 1900892
uguuacagucuucaguugc

SEQ ID NO: 1900894 - RNA, 19 nt, Artificial Sequence
  Description of Artificial Sequence: Synthetic oligonucleotide
  Sense strand starting at position 1854 of SEQ ID NO: 1879354
agcaaauuacuugagcuga

SEQ ID NO: 1900895 - RNA, 19 nt, Artificial Sequence
  Description of Artificial Sequence: Synthetic oligonucleotide
  Antisense strand to SEQ ID NO: 1900894
ucagcucaaguaauuugcu

SEQ ID NO: 1900896 - RNA, 19 nt, Artificial Sequence
  Description of Artificial Sequence: Synthetic oligonucleotide
  Sense strand starting at position 2113 of SEQ ID NO: 1879354
ggcguaauccuacaaggga

SEQ ID NO: 1900897 - RNA, 19 nt, Artificial Sequence
  Description of Artificial Sequence: Synthetic oligonucleotide
  Antisense strand to SEQ ID NO: 1900896
ucccuuguaggauuacgcc

SEQ ID NO: 1900898 - RNA, 19 nt, Artificial Sequence
  Description of Artificial Sequence: Synthetic oligonucleotide
  Sense strand starting at position 2127 of SEQ ID NO: 1879354
agggaaggguaugaucauu

SEQ ID NO: 1900899 - RNA, 19 nt, Artificial Sequence
  Description of Artificial Sequence: Synthetic oligonucleotide
  Antisense strand to SEQ ID NO: 1900898
aaugaucauacccuucccu

SEQ ID NO: 1900900 - RNA, 19 nt, Artificial Sequence
  Description of Artificial Sequence: Synthetic oligonucleotide
  Sense strand starting at position 2162 of SEQ ID NO: 1879354
acaugaucacgauaacugu

SEQ ID NO: 1900901 - RNA, 19 nt, Artificial Sequence
  Description of Artificial Sequence: Synthetic oligonucleotide
  Antisense strand to SEQ ID NO: 1900900
acaguuaucgugaucaugu

SEQ ID NO: 1900902 - RNA, 19 nt, Artificial Sequence
  Description of Artificial Sequence: Synthetic oligonucleotide
  Sense strand starting at position 2492 of SEQ ID NO: 1879354
cauguauuagaaugauguu

SEQ ID NO: 1900903 - RNA, 19 nt, Artificial Sequence
  Description of Artificial Sequence: Synthetic oligonucleotide
  Antisense strand to SEQ ID NO: 1900902
aacaucauucuaauacaug

SEQ ID NO: 1900904 - RNA, 19 nt, Artificial Sequence
  Description of Artificial Sequence: Synthetic oligonucleotide
  Sense strand starting at position 2924 of SEQ ID NO: 1879354
aaaguuaugcuaugccagu

SEQ ID NO: 1900905 - RNA, 19 nt, Artificial Sequence
  Description of Artificial Sequence: Synthetic oligonucleotide
  Antisense strand to SEQ ID NO: 1900904
acuggcauagcauaacuuu

SEQ ID NO: 1900906 - RNA, 19 nt, Artificial Sequence
  Description of Artificial Sequence: Synthetic oligonucleotide
  Sense strand starting at position 2999 of SEQ ID NO: 1879354
gccaauggcaugugaacaa

SEQ ID NO: 1900907 - RNA, 19 nt, Artificial Sequence
  Description of Artificial Sequence: Synthetic oligonucleotide
  Antisense strand to SEQ ID NO: 1900906
uuguucacaugccauuggc

SEQ ID NO: 1900908 - RNA, 19 nt, Artificial Sequence
  Description of Artificial Sequence: Synthetic oligonucleotide
  Sense strand starting at position 3125 of SEQ ID NO: 1879354
agcagaguucccuaccuga

SEQ ID NO: 1900909 - RNA, 19 nt, Artificial Sequence
  Description of Artificial Sequence: Synthetic oligonucleotide
  Antisense strand to SEQ ID NO: 1900908
ucagguagggaacucugcu

SEQ ID NO: 1900910 - RNA, 19 nt, Artificial Sequence
  Description of Artificial Sequence: Synthetic oligonucleotide
  Sense strand starting at position 3128 of SEQ ID NO: 1879354
agaguucccuaccugauga

SEQ ID NO: 1900911 - RNA, 19 nt, Artificial Sequence
  Description of Artificial Sequence: Synthetic oligonucleotide
  Antisense strand to SEQ ID NO: 1900910
ucaucagguagggaacucu

SEQ ID NO: 1900912 - RNA, 19 nt, Artificial Sequence
  Description of Artificial Sequence: Synthetic oligonucleotide
  Sense strand starting at position 3187 of SEQ ID NO: 1879354
acagucuugugagcaauaa

SEQ ID NO: 1900913 - RNA, 19 nt, Artificial Sequence
  Description of Artificial Sequence: Synthetic oligonucleotide
  Antisense strand to SEQ ID NO: 1900912
uuauugcucacaagacugu

SEQ ID NO: 1900914 - RNA, 19 nt, Artificial Sequence
  Description of Artificial Sequence: Synthetic oligonucleotide
  Sense strand starting at position 3188 of SEQ ID NO: 1879354
cagucuugugagcaauaau

SEQ ID NO: 1900915 - RNA, 19 nt, Artificial Sequence
  Description of Artificial Sequence: Synthetic oligonucleotide
  Antisense strand to SEQ ID NO: 1900914
auuauugcucacaagacug

SEQ ID NO: 1900916 - RNA, 19 nt, Artificial Sequence
  Description of Artificial Sequence: Synthetic oligonucleotide
  Sense strand starting at position 3191 of SEQ ID NO: 1879354
ucuugugagcaauaauaag

SEQ ID NO: 1900917 - RNA, 19 nt, Artificial Sequence
  Description of Artificial Sequence: Synthetic oligonucleotide
  Antisense strand to SEQ ID NO: 1900916
cuuauuauugcucacaaga

SEQ ID NO: 1900918 - RNA, 19 nt, Artificial Sequence
  Description of Artificial Sequence: Synthetic oligonucleotide
  Sense strand starting at position 3226 of SEQ ID NO: 1879354
ccacuaaaugugggauugu

SEQ ID NO: 1900919 - RNA, 19 nt, Artificial Sequence
  Description of Artificial Sequence: Synthetic oligonucleotide
  Antisense strand to SEQ ID NO: 1900918
acaaucccacauuuagugg

SEQ ID NO: 1900920 - RNA, 19 nt, Artificial Sequence
  Description of Artificial Sequence: Synthetic oligonucleotide
  Sense strand starting at position 3235 of SEQ ID NO: 1879354
gugggauuguuugcaauca

SEQ ID NO: 1900921 - RNA, 19 nt, Artificial Sequence
  Description of Artificial Sequence: Synthetic oligonucleotide
  Antisense strand to SEQ ID NO: 1900920
ugauugcaaacaaucccac

SEQ ID NO: 1900922 - RNA, 19 nt, Artificial Sequence
  Description of Artificial Sequence: Synthetic oligonucleotide
  Sense strand starting at position 3265 of SEQ ID NO: 1879354
cuaacugaugcguaaguca

SEQ ID NO: 1900923 - RNA, 19 nt, Artificial Sequence
  Description of Artificial Sequence: Synthetic oligonucleotide
  Antisense strand to SEQ ID NO: 1900922
ugacuuacgcaucaguuag

SEQ ID NO: 1900924 - RNA, 19 nt, Artificial Sequence
  Description of Artificial Sequence: Synthetic oligonucleotide
  Sense strand starting at position 3272 of SEQ ID NO: 1879354
augcguaagucaguugaaa

SEQ ID NO: 1900925 - RNA, 19 nt, Artificial Sequence
  Description of Artificial Sequence: Synthetic oligonucleotide
  Antisense strand to SEQ ID NO: 1900924
uuucaacugacuuacgcau

SEQ ID NO: 1900926 - RNA, 19 nt, Artificial Sequence
  Description of Artificial Sequence: Synthetic oligonucleotide
  Sense strand starting at position 3359 of SEQ ID NO: 1879354
uucuccagucaugaguuua

SEQ ID NO: 1900927 - RNA, 19 nt, Artificial Sequence
  Description of Artificial Sequence: Synthetic oligonucleotide
  Antisense strand to SEQ ID NO: 1900926
uaaacucaugacuggagaa

SEQ ID NO: 1900928 - RNA, 19 nt, Artificial Sequence
  Description of Artificial Sequence: Synthetic oligonucleotide
  Sense strand starting at position 3434 of SEQ ID NO: 1879354
uagaauauuugccugcagu

SEQ ID NO: 1900929 - RNA, 19 nt, Artificial Sequence
  Description of Artificial Sequence: Synthetic oligonucleotide
  Antisense strand to SEQ ID NO: 1900928
acugcaggcaaauauucua

SEQ ID NO: 1900930 - RNA, 19 nt, Artificial Sequence
  Description of Artificial Sequence: Synthetic oligonucleotide
  Sense strand starting at position 3435 of SEQ ID NO: 1879354
agaauauuugccugcagug

SEQ ID NO: 1900931 - RNA, 19 nt, Artificial Sequence
  Description of Artificial Sequence: Synthetic oligonucleotide
  Antisense strand to SEQ ID NO: 1900930
cacugcaggcaaauauucu

SEQ ID NO: 1900932 - RNA, 19 nt, Artificial Sequence
  Description of Artificial Sequence: Synthetic oligonucleotide
  Sense strand starting at position 3437 of SEQ ID NO: 1879354
aauauuugccugcagugua

SEQ ID NO: 1900933 - RNA, 19 nt, Artificial Sequence
  Description of Artificial Sequence: Synthetic oligonucleotide
  Antisense strand to SEQ ID NO: 1900932
uacacugcaggcaaauauu

SEQ ID NO: 1900934 - RNA, 19 nt, Artificial Sequence
  Description of Artificial Sequence: Synthetic oligonucleotide
  Sense strand starting at position 3612 of SEQ ID NO: 1879354
ccaugugauaaacgguagu

SEQ ID NO: 1900935 - RNA, 19 nt, Artificial Sequence
  Description of Artificial Sequence: Synthetic oligonucleotide
  Antisense strand to SEQ ID NO: 1900934
acuaccguuuaucacaugg

SEQ ID NO: 1900936 - RNA, 19 nt, Artificial Sequence
  Description of Artificial Sequence: Synthetic oligonucleotide
  Sense strand starting at position 3615 of SEQ ID NO: 1879354
ugugauaaacgguaguaag

SEQ ID NO: 1900937 - RNA, 19 nt, Artificial Sequence
  Description of Artificial Sequence: Synthetic oligonucleotide
  Antisense strand to SEQ ID NO: 1900936
cuuacuaccguuuaucaca

SEQ ID NO: 1900938 - RNA, 19 nt, Artificial Sequence
  Description of Artificial Sequence: Synthetic oligonucleotide
  Sense strand starting at position 3626 of SEQ ID NO: 1879354
guaguaagugguggagguu

SEQ ID NO: 1900939 - RNA, 19 nt, Artificial Sequence
  Description of Artificial Sequence: Synthetic oligonucleotide
  Antisense strand to SEQ ID NO: 1900938
aaccuccaccacuuacuac

SEQ ID NO: 1900940 - RNA, 19 nt, Artificial Sequence
  Description of Artificial Sequence: Synthetic oligonucleotide
  Sense strand starting at position 3828 of SEQ ID NO: 1879354
cugugcuaggucuaggaau

SEQ ID NO: 1900941 - RNA, 19 nt, Artificial Sequence
  Description of Artificial Sequence: Synthetic oligonucleotide
  Antisense strand to SEQ ID NO: 1900940
auuccuagaccuagcacag

SEQ ID NO: 1900942 - RNA, 19 nt, Artificial Sequence
  Description of Artificial Sequence: Synthetic oligonucleotide
  Sense strand starting at position 3830 of SEQ ID NO: 1879354
gugcuaggucuaggaauac

SEQ ID NO: 1900943 - RNA, 19 nt, Artificial Sequence
  Description of Artificial Sequence: Synthetic oligonucleotide
  Antisense strand to SEQ ID NO: 1900942
guauuccuagaccuagcac

SEQ ID NO: 1900944 - RNA, 19 nt, Artificial Sequence
  Description of Artificial Sequence: Synthetic oligonucleotide
  Sense strand starting at position 3936 of SEQ ID NO: 1879354
uguaauguacagugcaacu

SEQ ID NO: 1900945 - RNA, 19 nt, Artificial Sequence
  Description of Artificial Sequence: Synthetic oligonucleotide
  Antisense strand to SEQ ID NO: 1900944
aguugcacuguacauuaca

SEQ ID NO: 1900946 - RNA, 19 nt, Artificial Sequence
  Description of Artificial Sequence: Synthetic oligonucleotide
  Sense strand starting at position 490 of SEQ ID NO: 1879355
uggccuaucucagucagga

SEQ ID NO: 1900947 - RNA, 19 nt, Artificial Sequence
  Description of Artificial Sequence: Synthetic oligonucleotide
  Antisense strand to SEQ ID NO: 1900946
uccugacugagauaggcca

SEQ ID NO: 1900948 - RNA, 19 nt, Artificial Sequence
  Description of Artificial Sequence: Synthetic oligonucleotide
  Sense strand starting at position 837 of SEQ ID NO: 1879355
ggagcuauggcagagacuu

SEQ ID NO: 1900949 - RNA, 19 nt, Artificial Sequence
  Description of Artificial Sequence: Synthetic oligonucleotide
  Antisense strand to SEQ ID NO: 1900948
aagucucugccauagcucc

SEQ ID NO: 1900950 - RNA, 19 nt, Artificial Sequence
  Description of Artificial Sequence: Synthetic oligonucleotide
  Sense strand starting at position 849 of SEQ ID NO: 1879355
gagacuuucugcuuggcca

SEQ ID NO: 1900951 - RNA, 19 nt, Artificial Sequence
  Description of Artificial Sequence: Synthetic oligonucleotide
  Antisense strand to SEQ ID NO: 1900950
uggccaagcagaaagucuc

SEQ ID NO: 1900952 - RNA, 19 nt, Artificial Sequence
  Description of Artificial Sequence: Synthetic oligonucleotide
  Sense strand starting at position 850 of SEQ ID NO: 1879355
agacuuucugcuuggccaa

SEQ ID NO: 1900953 - RNA, 19 nt, Artificial Sequence
  Description of Artificial Sequence: Synthetic oligonucleotide
  Antisense strand to SEQ ID NO: 1900952
uuggccaagcagaaagucu

SEQ ID NO: 1900954 - RNA, 19 nt, Artificial Sequence
  Description of Artificial Sequence: Synthetic oligonucleotide
  Sense strand starting at position 949 of SEQ ID NO: 1879355
ugagucaguuuagccagaa

SEQ ID NO: 1900955 - RNA, 19 nt, Artificial Sequence
  Description of Artificial Sequence: Synthetic oligonucleotide
  Antisense strand to SEQ ID NO: 1900954
uucuggcuaaacugacuca

SEQ ID NO: 1900956 - RNA, 19 nt, Artificial Sequence
  Description of Artificial Sequence: Synthetic oligonucleotide
  Sense strand starting at position 1104 of SEQ ID NO: 1879355
ccugaugucuccuuaguca

SEQ ID NO: 1900957 - RNA, 19 nt, Artificial Sequence
  Description of Artificial Sequence: Synthetic oligonucleotide
  Antisense strand to SEQ ID NO: 1900956
ugacuaaggagacaucagg

SEQ ID NO: 1900958 - RNA, 19 nt, Artificial Sequence
  Description of Artificial Sequence: Synthetic oligonucleotide
  Sense strand starting at position 1249 of SEQ ID NO: 1879355
agucuuccucacugauguu

SEQ ID NO: 1900959 - RNA, 19 nt, Artificial Sequence
  Description of Artificial Sequence: Synthetic oligonucleotide
  Antisense strand to SEQ ID NO: 1900958
aacaucagugaggaagacu

SEQ ID NO: 1900960 - RNA, 19 nt, Artificial Sequence
  Description of Artificial Sequence: Synthetic oligonucleotide
  Sense strand starting at position 1261 of SEQ ID NO: 1879355
ugauguuacuacgcaucau

SEQ ID NO: 1900961 - RNA, 19 nt, Artificial Sequence
  Description of Artificial Sequence: Synthetic oligonucleotide
  Antisense strand to SEQ ID NO: 1900960
augaugcguaguaacauca

SEQ ID NO: 1900962 - RNA, 19 nt, Artificial Sequence
  Description of Artificial Sequence: Synthetic oligonucleotide
  Sense strand starting at position 1349 of SEQ ID NO: 1879355
gaguaagucuucuuuggug

SEQ ID NO: 1900963 - RNA, 19 nt, Artificial Sequence
  Description of Artificial Sequence: Synthetic oligonucleotide
  Antisense strand to SEQ ID NO: 1900962
caccaaagaagacuuacuc

SEQ ID NO: 1900964 - RNA, 19 nt, Artificial Sequence
  Description of Artificial Sequence: Synthetic oligonucleotide
  Sense strand starting at position 1488 of SEQ ID NO: 1879355
ccaccuuguagauguguca

SEQ ID NO: 1900965 - RNA, 19 nt, Artificial Sequence
  Description of Artificial Sequence: Synthetic oligonucleotide
  Antisense strand to SEQ ID NO: 1900964
ugacacaucuacaaggugg

SEQ ID NO: 1900966 - RNA, 19 nt, Artificial Sequence
  Description of Artificial Sequence: Synthetic oligonucleotide
  Sense strand starting at position 1495 of SEQ ID NO: 1879355
guagaugugucaccuacua

SEQ ID NO: 1900967 - RNA, 19 nt, Artificial Sequence
  Description of Artificial Sequence: Synthetic oligonucleotide
  Antisense strand to SEQ ID NO: 1900966
uaguaggugacacaucuac

SEQ ID NO: 1900968 - RNA, 19 nt, Artificial Sequence
  Description of Artificial Sequence: Synthetic oligonucleotide
  Sense strand starting at position 1559 of SEQ ID NO: 1879355
ggacaucacuccucgagaa

SEQ ID NO: 1900969 - RNA, 19 nt, Artificial Sequence
  Description of Artificial Sequence: Synthetic oligonucleotide
  Antisense strand to SEQ ID NO: 1900968
uucucgaggagugaugucc

SEQ ID NO: 1900970 - RNA, 19 nt, Artificial Sequence
  Description of Artificial Sequence: Synthetic oligonucleotide
  Sense strand starting at position 1563 of SEQ ID NO: 1879355
aucacuccucgagaaagca

SEQ ID NO: 1900971 - RNA, 19 nt, Artificial Sequence
  Description of Artificial Sequence: Synthetic oligonucleotide
  Antisense strand to SEQ ID NO: 1900970
ugcuuucucgaggagugau

SEQ ID NO: 1900972 - RNA, 19 nt, Artificial Sequence
  Description of Artificial Sequence: Synthetic oligonucleotide
  Sense strand starting at position 1610 of SEQ ID NO: 1879355
gugguuccugccuaaauug

SEQ ID NO: 1900973 - RNA, 19 nt, Artificial Sequence
  Description of Artificial Sequence: Synthetic oligonucleotide
  Antisense strand to SEQ ID NO: 1900972
caauuuaggcaggaaccac

SEQ ID NO: 1900974 - RNA, 19 nt, Artificial Sequence
  Description of Artificial Sequence: Synthetic oligonucleotide
  Sense strand starting at position 1620 of SEQ ID NO: 1879355
ccuaaauuguccucuguga

SEQ ID NO: 1900975 - RNA, 19 nt, Artificial Sequence
  Description of Artificial Sequence: Synthetic oligonucleotide
  Antisense strand to SEQ ID NO: 1900974
ucacagaggacaauuuagg

SEQ ID NO: 1900976 - RNA, 19 nt, Artificial Sequence
  Description of Artificial Sequence: Synthetic oligonucleotide
  Sense strand starting at position 1622 of SEQ ID NO: 1879355
uaaauuguccucugugagu

SEQ ID NO: 1900977 - RNA, 19 nt, Artificial Sequence
  Description of Artificial Sequence: Synthetic oligonucleotide
  Antisense strand to SEQ ID NO: 1900976
acucacagaggacaauuua

SEQ ID NO: 1900978 - RNA, 19 nt, Artificial Sequence
  Description of Artificial Sequence: Synthetic oligonucleotide
  Sense strand starting at position 1656 of SEQ ID NO: 1879355
ggacgagaguuauuggaag

SEQ ID NO: 1900979 - RNA, 19 nt, Artificial Sequence
  Description of Artificial Sequence: Synthetic oligonucleotide
  Antisense strand to SEQ ID NO: 1900978
cuuccaauaacucucgucc

SEQ ID NO: 1900980 - RNA, 19 nt, Artificial Sequence
  Description of Artificial Sequence: Synthetic oligonucleotide
  Sense strand starting at position 1658 of SEQ ID NO: 1879355
acgagaguuauuggaagga

SEQ ID NO: 1900981 - RNA, 19 nt, Artificial Sequence
  Description of Artificial Sequence: Synthetic oligonucleotide
  Antisense strand to SEQ ID NO: 1900980
uccuuccaauaacucucgu

SEQ ID NO: 1900982 - RNA, 19 nt, Artificial Sequence
  Description of Artificial Sequence: Synthetic oligonucleotide
  Sense strand starting at position 1732 of SEQ ID NO: 1879355
cuuggaauccugcacugaa

SEQ ID NO: 1900983 - RNA, 19 nt, Artificial Sequence
  Description of Artificial Sequence: Synthetic oligonucleotide
  Antisense strand to SEQ ID NO: 1900982
uucagugcaggauuccaag

SEQ ID NO: 1900984 - RNA, 19 nt, Artificial Sequence
  Description of Artificial Sequence: Synthetic oligonucleotide
  Sense strand starting at position 1773 of SEQ ID NO: 1879355
gggugacccuggccugaaa

SEQ ID NO: 1900985 - RNA, 19 nt, Artificial Sequence
  Description of Artificial Sequence: Synthetic oligonucleotide
  Antisense strand to SEQ ID NO: 1900984
uuucaggccagggucaccc

SEQ ID NO: 1900986 - RNA, 19 nt, Artificial Sequence
  Description of Artificial Sequence: Synthetic oligonucleotide
  Sense strand starting at position 1800 of SEQ ID NO: 1879355
aguuaccaaggaugugauu

SEQ ID NO: 1900987 - RNA, 19 nt, Artificial Sequence
  Description of Artificial Sequence: Synthetic oligonucleotide
  Antisense strand to SEQ ID NO: 1900986
aaucacauccuugguaacu

SEQ ID NO: 1900988 - RNA, 19 nt, Artificial Sequence
  Description of Artificial Sequence: Synthetic oligonucleotide
  Sense strand starting at position 1813 of SEQ ID NO: 1879355
gugauuugaagcugugauu

SEQ ID NO: 1900989 - RNA, 19 nt, Artificial Sequence
  Description of Artificial Sequence: Synthetic oligonucleotide
  Antisense strand to SEQ ID NO: 1900988
aaucacagcuucaaaucac

SEQ ID NO: 1900990 - RNA, 19 nt, Artificial Sequence
  Description of Artificial Sequence: Synthetic oligonucleotide
  Sense strand starting at position 1889 of SEQ ID NO: 1879355
cuguccuuauccguggaga

SEQ ID NO: 1900991 - RNA, 19 nt, Artificial Sequence
  Description of Artificial Sequence: Synthetic oligonucleotide
  Antisense strand to SEQ ID NO: 1900990
ucuccacggauaaggacag

SEQ ID NO: 1900992 - RNA, 19 nt, Artificial Sequence
  Description of Artificial Sequence: Synthetic oligonucleotide
  Sense strand starting at position 1890 of SEQ ID NO: 1879355
uguccuuauccguggagac

SEQ ID NO: 1900993 - RNA, 19 nt, Artificial Sequence
  Description of Artificial Sequence: Synthetic oligonucleotide
  Antisense strand to SEQ ID NO: 1900992
gucuccacggauaaggaca

SEQ ID NO: 1900994 - RNA, 19 nt, Artificial Sequence
  Description of Artificial Sequence: Synthetic oligonucleotide
  Sense strand starting at position 1891 of SEQ ID NO: 1879355
guccuuauccguggagaca

SEQ ID NO: 1900995 - RNA, 19 nt, Artificial Sequence
  Description of Artificial Sequence: Synthetic oligonucleotide
  Antisense strand to SEQ ID NO: 1900994
ugucuccacggauaaggac

SEQ ID NO: 1900996 - RNA, 19 nt, Artificial Sequence
  Description of Artificial Sequence: Synthetic oligonucleotide
  Sense strand starting at position 1945 of SEQ ID NO: 1879355
gucccaaugguccagcaaa

SEQ ID NO: 1900997 - RNA, 19 nt, Artificial Sequence
  Description of Artificial Sequence: Synthetic oligonucleotide
  Antisense strand to SEQ ID NO: 1900996
uuugcuggaccauugggac

SEQ ID NO: 1900998 - RNA, 19 nt, Artificial Sequence
  Description of Artificial Sequence: Synthetic oligonucleotide
  Sense strand starting at position 2332 of SEQ ID NO: 1879355
guggauggacuuugagaau

SEQ ID NO: 1900999 - RNA, 19 nt, Artificial Sequence
  Description of Artificial Sequence: Synthetic oligonucleotide
  Antisense strand to SEQ ID NO: 1900998
auucucaaaguccauccac

SEQ ID NO: 1901000 - RNA, 19 nt, Artificial Sequence
  Description of Artificial Sequence: Synthetic oligonucleotide
  Sense strand starting at position 2335 of SEQ ID NO: 1879355
gauggacuuugagaauacu

SEQ ID NO: 1901001 - RNA, 19 nt, Artificial Sequence
  Description of Artificial Sequence: Synthetic oligonucleotide
  Antisense strand to SEQ ID NO: 1901000
aguauucucaaaguccauc

SEQ ID NO: 1901002 - RNA, 19 nt, Artificial Sequence
  Description of Artificial Sequence: Synthetic oligonucleotide
  Sense strand starting at position 2344 of SEQ ID NO: 1879355
ugagaauacuaugcugagu

SEQ ID NO: 1901003 - RNA, 19 nt, Artificial Sequence
  Description of Artificial Sequence: Synthetic oligonucleotide
  Antisense strand to SEQ ID NO: 1901002
acucagcauaguauucuca

SEQ ID NO: 1901004 - RNA, 19 nt, Artificial Sequence
  Description of Artificial Sequence: Synthetic oligonucleotide
  Sense strand starting at position 2381 of SEQ ID NO: 1879355
cgacaaaucccguaggauu

SEQ ID NO: 1901005 - RNA, 19 nt, Artificial Sequence
  Description of Artificial Sequence: Synthetic oligonucleotide
  Antisense strand to SEQ ID NO: 1901004
aauccuacgggauuugucg

SEQ ID NO: 1901006 - RNA, 19 nt, Artificial Sequence
  Description of Artificial Sequence: Synthetic oligonucleotide
  Sense strand starting at position 2468 of SEQ ID NO: 1879355
cucgggaguggguguuuaa

SEQ ID NO: 1901007 - RNA, 19 nt, Artificial Sequence
  Description of Artificial Sequence: Synthetic oligonucleotide
  Antisense strand to SEQ ID NO: 1901006
uuaaacacccacucccgag

SEQ ID NO: 1901008 - RNA, 19 nt, Artificial Sequence
  Description of Artificial Sequence: Synthetic oligonucleotide
  Sense strand starting at position 2477 of SEQ ID NO: 1879355
ggguguuuaacagggaguu

SEQ ID NO: 1901009 - RNA, 19 nt, Artificial Sequence
  Description of Artificial Sequence: Synthetic oligonucleotide
  Antisense strand to SEQ ID NO: 1901008
aacucccuguuaaacaccc

SEQ ID NO: 1901010 - RNA, 19 nt, Artificial Sequence
  Description of Artificial Sequence: Synthetic oligonucleotide
  Sense strand starting at position 2478 of SEQ ID NO: 1879355
gguguuuaacagggaguuu

SEQ ID NO: 1901011 - RNA, 19 nt, Artificial Sequence
  Description of Artificial Sequence: Synthetic oligonucleotide
  Antisense strand to SEQ ID NO: 1901010
aaacucccuguuaaacacc

SEQ ID NO: 1901012 - RNA, 19 nt, Artificial Sequence
  Description of Artificial Sequence: Synthetic oligonucleotide
  Sense strand starting at position 2513 of SEQ ID NO: 1879355
agagguucucgagaugagu

SEQ ID NO: 1901013 - RNA, 19 nt, Artificial Sequence
  Description of Artificial Sequence: Synthetic oligonucleotide
  Antisense strand to SEQ ID NO: 1901012
acucaucucgagaaccucu

SEQ ID NO: 1901014 - RNA, 19 nt, Artificial Sequence
  Description of Artificial Sequence: Synthetic oligonucleotide
  Sense strand starting at position 2515 of SEQ ID NO: 1879355
agguucucgagaugaguga

SEQ ID NO: 1901015 - RNA, 19 nt, Artificial Sequence
  Description of Artificial Sequence: Synthetic oligonucleotide
  Antisense strand to SEQ ID NO: 1901014
ucacucaucucgagaaccu

SEQ ID NO: 1901016 - RNA, 19 nt, Artificial Sequence
  Description of Artificial Sequence: Synthetic oligonucleotide
  Sense strand starting at position 2540 of SEQ ID NO: 1879355
ccgacaugggugggugaaa

SEQ ID NO: 1901017 - RNA, 19 nt, Artificial Sequence
  Description of Artificial Sequence: Synthetic oligonucleotide
  Antisense strand to SEQ ID NO: 1901016
uuucacccacccaugucgg

SEQ ID NO: 1901018 - RNA, 19 nt, Artificial Sequence
  Description of Artificial Sequence: Synthetic oligonucleotide
  Sense strand starting at position 2606 of SEQ ID NO: 1879355
gcagaaaccucguuaccua

SEQ ID NO: 1901019 - RNA, 19 nt, Artificial Sequence
  Description of Artificial Sequence: Synthetic oligonucleotide
  Antisense strand to SEQ ID NO: 1901018
uagguaacgagguuucugc

SEQ ID NO: 1901020 - RNA, 19 nt, Artificial Sequence
  Description of Artificial Sequence: Synthetic oligonucleotide
  Sense strand starting at position 3837 of SEQ ID NO: 1879355
gcauuuggcucagucaucu

SEQ ID NO: 1901021 - RNA, 19 nt, Artificial Sequence
  Description of Artificial Sequence: Synthetic oligonucleotide
  Antisense strand to SEQ ID NO: 1901020
agaugacugagccaaaugc

SEQ ID NO: 1901022 - RNA, 19 nt, Artificial Sequence
  Description of Artificial Sequence: Synthetic oligonucleotide
  Sense strand starting at position 3849 of SEQ ID NO: 1879355
gucaucugugcugacauca

SEQ ID NO: 1901023 - RNA, 19 nt, Artificial Sequence
  Description of Artificial Sequence: Synthetic oligonucleotide
  Antisense strand to SEQ ID NO: 1901022
ugaugucagcacagaugac

SEQ ID NO: 1901024 - RNA, 19 nt, Artificial Sequence
  Description of Artificial Sequence: Synthetic oligonucleotide
  Sense strand starting at position 3860 of SEQ ID NO: 1879355
ugacaucacgacugucagu

SEQ ID NO: 1901025 - RNA, 19 nt, Artificial Sequence
  Description of Artificial Sequence: Synthetic oligonucleotide
  Antisense strand to SEQ ID NO: 1901024
acugacagucgugauguca

SEQ ID NO: 1901026 - RNA, 19 nt, Artificial Sequence
  Description of Artificial Sequence: Synthetic oligonucleotide
  Sense strand starting at position 173 of SEQ ID NO: 1879356
ggagcuauggcagagacuu

SEQ ID NO: 1901027 - RNA, 19 nt, Artificial Sequence
  Description of Artificial Sequence: Synthetic oligonucleotide
  Antisense strand to SEQ ID NO: 1901026
aagucucugccauagcucc

SEQ ID NO: 1901028 - RNA, 19 nt, Artificial Sequence
  Description of Artificial Sequence: Synthetic oligonucleotide
  Sense strand starting at position 186 of SEQ ID NO: 1879356
agacuuucugcuuggccaa

SEQ ID NO: 1901029 - RNA, 19 nt, Artificial Sequence
  Description of Artificial Sequence: Synthetic oligonucleotide
  Antisense strand to SEQ ID NO: 1901028
uuggccaagcagaaagucu

SEQ ID NO: 1901030 - RNA, 19 nt, Artificial Sequence
  Description of Artificial Sequence: Synthetic oligonucleotide
  Sense strand starting at position 285 of SEQ ID NO: 1879356
ugagucaguuuagccagaa

SEQ ID NO: 1901031 - RNA, 19 nt, Artificial Sequence
  Description of Artificial Sequence: Synthetic oligonucleotide
  Antisense strand to SEQ ID NO: 1901030
uucuggcuaaacugacuca

SEQ ID NO: 1901032 - RNA, 19 nt, Artificial Sequence
  Description of Artificial Sequence: Synthetic oligonucleotide
  Sense strand starting at position 440 of SEQ ID NO: 1879356
ccugaugucuccuuaguca

SEQ ID NO: 1901033 - RNA, 19 nt, Artificial Sequence
  Description of Artificial Sequence: Synthetic oligonucleotide
  Antisense strand to SEQ ID NO: 1901032
ugacuaaggagacaucagg

SEQ ID NO: 1901034 - RNA, 19 nt, Artificial Sequence
  Description of Artificial Sequence: Synthetic oligonucleotide
  Sense strand starting at position 685 of SEQ ID NO: 1879356
gaguaagucuucuuuggug

SEQ ID NO: 1901035 - RNA, 19 nt, Artificial Sequence
  Description of Artificial Sequence: Synthetic oligonucleotide
  Antisense strand to SEQ ID NO: 1901034
caccaaagaagacuuacuc

SEQ ID NO: 1901036 - RNA, 19 nt, Artificial Sequence
  Description of Artificial Sequence: Synthetic oligonucleotide
  Sense strand starting at position 831 of SEQ ID NO: 1879356
guagaugugucaccuacua

SEQ ID NO: 1901037 - RNA, 19 nt, Artificial Sequence
  Description of Artificial Sequence: Synthetic oligonucleotide
  Antisense strand to SEQ ID NO: 1901036
uaguaggugacacaucuac

SEQ ID NO: 1901038 - RNA, 19 nt, Artificial Sequence
  Description of Artificial Sequence: Synthetic oligonucleotide
  Sense strand starting at position 895 of SEQ ID NO: 1879356
ggacaucacuccucgagaa

SEQ ID NO: 1901039 - RNA, 19 nt, Artificial Sequence
  Description of Artificial Sequence: Synthetic oligonucleotide
  Antisense strand to SEQ ID NO: 1901038
uucucgaggagugaugucc

SEQ ID NO: 1901040 - RNA, 19 nt, Artificial Sequence
  Description of Artificial Sequence: Synthetic oligonucleotide
  Sense strand starting at position 899 of SEQ ID NO: 1879356
aucacuccucgagaaagca

SEQ ID NO: 1901041 - RNA, 19 nt, Artificial Sequence
  Description of Artificial Sequence: Synthetic oligonucleotide
  Antisense strand to SEQ ID NO: 1901040
ugcuuucucgaggagugau

SEQ ID NO: 1901042 - RNA, 19 nt, Artificial Sequence
  Description of Artificial Sequence: Synthetic oligonucleotide
  Sense strand starting at position 946 of SEQ ID NO: 1879356
gugguuccugccuaaauug

SEQ ID NO: 1901043 - RNA, 19 nt, Artificial Sequence
  Description of Artificial Sequence: Synthetic oligonucleotide
  Antisense strand to SEQ ID NO: 1901042
caauuuaggcaggaaccac

SEQ ID NO: 1901044 - RNA, 19 nt, Artificial Sequence
  Description of Artificial Sequence: Synthetic oligonucleotide
  Sense strand starting at position 956 of SEQ ID NO: 1879356
ccuaaauuguccucuguga

SEQ ID NO: 1901045 - RNA, 19 nt, Artificial Sequence
  Description of Artificial Sequence: Synthetic oligonucleotide
  Antisense strand to SEQ ID NO: 1901044
ucacagaggacaauuuagg

SEQ ID NO: 1901046 - RNA, 19 nt, Artificial Sequence
  Description of Artificial Sequence: Synthetic oligonucleotide
  Sense strand starting at position 992 of SEQ ID NO: 1879356
ggacgagaguuauuggaag

SEQ ID NO: 1901047 - RNA, 19 nt, Artificial Sequence
  Description of Artificial Sequence: Synthetic oligonucleotide
  Antisense strand to SEQ ID NO: 1901046
cuuccaauaacucucgucc

SEQ ID NO: 1901048 - RNA, 19 nt, Artificial Sequence
  Description of Artificial Sequence: Synthetic oligonucleotide
  Sense strand starting at position 994 of SEQ ID NO: 1879356
acgagaguuauuggaagga

SEQ ID NO: 1901049 - RNA, 19 nt, Artificial Sequence
  Description of Artificial Sequence: Synthetic oligonucleotide
  Antisense strand to SEQ ID NO: 1901048
uccuuccaauaacucucgu

SEQ ID NO: 1901050 - RNA, 19 nt, Artificial Sequence
  Description of Artificial Sequence: Synthetic oligonucleotide
  Sense strand starting at position 1068 of SEQ ID NO: 1879356
cuuggaauccugcacugaa

SEQ ID NO: 1901051 - RNA, 19 nt, Artificial Sequence
  Description of Artificial Sequence: Synthetic oligonucleotide
  Antisense strand to SEQ ID NO: 1901050
uucagugcaggauuccaag

SEQ ID NO: 1901052 - RNA, 19 nt, Artificial Sequence
  Description of Artificial Sequence: Synthetic oligonucleotide
  Sense strand starting at position 1109 of SEQ ID NO: 1879356
gggugacccuggccugaaa

SEQ ID NO: 1901053 - RNA, 19 nt, Artificial Sequence
  Description of Artificial Sequence: Synthetic oligonucleotide
  Antisense strand to SEQ ID NO: 1901052
uuucaggccagggucaccc

SEQ ID NO: 1901054 - RNA, 19 nt, Artificial Sequence
  Description of Artificial Sequence: Synthetic oligonucleotide
  Sense strand starting at position 1136 of SEQ ID NO: 1879356
aguuaccaaggaugugauu

SEQ ID NO: 1901055 - RNA, 19 nt, Artificial Sequence
  Description of Artificial Sequence: Synthetic oligonucleotide
  Antisense strand to SEQ ID NO: 1901054
aaucacauccuugguaacu

SEQ ID NO: 1901056 - RNA, 19 nt, Artificial Sequence
  Description of Artificial Sequence: Synthetic oligonucleotide
  Sense strand starting at position 1149 of SEQ ID NO: 1879356
gugauuugaagcugugauu

SEQ ID NO: 1901057 - RNA, 19 nt, Artificial Sequence
  Description of Artificial Sequence: Synthetic oligonucleotide
  Antisense strand to SEQ ID NO: 1901056
aaucacagcuucaaaucac

SEQ ID NO: 1901058 - RNA, 19 nt, Artificial Sequence
  Description of Artificial Sequence: Synthetic oligonucleotide
  Sense strand starting at position 1227 of SEQ ID NO: 1879356
guccuuauccguggagaca

SEQ ID NO: 1901059 - RNA, 19 nt, Artificial Sequence
  Description of Artificial Sequence: Synthetic oligonucleotide
  Antisense strand to SEQ ID NO: 1901058
ugucuccacggauaaggac

SEQ ID NO: 1901060 - RNA, 19 nt, Artificial Sequence
  Description of Artificial Sequence: Synthetic oligonucleotide
  Sense strand starting at position 1281 of SEQ ID NO: 1879356
gucccaaugguccagcaaa

SEQ ID NO: 1901061 - RNA, 19 nt, Artificial Sequence
  Description of Artificial Sequence: Synthetic oligonucleotide
  Antisense strand to SEQ ID NO: 1901060
uuugcuggaccauugggac

SEQ ID NO: 1901062 - RNA, 19 nt, Artificial Sequence
  Description of Artificial Sequence: Synthetic oligonucleotide
  Sense strand starting at position 1668 of SEQ ID NO: 1879356
guggauggacuuugagaau

SEQ ID NO: 1901063 - RNA, 19 nt, Artificial Sequence
  Description of Artificial Sequence: Synthetic oligonucleotide
  Antisense strand to SEQ ID NO: 1901062
auucucaaaguccauccac

SEQ ID NO: 1901064 - RNA, 19 nt, Artificial Sequence
  Description of Artificial Sequence: Synthetic oligonucleotide
  Sense strand starting at position 1680 of SEQ ID NO: 1879356
ugagaauacuaugcugagu

SEQ ID NO: 1901065 - RNA, 19 nt, Artificial Sequence
  Description of Artificial Sequence: Synthetic oligonucleotide
  Antisense strand to SEQ ID NO: 1901064
acucagcauaguauucuca

SEQ ID NO: 1901066 - RNA, 19 nt, Artificial Sequence
  Description of Artificial Sequence: Synthetic oligonucleotide
  Sense strand starting at position 1717 of SEQ ID NO: 1879356
cgacaaaucccguaggauu

SEQ ID NO: 1901067 - RNA, 19 nt, Artificial Sequence
  Description of Artificial Sequence: Synthetic oligonucleotide
  Antisense strand to SEQ ID NO: 1901066
aauccuacgggauuugucg

SEQ ID NO: 1901068 - RNA, 19 nt, Artificial Sequence
  Description of Artificial Sequence: Synthetic oligonucleotide
  Sense strand starting at position 1813 of SEQ ID NO: 1879356
ggguguuuaacagggaguu

SEQ ID NO: 1901069 - RNA, 19 nt, Artificial Sequence
  Description of Artificial Sequence: Synthetic oligonucleotide
  Antisense strand to SEQ ID NO: 1901068
aacucccuguuaaacaccc

SEQ ID NO: 1901070 - RNA, 19 nt, Artificial Sequence
  Description of Artificial Sequence: Synthetic oligonucleotide
  Sense strand starting at position 1814 of SEQ ID NO: 1879356
gguguuuaacagggaguuu

SEQ ID NO: 1901071 - RNA, 19 nt, Artificial Sequence
  Description of Artificial Sequence: Synthetic oligonucleotide
  Antisense strand to SEQ ID NO: 1901070
aaacucccuguuaaacacc

SEQ ID NO: 1901072 - RNA, 19 nt, Artificial Sequence
  Description of Artificial Sequence: Synthetic oligonucleotide
  Sense strand starting at position 1849 of SEQ ID NO: 1879356
agagguucucgagaugagu

SEQ ID NO: 1901073 - RNA, 19 nt, Artificial Sequence
  Description of Artificial Sequence: Synthetic oligonucleotide
  Antisense strand to SEQ ID NO: 1901072
acucaucucgagaaccucu

SEQ ID NO: 1901074 - RNA, 19 nt, Artificial Sequence
  Description of Artificial Sequence: Synthetic oligonucleotide
  Sense strand starting at position 1851 of SEQ ID NO: 1879356
agguucucgagaugaguga

SEQ ID NO: 1901075 - RNA, 19 nt, Artificial Sequence
  Description of Artificial Sequence: Synthetic oligonucleotide
  Antisense strand to SEQ ID NO: 1901074
ucacucaucucgagaaccu

SEQ ID NO: 1901076 - RNA, 19 nt, Artificial Sequence
  Description of Artificial Sequence: Synthetic oligonucleotide
  Sense strand starting at position 1876 of SEQ ID NO: 1879356
ccgacaugggugggugaaa

SEQ ID NO: 1901077 - RNA, 19 nt, Artificial Sequence
  Description of Artificial Sequence: Synthetic oligonucleotide
  Antisense strand to SEQ ID NO: 1901076
uuucacccacccaugucgg

SEQ ID NO: 1901078 - RNA, 19 nt, Artificial Sequence
  Description of Artificial Sequence: Synthetic oligonucleotide
  Sense strand starting at position 1942 of SEQ ID NO: 1879356
gcagaaaccucguuaccua

SEQ ID NO: 1901079 - RNA, 19 nt, Artificial Sequence
  Description of Artificial Sequence: Synthetic oligonucleotide
  Antisense strand to SEQ ID NO: 1901078
uagguaacgagguuucugc

SEQ ID NO: 1901080 - RNA, 19 nt, Artificial Sequence
  Description of Artificial Sequence: Synthetic oligonucleotide
  Sense strand starting at position 3173 of SEQ ID NO: 1879356
gcauuuggcucagucaucu

SEQ ID NO: 1901081 - RNA, 19 nt, Artificial Sequence
  Description of Artificial Sequence: Synthetic oligonucleotide
  Antisense strand to SEQ ID NO: 1901080
agaugacugagccaaaugc

SEQ ID NO: 1901082 - RNA, 19 nt, Artificial Sequence
  Description of Artificial Sequence: Synthetic oligonucleotide
  Sense strand starting at position 3185 of SEQ ID NO: 1879356
gucaucugugcugacauca

SEQ ID NO: 1901083 - RNA, 19 nt, Artificial Sequence
  Description of Artificial Sequence: Synthetic oligonucleotide
  Antisense strand to SEQ ID NO: 1901082
ugaugucagcacagaugac

SEQ ID NO: 1901084 - RNA, 19 nt, Artificial Sequence
  Description of Artificial Sequence: Synthetic oligonucleotide
  Sense strand starting at position 3196 of SEQ ID NO: 1879356
ugacaucacgacugucagu

SEQ ID NO: 1901085 - RNA, 19 nt, Artificial Sequence
  Description of Artificial Sequence: Synthetic oligonucleotide
  Antisense strand to SEQ ID NO: 1901084
acugacagucgugauguca

SEQ ID NO: 1901086 - RNA, 19 nt, Artificial Sequence
  Description of Artificial Sequence: Synthetic oligonucleotide
  Sense strand starting at position 3490 of SEQ ID NO: 1879356
uauccuggcuggguguaaa

SEQ ID NO: 1901087 - RNA, 19 nt, Artificial Sequence
  Description of Artificial Sequence: Synthetic oligonucleotide
  Antisense strand to SEQ ID NO: 1901086
uuuacacccagccaggaua

SEQ ID NO: 1901088 - RNA, 19 nt, Artificial Sequence
  Description of Artificial Sequence: Synthetic oligonucleotide
  Sense strand starting at position 3518 of SEQ ID NO: 1879356
uggaaauugucaccgacaa

SEQ ID NO: 1901089 - RNA, 19 nt, Artificial Sequence
  Description of Artificial Sequence: Synthetic oligonucleotide
  Antisense strand to SEQ ID NO: 1901088
uugucggugacaauuucca

SEQ ID NO: 1901090 - RNA, 19 nt, Artificial Sequence
  Description of Artificial Sequence: Synthetic oligonucleotide
  Sense strand starting at position 3519 of SEQ ID NO: 1879356
ggaaauugucaccgacaau

SEQ ID NO: 1901091 - RNA, 19 nt, Artificial Sequence
  Description of Artificial Sequence: Synthetic oligonucleotide
  Antisense strand to SEQ ID NO: 1901090
auugucggugacaauuucc

SEQ ID NO: 1901092 - RNA, 19 nt, Artificial Sequence
  Description of Artificial Sequence: Synthetic oligonucleotide
  Sense strand starting at position 3522 of SEQ ID NO: 1879356
aauugucaccgacaauguu

SEQ ID NO: 1901093 - RNA, 19 nt, Artificial Sequence
  Description of Artificial Sequence: Synthetic oligonucleotide
  Antisense strand to SEQ ID NO: 1901092
aacauugucggugacaauu

SEQ ID NO: 1901094 - RNA, 19 nt, Artificial Sequence
  Description of Artificial Sequence: Synthetic oligonucleotide
  Sense strand starting at position 3641 of SEQ ID NO: 1879356
ucuugaugucgugaaaugu

SEQ ID NO: 1901095 - RNA, 19 nt, Artificial Sequence
  Description of Artificial Sequence: Synthetic oligonucleotide
  Antisense strand to SEQ ID NO: 1901094
acauuucacgacaucaaga

SEQ ID NO: 1901096 - RNA, 19 nt, Artificial Sequence
  Description of Artificial Sequence: Synthetic oligonucleotide
  Sense strand starting at position 3645 of SEQ ID NO: 1879356
gaugucgugaaaugucaug

SEQ ID NO: 1901097 - RNA, 19 nt, Artificial Sequence
  Description of Artificial Sequence: Synthetic oligonucleotide
  Antisense strand to SEQ ID NO: 1901096
caugacauuucacgacauc

SEQ ID NO: 1901098 - RNA, 19 nt, Artificial Sequence
  Description of Artificial Sequence: Synthetic oligonucleotide
  Sense strand starting at position 3695 of SEQ ID NO: 1879356
ucacaucucugggcacuua

SEQ ID NO: 1901099 - RNA, 19 nt, Artificial Sequence
  Description of Artificial Sequence: Synthetic oligonucleotide
  Antisense strand to SEQ ID NO: 1901098
uaagugcccagagauguga

SEQ ID NO: 1901100 - RNA, 19 nt, Artificial Sequence
  Description of Artificial Sequence: Synthetic oligonucleotide
  Sense strand starting at position 3732 of SEQ ID NO: 1879356
gaaccagaguuggugaaau

SEQ ID NO: 1901101 - RNA, 19 nt, Artificial Sequence
  Description of Artificial Sequence: Synthetic oligonucleotide
  Antisense strand to SEQ ID NO: 1901100
auuucaccaacucugguuc

SEQ ID NO: 1901102 - RNA, 19 nt, Artificial Sequence
  Description of Artificial Sequence: Synthetic oligonucleotide
  Sense strand starting at position 3771 of SEQ ID NO: 1879356
agcccauugccgguguuua

SEQ ID NO: 1901103 - RNA, 19 nt, Artificial Sequence
  Description of Artificial Sequence: Synthetic oligonucleotide
  Antisense strand to SEQ ID NO: 1901102
uaaacaccggcaaugggcu

SEQ ID NO: 1901104 - RNA, 19 nt, Artificial Sequence
  Description of Artificial Sequence: Synthetic oligonucleotide
  Sense strand starting at position 3776 of SEQ ID NO: 1879356
auugccgguguuuauaaua

SEQ ID NO: 1901105 - RNA, 19 nt, Artificial Sequence
  Description of Artificial Sequence: Synthetic oligonucleotide
  Antisense strand to SEQ ID NO: 1901104
uauuauaaacaccggcaau

SEQ ID NO: 1901106 - RNA, 19 nt, Artificial Sequence
  Description of Artificial Sequence: Synthetic oligonucleotide
  Sense strand starting at position 36 of SEQ ID NO: 1879357
gccagaaaccuguaacucu

SEQ ID NO: 1901107 - RNA, 19 nt, Artificial Sequence
  Description of Artificial Sequence: Synthetic oligonucleotide
  Antisense strand to SEQ ID NO: 1901106
agaguuacagguuucuggc

SEQ ID NO: 1901108 - RNA, 19 nt, Artificial Sequence
  Description of Artificial Sequence: Synthetic oligonucleotide
  Sense strand starting at position 44 of SEQ ID NO: 1879357
ccuguaacucucuaacugu

SEQ ID NO: 1901109 - RNA, 19 nt, Artificial Sequence
  Description of Artificial Sequence: Synthetic oligonucleotide
  Antisense strand to SEQ ID NO: 1901108
acaguuagagaguuacagg

SEQ ID NO: 1901110 - RNA, 19 nt, Artificial Sequence
  Description of Artificial Sequence: Synthetic oligonucleotide
  Sense strand starting at position 50 of SEQ ID NO: 1879357
acucucuaacugugugaaa

SEQ ID NO: 1901111 - RNA, 19 nt, Artificial Sequence
  Description of Artificial Sequence: Synthetic oligonucleotide
  Antisense strand to SEQ ID NO: 1901110
uuucacacaguuagagagu

SEQ ID NO: 1901112 - RNA, 19 nt, Artificial Sequence
  Description of Artificial Sequence: Synthetic oligonucleotide
  Sense strand starting at position 51 of SEQ ID NO: 1879357
cucucuaacugugugaaac

SEQ ID NO: 1901113 - RNA, 19 nt, Artificial Sequence
  Description of Artificial Sequence: Synthetic oligonucleotide
  Antisense strand to SEQ ID NO: 1901112
guuucacacaguuagagag

SEQ ID NO: 1901114 - RNA, 19 nt, Artificial Sequence
  Description of Artificial Sequence: Synthetic oligonucleotide
  Sense strand starting at position 52 of SEQ ID NO: 1879357
ucucuaacugugugaaaca

SEQ ID NO: 1901115 - RNA, 19 nt, Artificial Sequence
  Description of Artificial Sequence: Synthetic oligonucleotide
  Antisense strand to SEQ ID NO: 1901114
uguuucacacaguuagaga

SEQ ID NO: 1901116 - RNA, 19 nt, Artificial Sequence
  Description of Artificial Sequence: Synthetic oligonucleotide
  Sense strand starting at position 59 of SEQ ID NO: 1879357
cugugugaaacauguaagu

SEQ ID NO: 1901117 - RNA, 19 nt, Artificial Sequence
  Description of Artificial Sequence: Synthetic oligonucleotide
  Antisense strand to SEQ ID NO: 1901116
acuuacauguuucacacag

SEQ ID NO: 1901118 - RNA, 19 nt, Artificial Sequence
  Description of Artificial Sequence: Synthetic oligonucleotide
  Sense strand starting at position 61 of SEQ ID NO: 1879357
gugugaaacauguaaguuu

SEQ ID NO: 1901119 - RNA, 19 nt, Artificial Sequence
  Description of Artificial Sequence: Synthetic oligonucleotide
  Antisense strand to SEQ ID NO: 1901118
aaacuuacauguuucacac

SEQ ID NO: 1901120 - RNA, 19 nt, Artificial Sequence
  Description of Artificial Sequence: Synthetic oligonucleotide
  Sense strand starting at position 68 of SEQ ID NO: 1879357
acauguaaguuuccacauc

SEQ ID NO: 1901121 - RNA, 19 nt, Artificial Sequence
  Description of Artificial Sequence: Synthetic oligonucleotide
  Antisense strand to SEQ ID NO: 1901120
gauguggaaacuuacaugu

SEQ ID NO: 1901122 - RNA, 19 nt, Artificial Sequence
  Description of Artificial Sequence: Synthetic oligonucleotide
  Sense strand starting at position 94 of SEQ ID NO: 1879357
ugggaauacuaauaacaau

SEQ ID NO: 1901123 - RNA, 19 nt, Artificial Sequence
  Description of Artificial Sequence: Synthetic oligonucleotide
  Antisense strand to SEQ ID NO: 1901122
auuguuauuaguauuccca

SEQ ID NO: 1901124 - RNA, 19 nt, Artificial Sequence
  Description of Artificial Sequence: Synthetic oligonucleotide
  Sense strand starting at position 166 of SEQ ID NO: 1879357
guaggugcucaacaaagau

SEQ ID NO: 1901125 - RNA, 19 nt, Artificial Sequence
  Description of Artificial Sequence: Synthetic oligonucleotide
  Antisense strand to SEQ ID NO: 1901124
aucuuuguugagcaccuac

SEQ ID NO: 1901126 - RNA, 19 nt, Artificial Sequence
  Description of Artificial Sequence: Synthetic oligonucleotide
  Sense strand starting at position 621 of SEQ ID NO: 1879357
ccgggacccuguucuuaga

SEQ ID NO: 1901127 - RNA, 19 nt, Artificial Sequence
  Description of Artificial Sequence: Synthetic oligonucleotide
  Antisense strand to SEQ ID NO: 1901126
ucuaagaacagggucccgg

SEQ ID NO: 1901128 - RNA, 19 nt, Artificial Sequence
  Description of Artificial Sequence: Synthetic oligonucleotide
  Sense strand starting at position 623 of SEQ ID NO: 1879357
gggacccuguucuuagaca

SEQ ID NO: 1901129 - RNA, 19 nt, Artificial Sequence
  Description of Artificial Sequence: Synthetic oligonucleotide
  Antisense strand to SEQ ID NO: 1901128
ugucuaagaacaggguccc

SEQ ID NO: 1901130 - RNA, 19 nt, Artificial Sequence
  Description of Artificial Sequence: Synthetic oligonucleotide
  Sense strand starting at position 631 of SEQ ID NO: 1879357
guucuuagacaaggucuau

SEQ ID NO: 1901131 - RNA, 19 nt, Artificial Sequence
  Description of Artificial Sequence: Synthetic oligonucleotide
  Antisense strand to SEQ ID NO: 1901130
auagaccuugucuaagaac

SEQ ID NO: 1901132 - RNA, 19 nt, Artificial Sequence
  Description of Artificial Sequence: Synthetic oligonucleotide
  Sense strand starting at position 671 of SEQ ID NO: 1879357
uuuguaagaccuggaucua

SEQ ID NO: 1901133 - RNA, 19 nt, Artificial Sequence
  Description of Artificial Sequence: Synthetic oligonucleotide
  Antisense strand to SEQ ID NO: 1901132
uagauccaggucuuacaaa

SEQ ID NO: 1901134 - RNA, 19 nt, Artificial Sequence
  Description of Artificial Sequence: Synthetic oligonucleotide
  Sense strand starting at position 726 of SEQ ID NO: 1879357
ugauauuuaguguguccua

SEQ ID NO: 1901135 - RNA, 19 nt, Artificial Sequence
  Description of Artificial Sequence: Synthetic oligonucleotide
  Antisense strand to SEQ ID NO: 1901134
uaggacacacuaaauauca

SEQ ID NO: 1901136 - RNA, 19 nt, Artificial Sequence
  Description of Artificial Sequence: Synthetic oligonucleotide
  Sense strand starting at position 733 of SEQ ID NO: 1879357
uaguguguccuagggagau

SEQ ID NO: 1901137 - RNA, 19 nt, Artificial Sequence
  Description of Artificial Sequence: Synthetic oligonucleotide
  Antisense strand to SEQ ID NO: 1901136
aucucccuaggacacacua

SEQ ID NO: 1901138 - RNA, 19 nt, Artificial Sequence
  Description of Artificial Sequence: Synthetic oligonucleotide
  Sense strand starting at position 735 of SEQ ID NO: 1879357
guguguccuagggagauga

SEQ ID NO: 1901139 - RNA, 19 nt, Artificial Sequence
  Description of Artificial Sequence: Synthetic oligonucleotide
  Antisense strand to SEQ ID NO: 1901138
ucaucucccuaggacacac

SEQ ID NO: 1901140 - RNA, 19 nt, Artificial Sequence
  Description of Artificial Sequence: Synthetic oligonucleotide
  Sense strand starting at position 811 of SEQ ID NO: 1879357
ggccaauuugcuugcacca

SEQ ID NO: 1901141 - RNA, 19 nt, Artificial Sequence
  Description of Artificial Sequence: Synthetic oligonucleotide
  Antisense strand to SEQ ID NO: 1901140
uggugcaagcaaauuggcc

SEQ ID NO: 1901142 - RNA, 19 nt, Artificial Sequence
  Description of Artificial Sequence: Synthetic oligonucleotide
  Sense strand starting at position 1223 of SEQ ID NO: 1879357
aucguauuggaagacuuua

SEQ ID NO: 1901143 - RNA, 19 nt, Artificial Sequence
  Description of Artificial Sequence: Synthetic oligonucleotide
  Antisense strand to SEQ ID NO: 1901142
uaaagucuuccaauacgau

SEQ ID NO: 1901144 - RNA, 19 nt, Artificial Sequence
  Description of Artificial Sequence: Synthetic oligonucleotide
  Sense strand starting at position 2165 of SEQ ID NO: 1879357
cguauaggucccguguuau

SEQ ID NO: 1901145 - RNA, 19 nt, Artificial Sequence
  Description of Artificial Sequence: Synthetic oligonucleotide
  Antisense strand to SEQ ID NO: 1901144
auaacacgggaccuauacg

SEQ ID NO: 1901146 - RNA, 19 nt, Artificial Sequence
  Description of Artificial Sequence: Synthetic oligonucleotide
  Sense strand starting at position 2234 of SEQ ID NO: 1879357
ggcagcucugcauaauauu

SEQ ID NO: 1901147 - RNA, 19 nt, Artificial Sequence
  Description of Artificial Sequence: Synthetic oligonucleotide
  Antisense strand to SEQ ID NO: 1901146
aauauuaugcagagcugcc

SEQ ID NO: 1901148 - RNA, 19 nt, Artificial Sequence
  Description of Artificial Sequence: Synthetic oligonucleotide
  Sense strand starting at position 2471 of SEQ ID NO: 1879357
cauuauuuaugcgcuagua

SEQ ID NO: 1901149 - RNA, 19 nt, Artificial Sequence
  Description of Artificial Sequence: Synthetic oligonucleotide
  Antisense strand to SEQ ID NO: 1901148
uacuagcgcauaaauaaug

SEQ ID NO: 1901150 - RNA, 19 nt, Artificial Sequence
  Description of Artificial Sequence: Synthetic oligonucleotide
  Sense strand starting at position 2473 of SEQ ID NO: 1879357
uuauuuaugcgcuaguaag

SEQ ID NO: 1901151 - RNA, 19 nt, Artificial Sequence
  Description of Artificial Sequence: Synthetic oligonucleotide
  Antisense strand to SEQ ID NO: 1901150
cuuacuagcgcauaaauaa

SEQ ID NO: 1901152 - RNA, 19 nt, Artificial Sequence
  Description of Artificial Sequence: Synthetic oligonucleotide
  Sense strand starting at position 2777 of SEQ ID NO: 1879357
gcucucaauguuugagaug

SEQ ID NO: 1901153 - RNA, 19 nt, Artificial Sequence
  Description of Artificial Sequence: Synthetic oligonucleotide
  Antisense strand to SEQ ID NO: 1901152
caucucaaacauugagagc

SEQ ID NO: 1901154 - RNA, 19 nt, Artificial Sequence
  Description of Artificial Sequence: Synthetic oligonucleotide
  Sense strand starting at position 2834 of SEQ ID NO: 1879357
acaguagauugucuuuaug

SEQ ID NO: 1901155 - RNA, 19 nt, Artificial Sequence
  Description of Artificial Sequence: Synthetic oligonucleotide
  Antisense strand to SEQ ID NO: 1901154
cauaaagacaaucuacugu

SEQ ID NO: 1901156 - RNA, 19 nt, Artificial Sequence
  Description of Artificial Sequence: Synthetic oligonucleotide
  Sense strand starting at position 2837 of SEQ ID NO: 1879357
guagauugucuuuauggga

SEQ ID NO: 1901157 - RNA, 19 nt, Artificial Sequence
  Description of Artificial Sequence: Synthetic oligonucleotide
  Antisense strand to SEQ ID NO: 1901156
ucccauaaagacaaucuac

SEQ ID NO: 1901158 - RNA, 19 nt, Artificial Sequence
  Description of Artificial Sequence: Synthetic oligonucleotide
  Sense strand starting at position 2845 of SEQ ID NO: 1879357
ucuuuaugggauugugaca

SEQ ID NO: 1901159 - RNA, 19 nt, Artificial Sequence
  Description of Artificial Sequence: Synthetic oligonucleotide
  Antisense strand to SEQ ID NO: 1901158
ugucacaaucccauaaaga

SEQ ID NO: 1901160 - RNA, 19 nt, Artificial Sequence
  Description of Artificial Sequence: Synthetic oligonucleotide
  Sense strand starting at position 2852 of SEQ ID NO: 1879357
gggauugugacauacugua

SEQ ID NO: 1901161 - RNA, 19 nt, Artificial Sequence
  Description of Artificial Sequence: Synthetic oligonucleotide
  Antisense strand to SEQ ID NO: 1901160
uacaguaugucacaauccc

SEQ ID NO: 1901162 - RNA, 19 nt, Artificial Sequence
  Description of Artificial Sequence: Synthetic oligonucleotide
  Sense strand starting at position 2857 of SEQ ID NO: 1879357
ugugacauacuguaguuua

SEQ ID NO: 1901163 - RNA, 19 nt, Artificial Sequence
  Description of Artificial Sequence: Synthetic oligonucleotide
  Antisense strand to SEQ ID NO: 1901162
uaaacuacaguaugucaca

SEQ ID NO: 1901164 - RNA, 19 nt, Artificial Sequence
  Description of Artificial Sequence: Synthetic oligonucleotide
  Sense strand starting at position 2871 of SEQ ID NO: 1879357
guuuacaugcuuuaguaau

SEQ ID NO: 1901165 - RNA, 19 nt, Artificial Sequence
  Description of Artificial Sequence: Synthetic oligonucleotide
  Antisense strand to SEQ ID NO: 1901164
auuacuaaagcauguaaac

SEQ ID NO: 1901166 - RNA, 19 nt, Artificial Sequence
  Description of Artificial Sequence: Synthetic oligonucleotide
  Sense strand starting at position 3009 of SEQ ID NO: 1879357
uugucuuaaagugaguuau

SEQ ID NO: 1901167 - RNA, 19 nt, Artificial Sequence
  Description of Artificial Sequence: Synthetic oligonucleotide
  Antisense strand to SEQ ID NO: 1901166
auaacucacuuuaagacaa

SEQ ID NO: 1901168 - RNA, 19 nt, Artificial Sequence
  Description of Artificial Sequence: Synthetic oligonucleotide
  Sense strand starting at position 3101 of SEQ ID NO: 1879357
aguacauguuaucuaauag

SEQ ID NO: 1901169 - RNA, 19 nt, Artificial Sequence
  Description of Artificial Sequence: Synthetic oligonucleotide
  Antisense strand to SEQ ID NO: 1901168
cuauuagauaacauguacu

SEQ ID NO: 1901170 - RNA, 19 nt, Artificial Sequence
  Description of Artificial Sequence: Synthetic oligonucleotide
  Sense strand starting at position 3145 of SEQ ID NO: 1879357
agagguuuauuuguuguuu

SEQ ID NO: 1901171 - RNA, 19 nt, Artificial Sequence
  Description of Artificial Sequence: Synthetic oligonucleotide
  Antisense strand to SEQ ID NO: 1901170
aaacaacaaauaaaccucu

SEQ ID NO: 1901172 - RNA, 19 nt, Artificial Sequence
  Description of Artificial Sequence: Synthetic oligonucleotide
  Sense strand starting at position 3186 of SEQ ID NO: 1879357
agugauacguuguuaugaa

SEQ ID NO: 1901173 - RNA, 19 nt, Artificial Sequence
  Description of Artificial Sequence: Synthetic oligonucleotide
  Antisense strand to SEQ ID NO: 1901172
uucauaacaacguaucacu

SEQ ID NO: 1901174 - RNA, 19 nt, Artificial Sequence
  Description of Artificial Sequence: Synthetic oligonucleotide
  Sense strand starting at position 3193 of SEQ ID NO: 1879357
cguuguuaugaagagacga

SEQ ID NO: 1901175 - RNA, 19 nt, Artificial Sequence
  Description of Artificial Sequence: Synthetic oligonucleotide
  Antisense strand to SEQ ID NO: 1901174
ucgucucuucauaacaacg

SEQ ID NO: 1901176 - RNA, 19 nt, Artificial Sequence
  Description of Artificial Sequence: Synthetic oligonucleotide
  Sense strand starting at position 3218 of SEQ ID NO: 1879357
aacaaauauuucgaagugu

SEQ ID NO: 1901177 - RNA, 19 nt, Artificial Sequence
  Description of Artificial Sequence: Synthetic oligonucleotide
  Antisense strand to SEQ ID NO: 1901176
acacuucgaaauauuuguu

SEQ ID NO: 1901178 - RNA, 19 nt, Artificial Sequence
  Description of Artificial Sequence: Synthetic oligonucleotide
  Sense strand starting at position 3231 of SEQ ID NO: 1879357
aaguguucccauuauugug

SEQ ID NO: 1901179 - RNA, 19 nt, Artificial Sequence
  Description of Artificial Sequence: Synthetic oligonucleotide
  Antisense strand to SEQ ID NO: 1901178
cacaauaaugggaacacuu

SEQ ID NO: 1901180 - RNA, 19 nt, Artificial Sequence
  Description of Artificial Sequence: Synthetic oligonucleotide
  Sense strand starting at position 3270 of SEQ ID NO: 1879357
uuaugauugucaucacaga

SEQ ID NO: 1901181 - RNA, 19 nt, Artificial Sequence
  Description of Artificial Sequence: Synthetic oligonucleotide
  Antisense strand to SEQ ID NO: 1901180
ucugugaugacaaucauaa

SEQ ID NO: 1901182 - RNA, 19 nt, Artificial Sequence
  Description of Artificial Sequence: Synthetic oligonucleotide
  Sense strand starting at position 3341 of SEQ ID NO: 1879357
uugagcaguucaguggauu

SEQ ID NO: 1901183 - RNA, 19 nt, Artificial Sequence
  Description of Artificial Sequence: Synthetic oligonucleotide
  Antisense strand to SEQ ID NO: 1901182
aauccacugaacugcucaa

SEQ ID NO: 1901184 - RNA, 19 nt, Artificial Sequence
  Description of Artificial Sequence: Synthetic oligonucleotide
  Sense strand starting at position 3342 of SEQ ID NO: 1879357
ugagcaguucaguggauuu

SEQ ID NO: 1901185 - RNA, 19 nt, Artificial Sequence
  Description of Artificial Sequence: Synthetic oligonucleotide
  Antisense strand to SEQ ID NO: 1901184
aaauccacugaacugcuca

SEQ ID NO: 1901186 - RNA, 19 nt, Artificial Sequence
  Description of Artificial Sequence: Synthetic oligonucleotide
  Sense strand starting at position 32 of SEQ ID NO: 1879358
uuagaacucguagggauau

SEQ ID NO: 1901187 - RNA, 19 nt, Artificial Sequence
  Description of Artificial Sequence: Synthetic oligonucleotide
  Antisense strand to SEQ ID NO: 1901186
auaucccuacgaguucuaa

SEQ ID NO: 1901188 - RNA, 19 nt, Artificial Sequence
  Description of Artificial Sequence: Synthetic oligonucleotide
  Sense strand starting at position 52 of SEQ ID NO: 1879358
agauauuauccugaccugu

SEQ ID NO: 1901189 - RNA, 19 nt, Artificial Sequence
  Description of Artificial Sequence: Synthetic oligonucleotide
  Antisense strand to SEQ ID NO: 1901188
acaggucaggauaauaucu

SEQ ID NO: 1901190 - RNA, 19 nt, Artificial Sequence
  Description of Artificial Sequence: Synthetic oligonucleotide
  Sense strand starting at position 637 of SEQ ID NO: 1879358
cugagaaacucuuauuuag

SEQ ID NO: 1901191 - RNA, 19 nt, Artificial Sequence
  Description of Artificial Sequence: Synthetic oligonucleotide
  Antisense strand to SEQ ID NO: 1901190
cuaaauaagaguuucucag

SEQ ID NO: 1901192 - RNA, 19 nt, Artificial Sequence
  Description of Artificial Sequence: Synthetic oligonucleotide
  Sense strand starting at position 773 of SEQ ID NO: 1879358
aguccaguucuccaacauu

SEQ ID NO: 1901193 - RNA, 19 nt, Artificial Sequence
  Description of Artificial Sequence: Synthetic oligonucleotide
  Antisense strand to SEQ ID NO: 1901192
aauguuggagaacuggacu

SEQ ID NO: 1901194 - RNA, 19 nt, Artificial Sequence
  Description of Artificial Sequence: Synthetic oligonucleotide
  Sense strand starting at position 789 of SEQ ID NO: 1879358
auuauauauuggcuacgau

SEQ ID NO: 1901195 - RNA, 19 nt, Artificial Sequence
  Description of Artificial Sequence: Synthetic oligonucleotide
  Antisense strand to SEQ ID NO: 1901194
aucguagccaauauauaau

SEQ ID NO: 1901196 - RNA, 19 nt, Artificial Sequence
  Description of Artificial Sequence: Synthetic oligonucleotide
  Sense strand starting at position 790 of SEQ ID NO: 1879358
uuauauauuggcuacgauu

SEQ ID NO: 1901197 - RNA, 19 nt, Artificial Sequence
  Description of Artificial Sequence: Synthetic oligonucleotide
  Antisense strand to SEQ ID NO: 1901196
aaucguagccaauauauaa

SEQ ID NO: 1901198 - RNA, 19 nt, Artificial Sequence
  Description of Artificial Sequence: Synthetic oligonucleotide
  Sense strand starting at position 792 of SEQ ID NO: 1879358
auauauuggcuacgauuaa

SEQ ID NO: 1901199 - RNA, 19 nt, Artificial Sequence
  Description of Artificial Sequence: Synthetic oligonucleotide
  Antisense strand to SEQ ID NO: 1901198
uuaaucguagccaauauau

SEQ ID NO: 1901200 - RNA, 19 nt, Artificial Sequence
  Description of Artificial Sequence: Synthetic oligonucleotide
  Sense strand starting at position 796 of SEQ ID NO: 1879358
auuggcuacgauuaaucaa

SEQ ID NO: 1901201 - RNA, 19 nt, Artificial Sequence
  Description of Artificial Sequence: Synthetic oligonucleotide
  Antisense strand to SEQ ID NO: 1901200
uugauuaaucguagccaau

SEQ ID NO: 1901202 - RNA, 19 nt, Artificial Sequence
  Description of Artificial Sequence: Synthetic oligonucleotide
  Sense strand starting at position 799 of SEQ ID NO: 1879358
ggcuacgauuaaucaagau

SEQ ID NO: 1901203 - RNA, 19 nt, Artificial Sequence
  Description of Artificial Sequence: Synthetic oligonucleotide
  Antisense strand to SEQ ID NO: 1901202
aucuugauuaaucguagcc

SEQ ID NO: 1901204 - RNA, 19 nt, Artificial Sequence
  Description of Artificial Sequence: Synthetic oligonucleotide
  Sense strand starting at position 834 of SEQ ID NO: 1879358
ugccgaaauguuucccgua

SEQ ID NO: 1901205 - RNA, 19 nt, Artificial Sequence
  Description of Artificial Sequence: Synthetic oligonucleotide
  Antisense strand to SEQ ID NO: 1901204
uacgggaaacauuucggca

SEQ ID NO: 1901206 - RNA, 19 nt, Artificial Sequence
  Description of Artificial Sequence: Synthetic oligonucleotide
  Sense strand starting at position 841 of SEQ ID NO: 1879358
auguuucccguacaauaaa

SEQ ID NO: 1901207 - RNA, 19 nt, Artificial Sequence
  Description of Artificial Sequence: Synthetic oligonucleotide
  Antisense strand to SEQ ID NO: 1901206
uuuauuguacgggaaacau

SEQ ID NO: 1901208 - RNA, 19 nt, Artificial Sequence
  Description of Artificial Sequence: Synthetic oligonucleotide
  Sense strand starting at position 894 of SEQ ID NO: 1879358
agucgaguucuuuacuaac

SEQ ID NO: 1901209 - RNA, 19 nt, Artificial Sequence
  Description of Artificial Sequence: Synthetic oligonucleotide
  Antisense strand to SEQ ID NO: 1901208
guuaguaaagaacucgacu

SEQ ID NO: 1901210 - RNA, 19 nt, Artificial Sequence
  Description of Artificial Sequence: Synthetic oligonucleotide
  Sense strand starting at position 896 of SEQ ID NO: 1879358
ucgaguucuuuacuaacaa

SEQ ID NO: 1901211 - RNA, 19 nt, Artificial Sequence
  Description of Artificial Sequence: Synthetic oligonucleotide
  Antisense strand to SEQ ID NO: 1901210
uuguuaguaaagaacucga

SEQ ID NO: 1901212 - RNA, 19 nt, Artificial Sequence
  Description of Artificial Sequence: Synthetic oligonucleotide
  Sense strand starting at position 1171 of SEQ ID NO: 1879358
ggaacuuguccgcagagaa

SEQ ID NO: 1901213 - RNA, 19 nt, Artificial Sequence
  Description of Artificial Sequence: Synthetic oligonucleotide
  Antisense strand to SEQ ID NO: 1901212
uucucugcggacaaguucc

SEQ ID NO: 1901214 - RNA, 19 nt, Artificial Sequence
  Description of Artificial Sequence: Synthetic oligonucleotide
  Sense strand starting at position 1251 of SEQ ID NO: 1879358
guaacagagcuauggaaau

SEQ ID NO: 1901215 - RNA, 19 nt, Artificial Sequence
  Description of Artificial Sequence: Synthetic oligonucleotide
  Antisense strand to SEQ ID NO: 1901214
auuuccauagcucuguuac

SEQ ID NO: 1901216 - RNA, 19 nt, Artificial Sequence
  Description of Artificial Sequence: Synthetic oligonucleotide
  Sense strand starting at position 1317 of SEQ ID NO: 1879358
ucaugaagaccuggucuca

SEQ ID NO: 1901217 - RNA, 19 nt, Artificial Sequence
  Description of Artificial Sequence: Synthetic oligonucleotide
  Antisense strand to SEQ ID NO: 1901216
ugagaccaggucuucauga

SEQ ID NO: 1901218 - RNA, 19 nt, Artificial Sequence
  Description of Artificial Sequence: Synthetic oligonucleotide
  Sense strand starting at position 1749 of SEQ ID NO: 1879358
aggaaagacuuaguugagu

SEQ ID NO: 1901219 - RNA, 19 nt, Artificial Sequence
  Description of Artificial Sequence: Synthetic oligonucleotide
  Antisense strand to SEQ ID NO: 1901218
acucaacuaagucuuuccu

SEQ ID NO: 1901220 - RNA, 19 nt, Artificial Sequence
  Description of Artificial Sequence: Synthetic oligonucleotide
  Sense strand starting at position 1794 of SEQ ID NO: 1879358
cgacuagccuagucagaaa

SEQ ID NO: 1901221 - RNA, 19 nt, Artificial Sequence
  Description of Artificial Sequence: Synthetic oligonucleotide
  Antisense strand to SEQ ID NO: 1901220
uuucugacuaggcuagucg

SEQ ID NO: 1901222 - RNA, 19 nt, Artificial Sequence
  Description of Artificial Sequence: Synthetic oligonucleotide
  Sense strand starting at position 2408 of SEQ ID NO: 1879358
aaauuaguguuagcaggga

SEQ ID NO: 1901223 - RNA, 19 nt, Artificial Sequence
  Description of Artificial Sequence: Synthetic oligonucleotide
  Antisense strand to SEQ ID NO: 1901222
ucccugcuaacacuaauuu

SEQ ID NO: 1901224 - RNA, 19 nt, Artificial Sequence
  Description of Artificial Sequence: Synthetic oligonucleotide
  Sense strand starting at position 2512 of SEQ ID NO: 1879358
cgaaauaacugccuuccaa

SEQ ID NO: 1901225 - RNA, 19 nt, Artificial Sequence
  Description of Artificial Sequence: Synthetic oligonucleotide
  Antisense strand to SEQ ID NO: 1901224
uuggaaggcaguuauuucg

SEQ ID NO: 1901226 - RNA, 19 nt, Artificial Sequence
  Description of Artificial Sequence: Synthetic oligonucleotide
  Sense strand starting at position 2576 of SEQ ID NO: 1879358
caugcauuuguguguauau

SEQ ID NO: 1901227 - RNA, 19 nt, Artificial Sequence
  Description of Artificial Sequence: Synthetic oligonucleotide
  Antisense strand to SEQ ID NO: 1901226
auauacacacaaaugcaug

SEQ ID NO: 1901228 - RNA, 19 nt, Artificial Sequence
  Description of Artificial Sequence: Synthetic oligonucleotide
  Sense strand starting at position 2685 of SEQ ID NO: 1879358
gugcuauagguauauacca

SEQ ID NO: 1901229 - RNA, 19 nt, Artificial Sequence
  Description of Artificial Sequence: Synthetic oligonucleotide
  Antisense strand to SEQ ID NO: 1901228
ugguauauaccuauagcac

SEQ ID NO: 1901230 - RNA, 19 nt, Artificial Sequence
  Description of Artificial Sequence: Synthetic oligonucleotide
  Sense strand starting at position 2693 of SEQ ID NO: 1879358
gguauauaccagugaauau

SEQ ID NO: 1901231 - RNA, 19 nt, Artificial Sequence
  Description of Artificial Sequence: Synthetic oligonucleotide
  Antisense strand to SEQ ID NO: 1901230
auauucacugguauauacc

SEQ ID NO: 1901232 - RNA, 19 nt, Artificial Sequence
  Description of Artificial Sequence: Synthetic oligonucleotide
  Sense strand starting at position 2824 of SEQ ID NO: 1879358
agugaaagaugccuguaac

SEQ ID NO: 1901233 - RNA, 19 nt, Artificial Sequence
  Description of Artificial Sequence: Synthetic oligonucleotide
  Antisense strand to SEQ ID NO: 1901232
guuacaggcaucuuucacu

SEQ ID NO: 1901234 - RNA, 19 nt, Artificial Sequence
  Description of Artificial Sequence: Synthetic oligonucleotide
  Sense strand starting at position 2827 of SEQ ID NO: 1879358
gaaagaugccuguaaccac

SEQ ID NO: 1901235 - RNA, 19 nt, Artificial Sequence
  Description of Artificial Sequence: Synthetic oligonucleotide
  Antisense strand to SEQ ID NO: 1901234
gugguuacaggcaucuuuc

SEQ ID NO: 1901236 - RNA, 19 nt, Artificial Sequence
  Description of Artificial Sequence: Synthetic oligonucleotide
  Sense strand starting at position 2842 of SEQ ID NO: 1879358
ccacauccgccagagauga

SEQ ID NO: 1901237 - RNA, 19 nt, Artificial Sequence
  Description of Artificial Sequence: Synthetic oligonucleotide
  Antisense strand to SEQ ID NO: 1901236
ucaucucuggcggaugugg

SEQ ID NO: 1901238 - RNA, 19 nt, Artificial Sequence
  Description of Artificial Sequence: Synthetic oligonucleotide
  Sense strand starting at position 2864 of SEQ ID NO: 1879358
cuguuaauagauugaagua

SEQ ID NO: 1901239 - RNA, 19 nt, Artificial Sequence
  Description of Artificial Sequence: Synthetic oligonucleotide
  Antisense strand to SEQ ID NO: 1901238
uacuucaaucuauuaacag

SEQ ID NO: 1901240 - RNA, 19 nt, Artificial Sequence
  Description of Artificial Sequence: Synthetic oligonucleotide
  Sense strand starting at position 2876 of SEQ ID NO: 1879358
ugaaguauauuauuccaga

SEQ ID NO: 1901241 - RNA, 19 nt, Artificial Sequence
  Description of Artificial Sequence: Synthetic oligonucleotide
  Antisense strand to SEQ ID NO: 1901240
ucuggaauaauauacuuca

SEQ ID NO: 1901242 - RNA, 19 nt, Artificial Sequence
  Description of Artificial Sequence: Synthetic oligonucleotide
  Sense strand starting at position 2966 of SEQ ID NO: 1879358
augguauaaguugaacgua

SEQ ID NO: 1901243 - RNA, 19 nt, Artificial Sequence
  Description of Artificial Sequence: Synthetic oligonucleotide
  Antisense strand to SEQ ID NO: 1901242
uacguucaacuuauaccau

SEQ ID NO: 1901244 - RNA, 19 nt, Artificial Sequence
  Description of Artificial Sequence: Synthetic oligonucleotide
  Sense strand starting at position 2988 of SEQ ID NO: 1879358
ccauguuaauacguagaaa

SEQ ID NO: 1901245 - RNA, 19 nt, Artificial Sequence
  Description of Artificial Sequence: Synthetic oligonucleotide
  Antisense strand to SEQ ID NO: 1901244
uuucuacguauuaacaugg

SEQ ID NO: 1901246 - RNA, 19 nt, Artificial Sequence
  Description of Artificial Sequence: Synthetic oligonucleotide
  Sense strand starting at position 2991 of SEQ ID NO: 1879358
uguuaauacguagaaaucu

SEQ ID NO: 1901247 - RNA, 19 nt, Artificial Sequence
  Description of Artificial Sequence: Synthetic oligonucleotide
  Antisense strand to SEQ ID NO: 1901246
agauuucuacguauuaaca

SEQ ID NO: 1901248 - RNA, 19 nt, Artificial Sequence
  Description of Artificial Sequence: Synthetic oligonucleotide
  Sense strand starting at position 3057 of SEQ ID NO: 1879358
agauuuggaugucaucaac

SEQ ID NO: 1901249 - RNA, 19 nt, Artificial Sequence
  Description of Artificial Sequence: Synthetic oligonucleotide
  Antisense strand to SEQ ID NO: 1901248
guugaugacauccaaaucu

SEQ ID NO: 1901250 - RNA, 19 nt, Artificial Sequence
  Description of Artificial Sequence: Synthetic oligonucleotide
  Sense strand starting at position 3104 of SEQ ID NO: 1879358
ggagcuaacuacccagauu

SEQ ID NO: 1901251 - RNA, 19 nt, Artificial Sequence
  Description of Artificial Sequence: Synthetic oligonucleotide
  Antisense strand to SEQ ID NO: 1901250
aaucuggguaguuagcucc

SEQ ID NO: 1901252 - RNA, 19 nt, Artificial Sequence
  Description of Artificial Sequence: Synthetic oligonucleotide
  Sense strand starting at position 3187 of SEQ ID NO: 1879358
ccuugaaacuauguggaaa

SEQ ID NO: 1901253 - RNA, 19 nt, Artificial Sequence
  Description of Artificial Sequence: Synthetic oligonucleotide
  Antisense strand to SEQ ID NO: 1901252
uuuccacauaguuucaagg

SEQ ID NO: 1901254 - RNA, 19 nt, Artificial Sequence
  Description of Artificial Sequence: Synthetic oligonucleotide
  Sense strand starting at position 3234 of SEQ ID NO: 1879358
cagcgaugagucuaggaaa

SEQ ID NO: 1901255 - RNA, 19 nt, Artificial Sequence
  Description of Artificial Sequence: Synthetic oligonucleotide
  Antisense strand to SEQ ID NO: 1901254
uuuccuagacucaucgcug

SEQ ID NO: 1901256 - RNA, 19 nt, Artificial Sequence
  Description of Artificial Sequence: Synthetic oligonucleotide
  Sense strand starting at position 3387 of SEQ ID NO: 1879358
cugggaccuuguuugagua

SEQ ID NO: 1901257 - RNA, 19 nt, Artificial Sequence
  Description of Artificial Sequence: Synthetic oligonucleotide
  Antisense strand to SEQ ID NO: 1901256
uacucaaacaaggucccag

SEQ ID NO: 1901258 - RNA, 19 nt, Artificial Sequence
  Description of Artificial Sequence: Synthetic oligonucleotide
  Sense strand starting at position 3388 of SEQ ID NO: 1879358
ugggaccuuguuugaguaa

SEQ ID NO: 1901259 - RNA, 19 nt, Artificial Sequence
  Description of Artificial Sequence: Synthetic oligonucleotide
  Antisense strand to SEQ ID NO: 1901258
uuacucaaacaagguccca

SEQ ID NO: 1901260 - RNA, 19 nt, Artificial Sequence
  Description of Artificial Sequence: Synthetic oligonucleotide
  Sense strand starting at position 3419 of SEQ ID NO: 1879358
cuguuuaagagugacagua

SEQ ID NO: 1901261 - RNA, 19 nt, Artificial Sequence
  Description of Artificial Sequence: Synthetic oligonucleotide
  Antisense strand to SEQ ID NO: 1901260
uacugucacucuuaaacag

SEQ ID NO: 1901262 - RNA, 19 nt, Artificial Sequence
  Description of Artificial Sequence: Synthetic oligonucleotide
  Sense strand starting at position 3451 of SEQ ID NO: 1879358
agaacucugucuuugaagu

SEQ ID NO: 1901263 - RNA, 19 nt, Artificial Sequence
  Description of Artificial Sequence: Synthetic oligonucleotide
  Antisense strand to SEQ ID NO: 1901262
acuucaaagacagaguucu

SEQ ID NO: 1901264 - RNA, 19 nt, Artificial Sequence
  Description of Artificial Sequence: Synthetic oligonucleotide
  Sense strand starting at position 3622 of SEQ ID NO: 1879358
guuacauaauagucacuga

SEQ ID NO: 1901265 - RNA, 19 nt, Artificial Sequence
  Description of Artificial Sequence: Synthetic oligonucleotide
  Antisense strand to SEQ ID NO: 1901264
ucagugacuauuauguaac

SEQ ID NO: 1901266 - RNA, 19 nt, Artificial Sequence
  Description of Artificial Sequence: Synthetic oligonucleotide
  Sense strand starting at position 81 of SEQ ID NO: 1879359
ugacuuaaucccugauugu

SEQ ID NO: 1901267 - RNA, 19 nt, Artificial Sequence
  Description of Artificial Sequence: Synthetic oligonucleotide
  Antisense strand to SEQ ID NO: 1901266
acaaucagggauuaaguca

SEQ ID NO: 1901268 - RNA, 19 nt, Artificial Sequence
  Description of Artificial Sequence: Synthetic oligonucleotide
  Sense strand starting at position 350 of SEQ ID NO: 1879359
auagacagagucuguauau

SEQ ID NO: 1901269 - RNA, 19 nt, Artificial Sequence
  Description of Artificial Sequence: Synthetic oligonucleotide
  Antisense strand to SEQ ID NO: 1901268
auauacagacucugucuau

SEQ ID NO: 1901270 - RNA, 19 nt, Artificial Sequence
  Description of Artificial Sequence: Synthetic oligonucleotide
  Sense strand starting at position 351 of SEQ ID NO: 1879359
uagacagagucuguauauc

SEQ ID NO: 1901271 - RNA, 19 nt, Artificial Sequence
  Description of Artificial Sequence: Synthetic oligonucleotide
  Antisense strand to SEQ ID NO: 1901270
gauauacagacucugucua

SEQ ID NO: 1901272 - RNA, 19 nt, Artificial Sequence
  Description of Artificial Sequence: Synthetic oligonucleotide
  Sense strand starting at position 378 of SEQ ID NO: 1879359
acuggaaugcaguagcuau

SEQ ID NO: 1901273 - RNA, 19 nt, Artificial Sequence
  Description of Artificial Sequence: Synthetic oligonucleotide
  Antisense strand to SEQ ID NO: 1901272
auagcuacugcauuccagu

SEQ ID NO: 1901274 - RNA, 19 nt, Artificial Sequence
  Description of Artificial Sequence: Synthetic oligonucleotide
  Sense strand starting at position 403 of SEQ ID NO: 1879359
gugugaugacagcacacua

SEQ ID NO: 1901275 - RNA, 19 nt, Artificial Sequence
  Description of Artificial Sequence: Synthetic oligonucleotide
  Antisense strand to SEQ ID NO: 1901274
uagugugcugucaucacac

SEQ ID NO: 1901276 - RNA, 19 nt, Artificial Sequence
  Description of Artificial Sequence: Synthetic oligonucleotide
  Sense strand starting at position 929 of SEQ ID NO: 1879359
gccauaauuucucagggaa

SEQ ID NO: 1901277 - RNA, 19 nt, Artificial Sequence
  Description of Artificial Sequence: Synthetic oligonucleotide
  Antisense strand to SEQ ID NO: 1901276
uucccugagaaauuauggc

SEQ ID NO: 1901278 - RNA, 19 nt, Artificial Sequence
  Description of Artificial Sequence: Synthetic oligonucleotide
  Sense strand starting at position 1075 of SEQ ID NO: 1879359
gggcucaucuaggcuggaa

SEQ ID NO: 1901279 - RNA, 19 nt, Artificial Sequence
  Description of Artificial Sequence: Synthetic oligonucleotide
  Antisense strand to SEQ ID NO: 1901278
uuccagccuagaugagccc

SEQ ID NO: 1901280 - RNA, 19 nt, Artificial Sequence
  Description of Artificial Sequence: Synthetic oligonucleotide
  Sense strand starting at position 1326 of SEQ ID NO: 1879359
cugaaagaugcaugaauau

SEQ ID NO: 1901281 - RNA, 19 nt, Artificial Sequence
  Description of Artificial Sequence: Synthetic oligonucleotide
  Antisense strand to SEQ ID NO: 1901280
auauucaugcaucuuucag

SEQ ID NO: 1901282 - RNA, 19 nt, Artificial Sequence
  Description of Artificial Sequence: Synthetic oligonucleotide
  Sense strand starting at position 1369 of SEQ ID NO: 1879359
uccaaaugagauugcuaac

SEQ ID NO: 1901283 - RNA, 19 nt, Artificial Sequence
  Description of Artificial Sequence: Synthetic oligonucleotide
  Antisense strand to SEQ ID NO: 1901282
guuagcaaucucauuugga

SEQ ID NO: 1901284 - RNA, 19 nt, Artificial Sequence
  Description of Artificial Sequence: Synthetic oligonucleotide
  Sense strand starting at position 1446 of SEQ ID NO: 1879359
uccagagauccuugcagag

SEQ ID NO: 1901285 - RNA, 19 nt, Artificial Sequence
  Description of Artificial Sequence: Synthetic oligonucleotide
  Antisense strand to SEQ ID NO: 1901284
cucugcaaggaucucugga

SEQ ID NO: 1901286 - RNA, 19 nt, Artificial Sequence
  Description of Artificial Sequence: Synthetic oligonucleotide
  Sense strand starting at position 1470 of SEQ ID NO: 1879359
ugcaguucucguucaggca

SEQ ID NO: 1901287 - RNA, 19 nt, Artificial Sequence
  Description of Artificial Sequence: Synthetic oligonucleotide
  Antisense strand to SEQ ID NO: 1901286
ugccugaacgagaacugca

SEQ ID NO: 1901288 - RNA, 19 nt, Artificial Sequence
  Description of Artificial Sequence: Synthetic oligonucleotide
  Sense strand starting at position 1961 of SEQ ID NO: 1879359
ggugguugugaaaguccga

SEQ ID NO: 1901289 - RNA, 19 nt, Artificial Sequence
  Description of Artificial Sequence: Synthetic oligonucleotide
  Antisense strand to SEQ ID NO: 1901288
ucggacuuucacaaccacc

SEQ ID NO: 1901290 - RNA, 19 nt, Artificial Sequence
  Description of Artificial Sequence: Synthetic oligonucleotide
  Sense strand starting at position 2089 of SEQ ID NO: 1879359
cggagauggagcuagacuu

SEQ ID NO: 1901291 - RNA, 19 nt, Artificial Sequence
  Description of Artificial Sequence: Synthetic oligonucleotide
  Antisense strand to SEQ ID NO: 1901290
aagucuagcuccaucuccg

SEQ ID NO: 1901292 - RNA, 19 nt, Artificial Sequence
  Description of Artificial Sequence: Synthetic oligonucleotide
  Sense strand starting at position 2189 of SEQ ID NO: 1879359
cuggauuguacugggauaa

SEQ ID NO: 1901293 - RNA, 19 nt, Artificial Sequence
  Description of Artificial Sequence: Synthetic oligonucleotide
  Antisense strand to SEQ ID NO: 1901292
uuaucccaguacaauccag

SEQ ID NO: 1901294 - RNA, 19 nt, Artificial Sequence
  Description of Artificial Sequence: Synthetic oligonucleotide
  Sense strand starting at position 2190 of SEQ ID NO: 1879359
uggauuguacugggauaag

SEQ ID NO: 1901295 - RNA, 19 nt, Artificial Sequence
  Description of Artificial Sequence: Synthetic oligonucleotide
  Antisense strand to SEQ ID NO: 1901294
cuuaucccaguacaaucca

SEQ ID NO: 1901296 - RNA, 19 nt, Artificial Sequence
  Description of Artificial Sequence: Synthetic oligonucleotide
  Sense strand starting at position 2261 of SEQ ID NO: 1879359
gcuaucaaagcuuaauaga

SEQ ID NO: 1901297 - RNA, 19 nt, Artificial Sequence
  Description of Artificial Sequence: Synthetic oligonucleotide
  Antisense strand to SEQ ID NO: 1901296
ucuauuaagcuuugauagc

SEQ ID NO: 1901298 - RNA, 19 nt, Artificial Sequence
  Description of Artificial Sequence: Synthetic oligonucleotide
  Sense strand starting at position 2435 of SEQ ID NO: 1879359
uugugcauuucuguuugga

SEQ ID NO: 1901299 - RNA, 19 nt, Artificial Sequence
  Description of Artificial Sequence: Synthetic oligonucleotide
  Antisense strand to SEQ ID NO: 1901298
uccaaacagaaaugcacaa

SEQ ID NO: 1901300 - RNA, 19 nt, Artificial Sequence
  Description of Artificial Sequence: Synthetic oligonucleotide
  Sense strand starting at position 2502 of SEQ ID NO: 1879359
ugugcuuuaaagugaugga

SEQ ID NO: 1901301 - RNA, 19 nt, Artificial Sequence
  Description of Artificial Sequence: Synthetic oligonucleotide
  Antisense strand to SEQ ID NO: 1901300
uccaucacuuuaaagcaca

SEQ ID NO: 1901302 - RNA, 19 nt, Artificial Sequence
  Description of Artificial Sequence: Synthetic oligonucleotide
  Sense strand starting at position 2530 of SEQ ID NO: 1879359
aaaccauugguucgagauu

SEQ ID NO: 1901303 - RNA, 19 nt, Artificial Sequence
  Description of Artificial Sequence: Synthetic oligonucleotide
  Antisense strand to SEQ ID NO: 1901302
aaucucgaaccaaugguuu

SEQ ID NO: 1901304 - RNA, 19 nt, Artificial Sequence
  Description of Artificial Sequence: Synthetic oligonucleotide
  Sense strand starting at position 2642 of SEQ ID NO: 1879359
uuggucuuuguguaagaaa

SEQ ID NO: 1901305 - RNA, 19 nt, Artificial Sequence
  Description of Artificial Sequence: Synthetic oligonucleotide
  Antisense strand to SEQ ID NO: 1901304
uuucuuacacaaagaccaa

SEQ ID NO: 1901306 - RNA, 19 nt, Artificial Sequence
  Description of Artificial Sequence: Synthetic oligonucleotide
  Sense strand starting at position 2658 of SEQ ID NO: 1879359
aaauauaucuggucagagc

SEQ ID NO: 1901307 - RNA, 19 nt, Artificial Sequence
  Description of Artificial Sequence: Synthetic oligonucleotide
  Antisense strand to SEQ ID NO: 1901306
gcucugaccagauauauuu

SEQ ID NO: 1901308 - RNA, 19 nt, Artificial Sequence
  Description of Artificial Sequence: Synthetic oligonucleotide
  Sense strand starting at position 2659 of SEQ ID NO: 1879359
aauauaucuggucagagcu

SEQ ID NO: 1901309 - RNA, 19 nt, Artificial Sequence
  Description of Artificial Sequence: Synthetic oligonucleotide
  Antisense strand to SEQ ID NO: 1901308
agcucugaccagauauauu

SEQ ID NO: 1901310 - RNA, 19 nt, Artificial Sequence
  Description of Artificial Sequence: Synthetic oligonucleotide
  Sense strand starting at position 2754 of SEQ ID NO: 1879359
augggaaauugucccauca

SEQ ID NO: 1901311 - RNA, 19 nt, Artificial Sequence
  Description of Artificial Sequence: Synthetic oligonucleotide
  Antisense strand to SEQ ID NO: 1901310
ugaugggacaauuucccau

SEQ ID NO: 1901312 - RNA, 19 nt, Artificial Sequence
  Description of Artificial Sequence: Synthetic oligonucleotide
  Sense strand starting at position 2880 of SEQ ID NO: 1879359
guaugaaagagcuguugaa

SEQ ID NO: 1901313 - RNA, 19 nt, Artificial Sequence
  Description of Artificial Sequence: Synthetic oligonucleotide
  Antisense strand to SEQ ID NO: 1901312
uucaacagcucuuucauac

SEQ ID NO: 1901314 - RNA, 19 nt, Artificial Sequence
  Description of Artificial Sequence: Synthetic oligonucleotide
  Sense strand starting at position 3026 of SEQ ID NO: 1879359
uuaggagaaagcuguuuga

SEQ ID NO: 1901315 - RNA, 19 nt, Artificial Sequence
  Description of Artificial Sequence: Synthetic oligonucleotide
  Antisense strand to SEQ ID NO: 1901314
ucaaacagcuuucuccuaa

SEQ ID NO: 1901316 - RNA, 19 nt, Artificial Sequence
  Description of Artificial Sequence: Synthetic oligonucleotide
  Sense strand starting at position 3029 of SEQ ID NO: 1879359
ggagaaagcuguuugagaa

SEQ ID NO: 1901317 - RNA, 19 nt, Artificial Sequence
  Description of Artificial Sequence: Synthetic oligonucleotide
  Antisense strand to SEQ ID NO: 1901316
uucucaaacagcuuucucc

SEQ ID NO: 1901318 - RNA, 19 nt, Artificial Sequence
  Description of Artificial Sequence: Synthetic oligonucleotide
  Sense strand starting at position 3030 of SEQ ID NO: 1879359
gagaaagcuguuugagaac

SEQ ID NO: 1901319 - RNA, 19 nt, Artificial Sequence
  Description of Artificial Sequence: Synthetic oligonucleotide
  Antisense strand to SEQ ID NO: 1901318
guucucaaacagcuuucuc

SEQ ID NO: 1901320 - RNA, 19 nt, Artificial Sequence
  Description of Artificial Sequence: Synthetic oligonucleotide
  Sense strand starting at position 3039 of SEQ ID NO: 1879359
guuugagaaccauguauaa

SEQ ID NO: 1901321 - RNA, 19 nt, Artificial Sequence
  Description of Artificial Sequence: Synthetic oligonucleotide
  Antisense strand to SEQ ID NO: 1901320
uuauacaugguucucaaac

SEQ ID NO: 1901322 - RNA, 19 nt, Artificial Sequence
  Description of Artificial Sequence: Synthetic oligonucleotide
  Sense strand starting at position 3096 of SEQ ID NO: 1879359
uucguuuaugcacauuaau

SEQ ID NO: 1901323 - RNA, 19 nt, Artificial Sequence
  Description of Artificial Sequence: Synthetic oligonucleotide
  Antisense strand to SEQ ID NO: 1901322
auuaaugugcauaaacgaa

SEQ ID NO: 1901324 - RNA, 19 nt, Artificial Sequence
  Description of Artificial Sequence: Synthetic oligonucleotide
  Sense strand starting at position 3295 of SEQ ID NO: 1879359
gguggaccuugacuuguau

SEQ ID NO: 1901325 - RNA, 19 nt, Artificial Sequence
  Description of Artificial Sequence: Synthetic oligonucleotide
  Antisense strand to SEQ ID NO: 1901324
auacaagucaagguccacc

SEQ ID NO: 1901326 - RNA, 19 nt, Artificial Sequence
  Description of Artificial Sequence: Synthetic oligonucleotide
  Sense strand starting at position 3397 of SEQ ID NO: 1879359
auuauaaaguucucgaggu

SEQ ID NO: 1901327 - RNA, 19 nt, Artificial Sequence
  Description of Artificial Sequence: Synthetic oligonucleotide
  Antisense strand to SEQ ID NO: 1901326
accucgagaacuuuauaau

SEQ ID NO: 1901328 - RNA, 19 nt, Artificial Sequence
  Description of Artificial Sequence: Synthetic oligonucleotide
  Sense strand starting at position 3399 of SEQ ID NO: 1879359
uauaaaguucucgaggucu

SEQ ID NO: 1901329 - RNA, 19 nt, Artificial Sequence
  Description of Artificial Sequence: Synthetic oligonucleotide
  Antisense strand to SEQ ID NO: 1901328
agaccucgagaacuuuaua

SEQ ID NO: 1901330 - RNA, 19 nt, Artificial Sequence
  Description of Artificial Sequence: Synthetic oligonucleotide
  Sense strand starting at position 3473 of SEQ ID NO: 1879359
ucgcucuaucguguagacu

SEQ ID NO: 1901331 - RNA, 19 nt, Artificial Sequence
  Description of Artificial Sequence: Synthetic oligonucleotide
  Antisense strand to SEQ ID NO: 1901330
agucuacacgauagagcga

SEQ ID NO: 1901332 - RNA, 19 nt, Artificial Sequence
  Description of Artificial Sequence: Synthetic oligonucleotide
  Sense strand starting at position 3486 of SEQ ID NO: 1879359
uagacuuuggagcagugau

SEQ ID NO: 1901333 - RNA, 19 nt, Artificial Sequence
  Description of Artificial Sequence: Synthetic oligonucleotide
  Antisense strand to SEQ ID NO: 1901332
aucacugcuccaaagucua

SEQ ID NO: 1901334 - RNA, 19 nt, Artificial Sequence
  Description of Artificial Sequence: Synthetic oligonucleotide
  Sense strand starting at position 3658 of SEQ ID NO: 1879359
ugaucuaagucacugauga

SEQ ID NO: 1901335 - RNA, 19 nt, Artificial Sequence
  Description of Artificial Sequence: Synthetic oligonucleotide
  Antisense strand to SEQ ID NO: 1901334
ucaucagugacuuagauca

SEQ ID NO: 1901336 - RNA, 19 nt, Artificial Sequence
  Description of Artificial Sequence: Synthetic oligonucleotide
  Sense strand starting at position 3659 of SEQ ID NO: 1879359
gaucuaagucacugaugag

SEQ ID NO: 1901337 - RNA, 19 nt, Artificial Sequence
  Description of Artificial Sequence: Synthetic oligonucleotide
  Antisense strand to SEQ ID NO: 1901336
cucaucagugacuuagauc

SEQ ID NO: 1901338 - RNA, 19 nt, Artificial Sequence
  Description of Artificial Sequence: Synthetic oligonucleotide
  Sense strand starting at position 3727 of SEQ ID NO: 1879359
uugggcagacuaugagaau

SEQ ID NO: 1901339 - RNA, 19 nt, Artificial Sequence
  Description of Artificial Sequence: Synthetic oligonucleotide
  Antisense strand to SEQ ID NO: 1901338
auucucauagucugcccaa

SEQ ID NO: 1901340 - RNA, 19 nt, Artificial Sequence
  Description of Artificial Sequence: Synthetic oligonucleotide
  Sense strand starting at position 3778 of SEQ ID NO: 1879359
ugauauuggugaucuagua

SEQ ID NO: 1901341 - RNA, 19 nt, Artificial Sequence
  Description of Artificial Sequence: Synthetic oligonucleotide
  Antisense strand to SEQ ID NO: 1901340
uacuagaucaccaauauca

SEQ ID NO: 1901342 - RNA, 19 nt, Artificial Sequence
  Description of Artificial Sequence: Synthetic oligonucleotide
  Sense strand starting at position 3825 of SEQ ID NO: 1879359
ugguuagaggguuggauca

SEQ ID NO: 1901343 - RNA, 19 nt, Artificial Sequence
  Description of Artificial Sequence: Synthetic oligonucleotide
  Antisense strand to SEQ ID NO: 1901342
ugauccaacccucuaacca

SEQ ID NO: 1901344 - RNA, 19 nt, Artificial Sequence
  Description of Artificial Sequence: Synthetic oligonucleotide
  Sense strand starting at position 3837 of SEQ ID NO: 1879359
uggaucagucucuggaguu

SEQ ID NO: 1901345 - RNA, 19 nt, Artificial Sequence
  Description of Artificial Sequence: Synthetic oligonucleotide
  Antisense strand to SEQ ID NO: 1901344
aacuccagagacugaucca

SEQ ID NO: 1901346 - RNA, 19 nt, Artificial Sequence
  Description of Artificial Sequence: Synthetic oligonucleotide
  Sense strand starting at position 154 of SEQ ID NO: 1879360
gugagauguuaaccucaac

SEQ ID NO: 1901347 - RNA, 19 nt, Artificial Sequence
  Description of Artificial Sequence: Synthetic oligonucleotide
  Antisense strand to SEQ ID NO: 1901346
guugagguuaacaucucac

SEQ ID NO: 1901348 - RNA, 19 nt, Artificial Sequence
  Description of Artificial Sequence: Synthetic oligonucleotide
  Sense strand starting at position 172 of SEQ ID NO: 1879360
cuuuaagguuguguauuua

SEQ ID NO: 1901349 - RNA, 19 nt, Artificial Sequence
  Description of Artificial Sequence: Synthetic oligonucleotide
  Antisense strand to SEQ ID NO: 1901348
uaaauacacaaccuuaaag

SEQ ID NO: 1901350 - RNA, 19 nt, Artificial Sequence
  Description of Artificial Sequence: Synthetic oligonucleotide
  Sense strand starting at position 672 of SEQ ID NO: 1879360
ugcagcuuuguuuauuuga

SEQ ID NO: 1901351 - RNA, 19 nt, Artificial Sequence
  Description of Artificial Sequence: Synthetic oligonucleotide
  Antisense strand to SEQ ID NO: 1901350
ucaaauaaacaaagcugca

SEQ ID NO: 1901352 - RNA, 19 nt, Artificial Sequence
  Description of Artificial Sequence: Synthetic oligonucleotide
  Sense strand starting at position 1133 of SEQ ID NO: 1879360
ggagaaauuacagguguuu

SEQ ID NO: 1901353 - RNA, 19 nt, Artificial Sequence
  Description of Artificial Sequence: Synthetic oligonucleotide
  Antisense strand to SEQ ID NO: 1901352
aaacaccuguaauuucucc

SEQ ID NO: 1901354 - RNA, 19 nt, Artificial Sequence
  Description of Artificial Sequence: Synthetic oligonucleotide
  Sense strand starting at position 1135 of SEQ ID NO: 1879360
agaaauuacagguguuuga

SEQ ID NO: 1901355 - RNA, 19 nt, Artificial Sequence
  Description of Artificial Sequence: Synthetic oligonucleotide
  Antisense strand to SEQ ID NO: 1901354
ucaaacaccuguaauuucu

SEQ ID NO: 1901356 - RNA, 19 nt, Artificial Sequence
  Description of Artificial Sequence: Synthetic oligonucleotide
  Sense strand starting at position 1138 of SEQ ID NO: 1879360
aauuacagguguuugauau

SEQ ID NO: 1901357 - RNA, 19 nt, Artificial Sequence
  Description of Artificial Sequence: Synthetic oligonucleotide
  Antisense strand to SEQ ID NO: 1901356
auaucaaacaccuguaauu

SEQ ID NO: 1901358 - RNA, 19 nt, Artificial Sequence
  Description of Artificial Sequence: Synthetic oligonucleotide
  Sense strand starting at position 1257 of SEQ ID NO: 1879360
agaugaaucuuaucuagca

SEQ ID NO: 1901359 - RNA, 19 nt, Artificial Sequence
  Description of Artificial Sequence: Synthetic oligonucleotide
  Antisense strand to SEQ ID NO: 1901358
ugcuagauaagauucaucu

SEQ ID NO: 1901360 - RNA, 19 nt, Artificial Sequence
  Description of Artificial Sequence: Synthetic oligonucleotide
  Sense strand starting at position 1306 of SEQ ID NO: 1879360
auaaucagauuauugguca

SEQ ID NO: 1901361 - RNA, 19 nt, Artificial Sequence
  Description of Artificial Sequence: Synthetic oligonucleotide
  Antisense strand to SEQ ID NO: 1901360
ugaccaauaaucugauuau

SEQ ID NO: 1901362 - RNA, 19 nt, Artificial Sequence
  Description of Artificial Sequence: Synthetic oligonucleotide
  Sense strand starting at position 1309 of SEQ ID NO: 1879360
aucagauuauuggucauag

SEQ ID NO: 1901363 - RNA, 19 nt, Artificial Sequence
  Description of Artificial Sequence: Synthetic oligonucleotide
  Antisense strand to SEQ ID NO: 1901362
cuaugaccaauaaucugau

SEQ ID NO: 1901364 - RNA, 19 nt, Artificial Sequence
  Description of Artificial Sequence: Synthetic oligonucleotide
  Sense strand starting at position 1310 of SEQ ID NO: 1879360
ucagauuauuggucauaga

SEQ ID NO: 1901365 - RNA, 19 nt, Artificial Sequence
  Description of Artificial Sequence: Synthetic oligonucleotide
  Antisense strand to SEQ ID NO: 1901364
ucuaugaccaauaaucuga

SEQ ID NO: 1901366 - RNA, 19 nt, Artificial Sequence
  Description of Artificial Sequence: Synthetic oligonucleotide
  Sense strand starting at position 1318 of SEQ ID NO: 1879360
uuggucauagaugggaauu

SEQ ID NO: 1901367 - RNA, 19 nt, Artificial Sequence
  Description of Artificial Sequence: Synthetic oligonucleotide
  Antisense strand to SEQ ID NO: 1901366
aauucccaucuaugaccaa

SEQ ID NO: 1901368 - RNA, 19 nt, Artificial Sequence
  Description of Artificial Sequence: Synthetic oligonucleotide
  Sense strand starting at position 1320 of SEQ ID NO: 1879360
ggucauagaugggaauuua

SEQ ID NO: 1901369 - RNA, 19 nt, Artificial Sequence
  Description of Artificial Sequence: Synthetic oligonucleotide
  Antisense strand to SEQ ID NO: 1901368
uaaauucccaucuaugacc

SEQ ID NO: 1901370 - RNA, 19 nt, Artificial Sequence
  Description of Artificial Sequence: Synthetic oligonucleotide
  Sense strand starting at position 1398 of SEQ ID NO: 1879360
aagugacuugcccaacagu

SEQ ID NO: 1901371 - RNA, 19 nt, Artificial Sequence
  Description of Artificial Sequence: Synthetic oligonucleotide
  Antisense strand to SEQ ID NO: 1901370
acuguugggcaagucacuu

SEQ ID NO: 1901372 - RNA, 19 nt, Artificial Sequence
  Description of Artificial Sequence: Synthetic oligonucleotide
  Sense strand starting at position 1401 of SEQ ID NO: 1879360
ugacuugcccaacagugaa

SEQ ID NO: 1901373 - RNA, 19 nt, Artificial Sequence
  Description of Artificial Sequence: Synthetic oligonucleotide
  Antisense strand to SEQ ID NO: 1901372
uucacuguugggcaaguca

SEQ ID NO: 1901374 - RNA, 19 nt, Artificial Sequence
  Description of Artificial Sequence: Synthetic oligonucleotide
  Sense strand starting at position 1562 of SEQ ID NO: 1879360
gugucaaccuuauuuaugu

SEQ ID NO: 1901375 - RNA, 19 nt, Artificial Sequence
  Description of Artificial Sequence: Synthetic oligonucleotide
  Antisense strand to SEQ ID NO: 1901374
acauaaauaagguugacac

SEQ ID NO: 1901376 - RNA, 19 nt, Artificial Sequence
  Description of Artificial Sequence: Synthetic oligonucleotide
  Sense strand starting at position 1716 of SEQ ID NO: 1879360
aagggaauugccuguggac

SEQ ID NO: 1901377 - RNA, 19 nt, Artificial Sequence
  Description of Artificial Sequence: Synthetic oligonucleotide
  Antisense strand to SEQ ID NO: 1901376
guccacaggcaauucccuu

SEQ ID NO: 1901378 - RNA, 19 nt, Artificial Sequence
  Description of Artificial Sequence: Synthetic oligonucleotide
  Sense strand starting at position 1780 of SEQ ID NO: 1879360
gcuacugggccacauaaua

SEQ ID NO: 1901379 - RNA, 19 nt, Artificial Sequence
  Description of Artificial Sequence: Synthetic oligonucleotide
  Antisense strand to SEQ ID NO: 1901378
uauuauguggcccaguagc

SEQ ID NO: 1901380 - RNA, 19 nt, Artificial Sequence
  Description of Artificial Sequence: Synthetic oligonucleotide
  Sense strand starting at position 2056 of SEQ ID NO: 1879360
gaguucuaggcccaggaca

SEQ ID NO: 1901381 - RNA, 19 nt, Artificial Sequence
  Description of Artificial Sequence: Synthetic oligonucleotide
  Antisense strand to SEQ ID NO: 1901380
uguccugggccuagaacuc

SEQ ID NO: 1901382 - RNA, 19 nt, Artificial Sequence
  Description of Artificial Sequence: Synthetic oligonucleotide
  Sense strand starting at position 2351 of SEQ ID NO: 1879360
gcuagaauuagguagcaaa

SEQ ID NO: 1901383 - RNA, 19 nt, Artificial Sequence
  Description of Artificial Sequence: Synthetic oligonucleotide
  Antisense strand to SEQ ID NO: 1901382
uuugcuaccuaauucuagc

SEQ ID NO: 1901384 - RNA, 19 nt, Artificial Sequence
  Description of Artificial Sequence: Synthetic oligonucleotide
  Sense strand starting at position 2459 of SEQ ID NO: 1879360
acauuugguccauguaugu

SEQ ID NO: 1901385 - RNA, 19 nt, Artificial Sequence
  Description of Artificial Sequence: Synthetic oligonucleotide
  Antisense strand to SEQ ID NO: 1901384
acauacauggaccaaaugu

SEQ ID NO: 1901386 - RNA, 19 nt, Artificial Sequence
  Description of Artificial Sequence: Synthetic oligonucleotide
  Sense strand starting at position 2557 of SEQ ID NO: 1879360
acgguauuucacuguguag

SEQ ID NO: 1901387 - RNA, 19 nt, Artificial Sequence
  Description of Artificial Sequence: Synthetic oligonucleotide
  Antisense strand to SEQ ID NO: 1901386
cuacacagugaaauaccgu

SEQ ID NO: 1901388 - RNA, 19 nt, Artificial Sequence
  Description of Artificial Sequence: Synthetic oligonucleotide
  Sense strand starting at position 2619 of SEQ ID NO: 1879360
aagccuuaggcgcuuguua

SEQ ID NO: 1901389 - RNA, 19 nt, Artificial Sequence
  Description of Artificial Sequence: Synthetic oligonucleotide
  Antisense strand to SEQ ID NO: 1901388
uaacaagcgccuaaggcuu

SEQ ID NO: 1901390 - RNA, 19 nt, Artificial Sequence
  Description of Artificial Sequence: Synthetic oligonucleotide
  Sense strand starting at position 2620 of SEQ ID NO: 1879360
agccuuaggcgcuuguuaa

SEQ ID NO: 1901391 - RNA, 19 nt, Artificial Sequence
  Description of Artificial Sequence: Synthetic oligonucleotide
  Antisense strand to SEQ ID NO: 1901390
uuaacaagcgccuaaggcu

SEQ ID NO: 1901392 - RNA, 19 nt, Artificial Sequence
  Description of Artificial Sequence: Synthetic oligonucleotide
  Sense strand starting at position 2836 of SEQ ID NO: 1879360
gcacauuucugccuuggga

SEQ ID NO: 1901393 - RNA, 19 nt, Artificial Sequence
  Description of Artificial Sequence: Synthetic oligonucleotide
  Antisense strand to SEQ ID NO: 1901392
ucccaaggcagaaaugugc

SEQ ID NO: 1901394 - RNA, 19 nt, Artificial Sequence
  Description of Artificial Sequence: Synthetic oligonucleotide
  Sense strand starting at position 2994 of SEQ ID NO: 1879360
aggagaugcaugcacacau

SEQ ID NO: 1901395 - RNA, 19 nt, Artificial Sequence
  Description of Artificial Sequence: Synthetic oligonucleotide
  Antisense strand to SEQ ID NO: 1901394
augugugcaugcaucuccu

SEQ ID NO: 1901396 - RNA, 19 nt, Artificial Sequence
  Description of Artificial Sequence: Synthetic oligonucleotide
  Sense strand starting at position 3007 of SEQ ID NO: 1879360
acacauauguguuuagaac

SEQ ID NO: 1901397 - RNA, 19 nt, Artificial Sequence
  Description of Artificial Sequence: Synthetic oligonucleotide
  Antisense strand to SEQ ID NO: 1901396
guucuaaacacauaugugu

SEQ ID NO: 1901398 - RNA, 19 nt, Artificial Sequence
  Description of Artificial Sequence: Synthetic oligonucleotide
  Sense strand starting at position 3097 of SEQ ID NO: 1879360
cuaaaucugguguaauaug

SEQ ID NO: 1901399 - RNA, 19 nt, Artificial Sequence
  Description of Artificial Sequence: Synthetic oligonucleotide
  Antisense strand to SEQ ID NO: 1901398
cauauuacaccagauuuag

SEQ ID NO: 1901400 - RNA, 19 nt, Artificial Sequence
  Description of Artificial Sequence: Synthetic oligonucleotide
  Sense strand starting at position 3130 of SEQ ID NO: 1879360
gcggccugcguauuauaaa

SEQ ID NO: 1901401 - RNA, 19 nt, Artificial Sequence
  Description of Artificial Sequence: Synthetic oligonucleotide
  Antisense strand to SEQ ID NO: 1901400
uuuauaauacgcaggccgc

SEQ ID NO: 1901402 - RNA, 19 nt, Artificial Sequence
  Description of Artificial Sequence: Synthetic oligonucleotide
  Sense strand starting at position 3236 of SEQ ID NO: 1879360
aggccuccugaguaggaau

SEQ ID NO: 1901403 - RNA, 19 nt, Artificial Sequence
  Description of Artificial Sequence: Synthetic oligonucleotide
  Antisense strand to SEQ ID NO: 1901402
auuccuacucaggaggccu

SEQ ID NO: 1901404 - RNA, 19 nt, Artificial Sequence
  Description of Artificial Sequence: Synthetic oligonucleotide
  Sense strand starting at position 3345 of SEQ ID NO: 1879360
gucaaagcuggguagagua

SEQ ID NO: 1901405 - RNA, 19 nt, Artificial Sequence
  Description of Artificial Sequence: Synthetic oligonucleotide
  Antisense strand to SEQ ID NO: 1901404
uacucuacccagcuuugac

SEQ ID NO: 1901406 - RNA, 19 nt, Artificial Sequence
  Description of Artificial Sequence: Synthetic oligonucleotide
  Sense strand starting at position 3347 of SEQ ID NO: 1879360
caaagcuggguagaguaau

SEQ ID NO: 1901407 - RNA, 19 nt, Artificial Sequence
  Description of Artificial Sequence: Synthetic oligonucleotide
  Antisense strand to SEQ ID NO: 1901406
auuacucuacccagcuuug

SEQ ID NO: 1901408 - RNA, 19 nt, Artificial Sequence
  Description of Artificial Sequence: Synthetic oligonucleotide
  Sense strand starting at position 3443 of SEQ ID NO: 1879360
agaagaaacuguucgugaa

SEQ ID NO: 1901409 - RNA, 19 nt, Artificial Sequence
  Description of Artificial Sequence: Synthetic oligonucleotide
  Antisense strand to SEQ ID NO: 1901408
uucacgaacaguuucuucu

SEQ ID NO: 1901410 - RNA, 19 nt, Artificial Sequence
  Description of Artificial Sequence: Synthetic oligonucleotide
  Sense strand starting at position 3444 of SEQ ID NO: 1879360
gaagaaacuguucgugaaa

SEQ ID NO: 1901411 - RNA, 19 nt, Artificial Sequence
  Description of Artificial Sequence: Synthetic oligonucleotide
  Antisense strand to SEQ ID NO: 1901410
uuucacgaacaguuucuuc

SEQ ID NO: 1901412 - RNA, 19 nt, Artificial Sequence
  Description of Artificial Sequence: Synthetic oligonucleotide
  Sense strand starting at position 3445 of SEQ ID NO: 1879360
aagaaacuguucgugaaau

SEQ ID NO: 1901413 - RNA, 19 nt, Artificial Sequence
  Description of Artificial Sequence: Synthetic oligonucleotide
  Antisense strand to SEQ ID NO: 1901412
auuucacgaacaguuucuu

SEQ ID NO: 1901414 - RNA, 19 nt, Artificial Sequence
  Description of Artificial Sequence: Synthetic oligonucleotide
  Sense strand starting at position 3552 of SEQ ID NO: 1879360
cgcuguaauagggauaaga

SEQ ID NO: 1901415 - RNA, 19 nt, Artificial Sequence
  Description of Artificial Sequence: Synthetic oligonucleotide
  Antisense strand to SEQ ID NO: 1901414
ucuuaucccuauuacagcg

SEQ ID NO: 1901416 - RNA, 19 nt, Artificial Sequence
  Description of Artificial Sequence: Synthetic oligonucleotide
  Sense strand starting at position 3568 of SEQ ID NO: 1879360
agacaagauguaugacagu

SEQ ID NO: 1901417 - RNA, 19 nt, Artificial Sequence
  Description of Artificial Sequence: Synthetic oligonucleotide
  Antisense strand to SEQ ID NO: 1901416
acugucauacaucuugucu

SEQ ID NO: 1901418 - RNA, 19 nt, Artificial Sequence
  Description of Artificial Sequence: Synthetic oligonucleotide
  Sense strand starting at position 3756 of SEQ ID NO: 1879360
uguggaagaugggugucaa

SEQ ID NO: 1901419 - RNA, 19 nt, Artificial Sequence
  Description of Artificial Sequence: Synthetic oligonucleotide
  Antisense strand to SEQ ID NO: 1901418
uugacacccaucuuccaca

SEQ ID NO: 1901420 - RNA, 19 nt, Artificial Sequence
  Description of Artificial Sequence: Synthetic oligonucleotide
  Sense strand starting at position 3795 of SEQ ID NO: 1879360
cucauuauucuggaguuuc

SEQ ID NO: 1901421 - RNA, 19 nt, Artificial Sequence
  Description of Artificial Sequence: Synthetic oligonucleotide
  Antisense strand to SEQ ID NO: 1901420
gaaacuccagaauaaugag

SEQ ID NO: 1901422 - RNA, 19 nt, Artificial Sequence
  Description of Artificial Sequence: Synthetic oligonucleotide
  Sense strand starting at position 3823 of SEQ ID NO: 1879360
gcaguuuauuuagcacuua

SEQ ID NO: 1901423 - RNA, 19 nt, Artificial Sequence
  Description of Artificial Sequence: Synthetic oligonucleotide
  Antisense strand to SEQ ID NO: 1901422
uaagugcuaaauaaacugc

SEQ ID NO: 1901424 - RNA, 19 nt, Artificial Sequence
  Description of Artificial Sequence: Synthetic oligonucleotide
  Sense strand starting at position 3909 of SEQ ID NO: 1879360
ugaagacugucaucugacu

SEQ ID NO: 1901425 - RNA, 19 nt, Artificial Sequence
  Description of Artificial Sequence: Synthetic oligonucleotide
  Antisense strand to SEQ ID NO: 1901424
agucagaugacagucuuca

SEQ ID NO: 1901426 - RNA, 19 nt, Artificial Sequence
  Description of Artificial Sequence: Synthetic oligonucleotide
  Sense strand starting at position 524 of SEQ ID NO: 1879361
ucucuagauguauggaaau

SEQ ID NO: 1901427 - RNA, 19 nt, Artificial Sequence
  Description of Artificial Sequence: Synthetic oligonucleotide
  Antisense strand to SEQ ID NO: 1901426
auuuccauacaucuagaga

SEQ ID NO: 1901428 - RNA, 19 nt, Artificial Sequence
  Description of Artificial Sequence: Synthetic oligonucleotide
  Sense strand starting at position 555 of SEQ ID NO: 1879361
uucugaagccuagagucau

SEQ ID NO: 1901429 - RNA, 19 nt, Artificial Sequence
  Description of Artificial Sequence: Synthetic oligonucleotide
  Antisense strand to SEQ ID NO: 1901428
augacucuaggcuucagaa

SEQ ID NO: 1901430 - RNA, 19 nt, Artificial Sequence
  Description of Artificial Sequence: Synthetic oligonucleotide
  Sense strand starting at position 559 of SEQ ID NO: 1879361
gaagccuagagucaucgua

SEQ ID NO: 1901431 - RNA, 19 nt, Artificial Sequence
  Description of Artificial Sequence: Synthetic oligonucleotide
  Antisense strand to SEQ ID NO: 1901430
uacgaugacucuaggcuuc

SEQ ID NO: 1901432 - RNA, 19 nt, Artificial Sequence
  Description of Artificial Sequence: Synthetic oligonucleotide
  Sense strand starting at position 566 of SEQ ID NO: 1879361
agagucaucguauaaacau

SEQ ID NO: 1901433 - RNA, 19 nt, Artificial Sequence
  Description of Artificial Sequence: Synthetic oligonucleotide
  Antisense strand to SEQ ID NO: 1901432
auguuuauacgaugacucu

SEQ ID NO: 1901434 - RNA, 19 nt, Artificial Sequence
  Description of Artificial Sequence: Synthetic oligonucleotide
  Sense strand starting at position 596 of SEQ ID NO: 1879361
guagauauugcauagcuau

SEQ ID NO: 1901435 - RNA, 19 nt, Artificial Sequence
  Description of Artificial Sequence: Synthetic oligonucleotide
  Antisense strand to SEQ ID NO: 1901434
auagcuaugcaauaucuac

SEQ ID NO: 1901436 - RNA, 19 nt, Artificial Sequence
  Description of Artificial Sequence: Synthetic oligonucleotide
  Sense strand starting at position 599 of SEQ ID NO: 1879361
gauauugcauagcuauaga

SEQ ID NO: 1901437 - RNA, 19 nt, Artificial Sequence
  Description of Artificial Sequence: Synthetic oligonucleotide
  Antisense strand to SEQ ID NO: 1901436
ucuauagcuaugcaauauc

SEQ ID NO: 1901438 - RNA, 19 nt, Artificial Sequence
  Description of Artificial Sequence: Synthetic oligonucleotide
  Sense strand starting at position 607 of SEQ ID NO: 1879361
auagcuauagauugauaug

SEQ ID NO: 1901439 - RNA, 19 nt, Artificial Sequence
  Description of Artificial Sequence: Synthetic oligonucleotide
  Antisense strand to SEQ ID NO: 1901438
cauaucaaucuauagcuau

SEQ ID NO: 1901440 - RNA, 19 nt, Artificial Sequence
  Description of Artificial Sequence: Synthetic oligonucleotide
  Sense strand starting at position 758 of SEQ ID NO: 1879361
gcaaauccaccagagaguu

SEQ ID NO: 1901441 - RNA, 19 nt, Artificial Sequence
  Description of Artificial Sequence: Synthetic oligonucleotide
  Antisense strand to SEQ ID NO: 1901440
aacucucugguggauuugc

SEQ ID NO: 1901442 - RNA, 19 nt, Artificial Sequence
  Description of Artificial Sequence: Synthetic oligonucleotide
  Sense strand starting at position 829 of SEQ ID NO: 1879361
cucuguuacuguucuauuu

SEQ ID NO: 1901443 - RNA, 19 nt, Artificial Sequence
  Description of Artificial Sequence: Synthetic oligonucleotide
  Antisense strand to SEQ ID NO: 1901442
aaauagaacaguaacagag

SEQ ID NO: 1901444 - RNA, 19 nt, Artificial Sequence
  Description of Artificial Sequence: Synthetic oligonucleotide
  Sense strand starting at position 929 of SEQ ID NO: 1879361
cggcccauauauccucaaa

SEQ ID NO: 1901445 - RNA, 19 nt, Artificial Sequence
  Description of Artificial Sequence: Synthetic oligonucleotide
  Antisense strand to SEQ ID NO: 1901444
uuugaggauauaugggccg

SEQ ID NO: 1901446 - RNA, 19 nt, Artificial Sequence
  Description of Artificial Sequence: Synthetic oligonucleotide
  Sense strand starting at position 994 of SEQ ID NO: 1879361
ggugaucagcuccauacca

SEQ ID NO: 1901447 - RNA, 19 nt, Artificial Sequence
  Description of Artificial Sequence: Synthetic oligonucleotide
  Antisense strand to SEQ ID NO: 1901446
ugguauggagcugaucacc

SEQ ID NO: 1901448 - RNA, 19 nt, Artificial Sequence
  Description of Artificial Sequence: Synthetic oligonucleotide
  Sense strand starting at position 1796 of SEQ ID NO: 1879361
ggcugugagcuuccuguuu

SEQ ID NO: 1901449 - RNA, 19 nt, Artificial Sequence
  Description of Artificial Sequence: Synthetic oligonucleotide
  Antisense strand to SEQ ID NO: 1901448
aaacaggaagcucacagcc

SEQ ID NO: 1901450 - RNA, 19 nt, Artificial Sequence
  Description of Artificial Sequence: Synthetic oligonucleotide
  Sense strand starting at position 1887 of SEQ ID NO: 1879361
cgacccaguuccuuccaaa

SEQ ID NO: 1901451 - RNA, 19 nt, Artificial Sequence
  Description of Artificial Sequence: Synthetic oligonucleotide
  Antisense strand to SEQ ID NO: 1901450
uuuggaaggaacugggucg

SEQ ID NO: 1901452 - RNA, 19 nt, Artificial Sequence
  Description of Artificial Sequence: Synthetic oligonucleotide
  Sense strand starting at position 1939 of SEQ ID NO: 1879361
cugcguuugaccucugugu

SEQ ID NO: 1901453 - RNA, 19 nt, Artificial Sequence
  Description of Artificial Sequence: Synthetic oligonucleotide
  Antisense strand to SEQ ID NO: 1901452
acacagaggucaaacgcag

SEQ ID NO: 1901454 - RNA, 19 nt, Artificial Sequence
  Description of Artificial Sequence: Synthetic oligonucleotide
  Sense strand starting at position 1979 of SEQ ID NO: 1879361
acagcaggguacucugaaa

SEQ ID NO: 1901455 - RNA, 19 nt, Artificial Sequence
  Description of Artificial Sequence: Synthetic oligonucleotide
  Antisense strand to SEQ ID NO: 1901454
uuucagaguacccugcugu

SEQ ID NO: 1901456 - RNA, 19 nt, Artificial Sequence
  Description of Artificial Sequence: Synthetic oligonucleotide
  Sense strand starting at position 2087 of SEQ ID NO: 1879361
aaccaaugagguugucaga

SEQ ID NO: 1901457 - RNA, 19 nt, Artificial Sequence
  Description of Artificial Sequence: Synthetic oligonucleotide
  Antisense strand to SEQ ID NO: 1901456
ucugacaaccucauugguu

SEQ ID NO: 1901458 - RNA, 19 nt, Artificial Sequence
  Description of Artificial Sequence: Synthetic oligonucleotide
  Sense strand starting at position 2156 of SEQ ID NO: 1879361
ggaggaagugguugcuaua

SEQ ID NO: 1901459 - RNA, 19 nt, Artificial Sequence
  Description of Artificial Sequence: Synthetic oligonucleotide
  Antisense strand to SEQ ID NO: 1901458
uauagcaaccacuuccucc

SEQ ID NO: 1901460 - RNA, 19 nt, Artificial Sequence
  Description of Artificial Sequence: Synthetic oligonucleotide
  Sense strand starting at position 2470 of SEQ ID NO: 1879361
gaugacauauuggaaagaa

SEQ ID NO: 1901461 - RNA, 19 nt, Artificial Sequence
  Description of Artificial Sequence: Synthetic oligonucleotide
  Antisense strand to SEQ ID NO: 1901460
uucuuuccaauaugucauc

SEQ ID NO: 1901462 - RNA, 19 nt, Artificial Sequence
  Description of Artificial Sequence: Synthetic oligonucleotide
  Sense strand starting at position 2506 of SEQ ID NO: 1879361
gucagaagaccugggcuuu

SEQ ID NO: 1901463 - RNA, 19 nt, Artificial Sequence
  Description of Artificial Sequence: Synthetic oligonucleotide
  Antisense strand to SEQ ID NO: 1901462
aaagcccaggucuucugac

SEQ ID NO: 1901464 - RNA, 19 nt, Artificial Sequence
  Description of Artificial Sequence: Synthetic oligonucleotide
  Sense strand starting at position 2507 of SEQ ID NO: 1879361
ucagaagaccugggcuuua

SEQ ID NO: 1901465 - RNA, 19 nt, Artificial Sequence
  Description of Artificial Sequence: Synthetic oligonucleotide
  Antisense strand to SEQ ID NO: 1901464
uaaagcccaggucuucuga

SEQ ID NO: 1901466 - RNA, 19 nt, Artificial Sequence
  Description of Artificial Sequence: Synthetic oligonucleotide
  Sense strand starting at position 2525 of SEQ ID NO: 1879361
agucccaguucugcgauuu

SEQ ID NO: 1901467 - RNA, 19 nt, Artificial Sequence
  Description of Artificial Sequence: Synthetic oligonucleotide
  Antisense strand to SEQ ID NO: 1901466
aaaucgcagaacugggacu

SEQ ID NO: 1901468 - RNA, 19 nt, Artificial Sequence
  Description of Artificial Sequence: Synthetic oligonucleotide
  Sense strand starting at position 2526 of SEQ ID NO: 1879361
gucccaguucugcgauuua

SEQ ID NO: 1901469 - RNA, 19 nt, Artificial Sequence
  Description of Artificial Sequence: Synthetic oligonucleotide
  Antisense strand to SEQ ID NO: 1901468
uaaaucgcagaacugggac

SEQ ID NO: 1901470 - RNA, 19 nt, Artificial Sequence
  Description of Artificial Sequence: Synthetic oligonucleotide
  Sense strand starting at position 2531 of SEQ ID NO: 1879361
aguucugcgauuuacuagu

SEQ ID NO: 1901471 - RNA, 19 nt, Artificial Sequence
  Description of Artificial Sequence: Synthetic oligonucleotide
  Antisense strand to SEQ ID NO: 1901470
acuaguaaaucgcagaacu

SEQ ID NO: 1901472 - RNA, 19 nt, Artificial Sequence
  Description of Artificial Sequence: Synthetic oligonucleotide
  Sense strand starting at position 2551 of SEQ ID NO: 1879361
guggaacuuugggcaaauu

SEQ ID NO: 1901473 - RNA, 19 nt, Artificial Sequence
  Description of Artificial Sequence: Synthetic oligonucleotide
  Antisense strand to SEQ ID NO: 1901472
aauuugcccaaaguuccac

SEQ ID NO: 1901474 - RNA, 19 nt, Artificial Sequence
  Description of Artificial Sequence: Synthetic oligonucleotide
  Sense strand starting at position 2654 of SEQ ID NO: 1879361
gugagaauccuauggaauc

SEQ ID NO: 1901475 - RNA, 19 nt, Artificial Sequence
  Description of Artificial Sequence: Synthetic oligonucleotide
  Antisense strand to SEQ ID NO: 1901474
gauuccauaggauucucac

SEQ ID NO: 1901476 - RNA, 19 nt, Artificial Sequence
  Description of Artificial Sequence: Synthetic oligonucleotide
  Sense strand starting at position 2678 of SEQ ID NO: 1879361
uaggaugaaacucguaugu

SEQ ID NO: 1901477 - RNA, 19 nt, Artificial Sequence
  Description of Artificial Sequence: Synthetic oligonucleotide
  Antisense strand to SEQ ID NO: 1901476
acauacgaguuucauccua

SEQ ID NO: 1901478 - RNA, 19 nt, Artificial Sequence
  Description of Artificial Sequence: Synthetic oligonucleotide
  Sense strand starting at position 2723 of SEQ ID NO: 1879361
aagauucgagucugcauaa

SEQ ID NO: 1901479 - RNA, 19 nt, Artificial Sequence
  Description of Artificial Sequence: Synthetic oligonucleotide
  Antisense strand to SEQ ID NO: 1901478
uuaugcagacucgaaucuu

SEQ ID NO: 1901480 - RNA, 19 nt, Artificial Sequence
  Description of Artificial Sequence: Synthetic oligonucleotide
  Sense strand starting at position 2724 of SEQ ID NO: 1879361
agauucgagucugcauaaa

SEQ ID NO: 1901481 - RNA, 19 nt, Artificial Sequence
  Description of Artificial Sequence: Synthetic oligonucleotide
  Antisense strand to SEQ ID NO: 1901480
uuuaugcagacucgaaucu

SEQ ID NO: 1901482 - RNA, 19 nt, Artificial Sequence
  Description of Artificial Sequence: Synthetic oligonucleotide
  Sense strand starting at position 2837 of SEQ ID NO: 1879361
gcccacacuucuguagaau

SEQ ID NO: 1901483 - RNA, 19 nt, Artificial Sequence
  Description of Artificial Sequence: Synthetic oligonucleotide
  Antisense strand to SEQ ID NO: 1901482
auucuacagaagugugggc

SEQ ID NO: 1901484 - RNA, 19 nt, Artificial Sequence
  Description of Artificial Sequence: Synthetic oligonucleotide
  Sense strand starting at position 3035 of SEQ ID NO: 1879361
cguguucugagucauauuu

SEQ ID NO: 1901485 - RNA, 19 nt, Artificial Sequence
  Description of Artificial Sequence: Synthetic oligonucleotide
  Antisense strand to SEQ ID NO: 1901484
aaauaugacucagaacacg

SEQ ID NO: 1901486 - RNA, 19 nt, Artificial Sequence
  Description of Artificial Sequence: Synthetic oligonucleotide
  Sense strand starting at position 3168 of SEQ ID NO: 1879361
guugguuugggauggugaa

SEQ ID NO: 1901487 - RNA, 19 nt, Artificial Sequence
  Description of Artificial Sequence: Synthetic oligonucleotide
  Antisense strand to SEQ ID NO: 1901486
uucaccaucccaaaccaac

SEQ ID NO: 1901488 - RNA, 19 nt, Artificial Sequence
  Description of Artificial Sequence: Synthetic oligonucleotide
  Sense strand starting at position 3333 of SEQ ID NO: 1879361
guuucaucucagugagagg

SEQ ID NO: 1901489 - RNA, 19 nt, Artificial Sequence
  Description of Artificial Sequence: Synthetic oligonucleotide
  Antisense strand to SEQ ID NO: 1901488
ccucucacugagaugaaac

SEQ ID NO: 1901490 - RNA, 19 nt, Artificial Sequence
  Description of Artificial Sequence: Synthetic oligonucleotide
  Sense strand starting at position 3348 of SEQ ID NO: 1879361
gaggcaagaugguuaagga

SEQ ID NO: 1901491 - RNA, 19 nt, Artificial Sequence
  Description of Artificial Sequence: Synthetic oligonucleotide
  Antisense strand to SEQ ID NO: 1901490
uccuuaaccaucuugccuc

SEQ ID NO: 1901492 - RNA, 19 nt, Artificial Sequence
  Description of Artificial Sequence: Synthetic oligonucleotide
  Sense strand starting at position 3567 of SEQ ID NO: 1879361
cguccaagugugagguauu

SEQ ID NO: 1901493 - RNA, 19 nt, Artificial Sequence
  Description of Artificial Sequence: Synthetic oligonucleotide
  Antisense strand to SEQ ID NO: 1901492
aauaccucacacuuggacg

SEQ ID NO: 1901494 - RNA, 19 nt, Artificial Sequence
  Description of Artificial Sequence: Synthetic oligonucleotide
  Sense strand starting at position 3570 of SEQ ID NO: 1879361
ccaagugugagguauuguu

SEQ ID NO: 1901495 - RNA, 19 nt, Artificial Sequence
  Description of Artificial Sequence: Synthetic oligonucleotide
  Antisense strand to SEQ ID NO: 1901494
aacaauaccucacacuugg

SEQ ID NO: 1901496 - RNA, 19 nt, Artificial Sequence
  Description of Artificial Sequence: Synthetic oligonucleotide
  Sense strand starting at position 3600 of SEQ ID NO: 1879361
gugccuugagaauaacaca

SEQ ID NO: 1901497 - RNA, 19 nt, Artificial Sequence
  Description of Artificial Sequence: Synthetic oligonucleotide
  Antisense strand to SEQ ID NO: 1901496
uguguuauucucaaggcac

SEQ ID NO: 1901498 - RNA, 19 nt, Artificial Sequence
  Description of Artificial Sequence: Synthetic oligonucleotide
  Sense strand starting at position 3683 of SEQ ID NO: 1879361
ggguaacugccuggaggaa

SEQ ID NO: 1901499 - RNA, 19 nt, Artificial Sequence
  Description of Artificial Sequence: Synthetic oligonucleotide
  Antisense strand to SEQ ID NO: 1901498
uuccuccaggcaguuaccc

SEQ ID NO: 1901500 - RNA, 19 nt, Artificial Sequence
  Description of Artificial Sequence: Synthetic oligonucleotide
  Sense strand starting at position 3684 of SEQ ID NO: 1879361
gguaacugccuggaggaau

SEQ ID NO: 1901501 - RNA, 19 nt, Artificial Sequence
  Description of Artificial Sequence: Synthetic oligonucleotide
  Antisense strand to SEQ ID NO: 1901500
auuccuccaggcaguuacc

SEQ ID NO: 1901502 - RNA, 19 nt, Artificial Sequence
  Description of Artificial Sequence: Synthetic oligonucleotide
  Sense strand starting at position 3792 of SEQ ID NO: 1879361
ugcagaucgcuguucuuua

SEQ ID NO: 1901503 - RNA, 19 nt, Artificial Sequence
  Description of Artificial Sequence: Synthetic oligonucleotide
  Antisense strand to SEQ ID NO: 1901502
uaaagaacagcgaucugca

SEQ ID NO: 1901504 - RNA, 19 nt, Artificial Sequence
  Description of Artificial Sequence: Synthetic oligonucleotide
  Sense strand starting at position 3879 of SEQ ID NO: 1879361
acuaaacagucucuuugua

SEQ ID NO: 1901505 - RNA, 19 nt, Artificial Sequence
  Description of Artificial Sequence: Synthetic oligonucleotide
  Antisense strand to SEQ ID NO: 1901504
uacaaagagacuguuuagu

SEQ ID NO: 1901506 - RNA, 19 nt, Artificial Sequence
  Description of Artificial Sequence: Synthetic oligonucleotide
  Sense strand starting at position 50 of SEQ ID NO: 1879363
uggcauauggcugaaacuu

SEQ ID NO: 1901507 - RNA, 19 nt, Artificial Sequence
  Description of Artificial Sequence: Synthetic oligonucleotide
  Antisense strand to SEQ ID NO: 1901506
aaguuucagccauaugcca

SEQ ID NO: 1901508 - RNA, 19 nt, Artificial Sequence
  Description of Artificial Sequence: Synthetic oligonucleotide
  Sense strand starting at position 144 of SEQ ID NO: 1879363
acgugcauccuuuauuuau

SEQ ID NO: 1901509 - RNA, 19 nt, Artificial Sequence
  Description of Artificial Sequence: Synthetic oligonucleotide
  Antisense strand to SEQ ID NO: 1901508
auaaauaaaggaugcacgu

SEQ ID NO: 1901510 - RNA, 19 nt, Artificial Sequence
  Description of Artificial Sequence: Synthetic oligonucleotide
  Sense strand starting at position 168 of SEQ ID NO: 1879363
guuuauuuagcuugucaag

SEQ ID NO: 1901511 - RNA, 19 nt, Artificial Sequence
  Description of Artificial Sequence: Synthetic oligonucleotide
  Antisense strand to SEQ ID NO: 1901510
cuugacaagcuaaauaaac

SEQ ID NO: 1901512 - RNA, 19 nt, Artificial Sequence
  Description of Artificial Sequence: Synthetic oligonucleotide
  Sense strand starting at position 170 of SEQ ID NO: 1879363
uuauuuagcuugucaagug

SEQ ID NO: 1901513 - RNA, 19 nt, Artificial Sequence
  Description of Artificial Sequence: Synthetic oligonucleotide
  Antisense strand to SEQ ID NO: 1901512
cacuugacaagcuaaauaa

SEQ ID NO: 1901514 - RNA, 19 nt, Artificial Sequence
  Description of Artificial Sequence: Synthetic oligonucleotide
  Sense strand starting at position 207 of SEQ ID NO: 1879363
uguugugggaucuguauuu

SEQ ID NO: 1901515 - RNA, 19 nt, Artificial Sequence
  Description of Artificial Sequence: Synthetic oligonucleotide
  Antisense strand to SEQ ID NO: 1901514
aaauacagaucccacaaca

SEQ ID NO: 1901516 - RNA, 19 nt, Artificial Sequence
  Description of Artificial Sequence: Synthetic oligonucleotide
  Sense strand starting at position 282 of SEQ ID NO: 1879363
ucgaaucucucauuugcuu

SEQ ID NO: 1901517 - RNA, 19 nt, Artificial Sequence
  Description of Artificial Sequence: Synthetic oligonucleotide
  Antisense strand to SEQ ID NO: 1901516
aagcaaaugagagauucga

SEQ ID NO: 1901518 - RNA, 19 nt, Artificial Sequence
  Description of Artificial Sequence: Synthetic oligonucleotide
  Sense strand starting at position 287 of SEQ ID NO: 1879363
ucucucauuugcuuaugua

SEQ ID NO: 1901519 - RNA, 19 nt, Artificial Sequence
  Description of Artificial Sequence: Synthetic oligonucleotide
  Antisense strand to SEQ ID NO: 1901518
uacauaagcaaaugagaga

SEQ ID NO: 1901520 - RNA, 19 nt, Artificial Sequence
  Description of Artificial Sequence: Synthetic oligonucleotide
  Sense strand starting at position 294 of SEQ ID NO: 1879363
uuugcuuauguacagaaca

SEQ ID NO: 1901521 - RNA, 19 nt, Artificial Sequence
  Description of Artificial Sequence: Synthetic oligonucleotide
  Antisense strand to SEQ ID NO: 1901520
uguucuguacauaagcaaa

SEQ ID NO: 1901522 - RNA, 19 nt, Artificial Sequence
  Description of Artificial Sequence: Synthetic oligonucleotide
  Sense strand starting at position 345 of SEQ ID NO: 1879363
gcuugaaaguucuuggaga

SEQ ID NO: 1901523 - RNA, 19 nt, Artificial Sequence
  Description of Artificial Sequence: Synthetic oligonucleotide
  Antisense strand to SEQ ID NO: 1901522
ucuccaagaacuuucaagc

SEQ ID NO: 1901524 - RNA, 19 nt, Artificial Sequence
  Description of Artificial Sequence: Synthetic oligonucleotide
  Sense strand starting at position 430 of SEQ ID NO: 1879363
ccuuauugugguuaauauc

SEQ ID NO: 1901525 - RNA, 19 nt, Artificial Sequence
  Description of Artificial Sequence: Synthetic oligonucleotide
  Antisense strand to SEQ ID NO: 1901524
gauauuaaccacaauaagg

SEQ ID NO: 1901526 - RNA, 19 nt, Artificial Sequence
  Description of Artificial Sequence: Synthetic oligonucleotide
  Sense strand starting at position 485 of SEQ ID NO: 1879363
gucauuauggaaugacaua

SEQ ID NO: 1901527 - RNA, 19 nt, Artificial Sequence
  Description of Artificial Sequence: Synthetic oligonucleotide
  Antisense strand to SEQ ID NO: 1901526
uaugucauuccauaaugac

SEQ ID NO: 1901528 - RNA, 19 nt, Artificial Sequence
  Description of Artificial Sequence: Synthetic oligonucleotide
  Sense strand starting at position 615 of SEQ ID NO: 1879363
ucauuuaaguaggaaccau

SEQ ID NO: 1901529 - RNA, 19 nt, Artificial Sequence
  Description of Artificial Sequence: Synthetic oligonucleotide
  Antisense strand to SEQ ID NO: 1901528
augguuccuacuuaaauga

SEQ ID NO: 1901530 - RNA, 19 nt, Artificial Sequence
  Description of Artificial Sequence: Synthetic oligonucleotide
  Sense strand starting at position 710 of SEQ ID NO: 1879363
cggguuucccaggaaacau

SEQ ID NO: 1901531 - RNA, 19 nt, Artificial Sequence
  Description of Artificial Sequence: Synthetic oligonucleotide
  Antisense strand to SEQ ID NO: 1901530
auguuuccugggaaacccg

SEQ ID NO: 1901532 - RNA, 19 nt, Artificial Sequence
  Description of Artificial Sequence: Synthetic oligonucleotide
  Sense strand starting at position 719 of SEQ ID NO: 1879363
caggaaacauggguugcua

SEQ ID NO: 1901533 - RNA, 19 nt, Artificial Sequence
  Description of Artificial Sequence: Synthetic oligonucleotide
  Antisense strand to SEQ ID NO: 1901532
uagcaacccauguuuccug

SEQ ID NO: 1901534 - RNA, 19 nt, Artificial Sequence
  Description of Artificial Sequence: Synthetic oligonucleotide
  Sense strand starting at position 935 of SEQ ID NO: 1879363
aggaaucuguuagucuaau

SEQ ID NO: 1901535 - RNA, 19 nt, Artificial Sequence
  Description of Artificial Sequence: Synthetic oligonucleotide
  Antisense strand to SEQ ID NO: 1901534
auuagacuaacagauuccu

SEQ ID NO: 1901536 - RNA, 19 nt, Artificial Sequence
  Description of Artificial Sequence: Synthetic oligonucleotide
  Sense strand starting at position 936 of SEQ ID NO: 1879363
ggaaucuguuagucuaaug

SEQ ID NO: 1901537 - RNA, 19 nt, Artificial Sequence
  Description of Artificial Sequence: Synthetic oligonucleotide
  Antisense strand to SEQ ID NO: 1901536
cauuagacuaacagauucc

SEQ ID NO: 1901538 - RNA, 19 nt, Artificial Sequence
  Description of Artificial Sequence: Synthetic oligonucleotide
  Sense strand starting at position 946 of SEQ ID NO: 1879363
agucuaaugcuuuagaaau

SEQ ID NO: 1901539 - RNA, 19 nt, Artificial Sequence
  Description of Artificial Sequence: Synthetic oligonucleotide
  Antisense strand to SEQ ID NO: 1901538
auuucuaaagcauuagacu

SEQ ID NO: 1901540 - RNA, 19 nt, Artificial Sequence
  Description of Artificial Sequence: Synthetic oligonucleotide
  Sense strand starting at position 956 of SEQ ID NO: 1879363
uuuagaaaugcuuagcaag

SEQ ID NO: 1901541 - RNA, 19 nt, Artificial Sequence
  Description of Artificial Sequence: Synthetic oligonucleotide
  Antisense strand to SEQ ID NO: 1901540
cuugcuaagcauuucuaaa

SEQ ID NO: 1901542 - RNA, 19 nt, Artificial Sequence
  Description of Artificial Sequence: Synthetic oligonucleotide
  Sense strand starting at position 1003 of SEQ ID NO: 1879363
ucaggacaucuugggcauu

SEQ ID NO: 1901543 - RNA, 19 nt, Artificial Sequence
  Description of Artificial Sequence: Synthetic oligonucleotide
  Antisense strand to SEQ ID NO: 1901542
aaugcccaagauguccuga

SEQ ID NO: 1901544 - RNA, 19 nt, Artificial Sequence
  Description of Artificial Sequence: Synthetic oligonucleotide
  Sense strand starting at position 1013 of SEQ ID NO: 1879363
uugggcauuucccuuuauu

SEQ ID NO: 1901545 - RNA, 19 nt, Artificial Sequence
  Description of Artificial Sequence: Synthetic oligonucleotide
  Antisense strand to SEQ ID NO: 1901544
aauaaagggaaaugcccaa

SEQ ID NO: 1901546 - RNA, 19 nt, Artificial Sequence
  Description of Artificial Sequence: Synthetic oligonucleotide
  Sense strand starting at position 1101 of SEQ ID NO: 1879363
aacucaugguggguuuaca

SEQ ID NO: 1901547 - RNA, 19 nt, Artificial Sequence
  Description of Artificial Sequence: Synthetic oligonucleotide
  Antisense strand to SEQ ID NO: 1901546
uguaaacccaccaugaguu

SEQ ID NO: 1901548 - RNA, 19 nt, Artificial Sequence
  Description of Artificial Sequence: Synthetic oligonucleotide
  Sense strand starting at position 1122 of SEQ ID NO: 1879363
ucauuauucuaguuagacu

SEQ ID NO: 1901549 - RNA, 19 nt, Artificial Sequence
  Description of Artificial Sequence: Synthetic oligonucleotide
  Antisense strand to SEQ ID NO: 1901548
agucuaacuagaauaauga

SEQ ID NO: 1901550 - RNA, 19 nt, Artificial Sequence
  Description of Artificial Sequence: Synthetic oligonucleotide
  Sense strand starting at position 1194 of SEQ ID NO: 1879363
cguugaaagguccaucaaa

SEQ ID NO: 1901551 - RNA, 19 nt, Artificial Sequence
  Description of Artificial Sequence: Synthetic oligonucleotide
  Antisense strand to SEQ ID NO: 1901550
uuugauggaccuuucaacg

SEQ ID NO: 1901552 - RNA, 19 nt, Artificial Sequence
  Description of Artificial Sequence: Synthetic oligonucleotide
  Sense strand starting at position 1346 of SEQ ID NO: 1879363
gggcguguacuagaaauga

SEQ ID NO: 1901553 - RNA, 19 nt, Artificial Sequence
  Description of Artificial Sequence: Synthetic oligonucleotide
  Antisense strand to SEQ ID NO: 1901552
ucauuucuaguacacgccc

SEQ ID NO: 1901554 - RNA, 19 nt, Artificial Sequence
  Description of Artificial Sequence: Synthetic oligonucleotide
  Sense strand starting at position 1518 of SEQ ID NO: 1879363
agguccuuuccuugaugaa

SEQ ID NO: 1901555 - RNA, 19 nt, Artificial Sequence
  Description of Artificial Sequence: Synthetic oligonucleotide
  Antisense strand to SEQ ID NO: 1901554
uucaucaaggaaaggaccu

SEQ ID NO: 1901556 - RNA, 19 nt, Artificial Sequence
  Description of Artificial Sequence: Synthetic oligonucleotide
  Sense strand starting at position 1519 of SEQ ID NO: 1879363
gguccuuuccuugaugaau

SEQ ID NO: 1901557 - RNA, 19 nt, Artificial Sequence
  Description of Artificial Sequence: Synthetic oligonucleotide
  Antisense strand to SEQ ID NO: 1901556
auucaucaaggaaaggacc

SEQ ID NO: 1901558 - RNA, 19 nt, Artificial Sequence
  Description of Artificial Sequence: Synthetic oligonucleotide
  Sense strand starting at position 1528 of SEQ ID NO: 1879363
cuugaugaauggucuggaa

SEQ ID NO: 1901559 - RNA, 19 nt, Artificial Sequence
  Description of Artificial Sequence: Synthetic oligonucleotide
  Antisense strand to SEQ ID NO: 1901558
uuccagaccauucaucaag

SEQ ID NO: 1901560 - RNA, 19 nt, Artificial Sequence
  Description of Artificial Sequence: Synthetic oligonucleotide
  Sense strand starting at position 1536 of SEQ ID NO: 1879363
auggucuggaaauguauaa

SEQ ID NO: 1901561 - RNA, 19 nt, Artificial Sequence
  Description of Artificial Sequence: Synthetic oligonucleotide
  Antisense strand to SEQ ID NO: 1901560
uuauacauuuccagaccau

SEQ ID NO: 1901562 - RNA, 19 nt, Artificial Sequence
  Description of Artificial Sequence: Synthetic oligonucleotide
  Sense strand starting at position 1579 of SEQ ID NO: 1879363
gggcacguuccacacaaua

SEQ ID NO: 1901563 - RNA, 19 nt, Artificial Sequence
  Description of Artificial Sequence: Synthetic oligonucleotide
  Antisense strand to SEQ ID NO: 1901562
uauuguguggaacgugccc

SEQ ID NO: 1901564 - RNA, 19 nt, Artificial Sequence
  Description of Artificial Sequence: Synthetic oligonucleotide
  Sense strand starting at position 1624 of SEQ ID NO: 1879363
cauauuaaacaucggugaa

SEQ ID NO: 1901565 - RNA, 19 nt, Artificial Sequence
  Description of Artificial Sequence: Synthetic oligonucleotide
  Antisense strand to SEQ ID NO: 1901564
uucaccgauguuuaauaug

SEQ ID NO: 1901566 - RNA, 19 nt, Artificial Sequence
  Description of Artificial Sequence: Synthetic oligonucleotide
  Sense strand starting at position 1626 of SEQ ID NO: 1879363
uauuaaacaucggugaaua

SEQ ID NO: 1901567 - RNA, 19 nt, Artificial Sequence
  Description of Artificial Sequence: Synthetic oligonucleotide
  Antisense strand to SEQ ID NO: 1901566
uauucaccgauguuuaaua

SEQ ID NO: 1901568 - RNA, 19 nt, Artificial Sequence
  Description of Artificial Sequence: Synthetic oligonucleotide
  Sense strand starting at position 1627 of SEQ ID NO: 1879363
auuaaacaucggugaauau

SEQ ID NO: 1901569 - RNA, 19 nt, Artificial Sequence
  Description of Artificial Sequence: Synthetic oligonucleotide
  Antisense strand to SEQ ID NO: 1901568
auauucaccgauguuuaau

SEQ ID NO: 1901570 - RNA, 19 nt, Artificial Sequence
  Description of Artificial Sequence: Synthetic oligonucleotide
  Sense strand starting at position 1628 of SEQ ID NO: 1879363
uuaaacaucggugaauauc

SEQ ID NO: 1901571 - RNA, 19 nt, Artificial Sequence
  Description of Artificial Sequence: Synthetic oligonucleotide
  Antisense strand to SEQ ID NO: 1901570
gauauucaccgauguuuaa

SEQ ID NO: 1901572 - RNA, 19 nt, Artificial Sequence
  Description of Artificial Sequence: Synthetic oligonucleotide
  Sense strand starting at position 1663 of SEQ ID NO: 1879363
aagaguugggauuauuguu

SEQ ID NO: 1901573 - RNA, 19 nt, Artificial Sequence
  Description of Artificial Sequence: Synthetic oligonucleotide
  Antisense strand to SEQ ID NO: 1901572
aacaauaaucccaacucuu

SEQ ID NO: 1901574 - RNA, 19 nt, Artificial Sequence
  Description of Artificial Sequence: Synthetic oligonucleotide
  Sense strand starting at position 1901 of SEQ ID NO: 1879363
guaauugaaguuggaaaca

SEQ ID NO: 1901575 - RNA, 19 nt, Artificial Sequence
  Description of Artificial Sequence: Synthetic oligonucleotide
  Antisense strand to SEQ ID NO: 1901574
uguuuccaacuucaauuac

SEQ ID NO: 1901576 - RNA, 19 nt, Artificial Sequence
  Description of Artificial Sequence: Synthetic oligonucleotide
  Sense strand starting at position 1955 of SEQ ID NO: 1879363
ggcgauggcacagagagau

SEQ ID NO: 1901577 - RNA, 19 nt, Artificial Sequence
  Description of Artificial Sequence: Synthetic oligonucleotide
  Antisense strand to SEQ ID NO: 1901576
aucucucugugccaucgcc

SEQ ID NO: 1901578 - RNA, 19 nt, Artificial Sequence
  Description of Artificial Sequence: Synthetic oligonucleotide
  Sense strand starting at position 2344 of SEQ ID NO: 1879363
gaaugauggccacaauguc

SEQ ID NO: 1901579 - RNA, 19 nt, Artificial Sequence
  Description of Artificial Sequence: Synthetic oligonucleotide
  Antisense strand to SEQ ID NO: 1901578
gacauuguggccaucauuc

SEQ ID NO: 1901580 - RNA, 19 nt, Artificial Sequence
  Description of Artificial Sequence: Synthetic oligonucleotide
  Sense strand starting at position 2374 of SEQ ID NO: 1879363
ugauguuucgcgagaaggu

SEQ ID NO: 1901581 - RNA, 19 nt, Artificial Sequence
  Description of Artificial Sequence: Synthetic oligonucleotide
  Antisense strand to SEQ ID NO: 1901580
accuucucgcgaaacauca

SEQ ID NO: 1901582 - RNA, 19 nt, Artificial Sequence
  Description of Artificial Sequence: Synthetic oligonucleotide
  Sense strand starting at position 2895 of SEQ ID NO: 1879363
ggccgguugcggucgaaga

SEQ ID NO: 1901583 - RNA, 19 nt, Artificial Sequence
  Description of Artificial Sequence: Synthetic oligonucleotide
  Antisense strand to SEQ ID NO: 1901582
ucuucgaccgcaaccggcc

SEQ ID NO: 1901584 - RNA, 19 nt, Artificial Sequence
  Description of Artificial Sequence: Synthetic oligonucleotide
  Sense strand starting at position 2899 of SEQ ID NO: 1879363
gguugcggucgaagaagua

SEQ ID NO: 1901585 - RNA, 19 nt, Artificial Sequence
  Description of Artificial Sequence: Synthetic oligonucleotide
  Antisense strand to SEQ ID NO: 1901584
uacuucuucgaccgcaacc

SEQ ID NO: 1901586 - RNA, 19 nt, Artificial Sequence
  Description of Artificial Sequence: Synthetic oligonucleotide
  Sense strand starting at position 18 of SEQ ID NO: 1879362
ggacaugguugacucuuaa

SEQ ID NO: 1901587 - RNA, 19 nt, Artificial Sequence
  Description of Artificial Sequence: Synthetic oligonucleotide
  Antisense strand to SEQ ID NO: 1901586
uuaagagucaaccaugucc

SEQ ID NO: 1901588 - RNA, 19 nt, Artificial Sequence
  Description of Artificial Sequence: Synthetic oligonucleotide
  Sense strand starting at position 352 of SEQ ID NO: 1879362
cuggaaauaugacugcaga

SEQ ID NO: 1901589 - RNA, 19 nt, Artificial Sequence
  Description of Artificial Sequence: Synthetic oligonucleotide
  Antisense strand to SEQ ID NO: 1901588
ucugcagucauauuuccag

SEQ ID NO: 1901590 - RNA, 19 nt, Artificial Sequence
  Description of Artificial Sequence: Synthetic oligonucleotide
  Sense strand starting at position 355 of SEQ ID NO: 1879362
gaaauaugacugcagagcu

SEQ ID NO: 1901591 - RNA, 19 nt, Artificial Sequence
  Description of Artificial Sequence: Synthetic oligonucleotide
  Antisense strand to SEQ ID NO: 1901590
agcucugcagucauauuuc

SEQ ID NO: 1901592 - RNA, 19 nt, Artificial Sequence
  Description of Artificial Sequence: Synthetic oligonucleotide
  Sense strand starting at position 504 of SEQ ID NO: 1879362
gcuuauauccuuuagggaa

SEQ ID NO: 1901593 - RNA, 19 nt, Artificial Sequence
  Description of Artificial Sequence: Synthetic oligonucleotide
  Antisense strand to SEQ ID NO: 1901592
uucccuaaaggauauaagc

SEQ ID NO: 1901594 - RNA, 19 nt, Artificial Sequence
  Description of Artificial Sequence: Synthetic oligonucleotide
  Sense strand starting at position 673 of SEQ ID NO: 1879362
agaacuaaucaagguuucu

SEQ ID NO: 1901595 - RNA, 19 nt, Artificial Sequence
  Description of Artificial Sequence: Synthetic oligonucleotide
  Antisense strand to SEQ ID NO: 1901594
agaaaccuugauuaguucu

SEQ ID NO: 1901596 - RNA, 19 nt, Artificial Sequence
  Description of Artificial Sequence: Synthetic oligonucleotide
  Sense strand starting at position 862 of SEQ ID NO: 1879362
gagguagaucaaugucaaa

SEQ ID NO: 1901597 - RNA, 19 nt, Artificial Sequence
  Description of Artificial Sequence: Synthetic oligonucleotide
  Antisense strand to SEQ ID NO: 1901596
uuugacauugaucuaccuc

SEQ ID NO: 1901598 - RNA, 19 nt, Artificial Sequence
  Description of Artificial Sequence: Synthetic oligonucleotide
  Sense strand starting at position 1007 of SEQ ID NO: 1879362
ccucuauuuguuuggucuu

SEQ ID NO: 1901599 - RNA, 19 nt, Artificial Sequence
  Description of Artificial Sequence: Synthetic oligonucleotide
  Antisense strand to SEQ ID NO: 1901598
aagaccaaacaaauagagg

SEQ ID NO: 1901600 - RNA, 19 nt, Artificial Sequence
  Description of Artificial Sequence: Synthetic oligonucleotide
  Sense strand starting at position 1356 of SEQ ID NO: 1879362
gcaguagauucugccauuu

SEQ ID NO: 1901601 - RNA, 19 nt, Artificial Sequence
  Description of Artificial Sequence: Synthetic oligonucleotide
  Antisense strand to SEQ ID NO: 1901600
aaauggcagaaucuacugc

SEQ ID NO: 1901602 - RNA, 19 nt, Artificial Sequence
  Description of Artificial Sequence: Synthetic oligonucleotide
  Sense strand starting at position 1453 of SEQ ID NO: 1879362
gagugaagguuauucugaa

SEQ ID NO: 1901603 - RNA, 19 nt, Artificial Sequence
  Description of Artificial Sequence: Synthetic oligonucleotide
  Antisense strand to SEQ ID NO: 1901602
uucagaauaaccuucacuc

SEQ ID NO: 1901604 - RNA, 19 nt, Artificial Sequence
  Description of Artificial Sequence: Synthetic oligonucleotide
  Sense strand starting at position 1454 of SEQ ID NO: 1879362
agugaagguuauucugaag

SEQ ID NO: 1901605 - RNA, 19 nt, Artificial Sequence
  Description of Artificial Sequence: Synthetic oligonucleotide
  Antisense strand to SEQ ID NO: 1901604
cuucagaauaaccuucacu

SEQ ID NO: 1901606 - RNA, 19 nt, Artificial Sequence
  Description of Artificial Sequence: Synthetic oligonucleotide
  Sense strand starting at position 1460 of SEQ ID NO: 1879362
gguuauucugaagagcaau

SEQ ID NO: 1901607 - RNA, 19 nt, Artificial Sequence
  Description of Artificial Sequence: Synthetic oligonucleotide
  Antisense strand to SEQ ID NO: 1901606
auugcucuucagaauaacc

SEQ ID NO: 1901608 - RNA, 19 nt, Artificial Sequence
  Description of Artificial Sequence: Synthetic oligonucleotide
  Sense strand starting at position 1579 of SEQ ID NO: 1879362
ccaagcauguaacuaagau

SEQ ID NO: 1901609 - RNA, 19 nt, Artificial Sequence
  Description of Artificial Sequence: Synthetic oligonucleotide
  Antisense strand to SEQ ID NO: 1901608
aucuuaguuacaugcuugg

SEQ ID NO: 1901610 - RNA, 19 nt, Artificial Sequence
  Description of Artificial Sequence: Synthetic oligonucleotide
  Sense strand starting at position 1612 of SEQ ID NO: 1879362
ggcaaauaccaucagucua

SEQ ID NO: 1901611 - RNA, 19 nt, Artificial Sequence
  Description of Artificial Sequence: Synthetic oligonucleotide
  Antisense strand to SEQ ID NO: 1901610
uagacugaugguauuugcc

SEQ ID NO: 1901612 - RNA, 19 nt, Artificial Sequence
  Description of Artificial Sequence: Synthetic oligonucleotide
  Sense strand starting at position 1627 of SEQ ID NO: 1879362
ucuauacaugaaugacagu

SEQ ID NO: 1901613 - RNA, 19 nt, Artificial Sequence
  Description of Artificial Sequence: Synthetic oligonucleotide
  Antisense strand to SEQ ID NO: 1901612
acugucauucauguauaga

SEQ ID NO: 1901614 - RNA, 19 nt, Artificial Sequence
  Description of Artificial Sequence: Synthetic oligonucleotide
  Sense strand starting at position 1670 of SEQ ID NO: 1879362
gacugcucccaguagauca

SEQ ID NO: 1901615 - RNA, 19 nt, Artificial Sequence
  Description of Artificial Sequence: Synthetic oligonucleotide
  Antisense strand to SEQ ID NO: 1901614
ugaucuacugggagcaguc

SEQ ID NO: 1901616 - RNA, 19 nt, Artificial Sequence
  Description of Artificial Sequence: Synthetic oligonucleotide
  Sense strand starting at position 1729 of SEQ ID NO: 1879362
uggcauauggcugaaacuu

SEQ ID NO: 1901617 - RNA, 19 nt, Artificial Sequence
  Description of Artificial Sequence: Synthetic oligonucleotide
  Antisense strand to SEQ ID NO: 1901616
aaguuucagccauaugcca

SEQ ID NO: 1901618 - RNA, 19 nt, Artificial Sequence
  Description of Artificial Sequence: Synthetic oligonucleotide
  Sense strand starting at position 1823 of SEQ ID NO: 1879362
acgugcauccuuuauuuau

SEQ ID NO: 1901619 - RNA, 19 nt, Artificial Sequence
  Description of Artificial Sequence: Synthetic oligonucleotide
  Antisense strand to SEQ ID NO: 1901618
auaaauaaaggaugcacgu

SEQ ID NO: 1901620 - RNA, 19 nt, Artificial Sequence
  Description of Artificial Sequence: Synthetic oligonucleotide
  Sense strand starting at position 1847 of SEQ ID NO: 1879362
guuuauuuagcuugucaag

SEQ ID NO: 1901621 - RNA, 19 nt, Artificial Sequence
  Description of Artificial Sequence: Synthetic oligonucleotide
  Antisense strand to SEQ ID NO: 1901620
cuugacaagcuaaauaaac

SEQ ID NO: 1901622 - RNA, 19 nt, Artificial Sequence
  Description of Artificial Sequence: Synthetic oligonucleotide
  Sense strand starting at position 1849 of SEQ ID NO: 1879362
uuauuuagcuugucaagug

SEQ ID NO: 1901623 - RNA, 19 nt, Artificial Sequence
  Description of Artificial Sequence: Synthetic oligonucleotide
  Antisense strand to SEQ ID NO: 1901622
cacuugacaagcuaaauaa

SEQ ID NO: 1901624 - RNA, 19 nt, Artificial Sequence
  Description of Artificial Sequence: Synthetic oligonucleotide
  Sense strand starting at position 1886 of SEQ ID NO: 1879362
uguugugggaucuguauuu

SEQ ID NO: 1901625 - RNA, 19 nt, Artificial Sequence
  Description of Artificial Sequence: Synthetic oligonucleotide
  Antisense strand to SEQ ID NO: 1901624
aaauacagaucccacaaca

SEQ ID NO: 1901626 - RNA, 19 nt, Artificial Sequence
  Description of Artificial Sequence: Synthetic oligonucleotide
  Sense strand starting at position 1961 of SEQ ID NO: 1879362
ucgaaucucucauuugcuu

SEQ ID NO: 1901627 - RNA, 19 nt, Artificial Sequence
  Description of Artificial Sequence: Synthetic oligonucleotide
  Antisense strand to SEQ ID NO: 1901626
aagcaaaugagagauucga

SEQ ID NO: 1901628 - RNA, 19 nt, Artificial Sequence
  Description of Artificial Sequence: Synthetic oligonucleotide
  Sense strand starting at position 1966 of SEQ ID NO: 1879362
ucucucauuugcuuaugua

SEQ ID NO: 1901629 - RNA, 19 nt, Artificial Sequence
  Description of Artificial Sequence: Synthetic oligonucleotide
  Antisense strand to SEQ ID NO: 1901628
uacauaagcaaaugagaga

SEQ ID NO: 1901630 - RNA, 19 nt, Artificial Sequence
  Description of Artificial Sequence: Synthetic oligonucleotide
  Sense strand starting at position 1973 of SEQ ID NO: 1879362
uuugcuuauguacagaaca

SEQ ID NO: 1901631 - RNA, 19 nt, Artificial Sequence
  Description of Artificial Sequence: Synthetic oligonucleotide
  Antisense strand to SEQ ID NO: 1901630
uguucuguacauaagcaaa

SEQ ID NO: 1901632 - RNA, 19 nt, Artificial Sequence
  Description of Artificial Sequence: Synthetic oligonucleotide
  Sense strand starting at position 2164 of SEQ ID NO: 1879362
gucauuauggaaugacaua

SEQ ID NO: 1901633 - RNA, 19 nt, Artificial Sequence
  Description of Artificial Sequence: Synthetic oligonucleotide
  Antisense strand to SEQ ID NO: 1901632
uaugucauuccauaaugac

SEQ ID NO: 1901634 - RNA, 19 nt, Artificial Sequence
  Description of Artificial Sequence: Synthetic oligonucleotide
  Sense strand starting at position 2389 of SEQ ID NO: 1879362
cggguuucccaggaaacau

SEQ ID NO: 1901635 - RNA, 19 nt, Artificial Sequence
  Description of Artificial Sequence: Synthetic oligonucleotide
  Antisense strand to SEQ ID NO: 1901634
auguuuccugggaaacccg

SEQ ID NO: 1901636 - RNA, 19 nt, Artificial Sequence
  Description of Artificial Sequence: Synthetic oligonucleotide
  Sense strand starting at position 2398 of SEQ ID NO: 1879362
caggaaacauggguugcua

SEQ ID NO: 1901637 - RNA, 19 nt, Artificial Sequence
  Description of Artificial Sequence: Synthetic oligonucleotide
  Antisense strand to SEQ ID NO: 1901636
uagcaacccauguuuccug

SEQ ID NO: 1901638 - RNA, 19 nt, Artificial Sequence
  Description of Artificial Sequence: Synthetic oligonucleotide
  Sense strand starting at position 2625 of SEQ ID NO: 1879362
agucuaaugcuuuagaaau

SEQ ID NO: 1901639 - RNA, 19 nt, Artificial Sequence
  Description of Artificial Sequence: Synthetic oligonucleotide
  Antisense strand to SEQ ID NO: 1901638
auuucuaaagcauuagacu

SEQ ID NO: 1901640 - RNA, 19 nt, Artificial Sequence
  Description of Artificial Sequence: Synthetic oligonucleotide
  Sense strand starting at position 2635 of SEQ ID NO: 1879362
uuuagaaaugcuuagcaag

SEQ ID NO: 1901641 - RNA, 19 nt, Artificial Sequence
  Description of Artificial Sequence: Synthetic oligonucleotide
  Antisense strand to SEQ ID NO: 1901640
cuugcuaagcauuucuaaa

SEQ ID NO: 1901642 - RNA, 19 nt, Artificial Sequence
  Description of Artificial Sequence: Synthetic oligonucleotide
  Sense strand starting at position 2692 of SEQ ID NO: 1879362
uugggcauuucccuuuauu

SEQ ID NO: 1901643 - RNA, 19 nt, Artificial Sequence
  Description of Artificial Sequence: Synthetic oligonucleotide
  Antisense strand to SEQ ID NO: 1901642
aauaaagggaaaugcccaa

SEQ ID NO: 1901644 - RNA, 19 nt, Artificial Sequence
  Description of Artificial Sequence: Synthetic oligonucleotide
  Sense strand starting at position 2873 of SEQ ID NO: 1879362
cguugaaagguccaucaaa

SEQ ID NO: 1901645 - RNA, 19 nt, Artificial Sequence
  Description of Artificial Sequence: Synthetic oligonucleotide
  Antisense strand to SEQ ID NO: 1901644
uuugauggaccuuucaacg

SEQ ID NO: 1901646 - RNA, 19 nt, Artificial Sequence
  Description of Artificial Sequence: Synthetic oligonucleotide
  Sense strand starting at position 3198 of SEQ ID NO: 1879362
gguccuuuccuugaugaau

SEQ ID NO: 1901647 - RNA, 19 nt, Artificial Sequence
  Description of Artificial Sequence: Synthetic oligonucleotide
  Antisense strand to SEQ ID NO: 1901646
auucaucaaggaaaggacc

SEQ ID NO: 1901648 - RNA, 19 nt, Artificial Sequence
  Description of Artificial Sequence: Synthetic oligonucleotide
  Sense strand starting at position 3207 of SEQ ID NO: 1879362
cuugaugaauggucuggaa

SEQ ID NO: 1901649 - RNA, 19 nt, Artificial Sequence
  Description of Artificial Sequence: Synthetic oligonucleotide
  Antisense strand to SEQ ID NO: 1901648
uuccagaccauucaucaag

SEQ ID NO: 1901650 - RNA, 19 nt, Artificial Sequence
  Description of Artificial Sequence: Synthetic oligonucleotide
  Sense strand starting at position 3215 of SEQ ID NO: 1879362
auggucuggaaauguauaa

SEQ ID NO: 1901651 - RNA, 19 nt, Artificial Sequence
  Description of Artificial Sequence: Synthetic oligonucleotide
  Antisense strand to SEQ ID NO: 1901650
uuauacauuuccagaccau

SEQ ID NO: 1901652 - RNA, 19 nt, Artificial Sequence
  Description of Artificial Sequence: Synthetic oligonucleotide
  Sense strand starting at position 3303 of SEQ ID NO: 1879362
cauauuaaacaucggugaa

SEQ ID NO: 1901653 - RNA, 19 nt, Artificial Sequence
  Description of Artificial Sequence: Synthetic oligonucleotide
  Antisense strand to SEQ ID NO: 1901652
uucaccgauguuuaauaug

SEQ ID NO: 1901654 - RNA, 19 nt, Artificial Sequence
  Description of Artificial Sequence: Synthetic oligonucleotide
  Sense strand starting at position 3305 of SEQ ID NO: 1879362
uauuaaacaucggugaaua

SEQ ID NO: 1901655 - RNA, 19 nt, Artificial Sequence
  Description of Artificial Sequence: Synthetic oligonucleotide
  Antisense strand to SEQ ID NO: 1901654
uauucaccgauguuuaaua

SEQ ID NO: 1901656 - RNA, 19 nt, Artificial Sequence
  Description of Artificial Sequence: Synthetic oligonucleotide
  Sense strand starting at position 3306 of SEQ ID NO: 1879362
auuaaacaucggugaauau

SEQ ID NO: 1901657 - RNA, 19 nt, Artificial Sequence
  Description of Artificial Sequence: Synthetic oligonucleotide
  Antisense strand to SEQ ID NO: 1901656
auauucaccgauguuuaau

SEQ ID NO: 1901658 - RNA, 19 nt, Artificial Sequence
  Description of Artificial Sequence: Synthetic oligonucleotide
  Sense strand starting at position 3307 of SEQ ID NO: 1879362
uuaaacaucggugaauauc

SEQ ID NO: 1901659 - RNA, 19 nt, Artificial Sequence
  Description of Artificial Sequence: Synthetic oligonucleotide
  Antisense strand to SEQ ID NO: 1901658
gauauucaccgauguuuaa

SEQ ID NO: 1901660 - RNA, 19 nt, Artificial Sequence
  Description of Artificial Sequence: Synthetic oligonucleotide
  Sense strand starting at position 3342 of SEQ ID NO: 1879362
aagaguugggauuauuguu

SEQ ID NO: 1901661 - RNA, 19 nt, Artificial Sequence
  Description of Artificial Sequence: Synthetic oligonucleotide
  Antisense strand to SEQ ID NO: 1901660
aacaauaaucccaacucuu

SEQ ID NO: 1901662 - RNA, 19 nt, Artificial Sequence
  Description of Artificial Sequence: Synthetic oligonucleotide
  Sense strand starting at position 3580 of SEQ ID NO: 1879362
guaauugaaguuggaaaca

SEQ ID NO: 1901663 - RNA, 19 nt, Artificial Sequence
  Description of Artificial Sequence: Synthetic oligonucleotide
  Antisense strand to SEQ ID NO: 1901662
uguuuccaacuucaauuac

SEQ ID NO: 1901664 - RNA, 19 nt, Artificial Sequence
  Description of Artificial Sequence: Synthetic oligonucleotide
  Sense strand starting at position 3634 of SEQ ID NO: 1879362
ggcgauggcacagagagau

SEQ ID NO: 1901665 - RNA, 19 nt, Artificial Sequence
  Description of Artificial Sequence: Synthetic oligonucleotide
  Antisense strand to SEQ ID NO: 1901664
aucucucugugccaucgcc

SEQ ID NO: 1901666 - RNA, 19 nt, Artificial Sequence
  Description of Artificial Sequence: Synthetic oligonucleotide
  Sense strand starting at position 30 of SEQ ID NO: 1879364
gugcauaguugugagcaca

SEQ ID NO: 1901667 - RNA, 19 nt, Artificial Sequence
  Description of Artificial Sequence: Synthetic oligonucleotide
  Antisense strand to SEQ ID NO: 1901666
ugugcucacaacuaugcac

SEQ ID NO: 1901668 - RNA, 19 nt, Artificial Sequence
  Description of Artificial Sequence: Synthetic oligonucleotide
  Sense strand starting at position 174 of SEQ ID NO: 1879364
accguaguccuguguggag

SEQ ID NO: 1901669 - RNA, 19 nt, Artificial Sequence
  Description of Artificial Sequence: Synthetic oligonucleotide
  Antisense strand to SEQ ID NO: 1901668
cuccacacaggacuacggu

SEQ ID NO: 1901670 - RNA, 19 nt, Artificial Sequence
  Description of Artificial Sequence: Synthetic oligonucleotide
  Sense strand starting at position 175 of SEQ ID NO: 1879364
ccguaguccuguguggagu

SEQ ID NO: 1901671 - RNA, 19 nt, Artificial Sequence
  Description of Artificial Sequence: Synthetic oligonucleotide
  Antisense strand to SEQ ID NO: 1901670
acuccacacaggacuacgg

SEQ ID NO: 1901672 - RNA, 19 nt, Artificial Sequence
  Description of Artificial Sequence: Synthetic oligonucleotide
  Sense strand starting at position 299 of SEQ ID NO: 1879364
gggacuggguccaaguagu

SEQ ID NO: 1901673 - RNA, 19 nt, Artificial Sequence
  Description of Artificial Sequence: Synthetic oligonucleotide
  Antisense strand to SEQ ID NO: 1901672
acuacuuggacccaguccc

SEQ ID NO: 1901674 - RNA, 19 nt, Artificial Sequence
  Description of Artificial Sequence: Synthetic oligonucleotide
  Sense strand starting at position 316 of SEQ ID NO: 1879364
guaagucaagugugugcaa

SEQ ID NO: 1901675 - RNA, 19 nt, Artificial Sequence
  Description of Artificial Sequence: Synthetic oligonucleotide
  Antisense strand to SEQ ID NO: 1901674
uugcacacacuugacuuac

SEQ ID NO: 1901676 - RNA, 19 nt, Artificial Sequence
  Description of Artificial Sequence: Synthetic oligonucleotide
  Sense strand starting at position 328 of SEQ ID NO: 1879364
ugugcaaucuccugaugga

SEQ ID NO: 1901677 - RNA, 19 nt, Artificial Sequence
  Description of Artificial Sequence: Synthetic oligonucleotide
  Antisense strand to SEQ ID NO: 1901676
uccaucaggagauugcaca

SEQ ID NO: 1901678 - RNA, 19 nt, Artificial Sequence
  Description of Artificial Sequence: Synthetic oligonucleotide
  Sense strand starting at position 329 of SEQ ID NO: 1879364
gugcaaucuccugauggag

SEQ ID NO: 1901679 - RNA, 19 nt, Artificial Sequence
  Description of Artificial Sequence: Synthetic oligonucleotide
  Antisense strand to SEQ ID NO: 1901678
cuccaucaggagauugcac

SEQ ID NO: 1901680 - RNA, 19 nt, Artificial Sequence
  Description of Artificial Sequence: Synthetic oligonucleotide
  Sense strand starting at position 360 of SEQ ID NO: 1879364
agggugggaguguguaauu

SEQ ID NO: 1901681 - RNA, 19 nt, Artificial Sequence
  Description of Artificial Sequence: Synthetic oligonucleotide
  Antisense strand to SEQ ID NO: 1901680
aauuacacacucccacccu

SEQ ID NO: 1901682 - RNA, 19 nt, Artificial Sequence
  Description of Artificial Sequence: Synthetic oligonucleotide
  Sense strand starting at position 416 of SEQ ID NO: 1879364
ggaacaaucugcgguggua

SEQ ID NO: 1901683 - RNA, 19 nt, Artificial Sequence
  Description of Artificial Sequence: Synthetic oligonucleotide
  Antisense strand to SEQ ID NO: 1901682
uaccaccgcagauuguucc

SEQ ID NO: 1901684 - RNA, 19 nt, Artificial Sequence
  Description of Artificial Sequence: Synthetic oligonucleotide
  Sense strand starting at position 3030 of SEQ ID NO: 1879364
gcuucuugugccggaugga

SEQ ID NO: 1901685 - RNA, 19 nt, Artificial Sequence
  Description of Artificial Sequence: Synthetic oligonucleotide
  Antisense strand to SEQ ID NO: 1901684
uccauccggcacaagaagc

SEQ ID NO: 1901686 - RNA, 19 nt, Artificial Sequence
  Description of Artificial Sequence: Synthetic oligonucleotide
  Sense strand starting at position 3031 of SEQ ID NO: 1879364
cuucuugugccggauggaa

SEQ ID NO: 1901687 - RNA, 19 nt, Artificial Sequence
  Description of Artificial Sequence: Synthetic oligonucleotide
  Antisense strand to SEQ ID NO: 1901686
uuccauccggcacaagaag

SEQ ID NO: 1901688 - RNA, 19 nt, Artificial Sequence
  Description of Artificial Sequence: Synthetic oligonucleotide
  Sense strand starting at position 3065 of SEQ ID NO: 1879364
ggcuguguucaucgcgaaa

SEQ ID NO: 1901689 - RNA, 19 nt, Artificial Sequence
  Description of Artificial Sequence: Synthetic oligonucleotide
  Antisense strand to SEQ ID NO: 1901688
uuucgcgaugaacacagcc

SEQ ID NO: 1901690 - RNA, 19 nt, Artificial Sequence
  Description of Artificial Sequence: Synthetic oligonucleotide
  Sense strand starting at position 3068 of SEQ ID NO: 1879364
uguguucaucgcgaaaugu

SEQ ID NO: 1901691 - RNA, 19 nt, Artificial Sequence
  Description of Artificial Sequence: Synthetic oligonucleotide
  Antisense strand to SEQ ID NO: 1901690
acauuucgcgaugaacaca

SEQ ID NO: 1901692 - RNA, 19 nt, Artificial Sequence
  Description of Artificial Sequence: Synthetic oligonucleotide
  Sense strand starting at position 3132 of SEQ ID NO: 1879364
aaagccuuugcucgucauu

SEQ ID NO: 1901693 - RNA, 19 nt, Artificial Sequence
  Description of Artificial Sequence: Synthetic oligonucleotide
  Antisense strand to SEQ ID NO: 1901692
aaugacgagcaaaggcuuu

SEQ ID NO: 1901694 - RNA, 19 nt, Artificial Sequence
  Description of Artificial Sequence: Synthetic oligonucleotide
  Sense strand starting at position 3230 of SEQ ID NO: 1879364
auuugacuuugccugugua

SEQ ID NO: 1901695 - RNA, 19 nt, Artificial Sequence
  Description of Artificial Sequence: Synthetic oligonucleotide
  Antisense strand to SEQ ID NO: 1901694
uacacaggcaaagucaaau

SEQ ID NO: 1901696 - RNA, 19 nt, Artificial Sequence
  Description of Artificial Sequence: Synthetic oligonucleotide
  Sense strand starting at position 3231 of SEQ ID NO: 1879364
uuugacuuugccuguguau

SEQ ID NO: 1901697 - RNA, 19 nt, Artificial Sequence
  Description of Artificial Sequence: Synthetic oligonucleotide
  Antisense strand to SEQ ID NO: 1901696
auacacaggcaaagucaaa

SEQ ID NO: 1901698 - RNA, 19 nt, Artificial Sequence
  Description of Artificial Sequence: Synthetic oligonucleotide
  Sense strand starting at position 3233 of SEQ ID NO: 1879364
ugacuuugccuguguauau

SEQ ID NO: 1901699 - RNA, 19 nt, Artificial Sequence
  Description of Artificial Sequence: Synthetic oligonucleotide
  Antisense strand to SEQ ID NO: 1901698
auauacacaggcaaaguca

SEQ ID NO: 1901700 - RNA, 19 nt, Artificial Sequence
  Description of Artificial Sequence: Synthetic oligonucleotide
  Sense strand starting at position 3334 of SEQ ID NO: 1879364
cugagaaccuguuugcuaa

SEQ ID NO: 1901701 - RNA, 19 nt, Artificial Sequence
  Description of Artificial Sequence: Synthetic oligonucleotide
  Antisense strand to SEQ ID NO: 1901700
uuagcaaacagguucucag

SEQ ID NO: 1901702 - RNA, 19 nt, Artificial Sequence
  Description of Artificial Sequence: Synthetic oligonucleotide
  Sense strand starting at position 3335 of SEQ ID NO: 1879364
ugagaaccuguuugcuaag

SEQ ID NO: 1901703 - RNA, 19 nt, Artificial Sequence
  Description of Artificial Sequence: Synthetic oligonucleotide
  Antisense strand to SEQ ID NO: 1901702
cuuagcaaacagguucuca

SEQ ID NO: 1901704 - RNA, 19 nt, Artificial Sequence
  Description of Artificial Sequence: Synthetic oligonucleotide
  Sense strand starting at position 3336 of SEQ ID NO: 1879364
gagaaccuguuugcuaagu

SEQ ID NO: 1901705 - RNA, 19 nt, Artificial Sequence
  Description of Artificial Sequence: Synthetic oligonucleotide
  Antisense strand to SEQ ID NO: 1901704
acuuagcaaacagguucuc

SEQ ID NO: 1901706 - RNA, 19 nt, Artificial Sequence
  Description of Artificial Sequence: Synthetic oligonucleotide
  Sense strand starting at position 3342 of SEQ ID NO: 1879364
cuguuugcuaagugauuga

SEQ ID NO: 1901707 - RNA, 19 nt, Artificial Sequence
  Description of Artificial Sequence: Synthetic oligonucleotide
  Antisense strand to SEQ ID NO: 1901706
ucaaucacuuagcaaacag

SEQ ID NO: 1901708 - RNA, 19 nt, Artificial Sequence
  Description of Artificial Sequence: Synthetic oligonucleotide
  Sense strand starting at position 3345 of SEQ ID NO: 1879364
uuugcuaagugauugagaa

SEQ ID NO: 1901709 - RNA, 19 nt, Artificial Sequence
  Description of Artificial Sequence: Synthetic oligonucleotide
  Antisense strand to SEQ ID NO: 1901708
uucucaaucacuuagcaaa

SEQ ID NO: 1901710 - RNA, 19 nt, Artificial Sequence
  Description of Artificial Sequence: Synthetic oligonucleotide
  Sense strand starting at position 3346 of SEQ ID NO: 1879364
uugcuaagugauugagaag

SEQ ID NO: 1901711 - RNA, 19 nt, Artificial Sequence
  Description of Artificial Sequence: Synthetic oligonucleotide
  Antisense strand to SEQ ID NO: 1901710
cuucucaaucacuuagcaa

SEQ ID NO: 1901712 - RNA, 19 nt, Artificial Sequence
  Description of Artificial Sequence: Synthetic oligonucleotide
  Sense strand starting at position 3405 of SEQ ID NO: 1879364
gcccuaucccaagagcaau

SEQ ID NO: 1901713 - RNA, 19 nt, Artificial Sequence
  Description of Artificial Sequence: Synthetic oligonucleotide
  Antisense strand to SEQ ID NO: 1901712
auugcucuugggauagggc

SEQ ID NO: 1901714 - RNA, 19 nt, Artificial Sequence
  Description of Artificial Sequence: Synthetic oligonucleotide
  Sense strand starting at position 3442 of SEQ ID NO: 1879364
uuguuaaguccagaaccua

SEQ ID NO: 1901715 - RNA, 19 nt, Artificial Sequence
  Description of Artificial Sequence: Synthetic oligonucleotide
  Antisense strand to SEQ ID NO: 1901714
uagguucuggacuuaacaa

SEQ ID NO: 1901716 - RNA, 19 nt, Artificial Sequence
  Description of Artificial Sequence: Synthetic oligonucleotide
  Sense strand starting at position 3524 of SEQ ID NO: 1879364
ccaugccugucuggaugau

SEQ ID NO: 1901717 - RNA, 19 nt, Artificial Sequence
  Description of Artificial Sequence: Synthetic oligonucleotide
  Antisense strand to SEQ ID NO: 1901716
aucauccagacaggcaugg

SEQ ID NO: 1901718 - RNA, 19 nt, Artificial Sequence
  Description of Artificial Sequence: Synthetic oligonucleotide
  Sense strand starting at position 3528 of SEQ ID NO: 1879364
gccugucuggaugauguaa

SEQ ID NO: 1901719 - RNA, 19 nt, Artificial Sequence
  Description of Artificial Sequence: Synthetic oligonucleotide
  Antisense strand to SEQ ID NO: 1901718
uuacaucauccagacaggc

SEQ ID NO: 1901720 - RNA, 19 nt, Artificial Sequence
  Description of Artificial Sequence: Synthetic oligonucleotide
  Sense strand starting at position 3546 of SEQ ID NO: 1879364
aagagaucuugaggcagaa

SEQ ID NO: 1901721 - RNA, 19 nt, Artificial Sequence
  Description of Artificial Sequence: Synthetic oligonucleotide
  Antisense strand to SEQ ID NO: 1901720
uucugccucaagaucucuu

SEQ ID NO: 1901722 - RNA, 19 nt, Artificial Sequence
  Description of Artificial Sequence: Synthetic oligonucleotide
  Sense strand starting at position 3661 of SEQ ID NO: 1879364
gccuaugugugucucagga

SEQ ID NO: 1901723 - RNA, 19 nt, Artificial Sequence
  Description of Artificial Sequence: Synthetic oligonucleotide
  Antisense strand to SEQ ID NO: 1901722
uccugagacacacauaggc

SEQ ID NO: 1901724 - RNA, 19 nt, Artificial Sequence
  Description of Artificial Sequence: Synthetic oligonucleotide
  Sense strand starting at position 3663 of SEQ ID NO: 1879364
cuaugugugucucaggaaa

SEQ ID NO: 1901725 - RNA, 19 nt, Artificial Sequence
  Description of Artificial Sequence: Synthetic oligonucleotide
  Antisense strand to SEQ ID NO: 1901724
uuuccugagacacacauag

SEQ ID NO: 1901726 - RNA, 19 nt, Artificial Sequence
  Description of Artificial Sequence: Synthetic oligonucleotide
  Sense strand starting at position 3670 of SEQ ID NO: 1879364
ugucucaggaaagguuaaa

SEQ ID NO: 1901727 - RNA, 19 nt, Artificial Sequence
  Description of Artificial Sequence: Synthetic oligonucleotide
  Antisense strand to SEQ ID NO: 1901726
uuuaaccuuuccugagaca

SEQ ID NO: 1901728 - RNA, 19 nt, Artificial Sequence
  Description of Artificial Sequence: Synthetic oligonucleotide
  Sense strand starting at position 3765 of SEQ ID NO: 1879364
gaucuuugaugaucuguac

SEQ ID NO: 1901729 - RNA, 19 nt, Artificial Sequence
  Description of Artificial Sequence: Synthetic oligonucleotide
  Antisense strand to SEQ ID NO: 1901728
guacagaucaucaaagauc

SEQ ID NO: 1901730 - RNA, 19 nt, Artificial Sequence
  Description of Artificial Sequence: Synthetic oligonucleotide
  Sense strand starting at position 3768 of SEQ ID NO: 1879364
cuuugaugaucuguacuga

SEQ ID NO: 1901731 - RNA, 19 nt, Artificial Sequence
  Description of Artificial Sequence: Synthetic oligonucleotide
  Antisense strand to SEQ ID NO: 1901730
ucaguacagaucaucaaag

SEQ ID NO: 1901732 - RNA, 19 nt, Artificial Sequence
  Description of Artificial Sequence: Synthetic oligonucleotide
  Sense strand starting at position 3799 of SEQ ID NO: 1879364
gugaguuaaucagaaacac

SEQ ID NO: 1901733 - RNA, 19 nt, Artificial Sequence
  Description of Artificial Sequence: Synthetic oligonucleotide
  Antisense strand to SEQ ID NO: 1901732
guguuucugauuaacucac

SEQ ID NO: 1901734 - RNA, 19 nt, Artificial Sequence
  Description of Artificial Sequence: Synthetic oligonucleotide
  Sense strand starting at position 3855 of SEQ ID NO: 1879364
ccucgaaacugauguuugu

SEQ ID NO: 1901735 - RNA, 19 nt, Artificial Sequence
  Description of Artificial Sequence: Synthetic oligonucleotide
  Antisense strand to SEQ ID NO: 1901734
acaaacaucaguuucgagg

SEQ ID NO: 1901736 - RNA, 19 nt, Artificial Sequence
  Description of Artificial Sequence: Synthetic oligonucleotide
  Sense strand starting at position 3858 of SEQ ID NO: 1879364
cgaaacugauguuuguauu

SEQ ID NO: 1901737 - RNA, 19 nt, Artificial Sequence
  Description of Artificial Sequence: Synthetic oligonucleotide
  Antisense strand to SEQ ID NO: 1901736
aauacaaacaucaguuucg

SEQ ID NO: 1901738 - RNA, 19 nt, Artificial Sequence
  Description of Artificial Sequence: Synthetic oligonucleotide
  Sense strand starting at position 3880 of SEQ ID NO: 1879364
gaguuuagcugucuuugag

SEQ ID NO: 1901739 - RNA, 19 nt, Artificial Sequence
  Description of Artificial Sequence: Synthetic oligonucleotide
  Antisense strand to SEQ ID NO: 1901738
cucaaagacagcuaaacuc

SEQ ID NO: 1901740 - RNA, 19 nt, Artificial Sequence
  Description of Artificial Sequence: Synthetic oligonucleotide
  Sense strand starting at position 3883 of SEQ ID NO: 1879364
uuuagcugucuuugaguuu

SEQ ID NO: 1901741 - RNA, 19 nt, Artificial Sequence
  Description of Artificial Sequence: Synthetic oligonucleotide
  Antisense strand to SEQ ID NO: 1901740
aaacucaaagacagcuaaa

SEQ ID NO: 1901742 - RNA, 19 nt, Artificial Sequence
  Description of Artificial Sequence: Synthetic oligonucleotide
  Sense strand starting at position 3923 of SEQ ID NO: 1879364
ccaagugugacugggaaga

SEQ ID NO: 1901743 - RNA, 19 nt, Artificial Sequence
  Description of Artificial Sequence: Synthetic oligonucleotide
  Antisense strand to SEQ ID NO: 1901742
ucuucccagucacacuugg

SEQ ID NO: 1901744 - RNA, 19 nt, Artificial Sequence
  Description of Artificial Sequence: Synthetic oligonucleotide
  Sense strand starting at position 3925 of SEQ ID NO: 1879364
aagugugacugggaagaga

SEQ ID NO: 1901745 - RNA, 19 nt, Artificial Sequence
  Description of Artificial Sequence: Synthetic oligonucleotide
  Antisense strand to SEQ ID NO: 1901744
ucucuucccagucacacuu

SEQ ID NO: 1901746 - RNA, 19 nt, Artificial Sequence
  Description of Artificial Sequence: Synthetic oligonucleotide
  Sense strand starting at position 70 of SEQ ID NO: 1879365
ggacaagucccauagugcu

SEQ ID NO: 1901747 - RNA, 19 nt, Artificial Sequence
  Description of Artificial Sequence: Synthetic oligonucleotide
  Antisense strand to SEQ ID NO: 1901746
agcacuaugggacuugucc

SEQ ID NO: 1901748 - RNA, 19 nt, Artificial Sequence
  Description of Artificial Sequence: Synthetic oligonucleotide
  Sense strand starting at position 82 of SEQ ID NO: 1879365
uagugcuaacugcagcaua

SEQ ID NO: 1901749 - RNA, 19 nt, Artificial Sequence
  Description of Artificial Sequence: Synthetic oligonucleotide
  Antisense strand to SEQ ID NO: 1901748
uaugcugcaguuagcacua

SEQ ID NO: 1901750 - RNA, 19 nt, Artificial Sequence
  Description of Artificial Sequence: Synthetic oligonucleotide
  Sense strand starting at position 111 of SEQ ID NO: 1879365
cagagagguacacguaaca

SEQ ID NO: 1901751 - RNA, 19 nt, Artificial Sequence
  Description of Artificial Sequence: Synthetic oligonucleotide
  Antisense strand to SEQ ID NO: 1901750
uguuacguguaccucucug

SEQ ID NO: 1901752 - RNA, 19 nt, Artificial Sequence
  Description of Artificial Sequence: Synthetic oligonucleotide
  Sense strand starting at position 134 of SEQ ID NO: 1879365
agcccagaguucuagaaua

SEQ ID NO: 1901753 - RNA, 19 nt, Artificial Sequence
  Description of Artificial Sequence: Synthetic oligonucleotide
  Antisense strand to SEQ ID NO: 1901752
uauucuagaacucugggcu

SEQ ID NO: 1901754 - RNA, 19 nt, Artificial Sequence
  Description of Artificial Sequence: Synthetic oligonucleotide
  Sense strand starting at position 459 of SEQ ID NO: 1879365
cagauuuacuaggaugagu

SEQ ID NO: 1901755 - RNA, 19 nt, Artificial Sequence
  Description of Artificial Sequence: Synthetic oligonucleotide
  Antisense strand to SEQ ID NO: 1901754
acucauccuaguaaaucug

SEQ ID NO: 1901756 - RNA, 19 nt, Artificial Sequence
  Description of Artificial Sequence: Synthetic oligonucleotide
  Sense strand starting at position 511 of SEQ ID NO: 1879365
cggaacugcuucuggcaua

SEQ ID NO: 1901757 - RNA, 19 nt, Artificial Sequence
  Description of Artificial Sequence: Synthetic oligonucleotide
  Antisense strand to SEQ ID NO: 1901756
uaugccagaagcaguuccg

SEQ ID NO: 1901758 - RNA, 19 nt, Artificial Sequence
  Description of Artificial Sequence: Synthetic oligonucleotide
  Sense strand starting at position 512 of SEQ ID NO: 1879365
ggaacugcuucuggcauau

SEQ ID NO: 1901759 - RNA, 19 nt, Artificial Sequence
  Description of Artificial Sequence: Synthetic oligonucleotide
  Antisense strand to SEQ ID NO: 1901758
auaugccagaagcaguucc

SEQ ID NO: 1901760 - RNA, 19 nt, Artificial Sequence
  Description of Artificial Sequence: Synthetic oligonucleotide
  Sense strand starting at position 516 of SEQ ID NO: 1879365
cugcuucuggcauaucgua

SEQ ID NO: 1901761 - RNA, 19 nt, Artificial Sequence
  Description of Artificial Sequence: Synthetic oligonucleotide
  Antisense strand to SEQ ID NO: 1901760
uacgauaugccagaagcag

SEQ ID NO: 1901762 - RNA, 19 nt, Artificial Sequence
  Description of Artificial Sequence: Synthetic oligonucleotide
  Sense strand starting at position 521 of SEQ ID NO: 1879365
ucuggcauaucguagguau

SEQ ID NO: 1901763 - RNA, 19 nt, Artificial Sequence
  Description of Artificial Sequence: Synthetic oligonucleotide
  Antisense strand to SEQ ID NO: 1901762
auaccuacgauaugccaga

SEQ ID NO: 1901764 - RNA, 19 nt, Artificial Sequence
  Description of Artificial Sequence: Synthetic oligonucleotide
  Sense strand starting at position 554 of SEQ ID NO: 1879365
uugaguuaauaagucaauc

SEQ ID NO: 1901765 - RNA, 19 nt, Artificial Sequence
  Description of Artificial Sequence: Synthetic oligonucleotide
  Antisense strand to SEQ ID NO: 1901764
gauugacuuauuaacucaa

SEQ ID NO: 1901766 - RNA, 19 nt, Artificial Sequence
  Description of Artificial Sequence: Synthetic oligonucleotide
  Sense strand starting at position 633 of SEQ ID NO: 1879365
ugagcucagucauccugau

SEQ ID NO: 1901767 - RNA, 19 nt, Artificial Sequence
  Description of Artificial Sequence: Synthetic oligonucleotide
  Antisense strand to SEQ ID NO: 1901766
aucaggaugacugagcuca

SEQ ID NO: 1901768 - RNA, 19 nt, Artificial Sequence
  Description of Artificial Sequence: Synthetic oligonucleotide
  Sense strand starting at position 637 of SEQ ID NO: 1879365
cucagucauccugaugaac

SEQ ID NO: 1901769 - RNA, 19 nt, Artificial Sequence
  Description of Artificial Sequence: Synthetic oligonucleotide
  Antisense strand to SEQ ID NO: 1901768
guucaucaggaugacugag

SEQ ID NO: 1901770 - RNA, 19 nt, Artificial Sequence
  Description of Artificial Sequence: Synthetic oligonucleotide
  Sense strand starting at position 727 of SEQ ID NO: 1879365
acauuaauauucugugguu

SEQ ID NO: 1901771 - RNA, 19 nt, Artificial Sequence
  Description of Artificial Sequence: Synthetic oligonucleotide
  Antisense strand to SEQ ID NO: 1901770
aaccacagaauauuaaugu

SEQ ID NO: 1901772 - RNA, 19 nt, Artificial Sequence
  Description of Artificial Sequence: Synthetic oligonucleotide
  Sense strand starting at position 729 of SEQ ID NO: 1879365
auuaauauucugugguucu

SEQ ID NO: 1901773 - RNA, 19 nt, Artificial Sequence
  Description of Artificial Sequence: Synthetic oligonucleotide
  Antisense strand to SEQ ID NO: 1901772
agaaccacagaauauuaau

SEQ ID NO: 1901774 - RNA, 19 nt, Artificial Sequence
  Description of Artificial Sequence: Synthetic oligonucleotide
  Sense strand starting at position 730 of SEQ ID NO: 1879365
uuaauauucugugguucuu

SEQ ID NO: 1901775 - RNA, 19 nt, Artificial Sequence
  Description of Artificial Sequence: Synthetic oligonucleotide
  Antisense strand to SEQ ID NO: 1901774
aagaaccacagaauauuaa

SEQ ID NO: 1901776 - RNA, 19 nt, Artificial Sequence
  Description of Artificial Sequence: Synthetic oligonucleotide
  Sense strand starting at position 780 of SEQ ID NO: 1879365
ggucuucucuucccaguca

SEQ ID NO: 1901777 - RNA, 19 nt, Artificial Sequence
  Description of Artificial Sequence: Synthetic oligonucleotide
  Antisense strand to SEQ ID NO: 1901776
ugacugggaagagaagacc

SEQ ID NO: 1901778 - RNA, 19 nt, Artificial Sequence
  Description of Artificial Sequence: Synthetic oligonucleotide
  Sense strand starting at position 792 of SEQ ID NO: 1879365
ccagucacacuugggauau

SEQ ID NO: 1901779 - RNA, 19 nt, Artificial Sequence
  Description of Artificial Sequence: Synthetic oligonucleotide
  Antisense strand to SEQ ID NO: 1901778
auaucccaagugugacugg

SEQ ID NO: 1901780 - RNA, 19 nt, Artificial Sequence
  Description of Artificial Sequence: Synthetic oligonucleotide
  Sense strand starting at position 793 of SEQ ID NO: 1879365
cagucacacuugggauauu

SEQ ID NO: 1901781 - RNA, 19 nt, Artificial Sequence
  Description of Artificial Sequence: Synthetic oligonucleotide
  Antisense strand to SEQ ID NO: 1901780
aauaucccaagugugacug

SEQ ID NO: 1901782 - RNA, 19 nt, Artificial Sequence
  Description of Artificial Sequence: Synthetic oligonucleotide
  Sense strand starting at position 794 of SEQ ID NO: 1879365
agucacacuugggauauuu

SEQ ID NO: 1901783 - RNA, 19 nt, Artificial Sequence
  Description of Artificial Sequence: Synthetic oligonucleotide
  Antisense strand to SEQ ID NO: 1901782
aaauaucccaagugugacu

SEQ ID NO: 1901784 - RNA, 19 nt, Artificial Sequence
  Description of Artificial Sequence: Synthetic oligonucleotide
  Sense strand starting at position 900 of SEQ ID NO: 1879365
ccaguaaauguguguuucu

SEQ ID NO: 1901785 - RNA, 19 nt, Artificial Sequence
  Description of Artificial Sequence: Synthetic oligonucleotide
  Antisense strand to SEQ ID NO: 1901784
agaaacacacauuuacugg

SEQ ID NO: 1901786 - RNA, 19 nt, Artificial Sequence
  Description of Artificial Sequence: Synthetic oligonucleotide
  Sense strand starting at position 903 of SEQ ID NO: 1879365
guaaauguguguuucugau

SEQ ID NO: 1901787 - RNA, 19 nt, Artificial Sequence
  Description of Artificial Sequence: Synthetic oligonucleotide
  Antisense strand to SEQ ID NO: 1901786
aucagaaacacacauuuac

SEQ ID NO: 1901788 - RNA, 19 nt, Artificial Sequence
  Description of Artificial Sequence: Synthetic oligonucleotide
  Sense strand starting at position 907 of SEQ ID NO: 1879365
auguguguuucugauuaac

SEQ ID NO: 1901789 - RNA, 19 nt, Artificial Sequence
  Description of Artificial Sequence: Synthetic oligonucleotide
  Antisense strand to SEQ ID NO: 1901788
guuaaucagaaacacacau

SEQ ID NO: 1901790 - RNA, 19 nt, Artificial Sequence
  Description of Artificial Sequence: Synthetic oligonucleotide
  Sense strand starting at position 909 of SEQ ID NO: 1879365
guguguuucugauuaacuc

SEQ ID NO: 1901791 - RNA, 19 nt, Artificial Sequence
  Description of Artificial Sequence: Synthetic oligonucleotide
  Antisense strand to SEQ ID NO: 1901790
gaguuaaucagaaacacac

SEQ ID NO: 1901792 - RNA, 19 nt, Artificial Sequence
  Description of Artificial Sequence: Synthetic oligonucleotide
  Sense strand starting at position 910 of SEQ ID NO: 1879365
uguguuucugauuaacuca

SEQ ID NO: 1901793 - RNA, 19 nt, Artificial Sequence
  Description of Artificial Sequence: Synthetic oligonucleotide
  Antisense strand to SEQ ID NO: 1901792
ugaguuaaucagaaacaca

SEQ ID NO: 1901794 - RNA, 19 nt, Artificial Sequence
  Description of Artificial Sequence: Synthetic oligonucleotide
  Sense strand starting at position 1096 of SEQ ID NO: 1879365
gguacugccugaucuggaa

SEQ ID NO: 1901795 - RNA, 19 nt, Artificial Sequence
  Description of Artificial Sequence: Synthetic oligonucleotide
  Antisense strand to SEQ ID NO: 1901794
uuccagaucaggcaguacc

SEQ ID NO: 1901796 - RNA, 19 nt, Artificial Sequence
  Description of Artificial Sequence: Synthetic oligonucleotide
  Sense strand starting at position 1289 of SEQ ID NO: 1879365
acaaaugaaucuggaaauu

SEQ ID NO: 1901797 - RNA, 19 nt, Artificial Sequence
  Description of Artificial Sequence: Synthetic oligonucleotide
  Antisense strand to SEQ ID NO: 1901796
aauuuccagauucauuugu

SEQ ID NO: 1901798 - RNA, 19 nt, Artificial Sequence
  Description of Artificial Sequence: Synthetic oligonucleotide
  Sense strand starting at position 1301 of SEQ ID NO: 1879365
ggaaauugcucuugggaua

SEQ ID NO: 1901799 - RNA, 19 nt, Artificial Sequence
  Description of Artificial Sequence: Synthetic oligonucleotide
  Antisense strand to SEQ ID NO: 1901798
uaucccaagagcaauuucc

SEQ ID NO: 1901800 - RNA, 19 nt, Artificial Sequence
  Description of Artificial Sequence: Synthetic oligonucleotide
  Sense strand starting at position 1302 of SEQ ID NO: 1879365
gaaauugcucuugggauag

SEQ ID NO: 1901801 - RNA, 19 nt, Artificial Sequence
  Description of Artificial Sequence: Synthetic oligonucleotide
  Antisense strand to SEQ ID NO: 1901800
cuaucccaagagcaauuuc

SEQ ID NO: 1901802 - RNA, 19 nt, Artificial Sequence
  Description of Artificial Sequence: Synthetic oligonucleotide
  Sense strand starting at position 1323 of SEQ ID NO: 1879365
ccaguaaaguccuguuggu

SEQ ID NO: 1901803 - RNA, 19 nt, Artificial Sequence
  Description of Artificial Sequence: Synthetic oligonucleotide
  Antisense strand to SEQ ID NO: 1901802
accaacaggacuuuacugg

SEQ ID NO: 1901804 - RNA, 19 nt, Artificial Sequence
  Description of Artificial Sequence: Synthetic oligonucleotide
  Sense strand starting at position 1492 of SEQ ID NO: 1879365
gucaaauuguaauggguag

SEQ ID NO: 1901805 - RNA, 19 nt, Artificial Sequence
  Description of Artificial Sequence: Synthetic oligonucleotide
  Antisense strand to SEQ ID NO: 1901804
cuacccauuacaauuugac

SEQ ID NO: 1901806 - RNA, 19 nt, Artificial Sequence
  Description of Artificial Sequence: Synthetic oligonucleotide
  Sense strand starting at position 1493 of SEQ ID NO: 1879365
ucaaauuguaauggguaga

SEQ ID NO: 1901807 - RNA, 19 nt, Artificial Sequence
  Description of Artificial Sequence: Synthetic oligonucleotide
  Antisense strand to SEQ ID NO: 1901806
ucuacccauuacaauuuga

SEQ ID NO: 1901808 - RNA, 19 nt, Artificial Sequence
  Description of Artificial Sequence: Synthetic oligonucleotide
  Sense strand starting at position 1591 of SEQ ID NO: 1879365
ggcuuuaacuaaugacuuu

SEQ ID NO: 1901809 - RNA, 19 nt, Artificial Sequence
  Description of Artificial Sequence: Synthetic oligonucleotide
  Antisense strand to SEQ ID NO: 1901808
aaagucauuaguuaaagcc

SEQ ID NO: 1901810 - RNA, 19 nt, Artificial Sequence
  Description of Artificial Sequence: Synthetic oligonucleotide
  Sense strand starting at position 72 of SEQ ID NO: 1879366
ccugucacagaguaaggua

SEQ ID NO: 1901811 - RNA, 19 nt, Artificial Sequence
  Description of Artificial Sequence: Synthetic oligonucleotide
  Antisense strand to SEQ ID NO: 1901810
uaccuuacucugugacagg

SEQ ID NO: 1901812 - RNA, 19 nt, Artificial Sequence
  Description of Artificial Sequence: Synthetic oligonucleotide
  Sense strand starting at position 625 of SEQ ID NO: 1879366
gggaucuuccgauagcaag

SEQ ID NO: 1901813 - RNA, 19 nt, Artificial Sequence
  Description of Artificial Sequence: Synthetic oligonucleotide
  Antisense strand to SEQ ID NO: 1901812
cuugcuaucggaagauccc

SEQ ID NO: 1901814 - RNA, 19 nt, Artificial Sequence
  Description of Artificial Sequence: Synthetic oligonucleotide
  Sense strand starting at position 651 of SEQ ID NO: 1879366
cuggaucucuggccaaacu

SEQ ID NO: 1901815 - RNA, 19 nt, Artificial Sequence
  Description of Artificial Sequence: Synthetic oligonucleotide
  Antisense strand to SEQ ID NO: 1901814
aguuuggccagagauccag

SEQ ID NO: 1901816 - RNA, 19 nt, Artificial Sequence
  Description of Artificial Sequence: Synthetic oligonucleotide
  Sense strand starting at position 988 of SEQ ID NO: 1879366
agaagagaaucauagaaac

SEQ ID NO: 1901817 - RNA, 19 nt, Artificial Sequence
  Description of Artificial Sequence: Synthetic oligonucleotide
  Antisense strand to SEQ ID NO: 1901816
guuucuaugauucucuucu

SEQ ID NO: 1901818 - RNA, 19 nt, Artificial Sequence
  Description of Artificial Sequence: Synthetic oligonucleotide
  Sense strand starting at position 1472 of SEQ ID NO: 1879366
ggcgacugugaucauuaca

SEQ ID NO: 1901819 - RNA, 19 nt, Artificial Sequence
  Description of Artificial Sequence: Synthetic oligonucleotide
  Antisense strand to SEQ ID NO: 1901818
uguaaugaucacagucgcc

SEQ ID NO: 1901820 - RNA, 19 nt, Artificial Sequence
  Description of Artificial Sequence: Synthetic oligonucleotide
  Sense strand starting at position 1536 of SEQ ID NO: 1879366
cuuaguagaugugcaauaa

SEQ ID NO: 1901821 - RNA, 19 nt, Artificial Sequence
  Description of Artificial Sequence: Synthetic oligonucleotide
  Antisense strand to SEQ ID NO: 1901820
uuauugcacaucuacuaag

SEQ ID NO: 1901822 - RNA, 19 nt, Artificial Sequence
  Description of Artificial Sequence: Synthetic oligonucleotide
  Sense strand starting at position 1537 of SEQ ID NO: 1879366
uuaguagaugugcaauaag

SEQ ID NO: 1901823 - RNA, 19 nt, Artificial Sequence
  Description of Artificial Sequence: Synthetic oligonucleotide
  Antisense strand to SEQ ID NO: 1901822
cuuauugcacaucuacuaa

SEQ ID NO: 1901824 - RNA, 19 nt, Artificial Sequence
  Description of Artificial Sequence: Synthetic oligonucleotide
  Sense strand starting at position 1777 of SEQ ID NO: 1879366
cagcaucuggcagagcuua

SEQ ID NO: 1901825 - RNA, 19 nt, Artificial Sequence
  Description of Artificial Sequence: Synthetic oligonucleotide
  Antisense strand to SEQ ID NO: 1901824
uaagcucugccagaugcug

SEQ ID NO: 1901826 - RNA, 19 nt, Artificial Sequence
  Description of Artificial Sequence: Synthetic oligonucleotide
  Sense strand starting at position 1782 of SEQ ID NO: 1879366
ucuggcagagcuuacuuau

SEQ ID NO: 1901827 - RNA, 19 nt, Artificial Sequence
  Description of Artificial Sequence: Synthetic oligonucleotide
  Antisense strand to SEQ ID NO: 1901826
auaaguaagcucugccaga

SEQ ID NO: 1901828 - RNA, 19 nt, Artificial Sequence
  Description of Artificial Sequence: Synthetic oligonucleotide
  Sense strand starting at position 1785 of SEQ ID NO: 1879366
ggcagagcuuacuuaugag

SEQ ID NO: 1901829 - RNA, 19 nt, Artificial Sequence
  Description of Artificial Sequence: Synthetic oligonucleotide
  Antisense strand to SEQ ID NO: 1901828
cucauaaguaagcucugcc

SEQ ID NO: 1901830 - RNA, 19 nt, Artificial Sequence
  Description of Artificial Sequence: Synthetic oligonucleotide
  Sense strand starting at position 1903 of SEQ ID NO: 1879366
agggaccuaccuugugaga

SEQ ID NO: 1901831 - RNA, 19 nt, Artificial Sequence
  Description of Artificial Sequence: Synthetic oligonucleotide
  Antisense strand to SEQ ID NO: 1901830
ucucacaagguaggucccu

SEQ ID NO: 1901832 - RNA, 19 nt, Artificial Sequence
  Description of Artificial Sequence: Synthetic oligonucleotide
  Sense strand starting at position 2015 of SEQ ID NO: 1879366
ccuuguuaacuggagcaca

SEQ ID NO: 1901833 - RNA, 19 nt, Artificial Sequence
  Description of Artificial Sequence: Synthetic oligonucleotide
  Antisense strand to SEQ ID NO: 1901832
ugugcuccaguuaacaagg

SEQ ID NO: 1901834 - RNA, 19 nt, Artificial Sequence
  Description of Artificial Sequence: Synthetic oligonucleotide
  Sense strand starting at position 2018 of SEQ ID NO: 1879366
uguuaacuggagcacaauu

SEQ ID NO: 1901835 - RNA, 19 nt, Artificial Sequence
  Description of Artificial Sequence: Synthetic oligonucleotide
  Antisense strand to SEQ ID NO: 1901834
aauugugcuccaguuaaca

SEQ ID NO: 1901836 - RNA, 19 nt, Artificial Sequence
  Description of Artificial Sequence: Synthetic oligonucleotide
  Sense strand starting at position 2182 of SEQ ID NO: 1879366
ucgucaugcgccuucucau

SEQ ID NO: 1901837 - RNA, 19 nt, Artificial Sequence
  Description of Artificial Sequence: Synthetic oligonucleotide
  Antisense strand to SEQ ID NO: 1901836
augagaaggcgcaugacga

SEQ ID NO: 1901838 - RNA, 19 nt, Artificial Sequence
  Description of Artificial Sequence: Synthetic oligonucleotide
  Sense strand starting at position 2183 of SEQ ID NO: 1879366
cgucaugcgccuucucauu

SEQ ID NO: 1901839 - RNA, 19 nt, Artificial Sequence
  Description of Artificial Sequence: Synthetic oligonucleotide
  Antisense strand to SEQ ID NO: 1901838
aaugagaaggcgcaugacg

SEQ ID NO: 1901840 - RNA, 19 nt, Artificial Sequence
  Description of Artificial Sequence: Synthetic oligonucleotide
  Sense strand starting at position 2188 of SEQ ID NO: 1879366
ugcgccuucucauugauuu

SEQ ID NO: 1901841 - RNA, 19 nt, Artificial Sequence
  Description of Artificial Sequence: Synthetic oligonucleotide
  Antisense strand to SEQ ID NO: 1901840
aaaucaaugagaaggcgca

SEQ ID NO: 1901842 - RNA, 19 nt, Artificial Sequence
  Description of Artificial Sequence: Synthetic oligonucleotide
  Sense strand starting at position 2189 of SEQ ID NO: 1879366
gcgccuucucauugauuuc

SEQ ID NO: 1901843 - RNA, 19 nt, Artificial Sequence
  Description of Artificial Sequence: Synthetic oligonucleotide
  Antisense strand to SEQ ID NO: 1901842
gaaaucaaugagaaggcgc

SEQ ID NO: 1901844 - RNA, 19 nt, Artificial Sequence
  Description of Artificial Sequence: Synthetic oligonucleotide
  Sense strand starting at position 2299 of SEQ ID NO: 1879366
ccuguaugguuucuaggau

SEQ ID NO: 1901845 - RNA, 19 nt, Artificial Sequence
  Description of Artificial Sequence: Synthetic oligonucleotide
  Antisense strand to SEQ ID NO: 1901844
auccuagaaaccauacagg

SEQ ID NO: 1901846 - RNA, 19 nt, Artificial Sequence
  Description of Artificial Sequence: Synthetic oligonucleotide
  Sense strand starting at position 2347 of SEQ ID NO: 1879366
cuccacagucccugagaga

SEQ ID NO: 1901847 - RNA, 19 nt, Artificial Sequence
  Description of Artificial Sequence: Synthetic oligonucleotide
  Antisense strand to SEQ ID NO: 1901846
ucucucagggacuguggag

SEQ ID NO: 1901848 - RNA, 19 nt, Artificial Sequence
  Description of Artificial Sequence: Synthetic oligonucleotide
  Sense strand starting at position 2408 of SEQ ID NO: 1879366
gacagagaugucugcacca

SEQ ID NO: 1901849 - RNA, 19 nt, Artificial Sequence
  Description of Artificial Sequence: Synthetic oligonucleotide
  Antisense strand to SEQ ID NO: 1901848
uggugcagacaucucuguc

SEQ ID NO: 1901850 - RNA, 19 nt, Artificial Sequence
  Description of Artificial Sequence: Synthetic oligonucleotide
  Sense strand starting at position 2410 of SEQ ID NO: 1879366
cagagaugucugcaccauu

SEQ ID NO: 1901851 - RNA, 19 nt, Artificial Sequence
  Description of Artificial Sequence: Synthetic oligonucleotide
  Antisense strand to SEQ ID NO: 1901850
aauggugcagacaucucug

SEQ ID NO: 1901852 - RNA, 19 nt, Artificial Sequence
  Description of Artificial Sequence: Synthetic oligonucleotide
  Sense strand starting at position 2502 of SEQ ID NO: 1879366
ggcugauggagugaguguu

SEQ ID NO: 1901853 - RNA, 19 nt, Artificial Sequence
  Description of Artificial Sequence: Synthetic oligonucleotide
  Antisense strand to SEQ ID NO: 1901852
aacacucacuccaucagcc

SEQ ID NO: 1901854 - RNA, 19 nt, Artificial Sequence
  Description of Artificial Sequence: Synthetic oligonucleotide
  Sense strand starting at position 2617 of SEQ ID NO: 1879366
uggcaacccucagucagaa

SEQ ID NO: 1901855 - RNA, 19 nt, Artificial Sequence
  Description of Artificial Sequence: Synthetic oligonucleotide
  Antisense strand to SEQ ID NO: 1901854
uucugacugaggguugcca

SEQ ID NO: 1901856 - RNA, 19 nt, Artificial Sequence
  Description of Artificial Sequence: Synthetic oligonucleotide
  Sense strand starting at position 2632 of SEQ ID NO: 1879366
agaagaacaguguggugau

SEQ ID NO: 1901857 - RNA, 19 nt, Artificial Sequence
  Description of Artificial Sequence: Synthetic oligonucleotide
  Antisense strand to SEQ ID NO: 1901856
aucaccacacuguucuucu

SEQ ID NO: 1901858 - RNA, 19 nt, Artificial Sequence
  Description of Artificial Sequence: Synthetic oligonucleotide
  Sense strand starting at position 2803 of SEQ ID NO: 1879366
aggugaacucacuggucca

SEQ ID NO: 1901859 - RNA, 19 nt, Artificial Sequence
  Description of Artificial Sequence: Synthetic oligonucleotide
  Antisense strand to SEQ ID NO: 1901858
uggaccagugaguucaccu

SEQ ID NO: 1901860 - RNA, 19 nt, Artificial Sequence
  Description of Artificial Sequence: Synthetic oligonucleotide
  Sense strand starting at position 2952 of SEQ ID NO: 1879366
ugcaaucuagaaugaauga

SEQ ID NO: 1901861 - RNA, 19 nt, Artificial Sequence
  Description of Artificial Sequence: Synthetic oligonucleotide
  Antisense strand to SEQ ID NO: 1901860
ucauucauucuagauugca

SEQ ID NO: 1901862 - RNA, 19 nt, Artificial Sequence
  Description of Artificial Sequence: Synthetic oligonucleotide
  Sense strand starting at position 2963 of SEQ ID NO: 1879366
augaaugaaugauacuaga

SEQ ID NO: 1901863 - RNA, 19 nt, Artificial Sequence
  Description of Artificial Sequence: Synthetic oligonucleotide
  Antisense strand to SEQ ID NO: 1901862
ucuaguaucauucauucau

SEQ ID NO: 1901864 - RNA, 19 nt, Artificial Sequence
  Description of Artificial Sequence: Synthetic oligonucleotide
  Sense strand starting at position 3070 of SEQ ID NO: 1879366
gcaauaaugcugugagaug

SEQ ID NO: 1901865 - RNA, 19 nt, Artificial Sequence
  Description of Artificial Sequence: Synthetic oligonucleotide
  Antisense strand to SEQ ID NO: 1901864
caucucacagcauuauugc

SEQ ID NO: 1901866 - RNA, 19 nt, Artificial Sequence
  Description of Artificial Sequence: Synthetic oligonucleotide
  Sense strand starting at position 3127 of SEQ ID NO: 1879366
agaagagugacgugacuua

SEQ ID NO: 1901867 - RNA, 19 nt, Artificial Sequence
  Description of Artificial Sequence: Synthetic oligonucleotide
  Antisense strand to SEQ ID NO: 1901866
uaagucacgucacucuucu

SEQ ID NO: 1901868 - RNA, 19 nt, Artificial Sequence
  Description of Artificial Sequence: Synthetic oligonucleotide
  Sense strand starting at position 3206 of SEQ ID NO: 1879366
gcccaaguuagugaacuga

SEQ ID NO: 1901869 - RNA, 19 nt, Artificial Sequence
  Description of Artificial Sequence: Synthetic oligonucleotide
  Antisense strand to SEQ ID NO: 1901868
ucaguucacuaacuugggc

SEQ ID NO: 1901870 - RNA, 19 nt, Artificial Sequence
  Description of Artificial Sequence: Synthetic oligonucleotide
  Sense strand starting at position 3210 of SEQ ID NO: 1879366
aaguuagugaacugagagu

SEQ ID NO: 1901871 - RNA, 19 nt, Artificial Sequence
  Description of Artificial Sequence: Synthetic oligonucleotide
  Antisense strand to SEQ ID NO: 1901870
acucucaguucacuaacuu

SEQ ID NO: 1901872 - RNA, 19 nt, Artificial Sequence
  Description of Artificial Sequence: Synthetic oligonucleotide
  Sense strand starting at position 3342 of SEQ ID NO: 1879366
uugccauuucccugggcaa

SEQ ID NO: 1901873 - RNA, 19 nt, Artificial Sequence
  Description of Artificial Sequence: Synthetic oligonucleotide
  Antisense strand to SEQ ID NO: 1901872
uugcccagggaaauggcaa

SEQ ID NO: 1901874 - RNA, 19 nt, Artificial Sequence
  Description of Artificial Sequence: Synthetic oligonucleotide
  Sense strand starting at position 3343 of SEQ ID NO: 1879366
ugccauuucccugggcaaa

SEQ ID NO: 1901875 - RNA, 19 nt, Artificial Sequence
  Description of Artificial Sequence: Synthetic oligonucleotide
  Antisense strand to SEQ ID NO: 1901874
uuugcccagggaaauggca

SEQ ID NO: 1901876 - RNA, 19 nt, Artificial Sequence
  Description of Artificial Sequence: Synthetic oligonucleotide
  Sense strand starting at position 3467 of SEQ ID NO: 1879366
uccaaaggccuaugagaua

SEQ ID NO: 1901877 - RNA, 19 nt, Artificial Sequence
  Description of Artificial Sequence: Synthetic oligonucleotide
  Antisense strand to SEQ ID NO: 1901876
uaucucauaggccuuugga

SEQ ID NO: 1901878 - RNA, 19 nt, Artificial Sequence
  Description of Artificial Sequence: Synthetic oligonucleotide
  Sense strand starting at position 3488 of SEQ ID NO: 1879366
gugacuugacaucaugguu

SEQ ID NO: 1901879 - RNA, 19 nt, Artificial Sequence
  Description of Artificial Sequence: Synthetic oligonucleotide
  Antisense strand to SEQ ID NO: 1901878
aaccaugaugucaagucac

SEQ ID NO: 1901880 - RNA, 19 nt, Artificial Sequence
  Description of Artificial Sequence: Synthetic oligonucleotide
  Sense strand starting at position 3726 of SEQ ID NO: 1879366
ucuccugugccugauggau

SEQ ID NO: 1901881 - RNA, 19 nt, Artificial Sequence
  Description of Artificial Sequence: Synthetic oligonucleotide
  Antisense strand to SEQ ID NO: 1901880
auccaucaggcacaggaga

SEQ ID NO: 1901882 - RNA, 19 nt, Artificial Sequence
  Description of Artificial Sequence: Synthetic oligonucleotide
  Sense strand starting at position 3752 of SEQ ID NO: 1879366
uucuguuauccacagguca

SEQ ID NO: 1901883 - RNA, 19 nt, Artificial Sequence
  Description of Artificial Sequence: Synthetic oligonucleotide
  Antisense strand to SEQ ID NO: 1901882
ugaccuguggauaacagaa

SEQ ID NO: 1901884 - RNA, 19 nt, Artificial Sequence
  Description of Artificial Sequence: Synthetic oligonucleotide
  Sense strand starting at position 3831 of SEQ ID NO: 1879366
guuggucacucuccuacaa

SEQ ID NO: 1901885 - RNA, 19 nt, Artificial Sequence
  Description of Artificial Sequence: Synthetic oligonucleotide
  Antisense strand to SEQ ID NO: 1901884
uuguaggagagugaccaac

SEQ ID NO: 1901886 - RNA, 19 nt, Artificial Sequence
  Description of Artificial Sequence: Synthetic oligonucleotide
  Sense strand starting at position 3912 of SEQ ID NO: 1879366
ccaguucugcucuagacac

SEQ ID NO: 1901887 - RNA, 19 nt, Artificial Sequence
  Description of Artificial Sequence: Synthetic oligonucleotide
  Antisense strand to SEQ ID NO: 1901886
gugucuagagcagaacugg

SEQ ID NO: 1901888 - RNA, 19 nt, Artificial Sequence
  Description of Artificial Sequence: Synthetic oligonucleotide
  Sense strand starting at position 3942 of SEQ ID NO: 1879366
caggcugguccuggaucaa

SEQ ID NO: 1901889 - RNA, 19 nt, Artificial Sequence
  Description of Artificial Sequence: Synthetic oligonucleotide
  Antisense strand to SEQ ID NO: 1901888
uugauccaggaccagccug

SEQ ID NO: 1901890 - RNA, 19 nt, Artificial Sequence
  Description of Artificial Sequence: Synthetic oligonucleotide
  Sense strand starting at position 161 of SEQ ID NO: 1879367
auguguugagcagaggauu

SEQ ID NO: 1901891 - RNA, 19 nt, Artificial Sequence
  Description of Artificial Sequence: Synthetic oligonucleotide
  Antisense strand to SEQ ID NO: 1901890
aauccucugcucaacacau

SEQ ID NO: 1901892 - RNA, 19 nt, Artificial Sequence
  Description of Artificial Sequence: Synthetic oligonucleotide
  Sense strand starting at position 283 of SEQ ID NO: 1879367
aggcauucccuaggaaguu

SEQ ID NO: 1901893 - RNA, 19 nt, Artificial Sequence
  Description of Artificial Sequence: Synthetic oligonucleotide
  Antisense strand to SEQ ID NO: 1901892
aacuuccuagggaaugccu

SEQ ID NO: 1901894 - RNA, 19 nt, Artificial Sequence
  Description of Artificial Sequence: Synthetic oligonucleotide
  Sense strand starting at position 320 of SEQ ID NO: 1879367
gcuugucaagcucuguauu

SEQ ID NO: 1901895 - RNA, 19 nt, Artificial Sequence
  Description of Artificial Sequence: Synthetic oligonucleotide
  Antisense strand to SEQ ID NO: 1901894
aauacagagcuugacaagc

SEQ ID NO: 1901896 - RNA, 19 nt, Artificial Sequence
  Description of Artificial Sequence: Synthetic oligonucleotide
  Sense strand starting at position 331 of SEQ ID NO: 1879367
ucuguauuaggccaaguau

SEQ ID NO: 1901897 - RNA, 19 nt, Artificial Sequence
  Description of Artificial Sequence: Synthetic oligonucleotide
  Antisense strand to SEQ ID NO: 1901896
auacuuggccuaauacaga

SEQ ID NO: 1901898 - RNA, 19 nt, Artificial Sequence
  Description of Artificial Sequence: Synthetic oligonucleotide
  Sense strand starting at position 399 of SEQ ID NO: 1879367
gugcuugcucugccuuaga

SEQ ID NO: 1901899 - RNA, 19 nt, Artificial Sequence
  Description of Artificial Sequence: Synthetic oligonucleotide
  Antisense strand to SEQ ID NO: 1901898
ucuaaggcagagcaagcac

SEQ ID NO: 1901900 - RNA, 19 nt, Artificial Sequence
  Description of Artificial Sequence: Synthetic oligonucleotide
  Sense strand starting at position 458 of SEQ ID NO: 1879367
gaguccucucaacagagua

SEQ ID NO: 1901901 - RNA, 19 nt, Artificial Sequence
  Description of Artificial Sequence: Synthetic oligonucleotide
  Antisense strand to SEQ ID NO: 1901900
uacucuguugagaggacuc

SEQ ID NO: 1901902 - RNA, 19 nt, Artificial Sequence
  Description of Artificial Sequence: Synthetic oligonucleotide
  Sense strand starting at position 496 of SEQ ID NO: 1879367
uugauacaucuuuguugaa

SEQ ID NO: 1901903 - RNA, 19 nt, Artificial Sequence
  Description of Artificial Sequence: Synthetic oligonucleotide
  Antisense strand to SEQ ID NO: 1901902
uucaacaaagauguaucaa

SEQ ID NO: 1901904 - RNA, 19 nt, Artificial Sequence
  Description of Artificial Sequence: Synthetic oligonucleotide
  Sense strand starting at position 497 of SEQ ID NO: 1879367
ugauacaucuuuguugaac

SEQ ID NO: 1901905 - RNA, 19 nt, Artificial Sequence
  Description of Artificial Sequence: Synthetic oligonucleotide
  Antisense strand to SEQ ID NO: 1901904
guucaacaaagauguauca

SEQ ID NO: 1901906 - RNA, 19 nt, Artificial Sequence
  Description of Artificial Sequence: Synthetic oligonucleotide
  Sense strand starting at position 659 of SEQ ID NO: 1879367
agaagcuucccuggaggaa

SEQ ID NO: 1901907 - RNA, 19 nt, Artificial Sequence
  Description of Artificial Sequence: Synthetic oligonucleotide
  Antisense strand to SEQ ID NO: 1901906
uuccuccagggaagcuucu

SEQ ID NO: 1901908 - RNA, 19 nt, Artificial Sequence
  Description of Artificial Sequence: Synthetic oligonucleotide
  Sense strand starting at position 1111 of SEQ ID NO: 1879367
uccauacaucuuuggaaga

SEQ ID NO: 1901909 - RNA, 19 nt, Artificial Sequence
  Description of Artificial Sequence: Synthetic oligonucleotide
  Antisense strand to SEQ ID NO: 1901908
ucuuccaaagauguaugga

SEQ ID NO: 1901910 - RNA, 19 nt, Artificial Sequence
  Description of Artificial Sequence: Synthetic oligonucleotide
  Sense strand starting at position 1495 of SEQ ID NO: 1879367
ggccuuuggauccaagguu

SEQ ID NO: 1901911 - RNA, 19 nt, Artificial Sequence
  Description of Artificial Sequence: Synthetic oligonucleotide
  Antisense strand to SEQ ID NO: 1901910
aaccuuggauccaaaggcc

SEQ ID NO: 1901912 - RNA, 19 nt, Artificial Sequence
  Description of Artificial Sequence: Synthetic oligonucleotide
  Sense strand starting at position 1530 of SEQ ID NO: 1879367
cccgacuuuguugaggaau

SEQ ID NO: 1901913 - RNA, 19 nt, Artificial Sequence
  Description of Artificial Sequence: Synthetic oligonucleotide
  Antisense strand to SEQ ID NO: 1901912
auuccucaacaaagucggg

SEQ ID NO: 1901914 - RNA, 19 nt, Artificial Sequence
  Description of Artificial Sequence: Synthetic oligonucleotide
  Sense strand starting at position 1735 of SEQ ID NO: 1879367
cgaagcuuucggccucagu

SEQ ID NO: 1901915 - RNA, 19 nt, Artificial Sequence
  Description of Artificial Sequence: Synthetic oligonucleotide
  Antisense strand to SEQ ID NO: 1901914
acugaggccgaaagcuucg

SEQ ID NO: 1901916 - RNA, 19 nt, Artificial Sequence
  Description of Artificial Sequence: Synthetic oligonucleotide
  Sense strand starting at position 1806 of SEQ ID NO: 1879367
cgugaaguggccgugacua

SEQ ID NO: 1901917 - RNA, 19 nt, Artificial Sequence
  Description of Artificial Sequence: Synthetic oligonucleotide
  Antisense strand to SEQ ID NO: 1901916
uagucacggccacuucacg

SEQ ID NO: 1901918 - RNA, 19 nt, Artificial Sequence
  Description of Artificial Sequence: Synthetic oligonucleotide
  Sense strand starting at position 2749 of SEQ ID NO: 1879367
gcgguugucauugcuuacu

SEQ ID NO: 1901919 - RNA, 19 nt, Artificial Sequence
  Description of Artificial Sequence: Synthetic oligonucleotide
  Antisense strand to SEQ ID NO: 1901918
aguaagcaaugacaaccgc

SEQ ID NO: 1901920 - RNA, 19 nt, Artificial Sequence
  Description of Artificial Sequence: Synthetic oligonucleotide
  Sense strand starting at position 2901 of SEQ ID NO: 1879367
ggcagguuugguuaggaga

SEQ ID NO: 1901921 - RNA, 19 nt, Artificial Sequence
  Description of Artificial Sequence: Synthetic oligonucleotide
  Antisense strand to SEQ ID NO: 1901920
ucuccuaaccaaaccugcc

SEQ ID NO: 1901922 - RNA, 19 nt, Artificial Sequence
  Description of Artificial Sequence: Synthetic oligonucleotide
  Sense strand starting at position 2916 of SEQ ID NO: 1879367
gagagugucccaugaacau

SEQ ID NO: 1901923 - RNA, 19 nt, Artificial Sequence
  Description of Artificial Sequence: Synthetic oligonucleotide
  Antisense strand to SEQ ID NO: 1901922
auguucaugggacacucuc

SEQ ID NO: 1901924 - RNA, 19 nt, Artificial Sequence
  Description of Artificial Sequence: Synthetic oligonucleotide
  Sense strand starting at position 2968 of SEQ ID NO: 1879367
augauuccucaguaagccu

SEQ ID NO: 1901925 - RNA, 19 nt, Artificial Sequence
  Description of Artificial Sequence: Synthetic oligonucleotide
  Antisense strand to SEQ ID NO: 1901924
aggcuuacugaggaaucau

SEQ ID NO: 1901926 - RNA, 19 nt, Artificial Sequence
  Description of Artificial Sequence: Synthetic oligonucleotide
  Sense strand starting at position 3025 of SEQ ID NO: 1879367
cugauaacugaauguaauu

SEQ ID NO: 1901927 - RNA, 19 nt, Artificial Sequence
  Description of Artificial Sequence: Synthetic oligonucleotide
  Antisense strand to SEQ ID NO: 1901926
aauuacauucaguuaucag

SEQ ID NO: 1901928 - RNA, 19 nt, Artificial Sequence
  Description of Artificial Sequence: Synthetic oligonucleotide
  Sense strand starting at position 3068 of SEQ ID NO: 1879367
cggcuauuaccucagaaag

SEQ ID NO: 1901929 - RNA, 19 nt, Artificial Sequence
  Description of Artificial Sequence: Synthetic oligonucleotide
  Antisense strand to SEQ ID NO: 1901928
cuuucugagguaauagccg

SEQ ID NO: 1901930 - RNA, 19 nt, Artificial Sequence
  Description of Artificial Sequence: Synthetic oligonucleotide
  Sense strand starting at position 3192 of SEQ ID NO: 1879367
gacaaauuagguuguuucu

SEQ ID NO: 1901931 - RNA, 19 nt, Artificial Sequence
  Description of Artificial Sequence: Synthetic oligonucleotide
  Antisense strand to SEQ ID NO: 1901930
agaaacaaccuaauuuguc

SEQ ID NO: 1901932 - RNA, 19 nt, Artificial Sequence
  Description of Artificial Sequence: Synthetic oligonucleotide
  Sense strand starting at position 3195 of SEQ ID NO: 1879367
aaauuagguuguuucuaag

SEQ ID NO: 1901933 - RNA, 19 nt, Artificial Sequence
  Description of Artificial Sequence: Synthetic oligonucleotide
  Antisense strand to SEQ ID NO: 1901932
cuuagaaacaaccuaauuu

SEQ ID NO: 1901934 - RNA, 19 nt, Artificial Sequence
  Description of Artificial Sequence: Synthetic oligonucleotide
  Sense strand starting at position 3205 of SEQ ID NO: 1879367
guuucuaaggcagaauuau

SEQ ID NO: 1901935 - RNA, 19 nt, Artificial Sequence
  Description of Artificial Sequence: Synthetic oligonucleotide
  Antisense strand to SEQ ID NO: 1901934
auaauucugccuuagaaac

SEQ ID NO: 1901936 - RNA, 19 nt, Artificial Sequence
  Description of Artificial Sequence: Synthetic oligonucleotide
  Sense strand starting at position 3211 of SEQ ID NO: 1879367
aaggcagaauuaucuugua

SEQ ID NO: 1901937 - RNA, 19 nt, Artificial Sequence
  Description of Artificial Sequence: Synthetic oligonucleotide
  Antisense strand to SEQ ID NO: 1901936
uacaagauaauucugccuu

SEQ ID NO: 1901938 - RNA, 19 nt, Artificial Sequence
  Description of Artificial Sequence: Synthetic oligonucleotide
  Sense strand starting at position 3345 of SEQ ID NO: 1879367
cuccuccuaugauuagaga

SEQ ID NO: 1901939 - RNA, 19 nt, Artificial Sequence
  Description of Artificial Sequence: Synthetic oligonucleotide
  Antisense strand to SEQ ID NO: 1901938
ucucuaaucauaggaggag

SEQ ID NO: 1901940 - RNA, 19 nt, Artificial Sequence
  Description of Artificial Sequence: Synthetic oligonucleotide
  Sense strand starting at position 3378 of SEQ ID NO: 1879367
uugagauauuaagugguga

SEQ ID NO: 1901941 - RNA, 19 nt, Artificial Sequence
  Description of Artificial Sequence: Synthetic oligonucleotide
  Antisense strand to SEQ ID NO: 1901940
ucaccacuuaauaucucaa

SEQ ID NO: 1901942 - RNA, 19 nt, Artificial Sequence
  Description of Artificial Sequence: Synthetic oligonucleotide
  Sense strand starting at position 3379 of SEQ ID NO: 1879367
ugagauauuaaguggugaa

SEQ ID NO: 1901943 - RNA, 19 nt, Artificial Sequence
  Description of Artificial Sequence: Synthetic oligonucleotide
  Antisense strand to SEQ ID NO: 1901942
uucaccacuuaauaucuca

SEQ ID NO: 1901944 - RNA, 19 nt, Artificial Sequence
  Description of Artificial Sequence: Synthetic oligonucleotide
  Sense strand starting at position 3413 of SEQ ID NO: 1879367
ugucuaacugucuaaccau

SEQ ID NO: 1901945 - RNA, 19 nt, Artificial Sequence
  Description of Artificial Sequence: Synthetic oligonucleotide
  Antisense strand to SEQ ID NO: 1901944
augguuagacaguuagaca

SEQ ID NO: 1901946 - RNA, 19 nt, Artificial Sequence
  Description of Artificial Sequence: Synthetic oligonucleotide
  Sense strand starting at position 3422 of SEQ ID NO: 1879367
gucuaaccaugguuuaaua

SEQ ID NO: 1901947 - RNA, 19 nt, Artificial Sequence
  Description of Artificial Sequence: Synthetic oligonucleotide
  Antisense strand to SEQ ID NO: 1901946
uauuaaaccaugguuagac

SEQ ID NO: 1901948 - RNA, 19 nt, Artificial Sequence
  Description of Artificial Sequence: Synthetic oligonucleotide
  Sense strand starting at position 3589 of SEQ ID NO: 1879367
cucuaaugggccuauaaua

SEQ ID NO: 1901949 - RNA, 19 nt, Artificial Sequence
  Description of Artificial Sequence: Synthetic oligonucleotide
  Antisense strand to SEQ ID NO: 1901948
uauuauaggcccauuagag

SEQ ID NO: 1901950 - RNA, 19 nt, Artificial Sequence
  Description of Artificial Sequence: Synthetic oligonucleotide
  Sense strand starting at position 3633 of SEQ ID NO: 1879367
ugacaaugauaacugugau

SEQ ID NO: 1901951 - RNA, 19 nt, Artificial Sequence
  Description of Artificial Sequence: Synthetic oligonucleotide
  Antisense strand to SEQ ID NO: 1901950
aucacaguuaucauuguca

SEQ ID NO: 1901952 - RNA, 19 nt, Artificial Sequence
  Description of Artificial Sequence: Synthetic oligonucleotide
  Sense strand starting at position 3636 of SEQ ID NO: 1879367
caaugauaacugugauaug

SEQ ID NO: 1901953 - RNA, 19 nt, Artificial Sequence
  Description of Artificial Sequence: Synthetic oligonucleotide
  Antisense strand to SEQ ID NO: 1901952
cauaucacaguuaucauug

SEQ ID NO: 1901954 - RNA, 19 nt, Artificial Sequence
  Description of Artificial Sequence: Synthetic oligonucleotide
  Sense strand starting at position 3647 of SEQ ID NO: 1879367
gugauauggucucuagaau

SEQ ID NO: 1901955 - RNA, 19 nt, Artificial Sequence
  Description of Artificial Sequence: Synthetic oligonucleotide
  Antisense strand to SEQ ID NO: 1901954
auucuagagaccauaucac

SEQ ID NO: 1901956 - RNA, 19 nt, Artificial Sequence
  Description of Artificial Sequence: Synthetic oligonucleotide
  Sense strand starting at position 3671 of SEQ ID NO: 1879367
gaugguagguacucugaga

SEQ ID NO: 1901957 - RNA, 19 nt, Artificial Sequence
  Description of Artificial Sequence: Synthetic oligonucleotide
  Antisense strand to SEQ ID NO: 1901956
ucucagaguaccuaccauc

SEQ ID NO: 1901958 - RNA, 19 nt, Artificial Sequence
  Description of Artificial Sequence: Synthetic oligonucleotide
  Sense strand starting at position 3700 of SEQ ID NO: 1879367
aggagaaauccauguguuu

SEQ ID NO: 1901959 - RNA, 19 nt, Artificial Sequence
  Description of Artificial Sequence: Synthetic oligonucleotide
  Antisense strand to SEQ ID NO: 1901958
aaacacauggauuucuccu

SEQ ID NO: 1901960 - RNA, 19 nt, Artificial Sequence
  Description of Artificial Sequence: Synthetic oligonucleotide
  Sense strand starting at position 3705 of SEQ ID NO: 1879367
aaauccauguguuugagga

SEQ ID NO: 1901961 - RNA, 19 nt, Artificial Sequence
  Description of Artificial Sequence: Synthetic oligonucleotide
  Antisense strand to SEQ ID NO: 1901960
uccucaaacacauggauuu

SEQ ID NO: 1901962 - RNA, 19 nt, Artificial Sequence
  Description of Artificial Sequence: Synthetic oligonucleotide
  Sense strand starting at position 3706 of SEQ ID NO: 1879367
aauccauguguuugaggaa

SEQ ID NO: 1901963 - RNA, 19 nt, Artificial Sequence
  Description of Artificial Sequence: Synthetic oligonucleotide
  Antisense strand to SEQ ID NO: 1901962
uuccucaaacacauggauu

SEQ ID NO: 1901964 - RNA, 19 nt, Artificial Sequence
  Description of Artificial Sequence: Synthetic oligonucleotide
  Sense strand starting at position 3886 of SEQ ID NO: 1879367
aggauaugagguugcacaa

SEQ ID NO: 1901965 - RNA, 19 nt, Artificial Sequence
  Description of Artificial Sequence: Synthetic oligonucleotide
  Antisense strand to SEQ ID NO: 1901964
uugugcaaccucauauccu

SEQ ID NO: 1901966 - RNA, 19 nt, Artificial Sequence
  Description of Artificial Sequence: Synthetic oligonucleotide
  Sense strand starting at position 3911 of SEQ ID NO: 1879367
gguugauggcauuaaucca

SEQ ID NO: 1901967 - RNA, 19 nt, Artificial Sequence
  Description of Artificial Sequence: Synthetic oligonucleotide
  Antisense strand to SEQ ID NO: 1901966
uggauuaaugccaucaacc

SEQ ID NO: 1901968 - RNA, 19 nt, Artificial Sequence
  Description of Artificial Sequence: Synthetic oligonucleotide
  Sense strand starting at position 3919 of SEQ ID NO: 1879367
gcauuaauccaagagguac

SEQ ID NO: 1901969 - RNA, 19 nt, Artificial Sequence
  Description of Artificial Sequence: Synthetic oligonucleotide
  Antisense strand to SEQ ID NO: 1901968
guaccucuuggauuaaugc

SEQ ID NO: 1901970 - RNA, 19 nt, Artificial Sequence
  Description of Artificial Sequence: Synthetic oligonucleotide
  Sense strand starting at position 62 of SEQ ID NO: 1879368
gcacucucuuaguuaagca

SEQ ID NO: 1901971 - RNA, 19 nt, Artificial Sequence
  Description of Artificial Sequence: Synthetic oligonucleotide
  Antisense strand to SEQ ID NO: 1901970
ugcuuaacuaagagagugc

SEQ ID NO: 1901972 - RNA, 19 nt, Artificial Sequence
  Description of Artificial Sequence: Synthetic oligonucleotide
  Sense strand starting at position 66 of SEQ ID NO: 1879368
ucucuuaguuaagcaguga

SEQ ID NO: 1901973 - RNA, 19 nt, Artificial Sequence
  Description of Artificial Sequence: Synthetic oligonucleotide
  Antisense strand to SEQ ID NO: 1901972
ucacugcuuaacuaagaga

SEQ ID NO: 1901974 - RNA, 19 nt, Artificial Sequence
  Description of Artificial Sequence: Synthetic oligonucleotide
  Sense strand starting at position 128 of SEQ ID NO: 1879368
uuugacaguuaucuuaaga

SEQ ID NO: 1901975 - RNA, 19 nt, Artificial Sequence
  Description of Artificial Sequence: Synthetic oligonucleotide
  Antisense strand to SEQ ID NO: 1901974
ucuuaagauaacugucaaa

SEQ ID NO: 1901976 - RNA, 19 nt, Artificial Sequence
  Description of Artificial Sequence: Synthetic oligonucleotide
  Sense strand starting at position 162 of SEQ ID NO: 1879368
acaccacacugguaaagau

SEQ ID NO: 1901977 - RNA, 19 nt, Artificial Sequence
  Description of Artificial Sequence: Synthetic oligonucleotide
  Antisense strand to SEQ ID NO: 1901976
aucuuuaccaguguggugu

SEQ ID NO: 1901978 - RNA, 19 nt, Artificial Sequence
  Description of Artificial Sequence: Synthetic oligonucleotide
  Sense strand starting at position 171 of SEQ ID NO: 1879368
ugguaaagaucccuuaccu

SEQ ID NO: 1901979 - RNA, 19 nt, Artificial Sequence
  Description of Artificial Sequence: Synthetic oligonucleotide
  Antisense strand to SEQ ID NO: 1901978
agguaagggaucuuuacca

SEQ ID NO: 1901980 - RNA, 19 nt, Artificial Sequence
  Description of Artificial Sequence: Synthetic oligonucleotide
  Sense strand starting at position 288 of SEQ ID NO: 1879368
aguguugaaggaugugaau

SEQ ID NO: 1901981 - RNA, 19 nt, Artificial Sequence
  Description of Artificial Sequence: Synthetic oligonucleotide
  Antisense strand to SEQ ID NO: 1901980
auucacauccuucaacacu

SEQ ID NO: 1901982 - RNA, 19 nt, Artificial Sequence
  Description of Artificial Sequence: Synthetic oligonucleotide
  Sense strand starting at position 369 of SEQ ID NO: 1879368
gcgaaagucagacagcuuu

SEQ ID NO: 1901983 - RNA, 19 nt, Artificial Sequence
  Description of Artificial Sequence: Synthetic oligonucleotide
  Antisense strand to SEQ ID NO: 1901982
aaagcugucugacuuucgc

SEQ ID NO: 1901984 - RNA, 19 nt, Artificial Sequence
  Description of Artificial Sequence: Synthetic oligonucleotide
  Sense strand starting at position 410 of SEQ ID NO: 1879368
gugauuggccagugcugau

SEQ ID NO: 1901985 - RNA, 19 nt, Artificial Sequence
  Description of Artificial Sequence: Synthetic oligonucleotide
  Antisense strand to SEQ ID NO: 1901984
aucagcacuggccaaucac

SEQ ID NO: 1901986 - RNA, 19 nt, Artificial Sequence
  Description of Artificial Sequence: Synthetic oligonucleotide
  Sense strand starting at position 417 of SEQ ID NO: 1879368
gccagugcugaugaggaaa

SEQ ID NO: 1901987 - RNA, 19 nt, Artificial Sequence
  Description of Artificial Sequence: Synthetic oligonucleotide
  Antisense strand to SEQ ID NO: 1901986
uuuccucaucagcacuggc

SEQ ID NO: 1901988 - RNA, 19 nt, Artificial Sequence
  Description of Artificial Sequence: Synthetic oligonucleotide
  Sense strand starting at position 563 of SEQ ID NO: 1879368
cuguccaucucguugggaa

SEQ ID NO: 1901989 - RNA, 19 nt, Artificial Sequence
  Description of Artificial Sequence: Synthetic oligonucleotide
  Antisense strand to SEQ ID NO: 1901988
uucccaacgagauggacag

SEQ ID NO: 1901990 - RNA, 19 nt, Artificial Sequence
  Description of Artificial Sequence: Synthetic oligonucleotide
  Sense strand starting at position 564 of SEQ ID NO: 1879368
uguccaucucguugggaaa

SEQ ID NO: 1901991 - RNA, 19 nt, Artificial Sequence
  Description of Artificial Sequence: Synthetic oligonucleotide
  Antisense strand to SEQ ID NO: 1901990
uuucccaacgagauggaca

SEQ ID NO: 1901992 - RNA, 19 nt, Artificial Sequence
  Description of Artificial Sequence: Synthetic oligonucleotide
  Sense strand starting at position 565 of SEQ ID NO: 1879368
guccaucucguugggaaac

SEQ ID NO: 1901993 - RNA, 19 nt, Artificial Sequence
  Description of Artificial Sequence: Synthetic oligonucleotide
  Antisense strand to SEQ ID NO: 1901992
guuucccaacgagauggac

SEQ ID NO: 1901994 - RNA, 19 nt, Artificial Sequence
  Description of Artificial Sequence: Synthetic oligonucleotide
  Sense strand starting at position 578 of SEQ ID NO: 1879368
ggaaacgucaugugaacua

SEQ ID NO: 1901995 - RNA, 19 nt, Artificial Sequence
  Description of Artificial Sequence: Synthetic oligonucleotide
  Antisense strand to SEQ ID NO: 1901994
uaguucacaugacguuucc

SEQ ID NO: 1901996 - RNA, 19 nt, Artificial Sequence
  Description of Artificial Sequence: Synthetic oligonucleotide
  Sense strand starting at position 701 of SEQ ID NO: 1879368
aucagccuuagucggaaau

SEQ ID NO: 1901997 - RNA, 19 nt, Artificial Sequence
  Description of Artificial Sequence: Synthetic oligonucleotide
  Antisense strand to SEQ ID NO: 1901996
auuuccgacuaaggcugau

SEQ ID NO: 1901998 - RNA, 19 nt, Artificial Sequence
  Description of Artificial Sequence: Synthetic oligonucleotide
  Sense strand starting at position 712 of SEQ ID NO: 1879368
ucggaaaucugauucggaa

SEQ ID NO: 1901999 - RNA, 19 nt, Artificial Sequence
  Description of Artificial Sequence: Synthetic oligonucleotide
  Antisense strand to SEQ ID NO: 1901998
uuccgaaucagauuuccga

SEQ ID NO: 1902000 - RNA, 19 nt, Artificial Sequence
  Description of Artificial Sequence: Synthetic oligonucleotide
  Sense strand starting at position 737 of SEQ ID NO: 1879368
agcuccgauccacauaaau

SEQ ID NO: 1902001 - RNA, 19 nt, Artificial Sequence
  Description of Artificial Sequence: Synthetic oligonucleotide
  Antisense strand to SEQ ID NO: 1902000
auuuauguggaucggagcu

SEQ ID NO: 1902002 - RNA, 19 nt, Artificial Sequence
  Description of Artificial Sequence: Synthetic oligonucleotide
  Sense strand starting at position 1059 of SEQ ID NO: 1879368
ggagcucagcacuauccau

SEQ ID NO: 1902003 - RNA, 19 nt, Artificial Sequence
  Description of Artificial Sequence: Synthetic oligonucleotide
  Antisense strand to SEQ ID NO: 1902002
auggauagugcugagcucc

SEQ ID NO: 1902004 - RNA, 19 nt, Artificial Sequence
  Description of Artificial Sequence: Synthetic oligonucleotide
  Sense strand starting at position 1120 of SEQ ID NO: 1879368
uccacugcagccuagaaau

SEQ ID NO: 1902005 - RNA, 19 nt, Artificial Sequence
  Description of Artificial Sequence: Synthetic oligonucleotide
  Antisense strand to SEQ ID NO: 1902004
auuucuaggcugcagugga

SEQ ID NO: 1902006 - RNA, 19 nt, Artificial Sequence
  Description of Artificial Sequence: Synthetic oligonucleotide
  Sense strand starting at position 2106 of SEQ ID NO: 1879368
ggagcuguggaaugucuuu

SEQ ID NO: 1902007 - RNA, 19 nt, Artificial Sequence
  Description of Artificial Sequence: Synthetic oligonucleotide
  Antisense strand to SEQ ID NO: 1902006
aaagacauuccacagcucc

SEQ ID NO: 1902008 - RNA, 19 nt, Artificial Sequence
  Description of Artificial Sequence: Synthetic oligonucleotide
  Sense strand starting at position 2407 of SEQ ID NO: 1879368
gggagaaauugaggaagga

SEQ ID NO: 1902009 - RNA, 19 nt, Artificial Sequence
  Description of Artificial Sequence: Synthetic oligonucleotide
  Antisense strand to SEQ ID NO: 1902008
uccuuccucaauuucuccc

SEQ ID NO: 1902010 - RNA, 19 nt, Artificial Sequence
  Description of Artificial Sequence: Synthetic oligonucleotide
  Sense strand starting at position 2446 of SEQ ID NO: 1879368
aggcgauuggaguacuuga

SEQ ID NO: 1902011 - RNA, 19 nt, Artificial Sequence
  Description of Artificial Sequence: Synthetic oligonucleotide
  Antisense strand to SEQ ID NO: 1902010
ucaaguacuccaaucgccu

SEQ ID NO: 1902012 - RNA, 19 nt, Artificial Sequence
  Description of Artificial Sequence: Synthetic oligonucleotide
  Sense strand starting at position 2471 of SEQ ID NO: 1879368
agggaugguucagaucaga

SEQ ID NO: 1902013 - RNA, 19 nt, Artificial Sequence
  Description of Artificial Sequence: Synthetic oligonucleotide
  Antisense strand to SEQ ID NO: 1902012
ucugaucugaaccaucccu

SEQ ID NO: 1902014 - RNA, 19 nt, Artificial Sequence
  Description of Artificial Sequence: Synthetic oligonucleotide
  Sense strand starting at position 2492 of SEQ ID NO: 1879368
ucugaagucuagcaaagaa

SEQ ID NO: 1902015 - RNA, 19 nt, Artificial Sequence
  Description of Artificial Sequence: Synthetic oligonucleotide
  Antisense strand to SEQ ID NO: 1902014
uucuuugcuagacuucaga

SEQ ID NO: 1902016 - RNA, 19 nt, Artificial Sequence
  Description of Artificial Sequence: Synthetic oligonucleotide
  Sense strand starting at position 2534 of SEQ ID NO: 1879368
acaagaaguuguuuccagu

SEQ ID NO: 1902017 - RNA, 19 nt, Artificial Sequence
  Description of Artificial Sequence: Synthetic oligonucleotide
  Antisense strand to SEQ ID NO: 1902016
acuggaaacaacuucuugu

SEQ ID NO: 1902018 - RNA, 19 nt, Artificial Sequence
  Description of Artificial Sequence: Synthetic oligonucleotide
  Sense strand starting at position 2540 of SEQ ID NO: 1879368
aguuguuuccaguauauau

SEQ ID NO: 1902019 - RNA, 19 nt, Artificial Sequence
  Description of Artificial Sequence: Synthetic oligonucleotide
  Antisense strand to SEQ ID NO: 1902018
auauauacuggaaacaacu

SEQ ID NO: 1902020 - RNA, 19 nt, Artificial Sequence
  Description of Artificial Sequence: Synthetic oligonucleotide
  Sense strand starting at position 2604 of SEQ ID NO: 1879368
auuguugguacgggaaauc

SEQ ID NO: 1902021 - RNA, 19 nt, Artificial Sequence
  Description of Artificial Sequence: Synthetic oligonucleotide
  Antisense strand to SEQ ID NO: 1902020
gauuucccguaccaacaau

SEQ ID NO: 1902022 - RNA, 19 nt, Artificial Sequence
  Description of Artificial Sequence: Synthetic oligonucleotide
  Sense strand starting at position 2615 of SEQ ID NO: 1879368
gggaaaucuuaagcagcau

SEQ ID NO: 1902023 - RNA, 19 nt, Artificial Sequence
  Description of Artificial Sequence: Synthetic oligonucleotide
  Antisense strand to SEQ ID NO: 1902022
augcugcuuaagauuuccc

SEQ ID NO: 1902024 - RNA, 19 nt, Artificial Sequence
  Description of Artificial Sequence: Synthetic oligonucleotide
  Sense strand starting at position 2681 of SEQ ID NO: 1879368
uuuguuucgccgucauuau

SEQ ID NO: 1902025 - RNA, 19 nt, Artificial Sequence
  Description of Artificial Sequence: Synthetic oligonucleotide
  Antisense strand to SEQ ID NO: 1902024
auaaugacggcgaaacaaa

SEQ ID NO: 1902026 - RNA, 19 nt, Artificial Sequence
  Description of Artificial Sequence: Synthetic oligonucleotide
  Sense strand starting at position 2690 of SEQ ID NO: 1879368
ccgucauuauugccaauua

SEQ ID NO: 1902027 - RNA, 19 nt, Artificial Sequence
  Description of Artificial Sequence: Synthetic oligonucleotide
  Antisense strand to SEQ ID NO: 1902026
uaauuggcaauaaugacgg

SEQ ID NO: 1902028 - RNA, 19 nt, Artificial Sequence
  Description of Artificial Sequence: Synthetic oligonucleotide
  Sense strand starting at position 2759 of SEQ ID NO: 1879368
uugguugcaucauuaggau

SEQ ID NO: 1902029 - RNA, 19 nt, Artificial Sequence
  Description of Artificial Sequence: Synthetic oligonucleotide
  Antisense strand to SEQ ID NO: 1902028
auccuaaugaugcaaccaa

SEQ ID NO: 1902030 - RNA, 19 nt, Artificial Sequence
  Description of Artificial Sequence: Synthetic oligonucleotide
  Sense strand starting at position 2876 of SEQ ID NO: 1879368
ccuggugugcuauaugcaa

SEQ ID NO: 1902031 - RNA, 19 nt, Artificial Sequence
  Description of Artificial Sequence: Synthetic oligonucleotide
  Antisense strand to SEQ ID NO: 1902030
uugcauauagcacaccagg

SEQ ID NO: 1902032 - RNA, 19 nt, Artificial Sequence
  Description of Artificial Sequence: Synthetic oligonucleotide
  Sense strand starting at position 2906 of SEQ ID NO: 1879368
ggucccuacuugucccaua

SEQ ID NO: 1902033 - RNA, 19 nt, Artificial Sequence
  Description of Artificial Sequence: Synthetic oligonucleotide
  Antisense strand to SEQ ID NO: 1902032
uaugggacaaguagggacc

SEQ ID NO: 1902034 - RNA, 19 nt, Artificial Sequence
  Description of Artificial Sequence: Synthetic oligonucleotide
  Sense strand starting at position 2907 of SEQ ID NO: 1879368
gucccuacuugucccauaa

SEQ ID NO: 1902035 - RNA, 19 nt, Artificial Sequence
  Description of Artificial Sequence: Synthetic oligonucleotide
  Antisense strand to SEQ ID NO: 1902034
uuaugggacaaguagggac

SEQ ID NO: 1902036 - RNA, 19 nt, Artificial Sequence
  Description of Artificial Sequence: Synthetic oligonucleotide
  Sense strand starting at position 2960 of SEQ ID NO: 1879368
cuucccuccgcagauuauu

SEQ ID NO: 1902037 - RNA, 19 nt, Artificial Sequence
  Description of Artificial Sequence: Synthetic oligonucleotide
  Antisense strand to SEQ ID NO: 1902036
aauaaucugcggagggaag

SEQ ID NO: 1902038 - RNA, 19 nt, Artificial Sequence
  Description of Artificial Sequence: Synthetic oligonucleotide
  Sense strand starting at position 3021 of SEQ ID NO: 1879368
cuggauuaguucuccuaau

SEQ ID NO: 1902039 - RNA, 19 nt, Artificial Sequence
  Description of Artificial Sequence: Synthetic oligonucleotide
  Antisense strand to SEQ ID NO: 1902038
auuaggagaacuaauccag

SEQ ID NO: 1902040 - RNA, 19 nt, Artificial Sequence
  Description of Artificial Sequence: Synthetic oligonucleotide
  Sense strand starting at position 3022 of SEQ ID NO: 1879368
uggauuaguucuccuaaug

SEQ ID NO: 1902041 - RNA, 19 nt, Artificial Sequence
  Description of Artificial Sequence: Synthetic oligonucleotide
  Antisense strand to SEQ ID NO: 1902040
cauuaggagaacuaaucca

SEQ ID NO: 1902042 - RNA, 19 nt, Artificial Sequence
  Description of Artificial Sequence: Synthetic oligonucleotide
  Sense strand starting at position 3505 of SEQ ID NO: 1879368
aagguuuauuuggaaauug

SEQ ID NO: 1902043 - RNA, 19 nt, Artificial Sequence
  Description of Artificial Sequence: Synthetic oligonucleotide
  Antisense strand to SEQ ID NO: 1902042
caauuuccaaauaaaccuu

SEQ ID NO: 1902044 - RNA, 19 nt, Artificial Sequence
  Description of Artificial Sequence: Synthetic oligonucleotide
  Sense strand starting at position 3513 of SEQ ID NO: 1879368
uuuggaaauugucuucuga

SEQ ID NO: 1902045 - RNA, 19 nt, Artificial Sequence
  Description of Artificial Sequence: Synthetic oligonucleotide
  Antisense strand to SEQ ID NO: 1902044
ucagaagacaauuuccaaa

SEQ ID NO: 1902046 - RNA, 19 nt, Artificial Sequence
  Description of Artificial Sequence: Synthetic oligonucleotide
  Sense strand starting at position 3524 of SEQ ID NO: 1879368
ucuucugagugccuggaaa

SEQ ID NO: 1902047 - RNA, 19 nt, Artificial Sequence
  Description of Artificial Sequence: Synthetic oligonucleotide
  Antisense strand to SEQ ID NO: 1902046
uuuccaggcacucagaaga

SEQ ID NO: 1902048 - RNA, 19 nt, Artificial Sequence
  Description of Artificial Sequence: Synthetic oligonucleotide
  Sense strand starting at position 3526 of SEQ ID NO: 1879368
uucugagugccuggaaacu

SEQ ID NO: 1902049 - RNA, 19 nt, Artificial Sequence
  Description of Artificial Sequence: Synthetic oligonucleotide
  Antisense strand to SEQ ID NO: 1902048
aguuuccaggcacucagaa

SEQ ID NO: 1902050 - RNA, 19 nt, Artificial Sequence
  Description of Artificial Sequence: Synthetic oligonucleotide
  Sense strand starting at position 8 of SEQ ID NO: 1879369
gacaaaucuugagucucag

SEQ ID NO: 1902051 - RNA, 19 nt, Artificial Sequence
  Description of Artificial Sequence: Synthetic oligonucleotide
  Antisense strand to SEQ ID NO: 1902050
cugagacucaagauuuguc

SEQ ID NO: 1902052 - RNA, 19 nt, Artificial Sequence
  Description of Artificial Sequence: Synthetic oligonucleotide
  Sense strand starting at position 291 of SEQ ID NO: 1879369
aggagaugugccuguugga

SEQ ID NO: 1902053 - RNA, 19 nt, Artificial Sequence
  Description of Artificial Sequence: Synthetic oligonucleotide
  Antisense strand to SEQ ID NO: 1902052
uccaacaggcacaucuccu

SEQ ID NO: 1902054 - RNA, 19 nt, Artificial Sequence
  Description of Artificial Sequence: Synthetic oligonucleotide
  Sense strand starting at position 557 of SEQ ID NO: 1879369
ggcucucacgaguaucaua

SEQ ID NO: 1902055 - RNA, 19 nt, Artificial Sequence
  Description of Artificial Sequence: Synthetic oligonucleotide
  Antisense strand to SEQ ID NO: 1902054
uaugauacucgugagagcc

SEQ ID NO: 1902056 - RNA, 19 nt, Artificial Sequence
  Description of Artificial Sequence: Synthetic oligonucleotide
  Sense strand starting at position 1138 of SEQ ID NO: 1879369
gguaauacuguagagagcu

SEQ ID NO: 1902057 - RNA, 19 nt, Artificial Sequence
  Description of Artificial Sequence: Synthetic oligonucleotide
  Antisense strand to SEQ ID NO: 1902056
agcucucuacaguauuacc

SEQ ID NO: 1902058 - RNA, 19 nt, Artificial Sequence
  Description of Artificial Sequence: Synthetic oligonucleotide
  Sense strand starting at position 1211 of SEQ ID NO: 1879369
guggauaaauugccugaga

SEQ ID NO: 1902059 - RNA, 19 nt, Artificial Sequence
  Description of Artificial Sequence: Synthetic oligonucleotide
  Antisense strand to SEQ ID NO: 1902058
ucucaggcaauuuauccac

SEQ ID NO: 1902060 - RNA, 19 nt, Artificial Sequence
  Description of Artificial Sequence: Synthetic oligonucleotide
  Sense strand starting at position 1212 of SEQ ID NO: 1879369
uggauaaauugccugagaa

SEQ ID NO: 1902061 - RNA, 19 nt, Artificial Sequence
  Description of Artificial Sequence: Synthetic oligonucleotide
  Antisense strand to SEQ ID NO: 1902060
uucucaggcaauuuaucca

SEQ ID NO: 1902062 - RNA, 19 nt, Artificial Sequence
  Description of Artificial Sequence: Synthetic oligonucleotide
  Sense strand starting at position 1222 of SEQ ID NO: 1879369
gccugagaaaucugcuuag

SEQ ID NO: 1902063 - RNA, 19 nt, Artificial Sequence
  Description of Artificial Sequence: Synthetic oligonucleotide
  Antisense strand to SEQ ID NO: 1902062
cuaagcagauuucucaggc

SEQ ID NO: 1902064 - RNA, 19 nt, Artificial Sequence
  Description of Artificial Sequence: Synthetic oligonucleotide
  Sense strand starting at position 1225 of SEQ ID NO: 1879369
ugagaaaucugcuuaggcu

SEQ ID NO: 1902065 - RNA, 19 nt, Artificial Sequence
  Description of Artificial Sequence: Synthetic oligonucleotide
  Antisense strand to SEQ ID NO: 1902064
agccuaagcagauuucuca

SEQ ID NO: 1902066 - RNA, 19 nt, Artificial Sequence
  Description of Artificial Sequence: Synthetic oligonucleotide
  Sense strand starting at position 1226 of SEQ ID NO: 1879369
gagaaaucugcuuaggcuu

SEQ ID NO: 1902067 - RNA, 19 nt, Artificial Sequence
  Description of Artificial Sequence: Synthetic oligonucleotide
  Antisense strand to SEQ ID NO: 1902066
aagccuaagcagauuucuc

SEQ ID NO: 1902068 - RNA, 19 nt, Artificial Sequence
  Description of Artificial Sequence: Synthetic oligonucleotide
  Sense strand starting at position 1253 of SEQ ID NO: 1879369
cgagaguguggaugagagu

SEQ ID NO: 1902069 - RNA, 19 nt, Artificial Sequence
  Description of Artificial Sequence: Synthetic oligonucleotide
  Antisense strand to SEQ ID NO: 1902068
acucucauccacacucucg

SEQ ID NO: 1902070 - RNA, 19 nt, Artificial Sequence
  Description of Artificial Sequence: Synthetic oligonucleotide
  Sense strand starting at position 1262 of SEQ ID NO: 1879369
ggaugagagugaaagguuu

SEQ ID NO: 1902071 - RNA, 19 nt, Artificial Sequence
  Description of Artificial Sequence: Synthetic oligonucleotide
  Antisense strand to SEQ ID NO: 1902070
aaaccuuucacucucaucc

SEQ ID NO: 1902072 - RNA, 19 nt, Artificial Sequence
  Description of Artificial Sequence: Synthetic oligonucleotide
  Sense strand starting at position 2117 of SEQ ID NO: 1879369
gcuguaucaggucaauaaa

SEQ ID NO: 1902073 - RNA, 19 nt, Artificial Sequence
  Description of Artificial Sequence: Synthetic oligonucleotide
  Antisense strand to SEQ ID NO: 1902072
uuuauugaccugauacagc

SEQ ID NO: 1902074 - RNA, 19 nt, Artificial Sequence
  Description of Artificial Sequence: Synthetic oligonucleotide
  Sense strand starting at position 2139 of SEQ ID NO: 1879369
ccugcaagauuguuaaccu

SEQ ID NO: 1902075 - RNA, 19 nt, Artificial Sequence
  Description of Artificial Sequence: Synthetic oligonucleotide
  Antisense strand to SEQ ID NO: 1902074
agguuaacaaucuugcagg

SEQ ID NO: 1902076 - RNA, 19 nt, Artificial Sequence
  Description of Artificial Sequence: Synthetic oligonucleotide
  Sense strand starting at position 2172 of SEQ ID NO: 1879369
acagucggguccuuagaau

SEQ ID NO: 1902077 - RNA, 19 nt, Artificial Sequence
  Description of Artificial Sequence: Synthetic oligonucleotide
  Antisense strand to SEQ ID NO: 1902076
auucuaaggacccgacugu

SEQ ID NO: 1902078 - RNA, 19 nt, Artificial Sequence
  Description of Artificial Sequence: Synthetic oligonucleotide
  Sense strand starting at position 2210 of SEQ ID NO: 1879369
ugugaacugauuugcgauu

SEQ ID NO: 1902079 - RNA, 19 nt, Artificial Sequence
  Description of Artificial Sequence: Synthetic oligonucleotide
  Antisense strand to SEQ ID NO: 1902078
aaucgcaaaucaguucaca

SEQ ID NO: 1902080 - RNA, 19 nt, Artificial Sequence
  Description of Artificial Sequence: Synthetic oligonucleotide
  Sense strand starting at position 2504 of SEQ ID NO: 1879369
cuugaaggucccgauugau

SEQ ID NO: 1902081 - RNA, 19 nt, Artificial Sequence
  Description of Artificial Sequence: Synthetic oligonucleotide
  Antisense strand to SEQ ID NO: 1902080
aucaaucgggaccuucaag

SEQ ID NO: 1902082 - RNA, 19 nt, Artificial Sequence
  Description of Artificial Sequence: Synthetic oligonucleotide
  Sense strand starting at position 2515 of SEQ ID NO: 1879369
cgauugauugggugggaga

SEQ ID NO: 1902083 - RNA, 19 nt, Artificial Sequence
  Description of Artificial Sequence: Synthetic oligonucleotide
  Antisense strand to SEQ ID NO: 1902082
ucucccacccaaucaaucg

SEQ ID NO: 1902084 - RNA, 19 nt, Artificial Sequence
  Description of Artificial Sequence: Synthetic oligonucleotide
  Sense strand starting at position 2517 of SEQ ID NO: 1879369
auugauugggugggagagu

SEQ ID NO: 1902085 - RNA, 19 nt, Artificial Sequence
  Description of Artificial Sequence: Synthetic oligonucleotide
  Antisense strand to SEQ ID NO: 1902084
acucucccacccaaucaau

SEQ ID NO: 1902086 - RNA, 19 nt, Artificial Sequence
  Description of Artificial Sequence: Synthetic oligonucleotide
  Sense strand starting at position 2775 of SEQ ID NO: 1879369
uuaagccaguuuccagaua

SEQ ID NO: 1902087 - RNA, 19 nt, Artificial Sequence
  Description of Artificial Sequence: Synthetic oligonucleotide
  Antisense strand to SEQ ID NO: 1902086
uaucuggaaacuggcuuaa

SEQ ID NO: 1902088 - RNA, 19 nt, Artificial Sequence
  Description of Artificial Sequence: Synthetic oligonucleotide
  Sense strand starting at position 2919 of SEQ ID NO: 1879369
ggaucuguguccucuggga

SEQ ID NO: 1902089 - RNA, 19 nt, Artificial Sequence
  Description of Artificial Sequence: Synthetic oligonucleotide
  Antisense strand to SEQ ID NO: 1902088
ucccagaggacacagaucc

SEQ ID NO: 1902090 - RNA, 19 nt, Artificial Sequence
  Description of Artificial Sequence: Synthetic oligonucleotide
  Sense strand starting at position 2951 of SEQ ID NO: 1879369
gggaaugaugacugcuacu

SEQ ID NO: 1902091 - RNA, 19 nt, Artificial Sequence
  Description of Artificial Sequence: Synthetic oligonucleotide
  Antisense strand to SEQ ID NO: 1902090
aguagcagucaucauuccc

SEQ ID NO: 1902092 - RNA, 19 nt, Artificial Sequence
  Description of Artificial Sequence: Synthetic oligonucleotide
  Sense strand starting at position 3100 of SEQ ID NO: 1879369
uagugagacccuggcgaaa

SEQ ID NO: 1902093 - RNA, 19 nt, Artificial Sequence
  Description of Artificial Sequence: Synthetic oligonucleotide
  Antisense strand to SEQ ID NO: 1902092
uuucgccagggucucacua

SEQ ID NO: 1902094 - RNA, 19 nt, Artificial Sequence
  Description of Artificial Sequence: Synthetic oligonucleotide
  Sense strand starting at position 3183 of SEQ ID NO: 1879369
ugaggaugggcauguaaug

SEQ ID NO: 1902095 - RNA, 19 nt, Artificial Sequence
  Description of Artificial Sequence: Synthetic oligonucleotide
  Antisense strand to SEQ ID NO: 1902094
cauuacaugcccauccuca

SEQ ID NO: 1902096 - RNA, 19 nt, Artificial Sequence
  Description of Artificial Sequence: Synthetic oligonucleotide
  Sense strand starting at position 3193 of SEQ ID NO: 1879369
cauguaaugcagggucuga

SEQ ID NO: 1902097 - RNA, 19 nt, Artificial Sequence
  Description of Artificial Sequence: Synthetic oligonucleotide
  Antisense strand to SEQ ID NO: 1902096
ucagacccugcauuacaug

SEQ ID NO: 1902098 - RNA, 19 nt, Artificial Sequence
  Description of Artificial Sequence: Synthetic oligonucleotide
  Sense strand starting at position 3243 of SEQ ID NO: 1879369
aacucuugguccucagaga

SEQ ID NO: 1902099 - RNA, 19 nt, Artificial Sequence
  Description of Artificial Sequence: Synthetic oligonucleotide
  Antisense strand to SEQ ID NO: 1902098
ucucugaggaccaagaguu

SEQ ID NO: 1902100 - RNA, 19 nt, Artificial Sequence
  Description of Artificial Sequence: Synthetic oligonucleotide
  Sense strand starting at position 3393 of SEQ ID NO: 1879369
auagcuuucccugaguaug

SEQ ID NO: 1902101 - RNA, 19 nt, Artificial Sequence
  Description of Artificial Sequence: Synthetic oligonucleotide
  Antisense strand to SEQ ID NO: 1902100
cauacucagggaaagcuau

SEQ ID NO: 1902102 - RNA, 19 nt, Artificial Sequence
  Description of Artificial Sequence: Synthetic oligonucleotide
  Sense strand starting at position 3396 of SEQ ID NO: 1879369
gcuuucccugaguaugaca

SEQ ID NO: 1902103 - RNA, 19 nt, Artificial Sequence
  Description of Artificial Sequence: Synthetic oligonucleotide
  Antisense strand to SEQ ID NO: 1902102
ugucauacucagggaaagc

SEQ ID NO: 1902104 - RNA, 19 nt, Artificial Sequence
  Description of Artificial Sequence: Synthetic oligonucleotide
  Sense strand starting at position 3405 of SEQ ID NO: 1879369
gaguaugacaggcaguauu

SEQ ID NO: 1902105 - RNA, 19 nt, Artificial Sequence
  Description of Artificial Sequence: Synthetic oligonucleotide
  Antisense strand to SEQ ID NO: 1902104
aauacugccugucauacuc

SEQ ID NO: 1902106 - RNA, 19 nt, Artificial Sequence
  Description of Artificial Sequence: Synthetic oligonucleotide
  Sense strand starting at position 3473 of SEQ ID NO: 1879369
uacuguccuuggcugaaau

SEQ ID NO: 1902107 - RNA, 19 nt, Artificial Sequence
  Description of Artificial Sequence: Synthetic oligonucleotide
  Antisense strand to SEQ ID NO: 1902106
auuucagccaaggacagua

SEQ ID NO: 1902108 - RNA, 19 nt, Artificial Sequence
  Description of Artificial Sequence: Synthetic oligonucleotide
  Sense strand starting at position 3561 of SEQ ID NO: 1879369
gucauacuccuaggauuag

SEQ ID NO: 1902109 - RNA, 19 nt, Artificial Sequence
  Description of Artificial Sequence: Synthetic oligonucleotide
  Antisense strand to SEQ ID NO: 1902108
cuaauccuaggaguaugac

SEQ ID NO: 1902110 - RNA, 19 nt, Artificial Sequence
  Description of Artificial Sequence: Synthetic oligonucleotide
  Sense strand starting at position 3618 of SEQ ID NO: 1879369
accuuauuggccuauaugu

SEQ ID NO: 1902111 - RNA, 19 nt, Artificial Sequence
  Description of Artificial Sequence: Synthetic oligonucleotide
  Antisense strand to SEQ ID NO: 1902110
acauauaggccaauaaggu

SEQ ID NO: 1902112 - RNA, 19 nt, Artificial Sequence
  Description of Artificial Sequence: Synthetic oligonucleotide
  Sense strand starting at position 3691 of SEQ ID NO: 1879369
ucugccuuuccuggauaga

SEQ ID NO: 1902113 - RNA, 19 nt, Artificial Sequence
  Description of Artificial Sequence: Synthetic oligonucleotide
  Antisense strand to SEQ ID NO: 1902112
ucuauccaggaaaggcaga

SEQ ID NO: 1902114 - RNA, 19 nt, Artificial Sequence
  Description of Artificial Sequence: Synthetic oligonucleotide
  Sense strand starting at position 3692 of SEQ ID NO: 1879369
cugccuuuccuggauagaa

SEQ ID NO: 1902115 - RNA, 19 nt, Artificial Sequence
  Description of Artificial Sequence: Synthetic oligonucleotide
  Antisense strand to SEQ ID NO: 1902114
uucuauccaggaaaggcag

SEQ ID NO: 1902116 - RNA, 19 nt, Artificial Sequence
  Description of Artificial Sequence: Synthetic oligonucleotide
  Sense strand starting at position 3694 of SEQ ID NO: 1879369
gccuuuccuggauagaaau

SEQ ID NO: 1902117 - RNA, 19 nt, Artificial Sequence
  Description of Artificial Sequence: Synthetic oligonucleotide
  Antisense strand to SEQ ID NO: 1902116
auuucuauccaggaaaggc

SEQ ID NO: 1902118 - RNA, 19 nt, Artificial Sequence
  Description of Artificial Sequence: Synthetic oligonucleotide
  Sense strand starting at position 3763 of SEQ ID NO: 1879369
cucugacucugaguccuua

SEQ ID NO: 1902119 - RNA, 19 nt, Artificial Sequence
  Description of Artificial Sequence: Synthetic oligonucleotide
  Antisense strand to SEQ ID NO: 1902118
uaaggacucagagucagag

SEQ ID NO: 1902120 - RNA, 19 nt, Artificial Sequence
  Description of Artificial Sequence: Synthetic oligonucleotide
  Sense strand starting at position 3786 of SEQ ID NO: 1879369
uaggcaucuuaguuagaca

SEQ ID NO: 1902121 - RNA, 19 nt, Artificial Sequence
  Description of Artificial Sequence: Synthetic oligonucleotide
  Antisense strand to SEQ ID NO: 1902120
ugucuaacuaagaugccua

SEQ ID NO: 1902122 - RNA, 19 nt, Artificial Sequence
  Description of Artificial Sequence: Synthetic oligonucleotide
  Sense strand starting at position 3800 of SEQ ID NO: 1879369
agacauagagcuugaaccu

SEQ ID NO: 1902123 - RNA, 19 nt, Artificial Sequence
  Description of Artificial Sequence: Synthetic oligonucleotide
  Antisense strand to SEQ ID NO: 1902122
agguucaagcucuaugucu

SEQ ID NO: 1902124 - RNA, 19 nt, Artificial Sequence
  Description of Artificial Sequence: Synthetic oligonucleotide
  Sense strand starting at position 3844 of SEQ ID NO: 1879369
ccaguucuguaccuagaug

SEQ ID NO: 1902125 - RNA, 19 nt, Artificial Sequence
  Description of Artificial Sequence: Synthetic oligonucleotide
  Antisense strand to SEQ ID NO: 1902124
caucuagguacagaacugg

SEQ ID NO: 1902126 - RNA, 19 nt, Artificial Sequence
  Description of Artificial Sequence: Synthetic oligonucleotide
  Sense strand starting at position 3874 of SEQ ID NO: 1879369
uccuaauagcuggaagcau

SEQ ID NO: 1902127 - RNA, 19 nt, Artificial Sequence
  Description of Artificial Sequence: Synthetic oligonucleotide
  Antisense strand to SEQ ID NO: 1902126
augcuuccagcuauuagga

SEQ ID NO: 1902128 - RNA, 19 nt, Artificial Sequence
  Description of Artificial Sequence: Synthetic oligonucleotide
  Sense strand starting at position 3950 of SEQ ID NO: 1879369
cuucuuagguuaguuugaa

SEQ ID NO: 1902129 - RNA, 19 nt, Artificial Sequence
  Description of Artificial Sequence: Synthetic oligonucleotide
  Antisense strand to SEQ ID NO: 1902128
uucaaacuaaccuaagaag

SEQ ID NO: 1902130 - RNA, 19 nt, Artificial Sequence
  Description of Artificial Sequence: Synthetic oligonucleotide
  Sense strand starting at position 220 of SEQ ID NO: 1879370
augacagcugcggaauaaa

SEQ ID NO: 1902131 - RNA, 19 nt, Artificial Sequence
  Description of Artificial Sequence: Synthetic oligonucleotide
  Antisense strand to SEQ ID NO: 1902130
uuuauuccgcagcugucau

SEQ ID NO: 1902132 - RNA, 19 nt, Artificial Sequence
  Description of Artificial Sequence: Synthetic oligonucleotide
  Sense strand starting at position 329 of SEQ ID NO: 1879370
gaagguaggcugugaguaa

SEQ ID NO: 1902133 - RNA, 19 nt, Artificial Sequence
  Description of Artificial Sequence: Synthetic oligonucleotide
  Antisense strand to SEQ ID NO: 1902132
uuacucacagccuaccuuc

SEQ ID NO: 1902134 - RNA, 19 nt, Artificial Sequence
  Description of Artificial Sequence: Synthetic oligonucleotide
  Sense strand starting at position 369 of SEQ ID NO: 1879370
ggaagaaacuuagugcaag

SEQ ID NO: 1902135 - RNA, 19 nt, Artificial Sequence
  Description of Artificial Sequence: Synthetic oligonucleotide
  Antisense strand to SEQ ID NO: 1902134
cuugcacuaaguuucuucc

SEQ ID NO: 1902136 - RNA, 19 nt, Artificial Sequence
  Description of Artificial Sequence: Synthetic oligonucleotide
  Sense strand starting at position 375 of SEQ ID NO: 1879370
aacuuagugcaaggaauga

SEQ ID NO: 1902137 - RNA, 19 nt, Artificial Sequence
  Description of Artificial Sequence: Synthetic oligonucleotide
  Antisense strand to SEQ ID NO: 1902136
ucauuccuugcacuaaguu

SEQ ID NO: 1902138 - RNA, 19 nt, Artificial Sequence
  Description of Artificial Sequence: Synthetic oligonucleotide
  Sense strand starting at position 411 of SEQ ID NO: 1879370
gcuuaccaauuugaguaaa

SEQ ID NO: 1902139 - RNA, 19 nt, Artificial Sequence
  Description of Artificial Sequence: Synthetic oligonucleotide
  Antisense strand to SEQ ID NO: 1902138
uuuacucaaauugguaagc

SEQ ID NO: 1902140 - RNA, 19 nt, Artificial Sequence
  Description of Artificial Sequence: Synthetic oligonucleotide
  Sense strand starting at position 450 of SEQ ID NO: 1879370
ggcaauuuguaaguaugua

SEQ ID NO: 1902141 - RNA, 19 nt, Artificial Sequence
  Description of Artificial Sequence: Synthetic oligonucleotide
  Antisense strand to SEQ ID NO: 1902140
uacauacuuacaaauugcc

SEQ ID NO: 1902142 - RNA, 19 nt, Artificial Sequence
  Description of Artificial Sequence: Synthetic oligonucleotide
  Sense strand starting at position 553 of SEQ ID NO: 1879370
auauuuagcuaugaggaua

SEQ ID NO: 1902143 - RNA, 19 nt, Artificial Sequence
  Description of Artificial Sequence: Synthetic oligonucleotide
  Antisense strand to SEQ ID NO: 1902142
uauccucauagcuaaauau

SEQ ID NO: 1902144 - RNA, 19 nt, Artificial Sequence
  Description of Artificial Sequence: Synthetic oligonucleotide
  Sense strand starting at position 829 of SEQ ID NO: 1879370
gcuggacuaagccaugaua

SEQ ID NO: 1902145 - RNA, 19 nt, Artificial Sequence
  Description of Artificial Sequence: Synthetic oligonucleotide
  Antisense strand to SEQ ID NO: 1902144
uaucauggcuuaguccagc

SEQ ID NO: 1902146 - RNA, 19 nt, Artificial Sequence
  Description of Artificial Sequence: Synthetic oligonucleotide
  Sense strand starting at position 831 of SEQ ID NO: 1879370
uggacuaagccaugauagu

SEQ ID NO: 1902147 - RNA, 19 nt, Artificial Sequence
  Description of Artificial Sequence: Synthetic oligonucleotide
  Antisense strand to SEQ ID NO: 1902146
acuaucauggcuuagucca

SEQ ID NO: 1902148 - RNA, 19 nt, Artificial Sequence
  Description of Artificial Sequence: Synthetic oligonucleotide
  Sense strand starting at position 985 of SEQ ID NO: 1879370
acagaauuguaccuccagu

SEQ ID NO: 1902149 - RNA, 19 nt, Artificial Sequence
  Description of Artificial Sequence: Synthetic oligonucleotide
  Antisense strand to SEQ ID NO: 1902148
acuggagguacaauucugu

SEQ ID NO: 1902150 - RNA, 19 nt, Artificial Sequence
  Description of Artificial Sequence: Synthetic oligonucleotide
  Sense strand starting at position 991 of SEQ ID NO: 1879370
uuguaccuccaguauguau

SEQ ID NO: 1902151 - RNA, 19 nt, Artificial Sequence
  Description of Artificial Sequence: Synthetic oligonucleotide
  Antisense strand to SEQ ID NO: 1902150
auacauacuggagguacaa

SEQ ID NO: 1902152 - RNA, 19 nt, Artificial Sequence
  Description of Artificial Sequence: Synthetic oligonucleotide
  Sense strand starting at position 1097 of SEQ ID NO: 1879370
gugggaggaucuguugaag

SEQ ID NO: 1902153 - RNA, 19 nt, Artificial Sequence
  Description of Artificial Sequence: Synthetic oligonucleotide
  Antisense strand to SEQ ID NO: 1902152
cuucaacagauccucccac

SEQ ID NO: 1902154 - RNA, 19 nt, Artificial Sequence
  Description of Artificial Sequence: Synthetic oligonucleotide
  Sense strand starting at position 1108 of SEQ ID NO: 1879370
uguugaagcaaggaguuua

SEQ ID NO: 1902155 - RNA, 19 nt, Artificial Sequence
  Description of Artificial Sequence: Synthetic oligonucleotide
  Antisense strand to SEQ ID NO: 1902154
uaaacuccuugcuucaaca

SEQ ID NO: 1902156 - RNA, 19 nt, Artificial Sequence
  Description of Artificial Sequence: Synthetic oligonucleotide
  Sense strand starting at position 1521 of SEQ ID NO: 1879370
uuccuuacgaguuaggacu

SEQ ID NO: 1902157 - RNA, 19 nt, Artificial Sequence
  Description of Artificial Sequence: Synthetic oligonucleotide
  Antisense strand to SEQ ID NO: 1902156
aguccuaacucguaaggaa

SEQ ID NO: 1902158 - RNA, 19 nt, Artificial Sequence
  Description of Artificial Sequence: Synthetic oligonucleotide
  Sense strand starting at position 2053 of SEQ ID NO: 1879370
guugcaccgugaucaauuu

SEQ ID NO: 1902159 - RNA, 19 nt, Artificial Sequence
  Description of Artificial Sequence: Synthetic oligonucleotide
  Antisense strand to SEQ ID NO: 1902158
aaauugaucacggugcaac

SEQ ID NO: 1902160 - RNA, 19 nt, Artificial Sequence
  Description of Artificial Sequence: Synthetic oligonucleotide
  Sense strand starting at position 2391 of SEQ ID NO: 1879370
gcgggugacccggaauuaa

SEQ ID NO: 1902161 - RNA, 19 nt, Artificial Sequence
  Description of Artificial Sequence: Synthetic oligonucleotide
  Antisense strand to SEQ ID NO: 1902160
uuaauuccgggucacccgc

SEQ ID NO: 1902162 - RNA, 19 nt, Artificial Sequence
  Description of Artificial Sequence: Synthetic oligonucleotide
  Sense strand starting at position 2550 of SEQ ID NO: 1879370
ugggaagauugugccaguu

SEQ ID NO: 1902163 - RNA, 19 nt, Artificial Sequence
  Description of Artificial Sequence: Synthetic oligonucleotide
  Antisense strand to SEQ ID NO: 1902162
aacuggcacaaucuuccca

SEQ ID NO: 1902164 - RNA, 19 nt, Artificial Sequence
  Description of Artificial Sequence: Synthetic oligonucleotide
  Sense strand starting at position 2562 of SEQ ID NO: 1879370
gccaguugugcagugucga

SEQ ID NO: 1902165 - RNA, 19 nt, Artificial Sequence
  Description of Artificial Sequence: Synthetic oligonucleotide
  Antisense strand to SEQ ID NO: 1902164
ucgacacugcacaacuggc

SEQ ID NO: 1902166 - RNA, 19 nt, Artificial Sequence
  Description of Artificial Sequence: Synthetic oligonucleotide
  Sense strand starting at position 2600 of SEQ ID NO: 1879370
cacguaucuccugugugua

SEQ ID NO: 1902167 - RNA, 19 nt, Artificial Sequence
  Description of Artificial Sequence: Synthetic oligonucleotide
  Antisense strand to SEQ ID NO: 1902166
uacacacaggagauacgug

SEQ ID NO: 1902168 - RNA, 19 nt, Artificial Sequence
  Description of Artificial Sequence: Synthetic oligonucleotide
  Sense strand starting at position 2631 of SEQ ID NO: 1879370
cuuggugcuuaaguagaua

SEQ ID NO: 1902169 - RNA, 19 nt, Artificial Sequence
  Description of Artificial Sequence: Synthetic oligonucleotide
  Antisense strand to SEQ ID NO: 1902168
uaucuacuuaagcaccaag

SEQ ID NO: 1902170 - RNA, 19 nt, Artificial Sequence
  Description of Artificial Sequence: Synthetic oligonucleotide
  Sense strand starting at position 2670 of SEQ ID NO: 1879370
ucgaacaagcaguaucuau

SEQ ID NO: 1902171 - RNA, 19 nt, Artificial Sequence
  Description of Artificial Sequence: Synthetic oligonucleotide
  Antisense strand to SEQ ID NO: 1902170
auagauacugcuuguucga

SEQ ID NO: 1902172 - RNA, 19 nt, Artificial Sequence
  Description of Artificial Sequence: Synthetic oligonucleotide
  Sense strand starting at position 2990 of SEQ ID NO: 1879370
gacggaauuucgcucgucu

SEQ ID NO: 1902173 - RNA, 19 nt, Artificial Sequence
  Description of Artificial Sequence: Synthetic oligonucleotide
  Antisense strand to SEQ ID NO: 1902172
agacgagcgaaauuccguc

SEQ ID NO: 1902174 - RNA, 19 nt, Artificial Sequence
  Description of Artificial Sequence: Synthetic oligonucleotide
  Sense strand starting at position 2994 of SEQ ID NO: 1879370
gaauuucgcucgucuucca

SEQ ID NO: 1902175 - RNA, 19 nt, Artificial Sequence
  Description of Artificial Sequence: Synthetic oligonucleotide
  Antisense strand to SEQ ID NO: 1902174
uggaagacgagcgaaauuc

SEQ ID NO: 1902176 - RNA, 19 nt, Artificial Sequence
  Description of Artificial Sequence: Synthetic oligonucleotide
  Sense strand starting at position 3283 of SEQ ID NO: 1879370
uuucuuagggugugacaau

SEQ ID NO: 1902177 - RNA, 19 nt, Artificial Sequence
  Description of Artificial Sequence: Synthetic oligonucleotide
  Antisense strand to SEQ ID NO: 1902176
auugucacacccuaagaaa

SEQ ID NO: 1902178 - RNA, 19 nt, Artificial Sequence
  Description of Artificial Sequence: Synthetic oligonucleotide
  Sense strand starting at position 3349 of SEQ ID NO: 1879370
auagaacaccuguauguuu

SEQ ID NO: 1902179 - RNA, 19 nt, Artificial Sequence
  Description of Artificial Sequence: Synthetic oligonucleotide
  Antisense strand to SEQ ID NO: 1902178
aaacauacagguguucuau

SEQ ID NO: 1902180 - RNA, 19 nt, Artificial Sequence
  Description of Artificial Sequence: Synthetic oligonucleotide
  Sense strand starting at position 3477 of SEQ ID NO: 1879370
ggacuuaaucuggguugua

SEQ ID NO: 1902181 - RNA, 19 nt, Artificial Sequence
  Description of Artificial Sequence: Synthetic oligonucleotide
  Antisense strand to SEQ ID NO: 1902180
uacaacccagauuaagucc

SEQ ID NO: 1902182 - RNA, 19 nt, Artificial Sequence
  Description of Artificial Sequence: Synthetic oligonucleotide
  Sense strand starting at position 3478 of SEQ ID NO: 1879370
gacuuaaucuggguuguaa

SEQ ID NO: 1902183 - RNA, 19 nt, Artificial Sequence
  Description of Artificial Sequence: Synthetic oligonucleotide
  Antisense strand to SEQ ID NO: 1902182
uuacaacccagauuaaguc

SEQ ID NO: 1902184 - RNA, 19 nt, Artificial Sequence
  Description of Artificial Sequence: Synthetic oligonucleotide
  Sense strand starting at position 3491 of SEQ ID NO: 1879370
uuguaaguaucucucauac

SEQ ID NO: 1902185 - RNA, 19 nt, Artificial Sequence
  Description of Artificial Sequence: Synthetic oligonucleotide
  Antisense strand to SEQ ID NO: 1902184
guaugagagauacuuacaa

SEQ ID NO: 1902186 - RNA, 19 nt, Artificial Sequence
  Description of Artificial Sequence: Synthetic oligonucleotide
  Sense strand starting at position 3509 of SEQ ID NO: 1879370
ccaacuauuugaugaauug

SEQ ID NO: 1902187 - RNA, 19 nt, Artificial Sequence
  Description of Artificial Sequence: Synthetic oligonucleotide
  Antisense strand to SEQ ID NO: 1902186
caauucaucaaauaguugg

SEQ ID NO: 1902188 - RNA, 19 nt, Artificial Sequence
  Description of Artificial Sequence: Synthetic oligonucleotide
  Sense strand starting at position 3518 of SEQ ID NO: 1879370
ugaugaauugcauagcauc

SEQ ID NO: 1902189 - RNA, 19 nt, Artificial Sequence
  Description of Artificial Sequence: Synthetic oligonucleotide
  Antisense strand to SEQ ID NO: 1902188
gaugcuaugcaauucauca

SEQ ID NO: 1902190 - RNA, 19 nt, Artificial Sequence
  Description of Artificial Sequence: Synthetic oligonucleotide
  Sense strand starting at position 3549 of SEQ ID NO: 1879370
ggagccuagcgugcuauua

SEQ ID NO: 1902191 - RNA, 19 nt, Artificial Sequence
  Description of Artificial Sequence: Synthetic oligonucleotide
  Antisense strand to SEQ ID NO: 1902190
uaauagcacgcuaggcucc

SEQ ID NO: 1902192 - RNA, 19 nt, Artificial Sequence
  Description of Artificial Sequence: Synthetic oligonucleotide
  Sense strand starting at position 3550 of SEQ ID NO: 1879370
gagccuagcgugcuauuau

SEQ ID NO: 1902193 - RNA, 19 nt, Artificial Sequence
  Description of Artificial Sequence: Synthetic oligonucleotide
  Antisense strand to SEQ ID NO: 1902192
auaauagcacgcuaggcuc

SEQ ID NO: 1902194 - RNA, 19 nt, Artificial Sequence
  Description of Artificial Sequence: Synthetic oligonucleotide
  Sense strand starting at position 3599 of SEQ ID NO: 1879370
aggucuuucugaguuugag

SEQ ID NO: 1902195 - RNA, 19 nt, Artificial Sequence
  Description of Artificial Sequence: Synthetic oligonucleotide
  Antisense strand to SEQ ID NO: 1902194
cucaaacucagaaagaccu

SEQ ID NO: 1902196 - RNA, 19 nt, Artificial Sequence
  Description of Artificial Sequence: Synthetic oligonucleotide
  Sense strand starting at position 3602 of SEQ ID NO: 1879370
ucuuucugaguuugagagu

SEQ ID NO: 1902197 - RNA, 19 nt, Artificial Sequence
  Description of Artificial Sequence: Synthetic oligonucleotide
  Antisense strand to SEQ ID NO: 1902196
acucucaaacucagaaaga

SEQ ID NO: 1902198 - RNA, 19 nt, Artificial Sequence
  Description of Artificial Sequence: Synthetic oligonucleotide
  Sense strand starting at position 3666 of SEQ ID NO: 1879370
guugguauuuaugaaggaa

SEQ ID NO: 1902199 - RNA, 19 nt, Artificial Sequence
  Description of Artificial Sequence: Synthetic oligonucleotide
  Antisense strand to SEQ ID NO: 1902198
uuccuucauaaauaccaac

SEQ ID NO: 1902200 - RNA, 19 nt, Artificial Sequence
  Description of Artificial Sequence: Synthetic oligonucleotide
  Sense strand starting at position 3709 of SEQ ID NO: 1879370
auaaauaguugucucuacu

SEQ ID NO: 1902201 - RNA, 19 nt, Artificial Sequence
  Description of Artificial Sequence: Synthetic oligonucleotide
  Antisense strand to SEQ ID NO: 1902200
aguagagacaacuauuuau

SEQ ID NO: 1902202 - RNA, 19 nt, Artificial Sequence
  Description of Artificial Sequence: Synthetic oligonucleotide
  Sense strand starting at position 3802 of SEQ ID NO: 1879370
gaauguaugccauaugcug

SEQ ID NO: 1902203 - RNA, 19 nt, Artificial Sequence
  Description of Artificial Sequence: Synthetic oligonucleotide
  Antisense strand to SEQ ID NO: 1902202
cagcauauggcauacauuc

SEQ ID NO: 1902204 - RNA, 19 nt, Artificial Sequence
  Description of Artificial Sequence: Synthetic oligonucleotide
  Sense strand starting at position 3819 of SEQ ID NO: 1879370
ugagacugcuaggcucuaa

SEQ ID NO: 1902205 - RNA, 19 nt, Artificial Sequence
  Description of Artificial Sequence: Synthetic oligonucleotide
  Antisense strand to SEQ ID NO: 1902204
uuagagccuagcagucuca

SEQ ID NO: 1902206 - RNA, 19 nt, Artificial Sequence
  Description of Artificial Sequence: Synthetic oligonucleotide
  Sense strand starting at position 3823 of SEQ ID NO: 1879370
acugcuaggcucuaaauac

SEQ ID NO: 1902207 - RNA, 19 nt, Artificial Sequence
  Description of Artificial Sequence: Synthetic oligonucleotide
  Antisense strand to SEQ ID NO: 1902206
guauuuagagccuagcagu

SEQ ID NO: 1902208 - RNA, 19 nt, Artificial Sequence
  Description of Artificial Sequence: Synthetic oligonucleotide
  Sense strand starting at position 3950 of SEQ ID NO: 1879370
ggacauaccuggucucaau

SEQ ID NO: 1902209 - RNA, 19 nt, Artificial Sequence
  Description of Artificial Sequence: Synthetic oligonucleotide
  Antisense strand to SEQ ID NO: 1902208
auugagaccagguaugucc

SEQ ID NO: 1902210 - RNA, 19 nt, Artificial Sequence
  Description of Artificial Sequence: Synthetic oligonucleotide
  Sense strand starting at position 331 of SEQ ID NO: 1879371
augacaagucuguaauauu

SEQ ID NO: 1902211 - RNA, 19 nt, Artificial Sequence
  Description of Artificial Sequence: Synthetic oligonucleotide
  Antisense strand to SEQ ID NO: 1902210
aauauuacagacuugucau

SEQ ID NO: 1902212 - RNA, 19 nt, Artificial Sequence
  Description of Artificial Sequence: Synthetic oligonucleotide
  Sense strand starting at position 339 of SEQ ID NO: 1879371
ucuguaauauuugcugcau

SEQ ID NO: 1902213 - RNA, 19 nt, Artificial Sequence
  Description of Artificial Sequence: Synthetic oligonucleotide
  Antisense strand to SEQ ID NO: 1902212
augcagcaaauauuacaga

SEQ ID NO: 1902214 - RNA, 19 nt, Artificial Sequence
  Description of Artificial Sequence: Synthetic oligonucleotide
  Sense strand starting at position 340 of SEQ ID NO: 1879371
cuguaauauuugcugcaua

SEQ ID NO: 1902215 - RNA, 19 nt, Artificial Sequence
  Description of Artificial Sequence: Synthetic oligonucleotide
  Antisense strand to SEQ ID NO: 1902214
uaugcagcaaauauuacag

SEQ ID NO: 1902216 - RNA, 19 nt, Artificial Sequence
  Description of Artificial Sequence: Synthetic oligonucleotide
  Sense strand starting at position 371 of SEQ ID NO: 1879371
aguauugggccaggugaaa

SEQ ID NO: 1902217 - RNA, 19 nt, Artificial Sequence
  Description of Artificial Sequence: Synthetic oligonucleotide
  Antisense strand to SEQ ID NO: 1902216
uuucaccuggcccaauacu

SEQ ID NO: 1902218 - RNA, 19 nt, Artificial Sequence
  Description of Artificial Sequence: Synthetic oligonucleotide
  Sense strand starting at position 402 of SEQ ID NO: 1879371
caaguugguucugcaauuu

SEQ ID NO: 1902219 - RNA, 19 nt, Artificial Sequence
  Description of Artificial Sequence: Synthetic oligonucleotide
  Antisense strand to SEQ ID NO: 1902218
aaauugcagaaccaacuug

SEQ ID NO: 1902220 - RNA, 19 nt, Artificial Sequence
  Description of Artificial Sequence: Synthetic oligonucleotide
  Sense strand starting at position 478 of SEQ ID NO: 1879371
augguagaauccuugaaau

SEQ ID NO: 1902221 - RNA, 19 nt, Artificial Sequence
  Description of Artificial Sequence: Synthetic oligonucleotide
  Antisense strand to SEQ ID NO: 1902220
auuucaaggauucuaccau

SEQ ID NO: 1902222 - RNA, 19 nt, Artificial Sequence
  Description of Artificial Sequence: Synthetic oligonucleotide
  Sense strand starting at position 555 of SEQ ID NO: 1879371
ccacauaaguguuuauaau

SEQ ID NO: 1902223 - RNA, 19 nt, Artificial Sequence
  Description of Artificial Sequence: Synthetic oligonucleotide
  Antisense strand to SEQ ID NO: 1902222
auuauaaacacuuaugugg

SEQ ID NO: 1902224 - RNA, 19 nt, Artificial Sequence
  Description of Artificial Sequence: Synthetic oligonucleotide
  Sense strand starting at position 704 of SEQ ID NO: 1879371
gucuuuagggcucaauuag

SEQ ID NO: 1902225 - RNA, 19 nt, Artificial Sequence
  Description of Artificial Sequence: Synthetic oligonucleotide
  Antisense strand to SEQ ID NO: 1902224
cuaauugagcccuaaagac

SEQ ID NO: 1902226 - RNA, 19 nt, Artificial Sequence
  Description of Artificial Sequence: Synthetic oligonucleotide
  Sense strand starting at position 710 of SEQ ID NO: 1879371
agggcucaauuaguuacaa

SEQ ID NO: 1902227 - RNA, 19 nt, Artificial Sequence
  Description of Artificial Sequence: Synthetic oligonucleotide
  Antisense strand to SEQ ID NO: 1902226
uuguaacuaauugagcccu

SEQ ID NO: 1902228 - RNA, 19 nt, Artificial Sequence
  Description of Artificial Sequence: Synthetic oligonucleotide
  Sense strand starting at position 782 of SEQ ID NO: 1879371
uuccauuacugcucaggaa

SEQ ID NO: 1902229 - RNA, 19 nt, Artificial Sequence
  Description of Artificial Sequence: Synthetic oligonucleotide
  Antisense strand to SEQ ID NO: 1902228
uuccugagcaguaauggaa

SEQ ID NO: 1902230 - RNA, 19 nt, Artificial Sequence
  Description of Artificial Sequence: Synthetic oligonucleotide
  Sense strand starting at position 1032 of SEQ ID NO: 1879371
cagacuuaguaauugcuga

SEQ ID NO: 1902231 - RNA, 19 nt, Artificial Sequence
  Description of Artificial Sequence: Synthetic oligonucleotide
  Antisense strand to SEQ ID NO: 1902230
ucagcaauuacuaagucug

SEQ ID NO: 1902232 - RNA, 19 nt, Artificial Sequence
  Description of Artificial Sequence: Synthetic oligonucleotide
  Sense strand starting at position 1124 of SEQ ID NO: 1879371
ugauauggcuuuccaaauc

SEQ ID NO: 1902233 - RNA, 19 nt, Artificial Sequence
  Description of Artificial Sequence: Synthetic oligonucleotide
  Antisense strand to SEQ ID NO: 1902232
gauuuggaaagccauauca

SEQ ID NO: 1902234 - RNA, 19 nt, Artificial Sequence
  Description of Artificial Sequence: Synthetic oligonucleotide
  Sense strand starting at position 1320 of SEQ ID NO: 1879371
uuaauacugcaguggaaac

SEQ ID NO: 1902235 - RNA, 19 nt, Artificial Sequence
  Description of Artificial Sequence: Synthetic oligonucleotide
  Antisense strand to SEQ ID NO: 1902234
guuuccacugcaguauuaa

SEQ ID NO: 1902236 - RNA, 19 nt, Artificial Sequence
  Description of Artificial Sequence: Synthetic oligonucleotide
  Sense strand starting at position 1407 of SEQ ID NO: 1879371
gugaucaaucaauguccaa

SEQ ID NO: 1902237 - RNA, 19 nt, Artificial Sequence
  Description of Artificial Sequence: Synthetic oligonucleotide
  Antisense strand to SEQ ID NO: 1902236
uuggacauugauugaucac

SEQ ID NO: 1902238 - RNA, 19 nt, Artificial Sequence
  Description of Artificial Sequence: Synthetic oligonucleotide
  Sense strand starting at position 1490 of SEQ ID NO: 1879371
uggaauaccuaguuugaca

SEQ ID NO: 1902239 - RNA, 19 nt, Artificial Sequence
  Description of Artificial Sequence: Synthetic oligonucleotide
  Antisense strand to SEQ ID NO: 1902238
ugucaaacuagguauucca

SEQ ID NO: 1902240 - RNA, 19 nt, Artificial Sequence
  Description of Artificial Sequence: Synthetic oligonucleotide
  Sense strand starting at position 1492 of SEQ ID NO: 1879371
gaauaccuaguuugacagu

SEQ ID NO: 1902241 - RNA, 19 nt, Artificial Sequence
  Description of Artificial Sequence: Synthetic oligonucleotide
  Antisense strand to SEQ ID NO: 1902240
acugucaaacuagguauuc

SEQ ID NO: 1902242 - RNA, 19 nt, Artificial Sequence
  Description of Artificial Sequence: Synthetic oligonucleotide
  Sense strand starting at position 1503 of SEQ ID NO: 1879371
uugacaguucucuacuuua

SEQ ID NO: 1902243 - RNA, 19 nt, Artificial Sequence
  Description of Artificial Sequence: Synthetic oligonucleotide
  Antisense strand to SEQ ID NO: 1902242
uaaaguagagaacugucaa

SEQ ID NO: 1902244 - RNA, 19 nt, Artificial Sequence
  Description of Artificial Sequence: Synthetic oligonucleotide
  Sense strand starting at position 1557 of SEQ ID NO: 1879371
cauaguagguaccuaguaa

SEQ ID NO: 1902245 - RNA, 19 nt, Artificial Sequence
  Description of Artificial Sequence: Synthetic oligonucleotide
  Antisense strand to SEQ ID NO: 1902244
uuacuagguaccuacuaug

SEQ ID NO: 1902246 - RNA, 19 nt, Artificial Sequence
  Description of Artificial Sequence: Synthetic oligonucleotide
  Sense strand starting at position 1558 of SEQ ID NO: 1879371
auaguagguaccuaguaaa

SEQ ID NO: 1902247 - RNA, 19 nt, Artificial Sequence
  Description of Artificial Sequence: Synthetic oligonucleotide
  Antisense strand to SEQ ID NO: 1902246
uuuacuagguaccuacuau

SEQ ID NO: 1902248 - RNA, 19 nt, Artificial Sequence
  Description of Artificial Sequence: Synthetic oligonucleotide
  Sense strand starting at position 1622 of SEQ ID NO: 1879371
cuuugaggccagugggaaa

SEQ ID NO: 1902249 - RNA, 19 nt, Artificial Sequence
  Description of Artificial Sequence: Synthetic oligonucleotide
  Antisense strand to SEQ ID NO: 1902248
uuucccacuggccucaaag

SEQ ID NO: 1902250 - RNA, 19 nt, Artificial Sequence
  Description of Artificial Sequence: Synthetic oligonucleotide
  Sense strand starting at position 1908 of SEQ ID NO: 1879371
ucacaugguuaucuaaagu

SEQ ID NO: 1902251 - RNA, 19 nt, Artificial Sequence
  Description of Artificial Sequence: Synthetic oligonucleotide
  Antisense strand to SEQ ID NO: 1902250
acuuuagauaaccauguga

SEQ ID NO: 1902252 - RNA, 19 nt, Artificial Sequence
  Description of Artificial Sequence: Synthetic oligonucleotide
  Sense strand starting at position 1933 of SEQ ID NO: 1879371
aaucgaguugguuacuaaa

SEQ ID NO: 1902253 - RNA, 19 nt, Artificial Sequence
  Description of Artificial Sequence: Synthetic oligonucleotide
  Antisense strand to SEQ ID NO: 1902252
uuuaguaaccaacucgauu

SEQ ID NO: 1902254 - RNA, 19 nt, Artificial Sequence
  Description of Artificial Sequence: Synthetic oligonucleotide
  Sense strand starting at position 1955 of SEQ ID NO: 1879371
gggugaguuucacucugag

SEQ ID NO: 1902255 - RNA, 19 nt, Artificial Sequence
  Description of Artificial Sequence: Synthetic oligonucleotide
  Antisense strand to SEQ ID NO: 1902254
cucagagugaaacucaccc

SEQ ID NO: 1902256 - RNA, 19 nt, Artificial Sequence
  Description of Artificial Sequence: Synthetic oligonucleotide
  Sense strand starting at position 1970 of SEQ ID NO: 1879371
ugagguuuccacuagcaac

SEQ ID NO: 1902257 - RNA, 19 nt, Artificial Sequence
  Description of Artificial Sequence: Synthetic oligonucleotide
  Antisense strand to SEQ ID NO: 1902256
guugcuaguggaaaccuca

SEQ ID NO: 1902258 - RNA, 19 nt, Artificial Sequence
  Description of Artificial Sequence: Synthetic oligonucleotide
  Sense strand starting at position 2025 of SEQ ID NO: 1879371
uaauacugacagugugaca

SEQ ID NO: 1902259 - RNA, 19 nt, Artificial Sequence
  Description of Artificial Sequence: Synthetic oligonucleotide
  Antisense strand to SEQ ID NO: 1902258
ugucacacugucaguauua

SEQ ID NO: 1902260 - RNA, 19 nt, Artificial Sequence
  Description of Artificial Sequence: Synthetic oligonucleotide
  Sense strand starting at position 2062 of SEQ ID NO: 1879371
acagauugaugugcaaauc

SEQ ID NO: 1902261 - RNA, 19 nt, Artificial Sequence
  Description of Artificial Sequence: Synthetic oligonucleotide
  Antisense strand to SEQ ID NO: 1902260
gauuugcacaucaaucugu

SEQ ID NO: 1902262 - RNA, 19 nt, Artificial Sequence
  Description of Artificial Sequence: Synthetic oligonucleotide
  Sense strand starting at position 2063 of SEQ ID NO: 1879371
cagauugaugugcaaauca

SEQ ID NO: 1902263 - RNA, 19 nt, Artificial Sequence
  Description of Artificial Sequence: Synthetic oligonucleotide
  Antisense strand to SEQ ID NO: 1902262
ugauuugcacaucaaucug

SEQ ID NO: 1902264 - RNA, 19 nt, Artificial Sequence
  Description of Artificial Sequence: Synthetic oligonucleotide
  Sense strand starting at position 2136 of SEQ ID NO: 1879371
gcacacugccaugauacaa

SEQ ID NO: 1902265 - RNA, 19 nt, Artificial Sequence
  Description of Artificial Sequence: Synthetic oligonucleotide
  Antisense strand to SEQ ID NO: 1902264
uuguaucauggcagugugc

SEQ ID NO: 1902266 - RNA, 19 nt, Artificial Sequence
  Description of Artificial Sequence: Synthetic oligonucleotide
  Sense strand starting at position 2157 of SEQ ID NO: 1879371
ucaagagaugcggagaagu

SEQ ID NO: 1902267 - RNA, 19 nt, Artificial Sequence
  Description of Artificial Sequence: Synthetic oligonucleotide
  Antisense strand to SEQ ID NO: 1902266
acuucuccgcaucucuuga

SEQ ID NO: 1902268 - RNA, 19 nt, Artificial Sequence
  Description of Artificial Sequence: Synthetic oligonucleotide
  Sense strand starting at position 2170 of SEQ ID NO: 1879371
agaaguuaucauuaugcac

SEQ ID NO: 1902269 - RNA, 19 nt, Artificial Sequence
  Description of Artificial Sequence: Synthetic oligonucleotide
  Antisense strand to SEQ ID NO: 1902268
gugcauaaugauaacuucu

SEQ ID NO: 1902270 - RNA, 19 nt, Artificial Sequence
  Description of Artificial Sequence: Synthetic oligonucleotide
  Sense strand starting at position 2435 of SEQ ID NO: 1879371
guuugauggauuuggccuu

SEQ ID NO: 1902271 - RNA, 19 nt, Artificial Sequence
  Description of Artificial Sequence: Synthetic oligonucleotide
  Antisense strand to SEQ ID NO: 1902270
aaggccaaauccaucaaac

SEQ ID NO: 1902272 - RNA, 19 nt, Artificial Sequence
  Description of Artificial Sequence: Synthetic oligonucleotide
  Sense strand starting at position 2573 of SEQ ID NO: 1879371
aggaaagaucggugagacu

SEQ ID NO: 1902273 - RNA, 19 nt, Artificial Sequence
  Description of Artificial Sequence: Synthetic oligonucleotide
  Antisense strand to SEQ ID NO: 1902272
agucucaccgaucuuuccu

SEQ ID NO: 1902274 - RNA, 19 nt, Artificial Sequence
  Description of Artificial Sequence: Synthetic oligonucleotide
  Sense strand starting at position 2861 of SEQ ID NO: 1879371
guaucaaagggcuauguua

SEQ ID NO: 1902275 - RNA, 19 nt, Artificial Sequence
  Description of Artificial Sequence: Synthetic oligonucleotide
  Antisense strand to SEQ ID NO: 1902274
uaacauagcccuuugauac

SEQ ID NO: 1902276 - RNA, 19 nt, Artificial Sequence
  Description of Artificial Sequence: Synthetic oligonucleotide
  Sense strand starting at position 2863 of SEQ ID NO: 1879371
aucaaagggcuauguuauu

SEQ ID NO: 1902277 - RNA, 19 nt, Artificial Sequence
  Description of Artificial Sequence: Synthetic oligonucleotide
  Antisense strand to SEQ ID NO: 1902276
aauaacauagcccuuugau

SEQ ID NO: 1902278 - RNA, 19 nt, Artificial Sequence
  Description of Artificial Sequence: Synthetic oligonucleotide
  Sense strand starting at position 2967 of SEQ ID NO: 1879371
cccagagaguuuccacauc

SEQ ID NO: 1902279 - RNA, 19 nt, Artificial Sequence
  Description of Artificial Sequence: Synthetic oligonucleotide
  Antisense strand to SEQ ID NO: 1902278
gauguggaaacucucuggg

SEQ ID NO: 1902280 - RNA, 19 nt, Artificial Sequence
  Description of Artificial Sequence: Synthetic oligonucleotide
  Sense strand starting at position 3146 of SEQ ID NO: 1879371
acaguuucugaauagagca

SEQ ID NO: 1902281 - RNA, 19 nt, Artificial Sequence
  Description of Artificial Sequence: Synthetic oligonucleotide
  Antisense strand to SEQ ID NO: 1902280
ugcucuauucagaaacugu

SEQ ID NO: 1902282 - RNA, 19 nt, Artificial Sequence
  Description of Artificial Sequence: Synthetic oligonucleotide
  Sense strand starting at position 3272 of SEQ ID NO: 1879371
aaaugauaggcuuggguua

SEQ ID NO: 1902283 - RNA, 19 nt, Artificial Sequence
  Description of Artificial Sequence: Synthetic oligonucleotide
  Antisense strand to SEQ ID NO: 1902282
uaacccaagccuaucauuu

SEQ ID NO: 1902284 - RNA, 19 nt, Artificial Sequence
  Description of Artificial Sequence: Synthetic oligonucleotide
  Sense strand starting at position 3273 of SEQ ID NO: 1879371
aaugauaggcuuggguuau

SEQ ID NO: 1902285 - RNA, 19 nt, Artificial Sequence
  Description of Artificial Sequence: Synthetic oligonucleotide
  Antisense strand to SEQ ID NO: 1902284
auaacccaagccuaucauu

SEQ ID NO: 1902286 - RNA, 19 nt, Artificial Sequence
  Description of Artificial Sequence: Synthetic oligonucleotide
  Sense strand starting at position 3285 of SEQ ID NO: 1879371
ggguuauuaggaggcacaa

SEQ ID NO: 1902287 - RNA, 19 nt, Artificial Sequence
  Description of Artificial Sequence: Synthetic oligonucleotide
  Antisense strand to SEQ ID NO: 1902286
uugugccuccuaauaaccc

SEQ ID NO: 1902288 - RNA, 19 nt, Artificial Sequence
  Description of Artificial Sequence: Synthetic oligonucleotide
  Sense strand starting at position 3610 of SEQ ID NO: 1879371
cugugcuauccugaaauau

SEQ ID NO: 1902289 - RNA, 19 nt, Artificial Sequence
  Description of Artificial Sequence: Synthetic oligonucleotide
  Antisense strand to SEQ ID NO: 1902288
auauuucaggauagcacag

SEQ ID NO: 1902290 - RNA, 19 nt, Artificial Sequence
  Description of Artificial Sequence: Synthetic oligonucleotide
  Sense strand starting at position 143 of SEQ ID NO: 1879372
uucccagaauccuaggaaa

SEQ ID NO: 1902291 - RNA, 19 nt, Artificial Sequence
  Description of Artificial Sequence: Synthetic oligonucleotide
  Antisense strand to SEQ ID NO: 1902290
uuuccuaggauucugggaa

SEQ ID NO: 1902292 - RNA, 19 nt, Artificial Sequence
  Description of Artificial Sequence: Synthetic oligonucleotide
  Sense strand starting at position 448 of SEQ ID NO: 1879372
cagaguguauuuguuuguu

SEQ ID NO: 1902293 - RNA, 19 nt, Artificial Sequence
  Description of Artificial Sequence: Synthetic oligonucleotide
  Antisense strand to SEQ ID NO: 1902292
aacaaacaaauacacucug

SEQ ID NO: 1902294 - RNA, 19 nt, Artificial Sequence
  Description of Artificial Sequence: Synthetic oligonucleotide
  Sense strand starting at position 703 of SEQ ID NO: 1879372
ucuucuugucaagagcaaa

SEQ ID NO: 1902295 - RNA, 19 nt, Artificial Sequence
  Description of Artificial Sequence: Synthetic oligonucleotide
  Antisense strand to SEQ ID NO: 1902294
uuugcucuugacaagaaga

SEQ ID NO: 1902296 - RNA, 19 nt, Artificial Sequence
  Description of Artificial Sequence: Synthetic oligonucleotide
  Sense strand starting at position 794 of SEQ ID NO: 1879372
ccuugugucgaggacugua

SEQ ID NO: 1902297 - RNA, 19 nt, Artificial Sequence
  Description of Artificial Sequence: Synthetic oligonucleotide
  Antisense strand to SEQ ID NO: 1902296
uacaguccucgacacaagg

SEQ ID NO: 1902298 - RNA, 19 nt, Artificial Sequence
  Description of Artificial Sequence: Synthetic oligonucleotide
  Sense strand starting at position 799 of SEQ ID NO: 1879372
ugucgaggacuguaucuua

SEQ ID NO: 1902299 - RNA, 19 nt, Artificial Sequence
  Description of Artificial Sequence: Synthetic oligonucleotide
  Antisense strand to SEQ ID NO: 1902298
uaagauacaguccucgaca

SEQ ID NO: 1902300 - RNA, 19 nt, Artificial Sequence
  Description of Artificial Sequence: Synthetic oligonucleotide
  Sense strand starting at position 802 of SEQ ID NO: 1879372
cgaggacuguaucuuaauc

SEQ ID NO: 1902301 - RNA, 19 nt, Artificial Sequence
  Description of Artificial Sequence: Synthetic oligonucleotide
  Antisense strand to SEQ ID NO: 1902300
gauuaagauacaguccucg

SEQ ID NO: 1902302 - RNA, 19 nt, Artificial Sequence
  Description of Artificial Sequence: Synthetic oligonucleotide
  Sense strand starting at position 827 of SEQ ID NO: 1879372
ggaucuccucucgaaguga

SEQ ID NO: 1902303 - RNA, 19 nt, Artificial Sequence
  Description of Artificial Sequence: Synthetic oligonucleotide
  Antisense strand to SEQ ID NO: 1902302
ucacuucgagaggagaucc

SEQ ID NO: 1902304 - RNA, 19 nt, Artificial Sequence
  Description of Artificial Sequence: Synthetic oligonucleotide
  Sense strand starting at position 851 of SEQ ID NO: 1879372
gugcuaccuccagaaagag

SEQ ID NO: 1902305 - RNA, 19 nt, Artificial Sequence
  Description of Artificial Sequence: Synthetic oligonucleotide
  Antisense strand to SEQ ID NO: 1902304
cucuuucuggagguagcac

SEQ ID NO: 1902306 - RNA, 19 nt, Artificial Sequence
  Description of Artificial Sequence: Synthetic oligonucleotide
  Sense strand starting at position 944 of SEQ ID NO: 1879372
uccuguuuaucccugugau

SEQ ID NO: 1902307 - RNA, 19 nt, Artificial Sequence
  Description of Artificial Sequence: Synthetic oligonucleotide
  Antisense strand to SEQ ID NO: 1902306
aucacagggauaaacagga

SEQ ID NO: 1902308 - RNA, 19 nt, Artificial Sequence
  Description of Artificial Sequence: Synthetic oligonucleotide
  Sense strand starting at position 945 of SEQ ID NO: 1879372
ccuguuuaucccugugaug

SEQ ID NO: 1902309 - RNA, 19 nt, Artificial Sequence
  Description of Artificial Sequence: Synthetic oligonucleotide
  Antisense strand to SEQ ID NO: 1902308
caucacagggauaaacagg

SEQ ID NO: 1902310 - RNA, 19 nt, Artificial Sequence
  Description of Artificial Sequence: Synthetic oligonucleotide
  Sense strand starting at position 947 of SEQ ID NO: 1879372
uguuuaucccugugaugag

SEQ ID NO: 1902311 - RNA, 19 nt, Artificial Sequence
  Description of Artificial Sequence: Synthetic oligonucleotide
  Antisense strand to SEQ ID NO: 1902310
cucaucacagggauaaaca

SEQ ID NO: 1902312 - RNA, 19 nt, Artificial Sequence
  Description of Artificial Sequence: Synthetic oligonucleotide
  Sense strand starting at position 1119 of SEQ ID NO: 1879372
cagcaaagguguucuccau

SEQ ID NO: 1902313 - RNA, 19 nt, Artificial Sequence
  Description of Artificial Sequence: Synthetic oligonucleotide
  Antisense strand to SEQ ID NO: 1902312
auggagaacaccuuugcug

SEQ ID NO: 1902314 - RNA, 19 nt, Artificial Sequence
  Description of Artificial Sequence: Synthetic oligonucleotide
  Sense strand starting at position 1185 of SEQ ID NO: 1879372
gagcuaauugcaugucaca

SEQ ID NO: 1902315 - RNA, 19 nt, Artificial Sequence
  Description of Artificial Sequence: Synthetic oligonucleotide
  Antisense strand to SEQ ID NO: 1902314
ugugacaugcaauuagcuc

SEQ ID NO: 1902316 - RNA, 19 nt, Artificial Sequence
  Description of Artificial Sequence: Synthetic oligonucleotide
  Sense strand starting at position 1267 of SEQ ID NO: 1879372
augcaugcuguuuaaaucu

SEQ ID NO: 1902317 - RNA, 19 nt, Artificial Sequence
  Description of Artificial Sequence: Synthetic oligonucleotide
  Antisense strand to SEQ ID NO: 1902316
agauuuaaacagcaugcau

SEQ ID NO: 1902318 - RNA, 19 nt, Artificial Sequence
  Description of Artificial Sequence: Synthetic oligonucleotide
  Sense strand starting at position 1293 of SEQ ID NO: 1879372
gucaauauucaggguggca

SEQ ID NO: 1902319 - RNA, 19 nt, Artificial Sequence
  Description of Artificial Sequence: Synthetic oligonucleotide
  Antisense strand to SEQ ID NO: 1902318
ugccacccugaauauugac

SEQ ID NO: 1902320 - RNA, 19 nt, Artificial Sequence
  Description of Artificial Sequence: Synthetic oligonucleotide
  Sense strand starting at position 1333 of SEQ ID NO: 1879372
cucuauuucuguucuucga

SEQ ID NO: 1902321 - RNA, 19 nt, Artificial Sequence
  Description of Artificial Sequence: Synthetic oligonucleotide
  Antisense strand to SEQ ID NO: 1902320
ucgaagaacagaaauagag

SEQ ID NO: 1902322 - RNA, 19 nt, Artificial Sequence
  Description of Artificial Sequence: Synthetic oligonucleotide
  Sense strand starting at position 1335 of SEQ ID NO: 1879372
cuauuucuguucuucgaca

SEQ ID NO: 1902323 - RNA, 19 nt, Artificial Sequence
  Description of Artificial Sequence: Synthetic oligonucleotide
  Antisense strand to SEQ ID NO: 1902322
ugucgaagaacagaaauag

SEQ ID NO: 1902324 - RNA, 19 nt, Artificial Sequence
  Description of Artificial Sequence: Synthetic oligonucleotide
  Sense strand starting at position 1337 of SEQ ID NO: 1879372
auuucuguucuucgacauu

SEQ ID NO: 1902325 - RNA, 19 nt, Artificial Sequence
  Description of Artificial Sequence: Synthetic oligonucleotide
  Antisense strand to SEQ ID NO: 1902324
aaugucgaagaacagaaau

SEQ ID NO: 1902326 - RNA, 19 nt, Artificial Sequence
  Description of Artificial Sequence: Synthetic oligonucleotide
  Sense strand starting at position 1441 of SEQ ID NO: 1879372
gcuagaccacaauguuuau

SEQ ID NO: 1902327 - RNA, 19 nt, Artificial Sequence
  Description of Artificial Sequence: Synthetic oligonucleotide
  Antisense strand to SEQ ID NO: 1902326
auaaacauuguggucuagc

SEQ ID NO: 1902328 - RNA, 19 nt, Artificial Sequence
  Description of Artificial Sequence: Synthetic oligonucleotide
  Sense strand starting at position 1466 of SEQ ID NO: 1879372
aguaguugauaaucuuaca

SEQ ID NO: 1902329 - RNA, 19 nt, Artificial Sequence
  Description of Artificial Sequence: Synthetic oligonucleotide
  Antisense strand to SEQ ID NO: 1902328
uguaagauuaucaacuacu

SEQ ID NO: 1902330 - RNA, 19 nt, Artificial Sequence
  Description of Artificial Sequence: Synthetic oligonucleotide
  Sense strand starting at position 1580 of SEQ ID NO: 1879372
aagucuuguugauuagagu

SEQ ID NO: 1902331 - RNA, 19 nt, Artificial Sequence
  Description of Artificial Sequence: Synthetic oligonucleotide
  Antisense strand to SEQ ID NO: 1902330
acucuaaucaacaagacuu

SEQ ID NO: 1902332 - RNA, 19 nt, Artificial Sequence
  Description of Artificial Sequence: Synthetic oligonucleotide
  Sense strand starting at position 1581 of SEQ ID NO: 1879372
agucuuguugauuagagua

SEQ ID NO: 1902333 - RNA, 19 nt, Artificial Sequence
  Description of Artificial Sequence: Synthetic oligonucleotide
  Antisense strand to SEQ ID NO: 1902332
uacucuaaucaacaagacu

SEQ ID NO: 1902334 - RNA, 19 nt, Artificial Sequence
  Description of Artificial Sequence: Synthetic oligonucleotide
  Sense strand starting at position 1632 of SEQ ID NO: 1879372
acuugacucuuuccugaag

SEQ ID NO: 1902335 - RNA, 19 nt, Artificial Sequence
  Description of Artificial Sequence: Synthetic oligonucleotide
  Antisense strand to SEQ ID NO: 1902334
cuucaggaaagagucaagu

SEQ ID NO: 1902336 - RNA, 19 nt, Artificial Sequence
  Description of Artificial Sequence: Synthetic oligonucleotide
  Sense strand starting at position 1635 of SEQ ID NO: 1879372
ugacucuuuccugaagcaa

SEQ ID NO: 1902337 - RNA, 19 nt, Artificial Sequence
  Description of Artificial Sequence: Synthetic oligonucleotide
  Antisense strand to SEQ ID NO: 1902336
uugcuucaggaaagaguca

SEQ ID NO: 1902338 - RNA, 19 nt, Artificial Sequence
  Description of Artificial Sequence: Synthetic oligonucleotide
  Sense strand starting at position 1650 of SEQ ID NO: 1879372
gcaagaacguaaucucaag

SEQ ID NO: 1902339 - RNA, 19 nt, Artificial Sequence
  Description of Artificial Sequence: Synthetic oligonucleotide
  Antisense strand to SEQ ID NO: 1902338
cuugagauuacguucuugc

SEQ ID NO: 1902340 - RNA, 19 nt, Artificial Sequence
  Description of Artificial Sequence: Synthetic oligonucleotide
  Sense strand starting at position 1724 of SEQ ID NO: 1879372
gauagaaacuuggauggaa

SEQ ID NO: 1902341 - RNA, 19 nt, Artificial Sequence
  Description of Artificial Sequence: Synthetic oligonucleotide
  Antisense strand to SEQ ID NO: 1902340
uuccauccaaguuucuauc

SEQ ID NO: 1902342 - RNA, 19 nt, Artificial Sequence
  Description of Artificial Sequence: Synthetic oligonucleotide
  Sense strand starting at position 1759 of SEQ ID NO: 1879372
ccaauuagccuguguuaag

SEQ ID NO: 1902343 - RNA, 19 nt, Artificial Sequence
  Description of Artificial Sequence: Synthetic oligonucleotide
  Antisense strand to SEQ ID NO: 1902342
cuuaacacaggcuaauugg

SEQ ID NO: 1902344 - RNA, 19 nt, Artificial Sequence
  Description of Artificial Sequence: Synthetic oligonucleotide
  Sense strand starting at position 1790 of SEQ ID NO: 1879372
uuaacaagcuugcucaaga

SEQ ID NO: 1902345 - RNA, 19 nt, Artificial Sequence
  Description of Artificial Sequence: Synthetic oligonucleotide
  Antisense strand to SEQ ID NO: 1902344
ucuugagcaagcuuguuaa

SEQ ID NO: 1902346 - RNA, 19 nt, Artificial Sequence
  Description of Artificial Sequence: Synthetic oligonucleotide
  Sense strand starting at position 2002 of SEQ ID NO: 1879372
gagaaaugauggcugcuau

SEQ ID NO: 1902347 - RNA, 19 nt, Artificial Sequence
  Description of Artificial Sequence: Synthetic oligonucleotide
  Antisense strand to SEQ ID NO: 1902346
auagcagccaucauuucuc

SEQ ID NO: 1902348 - RNA, 19 nt, Artificial Sequence
  Description of Artificial Sequence: Synthetic oligonucleotide
  Sense strand starting at position 2121 of SEQ ID NO: 1879372
gaggacagcucuccucauu

SEQ ID NO: 1902349 - RNA, 19 nt, Artificial Sequence
  Description of Artificial Sequence: Synthetic oligonucleotide
  Antisense strand to SEQ ID NO: 1902348
aaugaggagagcuguccuc

SEQ ID NO: 1902350 - RNA, 19 nt, Artificial Sequence
  Description of Artificial Sequence: Synthetic oligonucleotide
  Sense strand starting at position 2239 of SEQ ID NO: 1879372
aaaggaugaguuuguccuu

SEQ ID NO: 1902351 - RNA, 19 nt, Artificial Sequence
  Description of Artificial Sequence: Synthetic oligonucleotide
  Antisense strand to SEQ ID NO: 1902350
aaggacaaacucauccuuu

SEQ ID NO: 1902352 - RNA, 19 nt, Artificial Sequence
  Description of Artificial Sequence: Synthetic oligonucleotide
  Sense strand starting at position 2240 of SEQ ID NO: 1879372
aaggaugaguuuguccuuu

SEQ ID NO: 1902353 - RNA, 19 nt, Artificial Sequence
  Description of Artificial Sequence: Synthetic oligonucleotide
  Antisense strand to SEQ ID NO: 1902352
aaaggacaaacucauccuu

SEQ ID NO: 1902354 - RNA, 19 nt, Artificial Sequence
  Description of Artificial Sequence: Synthetic oligonucleotide
  Sense strand starting at position 2310 of SEQ ID NO: 1879372
aaauuugucucuugaagga

SEQ ID NO: 1902355 - RNA, 19 nt, Artificial Sequence
  Description of Artificial Sequence: Synthetic oligonucleotide
  Antisense strand to SEQ ID NO: 1902354
uccuucaagagacaaauuu

SEQ ID NO: 1902356 - RNA, 19 nt, Artificial Sequence
  Description of Artificial Sequence: Synthetic oligonucleotide
  Sense strand starting at position 2314 of SEQ ID NO: 1879372
uugucucuugaaggagaau

SEQ ID NO: 1902357 - RNA, 19 nt, Artificial Sequence
  Description of Artificial Sequence: Synthetic oligonucleotide
  Antisense strand to SEQ ID NO: 1902356
auucuccuucaagagacaa

SEQ ID NO: 1902358 - RNA, 19 nt, Artificial Sequence
  Description of Artificial Sequence: Synthetic oligonucleotide
  Sense strand starting at position 2473 of SEQ ID NO: 1879372
agaacauguugcucucacu

SEQ ID NO: 1902359 - RNA, 19 nt, Artificial Sequence
  Description of Artificial Sequence: Synthetic oligonucleotide
  Antisense strand to SEQ ID NO: 1902358
agugagagcaacauguucu

SEQ ID NO: 1902360 - RNA, 19 nt, Artificial Sequence
  Description of Artificial Sequence: Synthetic oligonucleotide
  Sense strand starting at position 2508 of SEQ ID NO: 1879372
aaaggugagaucuggucua

SEQ ID NO: 1902361 - RNA, 19 nt, Artificial Sequence
  Description of Artificial Sequence: Synthetic oligonucleotide
  Antisense strand to SEQ ID NO: 1902360
uagaccagaucucaccuuu

SEQ ID NO: 1902362 - RNA, 19 nt, Artificial Sequence
  Description of Artificial Sequence: Synthetic oligonucleotide
  Sense strand starting at position 3213 of SEQ ID NO: 1879372
gcuuaaagacauuacguua

SEQ ID NO: 1902363 - RNA, 19 nt, Artificial Sequence
  Description of Artificial Sequence: Synthetic oligonucleotide
  Antisense strand to SEQ ID NO: 1902362
uaacguaaugucuuuaagc

SEQ ID NO: 1902364 - RNA, 19 nt, Artificial Sequence
  Description of Artificial Sequence: Synthetic oligonucleotide
  Sense strand starting at position 3216 of SEQ ID NO: 1879372
uaaagacauuacguuaagu

SEQ ID NO: 1902365 - RNA, 19 nt, Artificial Sequence
  Description of Artificial Sequence: Synthetic oligonucleotide
  Antisense strand to SEQ ID NO: 1902364
acuuaacguaaugucuuua

SEQ ID NO: 1902366 - RNA, 19 nt, Artificial Sequence
  Description of Artificial Sequence: Synthetic oligonucleotide
  Sense strand starting at position 3280 of SEQ ID NO: 1879372
acaugagcuaccuggagua

SEQ ID NO: 1902367 - RNA, 19 nt, Artificial Sequence
  Description of Artificial Sequence: Synthetic oligonucleotide
  Antisense strand to SEQ ID NO: 1902366
uacuccagguagcucaugu

SEQ ID NO: 1902368 - RNA, 19 nt, Artificial Sequence
  Description of Artificial Sequence: Synthetic oligonucleotide
  Sense strand starting at position 3290 of SEQ ID NO: 1879372
ccuggaguagucggauuca

SEQ ID NO: 1902369 - RNA, 19 nt, Artificial Sequence
  Description of Artificial Sequence: Synthetic oligonucleotide
  Antisense strand to SEQ ID NO: 1902368
ugaauccgacuacuccagg

SEQ ID NO: 1902370 - RNA, 19 nt, Artificial Sequence
  Description of Artificial Sequence: Synthetic oligonucleotide
  Sense strand starting at position 158 of SEQ ID NO: 1879373
ugcacuggagacuguauaa

SEQ ID NO: 1902371 - RNA, 19 nt, Artificial Sequence
  Description of Artificial Sequence: Synthetic oligonucleotide
  Antisense strand to SEQ ID NO: 1902370
uuauacagucuccagugca

SEQ ID NO: 1902372 - RNA, 19 nt, Artificial Sequence
  Description of Artificial Sequence: Synthetic oligonucleotide
  Sense strand starting at position 198 of SEQ ID NO: 1879373
uacagucgaguuggauaga

SEQ ID NO: 1902373 - RNA, 19 nt, Artificial Sequence
  Description of Artificial Sequence: Synthetic oligonucleotide
  Antisense strand to SEQ ID NO: 1902372
ucuauccaacucgacugua

SEQ ID NO: 1902374 - RNA, 19 nt, Artificial Sequence
  Description of Artificial Sequence: Synthetic oligonucleotide
  Sense strand starting at position 201 of SEQ ID NO: 1879373
agucgaguuggauagauaa

SEQ ID NO: 1902375 - RNA, 19 nt, Artificial Sequence
  Description of Artificial Sequence: Synthetic oligonucleotide
  Antisense strand to SEQ ID NO: 1902374
uuaucuauccaacucgacu

SEQ ID NO: 1902376 - RNA, 19 nt, Artificial Sequence
  Description of Artificial Sequence: Synthetic oligonucleotide
  Sense strand starting at position 264 of SEQ ID NO: 1879373
guaugucaaggguaaauuc

SEQ ID NO: 1902377 - RNA, 19 nt, Artificial Sequence
  Description of Artificial Sequence: Synthetic oligonucleotide
  Antisense strand to SEQ ID NO: 1902376
gaauuuacccuugacauac

SEQ ID NO: 1902378 - RNA, 19 nt, Artificial Sequence
  Description of Artificial Sequence: Synthetic oligonucleotide
  Sense strand starting at position 302 of SEQ ID NO: 1879373
ugagaagugcaucaggcuu

SEQ ID NO: 1902379 - RNA, 19 nt, Artificial Sequence
  Description of Artificial Sequence: Synthetic oligonucleotide
  Antisense strand to SEQ ID NO: 1902378
aagccugaugcacuucuca

SEQ ID NO: 1902380 - RNA, 19 nt, Artificial Sequence
  Description of Artificial Sequence: Synthetic oligonucleotide
  Sense strand starting at position 361 of SEQ ID NO: 1879373
gaacaugaguucccaguua

SEQ ID NO: 1902381 - RNA, 19 nt, Artificial Sequence
  Description of Artificial Sequence: Synthetic oligonucleotide
  Antisense strand to SEQ ID NO: 1902380
uaacugggaacucauguuc

SEQ ID NO: 1902382 - RNA, 19 nt, Artificial Sequence
  Description of Artificial Sequence: Synthetic oligonucleotide
  Sense strand starting at position 366 of SEQ ID NO: 1879373
ugaguucccaguuauggga

SEQ ID NO: 1902383 - RNA, 19 nt, Artificial Sequence
  Description of Artificial Sequence: Synthetic oligonucleotide
  Antisense strand to SEQ ID NO: 1902382
ucccauaacugggaacuca

SEQ ID NO: 1902384 - RNA, 19 nt, Artificial Sequence
  Description of Artificial Sequence: Synthetic oligonucleotide
  Sense strand starting at position 375 of SEQ ID NO: 1879373
aguuaugggacuuguaaug

SEQ ID NO: 1902385 - RNA, 19 nt, Artificial Sequence
  Description of Artificial Sequence: Synthetic oligonucleotide
  Antisense strand to SEQ ID NO: 1902384
cauuacaagucccauaacu

SEQ ID NO: 1902386 - RNA, 19 nt, Artificial Sequence
  Description of Artificial Sequence: Synthetic oligonucleotide
  Sense strand starting at position 439 of SEQ ID NO: 1879373
ggagaaagcccacguuaau

SEQ ID NO: 1902387 - RNA, 19 nt, Artificial Sequence
  Description of Artificial Sequence: Synthetic oligonucleotide
  Antisense strand to SEQ ID NO: 1902386
auuaacgugggcuuucucc

SEQ ID NO: 1902388 - RNA, 19 nt, Artificial Sequence
  Description of Artificial Sequence: Synthetic oligonucleotide
  Sense strand starting at position 571 of SEQ ID NO: 1879373
cugacaugacuuuguuuaa

SEQ ID NO: 1902389 - RNA, 19 nt, Artificial Sequence
  Description of Artificial Sequence: Synthetic oligonucleotide
  Antisense strand to SEQ ID NO: 1902388
uuaaacaaagucaugucag

SEQ ID NO: 1902390 - RNA, 19 nt, Artificial Sequence
  Description of Artificial Sequence: Synthetic oligonucleotide
  Sense strand starting at position 572 of SEQ ID NO: 1879373
ugacaugacuuuguuuaac

SEQ ID NO: 1902391 - RNA, 19 nt, Artificial Sequence
  Description of Artificial Sequence: Synthetic oligonucleotide
  Antisense strand to SEQ ID NO: 1902390
guuaaacaaagucauguca

SEQ ID NO: 1902392 - RNA, 19 nt, Artificial Sequence
  Description of Artificial Sequence: Synthetic oligonucleotide
  Sense strand starting at position 693 of SEQ ID NO: 1879373
agaauugugcuccauacug

SEQ ID NO: 1902393 - RNA, 19 nt, Artificial Sequence
  Description of Artificial Sequence: Synthetic oligonucleotide
  Antisense strand to SEQ ID NO: 1902392
caguauggagcacaauucu

SEQ ID NO: 1902394 - RNA, 19 nt, Artificial Sequence
  Description of Artificial Sequence: Synthetic oligonucleotide
  Sense strand starting at position 795 of SEQ ID NO: 1879373
ccaaguuaucacuaacgga

SEQ ID NO: 1902395 - RNA, 19 nt, Artificial Sequence
  Description of Artificial Sequence: Synthetic oligonucleotide
  Antisense strand to SEQ ID NO: 1902394
uccguuagugauaacuugg

SEQ ID NO: 1902396 - RNA, 19 nt, Artificial Sequence
  Description of Artificial Sequence: Synthetic oligonucleotide
  Sense strand starting at position 1845 of SEQ ID NO: 1879373
gggugucuccucgcugcaa

SEQ ID NO: 1902397 - RNA, 19 nt, Artificial Sequence
  Description of Artificial Sequence: Synthetic oligonucleotide
  Antisense strand to SEQ ID NO: 1902396
uugcagcgaggagacaccc

SEQ ID NO: 1902398 - RNA, 19 nt, Artificial Sequence
  Description of Artificial Sequence: Synthetic oligonucleotide
  Sense strand starting at position 1947 of SEQ ID NO: 1879373
aguuuccuucccggaauuu

SEQ ID NO: 1902399 - RNA, 19 nt, Artificial Sequence
  Description of Artificial Sequence: Synthetic oligonucleotide
  Antisense strand to SEQ ID NO: 1902398
aaauuccgggaaggaaacu

SEQ ID NO: 1902400 - RNA, 19 nt, Artificial Sequence
  Description of Artificial Sequence: Synthetic oligonucleotide
  Sense strand starting at position 2021 of SEQ ID NO: 1879373
gaugccgagucauuugacu

SEQ ID NO: 1902401 - RNA, 19 nt, Artificial Sequence
  Description of Artificial Sequence: Synthetic oligonucleotide
  Antisense strand to SEQ ID NO: 1902400
agucaaaugacucggcauc

SEQ ID NO: 1902402 - RNA, 19 nt, Artificial Sequence
  Description of Artificial Sequence: Synthetic oligonucleotide
  Sense strand starting at position 2026 of SEQ ID NO: 1879373
cgagucauuugacugcagu

SEQ ID NO: 1902403 - RNA, 19 nt, Artificial Sequence
  Description of Artificial Sequence: Synthetic oligonucleotide
  Antisense strand to SEQ ID NO: 1902402
acugcagucaaaugacucg

SEQ ID NO: 1902404 - RNA, 19 nt, Artificial Sequence
  Description of Artificial Sequence: Synthetic oligonucleotide
  Sense strand starting at position 2027 of SEQ ID NO: 1879373
gagucauuugacugcagug

SEQ ID NO: 1902405 - RNA, 19 nt, Artificial Sequence
  Description of Artificial Sequence: Synthetic oligonucleotide
  Antisense strand to SEQ ID NO: 1902404
cacugcagucaaaugacuc

SEQ ID NO: 1902406 - RNA, 19 nt, Artificial Sequence
  Description of Artificial Sequence: Synthetic oligonucleotide
  Sense strand starting at position 2029 of SEQ ID NO: 1879373
gucauuugacugcaguguu

SEQ ID NO: 1902407 - RNA, 19 nt, Artificial Sequence
  Description of Artificial Sequence: Synthetic oligonucleotide
  Antisense strand to SEQ ID NO: 1902406
aacacugcagucaaaugac

SEQ ID NO: 1902408 - RNA, 19 nt, Artificial Sequence
  Description of Artificial Sequence: Synthetic oligonucleotide
  Sense strand starting at position 2042 of SEQ ID NO: 1879373
aguguuaaacauugcaaag

SEQ ID NO: 1902409 - RNA, 19 nt, Artificial Sequence
  Description of Artificial Sequence: Synthetic oligonucleotide
  Antisense strand to SEQ ID NO: 1902408
cuuugcaauguuuaacacu

SEQ ID NO: 1902410 - RNA, 19 nt, Artificial Sequence
  Description of Artificial Sequence: Synthetic oligonucleotide
  Sense strand starting at position 2087 of SEQ ID NO: 1879373
guacgugaaacuuaaguga

SEQ ID NO: 1902411 - RNA, 19 nt, Artificial Sequence
  Description of Artificial Sequence: Synthetic oligonucleotide
  Antisense strand to SEQ ID NO: 1902410
ucacuuaaguuucacguac

SEQ ID NO: 1902412 - RNA, 19 nt, Artificial Sequence
  Description of Artificial Sequence: Synthetic oligonucleotide
  Sense strand starting at position 2170 of SEQ ID NO: 1879373
gguugcgugauuuaaugca

SEQ ID NO: 1902413 - RNA, 19 nt, Artificial Sequence
  Description of Artificial Sequence: Synthetic oligonucleotide
  Antisense strand to SEQ ID NO: 1902412
ugcauuaaaucacgcaacc

SEQ ID NO: 1902414 - RNA, 19 nt, Artificial Sequence
  Description of Artificial Sequence: Synthetic oligonucleotide
  Sense strand starting at position 2345 of SEQ ID NO: 1879373
auauuuaggugguaaacca

SEQ ID NO: 1902415 - RNA, 19 nt, Artificial Sequence
  Description of Artificial Sequence: Synthetic oligonucleotide
  Antisense strand to SEQ ID NO: 1902414
ugguuuaccaccuaaauau

SEQ ID NO: 1902416 - RNA, 19 nt, Artificial Sequence
  Description of Artificial Sequence: Synthetic oligonucleotide
  Sense strand starting at position 2402 of SEQ ID NO: 1879373
auagauuugaucggugugu

SEQ ID NO: 1902417 - RNA, 19 nt, Artificial Sequence
  Description of Artificial Sequence: Synthetic oligonucleotide
  Antisense strand to SEQ ID NO: 1902416
acacaccgaucaaaucuau

SEQ ID NO: 1902418 - RNA, 19 nt, Artificial Sequence
  Description of Artificial Sequence: Synthetic oligonucleotide
  Sense strand starting at position 2403 of SEQ ID NO: 1879373
uagauuugaucggugugua

SEQ ID NO: 1902419 - RNA, 19 nt, Artificial Sequence
  Description of Artificial Sequence: Synthetic oligonucleotide
  Antisense strand to SEQ ID NO: 1902418
uacacaccgaucaaaucua

SEQ ID NO: 1902420 - RNA, 19 nt, Artificial Sequence
  Description of Artificial Sequence: Synthetic oligonucleotide
  Sense strand starting at position 2404 of SEQ ID NO: 1879373
agauuugaucgguguguau

SEQ ID NO: 1902421 - RNA, 19 nt, Artificial Sequence
  Description of Artificial Sequence: Synthetic oligonucleotide
  Antisense strand to SEQ ID NO: 1902420
auacacaccgaucaaaucu

SEQ ID NO: 1902422 - RNA, 19 nt, Artificial Sequence
  Description of Artificial Sequence: Synthetic oligonucleotide
  Sense strand starting at position 2442 of SEQ ID NO: 1879373
gacagaauugcuggaagua

SEQ ID NO: 1902423 - RNA, 19 nt, Artificial Sequence
  Description of Artificial Sequence: Synthetic oligonucleotide
  Antisense strand to SEQ ID NO: 1902422
uacuuccagcaauucuguc

SEQ ID NO: 1902424 - RNA, 19 nt, Artificial Sequence
  Description of Artificial Sequence: Synthetic oligonucleotide
  Sense strand starting at position 2523 of SEQ ID NO: 1879373
agcuauuaaauguagugua

SEQ ID NO: 1902425 - RNA, 19 nt, Artificial Sequence
  Description of Artificial Sequence: Synthetic oligonucleotide
  Antisense strand to SEQ ID NO: 1902424
uacacuacauuuaauagcu

SEQ ID NO: 1902426 - RNA, 19 nt, Artificial Sequence
  Description of Artificial Sequence: Synthetic oligonucleotide
  Sense strand starting at position 2536 of SEQ ID NO: 1879373
aguguaguguccaugagug

SEQ ID NO: 1902427 - RNA, 19 nt, Artificial Sequence
  Description of Artificial Sequence: Synthetic oligonucleotide
  Antisense strand to SEQ ID NO: 1902426
cacucauggacacuacacu

SEQ ID NO: 1902428 - RNA, 19 nt, Artificial Sequence
  Description of Artificial Sequence: Synthetic oligonucleotide
  Sense strand starting at position 2794 of SEQ ID NO: 1879373
augugaauacuguaauucu

SEQ ID NO: 1902429 - RNA, 19 nt, Artificial Sequence
  Description of Artificial Sequence: Synthetic oligonucleotide
  Antisense strand to SEQ ID NO: 1902428
agaauuacaguauucacau

SEQ ID NO: 1902430 - RNA, 19 nt, Artificial Sequence
  Description of Artificial Sequence: Synthetic oligonucleotide
  Sense strand starting at position 2860 of SEQ ID NO: 1879373
gggacuguuugauuaguau

SEQ ID NO: 1902431 - RNA, 19 nt, Artificial Sequence
  Description of Artificial Sequence: Synthetic oligonucleotide
  Antisense strand to SEQ ID NO: 1902430
auacuaaucaaacaguccc

SEQ ID NO: 1902432 - RNA, 19 nt, Artificial Sequence
  Description of Artificial Sequence: Synthetic oligonucleotide
  Sense strand starting at position 3310 of SEQ ID NO: 1879373
guaagaaugggaggcagau

SEQ ID NO: 1902433 - RNA, 19 nt, Artificial Sequence
  Description of Artificial Sequence: Synthetic oligonucleotide
  Antisense strand to SEQ ID NO: 1902432
aucugccucccauucuuac

SEQ ID NO: 1902434 - RNA, 19 nt, Artificial Sequence
  Description of Artificial Sequence: Synthetic oligonucleotide
  Sense strand starting at position 3356 of SEQ ID NO: 1879373
ugguaaauaucaguaacau

SEQ ID NO: 1902435 - RNA, 19 nt, Artificial Sequence
  Description of Artificial Sequence: Synthetic oligonucleotide
  Antisense strand to SEQ ID NO: 1902434
auguuacugauauuuacca

SEQ ID NO: 1902436 - RNA, 19 nt, Artificial Sequence
  Description of Artificial Sequence: Synthetic oligonucleotide
  Sense strand starting at position 3597 of SEQ ID NO: 1879373
ucuauaacccgguaacuga

SEQ ID NO: 1902437 - RNA, 19 nt, Artificial Sequence
  Description of Artificial Sequence: Synthetic oligonucleotide
  Antisense strand to SEQ ID NO: 1902436
ucaguuaccggguuauaga

SEQ ID NO: 1902438 - RNA, 19 nt, Artificial Sequence
  Description of Artificial Sequence: Synthetic oligonucleotide
  Sense strand starting at position 3608 of SEQ ID NO: 1879373
guaacugauuucuauaaga

SEQ ID NO: 1902439 - RNA, 19 nt, Artificial Sequence
  Description of Artificial Sequence: Synthetic oligonucleotide
  Antisense strand to SEQ ID NO: 1902438
ucuuauagaaaucaguuac

SEQ ID NO: 1902440 - RNA, 19 nt, Artificial Sequence
  Description of Artificial Sequence: Synthetic oligonucleotide
  Sense strand starting at position 3634 of SEQ ID NO: 1879373
uuaccuaugccaggacaga

SEQ ID NO: 1902441 - RNA, 19 nt, Artificial Sequence
  Description of Artificial Sequence: Synthetic oligonucleotide
  Antisense strand to SEQ ID NO: 1902440
ucuguccuggcauagguaa

SEQ ID NO: 1902442 - RNA, 19 nt, Artificial Sequence
  Description of Artificial Sequence: Synthetic oligonucleotide
  Sense strand starting at position 3884 of SEQ ID NO: 1879373
aggcucagcuaaucauaaa

SEQ ID NO: 1902443 - RNA, 19 nt, Artificial Sequence
  Description of Artificial Sequence: Synthetic oligonucleotide
  Antisense strand to SEQ ID NO: 1902442
uuuaugauuagcugagccu

SEQ ID NO: 1902444 - RNA, 19 nt, Artificial Sequence
  Description of Artificial Sequence: Synthetic oligonucleotide
  Sense strand starting at position 3962 of SEQ ID NO: 1879373
auuagagcuguccaugaga

SEQ ID NO: 1902445 - RNA, 19 nt, Artificial Sequence
  Description of Artificial Sequence: Synthetic oligonucleotide
  Antisense strand to SEQ ID NO: 1902444
ucucauggacagcucuaau

SEQ ID NO: 1902446 - RNA, 19 nt, Artificial Sequence
  Description of Artificial Sequence: Synthetic oligonucleotide
  Sense strand starting at position 3964 of SEQ ID NO: 1879373
uagagcuguccaugagaag

SEQ ID NO: 1902447 - RNA, 19 nt, Artificial Sequence
  Description of Artificial Sequence: Synthetic oligonucleotide
  Antisense strand to SEQ ID NO: 1902446
cuucucauggacagcucua

SEQ ID NO: 1902448 - RNA, 19 nt, Artificial Sequence
  Description of Artificial Sequence: Synthetic oligonucleotide
  Sense strand starting at position 3965 of SEQ ID NO: 1879373
agagcuguccaugagaagu

SEQ ID NO: 1902449 - RNA, 19 nt, Artificial Sequence
  Description of Artificial Sequence: Synthetic oligonucleotide
  Antisense strand to SEQ ID NO: 1902448
acuucucauggacagcucu

SEQ ID NO: 1902450 - RNA, 19 nt, Artificial Sequence
  Description of Artificial Sequence: Synthetic oligonucleotide
  Sense strand starting at position 31 of SEQ ID NO: 1879374
agaguacucaacuggcgau

SEQ ID NO: 1902451 - RNA, 19 nt, Artificial Sequence
  Description of Artificial Sequence: Synthetic oligonucleotide
  Antisense strand to SEQ ID NO: 1902450
aucgccaguugaguacucu

SEQ ID NO: 1902452 - RNA, 19 nt, Artificial Sequence
  Description of Artificial Sequence: Synthetic oligonucleotide
  Sense strand starting at position 207 of SEQ ID NO: 1879374
uuuguauaccuggaaggca

SEQ ID NO: 1902453 - RNA, 19 nt, Artificial Sequence
  Description of Artificial Sequence: Synthetic oligonucleotide
  Antisense strand to SEQ ID NO: 1902452
ugccuuccagguauacaaa

SEQ ID NO: 1902454 - RNA, 19 nt, Artificial Sequence
  Description of Artificial Sequence: Synthetic oligonucleotide
  Sense strand starting at position 267 of SEQ ID NO: 1879374
cuggucauuugggaugaca

SEQ ID NO: 1902455 - RNA, 19 nt, Artificial Sequence
  Description of Artificial Sequence: Synthetic oligonucleotide
  Antisense strand to SEQ ID NO: 1902454
ugucaucccaaaugaccag

SEQ ID NO: 1902456 - RNA, 19 nt, Artificial Sequence
  Description of Artificial Sequence: Synthetic oligonucleotide
  Sense strand starting at position 630 of SEQ ID NO: 1879374
gggacagcucaugggacua

SEQ ID NO: 1902457 - RNA, 19 nt, Artificial Sequence
  Description of Artificial Sequence: Synthetic oligonucleotide
  Antisense strand to SEQ ID NO: 1902456
uagucccaugagcuguccc

SEQ ID NO: 1902458 - RNA, 19 nt, Artificial Sequence
  Description of Artificial Sequence: Synthetic oligonucleotide
  Sense strand starting at position 728 of SEQ ID NO: 1879374
cuggauuguuaagcucauu

SEQ ID NO: 1902459 - RNA, 19 nt, Artificial Sequence
  Description of Artificial Sequence: Synthetic oligonucleotide
  Antisense strand to SEQ ID NO: 1902458
aaugagcuuaacaauccag

SEQ ID NO: 1902460 - RNA, 19 nt, Artificial Sequence
  Description of Artificial Sequence: Synthetic oligonucleotide
  Sense strand starting at position 733 of SEQ ID NO: 1879374
uuguuaagcucauuucugu

SEQ ID NO: 1902461 - RNA, 19 nt, Artificial Sequence
  Description of Artificial Sequence: Synthetic oligonucleotide
  Antisense strand to SEQ ID NO: 1902460
acagaaaugagcuuaacaa

SEQ ID NO: 1902462 - RNA, 19 nt, Artificial Sequence
  Description of Artificial Sequence: Synthetic oligonucleotide
  Sense strand starting at position 781 of SEQ ID NO: 1879374
aucauugguuucucuggga

SEQ ID NO: 1902463 - RNA, 19 nt, Artificial Sequence
  Description of Artificial Sequence: Synthetic oligonucleotide
  Antisense strand to SEQ ID NO: 1902462
ucccagagaaaccaaugau

SEQ ID NO: 1902464 - RNA, 19 nt, Artificial Sequence
  Description of Artificial Sequence: Synthetic oligonucleotide
  Sense strand starting at position 785 of SEQ ID NO: 1879374
uugguuucucugggaauaa

SEQ ID NO: 1902465 - RNA, 19 nt, Artificial Sequence
  Description of Artificial Sequence: Synthetic oligonucleotide
  Antisense strand to SEQ ID NO: 1902464
uuauucccagagaaaccaa

SEQ ID NO: 1902466 - RNA, 19 nt, Artificial Sequence
  Description of Artificial Sequence: Synthetic oligonucleotide
  Sense strand starting at position 797 of SEQ ID NO: 1879374
ggaauaauuucucaaagac

SEQ ID NO: 1902467 - RNA, 19 nt, Artificial Sequence
  Description of Artificial Sequence: Synthetic oligonucleotide
  Antisense strand to SEQ ID NO: 1902466
gucuuugagaaauuauucc

SEQ ID NO: 1902468 - RNA, 19 nt, Artificial Sequence
  Description of Artificial Sequence: Synthetic oligonucleotide
  Sense strand starting at position 1024 of SEQ ID NO: 1879374
uguacagaugucuaagagu

SEQ ID NO: 1902469 - RNA, 19 nt, Artificial Sequence
  Description of Artificial Sequence: Synthetic oligonucleotide
  Antisense strand to SEQ ID NO: 1902468
acucuuagacaucuguaca

SEQ ID NO: 1902470 - RNA, 19 nt, Artificial Sequence
  Description of Artificial Sequence: Synthetic oligonucleotide
  Sense strand starting at position 1129 of SEQ ID NO: 1879374
aaauguugucagcauguag

SEQ ID NO: 1902471 - RNA, 19 nt, Artificial Sequence
  Description of Artificial Sequence: Synthetic oligonucleotide
  Antisense strand to SEQ ID NO: 1902470
cuacaugcugacaacauuu

SEQ ID NO: 1902472 - RNA, 19 nt, Artificial Sequence
  Description of Artificial Sequence: Synthetic oligonucleotide
  Sense strand starting at position 1132 of SEQ ID NO: 1879374
uguugucagcauguaguuu

SEQ ID NO: 1902473 - RNA, 19 nt, Artificial Sequence
  Description of Artificial Sequence: Synthetic oligonucleotide
  Antisense strand to SEQ ID NO: 1902472
aaacuacaugcugacaaca

SEQ ID NO: 1902474 - RNA, 19 nt, Artificial Sequence
  Description of Artificial Sequence: Synthetic oligonucleotide
  Sense strand starting at position 1144 of SEQ ID NO: 1879374
guaguuuccauuugugaug

SEQ ID NO: 1902475 - RNA, 19 nt, Artificial Sequence
  Description of Artificial Sequence: Synthetic oligonucleotide
  Antisense strand to SEQ ID NO: 1902474
caucacaaauggaaacuac

SEQ ID NO: 1902476 - RNA, 19 nt, Artificial Sequence
  Description of Artificial Sequence: Synthetic oligonucleotide
  Sense strand starting at position 1155 of SEQ ID NO: 1879374
uugugauguggagacaucu

SEQ ID NO: 1902477 - RNA, 19 nt, Artificial Sequence
  Description of Artificial Sequence: Synthetic oligonucleotide
  Antisense strand to SEQ ID NO: 1902476
agaugucuccacaucacaa

SEQ ID NO: 1902478 - RNA, 19 nt, Artificial Sequence
  Description of Artificial Sequence: Synthetic oligonucleotide
  Sense strand starting at position 1286 of SEQ ID NO: 1879374
gaauuuagucuuugcaggu

SEQ ID NO: 1902479 - RNA, 19 nt, Artificial Sequence
  Description of Artificial Sequence: Synthetic oligonucleotide
  Antisense strand to SEQ ID NO: 1902478
accugcaaagacuaaauuc

SEQ ID NO: 1902480 - RNA, 19 nt, Artificial Sequence
  Description of Artificial Sequence: Synthetic oligonucleotide
  Sense strand starting at position 1340 of SEQ ID NO: 1879374
uggauaucaggcugccaua

SEQ ID NO: 1902481 - RNA, 19 nt, Artificial Sequence
  Description of Artificial Sequence: Synthetic oligonucleotide
  Antisense strand to SEQ ID NO: 1902480
uauggcagccugauaucca

SEQ ID NO: 1902482 - RNA, 19 nt, Artificial Sequence
  Description of Artificial Sequence: Synthetic oligonucleotide
  Sense strand starting at position 2405 of SEQ ID NO: 1879374
ucaguuauuaaaggucagu

SEQ ID NO: 1902483 - RNA, 19 nt, Artificial Sequence
  Description of Artificial Sequence: Synthetic oligonucleotide
  Antisense strand to SEQ ID NO: 1902482
acugaccuuuaauaacuga

SEQ ID NO: 1902484 - RNA, 19 nt, Artificial Sequence
  Description of Artificial Sequence: Synthetic oligonucleotide
  Sense strand starting at position 2408 of SEQ ID NO: 1879374
guuauuaaaggucagugaa

SEQ ID NO: 1902485 - RNA, 19 nt, Artificial Sequence
  Description of Artificial Sequence: Synthetic oligonucleotide
  Antisense strand to SEQ ID NO: 1902484
uucacugaccuuuaauaac

SEQ ID NO: 1902486 - RNA, 19 nt, Artificial Sequence
  Description of Artificial Sequence: Synthetic oligonucleotide
  Sense strand starting at position 2410 of SEQ ID NO: 1879374
uauuaaaggucagugaaca

SEQ ID NO: 1902487 - RNA, 19 nt, Artificial Sequence
  Description of Artificial Sequence: Synthetic oligonucleotide
  Antisense strand to SEQ ID NO: 1902486
uguucacugaccuuuaaua

SEQ ID NO: 1902488 - RNA, 19 nt, Artificial Sequence
  Description of Artificial Sequence: Synthetic oligonucleotide
  Sense strand starting at position 2411 of SEQ ID NO: 1879374
auuaaaggucagugaacac

SEQ ID NO: 1902489 - RNA, 19 nt, Artificial Sequence
  Description of Artificial Sequence: Synthetic oligonucleotide
  Antisense strand to SEQ ID NO: 1902488
guguucacugaccuuuaau

SEQ ID NO: 1902490 - RNA, 19 nt, Artificial Sequence
  Description of Artificial Sequence: Synthetic oligonucleotide
  Sense strand starting at position 2541 of SEQ ID NO: 1879374
gugucccaucuauaucauu

SEQ ID NO: 1902491 - RNA, 19 nt, Artificial Sequence
  Description of Artificial Sequence: Synthetic oligonucleotide
  Antisense strand to SEQ ID NO: 1902490
aaugauauagaugggacac

SEQ ID NO: 1902492 - RNA, 19 nt, Artificial Sequence
  Description of Artificial Sequence: Synthetic oligonucleotide
  Sense strand starting at position 2678 of SEQ ID NO: 1879374
uugcuuguaucauuuauuc

SEQ ID NO: 1902493 - RNA, 19 nt, Artificial Sequence
  Description of Artificial Sequence: Synthetic oligonucleotide
  Antisense strand to SEQ ID NO: 1902492
gaauaaaugauacaagcaa

SEQ ID NO: 1902494 - RNA, 19 nt, Artificial Sequence
  Description of Artificial Sequence: Synthetic oligonucleotide
  Sense strand starting at position 2851 of SEQ ID NO: 1879374
ucccuuguagggugaaaua

SEQ ID NO: 1902495 - RNA, 19 nt, Artificial Sequence
  Description of Artificial Sequence: Synthetic oligonucleotide
  Antisense strand to SEQ ID NO: 1902494
uauuucacccuacaaggga

SEQ ID NO: 1902496 - RNA, 19 nt, Artificial Sequence
  Description of Artificial Sequence: Synthetic oligonucleotide
  Sense strand starting at position 2862 of SEQ ID NO: 1879374
gugaaauauuuggagucug

SEQ ID NO: 1902497 - RNA, 19 nt, Artificial Sequence
  Description of Artificial Sequence: Synthetic oligonucleotide
  Antisense strand to SEQ ID NO: 1902496
cagacuccaaauauuucac

SEQ ID NO: 1902498 - RNA, 19 nt, Artificial Sequence
  Description of Artificial Sequence: Synthetic oligonucleotide
  Sense strand starting at position 2887 of SEQ ID NO: 1879374
aggaguugguuuagaugag

SEQ ID NO: 1902499 - RNA, 19 nt, Artificial Sequence
  Description of Artificial Sequence: Synthetic oligonucleotide
  Antisense strand to SEQ ID NO: 1902498
cucaucuaaaccaacuccu

SEQ ID NO: 1902500 - RNA, 19 nt, Artificial Sequence
  Description of Artificial Sequence: Synthetic oligonucleotide
  Sense strand starting at position 3020 of SEQ ID NO: 1879374
aagaguaauuuagggagca

SEQ ID NO: 1902501 - RNA, 19 nt, Artificial Sequence
  Description of Artificial Sequence: Synthetic oligonucleotide
  Antisense strand to SEQ ID NO: 1902500
ugcucccuaaauuacucuu

SEQ ID NO: 1902502 - RNA, 19 nt, Artificial Sequence
  Description of Artificial Sequence: Synthetic oligonucleotide
  Sense strand starting at position 3088 of SEQ ID NO: 1879374
cuggauugcuggcuggaca

SEQ ID NO: 1902503 - RNA, 19 nt, Artificial Sequence
  Description of Artificial Sequence: Synthetic oligonucleotide
  Antisense strand to SEQ ID NO: 1902502
uguccagccagcaauccag

SEQ ID NO: 1902504 - RNA, 19 nt, Artificial Sequence
  Description of Artificial Sequence: Synthetic oligonucleotide
  Sense strand starting at position 3125 of SEQ ID NO: 1879374
gcagucccauggucagaaa

SEQ ID NO: 1902505 - RNA, 19 nt, Artificial Sequence
  Description of Artificial Sequence: Synthetic oligonucleotide
  Antisense strand to SEQ ID NO: 1902504
uuucugaccaugggacugc

SEQ ID NO: 1902506 - RNA, 19 nt, Artificial Sequence
  Description of Artificial Sequence: Synthetic oligonucleotide
  Sense strand starting at position 3283 of SEQ ID NO: 1879374
gggaaacgcuguccugaau

SEQ ID NO: 1902507 - RNA, 19 nt, Artificial Sequence
  Description of Artificial Sequence: Synthetic oligonucleotide
  Antisense strand to SEQ ID NO: 1902506
auucaggacagcguuuccc

SEQ ID NO: 1902508 - RNA, 19 nt, Artificial Sequence
  Description of Artificial Sequence: Synthetic oligonucleotide
  Sense strand starting at position 3480 of SEQ ID NO: 1879374
ugccuaucacaugaaguga

SEQ ID NO: 1902509 - RNA, 19 nt, Artificial Sequence
  Description of Artificial Sequence: Synthetic oligonucleotide
  Antisense strand to SEQ ID NO: 1902508
ucacuucaugugauaggca

SEQ ID NO: 1902510 - RNA, 19 nt, Artificial Sequence
  Description of Artificial Sequence: Synthetic oligonucleotide
  Sense strand starting at position 3562 of SEQ ID NO: 1879374
aagacuuaggcaugucaua

SEQ ID NO: 1902511 - RNA, 19 nt, Artificial Sequence
  Description of Artificial Sequence: Synthetic oligonucleotide
  Antisense strand to SEQ ID NO: 1902510
uaugacaugccuaagucuu

SEQ ID NO: 1902512 - RNA, 19 nt, Artificial Sequence
  Description of Artificial Sequence: Synthetic oligonucleotide
  Sense strand starting at position 3571 of SEQ ID NO: 1879374
gcaugucauaggcagacua

SEQ ID NO: 1902513 - RNA, 19 nt, Artificial Sequence
  Description of Artificial Sequence: Synthetic oligonucleotide
  Antisense strand to SEQ ID NO: 1902512
uagucugccuaugacaugc

SEQ ID NO: 1902514 - RNA, 19 nt, Artificial Sequence
  Description of Artificial Sequence: Synthetic oligonucleotide
  Sense strand starting at position 3683 of SEQ ID NO: 1879374
caguaaauuccgggaucag

SEQ ID NO: 1902515 - RNA, 19 nt, Artificial Sequence
  Description of Artificial Sequence: Synthetic oligonucleotide
  Antisense strand to SEQ ID NO: 1902514
cugaucccggaauuuacug

SEQ ID NO: 1902516 - RNA, 19 nt, Artificial Sequence
  Description of Artificial Sequence: Synthetic oligonucleotide
  Sense strand starting at position 3684 of SEQ ID NO: 1879374
aguaaauuccgggaucagc

SEQ ID NO: 1902517 - RNA, 19 nt, Artificial Sequence
  Description of Artificial Sequence: Synthetic oligonucleotide
  Antisense strand to SEQ ID NO: 1902516
gcugaucccggaauuuacu

SEQ ID NO: 1902518 - RNA, 19 nt, Artificial Sequence
  Description of Artificial Sequence: Synthetic oligonucleotide
  Sense strand starting at position 3708 of SEQ ID NO: 1879374
ggcccucuucucugaccaa

SEQ ID NO: 1902519 - RNA, 19 nt, Artificial Sequence
  Description of Artificial Sequence: Synthetic oligonucleotide
  Antisense strand to SEQ ID NO: 1902518
uuggucagagaagagggcc

SEQ ID NO: 1902520 - RNA, 19 nt, Artificial Sequence
  Description of Artificial Sequence: Synthetic oligonucleotide
  Sense strand starting at position 3779 of SEQ ID NO: 1879374
uugagaagucugcaaacau

SEQ ID NO: 1902521 - RNA, 19 nt, Artificial Sequence
  Description of Artificial Sequence: Synthetic oligonucleotide
  Antisense strand to SEQ ID NO: 1902520
auguuugcagacuucucaa

SEQ ID NO: 1902522 - RNA, 19 nt, Artificial Sequence
  Description of Artificial Sequence: Synthetic oligonucleotide
  Sense strand starting at position 3811 of SEQ ID NO: 1879374
gagguuccauguuuaugga

SEQ ID NO: 1902523 - RNA, 19 nt, Artificial Sequence
  Description of Artificial Sequence: Synthetic oligonucleotide
  Antisense strand to SEQ ID NO: 1902522
uccauaaacauggaaccuc

SEQ ID NO: 1902524 - RNA, 19 nt, Artificial Sequence
  Description of Artificial Sequence: Synthetic oligonucleotide
  Sense strand starting at position 3818 of SEQ ID NO: 1879374
cauguuuauggaugauguu

SEQ ID NO: 1902525 - RNA, 19 nt, Artificial Sequence
  Description of Artificial Sequence: Synthetic oligonucleotide
  Antisense strand to SEQ ID NO: 1902524
aacaucauccauaaacaug

SEQ ID NO: 1902526 - RNA, 19 nt, Artificial Sequence
  Description of Artificial Sequence: Synthetic oligonucleotide
  Sense strand starting at position 3827 of SEQ ID NO: 1879374
ggaugauguuguguuaauc

SEQ ID NO: 1902527 - RNA, 19 nt, Artificial Sequence
  Description of Artificial Sequence: Synthetic oligonucleotide
  Antisense strand to SEQ ID NO: 1902526
gauuaacacaacaucaucc

SEQ ID NO: 1902528 - RNA, 19 nt, Artificial Sequence
  Description of Artificial Sequence: Synthetic oligonucleotide
  Sense strand starting at position 3907 of SEQ ID NO: 1879374
acaaaugccaugugaggaa

SEQ ID NO: 1902529 - RNA, 19 nt, Artificial Sequence
  Description of Artificial Sequence: Synthetic oligonucleotide
  Antisense strand to SEQ ID NO: 1902528
uuccucacauggcauuugu

SEQ ID NO: 1902530 - RNA, 19 nt, Artificial Sequence
  Description of Artificial Sequence: Synthetic oligonucleotide
  Sense strand starting at position 60 of SEQ ID NO: 1879375
accguucuucccuagugaa

SEQ ID NO: 1902531 - RNA, 19 nt, Artificial Sequence
  Description of Artificial Sequence: Synthetic oligonucleotide
  Antisense strand to SEQ ID NO: 1902530
uucacuagggaagaacggu

SEQ ID NO: 1902532 - RNA, 19 nt, Artificial Sequence
  Description of Artificial Sequence: Synthetic oligonucleotide
  Sense strand starting at position 99 of SEQ ID NO: 1879375
ggcagcuguggguauauca

SEQ ID NO: 1902533 - RNA, 19 nt, Artificial Sequence
  Description of Artificial Sequence: Synthetic oligonucleotide
  Antisense strand to SEQ ID NO: 1902532
ugauauacccacagcugcc

SEQ ID NO: 1902534 - RNA, 19 nt, Artificial Sequence
  Description of Artificial Sequence: Synthetic oligonucleotide
  Sense strand starting at position 109 of SEQ ID NO: 1879375
gguauaucaacuggucuga

SEQ ID NO: 1902535 - RNA, 19 nt, Artificial Sequence
  Description of Artificial Sequence: Synthetic oligonucleotide
  Antisense strand to SEQ ID NO: 1902534
ucagaccaguugauauacc

SEQ ID NO: 1902536 - RNA, 19 nt, Artificial Sequence
  Description of Artificial Sequence: Synthetic oligonucleotide
  Sense strand starting at position 176 of SEQ ID NO: 1879375
cagggucaugggugagaau

SEQ ID NO: 1902537 - RNA, 19 nt, Artificial Sequence
  Description of Artificial Sequence: Synthetic oligonucleotide
  Antisense strand to SEQ ID NO: 1902536
auucucacccaugacccug

SEQ ID NO: 1902538 - RNA, 19 nt, Artificial Sequence
  Description of Artificial Sequence: Synthetic oligonucleotide
  Sense strand starting at position 305 of SEQ ID NO: 1879375
uuagaaagauaccuuuguu

SEQ ID NO: 1902539 - RNA, 19 nt, Artificial Sequence
  Description of Artificial Sequence: Synthetic oligonucleotide
  Antisense strand to SEQ ID NO: 1902538
aacaaagguaucuuucuaa

SEQ ID NO: 1902540 - RNA, 19 nt, Artificial Sequence
  Description of Artificial Sequence: Synthetic oligonucleotide
  Sense strand starting at position 308 of SEQ ID NO: 1879375
gaaagauaccuuuguucug

SEQ ID NO: 1902541 - RNA, 19 nt, Artificial Sequence
  Description of Artificial Sequence: Synthetic oligonucleotide
  Antisense strand to SEQ ID NO: 1902540
cagaacaaagguaucuuuc

SEQ ID NO: 1902542 - RNA, 19 nt, Artificial Sequence
  Description of Artificial Sequence: Synthetic oligonucleotide
  Sense strand starting at position 324 of SEQ ID NO: 1879375
cugugcuuacuuuauaaag

SEQ ID NO: 1902543 - RNA, 19 nt, Artificial Sequence
  Description of Artificial Sequence: Synthetic oligonucleotide
  Antisense strand to SEQ ID NO: 1902542
cuuuauaaaguaagcacag

SEQ ID NO: 1902544 - RNA, 19 nt, Artificial Sequence
  Description of Artificial Sequence: Synthetic oligonucleotide
  Sense strand starting at position 452 of SEQ ID NO: 1879375
uggcaugaccuugauacga

SEQ ID NO: 1902545 - RNA, 19 nt, Artificial Sequence
  Description of Artificial Sequence: Synthetic oligonucleotide
  Antisense strand to SEQ ID NO: 1902544
ucguaucaaggucaugcca

SEQ ID NO: 1902546 - RNA, 19 nt, Artificial Sequence
  Description of Artificial Sequence: Synthetic oligonucleotide
  Sense strand starting at position 536 of SEQ ID NO: 1879375
guaacagcgauuugucuuu

SEQ ID NO: 1902547 - RNA, 19 nt, Artificial Sequence
  Description of Artificial Sequence: Synthetic oligonucleotide
  Antisense strand to SEQ ID NO: 1902546
aaagacaaaucgcuguuac

SEQ ID NO: 1902548 - RNA, 19 nt, Artificial Sequence
  Description of Artificial Sequence: Synthetic oligonucleotide
  Sense strand starting at position 581 of SEQ ID NO: 1879375
gcauuugucuucuccagaa

SEQ ID NO: 1902549 - RNA, 19 nt, Artificial Sequence
  Description of Artificial Sequence: Synthetic oligonucleotide
  Antisense strand to SEQ ID NO: 1902548
uucuggagaagacaaaugc

SEQ ID NO: 1902550 - RNA, 19 nt, Artificial Sequence
  Description of Artificial Sequence: Synthetic oligonucleotide
  Sense strand starting at position 666 of SEQ ID NO: 1879375
aaaggugagcuuuggaaau

SEQ ID NO: 1902551 - RNA, 19 nt, Artificial Sequence
  Description of Artificial Sequence: Synthetic oligonucleotide
  Antisense strand to SEQ ID NO: 1902550
auuuccaaagcucaccuuu

SEQ ID NO: 1902552 - RNA, 19 nt, Artificial Sequence
  Description of Artificial Sequence: Synthetic oligonucleotide
  Sense strand starting at position 678 of SEQ ID NO: 1879375
uggaaauaucuuugagcaa

SEQ ID NO: 1902553 - RNA, 19 nt, Artificial Sequence
  Description of Artificial Sequence: Synthetic oligonucleotide
  Antisense strand to SEQ ID NO: 1902552
uugcucaaagauauuucca

SEQ ID NO: 1902554 - RNA, 19 nt, Artificial Sequence
  Description of Artificial Sequence: Synthetic oligonucleotide
  Sense strand starting at position 690 of SEQ ID NO: 1879375
ugagcaauuuauucguuau

SEQ ID NO: 1902555 - RNA, 19 nt, Artificial Sequence
  Description of Artificial Sequence: Synthetic oligonucleotide
  Antisense strand to SEQ ID NO: 1902554
auaacgaauaaauugcuca

SEQ ID NO: 1902556 - RNA, 19 nt, Artificial Sequence
  Description of Artificial Sequence: Synthetic oligonucleotide
  Sense strand starting at position 715 of SEQ ID NO: 1879375
auguaaucuguuggaacaa

SEQ ID NO: 1902557 - RNA, 19 nt, Artificial Sequence
  Description of Artificial Sequence: Synthetic oligonucleotide
  Antisense strand to SEQ ID NO: 1902556
uuguuccaacagauuacau

SEQ ID NO: 1902558 - RNA, 19 nt, Artificial Sequence
  Description of Artificial Sequence: Synthetic oligonucleotide
  Sense strand starting at position 727 of SEQ ID NO: 1879375
ggaacaaaguucuaggaca

SEQ ID NO: 1902559 - RNA, 19 nt, Artificial Sequence
  Description of Artificial Sequence: Synthetic oligonucleotide
  Antisense strand to SEQ ID NO: 1902558
uguccuagaacuuuguucc

SEQ ID NO: 1902560 - RNA, 19 nt, Artificial Sequence
  Description of Artificial Sequence: Synthetic oligonucleotide
  Sense strand starting at position 797 of SEQ ID NO: 1879375
acuuauacuuaguuggaaa

SEQ ID NO: 1902561 - RNA, 19 nt, Artificial Sequence
  Description of Artificial Sequence: Synthetic oligonucleotide
  Antisense strand to SEQ ID NO: 1902560
uuuccaacuaaguauaagu

SEQ ID NO: 1902562 - RNA, 19 nt, Artificial Sequence
  Description of Artificial Sequence: Synthetic oligonucleotide
  Sense strand starting at position 799 of SEQ ID NO: 1879375
uuauacuuaguuggaaacu

SEQ ID NO: 1902563 - RNA, 19 nt, Artificial Sequence
  Description of Artificial Sequence: Synthetic oligonucleotide
  Antisense strand to SEQ ID NO: 1902562
aguuuccaacuaaguauaa

SEQ ID NO: 1902564 - RNA, 19 nt, Artificial Sequence
  Description of Artificial Sequence: Synthetic oligonucleotide
  Sense strand starting at position 892 of SEQ ID NO: 1879375
ucaucaauauccuuacgga

SEQ ID NO: 1902565 - RNA, 19 nt, Artificial Sequence
  Description of Artificial Sequence: Synthetic oligonucleotide
  Antisense strand to SEQ ID NO: 1902564
uccguaaggauauugauga

SEQ ID NO: 1902566 - RNA, 19 nt, Artificial Sequence
  Description of Artificial Sequence: Synthetic oligonucleotide
  Sense strand starting at position 907 of SEQ ID NO: 1879375
cggagugcacacugaauua

SEQ ID NO: 1902567 - RNA, 19 nt, Artificial Sequence
  Description of Artificial Sequence: Synthetic oligonucleotide
  Antisense strand to SEQ ID NO: 1902566
uaauucagugugcacuccg

SEQ ID NO: 1902568 - RNA, 19 nt, Artificial Sequence
  Description of Artificial Sequence: Synthetic oligonucleotide
  Sense strand starting at position 1968 of SEQ ID NO: 1879375
ggaccuuggcuccggauaa

SEQ ID NO: 1902569 - RNA, 19 nt, Artificial Sequence
  Description of Artificial Sequence: Synthetic oligonucleotide
  Antisense strand to SEQ ID NO: 1902568
uuauccggagccaaggucc

SEQ ID NO: 1902570 - RNA, 19 nt, Artificial Sequence
  Description of Artificial Sequence: Synthetic oligonucleotide
  Sense strand starting at position 1988 of SEQ ID NO: 1879375
ccguuuccgggucaacaaa

SEQ ID NO: 1902571 - RNA, 19 nt, Artificial Sequence
  Description of Artificial Sequence: Synthetic oligonucleotide
  Antisense strand to SEQ ID NO: 1902570
uuuguugacccggaaacgg

SEQ ID NO: 1902572 - RNA, 19 nt, Artificial Sequence
  Description of Artificial Sequence: Synthetic oligonucleotide
  Sense strand starting at position 2594 of SEQ ID NO: 1879375
uuuauaaauucgguaccuu

SEQ ID NO: 1902573 - RNA, 19 nt, Artificial Sequence
  Description of Artificial Sequence: Synthetic oligonucleotide
  Antisense strand to SEQ ID NO: 1902572
aagguaccgaauuuauaaa

SEQ ID NO: 1902574 - RNA, 19 nt, Artificial Sequence
  Description of Artificial Sequence: Synthetic oligonucleotide
  Sense strand starting at position 2595 of SEQ ID NO: 1879375
uuauaaauucgguaccuuu

SEQ ID NO: 1902575 - RNA, 19 nt, Artificial Sequence
  Description of Artificial Sequence: Synthetic oligonucleotide
  Antisense strand to SEQ ID NO: 1902574
aaagguaccgaauuuauaa

SEQ ID NO: 1902576 - RNA, 19 nt, Artificial Sequence
  Description of Artificial Sequence: Synthetic oligonucleotide
  Sense strand starting at position 2751 of SEQ ID NO: 1879375
uugucuccaguacauauaa

SEQ ID NO: 1902577 - RNA, 19 nt, Artificial Sequence
  Description of Artificial Sequence: Synthetic oligonucleotide
  Antisense strand to SEQ ID NO: 1902576
uuauauguacuggagacaa

SEQ ID NO: 1902578 - RNA, 19 nt, Artificial Sequence
  Description of Artificial Sequence: Synthetic oligonucleotide
  Sense strand starting at position 2765 of SEQ ID NO: 1879375
uauaaugaggcuuguaaag

SEQ ID NO: 1902579 - RNA, 19 nt, Artificial Sequence
  Description of Artificial Sequence: Synthetic oligonucleotide
  Antisense strand to SEQ ID NO: 1902578
cuuuacaagccucauuaua

SEQ ID NO: 1902580 - RNA, 19 nt, Artificial Sequence
  Description of Artificial Sequence: Synthetic oligonucleotide
  Sense strand starting at position 2783 of SEQ ID NO: 1879375
guggauaguguucaggaca

SEQ ID NO: 1902581 - RNA, 19 nt, Artificial Sequence
  Description of Artificial Sequence: Synthetic oligonucleotide
  Antisense strand to SEQ ID NO: 1902580
uguccugaacacuauccac

SEQ ID NO: 1902582 - RNA, 19 nt, Artificial Sequence
  Description of Artificial Sequence: Synthetic oligonucleotide
  Sense strand starting at position 2901 of SEQ ID NO: 1879375
aauuguauuuccggauuuc

SEQ ID NO: 1902583 - RNA, 19 nt, Artificial Sequence
  Description of Artificial Sequence: Synthetic oligonucleotide
  Antisense strand to SEQ ID NO: 1902582
gaaauccggaaauacaauu

SEQ ID NO: 1902584 - RNA, 19 nt, Artificial Sequence
  Description of Artificial Sequence: Synthetic oligonucleotide
  Sense strand starting at position 2998 of SEQ ID NO: 1879375
uugugcuaccaaugauuau

SEQ ID NO: 1902585 - RNA, 19 nt, Artificial Sequence
  Description of Artificial Sequence: Synthetic oligonucleotide
  Antisense strand to SEQ ID NO: 1902584
auaaucauugguagcacaa

SEQ ID NO: 1902586 - RNA, 19 nt, Artificial Sequence
  Description of Artificial Sequence: Synthetic oligonucleotide
  Sense strand starting at position 3134 of SEQ ID NO: 1879375
ucucuuagccaguggaaca

SEQ ID NO: 1902587 - RNA, 19 nt, Artificial Sequence
  Description of Artificial Sequence: Synthetic oligonucleotide
  Antisense strand to SEQ ID NO: 1902586
uguuccacuggcuaagaga

SEQ ID NO: 1902588 - RNA, 19 nt, Artificial Sequence
  Description of Artificial Sequence: Synthetic oligonucleotide
  Sense strand starting at position 3352 of SEQ ID NO: 1879375
uggcaagucacagaguaua

SEQ ID NO: 1902589 - RNA, 19 nt, Artificial Sequence
  Description of Artificial Sequence: Synthetic oligonucleotide
  Antisense strand to SEQ ID NO: 1902588
uauacucugugacuugcca

SEQ ID NO: 1902590 - RNA, 19 nt, Artificial Sequence
  Description of Artificial Sequence: Synthetic oligonucleotide
  Sense strand starting at position 3437 of SEQ ID NO: 1879375
gaggaaugcaccuguugua

SEQ ID NO: 1902591 - RNA, 19 nt, Artificial Sequence
  Description of Artificial Sequence: Synthetic oligonucleotide
  Antisense strand to SEQ ID NO: 1902590
uacaacaggugcauuccuc

SEQ ID NO: 1902592 - RNA, 19 nt, Artificial Sequence
  Description of Artificial Sequence: Synthetic oligonucleotide
  Sense strand starting at position 3589 of SEQ ID NO: 1879375
gccaauauacccggcuaau

SEQ ID NO: 1902593 - RNA, 19 nt, Artificial Sequence
  Description of Artificial Sequence: Synthetic oligonucleotide
  Antisense strand to SEQ ID NO: 1902592
auuagccggguauauuggc

SEQ ID NO: 1902594 - RNA, 19 nt, Artificial Sequence
  Description of Artificial Sequence: Synthetic oligonucleotide
  Sense strand starting at position 3740 of SEQ ID NO: 1879375
ggcuuaauguuuguuuaua

SEQ ID NO: 1902595 - RNA, 19 nt, Artificial Sequence
  Description of Artificial Sequence: Synthetic oligonucleotide
  Antisense strand to SEQ ID NO: 1902594
uauaaacaaacauuaagcc

SEQ ID NO: 1902596 - RNA, 19 nt, Artificial Sequence
  Description of Artificial Sequence: Synthetic oligonucleotide
  Sense strand starting at position 3767 of SEQ ID NO: 1879375
uaagaaucaguuugugaca

SEQ ID NO: 1902597 - RNA, 19 nt, Artificial Sequence
  Description of Artificial Sequence: Synthetic oligonucleotide
  Antisense strand to SEQ ID NO: 1902596
ugucacaaacugauucuua

SEQ ID NO: 1902598 - RNA, 19 nt, Artificial Sequence
  Description of Artificial Sequence: Synthetic oligonucleotide
  Sense strand starting at position 3831 of SEQ ID NO: 1879375
ucaauuuauguguguacua

SEQ ID NO: 1902599 - RNA, 19 nt, Artificial Sequence
  Description of Artificial Sequence: Synthetic oligonucleotide
  Antisense strand to SEQ ID NO: 1902598
uaguacacacauaaauuga

SEQ ID NO: 1902600 - RNA, 19 nt, Artificial Sequence
  Description of Artificial Sequence: Synthetic oligonucleotide
  Sense strand starting at position 3841 of SEQ ID NO: 1879375
uguguacuauuaccuuuaa

SEQ ID NO: 1902601 - RNA, 19 nt, Artificial Sequence
  Description of Artificial Sequence: Synthetic oligonucleotide
  Antisense strand to SEQ ID NO: 1902600
uuaaagguaauaguacaca

SEQ ID NO: 1902602 - RNA, 19 nt, Artificial Sequence
  Description of Artificial Sequence: Synthetic oligonucleotide
  Sense strand starting at position 3842 of SEQ ID NO: 1879375
guguacuauuaccuuuaaa

SEQ ID NO: 1902603 - RNA, 19 nt, Artificial Sequence
  Description of Artificial Sequence: Synthetic oligonucleotide
  Antisense strand to SEQ ID NO: 1902602
uuuaaagguaauaguacac

SEQ ID NO: 1902604 - RNA, 19 nt, Artificial Sequence
  Description of Artificial Sequence: Synthetic oligonucleotide
  Sense strand starting at position 3945 of SEQ ID NO: 1879375
augugugcugugaaagugu

SEQ ID NO: 1902605 - RNA, 19 nt, Artificial Sequence
  Description of Artificial Sequence: Synthetic oligonucleotide
  Antisense strand to SEQ ID NO: 1902604
acacuuucacagcacacau

SEQ ID NO: 1902606 - RNA, 19 nt, Artificial Sequence
  Description of Artificial Sequence: Synthetic oligonucleotide
  Sense strand starting at position 3947 of SEQ ID NO: 1879375
gugugcugugaaaguguau

SEQ ID NO: 1902607 - RNA, 19 nt, Artificial Sequence
  Description of Artificial Sequence: Synthetic oligonucleotide
  Antisense strand to SEQ ID NO: 1902606
auacacuuucacagcacac

SEQ ID NO: 1902608 - RNA, 19 nt, Artificial Sequence
  Description of Artificial Sequence: Synthetic oligonucleotide
  Sense strand starting at position 3971 of SEQ ID NO: 1879375
ggguauauuauguaggugu

SEQ ID NO: 1902609 - RNA, 19 nt, Artificial Sequence
  Description of Artificial Sequence: Synthetic oligonucleotide
  Antisense strand to SEQ ID NO: 1902608
acaccuacauaauauaccc

SEQ ID NO: 1902610 - RNA, 19 nt, Artificial Sequence
  Description of Artificial Sequence: Synthetic oligonucleotide
  Sense strand starting at position 132 of SEQ ID NO: 1879376
ccgcgacuggccuagauuu

SEQ ID NO: 1902611 - RNA, 19 nt, Artificial Sequence
  Description of Artificial Sequence: Synthetic oligonucleotide
  Antisense strand to SEQ ID NO: 1902610
aaaucuaggccagucgcgg

SEQ ID NO: 1902612 - RNA, 19 nt, Artificial Sequence
  Description of Artificial Sequence: Synthetic oligonucleotide
  Sense strand starting at position 375 of SEQ ID NO: 1879376
cuuuauaaucagggccaga

SEQ ID NO: 1902613 - RNA, 19 nt, Artificial Sequence
  Description of Artificial Sequence: Synthetic oligonucleotide
  Antisense strand to SEQ ID NO: 1902612
ucuggcccugauuauaaag

SEQ ID NO: 1902614 - RNA, 19 nt, Artificial Sequence
  Description of Artificial Sequence: Synthetic oligonucleotide
  Sense strand starting at position 493 of SEQ ID NO: 1879376
guagucacaggucaacuau

SEQ ID NO: 1902615 - RNA, 19 nt, Artificial Sequence
  Description of Artificial Sequence: Synthetic oligonucleotide
  Antisense strand to SEQ ID NO: 1902614
auaguugaccugugacuac

SEQ ID NO: 1902616 - RNA, 19 nt, Artificial Sequence
  Description of Artificial Sequence: Synthetic oligonucleotide
  Sense strand starting at position 709 of SEQ ID NO: 1879376
augauuaaagacugugauc

SEQ ID NO: 1902617 - RNA, 19 nt, Artificial Sequence
  Description of Artificial Sequence: Synthetic oligonucleotide
  Antisense strand to SEQ ID NO: 1902616
gaucacagucuuuaaucau

SEQ ID NO: 1902618 - RNA, 19 nt, Artificial Sequence
  Description of Artificial Sequence: Synthetic oligonucleotide
  Sense strand starting at position 723 of SEQ ID NO: 1879376
ugaucagagccauguagga

SEQ ID NO: 1902619 - RNA, 19 nt, Artificial Sequence
  Description of Artificial Sequence: Synthetic oligonucleotide
  Antisense strand to SEQ ID NO: 1902618
uccuacauggcucugauca

SEQ ID NO: 1902620 - RNA, 19 nt, Artificial Sequence
  Description of Artificial Sequence: Synthetic oligonucleotide
  Sense strand starting at position 836 of SEQ ID NO: 1879376
gccucauggaggugaauga

SEQ ID NO: 1902621 - RNA, 19 nt, Artificial Sequence
  Description of Artificial Sequence: Synthetic oligonucleotide
  Antisense strand to SEQ ID NO: 1902620
ucauucaccuccaugaggc

SEQ ID NO: 1902622 - RNA, 19 nt, Artificial Sequence
  Description of Artificial Sequence: Synthetic oligonucleotide
  Sense strand starting at position 843 of SEQ ID NO: 1879376
ggaggugaaugaucaguca

SEQ ID NO: 1902623 - RNA, 19 nt, Artificial Sequence
  Description of Artificial Sequence: Synthetic oligonucleotide
  Antisense strand to SEQ ID NO: 1902622
ugacugaucauucaccucc

SEQ ID NO: 1902624 - RNA, 19 nt, Artificial Sequence
  Description of Artificial Sequence: Synthetic oligonucleotide
  Sense strand starting at position 846 of SEQ ID NO: 1879376
ggugaaugaucagucacua

SEQ ID NO: 1902625 - RNA, 19 nt, Artificial Sequence
  Description of Artificial Sequence: Synthetic oligonucleotide
  Antisense strand to SEQ ID NO: 1902624
uagugacugaucauucacc

SEQ ID NO: 1902626 - RNA, 19 nt, Artificial Sequence
  Description of Artificial Sequence: Synthetic oligonucleotide
  Sense strand starting at position 1247 of SEQ ID NO: 1879376
gcaagauggccagagcaau

SEQ ID NO: 1902627 - RNA, 19 nt, Artificial Sequence
  Description of Artificial Sequence: Synthetic oligonucleotide
  Antisense strand to SEQ ID NO: 1902626
auugcucuggccaucuugc

SEQ ID NO: 1902628 - RNA, 19 nt, Artificial Sequence
  Description of Artificial Sequence: Synthetic oligonucleotide
  Sense strand starting at position 1446 of SEQ ID NO: 1879376
gaggaaacauggucucuca

SEQ ID NO: 1902629 - RNA, 19 nt, Artificial Sequence
  Description of Artificial Sequence: Synthetic oligonucleotide
  Antisense strand to SEQ ID NO: 1902628
ugagagaccauguuuccuc

SEQ ID NO: 1902630 - RNA, 19 nt, Artificial Sequence
  Description of Artificial Sequence: Synthetic oligonucleotide
  Sense strand starting at position 1466 of SEQ ID NO: 1879376
uuaugaugucuacaucagu

SEQ ID NO: 1902631 - RNA, 19 nt, Artificial Sequence
  Description of Artificial Sequence: Synthetic oligonucleotide
  Antisense strand to SEQ ID NO: 1902630
acugauguagacaucauaa

SEQ ID NO: 1902632 - RNA, 19 nt, Artificial Sequence
  Description of Artificial Sequence: Synthetic oligonucleotide
  Sense strand starting at position 1469 of SEQ ID NO: 1879376
ugaugucuacaucaguaag

SEQ ID NO: 1902633 - RNA, 19 nt, Artificial Sequence
  Description of Artificial Sequence: Synthetic oligonucleotide
  Antisense strand to SEQ ID NO: 1902632
cuuacugauguagacauca

SEQ ID NO: 1902634 - RNA, 19 nt, Artificial Sequence
  Description of Artificial Sequence: Synthetic oligonucleotide
  Sense strand starting at position 1471 of SEQ ID NO: 1879376
augucuacaucaguaagau

SEQ ID NO: 1902635 - RNA, 19 nt, Artificial Sequence
  Description of Artificial Sequence: Synthetic oligonucleotide
  Antisense strand to SEQ ID NO: 1902634
aucuuacugauguagacau

SEQ ID NO: 1902636 - RNA, 19 nt, Artificial Sequence
  Description of Artificial Sequence: Synthetic oligonucleotide
  Sense strand starting at position 1472 of SEQ ID NO: 1879376
ugucuacaucaguaagaua

SEQ ID NO: 1902637 - RNA, 19 nt, Artificial Sequence
  Description of Artificial Sequence: Synthetic oligonucleotide
  Antisense strand to SEQ ID NO: 1902636
uaucuuacugauguagaca

SEQ ID NO: 1902638 - RNA, 19 nt, Artificial Sequence
  Description of Artificial Sequence: Synthetic oligonucleotide
  Sense strand starting at position 2196 of SEQ ID NO: 1879376
augaaauugcuaugauuag

SEQ ID NO: 1902639 - RNA, 19 nt, Artificial Sequence
  Description of Artificial Sequence: Synthetic oligonucleotide
  Antisense strand to SEQ ID NO: 1902638
cuaaucauagcaauuucau

SEQ ID NO: 1902640 - RNA, 19 nt, Artificial Sequence
  Description of Artificial Sequence: Synthetic oligonucleotide
  Sense strand starting at position 2275 of SEQ ID NO: 1879376
cuagaugugcuccauaauc

SEQ ID NO: 1902641 - RNA, 19 nt, Artificial Sequence
  Description of Artificial Sequence: Synthetic oligonucleotide
  Antisense strand to SEQ ID NO: 1902640
gauuauggagcacaucuag

SEQ ID NO: 1902642 - RNA, 19 nt, Artificial Sequence
  Description of Artificial Sequence: Synthetic oligonucleotide
  Sense strand starting at position 2277 of SEQ ID NO: 1879376
agaugugcuccauaaucag

SEQ ID NO: 1902643 - RNA, 19 nt, Artificial Sequence
  Description of Artificial Sequence: Synthetic oligonucleotide
  Antisense strand to SEQ ID NO: 1902642
cugauuauggagcacaucu

SEQ ID NO: 1902644 - RNA, 19 nt, Artificial Sequence
  Description of Artificial Sequence: Synthetic oligonucleotide
  Sense strand starting at position 2372 of SEQ ID NO: 1879376
gaagaaauuccugguugug

SEQ ID NO: 1902645 - RNA, 19 nt, Artificial Sequence
  Description of Artificial Sequence: Synthetic oligonucleotide
  Antisense strand to SEQ ID NO: 1902644
cacaaccaggaauuucuuc

SEQ ID NO: 1902646 - RNA, 19 nt, Artificial Sequence
  Description of Artificial Sequence: Synthetic oligonucleotide
  Sense strand starting at position 2374 of SEQ ID NO: 1879376
agaaauuccugguugugag

SEQ ID NO: 1902647 - RNA, 19 nt, Artificial Sequence
  Description of Artificial Sequence: Synthetic oligonucleotide
  Antisense strand to SEQ ID NO: 1902646
cucacaaccaggaauuucu

SEQ ID NO: 1902648 - RNA, 19 nt, Artificial Sequence
  Description of Artificial Sequence: Synthetic oligonucleotide
  Sense strand starting at position 2605 of SEQ ID NO: 1879376
gauguucuaggacagcuua

SEQ ID NO: 1902649 - RNA, 19 nt, Artificial Sequence
  Description of Artificial Sequence: Synthetic oligonucleotide
  Antisense strand to SEQ ID NO: 1902648
uaagcuguccuagaacauc

SEQ ID NO: 1902650 - RNA, 19 nt, Artificial Sequence
  Description of Artificial Sequence: Synthetic oligonucleotide
  Sense strand starting at position 2773 of SEQ ID NO: 1879376
uuaaguggucaagagcaca

SEQ ID NO: 1902651 - RNA, 19 nt, Artificial Sequence
  Description of Artificial Sequence: Synthetic oligonucleotide
  Antisense strand to SEQ ID NO: 1902650
ugugcucuugaccacuuaa

SEQ ID NO: 1902652 - RNA, 19 nt, Artificial Sequence
  Description of Artificial Sequence: Synthetic oligonucleotide
  Sense strand starting at position 2776 of SEQ ID NO: 1879376
aguggucaagagcacaaua

SEQ ID NO: 1902653 - RNA, 19 nt, Artificial Sequence
  Description of Artificial Sequence: Synthetic oligonucleotide
  Antisense strand to SEQ ID NO: 1902652
uauugugcucuugaccacu

SEQ ID NO: 1902654 - RNA, 19 nt, Artificial Sequence
  Description of Artificial Sequence: Synthetic oligonucleotide
  Sense strand starting at position 2778 of SEQ ID NO: 1879376
uggucaagagcacaauauu

SEQ ID NO: 1902655 - RNA, 19 nt, Artificial Sequence
  Description of Artificial Sequence: Synthetic oligonucleotide
  Antisense strand to SEQ ID NO: 1902654
aauauugugcucuugacca

SEQ ID NO: 1902656 - RNA, 19 nt, Artificial Sequence
  Description of Artificial Sequence: Synthetic oligonucleotide
  Sense strand starting at position 2925 of SEQ ID NO: 1879376
ucauaaagugcccaguaua

SEQ ID NO: 1902657 - RNA, 19 nt, Artificial Sequence
  Description of Artificial Sequence: Synthetic oligonucleotide
  Antisense strand to SEQ ID NO: 1902656
uauacugggcacuuuauga

SEQ ID NO: 1902658 - RNA, 19 nt, Artificial Sequence
  Description of Artificial Sequence: Synthetic oligonucleotide
  Sense strand starting at position 2980 of SEQ ID NO: 1879376
aaaucauggcgaugauuaa

SEQ ID NO: 1902659 - RNA, 19 nt, Artificial Sequence
  Description of Artificial Sequence: Synthetic oligonucleotide
  Antisense strand to SEQ ID NO: 1902658
uuaaucaucgccaugauuu

SEQ ID NO: 1902660 - RNA, 19 nt, Artificial Sequence
  Description of Artificial Sequence: Synthetic oligonucleotide
  Sense strand starting at position 2981 of SEQ ID NO: 1879376
aaucauggcgaugauuaau

SEQ ID NO: 1902661 - RNA, 19 nt, Artificial Sequence
  Description of Artificial Sequence: Synthetic oligonucleotide
  Antisense strand to SEQ ID NO: 1902660
auuaaucaucgccaugauu

SEQ ID NO: 1902662 - RNA, 19 nt, Artificial Sequence
  Description of Artificial Sequence: Synthetic oligonucleotide
  Sense strand starting at position 3062 of SEQ ID NO: 1879376
gaagauagaucuucuguaa

SEQ ID NO: 1902663 - RNA, 19 nt, Artificial Sequence
  Description of Artificial Sequence: Synthetic oligonucleotide
  Antisense strand to SEQ ID NO: 1902662
uuacagaagaucuaucuuc

SEQ ID NO: 1902664 - RNA, 19 nt, Artificial Sequence
  Description of Artificial Sequence: Synthetic oligonucleotide
  Sense strand starting at position 3065 of SEQ ID NO: 1879376
gauagaucuucuguaaaga

SEQ ID NO: 1902665 - RNA, 19 nt, Artificial Sequence
  Description of Artificial Sequence: Synthetic oligonucleotide
  Antisense strand to SEQ ID NO: 1902664
ucuuuacagaagaucuauc

SEQ ID NO: 1902666 - RNA, 19 nt, Artificial Sequence
  Description of Artificial Sequence: Synthetic oligonucleotide
  Sense strand starting at position 3122 of SEQ ID NO: 1879376
gcgugacacagucaggaaa

SEQ ID NO: 1902667 - RNA, 19 nt, Artificial Sequence
  Description of Artificial Sequence: Synthetic oligonucleotide
  Antisense strand to SEQ ID NO: 1902666
uuuccugacugugucacgc

SEQ ID NO: 1902668 - RNA, 19 nt, Artificial Sequence
  Description of Artificial Sequence: Synthetic oligonucleotide
  Sense strand starting at position 3159 of SEQ ID NO: 1879376
aguccuaaauguuugacaa

SEQ ID NO: 1902669 - RNA, 19 nt, Artificial Sequence
  Description of Artificial Sequence: Synthetic oligonucleotide
  Antisense strand to SEQ ID NO: 1902668
uugucaaacauuuaggacu

SEQ ID NO: 1902670 - RNA, 19 nt, Artificial Sequence
  Description of Artificial Sequence: Synthetic oligonucleotide
  Sense strand starting at position 3172 of SEQ ID NO: 1879376
ugacaaugucucuaagcuu

SEQ ID NO: 1902671 - RNA, 19 nt, Artificial Sequence
  Description of Artificial Sequence: Synthetic oligonucleotide
  Antisense strand to SEQ ID NO: 1902670
aagcuuagagacauuguca

SEQ ID NO: 1902672 - RNA, 19 nt, Artificial Sequence
  Description of Artificial Sequence: Synthetic oligonucleotide
  Sense strand starting at position 3249 of SEQ ID NO: 1879376
ggaaguugaccugagcuuu

SEQ ID NO: 1902673 - RNA, 19 nt, Artificial Sequence
  Description of Artificial Sequence: Synthetic oligonucleotide
  Antisense strand to SEQ ID NO: 1902672
aaagcucaggucaacuucc

SEQ ID NO: 1902674 - RNA, 19 nt, Artificial Sequence
  Description of Artificial Sequence: Synthetic oligonucleotide
  Sense strand starting at position 3279 of SEQ ID NO: 1879376
aggguuggaauagguaaua

SEQ ID NO: 1902675 - RNA, 19 nt, Artificial Sequence
  Description of Artificial Sequence: Synthetic oligonucleotide
  Antisense strand to SEQ ID NO: 1902674
uauuaccuauuccaacccu

SEQ ID NO: 1902676 - RNA, 19 nt, Artificial Sequence
  Description of Artificial Sequence: Synthetic oligonucleotide
  Sense strand starting at position 3514 of SEQ ID NO: 1879376
ugaggaguuuggguugaag

SEQ ID NO: 1902677 - RNA, 19 nt, Artificial Sequence
  Description of Artificial Sequence: Synthetic oligonucleotide
  Antisense strand to SEQ ID NO: 1902676
cuucaacccaaacuccuca

SEQ ID NO: 1902678 - RNA, 19 nt, Artificial Sequence
  Description of Artificial Sequence: Synthetic oligonucleotide
  Sense strand starting at position 3525 of SEQ ID NO: 1879376
gguugaagugcggaggaau

SEQ ID NO: 1902679 - RNA, 19 nt, Artificial Sequence
  Description of Artificial Sequence: Synthetic oligonucleotide
  Antisense strand to SEQ ID NO: 1902678
auuccuccgcacuucaacc

SEQ ID NO: 1902680 - RNA, 19 nt, Artificial Sequence
  Description of Artificial Sequence: Synthetic oligonucleotide
  Sense strand starting at position 3528 of SEQ ID NO: 1879376
ugaagugcggaggaauuau

SEQ ID NO: 1902681 - RNA, 19 nt, Artificial Sequence
  Description of Artificial Sequence: Synthetic oligonucleotide
  Antisense strand to SEQ ID NO: 1902680
auaauuccuccgcacuuca

SEQ ID NO: 1902682 - RNA, 19 nt, Artificial Sequence
  Description of Artificial Sequence: Synthetic oligonucleotide
  Sense strand starting at position 3603 of SEQ ID NO: 1879376
gaauguaucgcacaaggaa

SEQ ID NO: 1902683 - RNA, 19 nt, Artificial Sequence
  Description of Artificial Sequence: Synthetic oligonucleotide
  Antisense strand to SEQ ID NO: 1902682
uuccuugugcgauacauuc

SEQ ID NO: 1902684 - RNA, 19 nt, Artificial Sequence
  Description of Artificial Sequence: Synthetic oligonucleotide
  Sense strand starting at position 3656 of SEQ ID NO: 1879376
uguggaacucgaugagaag

SEQ ID NO: 1902685 - RNA, 19 nt, Artificial Sequence
  Description of Artificial Sequence: Synthetic oligonucleotide
  Antisense strand to SEQ ID NO: 1902684
cuucucaucgaguuccaca

SEQ ID NO: 1902686 - RNA, 19 nt, Artificial Sequence
  Description of Artificial Sequence: Synthetic oligonucleotide
  Sense strand starting at position 3657 of SEQ ID NO: 1879376
guggaacucgaugagaagu

SEQ ID NO: 1902687 - RNA, 19 nt, Artificial Sequence
  Description of Artificial Sequence: Synthetic oligonucleotide
  Antisense strand to SEQ ID NO: 1902686
acuucucaucgaguuccac

SEQ ID NO: 1902688 - RNA, 19 nt, Artificial Sequence
  Description of Artificial Sequence: Synthetic oligonucleotide
  Sense strand starting at position 3745 of SEQ ID NO: 1879376
ucaaucagguccucagaua

SEQ ID NO: 1902689 - RNA, 19 nt, Artificial Sequence
  Description of Artificial Sequence: Synthetic oligonucleotide
  Antisense strand to SEQ ID NO: 1902688
uaucugaggaccugauuga

SEQ ID NO: 1902690 - RNA, 19 nt, Artificial Sequence
  Description of Artificial Sequence: Synthetic oligonucleotide
  Sense strand starting at position 426 of SEQ ID NO: 1879377
agcuguaggagucacagaa

SEQ ID NO: 1902691 - RNA, 19 nt, Artificial Sequence
  Description of Artificial Sequence: Synthetic oligonucleotide
  Antisense strand to SEQ ID NO: 1902690
uucugugacuccuacagcu

SEQ ID NO: 1902692 - RNA, 19 nt, Artificial Sequence
  Description of Artificial Sequence: Synthetic oligonucleotide
  Sense strand starting at position 682 of SEQ ID NO: 1879377
cucccagaaugugcuuaau

SEQ ID NO: 1902693 - RNA, 19 nt, Artificial Sequence
  Description of Artificial Sequence: Synthetic oligonucleotide
  Antisense strand to SEQ ID NO: 1902692
auuaagcacauucugggag

SEQ ID NO: 1902694 - RNA, 19 nt, Artificial Sequence
  Description of Artificial Sequence: Synthetic oligonucleotide
  Sense strand starting at position 684 of SEQ ID NO: 1879377
cccagaaugugcuuaaucu

SEQ ID NO: 1902695 - RNA, 19 nt, Artificial Sequence
  Description of Artificial Sequence: Synthetic oligonucleotide
  Antisense strand to SEQ ID NO: 1902694
agauuaagcacauucuggg

SEQ ID NO: 1902696 - RNA, 19 nt, Artificial Sequence
  Description of Artificial Sequence: Synthetic oligonucleotide
  Sense strand starting at position 685 of SEQ ID NO: 1879377
ccagaaugugcuuaaucuu

SEQ ID NO: 1902697 - RNA, 19 nt, Artificial Sequence
  Description of Artificial Sequence: Synthetic oligonucleotide
  Antisense strand to SEQ ID NO: 1902696
aagauuaagcacauucugg

SEQ ID NO: 1902698 - RNA, 19 nt, Artificial Sequence
  Description of Artificial Sequence: Synthetic oligonucleotide
  Sense strand starting at position 858 of SEQ ID NO: 1879377
cgagccacuuuacugaaau

SEQ ID NO: 1902699 - RNA, 19 nt, Artificial Sequence
  Description of Artificial Sequence: Synthetic oligonucleotide
  Antisense strand to SEQ ID NO: 1902698
auuucaguaaaguggcucg

SEQ ID NO: 1902700 - RNA, 19 nt, Artificial Sequence
  Description of Artificial Sequence: Synthetic oligonucleotide
  Sense strand starting at position 870 of SEQ ID NO: 1879377
cugaaaugagacuguguuu

SEQ ID NO: 1902701 - RNA, 19 nt, Artificial Sequence
  Description of Artificial Sequence: Synthetic oligonucleotide
  Antisense strand to SEQ ID NO: 1902700
aaacacagucucauuucag

SEQ ID NO: 1902702 - RNA, 19 nt, Artificial Sequence
  Description of Artificial Sequence: Synthetic oligonucleotide
  Sense strand starting at position 1128 of SEQ ID NO: 1879377
ugcaucaucugaccagaau

SEQ ID NO: 1902703 - RNA, 19 nt, Artificial Sequence
  Description of Artificial Sequence: Synthetic oligonucleotide
  Antisense strand to SEQ ID NO: 1902702
auucuggucagaugaugca

SEQ ID NO: 1902704 - RNA, 19 nt, Artificial Sequence
  Description of Artificial Sequence: Synthetic oligonucleotide
  Sense strand starting at position 1172 of SEQ ID NO: 1879377
gguuguugacuguagaguu

SEQ ID NO: 1902705 - RNA, 19 nt, Artificial Sequence
  Description of Artificial Sequence: Synthetic oligonucleotide
  Antisense strand to SEQ ID NO: 1902704
aacucuacagucaacaacc

SEQ ID NO: 1902706 - RNA, 19 nt, Artificial Sequence
  Description of Artificial Sequence: Synthetic oligonucleotide
  Sense strand starting at position 1192 of SEQ ID NO: 1879377
guucccuauuuauagauuu

SEQ ID NO: 1902707 - RNA, 19 nt, Artificial Sequence
  Description of Artificial Sequence: Synthetic oligonucleotide
  Antisense strand to SEQ ID NO: 1902706
aaaucuauaaauagggaac

SEQ ID NO: 1902708 - RNA, 19 nt, Artificial Sequence
  Description of Artificial Sequence: Synthetic oligonucleotide
  Sense strand starting at position 1326 of SEQ ID NO: 1879377
uucugaagguuuccauuau

SEQ ID NO: 1902709 - RNA, 19 nt, Artificial Sequence
  Description of Artificial Sequence: Synthetic oligonucleotide
  Antisense strand to SEQ ID NO: 1902708
auaauggaaaccuucagaa

SEQ ID NO: 1902710 - RNA, 19 nt, Artificial Sequence
  Description of Artificial Sequence: Synthetic oligonucleotide
  Sense strand starting at position 1333 of SEQ ID NO: 1879377
gguuuccauuaucuuuaca

SEQ ID NO: 1902711 - RNA, 19 nt, Artificial Sequence
  Description of Artificial Sequence: Synthetic oligonucleotide
  Antisense strand to SEQ ID NO: 1902710
uguaaagauaauggaaacc

SEQ ID NO: 1902712 - RNA, 19 nt, Artificial Sequence
  Description of Artificial Sequence: Synthetic oligonucleotide
  Sense strand starting at position 1555 of SEQ ID NO: 1879377
cgagcuauuagugauaaca

SEQ ID NO: 1902713 - RNA, 19 nt, Artificial Sequence
  Description of Artificial Sequence: Synthetic oligonucleotide
  Antisense strand to SEQ ID NO: 1902712
uguuaucacuaauagcucg

SEQ ID NO: 1902714 - RNA, 19 nt, Artificial Sequence
  Description of Artificial Sequence: Synthetic oligonucleotide
  Sense strand starting at position 1644 of SEQ ID NO: 1879377
uacagaguugcugaguaca

SEQ ID NO: 1902715 - RNA, 19 nt, Artificial Sequence
  Description of Artificial Sequence: Synthetic oligonucleotide
  Antisense strand to SEQ ID NO: 1902714
uguacucagcaacucugua

SEQ ID NO: 1902716 - RNA, 19 nt, Artificial Sequence
  Description of Artificial Sequence: Synthetic oligonucleotide
  Sense strand starting at position 1646 of SEQ ID NO: 1879377
cagaguugcugaguacaga

SEQ ID NO: 1902717 - RNA, 19 nt, Artificial Sequence
  Description of Artificial Sequence: Synthetic oligonucleotide
  Antisense strand to SEQ ID NO: 1902716
ucuguacucagcaacucug

SEQ ID NO: 1902718 - RNA, 19 nt, Artificial Sequence
  Description of Artificial Sequence: Synthetic oligonucleotide
  Sense strand starting at position 1928 of SEQ ID NO: 1879377
ugaaucaucucuuuggcca

SEQ ID NO: 1902719 - RNA, 19 nt, Artificial Sequence
  Description of Artificial Sequence: Synthetic oligonucleotide
  Antisense strand to SEQ ID NO: 1902718
uggccaaagagaugauuca

SEQ ID NO: 1902720 - RNA, 19 nt, Artificial Sequence
  Description of Artificial Sequence: Synthetic oligonucleotide
  Sense strand starting at position 1998 of SEQ ID NO: 1879377
ucaguaucagauugacugu

SEQ ID NO: 1902721 - RNA, 19 nt, Artificial Sequence
  Description of Artificial Sequence: Synthetic oligonucleotide
  Antisense strand to SEQ ID NO: 1902720
acagucaaucugauacuga

SEQ ID NO: 1902722 - RNA, 19 nt, Artificial Sequence
  Description of Artificial Sequence: Synthetic oligonucleotide
  Sense strand starting at position 2214 of SEQ ID NO: 1879377
aucuucuauccgugaaaug

SEQ ID NO: 1902723 - RNA, 19 nt, Artificial Sequence
  Description of Artificial Sequence: Synthetic oligonucleotide
  Antisense strand to SEQ ID NO: 1902722
cauuucacggauagaagau

SEQ ID NO: 1902724 - RNA, 19 nt, Artificial Sequence
  Description of Artificial Sequence: Synthetic oligonucleotide
  Sense strand starting at position 2215 of SEQ ID NO: 1879377
ucuucuauccgugaaaugg

SEQ ID NO: 1902725 - RNA, 19 nt, Artificial Sequence
  Description of Artificial Sequence: Synthetic oligonucleotide
  Antisense strand to SEQ ID NO: 1902724
ccauuucacggauagaaga

SEQ ID NO: 1902726 - RNA, 19 nt, Artificial Sequence
  Description of Artificial Sequence: Synthetic oligonucleotide
  Sense strand starting at position 2219 of SEQ ID NO: 1879377
cuauccgugaaauggugaa

SEQ ID NO: 1902727 - RNA, 19 nt, Artificial Sequence
  Description of Artificial Sequence: Synthetic oligonucleotide
  Antisense strand to SEQ ID NO: 1902726
uucaccauuucacggauag

SEQ ID NO: 1902728 - RNA, 19 nt, Artificial Sequence
  Description of Artificial Sequence: Synthetic oligonucleotide
  Sense strand starting at position 2225 of SEQ ID NO: 1879377
gugaaauggugaagaagga

SEQ ID NO: 1902729 - RNA, 19 nt, Artificial Sequence
  Description of Artificial Sequence: Synthetic oligonucleotide
  Antisense strand to SEQ ID NO: 1902728
uccuucuucaccauuucac

SEQ ID NO: 1902730 - RNA, 19 nt, Artificial Sequence
  Description of Artificial Sequence: Synthetic oligonucleotide
  Sense strand starting at position 2411 of SEQ ID NO: 1879377
ccaguucuccacuaauguc

SEQ ID NO: 1902731 - RNA, 19 nt, Artificial Sequence
  Description of Artificial Sequence: Synthetic oligonucleotide
  Antisense strand to SEQ ID NO: 1902730
gacauuaguggagaacugg

SEQ ID NO: 1902732 - RNA, 19 nt, Artificial Sequence
  Description of Artificial Sequence: Synthetic oligonucleotide
  Sense strand starting at position 2541 of SEQ ID NO: 1879377
gaagaaugcuagucaggaa

SEQ ID NO: 1902733 - RNA, 19 nt, Artificial Sequence
  Description of Artificial Sequence: Synthetic oligonucleotide
  Antisense strand to SEQ ID NO: 1902732
uuccugacuagcauucuuc

SEQ ID NO: 1902734 - RNA, 19 nt, Artificial Sequence
  Description of Artificial Sequence: Synthetic oligonucleotide
  Sense strand starting at position 2639 of SEQ ID NO: 1879377
uuguaucauggguauguga

SEQ ID NO: 1902735 - RNA, 19 nt, Artificial Sequence
  Description of Artificial Sequence: Synthetic oligonucleotide
  Antisense strand to SEQ ID NO: 1902734
ucacauacccaugauacaa

SEQ ID NO: 1902736 - RNA, 19 nt, Artificial Sequence
  Description of Artificial Sequence: Synthetic oligonucleotide
  Sense strand starting at position 2641 of SEQ ID NO: 1879377
guaucauggguaugugaga

SEQ ID NO: 1902737 - RNA, 19 nt, Artificial Sequence
  Description of Artificial Sequence: Synthetic oligonucleotide
  Antisense strand to SEQ ID NO: 1902736
ucucacauacccaugauac

SEQ ID NO: 1902738 - RNA, 19 nt, Artificial Sequence
  Description of Artificial Sequence: Synthetic oligonucleotide
  Sense strand starting at position 2642 of SEQ ID NO: 1879377
uaucauggguaugugagaa

SEQ ID NO: 1902739 - RNA, 19 nt, Artificial Sequence
  Description of Artificial Sequence: Synthetic oligonucleotide
  Antisense strand to SEQ ID NO: 1902738
uucucacauacccaugaua

SEQ ID NO: 1902740 - RNA, 19 nt, Artificial Sequence
  Description of Artificial Sequence: Synthetic oligonucleotide
  Sense strand starting at position 2706 of SEQ ID NO: 1879377
aggugaugguaucugccaa

SEQ ID NO: 1902741 - RNA, 19 nt, Artificial Sequence
  Description of Artificial Sequence: Synthetic oligonucleotide
  Antisense strand to SEQ ID NO: 1902740
uuggcagauaccaucaccu

SEQ ID NO: 1902742 - RNA, 19 nt, Artificial Sequence
  Description of Artificial Sequence: Synthetic oligonucleotide
  Sense strand starting at position 2734 of SEQ ID NO: 1879377
ccuguaaaguuacuacuuu

SEQ ID NO: 1902743 - RNA, 19 nt, Artificial Sequence
  Description of Artificial Sequence: Synthetic oligonucleotide
  Antisense strand to SEQ ID NO: 1902742
aaaguaguaacuuuacagg

SEQ ID NO: 1902744 - RNA, 19 nt, Artificial Sequence
  Description of Artificial Sequence: Synthetic oligonucleotide
  Sense strand starting at position 2767 of SEQ ID NO: 1879377
uuauucuuuggaggugagu

SEQ ID NO: 1902745 - RNA, 19 nt, Artificial Sequence
  Description of Artificial Sequence: Synthetic oligonucleotide
  Antisense strand to SEQ ID NO: 1902744
acucaccuccaaagaauaa

SEQ ID NO: 1902746 - RNA, 19 nt, Artificial Sequence
  Description of Artificial Sequence: Synthetic oligonucleotide
  Sense strand starting at position 2769 of SEQ ID NO: 1879377
auucuuuggaggugaguca

SEQ ID NO: 1902747 - RNA, 19 nt, Artificial Sequence
  Description of Artificial Sequence: Synthetic oligonucleotide
  Antisense strand to SEQ ID NO: 1902746
ugacucaccuccaaagaau

SEQ ID NO: 1902748 - RNA, 19 nt, Artificial Sequence
  Description of Artificial Sequence: Synthetic oligonucleotide
  Sense strand starting at position 2821 of SEQ ID NO: 1879377
gcucuauguccuggaagga

SEQ ID NO: 1902749 - RNA, 19 nt, Artificial Sequence
  Description of Artificial Sequence: Synthetic oligonucleotide
  Antisense strand to SEQ ID NO: 1902748
uccuuccaggacauagagc

SEQ ID NO: 1902750 - RNA, 19 nt, Artificial Sequence
  Description of Artificial Sequence: Synthetic oligonucleotide
  Sense strand starting at position 2861 of SEQ ID NO: 1879377
uggaauguuucuguaaaga

SEQ ID NO: 1902751 - RNA, 19 nt, Artificial Sequence
  Description of Artificial Sequence: Synthetic oligonucleotide
  Antisense strand to SEQ ID NO: 1902750
ucuuuacagaaacauucca

SEQ ID NO: 1902752 - RNA, 19 nt, Artificial Sequence
  Description of Artificial Sequence: Synthetic oligonucleotide
  Sense strand starting at position 2929 of SEQ ID NO: 1879377
gggcuuguggguuaauaau

SEQ ID NO: 1902753 - RNA, 19 nt, Artificial Sequence
  Description of Artificial Sequence: Synthetic oligonucleotide
  Antisense strand to SEQ ID NO: 1902752
auuauuaacccacaagccc

SEQ ID NO: 1902754 - RNA, 19 nt, Artificial Sequence
  Description of Artificial Sequence: Synthetic oligonucleotide
  Sense strand starting at position 3025 of SEQ ID NO: 1879377
uugacaugucuccauccuu

SEQ ID NO: 1902755 - RNA, 19 nt, Artificial Sequence
  Description of Artificial Sequence: Synthetic oligonucleotide
  Antisense strand to SEQ ID NO: 1902754
aaggauggagacaugucaa

SEQ ID NO: 1902756 - RNA, 19 nt, Artificial Sequence
  Description of Artificial Sequence: Synthetic oligonucleotide
  Sense strand starting at position 3142 of SEQ ID NO: 1879377
auuguagaaugguauuuag

SEQ ID NO: 1902757 - RNA, 19 nt, Artificial Sequence
  Description of Artificial Sequence: Synthetic oligonucleotide
  Antisense strand to SEQ ID NO: 1902756
cuaaauaccauucuacaau

SEQ ID NO: 1902758 - RNA, 19 nt, Artificial Sequence
  Description of Artificial Sequence: Synthetic oligonucleotide
  Sense strand starting at position 3191 of SEQ ID NO: 1879377
uugcuacugagguaucagu

SEQ ID NO: 1902759 - RNA, 19 nt, Artificial Sequence
  Description of Artificial Sequence: Synthetic oligonucleotide
  Antisense strand to SEQ ID NO: 1902758
acugauaccucaguagcaa

SEQ ID NO: 1902760 - RNA, 19 nt, Artificial Sequence
  Description of Artificial Sequence: Synthetic oligonucleotide
  Sense strand starting at position 3439 of SEQ ID NO: 1879377
gugagcucccuuuaucuac

SEQ ID NO: 1902761 - RNA, 19 nt, Artificial Sequence
  Description of Artificial Sequence: Synthetic oligonucleotide
  Antisense strand to SEQ ID NO: 1902760
guagauaaagggagcucac

SEQ ID NO: 1902762 - RNA, 19 nt, Artificial Sequence
  Description of Artificial Sequence: Synthetic oligonucleotide
  Sense strand starting at position 3549 of SEQ ID NO: 1879377
aucagaguacaguguuuau

SEQ ID NO: 1902763 - RNA, 19 nt, Artificial Sequence
  Description of Artificial Sequence: Synthetic oligonucleotide
  Antisense strand to SEQ ID NO: 1902762
auaaacacuguacucugau

SEQ ID NO: 1902764 - RNA, 19 nt, Artificial Sequence
  Description of Artificial Sequence: Synthetic oligonucleotide
  Sense strand starting at position 3589 of SEQ ID NO: 1879377
ugucuuuagcuuuacaaug

SEQ ID NO: 1902765 - RNA, 19 nt, Artificial Sequence
  Description of Artificial Sequence: Synthetic oligonucleotide
  Antisense strand to SEQ ID NO: 1902764
cauuguaaagcuaaagaca

SEQ ID NO: 1902766 - RNA, 19 nt, Artificial Sequence
  Description of Artificial Sequence: Synthetic oligonucleotide
  Sense strand starting at position 3672 of SEQ ID NO: 1879377
ugcuguauauuuguaaugu

SEQ ID NO: 1902767 - RNA, 19 nt, Artificial Sequence
  Description of Artificial Sequence: Synthetic oligonucleotide
  Antisense strand to SEQ ID NO: 1902766
acauuacaaauauacagca

SEQ ID NO: 1902768 - RNA, 19 nt, Artificial Sequence
  Description of Artificial Sequence: Synthetic oligonucleotide
  Sense strand starting at position 3835 of SEQ ID NO: 1879377
agagucauguauccaccaa

SEQ ID NO: 1902769 - RNA, 19 nt, Artificial Sequence
  Description of Artificial Sequence: Synthetic oligonucleotide
  Antisense strand to SEQ ID NO: 1902768
uugguggauacaugacucu

SEQ ID NO: 1902770 - RNA, 19 nt, Artificial Sequence
  Description of Artificial Sequence: Synthetic oligonucleotide
  Sense strand starting at position 10 of SEQ ID NO: 1879378
gccauuuaguagccaauau

SEQ ID NO: 1902771 - RNA, 19 nt, Artificial Sequence
  Description of Artificial Sequence: Synthetic oligonucleotide
  Antisense strand to SEQ ID NO: 1902770
auauuggcuacuaaauggc

SEQ ID NO: 1902772 - RNA, 19 nt, Artificial Sequence
  Description of Artificial Sequence: Synthetic oligonucleotide
  Sense strand starting at position 28 of SEQ ID NO: 1879378
uacaaauggccaugaugga

SEQ ID NO: 1902773 - RNA, 19 nt, Artificial Sequence
  Description of Artificial Sequence: Synthetic oligonucleotide
  Antisense strand to SEQ ID NO: 1902772
uccaucauggccauuugua

SEQ ID NO: 1902774 - RNA, 19 nt, Artificial Sequence
  Description of Artificial Sequence: Synthetic oligonucleotide
  Sense strand starting at position 87 of SEQ ID NO: 1879378
ggguaucuugucugagcua

SEQ ID NO: 1902775 - RNA, 19 nt, Artificial Sequence
  Description of Artificial Sequence: Synthetic oligonucleotide
  Antisense strand to SEQ ID NO: 1902774
uagcucagacaagauaccc

SEQ ID NO: 1902776 - RNA, 19 nt, Artificial Sequence
  Description of Artificial Sequence: Synthetic oligonucleotide
  Sense strand starting at position 88 of SEQ ID NO: 1879378
gguaucuugucugagcuau

SEQ ID NO: 1902777 - RNA, 19 nt, Artificial Sequence
  Description of Artificial Sequence: Synthetic oligonucleotide
  Antisense strand to SEQ ID NO: 1902776
auagcucagacaagauacc

SEQ ID NO: 1902778 - RNA, 19 nt, Artificial Sequence
  Description of Artificial Sequence: Synthetic oligonucleotide
  Sense strand starting at position 125 of SEQ ID NO: 1879378
uagguaggcucccugagaa

SEQ ID NO: 1902779 - RNA, 19 nt, Artificial Sequence
  Description of Artificial Sequence: Synthetic oligonucleotide
  Antisense strand to SEQ ID NO: 1902778
uucucagggagccuaccua

SEQ ID NO: 1902780 - RNA, 19 nt, Artificial Sequence
  Description of Artificial Sequence: Synthetic oligonucleotide
  Sense strand starting at position 169 of SEQ ID NO: 1879378
gcccacuaucgagaaugcu

SEQ ID NO: 1902781 - RNA, 19 nt, Artificial Sequence
  Description of Artificial Sequence: Synthetic oligonucleotide
  Antisense strand to SEQ ID NO: 1902780
agcauucucgauagugggc

SEQ ID NO: 1902782 - RNA, 19 nt, Artificial Sequence
  Description of Artificial Sequence: Synthetic oligonucleotide
  Sense strand starting at position 175 of SEQ ID NO: 1879378
uaucgagaaugcuacuaag

SEQ ID NO: 1902783 - RNA, 19 nt, Artificial Sequence
  Description of Artificial Sequence: Synthetic oligonucleotide
  Antisense strand to SEQ ID NO: 1902782
cuuaguagcauucucgaua

SEQ ID NO: 1902784 - RNA, 19 nt, Artificial Sequence
  Description of Artificial Sequence: Synthetic oligonucleotide
  Sense strand starting at position 181 of SEQ ID NO: 1879378
gaaugcuacuaagugcauu

SEQ ID NO: 1902785 - RNA, 19 nt, Artificial Sequence
  Description of Artificial Sequence: Synthetic oligonucleotide
  Antisense strand to SEQ ID NO: 1902784
aaugcacuuaguagcauuc

SEQ ID NO: 1902786 - RNA, 19 nt, Artificial Sequence
  Description of Artificial Sequence: Synthetic oligonucleotide
  Sense strand starting at position 184 of SEQ ID NO: 1879378
ugcuacuaagugcauuaau

SEQ ID NO: 1902787 - RNA, 19 nt, Artificial Sequence
  Description of Artificial Sequence: Synthetic oligonucleotide
  Antisense strand to SEQ ID NO: 1902786
auuaaugcacuuaguagca

SEQ ID NO: 1902788 - RNA, 19 nt, Artificial Sequence
  Description of Artificial Sequence: Synthetic oligonucleotide
  Sense strand starting at position 195 of SEQ ID NO: 1879378
gcauuaaugcauuagagau

SEQ ID NO: 1902789 - RNA, 19 nt, Artificial Sequence
  Description of Artificial Sequence: Synthetic oligonucleotide
  Antisense strand to SEQ ID NO: 1902788
aucucuaaugcauuaaugc

SEQ ID NO: 1902790 - RNA, 19 nt, Artificial Sequence
  Description of Artificial Sequence: Synthetic oligonucleotide
  Sense strand starting at position 203 of SEQ ID NO: 1879378
gcauuagagaucugaaaug

SEQ ID NO: 1902791 - RNA, 19 nt, Artificial Sequence
  Description of Artificial Sequence: Synthetic oligonucleotide
  Antisense strand to SEQ ID NO: 1902790
cauuucagaucucuaaugc

SEQ ID NO: 1902792 - RNA, 19 nt, Artificial Sequence
  Description of Artificial Sequence: Synthetic oligonucleotide
  Sense strand starting at position 212 of SEQ ID NO: 1879378
aucugaaaugucuggcaga

SEQ ID NO: 1902793 - RNA, 19 nt, Artificial Sequence
  Description of Artificial Sequence: Synthetic oligonucleotide
  Antisense strand to SEQ ID NO: 1902792
ucugccagacauuucagau

SEQ ID NO: 1902794 - RNA, 19 nt, Artificial Sequence
  Description of Artificial Sequence: Synthetic oligonucleotide
  Sense strand starting at position 213 of SEQ ID NO: 1879378
ucugaaaugucuggcagaa

SEQ ID NO: 1902795 - RNA, 19 nt, Artificial Sequence
  Description of Artificial Sequence: Synthetic oligonucleotide
  Antisense strand to SEQ ID NO: 1902794
uucugccagacauuucaga

SEQ ID NO: 1902796 - RNA, 19 nt, Artificial Sequence
  Description of Artificial Sequence: Synthetic oligonucleotide
  Sense strand starting at position 215 of SEQ ID NO: 1879378
ugaaaugucuggcagaaau

SEQ ID NO: 1902797 - RNA, 19 nt, Artificial Sequence
  Description of Artificial Sequence: Synthetic oligonucleotide
  Antisense strand to SEQ ID NO: 1902796
auuucugccagacauuuca

SEQ ID NO: 1902798 - RNA, 19 nt, Artificial Sequence
  Description of Artificial Sequence: Synthetic oligonucleotide
  Sense strand starting at position 225 of SEQ ID NO: 1879378
ggcagaaaugcugacagua

SEQ ID NO: 1902799 - RNA, 19 nt, Artificial Sequence
  Description of Artificial Sequence: Synthetic oligonucleotide
  Antisense strand to SEQ ID NO: 1902798
uacugucagcauuucugcc

SEQ ID NO: 1902800 - RNA, 19 nt, Artificial Sequence
  Description of Artificial Sequence: Synthetic oligonucleotide
  Sense strand starting at position 227 of SEQ ID NO: 1879378
cagaaaugcugacaguaac

SEQ ID NO: 1902801 - RNA, 19 nt, Artificial Sequence
  Description of Artificial Sequence: Synthetic oligonucleotide
  Antisense strand to SEQ ID NO: 1902800
guuacugucagcauuucug

SEQ ID NO: 1902802 - RNA, 19 nt, Artificial Sequence
  Description of Artificial Sequence: Synthetic oligonucleotide
  Sense strand starting at position 235 of SEQ ID NO: 1879378
cugacaguaacucggcaau

SEQ ID NO: 1902803 - RNA, 19 nt, Artificial Sequence
  Description of Artificial Sequence: Synthetic oligonucleotide
  Antisense strand to SEQ ID NO: 1902802
auugccgaguuacugucag

SEQ ID NO: 1902804 - RNA, 19 nt, Artificial Sequence
  Description of Artificial Sequence: Synthetic oligonucleotide
  Sense strand starting at position 237 of SEQ ID NO: 1879378
gacaguaacucggcaauua

SEQ ID NO: 1902805 - RNA, 19 nt, Artificial Sequence
  Description of Artificial Sequence: Synthetic oligonucleotide
  Antisense strand to SEQ ID NO: 1902804
uaauugccgaguuacuguc

SEQ ID NO: 1902806 - RNA, 19 nt, Artificial Sequence
  Description of Artificial Sequence: Synthetic oligonucleotide
  Sense strand starting at position 247 of SEQ ID NO: 1879378
cggcaauuagacugaggga

SEQ ID NO: 1902807 - RNA, 19 nt, Artificial Sequence
  Description of Artificial Sequence: Synthetic oligonucleotide
  Antisense strand to SEQ ID NO: 1902806
ucccucagucuaauugccg

SEQ ID NO: 1902808 - RNA, 19 nt, Artificial Sequence
  Description of Artificial Sequence: Synthetic oligonucleotide
  Sense strand starting at position 285 of SEQ ID NO: 1879378
guugguggugguugaaaca

SEQ ID NO: 1902809 - RNA, 19 nt, Artificial Sequence
  Description of Artificial Sequence: Synthetic oligonucleotide
  Antisense strand to SEQ ID NO: 1902808
uguuucaaccaccaccaac

SEQ ID NO: 1902810 - RNA, 19 nt, Artificial Sequence
  Description of Artificial Sequence: Synthetic oligonucleotide
  Sense strand starting at position 344 of SEQ ID NO: 1879378
gugcccuguuccucagaga

SEQ ID NO: 1902811 - RNA, 19 nt, Artificial Sequence
  Description of Artificial Sequence: Synthetic oligonucleotide
  Antisense strand to SEQ ID NO: 1902810
ucucugaggaacagggcac

SEQ ID NO: 1902812 - RNA, 19 nt, Artificial Sequence
  Description of Artificial Sequence: Synthetic oligonucleotide
  Sense strand starting at position 1988 of SEQ ID NO: 1879378
gagggaaucuuggcuagga

SEQ ID NO: 1902813 - RNA, 19 nt, Artificial Sequence
  Description of Artificial Sequence: Synthetic oligonucleotide
  Antisense strand to SEQ ID NO: 1902812
uccuagccaagauucccuc

SEQ ID NO: 1902814 - RNA, 19 nt, Artificial Sequence
  Description of Artificial Sequence: Synthetic oligonucleotide
  Sense strand starting at position 2025 of SEQ ID NO: 1879378
agaagugguugauccugaa

SEQ ID NO: 1902815 - RNA, 19 nt, Artificial Sequence
  Description of Artificial Sequence: Synthetic oligonucleotide
  Antisense strand to SEQ ID NO: 1902814
uucaggaucaaccacuucu

SEQ ID NO: 1902816 - RNA, 19 nt, Artificial Sequence
  Description of Artificial Sequence: Synthetic oligonucleotide
  Sense strand starting at position 2028 of SEQ ID NO: 1879378
agugguugauccugaagaa

SEQ ID NO: 1902817 - RNA, 19 nt, Artificial Sequence
  Description of Artificial Sequence: Synthetic oligonucleotide
  Antisense strand to SEQ ID NO: 1902816
uucuucaggaucaaccacu

SEQ ID NO: 1902818 - RNA, 19 nt, Artificial Sequence
  Description of Artificial Sequence: Synthetic oligonucleotide
  Sense strand starting at position 2126 of SEQ ID NO: 1879378
gcgccagguucuaugggua

SEQ ID NO: 1902819 - RNA, 19 nt, Artificial Sequence
  Description of Artificial Sequence: Synthetic oligonucleotide
  Antisense strand to SEQ ID NO: 1902818
uacccauagaaccuggcgc

SEQ ID NO: 1902820 - RNA, 19 nt, Artificial Sequence
  Description of Artificial Sequence: Synthetic oligonucleotide
  Sense strand starting at position 2230 of SEQ ID NO: 1879378
guaggucccgcuggaaauu

SEQ ID NO: 1902821 - RNA, 19 nt, Artificial Sequence
  Description of Artificial Sequence: Synthetic oligonucleotide
  Antisense strand to SEQ ID NO: 1902820
aauuuccagcgggaccuac

SEQ ID NO: 1902822 - RNA, 19 nt, Artificial Sequence
  Description of Artificial Sequence: Synthetic oligonucleotide
  Sense strand starting at position 2593 of SEQ ID NO: 1879378
uggaguuucucuucuugaa

SEQ ID NO: 1902823 - RNA, 19 nt, Artificial Sequence
  Description of Artificial Sequence: Synthetic oligonucleotide
  Antisense strand to SEQ ID NO: 1902822
uucaagaagagaaacucca

SEQ ID NO: 1902824 - RNA, 19 nt, Artificial Sequence
  Description of Artificial Sequence: Synthetic oligonucleotide
  Sense strand starting at position 3065 of SEQ ID NO: 1879378
guguguaauggcgcgaucu

SEQ ID NO: 1902825 - RNA, 19 nt, Artificial Sequence
  Description of Artificial Sequence: Synthetic oligonucleotide
  Antisense strand to SEQ ID NO: 1902824
agaucgcgccauuacacac

SEQ ID NO: 1902826 - RNA, 19 nt, Artificial Sequence
  Description of Artificial Sequence: Synthetic oligonucleotide
  Sense strand starting at position 3353 of SEQ ID NO: 1879378
auaaguuccuaccagguau

SEQ ID NO: 1902827 - RNA, 19 nt, Artificial Sequence
  Description of Artificial Sequence: Synthetic oligonucleotide
  Antisense strand to SEQ ID NO: 1902826
auaccugguaggaacuuau

SEQ ID NO: 1902828 - RNA, 19 nt, Artificial Sequence
  Description of Artificial Sequence: Synthetic oligonucleotide
  Sense strand starting at position 3364 of SEQ ID NO: 1879378
ccagguauauaguuuagaa

SEQ ID NO: 1902829 - RNA, 19 nt, Artificial Sequence
  Description of Artificial Sequence: Synthetic oligonucleotide
  Antisense strand to SEQ ID NO: 1902828
uucuaaacuauauaccugg

SEQ ID NO: 1902830 - RNA, 19 nt, Artificial Sequence
  Description of Artificial Sequence: Synthetic oligonucleotide
  Sense strand starting at position 3408 of SEQ ID NO: 1879378
acacuaacgaggugggauu

SEQ ID NO: 1902831 - RNA, 19 nt, Artificial Sequence
  Description of Artificial Sequence: Synthetic oligonucleotide
  Antisense strand to SEQ ID NO: 1902830
aaucccaccucguuagugu

SEQ ID NO: 1902832 - RNA, 19 nt, Artificial Sequence
  Description of Artificial Sequence: Synthetic oligonucleotide
  Sense strand starting at position 381 of SEQ ID NO: 1879379
uggcaaggagguuauccau

SEQ ID NO: 1902833 - RNA, 19 nt, Artificial Sequence
  Description of Artificial Sequence: Synthetic oligonucleotide
  Antisense strand to SEQ ID NO: 1902832
auggauaaccuccuugcca

SEQ ID NO: 1902834 - RNA, 19 nt, Artificial Sequence
  Description of Artificial Sequence: Synthetic oligonucleotide
  Sense strand starting at position 457 of SEQ ID NO: 1879379
ugauaucuguuacucuauc

SEQ ID NO: 1902835 - RNA, 19 nt, Artificial Sequence
  Description of Artificial Sequence: Synthetic oligonucleotide
  Antisense strand to SEQ ID NO: 1902834
gauagaguaacagauauca

SEQ ID NO: 1902836 - RNA, 19 nt, Artificial Sequence
  Description of Artificial Sequence: Synthetic oligonucleotide
  Sense strand starting at position 576 of SEQ ID NO: 1879379
aaggguuagcgacaguaaa

SEQ ID NO: 1902837 - RNA, 19 nt, Artificial Sequence
  Description of Artificial Sequence: Synthetic oligonucleotide
  Antisense strand to SEQ ID NO: 1902836
uuuacugucgcuaacccuu

SEQ ID NO: 1902838 - RNA, 19 nt, Artificial Sequence
  Description of Artificial Sequence: Synthetic oligonucleotide
  Sense strand starting at position 688 of SEQ ID NO: 1879379
cccucuguaggugauguaa

SEQ ID NO: 1902839 - RNA, 19 nt, Artificial Sequence
  Description of Artificial Sequence: Synthetic oligonucleotide
  Antisense strand to SEQ ID NO: 1902838
uuacaucaccuacagaggg

SEQ ID NO: 1902840 - RNA, 19 nt, Artificial Sequence
  Description of Artificial Sequence: Synthetic oligonucleotide
  Sense strand starting at position 737 of SEQ ID NO: 1879379
ugggaauggauacgucaga

SEQ ID NO: 1902841 - RNA, 19 nt, Artificial Sequence
  Description of Artificial Sequence: Synthetic oligonucleotide
  Antisense strand to SEQ ID NO: 1902840
ucugacguauccauuccca

SEQ ID NO: 1902842 - RNA, 19 nt, Artificial Sequence
  Description of Artificial Sequence: Synthetic oligonucleotide
  Sense strand starting at position 832 of SEQ ID NO: 1879379
ugugaagaagguuguuauu

SEQ ID NO: 1902843 - RNA, 19 nt, Artificial Sequence
  Description of Artificial Sequence: Synthetic oligonucleotide
  Antisense strand to SEQ ID NO: 1902842
aauaacaaccuucuucaca

SEQ ID NO: 1902844 - RNA, 19 nt, Artificial Sequence
  Description of Artificial Sequence: Synthetic oligonucleotide
  Sense strand starting at position 904 of SEQ ID NO: 1879379
gugguucuagaguagcaaa

SEQ ID NO: 1902845 - RNA, 19 nt, Artificial Sequence
  Description of Artificial Sequence: Synthetic oligonucleotide
  Antisense strand to SEQ ID NO: 1902844
uuugcuacucuagaaccac

SEQ ID NO: 1902846 - RNA, 19 nt, Artificial Sequence
  Description of Artificial Sequence: Synthetic oligonucleotide
  Sense strand starting at position 1083 of SEQ ID NO: 1879379
uggagcuauucccuaauga

SEQ ID NO: 1902847 - RNA, 19 nt, Artificial Sequence
  Description of Artificial Sequence: Synthetic oligonucleotide
  Antisense strand to SEQ ID NO: 1902846
ucauuagggaauagcucca

SEQ ID NO: 1902848 - RNA, 19 nt, Artificial Sequence
  Description of Artificial Sequence: Synthetic oligonucleotide
  Sense strand starting at position 1242 of SEQ ID NO: 1879379
uagagaugauuacuuguau

SEQ ID NO: 1902849 - RNA, 19 nt, Artificial Sequence
  Description of Artificial Sequence: Synthetic oligonucleotide
  Antisense strand to SEQ ID NO: 1902848
auacaaguaaucaucucua

SEQ ID NO: 1902850 - RNA, 19 nt, Artificial Sequence
  Description of Artificial Sequence: Synthetic oligonucleotide
  Sense strand starting at position 1243 of SEQ ID NO: 1879379
agagaugauuacuuguauc

SEQ ID NO: 1902851 - RNA, 19 nt, Artificial Sequence
  Description of Artificial Sequence: Synthetic oligonucleotide
  Antisense strand to SEQ ID NO: 1902850
gauacaaguaaucaucucu

SEQ ID NO: 1902852 - RNA, 19 nt, Artificial Sequence
  Description of Artificial Sequence: Synthetic oligonucleotide
  Sense strand starting at position 1318 of SEQ ID NO: 1879379
ucagcaugauacucuguaa

SEQ ID NO: 1902853 - RNA, 19 nt, Artificial Sequence
  Description of Artificial Sequence: Synthetic oligonucleotide
  Antisense strand to SEQ ID NO: 1902852
uuacagaguaucaugcuga

SEQ ID NO: 1902854 - RNA, 19 nt, Artificial Sequence
  Description of Artificial Sequence: Synthetic oligonucleotide
  Sense strand starting at position 1321 of SEQ ID NO: 1879379
gcaugauacucuguaauuc

SEQ ID NO: 1902855 - RNA, 19 nt, Artificial Sequence
  Description of Artificial Sequence: Synthetic oligonucleotide
  Antisense strand to SEQ ID NO: 1902854
gaauuacagaguaucaugc

SEQ ID NO: 1902856 - RNA, 19 nt, Artificial Sequence
  Description of Artificial Sequence: Synthetic oligonucleotide
  Sense strand starting at position 1422 of SEQ ID NO: 1879379
ggacaagauuacgucacaa

SEQ ID NO: 1902857 - RNA, 19 nt, Artificial Sequence
  Description of Artificial Sequence: Synthetic oligonucleotide
  Antisense strand to SEQ ID NO: 1902856
uugugacguaaucuugucc

SEQ ID NO: 1902858 - RNA, 19 nt, Artificial Sequence
  Description of Artificial Sequence: Synthetic oligonucleotide
  Sense strand starting at position 1432 of SEQ ID NO: 1879379
acgucacaauuaguaaauu

SEQ ID NO: 1902859 - RNA, 19 nt, Artificial Sequence
  Description of Artificial Sequence: Synthetic oligonucleotide
  Antisense strand to SEQ ID NO: 1902858
aauuuacuaauugugacgu

SEQ ID NO: 1902860 - RNA, 19 nt, Artificial Sequence
  Description of Artificial Sequence: Synthetic oligonucleotide
  Sense strand starting at position 2021 of SEQ ID NO: 1879379
gaagaugaaugguauuugu

SEQ ID NO: 1902861 - RNA, 19 nt, Artificial Sequence
  Description of Artificial Sequence: Synthetic oligonucleotide
  Antisense strand to SEQ ID NO: 1902860
acaaauaccauucaucuuc

SEQ ID NO: 1902862 - RNA, 19 nt, Artificial Sequence
  Description of Artificial Sequence: Synthetic oligonucleotide
  Sense strand starting at position 2090 of SEQ ID NO: 1879379
gaaguaauauuacuaguga

SEQ ID NO: 1902863 - RNA, 19 nt, Artificial Sequence
  Description of Artificial Sequence: Synthetic oligonucleotide
  Antisense strand to SEQ ID NO: 1902862
ucacuaguaauauuacuuc

SEQ ID NO: 1902864 - RNA, 19 nt, Artificial Sequence
  Description of Artificial Sequence: Synthetic oligonucleotide
  Sense strand starting at position 2135 of SEQ ID NO: 1879379
caguccauucuagguagaa

SEQ ID NO: 1902865 - RNA, 19 nt, Artificial Sequence
  Description of Artificial Sequence: Synthetic oligonucleotide
  Antisense strand to SEQ ID NO: 1902864
uucuaccuagaauggacug

SEQ ID NO: 1902866 - RNA, 19 nt, Artificial Sequence
  Description of Artificial Sequence: Synthetic oligonucleotide
  Sense strand starting at position 2136 of SEQ ID NO: 1879379
aguccauucuagguagaac

SEQ ID NO: 1902867 - RNA, 19 nt, Artificial Sequence
  Description of Artificial Sequence: Synthetic oligonucleotide
  Antisense strand to SEQ ID NO: 1902866
guucuaccuagaauggacu

SEQ ID NO: 1902868 - RNA, 19 nt, Artificial Sequence
  Description of Artificial Sequence: Synthetic oligonucleotide
  Sense strand starting at position 2177 of SEQ ID NO: 1879379
ugguucuuugcugauggua

SEQ ID NO: 1902869 - RNA, 19 nt, Artificial Sequence
  Description of Artificial Sequence: Synthetic oligonucleotide
  Antisense strand to SEQ ID NO: 1902868
uaccaucagcaaagaacca

SEQ ID NO: 1902870 - RNA, 19 nt, Artificial Sequence
  Description of Artificial Sequence: Synthetic oligonucleotide
  Sense strand starting at position 2246 of SEQ ID NO: 1879379
agggcaguucagugauuuc

SEQ ID NO: 1902871 - RNA, 19 nt, Artificial Sequence
  Description of Artificial Sequence: Synthetic oligonucleotide
  Antisense strand to SEQ ID NO: 1902870
gaaaucacugaacugcccu

SEQ ID NO: 1902872 - RNA, 19 nt, Artificial Sequence
  Description of Artificial Sequence: Synthetic oligonucleotide
  Sense strand starting at position 2526 of SEQ ID NO: 1879379
aggcuuugcuaauuaagag

SEQ ID NO: 1902873 - RNA, 19 nt, Artificial Sequence
  Description of Artificial Sequence: Synthetic oligonucleotide
  Antisense strand to SEQ ID NO: 1902872
cucuuaauuagcaaagccu

SEQ ID NO: 1902874 - RNA, 19 nt, Artificial Sequence
  Description of Artificial Sequence: Synthetic oligonucleotide
  Sense strand starting at position 2615 of SEQ ID NO: 1879379
uccuaaagcuggguuucua

SEQ ID NO: 1902875 - RNA, 19 nt, Artificial Sequence
  Description of Artificial Sequence: Synthetic oligonucleotide
  Antisense strand to SEQ ID NO: 1902874
uagaaacccagcuuuagga

SEQ ID NO: 1902876 - RNA, 19 nt, Artificial Sequence
  Description of Artificial Sequence: Synthetic oligonucleotide
  Sense strand starting at position 2642 of SEQ ID NO: 1879379
ugucaacagugguuaucau

SEQ ID NO: 1902877 - RNA, 19 nt, Artificial Sequence
  Description of Artificial Sequence: Synthetic oligonucleotide
  Antisense strand to SEQ ID NO: 1902876
augauaaccacuguugaca

SEQ ID NO: 1902878 - RNA, 19 nt, Artificial Sequence
  Description of Artificial Sequence: Synthetic oligonucleotide
  Sense strand starting at position 2649 of SEQ ID NO: 1879379
agugguuaucaucagguua

SEQ ID NO: 1902879 - RNA, 19 nt, Artificial Sequence
  Description of Artificial Sequence: Synthetic oligonucleotide
  Antisense strand to SEQ ID NO: 1902878
uaaccugaugauaaccacu

SEQ ID NO: 1902880 - RNA, 19 nt, Artificial Sequence
  Description of Artificial Sequence: Synthetic oligonucleotide
  Sense strand starting at position 2662 of SEQ ID NO: 1879379
agguuaugggauugcaagu

SEQ ID NO: 1902881 - RNA, 19 nt, Artificial Sequence
  Description of Artificial Sequence: Synthetic oligonucleotide
  Antisense strand to SEQ ID NO: 1902880
acuugcaaucccauaaccu

SEQ ID NO: 1902882 - RNA, 19 nt, Artificial Sequence
  Description of Artificial Sequence: Synthetic oligonucleotide
  Sense strand starting at position 2725 of SEQ ID NO: 1879379
uucuauaaggguuauguau

SEQ ID NO: 1902883 - RNA, 19 nt, Artificial Sequence
  Description of Artificial Sequence: Synthetic oligonucleotide
  Antisense strand to SEQ ID NO: 1902882
auacauaacccuuauagaa

SEQ ID NO: 1902884 - RNA, 19 nt, Artificial Sequence
  Description of Artificial Sequence: Synthetic oligonucleotide
  Sense strand starting at position 2749 of SEQ ID NO: 1879379
uugcauuagcuuggaugaa

SEQ ID NO: 1902885 - RNA, 19 nt, Artificial Sequence
  Description of Artificial Sequence: Synthetic oligonucleotide
  Antisense strand to SEQ ID NO: 1902884
uucauccaagcuaaugcaa

SEQ ID NO: 1902886 - RNA, 19 nt, Artificial Sequence
  Description of Artificial Sequence: Synthetic oligonucleotide
  Sense strand starting at position 2879 of SEQ ID NO: 1879379
agccuccuacaaugaguaa

SEQ ID NO: 1902887 - RNA, 19 nt, Artificial Sequence
  Description of Artificial Sequence: Synthetic oligonucleotide
  Antisense strand to SEQ ID NO: 1902886
uuacucauuguaggaggcu

SEQ ID NO: 1902888 - RNA, 19 nt, Artificial Sequence
  Description of Artificial Sequence: Synthetic oligonucleotide
  Sense strand starting at position 2902 of SEQ ID NO: 1879379
ggaaaucugucccuuauac

SEQ ID NO: 1902889 - RNA, 19 nt, Artificial Sequence
  Description of Artificial Sequence: Synthetic oligonucleotide
  Antisense strand to SEQ ID NO: 1902888
guauaagggacagauuucc

SEQ ID NO: 1902890 - RNA, 19 nt, Artificial Sequence
  Description of Artificial Sequence: Synthetic oligonucleotide
  Sense strand starting at position 2956 of SEQ ID NO: 1879379
uuaacuaggcugggauauu

SEQ ID NO: 1902891 - RNA, 19 nt, Artificial Sequence
  Description of Artificial Sequence: Synthetic oligonucleotide
  Antisense strand to SEQ ID NO: 1902890
aauaucccagccuaguuaa

SEQ ID NO: 1902892 - RNA, 19 nt, Artificial Sequence
  Description of Artificial Sequence: Synthetic oligonucleotide
  Sense strand starting at position 2965 of SEQ ID NO: 1879379
cugggauauucuguauuaa

SEQ ID NO: 1902893 - RNA, 19 nt, Artificial Sequence
  Description of Artificial Sequence: Synthetic oligonucleotide
  Antisense strand to SEQ ID NO: 1902892
uuaauacagaauaucccag

SEQ ID NO: 1902894 - RNA, 19 nt, Artificial Sequence
  Description of Artificial Sequence: Synthetic oligonucleotide
  Sense strand starting at position 3078 of SEQ ID NO: 1879379
uuggcuaggacucaguuau

SEQ ID NO: 1902895 - RNA, 19 nt, Artificial Sequence
  Description of Artificial Sequence: Synthetic oligonucleotide
  Antisense strand to SEQ ID NO: 1902894
auaacugaguccuagccaa

SEQ ID NO: 1902896 - RNA, 19 nt, Artificial Sequence
  Description of Artificial Sequence: Synthetic oligonucleotide
  Sense strand starting at position 3092 of SEQ ID NO: 1879379
guuauaagccugcaucuaa

SEQ ID NO: 1902897 - RNA, 19 nt, Artificial Sequence
  Description of Artificial Sequence: Synthetic oligonucleotide
  Antisense strand to SEQ ID NO: 1902896
uuagaugcaggcuuauaac

SEQ ID NO: 1902898 - RNA, 19 nt, Artificial Sequence
  Description of Artificial Sequence: Synthetic oligonucleotide
  Sense strand starting at position 3437 of SEQ ID NO: 1879379
cuuagagaguacuuacaua

SEQ ID NO: 1902899 - RNA, 19 nt, Artificial Sequence
  Description of Artificial Sequence: Synthetic oligonucleotide
  Antisense strand to SEQ ID NO: 1902898
uauguaaguacucucuaag

SEQ ID NO: 1902900 - RNA, 19 nt, Artificial Sequence
  Description of Artificial Sequence: Synthetic oligonucleotide
  Sense strand starting at position 3543 of SEQ ID NO: 1879379
ugcugaauacugugagcaa

SEQ ID NO: 1902901 - RNA, 19 nt, Artificial Sequence
  Description of Artificial Sequence: Synthetic oligonucleotide
  Antisense strand to SEQ ID NO: 1902900
uugcucacaguauucagca

SEQ ID NO: 1902902 - RNA, 19 nt, Artificial Sequence
  Description of Artificial Sequence: Synthetic oligonucleotide
  Sense strand starting at position 3546 of SEQ ID NO: 1879379
ugaauacugugagcaauug

SEQ ID NO: 1902903 - RNA, 19 nt, Artificial Sequence
  Description of Artificial Sequence: Synthetic oligonucleotide
  Antisense strand to SEQ ID NO: 1902902
caauugcucacaguauuca

SEQ ID NO: 1902904 - RNA, 19 nt, Artificial Sequence
  Description of Artificial Sequence: Synthetic oligonucleotide
  Sense strand starting at position 3547 of SEQ ID NO: 1879379
gaauacugugagcaauugu

SEQ ID NO: 1902905 - RNA, 19 nt, Artificial Sequence
  Description of Artificial Sequence: Synthetic oligonucleotide
  Antisense strand to SEQ ID NO: 1902904
acaauugcucacaguauuc

SEQ ID NO: 1902906 - RNA, 19 nt, Artificial Sequence
  Description of Artificial Sequence: Synthetic oligonucleotide
  Sense strand starting at position 3652 of SEQ ID NO: 1879379
aguauacuuguauaaggca

SEQ ID NO: 1902907 - RNA, 19 nt, Artificial Sequence
  Description of Artificial Sequence: Synthetic oligonucleotide
  Antisense strand to SEQ ID NO: 1902906
ugccuuauacaaguauacu

SEQ ID NO: 1902908 - RNA, 19 nt, Artificial Sequence
  Description of Artificial Sequence: Synthetic oligonucleotide
  Sense strand starting at position 3747 of SEQ ID NO: 1879379
gggacauuacuguaugcuu

SEQ ID NO: 1902909 - RNA, 19 nt, Artificial Sequence
  Description of Artificial Sequence: Synthetic oligonucleotide
  Antisense strand to SEQ ID NO: 1902908
aagcauacaguaauguccc

SEQ ID NO: 1902910 - RNA, 19 nt, Artificial Sequence
  Description of Artificial Sequence: Synthetic oligonucleotide
  Sense strand starting at position 3847 of SEQ ID NO: 1879379
gcaacagaucaauaugcca

SEQ ID NO: 1902911 - RNA, 19 nt, Artificial Sequence
  Description of Artificial Sequence: Synthetic oligonucleotide
  Antisense strand to SEQ ID NO: 1902910
uggcauauugaucuguugc

SEQ ID NO: 1902912 - RNA, 19 nt, Artificial Sequence
  Description of Artificial Sequence: Synthetic oligonucleotide
  Sense strand starting at position 15 of SEQ ID NO: 1879380
ccaugaauccuuuacaggu

SEQ ID NO: 1902913 - RNA, 19 nt, Artificial Sequence
  Description of Artificial Sequence: Synthetic oligonucleotide
  Antisense strand to SEQ ID NO: 1902912
accuguaaaggauucaugg

SEQ ID NO: 1902914 - RNA, 19 nt, Artificial Sequence
  Description of Artificial Sequence: Synthetic oligonucleotide
  Sense strand starting at position 34 of SEQ ID NO: 1879380
uuugaucauugugucaaau

SEQ ID NO: 1902915 - RNA, 19 nt, Artificial Sequence
  Description of Artificial Sequence: Synthetic oligonucleotide
  Antisense strand to SEQ ID NO: 1902914
auuugacacaaugaucaaa

SEQ ID NO: 1902916 - RNA, 19 nt, Artificial Sequence
  Description of Artificial Sequence: Synthetic oligonucleotide
  Sense strand starting at position 124 of SEQ ID NO: 1879380
aguugugugagaugacaca

SEQ ID NO: 1902917 - RNA, 19 nt, Artificial Sequence
  Description of Artificial Sequence: Synthetic oligonucleotide
  Antisense strand to SEQ ID NO: 1902916
ugugucaucucacacaacu

SEQ ID NO: 1902918 - RNA, 19 nt, Artificial Sequence
  Description of Artificial Sequence: Synthetic oligonucleotide
  Sense strand starting at position 193 of SEQ ID NO: 1879380
gcucaacuuggccaaggau

SEQ ID NO: 1902919 - RNA, 19 nt, Artificial Sequence
  Description of Artificial Sequence: Synthetic oligonucleotide
  Antisense strand to SEQ ID NO: 1902918
auccuuggccaaguugagc

SEQ ID NO: 1902920 - RNA, 19 nt, Artificial Sequence
  Description of Artificial Sequence: Synthetic oligonucleotide
  Sense strand starting at position 205 of SEQ ID NO: 1879380
caaggauggugucugauau

SEQ ID NO: 1902921 - RNA, 19 nt, Artificial Sequence
  Description of Artificial Sequence: Synthetic oligonucleotide
  Antisense strand to SEQ ID NO: 1902920
auaucagacaccauccuug

SEQ ID NO: 1902922 - RNA, 19 nt, Artificial Sequence
  Description of Artificial Sequence: Synthetic oligonucleotide
  Sense strand starting at position 206 of SEQ ID NO: 1879380
aaggauggugucugauaug

SEQ ID NO: 1902923 - RNA, 19 nt, Artificial Sequence
  Description of Artificial Sequence: Synthetic oligonucleotide
  Antisense strand to SEQ ID NO: 1902922
cauaucagacaccauccuu

SEQ ID NO: 1902924 - RNA, 19 nt, Artificial Sequence
  Description of Artificial Sequence: Synthetic oligonucleotide
  Sense strand starting at position 298 of SEQ ID NO: 1879380
uggcgauuggaucauggga

SEQ ID NO: 1902925 - RNA, 19 nt, Artificial Sequence
  Description of Artificial Sequence: Synthetic oligonucleotide
  Antisense strand to SEQ ID NO: 1902924
ucccaugauccaaucgcca

SEQ ID NO: 1902926 - RNA, 19 nt, Artificial Sequence
  Description of Artificial Sequence: Synthetic oligonucleotide
  Sense strand starting at position 352 of SEQ ID NO: 1879380
ccgucaucaccauaguaag

SEQ ID NO: 1902927 - RNA, 19 nt, Artificial Sequence
  Description of Artificial Sequence: Synthetic oligonucleotide
  Antisense strand to SEQ ID NO: 1902926
cuuacuauggugaugacgg

SEQ ID NO: 1902928 - RNA, 19 nt, Artificial Sequence
  Description of Artificial Sequence: Synthetic oligonucleotide
  Sense strand starting at position 362 of SEQ ID NO: 1879380
cauaguaaguucucuugag

SEQ ID NO: 1902929 - RNA, 19 nt, Artificial Sequence
  Description of Artificial Sequence: Synthetic oligonucleotide
  Antisense strand to SEQ ID NO: 1902928
cucaagagaacuuacuaug

SEQ ID NO: 1902930 - RNA, 19 nt, Artificial Sequence
  Description of Artificial Sequence: Synthetic oligonucleotide
  Sense strand starting at position 943 of SEQ ID NO: 1879380
ggacuaauacagugucaga

SEQ ID NO: 1902931 - RNA, 19 nt, Artificial Sequence
  Description of Artificial Sequence: Synthetic oligonucleotide
  Antisense strand to SEQ ID NO: 1902930
ucugacacuguauuagucc

SEQ ID NO: 1902932 - RNA, 19 nt, Artificial Sequence
  Description of Artificial Sequence: Synthetic oligonucleotide
  Sense strand starting at position 986 of SEQ ID NO: 1879380
gugacauauccacaccagu

SEQ ID NO: 1902933 - RNA, 19 nt, Artificial Sequence
  Description of Artificial Sequence: Synthetic oligonucleotide
  Antisense strand to SEQ ID NO: 1902932
acugguguggauaugucac

SEQ ID NO: 1902934 - RNA, 19 nt, Artificial Sequence
  Description of Artificial Sequence: Synthetic oligonucleotide
  Sense strand starting at position 1027 of SEQ ID NO: 1879380
cauggagucuguguaugga

SEQ ID NO: 1902935 - RNA, 19 nt, Artificial Sequence
  Description of Artificial Sequence: Synthetic oligonucleotide
  Antisense strand to SEQ ID NO: 1902934
uccauacacagacuccaug

SEQ ID NO: 1902936 - RNA, 19 nt, Artificial Sequence
  Description of Artificial Sequence: Synthetic oligonucleotide
  Sense strand starting at position 1575 of SEQ ID NO: 1879380
aagggauucccauguuccu

SEQ ID NO: 1902937 - RNA, 19 nt, Artificial Sequence
  Description of Artificial Sequence: Synthetic oligonucleotide
  Antisense strand to SEQ ID NO: 1902936
aggaacaugggaaucccuu

SEQ ID NO: 1902938 - RNA, 19 nt, Artificial Sequence
  Description of Artificial Sequence: Synthetic oligonucleotide
  Sense strand starting at position 1594 of SEQ ID NO: 1879380
ugccuuacuggucagugaa

SEQ ID NO: 1902939 - RNA, 19 nt, Artificial Sequence
  Description of Artificial Sequence: Synthetic oligonucleotide
  Antisense strand to SEQ ID NO: 1902938
uucacugaccaguaaggca

SEQ ID NO: 1902940 - RNA, 19 nt, Artificial Sequence
  Description of Artificial Sequence: Synthetic oligonucleotide
  Sense strand starting at position 1596 of SEQ ID NO: 1879380
ccuuacuggucagugaauu

SEQ ID NO: 1902941 - RNA, 19 nt, Artificial Sequence
  Description of Artificial Sequence: Synthetic oligonucleotide
  Antisense strand to SEQ ID NO: 1902940
aauucacugaccaguaagg

SEQ ID NO: 1902942 - RNA, 19 nt, Artificial Sequence
  Description of Artificial Sequence: Synthetic oligonucleotide
  Sense strand starting at position 1597 of SEQ ID NO: 1879380
cuuacuggucagugaauua

SEQ ID NO: 1902943 - RNA, 19 nt, Artificial Sequence
  Description of Artificial Sequence: Synthetic oligonucleotide
  Antisense strand to SEQ ID NO: 1902942
uaauucacugaccaguaag

SEQ ID NO: 1902944 - RNA, 19 nt, Artificial Sequence
  Description of Artificial Sequence: Synthetic oligonucleotide
  Sense strand starting at position 1780 of SEQ ID NO: 1879380
agacaauccuguccugaag

SEQ ID NO: 1902945 - RNA, 19 nt, Artificial Sequence
  Description of Artificial Sequence: Synthetic oligonucleotide
  Antisense strand to SEQ ID NO: 1902944
cuucaggacaggauugucu

SEQ ID NO: 1902946 - RNA, 19 nt, Artificial Sequence
  Description of Artificial Sequence: Synthetic oligonucleotide
  Sense strand starting at position 1993 of SEQ ID NO: 1879380
gggcggagugauuagguca

SEQ ID NO: 1902947 - RNA, 19 nt, Artificial Sequence
  Description of Artificial Sequence: Synthetic oligonucleotide
  Antisense strand to SEQ ID NO: 1902946
ugaccuaaucacuccgccc

SEQ ID NO: 1902948 - RNA, 19 nt, Artificial Sequence
  Description of Artificial Sequence: Synthetic oligonucleotide
  Sense strand starting at position 1996 of SEQ ID NO: 1879380
cggagugauuaggucauaa

SEQ ID NO: 1902949 - RNA, 19 nt, Artificial Sequence
  Description of Artificial Sequence: Synthetic oligonucleotide
  Antisense strand to SEQ ID NO: 1902948
uuaugaccuaaucacuccg

SEQ ID NO: 1902950 - RNA, 19 nt, Artificial Sequence
  Description of Artificial Sequence: Synthetic oligonucleotide
  Sense strand starting at position 2007 of SEQ ID NO: 1879380
ggucauaauugaucuuuau

SEQ ID NO: 1902951 - RNA, 19 nt, Artificial Sequence
  Description of Artificial Sequence: Synthetic oligonucleotide
  Antisense strand to SEQ ID NO: 1902950
auaaagaucaauuaugacc

SEQ ID NO: 1902952 - RNA, 19 nt, Artificial Sequence
  Description of Artificial Sequence: Synthetic oligonucleotide
  Sense strand starting at position 2024 of SEQ ID NO: 1879380
auuguugcagcugaagauu

SEQ ID NO: 1902953 - RNA, 19 nt, Artificial Sequence
  Description of Artificial Sequence: Synthetic oligonucleotide
  Antisense strand to SEQ ID NO: 1902952
aaucuucagcugcaacaau

SEQ ID NO: 1902954 - RNA, 19 nt, Artificial Sequence
  Description of Artificial Sequence: Synthetic oligonucleotide
  Sense strand starting at position 2027 of SEQ ID NO: 1879380
guugcagcugaagauuauu

SEQ ID NO: 1902955 - RNA, 19 nt, Artificial Sequence
  Description of Artificial Sequence: Synthetic oligonucleotide
  Antisense strand to SEQ ID NO: 1902954
aauaaucuucagcugcaac

SEQ ID NO: 1902956 - RNA, 19 nt, Artificial Sequence
  Description of Artificial Sequence: Synthetic oligonucleotide
  Sense strand starting at position 2339 of SEQ ID NO: 1879380
cuaagaacuuucccaggca

SEQ ID NO: 1902957 - RNA, 19 nt, Artificial Sequence
  Description of Artificial Sequence: Synthetic oligonucleotide
  Antisense strand to SEQ ID NO: 1902956
ugccugggaaaguucuuag

SEQ ID NO: 1902958 - RNA, 19 nt, Artificial Sequence
  Description of Artificial Sequence: Synthetic oligonucleotide
  Sense strand starting at position 2445 of SEQ ID NO: 1879380
aagacaggacugugaguua

SEQ ID NO: 1902959 - RNA, 19 nt, Artificial Sequence
  Description of Artificial Sequence: Synthetic oligonucleotide
  Antisense strand to SEQ ID NO: 1902958
uaacucacaguccugucuu

SEQ ID NO: 1902960 - RNA, 19 nt, Artificial Sequence
  Description of Artificial Sequence: Synthetic oligonucleotide
  Sense strand starting at position 2448 of SEQ ID NO: 1879380
acaggacugugaguuacau

SEQ ID NO: 1902961 - RNA, 19 nt, Artificial Sequence
  Description of Artificial Sequence: Synthetic oligonucleotide
  Antisense strand to SEQ ID NO: 1902960
auguaacucacaguccugu

SEQ ID NO: 1902962 - RNA, 19 nt, Artificial Sequence
  Description of Artificial Sequence: Synthetic oligonucleotide
  Sense strand starting at position 2454 of SEQ ID NO: 1879380
cugugaguuacaugggaca

SEQ ID NO: 1902963 - RNA, 19 nt, Artificial Sequence
  Description of Artificial Sequence: Synthetic oligonucleotide
  Antisense strand to SEQ ID NO: 1902962
ugucccauguaacucacag

SEQ ID NO: 1902964 - RNA, 19 nt, Artificial Sequence
  Description of Artificial Sequence: Synthetic oligonucleotide
  Sense strand starting at position 2456 of SEQ ID NO: 1879380
gugaguuacaugggacauu

SEQ ID NO: 1902965 - RNA, 19 nt, Artificial Sequence
  Description of Artificial Sequence: Synthetic oligonucleotide
  Antisense strand to SEQ ID NO: 1902964
aaugucccauguaacucac

SEQ ID NO: 1902966 - RNA, 19 nt, Artificial Sequence
  Description of Artificial Sequence: Synthetic oligonucleotide
  Sense strand starting at position 2588 of SEQ ID NO: 1879380
cugggccauguagauuaau

SEQ ID NO: 1902967 - RNA, 19 nt, Artificial Sequence
  Description of Artificial Sequence: Synthetic oligonucleotide
  Antisense strand to SEQ ID NO: 1902966
auuaaucuacauggcccag

SEQ ID NO: 1902968 - RNA, 19 nt, Artificial Sequence
  Description of Artificial Sequence: Synthetic oligonucleotide
  Sense strand starting at position 2591 of SEQ ID NO: 1879380
ggccauguagauuaauucu

SEQ ID NO: 1902969 - RNA, 19 nt, Artificial Sequence
  Description of Artificial Sequence: Synthetic oligonucleotide
  Antisense strand to SEQ ID NO: 1902968
agaauuaaucuacauggcc

SEQ ID NO: 1902970 - RNA, 19 nt, Artificial Sequence
  Description of Artificial Sequence: Synthetic oligonucleotide
  Sense strand starting at position 2697 of SEQ ID NO: 1879380
cucauuuguccuggucuau

SEQ ID NO: 1902971 - RNA, 19 nt, Artificial Sequence
  Description of Artificial Sequence: Synthetic oligonucleotide
  Antisense strand to SEQ ID NO: 1902970
auagaccaggacaaaugag

SEQ ID NO: 1902972 - RNA, 19 nt, Artificial Sequence
  Description of Artificial Sequence: Synthetic oligonucleotide
  Sense strand starting at position 3005 of SEQ ID NO: 1879380
gccaccuugcucuagaaag

SEQ ID NO: 1902973 - RNA, 19 nt, Artificial Sequence
  Description of Artificial Sequence: Synthetic oligonucleotide
  Antisense strand to SEQ ID NO: 1902972
cuuucuagagcaagguggc

SEQ ID NO: 1902974 - RNA, 19 nt, Artificial Sequence
  Description of Artificial Sequence: Synthetic oligonucleotide
  Sense strand starting at position 3203 of SEQ ID NO: 1879380
gugaauaugcccuauguau

SEQ ID NO: 1902975 - RNA, 19 nt, Artificial Sequence
  Description of Artificial Sequence: Synthetic oligonucleotide
  Antisense strand to SEQ ID NO: 1902974
auacauagggcauauucac

SEQ ID NO: 1902976 - RNA, 19 nt, Artificial Sequence
  Description of Artificial Sequence: Synthetic oligonucleotide
  Sense strand starting at position 3415 of SEQ ID NO: 1879380
cagaucuugugagagauuu

SEQ ID NO: 1902977 - RNA, 19 nt, Artificial Sequence
  Description of Artificial Sequence: Synthetic oligonucleotide
  Antisense strand to SEQ ID NO: 1902976
aaaucucucacaagaucug

SEQ ID NO: 1902978 - RNA, 19 nt, Artificial Sequence
  Description of Artificial Sequence: Synthetic oligonucleotide
  Sense strand starting at position 3502 of SEQ ID NO: 1879380
ucccaugacacgugagaac

SEQ ID NO: 1902979 - RNA, 19 nt, Artificial Sequence
  Description of Artificial Sequence: Synthetic oligonucleotide
  Antisense strand to SEQ ID NO: 1902978
guucucacgugucauggga

SEQ ID NO: 1902980 - RNA, 19 nt, Artificial Sequence
  Description of Artificial Sequence: Synthetic oligonucleotide
  Sense strand starting at position 3511 of SEQ ID NO: 1879380
acgugagaacuaugggaac

SEQ ID NO: 1902981 - RNA, 19 nt, Artificial Sequence
  Description of Artificial Sequence: Synthetic oligonucleotide
  Antisense strand to SEQ ID NO: 1902980
guucccauaguucucacgu

SEQ ID NO: 1902982 - RNA, 19 nt, Artificial Sequence
  Description of Artificial Sequence: Synthetic oligonucleotide
  Sense strand starting at position 3525 of SEQ ID NO: 1879380
ggaacuacaguuugagauu

SEQ ID NO: 1902983 - RNA, 19 nt, Artificial Sequence
  Description of Artificial Sequence: Synthetic oligonucleotide
  Antisense strand to SEQ ID NO: 1902982
aaucucaaacuguaguucc

SEQ ID NO: 1902984 - RNA, 19 nt, Artificial Sequence
  Description of Artificial Sequence: Synthetic oligonucleotide
  Sense strand starting at position 3636 of SEQ ID NO: 1879380
agagcaaugucuuuaacug

SEQ ID NO: 1902985 - RNA, 19 nt, Artificial Sequence
  Description of Artificial Sequence: Synthetic oligonucleotide
  Antisense strand to SEQ ID NO: 1902984
caguuaaagacauugcucu

SEQ ID NO: 1902986 - RNA, 19 nt, Artificial Sequence
  Description of Artificial Sequence: Synthetic oligonucleotide
  Sense strand starting at position 3637 of SEQ ID NO: 1879380
gagcaaugucuuuaacugu

SEQ ID NO: 1902987 - RNA, 19 nt, Artificial Sequence
  Description of Artificial Sequence: Synthetic oligonucleotide
  Antisense strand to SEQ ID NO: 1902986
acaguuaaagacauugcuc

SEQ ID NO: 1902988 - RNA, 19 nt, Artificial Sequence
  Description of Artificial Sequence: Synthetic oligonucleotide
  Sense strand starting at position 3643 of SEQ ID NO: 1879380
ugucuuuaacugugaaaga

SEQ ID NO: 1902989 - RNA, 19 nt, Artificial Sequence
  Description of Artificial Sequence: Synthetic oligonucleotide
  Antisense strand to SEQ ID NO: 1902988
ucuuucacaguuaaagaca

SEQ ID NO: 1902990 - RNA, 19 nt, Artificial Sequence
  Description of Artificial Sequence: Synthetic oligonucleotide
  Sense strand starting at position 3735 of SEQ ID NO: 1879380
ugccuuaaacagcagacau

SEQ ID NO: 1902991 - RNA, 19 nt, Artificial Sequence
  Description of Artificial Sequence: Synthetic oligonucleotide
  Antisense strand to SEQ ID NO: 1902990
augucugcuguuuaaggca

SEQ ID NO: 1902992 - RNA, 19 nt, Artificial Sequence
  Description of Artificial Sequence: Synthetic oligonucleotide
  Sense strand starting at position 192 of SEQ ID NO: 1879381
ugaucucauuuccaaugga

SEQ ID NO: 1902993 - RNA, 19 nt, Artificial Sequence
  Description of Artificial Sequence: Synthetic oligonucleotide
  Antisense strand to SEQ ID NO: 1902992
uccauuggaaaugagauca

SEQ ID NO: 1902994 - RNA, 19 nt, Artificial Sequence
  Description of Artificial Sequence: Synthetic oligonucleotide
  Sense strand starting at position 364 of SEQ ID NO: 1879381
ugcagaguuuauuccaguu

SEQ ID NO: 1902995 - RNA, 19 nt, Artificial Sequence
  Description of Artificial Sequence: Synthetic oligonucleotide
  Antisense strand to SEQ ID NO: 1902994
aacuggaauaaacucugca

SEQ ID NO: 1902996 - RNA, 19 nt, Artificial Sequence
  Description of Artificial Sequence: Synthetic oligonucleotide
  Sense strand starting at position 366 of SEQ ID NO: 1879381
cagaguuuauuccaguugu

SEQ ID NO: 1902997 - RNA, 19 nt, Artificial Sequence
  Description of Artificial Sequence: Synthetic oligonucleotide
  Antisense strand to SEQ ID NO: 1902996
acaacuggaauaaacucug

SEQ ID NO: 1902998 - RNA, 19 nt, Artificial Sequence
  Description of Artificial Sequence: Synthetic oligonucleotide
  Sense strand starting at position 793 of SEQ ID NO: 1879381
guguucauuguaggcagua

SEQ ID NO: 1902999 - RNA, 19 nt, Artificial Sequence
  Description of Artificial Sequence: Synthetic oligonucleotide
  Antisense strand to SEQ ID NO: 1902998
uacugccuacaaugaacac

SEQ ID NO: 1903000 - RNA, 19 nt, Artificial Sequence
  Description of Artificial Sequence: Synthetic oligonucleotide
  Sense strand starting at position 1027 of SEQ ID NO: 1879381
acauauauagucggcguua

SEQ ID NO: 1903001 - RNA, 19 nt, Artificial Sequence
  Description of Artificial Sequence: Synthetic oligonucleotide
  Antisense strand to SEQ ID NO: 1903000
uaacgccgacuauauaugu

SEQ ID NO: 1903002 - RNA, 19 nt, Artificial Sequence
  Description of Artificial Sequence: Synthetic oligonucleotide
  Sense strand starting at position 1028 of SEQ ID NO: 1879381
cauauauagucggcguuau

SEQ ID NO: 1903003 - RNA, 19 nt, Artificial Sequence
  Description of Artificial Sequence: Synthetic oligonucleotide
  Antisense strand to SEQ ID NO: 1903002
auaacgccgacuauauaug

SEQ ID NO: 1903004 - RNA, 19 nt, Artificial Sequence
  Description of Artificial Sequence: Synthetic oligonucleotide
  Sense strand starting at position 1029 of SEQ ID NO: 1879381
auauauagucggcguuaua

SEQ ID NO: 1903005 - RNA, 19 nt, Artificial Sequence
  Description of Artificial Sequence: Synthetic oligonucleotide
  Antisense strand to SEQ ID NO: 1903004
uauaacgccgacuauauau

SEQ ID NO: 1903006 - RNA, 19 nt, Artificial Sequence
  Description of Artificial Sequence: Synthetic oligonucleotide
  Sense strand starting at position 1032 of SEQ ID NO: 1879381
uauagucggcguuauacca

SEQ ID NO: 1903007 - RNA, 19 nt, Artificial Sequence
  Description of Artificial Sequence: Synthetic oligonucleotide
  Antisense strand to SEQ ID NO: 1903006
ugguauaacgccgacuaua

SEQ ID NO: 1903008 - RNA, 19 nt, Artificial Sequence
  Description of Artificial Sequence: Synthetic oligonucleotide
  Sense strand starting at position 1055 of SEQ ID NO: 1879381
ggcugauagcuugaucauu

SEQ ID NO: 1903009 - RNA, 19 nt, Artificial Sequence
  Description of Artificial Sequence: Synthetic oligonucleotide
  Antisense strand to SEQ ID NO: 1903008
aaugaucaagcuaucagcc

SEQ ID NO: 1903010 - RNA, 19 nt, Artificial Sequence
  Description of Artificial Sequence: Synthetic oligonucleotide
  Sense strand starting at position 1986 of SEQ ID NO: 1879381
uacauugcuucuugggaca

SEQ ID NO: 1903011 - RNA, 19 nt, Artificial Sequence
  Description of Artificial Sequence: Synthetic oligonucleotide
  Antisense strand to SEQ ID NO: 1903010
ugucccaagaagcaaugua

SEQ ID NO: 1903012 - RNA, 19 nt, Artificial Sequence
  Description of Artificial Sequence: Synthetic oligonucleotide
  Sense strand starting at position 2002 of SEQ ID NO: 1879381
acaggaaccuccugaguuu

SEQ ID NO: 1903013 - RNA, 19 nt, Artificial Sequence
  Description of Artificial Sequence: Synthetic oligonucleotide
  Antisense strand to SEQ ID NO: 1903012
aaacucaggagguuccugu

SEQ ID NO: 1903014 - RNA, 19 nt, Artificial Sequence
  Description of Artificial Sequence: Synthetic oligonucleotide
  Sense strand starting at position 2011 of SEQ ID NO: 1879381
uccugaguuugggacuaag

SEQ ID NO: 1903015 - RNA, 19 nt, Artificial Sequence
  Description of Artificial Sequence: Synthetic oligonucleotide
  Antisense strand to SEQ ID NO: 1903014
cuuagucccaaacucagga

SEQ ID NO: 1903016 - RNA, 19 nt, Artificial Sequence
  Description of Artificial Sequence: Synthetic oligonucleotide
  Sense strand starting at position 2014 of SEQ ID NO: 1879381
ugaguuugggacuaaguuu

SEQ ID NO: 1903017 - RNA, 19 nt, Artificial Sequence
  Description of Artificial Sequence: Synthetic oligonucleotide
  Antisense strand to SEQ ID NO: 1903016
aaacuuagucccaaacuca

SEQ ID NO: 1903018 - RNA, 19 nt, Artificial Sequence
  Description of Artificial Sequence: Synthetic oligonucleotide
  Sense strand starting at position 2021 of SEQ ID NO: 1879381
gggacuaaguuuggacaga

SEQ ID NO: 1903019 - RNA, 19 nt, Artificial Sequence
  Description of Artificial Sequence: Synthetic oligonucleotide
  Antisense strand to SEQ ID NO: 1903018
ucuguccaaacuuaguccc

SEQ ID NO: 1903020 - RNA, 19 nt, Artificial Sequence
  Description of Artificial Sequence: Synthetic oligonucleotide
  Sense strand starting at position 2178 of SEQ ID NO: 1879381
gccggaguucucgcgagaa

SEQ ID NO: 1903021 - RNA, 19 nt, Artificial Sequence
  Description of Artificial Sequence: Synthetic oligonucleotide
  Antisense strand to SEQ ID NO: 1903020
uucucgcgagaacuccggc

SEQ ID NO: 1903022 - RNA, 19 nt, Artificial Sequence
  Description of Artificial Sequence: Synthetic oligonucleotide
  Sense strand starting at position 2180 of SEQ ID NO: 1879381
cggaguucucgcgagaacu

SEQ ID NO: 1903023 - RNA, 19 nt, Artificial Sequence
  Description of Artificial Sequence: Synthetic oligonucleotide
  Antisense strand to SEQ ID NO: 1903022
aguucucgcgagaacuccg

SEQ ID NO: 1903024 - RNA, 19 nt, Artificial Sequence
  Description of Artificial Sequence: Synthetic oligonucleotide
  Sense strand starting at position 2700 of SEQ ID NO: 1879381
cgaggaguggguuguuaaa

SEQ ID NO: 1903025 - RNA, 19 nt, Artificial Sequence
  Description of Artificial Sequence: Synthetic oligonucleotide
  Antisense strand to SEQ ID NO: 1903024
uuuaacaacccacuccucg

SEQ ID NO: 1903026 - RNA, 19 nt, Artificial Sequence
  Description of Artificial Sequence: Synthetic oligonucleotide
  Sense strand starting at position 2702 of SEQ ID NO: 1879381
aggaguggguuguuaaauu

SEQ ID NO: 1903027 - RNA, 19 nt, Artificial Sequence
  Description of Artificial Sequence: Synthetic oligonucleotide
  Antisense strand to SEQ ID NO: 1903026
aauuuaacaacccacuccu

SEQ ID NO: 1903028 - RNA, 19 nt, Artificial Sequence
  Description of Artificial Sequence: Synthetic oligonucleotide
  Sense strand starting at position 2917 of SEQ ID NO: 1879381
ccugaauaguaaucacgaa

SEQ ID NO: 1903029 - RNA, 19 nt, Artificial Sequence
  Description of Artificial Sequence: Synthetic oligonucleotide
  Antisense strand to SEQ ID NO: 1903028
uucgugauuacuauucagg

SEQ ID NO: 1903030 - RNA, 19 nt, Artificial Sequence
  Description of Artificial Sequence: Synthetic oligonucleotide
  Sense strand starting at position 2961 of SEQ ID NO: 1879381
guagguagcaguuagucuu

SEQ ID NO: 1903031 - RNA, 19 nt, Artificial Sequence
  Description of Artificial Sequence: Synthetic oligonucleotide
  Antisense strand to SEQ ID NO: 1903030
aagacuaacugcuaccuac

SEQ ID NO: 1903032 - RNA, 19 nt, Artificial Sequence
  Description of Artificial Sequence: Synthetic oligonucleotide
  Sense strand starting at position 2991 of SEQ ID NO: 1879381
guggguaauccuuacugca

SEQ ID NO: 1903033 - RNA, 19 nt, Artificial Sequence
  Description of Artificial Sequence: Synthetic oligonucleotide
  Antisense strand to SEQ ID NO: 1903032
ugcaguaaggauuacccac

SEQ ID NO: 1903034 - RNA, 19 nt, Artificial Sequence
  Description of Artificial Sequence: Synthetic oligonucleotide
  Sense strand starting at position 2993 of SEQ ID NO: 1879381
ggguaauccuuacugcagu

SEQ ID NO: 1903035 - RNA, 19 nt, Artificial Sequence
  Description of Artificial Sequence: Synthetic oligonucleotide
  Antisense strand to SEQ ID NO: 1903034
acugcaguaaggauuaccc

SEQ ID NO: 1903036 - RNA, 19 nt, Artificial Sequence
  Description of Artificial Sequence: Synthetic oligonucleotide
  Sense strand starting at position 3185 of SEQ ID NO: 1879381
uugccuauuccgggaaggu

SEQ ID NO: 1903037 - RNA, 19 nt, Artificial Sequence
  Description of Artificial Sequence: Synthetic oligonucleotide
  Antisense strand to SEQ ID NO: 1903036
accuucccggaauaggcaa

SEQ ID NO: 1903038 - RNA, 19 nt, Artificial Sequence
  Description of Artificial Sequence: Synthetic oligonucleotide
  Sense strand starting at position 3186 of SEQ ID NO: 1879381
ugccuauuccgggaagguc

SEQ ID NO: 1903039 - RNA, 19 nt, Artificial Sequence
  Description of Artificial Sequence: Synthetic oligonucleotide
  Antisense strand to SEQ ID NO: 1903038
gaccuucccggaauaggca

SEQ ID NO: 1903040 - RNA, 19 nt, Artificial Sequence
  Description of Artificial Sequence: Synthetic oligonucleotide
  Sense strand starting at position 3213 of SEQ ID NO: 1879381
agaucuguacucugaggac

SEQ ID NO: 1903041 - RNA, 19 nt, Artificial Sequence
  Description of Artificial Sequence: Synthetic oligonucleotide
  Antisense strand to SEQ ID NO: 1903040
guccucagaguacagaucu

SEQ ID NO: 1903042 - RNA, 19 nt, Artificial Sequence
  Description of Artificial Sequence: Synthetic oligonucleotide
  Sense strand starting at position 3220 of SEQ ID NO: 1879381
uacucugaggacugugaau

SEQ ID NO: 1903043 - RNA, 19 nt, Artificial Sequence
  Description of Artificial Sequence: Synthetic oligonucleotide
  Antisense strand to SEQ ID NO: 1903042
auucacaguccucagagua

SEQ ID NO: 1903044 - RNA, 19 nt, Artificial Sequence
  Description of Artificial Sequence: Synthetic oligonucleotide
  Sense strand starting at position 3222 of SEQ ID NO: 1879381
cucugaggacugugaauga

SEQ ID NO: 1903045 - RNA, 19 nt, Artificial Sequence
  Description of Artificial Sequence: Synthetic oligonucleotide
  Antisense strand to SEQ ID NO: 1903044
ucauucacaguccucagag

SEQ ID NO: 1903046 - RNA, 19 nt, Artificial Sequence
  Description of Artificial Sequence: Synthetic oligonucleotide
  Sense strand starting at position 3326 of SEQ ID NO: 1879381
uagccagucuucuuggagu

SEQ ID NO: 1903047 - RNA, 19 nt, Artificial Sequence
  Description of Artificial Sequence: Synthetic oligonucleotide
  Antisense strand to SEQ ID NO: 1903046
acuccaagaagacuggcua

SEQ ID NO: 1903048 - RNA, 19 nt, Artificial Sequence
  Description of Artificial Sequence: Synthetic oligonucleotide
  Sense strand starting at position 3341 of SEQ ID NO: 1879381
gagucacuuuggcugguaa

SEQ ID NO: 1903049 - RNA, 19 nt, Artificial Sequence
  Description of Artificial Sequence: Synthetic oligonucleotide
  Antisense strand to SEQ ID NO: 1903048
uuaccagccaaagugacuc

SEQ ID NO: 1903050 - RNA, 19 nt, Artificial Sequence
  Description of Artificial Sequence: Synthetic oligonucleotide
  Sense strand starting at position 3343 of SEQ ID NO: 1879381
gucacuuuggcugguaaga

SEQ ID NO: 1903051 - RNA, 19 nt, Artificial Sequence
  Description of Artificial Sequence: Synthetic oligonucleotide
  Antisense strand to SEQ ID NO: 1903050
ucuuaccagccaaagugac

SEQ ID NO: 1903052 - RNA, 19 nt, Artificial Sequence
  Description of Artificial Sequence: Synthetic oligonucleotide
  Sense strand starting at position 3354 of SEQ ID NO: 1879381
ugguaagaauuccuucgga

SEQ ID NO: 1903053 - RNA, 19 nt, Artificial Sequence
  Description of Artificial Sequence: Synthetic oligonucleotide
  Antisense strand to SEQ ID NO: 1903052
uccgaaggaauucuuacca

SEQ ID NO: 1903054 - RNA, 19 nt, Artificial Sequence
  Description of Artificial Sequence: Synthetic oligonucleotide
  Sense strand starting at position 3359 of SEQ ID NO: 1879381
agaauuccuucggaaauac

SEQ ID NO: 1903055 - RNA, 19 nt, Artificial Sequence
  Description of Artificial Sequence: Synthetic oligonucleotide
  Antisense strand to SEQ ID NO: 1903054
guauuuccgaaggaauucu

SEQ ID NO: 1903056 - RNA, 19 nt, Artificial Sequence
  Description of Artificial Sequence: Synthetic oligonucleotide
  Sense strand starting at position 3430 of SEQ ID NO: 1879381
aucccugucucaucuguga

SEQ ID NO: 1903057 - RNA, 19 nt, Artificial Sequence
  Description of Artificial Sequence: Synthetic oligonucleotide
  Antisense strand to SEQ ID NO: 1903056
ucacagaugagacagggau

SEQ ID NO: 1903058 - RNA, 19 nt, Artificial Sequence
  Description of Artificial Sequence: Synthetic oligonucleotide
  Sense strand starting at position 3439 of SEQ ID NO: 1879381
ucaucugugaccggcagaa

SEQ ID NO: 1903059 - RNA, 19 nt, Artificial Sequence
  Description of Artificial Sequence: Synthetic oligonucleotide
  Antisense strand to SEQ ID NO: 1903058
uucugccggucacagauga

SEQ ID NO: 1903060 - RNA, 19 nt, Artificial Sequence
  Description of Artificial Sequence: Synthetic oligonucleotide
  Sense strand starting at position 3461 of SEQ ID NO: 1879381
uguucaggguucucuggaa

SEQ ID NO: 1903061 - RNA, 19 nt, Artificial Sequence
  Description of Artificial Sequence: Synthetic oligonucleotide
  Antisense strand to SEQ ID NO: 1903060
uuccagagaacccugaaca

SEQ ID NO: 1903062 - RNA, 19 nt, Artificial Sequence
  Description of Artificial Sequence: Synthetic oligonucleotide
  Sense strand starting at position 3465 of SEQ ID NO: 1879381
caggguucucuggaaacga

SEQ ID NO: 1903063 - RNA, 19 nt, Artificial Sequence
  Description of Artificial Sequence: Synthetic oligonucleotide
  Antisense strand to SEQ ID NO: 1903062
ucguuuccagagaacccug

SEQ ID NO: 1903064 - RNA, 19 nt, Artificial Sequence
  Description of Artificial Sequence: Synthetic oligonucleotide
  Sense strand starting at position 3546 of SEQ ID NO: 1879381
gauugugaaucaggcagaa

SEQ ID NO: 1903065 - RNA, 19 nt, Artificial Sequence
  Description of Artificial Sequence: Synthetic oligonucleotide
  Antisense strand to SEQ ID NO: 1903064
uucugccugauucacaauc

SEQ ID NO: 1903066 - RNA, 19 nt, Artificial Sequence
  Description of Artificial Sequence: Synthetic oligonucleotide
  Sense strand starting at position 3799 of SEQ ID NO: 1879381
cuucuagucugaccuggau

SEQ ID NO: 1903067 - RNA, 19 nt, Artificial Sequence
  Description of Artificial Sequence: Synthetic oligonucleotide
  Antisense strand to SEQ ID NO: 1903066
auccaggucagacuagaag

SEQ ID NO: 1903068 - RNA, 19 nt, Artificial Sequence
  Description of Artificial Sequence: Synthetic oligonucleotide
  Sense strand starting at position 3881 of SEQ ID NO: 1879381
uccuucuuugccggaauua

SEQ ID NO: 1903069 - RNA, 19 nt, Artificial Sequence
  Description of Artificial Sequence: Synthetic oligonucleotide
  Antisense strand to SEQ ID NO: 1903068
uaauuccggcaaagaagga

SEQ ID NO: 1903070 - RNA, 19 nt, Artificial Sequence
  Description of Artificial Sequence: Synthetic oligonucleotide
  Sense strand starting at position 3882 of SEQ ID NO: 1879381
ccuucuuugccggaauuau

SEQ ID NO: 1903071 - RNA, 19 nt, Artificial Sequence
  Description of Artificial Sequence: Synthetic oligonucleotide
  Antisense strand to SEQ ID NO: 1903070
auaauuccggcaaagaagg

SEQ ID NO: 1903072 - RNA, 19 nt, Artificial Sequence
  Description of Artificial Sequence: Synthetic oligonucleotide
  Sense strand starting at position 108 of SEQ ID NO: 1879382
ccagguuucuaggaacaga

SEQ ID NO: 1903073 - RNA, 19 nt, Artificial Sequence
  Description of Artificial Sequence: Synthetic oligonucleotide
  Antisense strand to SEQ ID NO: 1903072
ucuguuccuagaaaccugg

SEQ ID NO: 1903074 - RNA, 19 nt, Artificial Sequence
  Description of Artificial Sequence: Synthetic oligonucleotide
  Sense strand starting at position 465 of SEQ ID NO: 1879382
aaggcuggcucucaaagau

SEQ ID NO: 1903075 - RNA, 19 nt, Artificial Sequence
  Description of Artificial Sequence: Synthetic oligonucleotide
  Antisense strand to SEQ ID NO: 1903074
aucuuugagagccagccuu

SEQ ID NO: 1903076 - RNA, 19 nt, Artificial Sequence
  Description of Artificial Sequence: Synthetic oligonucleotide
  Sense strand starting at position 957 of SEQ ID NO: 1879382
uaacauugugccgaacguu

SEQ ID NO: 1903077 - RNA, 19 nt, Artificial Sequence
  Description of Artificial Sequence: Synthetic oligonucleotide
  Antisense strand to SEQ ID NO: 1903076
aacguucggcacaauguua

SEQ ID NO: 1903078 - RNA, 19 nt, Artificial Sequence
  Description of Artificial Sequence: Synthetic oligonucleotide
  Sense strand starting at position 960 of SEQ ID NO: 1879382
cauugugccgaacguuaua

SEQ ID NO: 1903079 - RNA, 19 nt, Artificial Sequence
  Description of Artificial Sequence: Synthetic oligonucleotide
  Antisense strand to SEQ ID NO: 1903078
uauaacguucggcacaaug

SEQ ID NO: 1903080 - RNA, 19 nt, Artificial Sequence
  Description of Artificial Sequence: Synthetic oligonucleotide
  Sense strand starting at position 982 of SEQ ID NO: 1879382
agauccuccuccguaugau

SEQ ID NO: 1903081 - RNA, 19 nt, Artificial Sequence
  Description of Artificial Sequence: Synthetic oligonucleotide
  Antisense strand to SEQ ID NO: 1903080
aucauacggaggaggaucu

SEQ ID NO: 1903082 - RNA, 19 nt, Artificial Sequence
  Description of Artificial Sequence: Synthetic oligonucleotide
  Sense strand starting at position 983 of SEQ ID NO: 1879382
gauccuccuccguaugauc

SEQ ID NO: 1903083 - RNA, 19 nt, Artificial Sequence
  Description of Artificial Sequence: Synthetic oligonucleotide
  Antisense strand to SEQ ID NO: 1903082
gaucauacggaggaggauc

SEQ ID NO: 1903084 - RNA, 19 nt, Artificial Sequence
  Description of Artificial Sequence: Synthetic oligonucleotide
  Sense strand starting at position 991 of SEQ ID NO: 1879382
uccguaugauccuuaguuc

SEQ ID NO: 1903085 - RNA, 19 nt, Artificial Sequence
  Description of Artificial Sequence: Synthetic oligonucleotide
  Antisense strand to SEQ ID NO: 1903084
gaacuaaggaucauacgga

SEQ ID NO: 1903086 - RNA, 19 nt, Artificial Sequence
  Description of Artificial Sequence: Synthetic oligonucleotide
  Sense strand starting at position 1065 of SEQ ID NO: 1879382
gcugcuaccauuuguggaa

SEQ ID NO: 1903087 - RNA, 19 nt, Artificial Sequence
  Description of Artificial Sequence: Synthetic oligonucleotide
  Antisense strand to SEQ ID NO: 1903086
uuccacaaaugguagcagc

SEQ ID NO: 1903088 - RNA, 19 nt, Artificial Sequence
  Description of Artificial Sequence: Synthetic oligonucleotide
  Sense strand starting at position 1067 of SEQ ID NO: 1879382
ugcuaccauuuguggaauu

SEQ ID NO: 1903089 - RNA, 19 nt, Artificial Sequence
  Description of Artificial Sequence: Synthetic oligonucleotide
  Antisense strand to SEQ ID NO: 1903088
aauuccacaaaugguagca

SEQ ID NO: 1903090 - RNA, 19 nt, Artificial Sequence
  Description of Artificial Sequence: Synthetic oligonucleotide
  Sense strand starting at position 1079 of SEQ ID NO: 1879382
uggaauucugccggccaga

SEQ ID NO: 1903091 - RNA, 19 nt, Artificial Sequence
  Description of Artificial Sequence: Synthetic oligonucleotide
  Antisense strand to SEQ ID NO: 1903090
ucuggccggcagaauucca

SEQ ID NO: 1903092 - RNA, 19 nt, Artificial Sequence
  Description of Artificial Sequence: Synthetic oligonucleotide
  Sense strand starting at position 1226 of SEQ ID NO: 1879382
aagguagugcgaugacuca

SEQ ID NO: 1903093 - RNA, 19 nt, Artificial Sequence
  Description of Artificial Sequence: Synthetic oligonucleotide
  Antisense strand to SEQ ID NO: 1903092
ugagucaucgcacuaccuu

SEQ ID NO: 1903094 - RNA, 19 nt, Artificial Sequence
  Description of Artificial Sequence: Synthetic oligonucleotide
  Sense strand starting at position 2054 of SEQ ID NO: 1879382
gacagugguccuuguauug

SEQ ID NO: 1903095 - RNA, 19 nt, Artificial Sequence
  Description of Artificial Sequence: Synthetic oligonucleotide
  Antisense strand to SEQ ID NO: 1903094
caauacaaggaccacuguc

SEQ ID NO: 1903096 - RNA, 19 nt, Artificial Sequence
  Description of Artificial Sequence: Synthetic oligonucleotide
  Sense strand starting at position 2080 of SEQ ID NO: 1879382
gcggaaucacuccagauga

SEQ ID NO: 1903097 - RNA, 19 nt, Artificial Sequence
  Description of Artificial Sequence: Synthetic oligonucleotide
  Antisense strand to SEQ ID NO: 1903096
ucaucuggagugauuccgc

SEQ ID NO: 1903098 - RNA, 19 nt, Artificial Sequence
  Description of Artificial Sequence: Synthetic oligonucleotide
  Sense strand starting at position 2091 of SEQ ID NO: 1879382
ccagaugagucaguggaua

SEQ ID NO: 1903099 - RNA, 19 nt, Artificial Sequence
  Description of Artificial Sequence: Synthetic oligonucleotide
  Antisense strand to SEQ ID NO: 1903098
uauccacugacucaucugg

SEQ ID NO: 1903100 - RNA, 19 nt, Artificial Sequence
  Description of Artificial Sequence: Synthetic oligonucleotide
  Sense strand starting at position 2093 of SEQ ID NO: 1879382
agaugagucaguggauaca

SEQ ID NO: 1903101 - RNA, 19 nt, Artificial Sequence
  Description of Artificial Sequence: Synthetic oligonucleotide
  Antisense strand to SEQ ID NO: 1903100
uguauccacugacucaucu

SEQ ID NO: 1903102 - RNA, 19 nt, Artificial Sequence
  Description of Artificial Sequence: Synthetic oligonucleotide
  Sense strand starting at position 2125 of SEQ ID NO: 1879382
gccucauuguacgcaaaca

SEQ ID NO: 1903103 - RNA, 19 nt, Artificial Sequence
  Description of Artificial Sequence: Synthetic oligonucleotide
  Antisense strand to SEQ ID NO: 1903102
uguuugcguacaaugaggc

SEQ ID NO: 1903104 - RNA, 19 nt, Artificial Sequence
  Description of Artificial Sequence: Synthetic oligonucleotide
  Sense strand starting at position 2198 of SEQ ID NO: 1879382
guguguaugggaggcuaaa

SEQ ID NO: 1903105 - RNA, 19 nt, Artificial Sequence
  Description of Artificial Sequence: Synthetic oligonucleotide
  Antisense strand to SEQ ID NO: 1903104
uuuagccucccauacacac

SEQ ID NO: 1903106 - RNA, 19 nt, Artificial Sequence
  Description of Artificial Sequence: Synthetic oligonucleotide
  Sense strand starting at position 2210 of SEQ ID NO: 1879382
ggcuaaaucucagcaggac

SEQ ID NO: 1903107 - RNA, 19 nt, Artificial Sequence
  Description of Artificial Sequence: Synthetic oligonucleotide
  Antisense strand to SEQ ID NO: 1903106
guccugcugagauuuagcc

SEQ ID NO: 1903108 - RNA, 19 nt, Artificial Sequence
  Description of Artificial Sequence: Synthetic oligonucleotide
  Sense strand starting at position 2257 of SEQ ID NO: 1879382
gucgccugaugguuaagaa

SEQ ID NO: 1903109 - RNA, 19 nt, Artificial Sequence
  Description of Artificial Sequence: Synthetic oligonucleotide
  Antisense strand to SEQ ID NO: 1903108
uucuuaaccaucaggcgac

SEQ ID NO: 1903110 - RNA, 19 nt, Artificial Sequence
  Description of Artificial Sequence: Synthetic oligonucleotide
  Sense strand starting at position 2266 of SEQ ID NO: 1879382
ugguuaagaacugaagcuu

SEQ ID NO: 1903111 - RNA, 19 nt, Artificial Sequence
  Description of Artificial Sequence: Synthetic oligonucleotide
  Antisense strand to SEQ ID NO: 1903110
aagcuucaguucuuaacca

SEQ ID NO: 1903112 - RNA, 19 nt, Artificial Sequence
  Description of Artificial Sequence: Synthetic oligonucleotide
  Sense strand starting at position 2570 of SEQ ID NO: 1879382
agaugaagcuuugaaguca

SEQ ID NO: 1903113 - RNA, 19 nt, Artificial Sequence
  Description of Artificial Sequence: Synthetic oligonucleotide
  Antisense strand to SEQ ID NO: 1903112
ugacuucaaagcuucaucu

SEQ ID NO: 1903114 - RNA, 19 nt, Artificial Sequence
  Description of Artificial Sequence: Synthetic oligonucleotide
  Sense strand starting at position 2583 of SEQ ID NO: 1879382
aagucauacugaucugguu

SEQ ID NO: 1903115 - RNA, 19 nt, Artificial Sequence
  Description of Artificial Sequence: Synthetic oligonucleotide
  Antisense strand to SEQ ID NO: 1903114
aaccagaucaguaugacuu

SEQ ID NO: 1903116 - RNA, 19 nt, Artificial Sequence
  Description of Artificial Sequence: Synthetic oligonucleotide
  Sense strand starting at position 2596 of SEQ ID NO: 1879382
cugguuugcgucugaucac

SEQ ID NO: 1903117 - RNA, 19 nt, Artificial Sequence
  Description of Artificial Sequence: Synthetic oligonucleotide
  Antisense strand to SEQ ID NO: 1903116
gugaucagacgcaaaccag

SEQ ID NO: 1903118 - RNA, 19 nt, Artificial Sequence
  Description of Artificial Sequence: Synthetic oligonucleotide
  Sense strand starting at position 2599 of SEQ ID NO: 1879382
guuugcgucugaucacaca

SEQ ID NO: 1903119 - RNA, 19 nt, Artificial Sequence
  Description of Artificial Sequence: Synthetic oligonucleotide
  Antisense strand to SEQ ID NO: 1903118
ugugugaucagacgcaaac

SEQ ID NO: 1903120 - RNA, 19 nt, Artificial Sequence
  Description of Artificial Sequence: Synthetic oligonucleotide
  Sense strand starting at position 2690 of SEQ ID NO: 1879382
gagggauugagcuguuaga

SEQ ID NO: 1903121 - RNA, 19 nt, Artificial Sequence
  Description of Artificial Sequence: Synthetic oligonucleotide
  Antisense strand to SEQ ID NO: 1903120
ucuaacagcucaaucccuc

SEQ ID NO: 1903122 - RNA, 19 nt, Artificial Sequence
  Description of Artificial Sequence: Synthetic oligonucleotide
  Sense strand starting at position 2763 of SEQ ID NO: 1879382
ggcugagcuaccggauuaa

SEQ ID NO: 1903123 - RNA, 19 nt, Artificial Sequence
  Description of Artificial Sequence: Synthetic oligonucleotide
  Antisense strand to SEQ ID NO: 1903122
uuaauccgguagcucagcc

SEQ ID NO: 1903124 - RNA, 19 nt, Artificial Sequence
  Description of Artificial Sequence: Synthetic oligonucleotide
  Sense strand starting at position 2807 of SEQ ID NO: 1879382
cuggguuauugcuccagag

SEQ ID NO: 1903125 - RNA, 19 nt, Artificial Sequence
  Description of Artificial Sequence: Synthetic oligonucleotide
  Antisense strand to SEQ ID NO: 1903124
cucuggagcaauaacccag

SEQ ID NO: 1903126 - RNA, 19 nt, Artificial Sequence
  Description of Artificial Sequence: Synthetic oligonucleotide
  Sense strand starting at position 2811 of SEQ ID NO: 1879382
guuauugcuccagagccaa

SEQ ID NO: 1903127 - RNA, 19 nt, Artificial Sequence
  Description of Artificial Sequence: Synthetic oligonucleotide
  Antisense strand to SEQ ID NO: 1903126
uuggcucuggagcaauaac

SEQ ID NO: 1903128 - RNA, 19 nt, Artificial Sequence
  Description of Artificial Sequence: Synthetic oligonucleotide
  Sense strand starting at position 2847 of SEQ ID NO: 1879382
agauaugcccuuugucaac

SEQ ID NO: 1903129 - RNA, 19 nt, Artificial Sequence
  Description of Artificial Sequence: Synthetic oligonucleotide
  Antisense strand to SEQ ID NO: 1903128
guugacaaagggcauaucu

SEQ ID NO: 1903130 - RNA, 19 nt, Artificial Sequence
  Description of Artificial Sequence: Synthetic oligonucleotide
  Sense strand starting at position 2868 of SEQ ID NO: 1879382
ugccacugcuggucuguaa

SEQ ID NO: 1903131 - RNA, 19 nt, Artificial Sequence
  Description of Artificial Sequence: Synthetic oligonucleotide
  Antisense strand to SEQ ID NO: 1903130
uuacagaccagcaguggca

SEQ ID NO: 1903132 - RNA, 19 nt, Artificial Sequence
  Description of Artificial Sequence: Synthetic oligonucleotide
  Sense strand starting at position 3013 of SEQ ID NO: 1879382
agcuuagguuucccuaacu

SEQ ID NO: 1903133 - RNA, 19 nt, Artificial Sequence
  Description of Artificial Sequence: Synthetic oligonucleotide
  Antisense strand to SEQ ID NO: 1903132
aguuagggaaaccuaagcu

SEQ ID NO: 1903134 - RNA, 19 nt, Artificial Sequence
  Description of Artificial Sequence: Synthetic oligonucleotide
  Sense strand starting at position 3018 of SEQ ID NO: 1879382
agguuucccuaacuguaaa

SEQ ID NO: 1903135 - RNA, 19 nt, Artificial Sequence
  Description of Artificial Sequence: Synthetic oligonucleotide
  Antisense strand to SEQ ID NO: 1903134
uuuacaguuagggaaaccu

SEQ ID NO: 1903136 - RNA, 19 nt, Artificial Sequence
  Description of Artificial Sequence: Synthetic oligonucleotide
  Sense strand starting at position 3087 of SEQ ID NO: 1879382
acucuaagguuccuuagga

SEQ ID NO: 1903137 - RNA, 19 nt, Artificial Sequence
  Description of Artificial Sequence: Synthetic oligonucleotide
  Antisense strand to SEQ ID NO: 1903136
uccuaaggaaccuuagagu

SEQ ID NO: 1903138 - RNA, 19 nt, Artificial Sequence
  Description of Artificial Sequence: Synthetic oligonucleotide
  Sense strand starting at position 3088 of SEQ ID NO: 1879382
cucuaagguuccuuaggaa

SEQ ID NO: 1903139 - RNA, 19 nt, Artificial Sequence
  Description of Artificial Sequence: Synthetic oligonucleotide
  Antisense strand to SEQ ID NO: 1903138
uuccuaaggaaccuuagag

SEQ ID NO: 1903140 - RNA, 19 nt, Artificial Sequence
  Description of Artificial Sequence: Synthetic oligonucleotide
  Sense strand starting at position 3144 of SEQ ID NO: 1879382
gcuugagucccagagcaac

SEQ ID NO: 1903141 - RNA, 19 nt, Artificial Sequence
  Description of Artificial Sequence: Synthetic oligonucleotide
  Antisense strand to SEQ ID NO: 1903140
guugcucugggacucaagc

SEQ ID NO: 1903142 - RNA, 19 nt, Artificial Sequence
  Description of Artificial Sequence: Synthetic oligonucleotide
  Sense strand starting at position 3189 of SEQ ID NO: 1879382
ugugaaaguauauacguuu

SEQ ID NO: 1903143 - RNA, 19 nt, Artificial Sequence
  Description of Artificial Sequence: Synthetic oligonucleotide
  Antisense strand to SEQ ID NO: 1903142
aaacguauauacuuucaca

SEQ ID NO: 1903144 - RNA, 19 nt, Artificial Sequence
  Description of Artificial Sequence: Synthetic oligonucleotide
  Sense strand starting at position 3195 of SEQ ID NO: 1879382
aguauauacguuucggcuu

SEQ ID NO: 1903145 - RNA, 19 nt, Artificial Sequence
  Description of Artificial Sequence: Synthetic oligonucleotide
  Antisense strand to SEQ ID NO: 1903144
aagccgaaacguauauacu

SEQ ID NO: 1903146 - RNA, 19 nt, Artificial Sequence
  Description of Artificial Sequence: Synthetic oligonucleotide
  Sense strand starting at position 3200 of SEQ ID NO: 1879382
auacguuucggcuugugua

SEQ ID NO: 1903147 - RNA, 19 nt, Artificial Sequence
  Description of Artificial Sequence: Synthetic oligonucleotide
  Antisense strand to SEQ ID NO: 1903146
uacacaagccgaaacguau

SEQ ID NO: 1903148 - RNA, 19 nt, Artificial Sequence
  Description of Artificial Sequence: Synthetic oligonucleotide
  Sense strand starting at position 3285 of SEQ ID NO: 1879382
cucaguuugcuccaagaac

SEQ ID NO: 1903149 - RNA, 19 nt, Artificial Sequence
  Description of Artificial Sequence: Synthetic oligonucleotide
  Antisense strand to SEQ ID NO: 1903148
guucuuggagcaaacugag

SEQ ID NO: 1903150 - RNA, 19 nt, Artificial Sequence
  Description of Artificial Sequence: Synthetic oligonucleotide
  Sense strand starting at position 3974 of SEQ ID NO: 1879382
gcugaucucugcuugcagu

SEQ ID NO: 1903151 - RNA, 19 nt, Artificial Sequence
  Description of Artificial Sequence: Synthetic oligonucleotide
  Antisense strand to SEQ ID NO: 1903150
acugcaagcagagaucagc

SEQ ID NO: 1903152 - RNA, 19 nt, Artificial Sequence
  Description of Artificial Sequence: Synthetic oligonucleotide
  Sense strand starting at position 421 of SEQ ID NO: 1879383
ccagguuucuaggaacaga

SEQ ID NO: 1903153 - RNA, 19 nt, Artificial Sequence
  Description of Artificial Sequence: Synthetic oligonucleotide
  Antisense strand to SEQ ID NO: 1903152
ucuguuccuagaaaccugg

SEQ ID NO: 1903154 - RNA, 19 nt, Artificial Sequence
  Description of Artificial Sequence: Synthetic oligonucleotide
  Sense strand starting at position 778 of SEQ ID NO: 1879383
aaggcuggcucucaaagau

SEQ ID NO: 1903155 - RNA, 19 nt, Artificial Sequence
  Description of Artificial Sequence: Synthetic oligonucleotide
  Antisense strand to SEQ ID NO: 1903154
aucuuugagagccagccuu

SEQ ID NO: 1903156 - RNA, 19 nt, Artificial Sequence
  Description of Artificial Sequence: Synthetic oligonucleotide
  Sense strand starting at position 1270 of SEQ ID NO: 1879383
uaacauugugccgaacguu

SEQ ID NO: 1903157 - RNA, 19 nt, Artificial Sequence
  Description of Artificial Sequence: Synthetic oligonucleotide
  Antisense strand to SEQ ID NO: 1903156
aacguucggcacaauguua

SEQ ID NO: 1903158 - RNA, 19 nt, Artificial Sequence
  Description of Artificial Sequence: Synthetic oligonucleotide
  Sense strand starting at position 1273 of SEQ ID NO: 1879383
cauugugccgaacguuaua

SEQ ID NO: 1903159 - RNA, 19 nt, Artificial Sequence
  Description of Artificial Sequence: Synthetic oligonucleotide
  Antisense strand to SEQ ID NO: 1903158
uauaacguucggcacaaug

SEQ ID NO: 1903160 - RNA, 19 nt, Artificial Sequence
  Description of Artificial Sequence: Synthetic oligonucleotide
  Sense strand starting at position 1295 of SEQ ID NO: 1879383
agauccuccuccguaugau

SEQ ID NO: 1903161 - RNA, 19 nt, Artificial Sequence
  Description of Artificial Sequence: Synthetic oligonucleotide
  Antisense strand to SEQ ID NO: 1903160
aucauacggaggaggaucu

SEQ ID NO: 1903162 - RNA, 19 nt, Artificial Sequence
  Description of Artificial Sequence: Synthetic oligonucleotide
  Sense strand starting at position 1296 of SEQ ID NO: 1879383
gauccuccuccguaugauc

SEQ ID NO: 1903163 - RNA, 19 nt, Artificial Sequence
  Description of Artificial Sequence: Synthetic oligonucleotide
  Antisense strand to SEQ ID NO: 1903162
gaucauacggaggaggauc

SEQ ID NO: 1903164 - RNA, 19 nt, Artificial Sequence
  Description of Artificial Sequence: Synthetic oligonucleotide
  Sense strand starting at position 1304 of SEQ ID NO: 1879383
uccguaugauccuuaguuc

SEQ ID NO: 1903165 - RNA, 19 nt, Artificial Sequence
  Description of Artificial Sequence: Synthetic oligonucleotide
  Antisense strand to SEQ ID NO: 1903164
gaacuaaggaucauacgga

SEQ ID NO: 1903166 - RNA, 19 nt, Artificial Sequence
  Description of Artificial Sequence: Synthetic oligonucleotide
  Sense strand starting at position 1378 of SEQ ID NO: 1879383
gcugcuaccauuuguggaa

SEQ ID NO: 1903167 - RNA, 19 nt, Artificial Sequence
  Description of Artificial Sequence: Synthetic oligonucleotide
  Antisense strand to SEQ ID NO: 1903166
uuccacaaaugguagcagc

SEQ ID NO: 1903168 - RNA, 19 nt, Artificial Sequence
  Description of Artificial Sequence: Synthetic oligonucleotide
  Sense strand starting at position 1380 of SEQ ID NO: 1879383
ugcuaccauuuguggaauu

SEQ ID NO: 1903169 - RNA, 19 nt, Artificial Sequence
  Description of Artificial Sequence: Synthetic oligonucleotide
  Antisense strand to SEQ ID NO: 1903168
aauuccacaaaugguagca

SEQ ID NO: 1903170 - RNA, 19 nt, Artificial Sequence
  Description of Artificial Sequence: Synthetic oligonucleotide
  Sense strand starting at position 1392 of SEQ ID NO: 1879383
uggaauucugccggccaga

SEQ ID NO: 1903171 - RNA, 19 nt, Artificial Sequence
  Description of Artificial Sequence: Synthetic oligonucleotide
  Antisense strand to SEQ ID NO: 1903170
ucuggccggcagaauucca

SEQ ID NO: 1903172 - RNA, 19 nt, Artificial Sequence
  Description of Artificial Sequence: Synthetic oligonucleotide
  Sense strand starting at position 1539 of SEQ ID NO: 1879383
aagguagugcgaugacuca

SEQ ID NO: 1903173 - RNA, 19 nt, Artificial Sequence
  Description of Artificial Sequence: Synthetic oligonucleotide
  Antisense strand to SEQ ID NO: 1903172
ugagucaucgcacuaccuu

SEQ ID NO: 1903174 - RNA, 19 nt, Artificial Sequence
  Description of Artificial Sequence: Synthetic oligonucleotide
  Sense strand starting at position 2367 of SEQ ID NO: 1879383
gacagugguccuuguauug

SEQ ID NO: 1903175 - RNA, 19 nt, Artificial Sequence
  Description of Artificial Sequence: Synthetic oligonucleotide
  Antisense strand to SEQ ID NO: 1903174
caauacaaggaccacuguc

SEQ ID NO: 1903176 - RNA, 19 nt, Artificial Sequence
  Description of Artificial Sequence: Synthetic oligonucleotide
  Sense strand starting at position 2393 of SEQ ID NO: 1879383
gcggaaucacuccagauga

SEQ ID NO: 1903177 - RNA, 19 nt, Artificial Sequence
  Description of Artificial Sequence: Synthetic oligonucleotide
  Antisense strand to SEQ ID NO: 1903176
ucaucuggagugauuccgc

SEQ ID NO: 1903178 - RNA, 19 nt, Artificial Sequence
  Description of Artificial Sequence: Synthetic oligonucleotide
  Sense strand starting at position 2404 of SEQ ID NO: 1879383
ccagaugagucaguggaua

SEQ ID NO: 1903179 - RNA, 19 nt, Artificial Sequence
  Description of Artificial Sequence: Synthetic oligonucleotide
  Antisense strand to SEQ ID NO: 1903178
uauccacugacucaucugg

SEQ ID NO: 1903180 - RNA, 19 nt, Artificial Sequence
  Description of Artificial Sequence: Synthetic oligonucleotide
  Sense strand starting at position 2406 of SEQ ID NO: 1879383
agaugagucaguggauaca

SEQ ID NO: 1903181 - RNA, 19 nt, Artificial Sequence
  Description of Artificial Sequence: Synthetic oligonucleotide
  Antisense strand to SEQ ID NO: 1903180
uguauccacugacucaucu

SEQ ID NO: 1903182 - RNA, 19 nt, Artificial Sequence
  Description of Artificial Sequence: Synthetic oligonucleotide
  Sense strand starting at position 2438 of SEQ ID NO: 1879383
gccucauuguacgcaaaca

SEQ ID NO: 1903183 - RNA, 19 nt, Artificial Sequence
  Description of Artificial Sequence: Synthetic oligonucleotide
  Antisense strand to SEQ ID NO: 1903182
uguuugcguacaaugaggc

SEQ ID NO: 1903184 - RNA, 19 nt, Artificial Sequence
  Description of Artificial Sequence: Synthetic oligonucleotide
  Sense strand starting at position 2511 of SEQ ID NO: 1879383
guguguaugggaggcuaaa

SEQ ID NO: 1903185 - RNA, 19 nt, Artificial Sequence
  Description of Artificial Sequence: Synthetic oligonucleotide
  Antisense strand to SEQ ID NO: 1903184
uuuagccucccauacacac

SEQ ID NO: 1903186 - RNA, 19 nt, Artificial Sequence
  Description of Artificial Sequence: Synthetic oligonucleotide
  Sense strand starting at position 2523 of SEQ ID NO: 1879383
ggcuaaaucucagcaggac

SEQ ID NO: 1903187 - RNA, 19 nt, Artificial Sequence
  Description of Artificial Sequence: Synthetic oligonucleotide
  Antisense strand to SEQ ID NO: 1903186
guccugcugagauuuagcc

SEQ ID NO: 1903188 - RNA, 19 nt, Artificial Sequence
  Description of Artificial Sequence: Synthetic oligonucleotide
  Sense strand starting at position 2570 of SEQ ID NO: 1879383
gucgccugaugguuaagaa

SEQ ID NO: 1903189 - RNA, 19 nt, Artificial Sequence
  Description of Artificial Sequence: Synthetic oligonucleotide
  Antisense strand to SEQ ID NO: 1903188
uucuuaaccaucaggcgac

SEQ ID NO: 1903190 - RNA, 19 nt, Artificial Sequence
  Description of Artificial Sequence: Synthetic oligonucleotide
  Sense strand starting at position 2579 of SEQ ID NO: 1879383
ugguuaagaacugaagcuu

SEQ ID NO: 1903191 - RNA, 19 nt, Artificial Sequence
  Description of Artificial Sequence: Synthetic oligonucleotide
  Antisense strand to SEQ ID NO: 1903190
aagcuucaguucuuaacca

SEQ ID NO: 1903192 - RNA, 19 nt, Artificial Sequence
  Description of Artificial Sequence: Synthetic oligonucleotide
  Sense strand starting at position 2883 of SEQ ID NO: 1879383
agaugaagcuuugaaguca

SEQ ID NO: 1903193 - RNA, 19 nt, Artificial Sequence
  Description of Artificial Sequence: Synthetic oligonucleotide
  Antisense strand to SEQ ID NO: 1903192
ugacuucaaagcuucaucu

SEQ ID NO: 1903194 - RNA, 19 nt, Artificial Sequence
  Description of Artificial Sequence: Synthetic oligonucleotide
  Sense strand starting at position 2896 of SEQ ID NO: 1879383
aagucauacugaucugguu

SEQ ID NO: 1903195 - RNA, 19 nt, Artificial Sequence
  Description of Artificial Sequence: Synthetic oligonucleotide
  Antisense strand to SEQ ID NO: 1903194
aaccagaucaguaugacuu

SEQ ID NO: 1903196 - RNA, 19 nt, Artificial Sequence
  Description of Artificial Sequence: Synthetic oligonucleotide
  Sense strand starting at position 2909 of SEQ ID NO: 1879383
cugguuugcgucugaucac

SEQ ID NO: 1903197 - RNA, 19 nt, Artificial Sequence
  Description of Artificial Sequence: Synthetic oligonucleotide
  Antisense strand to SEQ ID NO: 1903196
gugaucagacgcaaaccag

SEQ ID NO: 1903198 - RNA, 19 nt, Artificial Sequence
  Description of Artificial Sequence: Synthetic oligonucleotide
  Sense strand starting at position 2912 of SEQ ID NO: 1879383
guuugcgucugaucacaca

SEQ ID NO: 1903199 - RNA, 19 nt, Artificial Sequence
  Description of Artificial Sequence: Synthetic oligonucleotide
  Antisense strand to SEQ ID NO: 1903198
ugugugaucagacgcaaac

SEQ ID NO: 1903200 - RNA, 19 nt, Artificial Sequence
  Description of Artificial Sequence: Synthetic oligonucleotide
  Sense strand starting at position 3003 of SEQ ID NO: 1879383
gagggauugagcuguuaga

SEQ ID NO: 1903201 - RNA, 19 nt, Artificial Sequence
  Description of Artificial Sequence: Synthetic oligonucleotide
  Antisense strand to SEQ ID NO: 1903200
ucuaacagcucaaucccuc

SEQ ID NO: 1903202 - RNA, 19 nt, Artificial Sequence
  Description of Artificial Sequence: Synthetic oligonucleotide
  Sense strand starting at position 3076 of SEQ ID NO: 1879383
ggcugagcuaccggauuaa

SEQ ID NO: 1903203 - RNA, 19 nt, Artificial Sequence
  Description of Artificial Sequence: Synthetic oligonucleotide
  Antisense strand to SEQ ID NO: 1903202
uuaauccgguagcucagcc

SEQ ID NO: 1903204 - RNA, 19 nt, Artificial Sequence
  Description of Artificial Sequence: Synthetic oligonucleotide
  Sense strand starting at position 3120 of SEQ ID NO: 1879383
cuggguuauugcuccagag

SEQ ID NO: 1903205 - RNA, 19 nt, Artificial Sequence
  Description of Artificial Sequence: Synthetic oligonucleotide
  Antisense strand to SEQ ID NO: 1903204
cucuggagcaauaacccag

SEQ ID NO: 1903206 - RNA, 19 nt, Artificial Sequence
  Description of Artificial Sequence: Synthetic oligonucleotide
  Sense strand starting at position 3124 of SEQ ID NO: 1879383
guuauugcuccagagccaa

SEQ ID NO: 1903207 - RNA, 19 nt, Artificial Sequence
  Description of Artificial Sequence: Synthetic oligonucleotide
  Antisense strand to SEQ ID NO: 1903206
uuggcucuggagcaauaac

SEQ ID NO: 1903208 - RNA, 19 nt, Artificial Sequence
  Description of Artificial Sequence: Synthetic oligonucleotide
  Sense strand starting at position 3160 of SEQ ID NO: 1879383
agauaugcccuuugucaac

SEQ ID NO: 1903209 - RNA, 19 nt, Artificial Sequence
  Description of Artificial Sequence: Synthetic oligonucleotide
  Antisense strand to SEQ ID NO: 1903208
guugacaaagggcauaucu

SEQ ID NO: 1903210 - RNA, 19 nt, Artificial Sequence
  Description of Artificial Sequence: Synthetic oligonucleotide
  Sense strand starting at position 3181 of SEQ ID NO: 1879383
ugccacugcuggucuguaa

SEQ ID NO: 1903211 - RNA, 19 nt, Artificial Sequence
  Description of Artificial Sequence: Synthetic oligonucleotide
  Antisense strand to SEQ ID NO: 1903210
uuacagaccagcaguggca

SEQ ID NO: 1903212 - RNA, 19 nt, Artificial Sequence
  Description of Artificial Sequence: Synthetic oligonucleotide
  Sense strand starting at position 3326 of SEQ ID NO: 1879383
agcuuagguuucccuaacu

SEQ ID NO: 1903213 - RNA, 19 nt, Artificial Sequence
  Description of Artificial Sequence: Synthetic oligonucleotide
  Antisense strand to SEQ ID NO: 1903212
aguuagggaaaccuaagcu

SEQ ID NO: 1903214 - RNA, 19 nt, Artificial Sequence
  Description of Artificial Sequence: Synthetic oligonucleotide
  Sense strand starting at position 3331 of SEQ ID NO: 1879383
agguuucccuaacuguaaa

SEQ ID NO: 1903215 - RNA, 19 nt, Artificial Sequence
  Description of Artificial Sequence: Synthetic oligonucleotide
  Antisense strand to SEQ ID NO: 1903214
uuuacaguuagggaaaccu

SEQ ID NO: 1903216 - RNA, 19 nt, Artificial Sequence
  Description of Artificial Sequence: Synthetic oligonucleotide
  Sense strand starting at position 3400 of SEQ ID NO: 1879383
acucuaagguuccuuagga

SEQ ID NO: 1903217 - RNA, 19 nt, Artificial Sequence
  Description of Artificial Sequence: Synthetic oligonucleotide
  Antisense strand to SEQ ID NO: 1903216
uccuaaggaaccuuagagu

SEQ ID NO: 1903218 - RNA, 19 nt, Artificial Sequence
  Description of Artificial Sequence: Synthetic oligonucleotide
  Sense strand starting at position 3401 of SEQ ID NO: 1879383
cucuaagguuccuuaggaa

SEQ ID NO: 1903219 - RNA, 19 nt, Artificial Sequence
  Description of Artificial Sequence: Synthetic oligonucleotide
  Antisense strand to SEQ ID NO: 1903218
uuccuaaggaaccuuagag

SEQ ID NO: 1903220 - RNA, 19 nt, Artificial Sequence
  Description of Artificial Sequence: Synthetic oligonucleotide
  Sense strand starting at position 3457 of SEQ ID NO: 1879383
gcuugagucccagagcaac

SEQ ID NO: 1903221 - RNA, 19 nt, Artificial Sequence
  Description of Artificial Sequence: Synthetic oligonucleotide
  Antisense strand to SEQ ID NO: 1903220
guugcucugggacucaagc

SEQ ID NO: 1903222 - RNA, 19 nt, Artificial Sequence
  Description of Artificial Sequence: Synthetic oligonucleotide
  Sense strand starting at position 3502 of SEQ ID NO: 1879383
ugugaaaguauauacguuu

SEQ ID NO: 1903223 - RNA, 19 nt, Artificial Sequence
  Description of Artificial Sequence: Synthetic oligonucleotide
  Antisense strand to SEQ ID NO: 1903222
aaacguauauacuuucaca

SEQ ID NO: 1903224 - RNA, 19 nt, Artificial Sequence
  Description of Artificial Sequence: Synthetic oligonucleotide
  Sense strand starting at position 3508 of SEQ ID NO: 1879383
aguauauacguuucggcuu

SEQ ID NO: 1903225 - RNA, 19 nt, Artificial Sequence
  Description of Artificial Sequence: Synthetic oligonucleotide
  Antisense strand to SEQ ID NO: 1903224
aagccgaaacguauauacu

SEQ ID NO: 1903226 - RNA, 19 nt, Artificial Sequence
  Description of Artificial Sequence: Synthetic oligonucleotide
  Sense strand starting at position 3513 of SEQ ID NO: 1879383
auacguuucggcuugugua

SEQ ID NO: 1903227 - RNA, 19 nt, Artificial Sequence
  Description of Artificial Sequence: Synthetic oligonucleotide
  Antisense strand to SEQ ID NO: 1903226
uacacaagccgaaacguau

SEQ ID NO: 1903228 - RNA, 19 nt, Artificial Sequence
  Description of Artificial Sequence: Synthetic oligonucleotide
  Sense strand starting at position 3514 of SEQ ID NO: 1879383
uacguuucggcuuguguaa

SEQ ID NO: 1903229 - RNA, 19 nt, Artificial Sequence
  Description of Artificial Sequence: Synthetic oligonucleotide
  Antisense strand to SEQ ID NO: 1903228
uuacacaagccgaaacgua

SEQ ID NO: 1903230 - RNA, 19 nt, Artificial Sequence
  Description of Artificial Sequence: Synthetic oligonucleotide
  Sense strand starting at position 3598 of SEQ ID NO: 1879383
cucaguuugcuccaagaac

SEQ ID NO: 1903231 - RNA, 19 nt, Artificial Sequence
  Description of Artificial Sequence: Synthetic oligonucleotide
  Antisense strand to SEQ ID NO: 1903230
guucuuggagcaaacugag

SEQ ID NO: 1903232 - RNA, 19 nt, Artificial Sequence
  Description of Artificial Sequence: Synthetic oligonucleotide
  Sense strand starting at position 166 of SEQ ID NO: 1879384
gucaguagcaucuuccgua

SEQ ID NO: 1903233 - RNA, 19 nt, Artificial Sequence
  Description of Artificial Sequence: Synthetic oligonucleotide
  Antisense strand to SEQ ID NO: 1903232
uacggaagaugcuacugac

SEQ ID NO: 1903234 - RNA, 19 nt, Artificial Sequence
  Description of Artificial Sequence: Synthetic oligonucleotide
  Sense strand starting at position 171 of SEQ ID NO: 1879384
uagcaucuuccguauugaa

SEQ ID NO: 1903235 - RNA, 19 nt, Artificial Sequence
  Description of Artificial Sequence: Synthetic oligonucleotide
  Antisense strand to SEQ ID NO: 1903234
uucaauacggaagaugcua

SEQ ID NO: 1903236 - RNA, 19 nt, Artificial Sequence
  Description of Artificial Sequence: Synthetic oligonucleotide
  Sense strand starting at position 207 of SEQ ID NO: 1879384
aucccuacccagugagaaa

SEQ ID NO: 1903237 - RNA, 19 nt, Artificial Sequence
  Description of Artificial Sequence: Synthetic oligonucleotide
  Antisense strand to SEQ ID NO: 1903236
uuucucacuggguagggau

SEQ ID NO: 1903238 - RNA, 19 nt, Artificial Sequence
  Description of Artificial Sequence: Synthetic oligonucleotide
  Sense strand starting at position 296 of SEQ ID NO: 1879384
ccugguucuuccuuaagga

SEQ ID NO: 1903239 - RNA, 19 nt, Artificial Sequence
  Description of Artificial Sequence: Synthetic oligonucleotide
  Antisense strand to SEQ ID NO: 1903238
uccuuaaggaagaaccagg

SEQ ID NO: 1903240 - RNA, 19 nt, Artificial Sequence
  Description of Artificial Sequence: Synthetic oligonucleotide
  Sense strand starting at position 297 of SEQ ID NO: 1879384
cugguucuuccuuaaggaa

SEQ ID NO: 1903241 - RNA, 19 nt, Artificial Sequence
  Description of Artificial Sequence: Synthetic oligonucleotide
  Antisense strand to SEQ ID NO: 1903240
uuccuuaaggaagaaccag

SEQ ID NO: 1903242 - RNA, 19 nt, Artificial Sequence
  Description of Artificial Sequence: Synthetic oligonucleotide
  Sense strand starting at position 310 of SEQ ID NO: 1879384
aaggaaccuuggguuuaau

SEQ ID NO: 1903243 - RNA, 19 nt, Artificial Sequence
  Description of Artificial Sequence: Synthetic oligonucleotide
  Antisense strand to SEQ ID NO: 1903242
auuaaacccaagguuccuu

SEQ ID NO: 1903244 - RNA, 19 nt, Artificial Sequence
  Description of Artificial Sequence: Synthetic oligonucleotide
  Sense strand starting at position 889 of SEQ ID NO: 1879384
cgauauccgcgauccaugu

SEQ ID NO: 1903245 - RNA, 19 nt, Artificial Sequence
  Description of Artificial Sequence: Synthetic oligonucleotide
  Antisense strand to SEQ ID NO: 1903244
acauggaucgcggauaucg

SEQ ID NO: 1903246 - RNA, 19 nt, Artificial Sequence
  Description of Artificial Sequence: Synthetic oligonucleotide
  Sense strand starting at position 932 of SEQ ID NO: 1879384
acaugacuucugcauuguu

SEQ ID NO: 1903247 - RNA, 19 nt, Artificial Sequence
  Description of Artificial Sequence: Synthetic oligonucleotide
  Antisense strand to SEQ ID NO: 1903246
aacaaugcagaagucaugu

SEQ ID NO: 1903248 - RNA, 19 nt, Artificial Sequence
  Description of Artificial Sequence: Synthetic oligonucleotide
  Sense strand starting at position 955 of SEQ ID NO: 1879384
aacugacauucugugugaa

SEQ ID NO: 1903249 - RNA, 19 nt, Artificial Sequence
  Description of Artificial Sequence: Synthetic oligonucleotide
  Antisense strand to SEQ ID NO: 1903248
uucacacagaaugucaguu

SEQ ID NO: 1903250 - RNA, 19 nt, Artificial Sequence
  Description of Artificial Sequence: Synthetic oligonucleotide
  Sense strand starting at position 956 of SEQ ID NO: 1879384
acugacauucugugugaau

SEQ ID NO: 1903251 - RNA, 19 nt, Artificial Sequence
  Description of Artificial Sequence: Synthetic oligonucleotide
  Antisense strand to SEQ ID NO: 1903250
auucacacagaaugucagu

SEQ ID NO: 1903252 - RNA, 19 nt, Artificial Sequence
  Description of Artificial Sequence: Synthetic oligonucleotide
  Sense strand starting at position 957 of SEQ ID NO: 1879384
cugacauucugugugaaua

SEQ ID NO: 1903253 - RNA, 19 nt, Artificial Sequence
  Description of Artificial Sequence: Synthetic oligonucleotide
  Antisense strand to SEQ ID NO: 1903252
uauucacacagaaugucag

SEQ ID NO: 1903254 - RNA, 19 nt, Artificial Sequence
  Description of Artificial Sequence: Synthetic oligonucleotide
  Sense strand starting at position 958 of SEQ ID NO: 1879384
ugacauucugugugaauaa

SEQ ID NO: 1903255 - RNA, 19 nt, Artificial Sequence
  Description of Artificial Sequence: Synthetic oligonucleotide
  Antisense strand to SEQ ID NO: 1903254
uuauucacacagaauguca

SEQ ID NO: 1903256 - RNA, 19 nt, Artificial Sequence
  Description of Artificial Sequence: Synthetic oligonucleotide
  Sense strand starting at position 971 of SEQ ID NO: 1879384
gaauaaagcguguaucaca

SEQ ID NO: 1903257 - RNA, 19 nt, Artificial Sequence
  Description of Artificial Sequence: Synthetic oligonucleotide
  Antisense strand to SEQ ID NO: 1903256
ugugauacacgcuuuauuc

SEQ ID NO: 1903258 - RNA, 19 nt, Artificial Sequence
  Description of Artificial Sequence: Synthetic oligonucleotide
  Sense strand starting at position 1164 of SEQ ID NO: 1879384
cugcacucacgcuaaauga

SEQ ID NO: 1903259 - RNA, 19 nt, Artificial Sequence
  Description of Artificial Sequence: Synthetic oligonucleotide
  Antisense strand to SEQ ID NO: 1903258
ucauuuagcgugagugcag

SEQ ID NO: 1903260 - RNA, 19 nt, Artificial Sequence
  Description of Artificial Sequence: Synthetic oligonucleotide
  Sense strand starting at position 1233 of SEQ ID NO: 1879384
uucugagucaugcagaagu

SEQ ID NO: 1903261 - RNA, 19 nt, Artificial Sequence
  Description of Artificial Sequence: Synthetic oligonucleotide
  Antisense strand to SEQ ID NO: 1903260
acuucugcaugacucagaa

SEQ ID NO: 1903262 - RNA, 19 nt, Artificial Sequence
  Description of Artificial Sequence: Synthetic oligonucleotide
  Sense strand starting at position 1235 of SEQ ID NO: 1879384
cugagucaugcagaaguag

SEQ ID NO: 1903263 - RNA, 19 nt, Artificial Sequence
  Description of Artificial Sequence: Synthetic oligonucleotide
  Antisense strand to SEQ ID NO: 1903262
cuacuucugcaugacucag

SEQ ID NO: 1903264 - RNA, 19 nt, Artificial Sequence
  Description of Artificial Sequence: Synthetic oligonucleotide
  Sense strand starting at position 1414 of SEQ ID NO: 1879384
cuccaagcuccagauaugu

SEQ ID NO: 1903265 - RNA, 19 nt, Artificial Sequence
  Description of Artificial Sequence: Synthetic oligonucleotide
  Antisense strand to SEQ ID NO: 1903264
acauaucuggagcuuggag

SEQ ID NO: 1903266 - RNA, 19 nt, Artificial Sequence
  Description of Artificial Sequence: Synthetic oligonucleotide
  Sense strand starting at position 1424 of SEQ ID NO: 1879384
cagauaugucaaggauucu

SEQ ID NO: 1903267 - RNA, 19 nt, Artificial Sequence
  Description of Artificial Sequence: Synthetic oligonucleotide
  Antisense strand to SEQ ID NO: 1903266
agaauccuugacauaucug

SEQ ID NO: 1903268 - RNA, 19 nt, Artificial Sequence
  Description of Artificial Sequence: Synthetic oligonucleotide
  Sense strand starting at position 1430 of SEQ ID NO: 1879384
ugucaaggauucuuaagca

SEQ ID NO: 1903269 - RNA, 19 nt, Artificial Sequence
  Description of Artificial Sequence: Synthetic oligonucleotide
  Antisense strand to SEQ ID NO: 1903268
ugcuuaagaauccuugaca

SEQ ID NO: 1903270 - RNA, 19 nt, Artificial Sequence
  Description of Artificial Sequence: Synthetic oligonucleotide
  Sense strand starting at position 1458 of SEQ ID NO: 1879384
caaucugucccuugaggaa

SEQ ID NO: 1903271 - RNA, 19 nt, Artificial Sequence
  Description of Artificial Sequence: Synthetic oligonucleotide
  Antisense strand to SEQ ID NO: 1903270
uuccucaagggacagauug

SEQ ID NO: 1903272 - RNA, 19 nt, Artificial Sequence
  Description of Artificial Sequence: Synthetic oligonucleotide
  Sense strand starting at position 1506 of SEQ ID NO: 1879384
agcugcgauguggagaauu

SEQ ID NO: 1903273 - RNA, 19 nt, Artificial Sequence
  Description of Artificial Sequence: Synthetic oligonucleotide
  Antisense strand to SEQ ID NO: 1903272
aauucuccacaucgcagcu

SEQ ID NO: 1903274 - RNA, 19 nt, Artificial Sequence
  Description of Artificial Sequence: Synthetic oligonucleotide
  Sense strand starting at position 1516 of SEQ ID NO: 1879384
uggagaauucgauguccga

SEQ ID NO: 1903275 - RNA, 19 nt, Artificial Sequence
  Description of Artificial Sequence: Synthetic oligonucleotide
  Antisense strand to SEQ ID NO: 1903274
ucggacaucgaauucucca

SEQ ID NO: 1903276 - RNA, 19 nt, Artificial Sequence
  Description of Artificial Sequence: Synthetic oligonucleotide
  Sense strand starting at position 1546 of SEQ ID NO: 1879384
ggaggagugggucgaguua

SEQ ID NO: 1903277 - RNA, 19 nt, Artificial Sequence
  Description of Artificial Sequence: Synthetic oligonucleotide
  Antisense strand to SEQ ID NO: 1903276
uaacucgacccacuccucc

SEQ ID NO: 1903278 - RNA, 19 nt, Artificial Sequence
  Description of Artificial Sequence: Synthetic oligonucleotide
  Sense strand starting at position 2172 of SEQ ID NO: 1879384
ugauuaaagaaucgaugug

SEQ ID NO: 1903279 - RNA, 19 nt, Artificial Sequence
  Description of Artificial Sequence: Synthetic oligonucleotide
  Antisense strand to SEQ ID NO: 1903278
cacaucgauucuuuaauca

SEQ ID NO: 1903280 - RNA, 19 nt, Artificial Sequence
  Description of Artificial Sequence: Synthetic oligonucleotide
  Sense strand starting at position 2493 of SEQ ID NO: 1879384
uuuguaaagcgggacagau

SEQ ID NO: 1903281 - RNA, 19 nt, Artificial Sequence
  Description of Artificial Sequence: Synthetic oligonucleotide
  Antisense strand to SEQ ID NO: 1903280
aucugucccgcuuuacaaa

SEQ ID NO: 1903282 - RNA, 19 nt, Artificial Sequence
  Description of Artificial Sequence: Synthetic oligonucleotide
  Sense strand starting at position 2522 of SEQ ID NO: 1879384
agcaucauauuguuugaca

SEQ ID NO: 1903283 - RNA, 19 nt, Artificial Sequence
  Description of Artificial Sequence: Synthetic oligonucleotide
  Antisense strand to SEQ ID NO: 1903282
ugucaaacaauaugaugcu

SEQ ID NO: 1903284 - RNA, 19 nt, Artificial Sequence
  Description of Artificial Sequence: Synthetic oligonucleotide
  Sense strand starting at position 2523 of SEQ ID NO: 1879384
gcaucauauuguuugacag

SEQ ID NO: 1903285 - RNA, 19 nt, Artificial Sequence
  Description of Artificial Sequence: Synthetic oligonucleotide
  Antisense strand to SEQ ID NO: 1903284
cugucaaacaauaugaugc

SEQ ID NO: 1903286 - RNA, 19 nt, Artificial Sequence
  Description of Artificial Sequence: Synthetic oligonucleotide
  Sense strand starting at position 2542 of SEQ ID NO: 1879384
aaugaucucgcaugaugaa

SEQ ID NO: 1903287 - RNA, 19 nt, Artificial Sequence
  Description of Artificial Sequence: Synthetic oligonucleotide
  Antisense strand to SEQ ID NO: 1903286
uucaucaugcgagaucauu

SEQ ID NO: 1903288 - RNA, 19 nt, Artificial Sequence
  Description of Artificial Sequence: Synthetic oligonucleotide
  Sense strand starting at position 2689 of SEQ ID NO: 1879384
ucagaaagacuccggcuuu

SEQ ID NO: 1903289 - RNA, 19 nt, Artificial Sequence
  Description of Artificial Sequence: Synthetic oligonucleotide
  Antisense strand to SEQ ID NO: 1903288
aaagccggagucuuucuga

SEQ ID NO: 1903290 - RNA, 19 nt, Artificial Sequence
  Description of Artificial Sequence: Synthetic oligonucleotide
  Sense strand starting at position 2749 of SEQ ID NO: 1879384
uuucuccucguggaugaaa

SEQ ID NO: 1903291 - RNA, 19 nt, Artificial Sequence
  Description of Artificial Sequence: Synthetic oligonucleotide
  Antisense strand to SEQ ID NO: 1903290
uuucauccacgaggagaaa

SEQ ID NO: 1903292 - RNA, 19 nt, Artificial Sequence
  Description of Artificial Sequence: Synthetic oligonucleotide
  Sense strand starting at position 2815 of SEQ ID NO: 1879384
ugcugauaacuccaugcua

SEQ ID NO: 1903293 - RNA, 19 nt, Artificial Sequence
  Description of Artificial Sequence: Synthetic oligonucleotide
  Antisense strand to SEQ ID NO: 1903292
uagcauggaguuaucagca

SEQ ID NO: 1903294 - RNA, 19 nt, Artificial Sequence
  Description of Artificial Sequence: Synthetic oligonucleotide
  Sense strand starting at position 2962 of SEQ ID NO: 1879384
cagaauggauguuuauaua

SEQ ID NO: 1903295 - RNA, 19 nt, Artificial Sequence
  Description of Artificial Sequence: Synthetic oligonucleotide
  Antisense strand to SEQ ID NO: 1903294
uauauaaacauccauucug

SEQ ID NO: 1903296 - RNA, 19 nt, Artificial Sequence
  Description of Artificial Sequence: Synthetic oligonucleotide
  Sense strand starting at position 3043 of SEQ ID NO: 1879384
uuuggucucucgccauuua

SEQ ID NO: 1903297 - RNA, 19 nt, Artificial Sequence
  Description of Artificial Sequence: Synthetic oligonucleotide
  Antisense strand to SEQ ID NO: 1903296
uaaauggcgagagaccaaa

SEQ ID NO: 1903298 - RNA, 19 nt, Artificial Sequence
  Description of Artificial Sequence: Synthetic oligonucleotide
  Sense strand starting at position 3198 of SEQ ID NO: 1879384
gguagugguggguaagaga

SEQ ID NO: 1903299 - RNA, 19 nt, Artificial Sequence
  Description of Artificial Sequence: Synthetic oligonucleotide
  Antisense strand to SEQ ID NO: 1903298
ucucuuacccaccacuacc

SEQ ID NO: 1903300 - RNA, 19 nt, Artificial Sequence
  Description of Artificial Sequence: Synthetic oligonucleotide
  Sense strand starting at position 3243 of SEQ ID NO: 1879384
ggaaguaaucugggugggu

SEQ ID NO: 1903301 - RNA, 19 nt, Artificial Sequence
  Description of Artificial Sequence: Synthetic oligonucleotide
  Antisense strand to SEQ ID NO: 1903300
acccacccagauuacuucc

SEQ ID NO: 1903302 - RNA, 19 nt, Artificial Sequence
  Description of Artificial Sequence: Synthetic oligonucleotide
  Sense strand starting at position 3244 of SEQ ID NO: 1879384
gaaguaaucuggguggguu

SEQ ID NO: 1903303 - RNA, 19 nt, Artificial Sequence
  Description of Artificial Sequence: Synthetic oligonucleotide
  Antisense strand to SEQ ID NO: 1903302
aacccacccagauuacuuc

SEQ ID NO: 1903304 - RNA, 19 nt, Artificial Sequence
  Description of Artificial Sequence: Synthetic oligonucleotide
  Sense strand starting at position 3318 of SEQ ID NO: 1879384
gacaaagaggccgguaaua

SEQ ID NO: 1903305 - RNA, 19 nt, Artificial Sequence
  Description of Artificial Sequence: Synthetic oligonucleotide
  Antisense strand to SEQ ID NO: 1903304
uauuaccggccucuuuguc

SEQ ID NO: 1903306 - RNA, 19 nt, Artificial Sequence
  Description of Artificial Sequence: Synthetic oligonucleotide
  Sense strand starting at position 3320 of SEQ ID NO: 1879384
caaagaggccgguaauagu

SEQ ID NO: 1903307 - RNA, 19 nt, Artificial Sequence
  Description of Artificial Sequence: Synthetic oligonucleotide
  Antisense strand to SEQ ID NO: 1903306
acuauuaccggccucuuug

SEQ ID NO: 1903308 - RNA, 19 nt, Artificial Sequence
  Description of Artificial Sequence: Synthetic oligonucleotide
  Sense strand starting at position 3328 of SEQ ID NO: 1879384
ccgguaauaguuuaacaaa

SEQ ID NO: 1903309 - RNA, 19 nt, Artificial Sequence
  Description of Artificial Sequence: Synthetic oligonucleotide
  Antisense strand to SEQ ID NO: 1903308
uuuguuaaacuauuaccgg

SEQ ID NO: 1903310 - RNA, 19 nt, Artificial Sequence
  Description of Artificial Sequence: Synthetic oligonucleotide
  Sense strand starting at position 3463 of SEQ ID NO: 1879384
aagaguaacuacucuuggu

SEQ ID NO: 1903311 - RNA, 19 nt, Artificial Sequence
  Description of Artificial Sequence: Synthetic oligonucleotide
  Antisense strand to SEQ ID NO: 1903310
accaagaguaguuacucuu

SEQ ID NO: 1903312 - RNA, 19 nt, Artificial Sequence
  Description of Artificial Sequence: Synthetic oligonucleotide
  Sense strand starting at position 92 of SEQ ID NO: 1879385
acccaauccucuguugaug

SEQ ID NO: 1903313 - RNA, 19 nt, Artificial Sequence
  Description of Artificial Sequence: Synthetic oligonucleotide
  Antisense strand to SEQ ID NO: 1903312
caucaacagaggauugggu

SEQ ID NO: 1903314 - RNA, 19 nt, Artificial Sequence
  Description of Artificial Sequence: Synthetic oligonucleotide
  Sense strand starting at position 174 of SEQ ID NO: 1879385
ugucucuguaucgagaaca

SEQ ID NO: 1903315 - RNA, 19 nt, Artificial Sequence
  Description of Artificial Sequence: Synthetic oligonucleotide
  Antisense strand to SEQ ID NO: 1903314
uguucucgauacagagaca

SEQ ID NO: 1903316 - RNA, 19 nt, Artificial Sequence
  Description of Artificial Sequence: Synthetic oligonucleotide
  Sense strand starting at position 516 of SEQ ID NO: 1879385
ccucaauagugaguacaga

SEQ ID NO: 1903317 - RNA, 19 nt, Artificial Sequence
  Description of Artificial Sequence: Synthetic oligonucleotide
  Antisense strand to SEQ ID NO: 1903316
ucuguacucacuauugagg

SEQ ID NO: 1903318 - RNA, 19 nt, Artificial Sequence
  Description of Artificial Sequence: Synthetic oligonucleotide
  Sense strand starting at position 661 of SEQ ID NO: 1879385
auuuguauucugugcaacu

SEQ ID NO: 1903319 - RNA, 19 nt, Artificial Sequence
  Description of Artificial Sequence: Synthetic oligonucleotide
  Antisense strand to SEQ ID NO: 1903318
aguugcacagaauacaaau

SEQ ID NO: 1903320 - RNA, 19 nt, Artificial Sequence
  Description of Artificial Sequence: Synthetic oligonucleotide
  Sense strand starting at position 672 of SEQ ID NO: 1879385
gugcaacugagaugggauu

SEQ ID NO: 1903321 - RNA, 19 nt, Artificial Sequence
  Description of Artificial Sequence: Synthetic oligonucleotide
  Antisense strand to SEQ ID NO: 1903320
aaucccaucucaguugcac

SEQ ID NO: 1903322 - RNA, 19 nt, Artificial Sequence
  Description of Artificial Sequence: Synthetic oligonucleotide
  Sense strand starting at position 812 of SEQ ID NO: 1879385
cccaaauguuugcugagaa

SEQ ID NO: 1903323 - RNA, 19 nt, Artificial Sequence
  Description of Artificial Sequence: Synthetic oligonucleotide
  Antisense strand to SEQ ID NO: 1903322
uucucagcaaacauuuggg

SEQ ID NO: 1903324 - RNA, 19 nt, Artificial Sequence
  Description of Artificial Sequence: Synthetic oligonucleotide
  Sense strand starting at position 819 of SEQ ID NO: 1879385
guuugcugagaauagugau

SEQ ID NO: 1903325 - RNA, 19 nt, Artificial Sequence
  Description of Artificial Sequence: Synthetic oligonucleotide
  Antisense strand to SEQ ID NO: 1903324
aucacuauucucagcaaac

SEQ ID NO: 1903326 - RNA, 19 nt, Artificial Sequence
  Description of Artificial Sequence: Synthetic oligonucleotide
  Sense strand starting at position 832 of SEQ ID NO: 1879385
agugauaaccauugucaua

SEQ ID NO: 1903327 - RNA, 19 nt, Artificial Sequence
  Description of Artificial Sequence: Synthetic oligonucleotide
  Antisense strand to SEQ ID NO: 1903326
uaugacaaugguuaucacu

SEQ ID NO: 1903328 - RNA, 19 nt, Artificial Sequence
  Description of Artificial Sequence: Synthetic oligonucleotide
  Sense strand starting at position 1108 of SEQ ID NO: 1879385
cucaguauuugggaaagag

SEQ ID NO: 1903329 - RNA, 19 nt, Artificial Sequence
  Description of Artificial Sequence: Synthetic oligonucleotide
  Antisense strand to SEQ ID NO: 1903328
cucuuucccaaauacugag

SEQ ID NO: 1903330 - RNA, 19 nt, Artificial Sequence
  Description of Artificial Sequence: Synthetic oligonucleotide
  Sense strand starting at position 1154 of SEQ ID NO: 1879385
uugaguaagcuacacaaua

SEQ ID NO: 1903331 - RNA, 19 nt, Artificial Sequence
  Description of Artificial Sequence: Synthetic oligonucleotide
  Antisense strand to SEQ ID NO: 1903330
uauuguguagcuuacucaa

SEQ ID NO: 1903332 - RNA, 19 nt, Artificial Sequence
  Description of Artificial Sequence: Synthetic oligonucleotide
  Sense strand starting at position 1203 of SEQ ID NO: 1879385
cuauguugccuugagcaaa

SEQ ID NO: 1903333 - RNA, 19 nt, Artificial Sequence
  Description of Artificial Sequence: Synthetic oligonucleotide
  Antisense strand to SEQ ID NO: 1903332
uuugcucaaggcaacauag

SEQ ID NO: 1903334 - RNA, 19 nt, Artificial Sequence
  Description of Artificial Sequence: Synthetic oligonucleotide
  Sense strand starting at position 1253 of SEQ ID NO: 1879385
augucugccuacuuaagga

SEQ ID NO: 1903335 - RNA, 19 nt, Artificial Sequence
  Description of Artificial Sequence: Synthetic oligonucleotide
  Antisense strand to SEQ ID NO: 1903334
uccuuaaguaggcagacau

SEQ ID NO: 1903336 - RNA, 19 nt, Artificial Sequence
  Description of Artificial Sequence: Synthetic oligonucleotide
  Sense strand starting at position 1332 of SEQ ID NO: 1879385
ggcacucuuaaggguuuga

SEQ ID NO: 1903337 - RNA, 19 nt, Artificial Sequence
  Description of Artificial Sequence: Synthetic oligonucleotide
  Antisense strand to SEQ ID NO: 1903336
ucaaacccuuaagagugcc

SEQ ID NO: 1903338 - RNA, 19 nt, Artificial Sequence
  Description of Artificial Sequence: Synthetic oligonucleotide
  Sense strand starting at position 1336 of SEQ ID NO: 1879385
cucuuaaggguuugagaag

SEQ ID NO: 1903339 - RNA, 19 nt, Artificial Sequence
  Description of Artificial Sequence: Synthetic oligonucleotide
  Antisense strand to SEQ ID NO: 1903338
cuucucaaacccuuaagag

SEQ ID NO: 1903340 - RNA, 19 nt, Artificial Sequence
  Description of Artificial Sequence: Synthetic oligonucleotide
  Sense strand starting at position 1373 of SEQ ID NO: 1879385
uggaaugguccuugguaca

SEQ ID NO: 1903341 - RNA, 19 nt, Artificial Sequence
  Description of Artificial Sequence: Synthetic oligonucleotide
  Antisense strand to SEQ ID NO: 1903340
uguaccaaggaccauucca

SEQ ID NO: 1903342 - RNA, 19 nt, Artificial Sequence
  Description of Artificial Sequence: Synthetic oligonucleotide
  Sense strand starting at position 1425 of SEQ ID NO: 1879385
aggacauaauuacaaagaa

SEQ ID NO: 1903343 - RNA, 19 nt, Artificial Sequence
  Description of Artificial Sequence: Synthetic oligonucleotide
  Antisense strand to SEQ ID NO: 1903342
uucuuuguaauuauguccu

SEQ ID NO: 1903344 - RNA, 19 nt, Artificial Sequence
  Description of Artificial Sequence: Synthetic oligonucleotide
  Sense strand starting at position 1818 of SEQ ID NO: 1879385
aacggucacuuacuggaaa

SEQ ID NO: 1903345 - RNA, 19 nt, Artificial Sequence
  Description of Artificial Sequence: Synthetic oligonucleotide
  Antisense strand to SEQ ID NO: 1903344
uuuccaguaagugaccguu

SEQ ID NO: 1903346 - RNA, 19 nt, Artificial Sequence
  Description of Artificial Sequence: Synthetic oligonucleotide
  Sense strand starting at position 1820 of SEQ ID NO: 1879385
cggucacuuacuggaaacu

SEQ ID NO: 1903347 - RNA, 19 nt, Artificial Sequence
  Description of Artificial Sequence: Synthetic oligonucleotide
  Antisense strand to SEQ ID NO: 1903346
aguuuccaguaagugaccg

SEQ ID NO: 1903348 - RNA, 19 nt, Artificial Sequence
  Description of Artificial Sequence: Synthetic oligonucleotide
  Sense strand starting at position 2217 of SEQ ID NO: 1879385
ggcaaagauuuccagggau

SEQ ID NO: 1903349 - RNA, 19 nt, Artificial Sequence
  Description of Artificial Sequence: Synthetic oligonucleotide
  Antisense strand to SEQ ID NO: 1903348
aucccuggaaaucuuugcc

SEQ ID NO: 1903350 - RNA, 19 nt, Artificial Sequence
  Description of Artificial Sequence: Synthetic oligonucleotide
  Sense strand starting at position 2232 of SEQ ID NO: 1879385
ggauuuguuugggauucca

SEQ ID NO: 1903351 - RNA, 19 nt, Artificial Sequence
  Description of Artificial Sequence: Synthetic oligonucleotide
  Antisense strand to SEQ ID NO: 1903350
uggaaucccaaacaaaucc

SEQ ID NO: 1903352 - RNA, 19 nt, Artificial Sequence
  Description of Artificial Sequence: Synthetic oligonucleotide
  Sense strand starting at position 2255 of SEQ ID NO: 1879385
uuuguagauuugccgagau

SEQ ID NO: 1903353 - RNA, 19 nt, Artificial Sequence
  Description of Artificial Sequence: Synthetic oligonucleotide
  Antisense strand to SEQ ID NO: 1903352
aucucggcaaaucuacaaa

SEQ ID NO: 1903354 - RNA, 19 nt, Artificial Sequence
  Description of Artificial Sequence: Synthetic oligonucleotide
  Sense strand starting at position 2378 of SEQ ID NO: 1879385
ugguguugugcgcauuuaa

SEQ ID NO: 1903355 - RNA, 19 nt, Artificial Sequence
  Description of Artificial Sequence: Synthetic oligonucleotide
  Antisense strand to SEQ ID NO: 1903354
uuaaaugcgcacaacacca

SEQ ID NO: 1903356 - RNA, 19 nt, Artificial Sequence
  Description of Artificial Sequence: Synthetic oligonucleotide
  Sense strand starting at position 2459 of SEQ ID NO: 1879385
aguauccuuguauaagaau

SEQ ID NO: 1903357 - RNA, 19 nt, Artificial Sequence
  Description of Artificial Sequence: Synthetic oligonucleotide
  Antisense strand to SEQ ID NO: 1903356
auucuuauacaaggauacu

SEQ ID NO: 1903358 - RNA, 19 nt, Artificial Sequence
  Description of Artificial Sequence: Synthetic oligonucleotide
  Sense strand starting at position 2465 of SEQ ID NO: 1879385
cuuguauaagaauggcuuu

SEQ ID NO: 1903359 - RNA, 19 nt, Artificial Sequence
  Description of Artificial Sequence: Synthetic oligonucleotide
  Antisense strand to SEQ ID NO: 1903358
aaagccauucuuauacaag

SEQ ID NO: 1903360 - RNA, 19 nt, Artificial Sequence
  Description of Artificial Sequence: Synthetic oligonucleotide
  Sense strand starting at position 2482 of SEQ ID NO: 1879385
uuugauuguugaucuaucu

SEQ ID NO: 1903361 - RNA, 19 nt, Artificial Sequence
  Description of Artificial Sequence: Synthetic oligonucleotide
  Antisense strand to SEQ ID NO: 1903360
agauagaucaacaaucaaa

SEQ ID NO: 1903362 - RNA, 19 nt, Artificial Sequence
  Description of Artificial Sequence: Synthetic oligonucleotide
  Sense strand starting at position 2540 of SEQ ID NO: 1879385
ggcaguccucuuugauuug

SEQ ID NO: 1903363 - RNA, 19 nt, Artificial Sequence
  Description of Artificial Sequence: Synthetic oligonucleotide
  Antisense strand to SEQ ID NO: 1903362
caaaucaaagaggacugcc

SEQ ID NO: 1903364 - RNA, 19 nt, Artificial Sequence
  Description of Artificial Sequence: Synthetic oligonucleotide
  Sense strand starting at position 2599 of SEQ ID NO: 1879385
ccaagaauccagugcaaca

SEQ ID NO: 1903365 - RNA, 19 nt, Artificial Sequence
  Description of Artificial Sequence: Synthetic oligonucleotide
  Antisense strand to SEQ ID NO: 1903364
uguugcacuggauucuugg

SEQ ID NO: 1903366 - RNA, 19 nt, Artificial Sequence
  Description of Artificial Sequence: Synthetic oligonucleotide
  Sense strand starting at position 2686 of SEQ ID NO: 1879385
aagauaucuucugcagguu

SEQ ID NO: 1903367 - RNA, 19 nt, Artificial Sequence
  Description of Artificial Sequence: Synthetic oligonucleotide
  Antisense strand to SEQ ID NO: 1903366
aaccugcagaagauaucuu

SEQ ID NO: 1903368 - RNA, 19 nt, Artificial Sequence
  Description of Artificial Sequence: Synthetic oligonucleotide
  Sense strand starting at position 2687 of SEQ ID NO: 1879385
agauaucuucugcagguuu

SEQ ID NO: 1903369 - RNA, 19 nt, Artificial Sequence
  Description of Artificial Sequence: Synthetic oligonucleotide
  Antisense strand to SEQ ID NO: 1903368
aaaccugcagaagauaucu

SEQ ID NO: 1903370 - RNA, 19 nt, Artificial Sequence
  Description of Artificial Sequence: Synthetic oligonucleotide
  Sense strand starting at position 2780 of SEQ ID NO: 1879385
ucagcaaaugacuaaguuu

SEQ ID NO: 1903371 - RNA, 19 nt, Artificial Sequence
  Description of Artificial Sequence: Synthetic oligonucleotide
  Antisense strand to SEQ ID NO: 1903370
aaacuuagucauuugcuga

SEQ ID NO: 1903372 - RNA, 19 nt, Artificial Sequence
  Description of Artificial Sequence: Synthetic oligonucleotide
  Sense strand starting at position 2813 of SEQ ID NO: 1879385
aguaucagucuuugagaug

SEQ ID NO: 1903373 - RNA, 19 nt, Artificial Sequence
  Description of Artificial Sequence: Synthetic oligonucleotide
  Antisense strand to SEQ ID NO: 1903372
caucucaaagacugauacu

SEQ ID NO: 1903374 - RNA, 19 nt, Artificial Sequence
  Description of Artificial Sequence: Synthetic oligonucleotide
  Sense strand starting at position 2819 of SEQ ID NO: 1879385
agucuuugagaugauugua

SEQ ID NO: 1903375 - RNA, 19 nt, Artificial Sequence
  Description of Artificial Sequence: Synthetic oligonucleotide
  Antisense strand to SEQ ID NO: 1903374
uacaaucaucucaaagacu

SEQ ID NO: 1903376 - RNA, 19 nt, Artificial Sequence
  Description of Artificial Sequence: Synthetic oligonucleotide
  Sense strand starting at position 2942 of SEQ ID NO: 1879385
ggaugcaauuugcugugua

SEQ ID NO: 1903377 - RNA, 19 nt, Artificial Sequence
  Description of Artificial Sequence: Synthetic oligonucleotide
  Antisense strand to SEQ ID NO: 1903376
uacacagcaaauugcaucc

SEQ ID NO: 1903378 - RNA, 19 nt, Artificial Sequence
  Description of Artificial Sequence: Synthetic oligonucleotide
  Sense strand starting at position 2950 of SEQ ID NO: 1879385
uuugcuguguaguuaauuu

SEQ ID NO: 1903379 - RNA, 19 nt, Artificial Sequence
  Description of Artificial Sequence: Synthetic oligonucleotide
  Antisense strand to SEQ ID NO: 1903378
aaauuaacuacacagcaaa

SEQ ID NO: 1903380 - RNA, 19 nt, Artificial Sequence
  Description of Artificial Sequence: Synthetic oligonucleotide
  Sense strand starting at position 2992 of SEQ ID NO: 1879385
guuagauuggcuuaugguu

SEQ ID NO: 1903381 - RNA, 19 nt, Artificial Sequence
  Description of Artificial Sequence: Synthetic oligonucleotide
  Antisense strand to SEQ ID NO: 1903380
aaccauaagccaaucuaac

SEQ ID NO: 1903382 - RNA, 19 nt, Artificial Sequence
  Description of Artificial Sequence: Synthetic oligonucleotide
  Sense strand starting at position 3077 of SEQ ID NO: 1879385
uuuguaugaccuggaauag

SEQ ID NO: 1903383 - RNA, 19 nt, Artificial Sequence
  Description of Artificial Sequence: Synthetic oligonucleotide
  Antisense strand to SEQ ID NO: 1903382
cuauuccaggucauacaaa

SEQ ID NO: 1903384 - RNA, 19 nt, Artificial Sequence
  Description of Artificial Sequence: Synthetic oligonucleotide
  Sense strand starting at position 3094 of SEQ ID NO: 1879385
agacauagcaugugugaau

SEQ ID NO: 1903385 - RNA, 19 nt, Artificial Sequence
  Description of Artificial Sequence: Synthetic oligonucleotide
  Antisense strand to SEQ ID NO: 1903384
auucacacaugcuaugucu

SEQ ID NO: 1903386 - RNA, 19 nt, Artificial Sequence
  Description of Artificial Sequence: Synthetic oligonucleotide
  Sense strand starting at position 3095 of SEQ ID NO: 1879385
gacauagcaugugugaaug

SEQ ID NO: 1903387 - RNA, 19 nt, Artificial Sequence
  Description of Artificial Sequence: Synthetic oligonucleotide
  Antisense strand to SEQ ID NO: 1903386
cauucacacaugcuauguc

SEQ ID NO: 1903388 - RNA, 19 nt, Artificial Sequence
  Description of Artificial Sequence: Synthetic oligonucleotide
  Sense strand starting at position 3101 of SEQ ID NO: 1879385
gcaugugugaaugauacau

SEQ ID NO: 1903389 - RNA, 19 nt, Artificial Sequence
  Description of Artificial Sequence: Synthetic oligonucleotide
  Antisense strand to SEQ ID NO: 1903388
auguaucauucacacaugc

SEQ ID NO: 1903390 - RNA, 19 nt, Artificial Sequence
  Description of Artificial Sequence: Synthetic oligonucleotide
  Sense strand starting at position 3207 of SEQ ID NO: 1879385
cguuauugauaccuagaau

SEQ ID NO: 1903391 - RNA, 19 nt, Artificial Sequence
  Description of Artificial Sequence: Synthetic oligonucleotide
  Antisense strand to SEQ ID NO: 1903390
auucuagguaucaauaacg

SEQ ID NO: 1903392 - RNA, 19 nt, Artificial Sequence
  Description of Artificial Sequence: Synthetic oligonucleotide
  Sense strand starting at position 20 of SEQ ID NO: 1879386
ucaagaaauuuggacuuau

SEQ ID NO: 1903393 - RNA, 19 nt, Artificial Sequence
  Description of Artificial Sequence: Synthetic oligonucleotide
  Antisense strand to SEQ ID NO: 1903392
auaaguccaaauuucuuga

SEQ ID NO: 1903394 - RNA, 19 nt, Artificial Sequence
  Description of Artificial Sequence: Synthetic oligonucleotide
  Sense strand starting at position 30 of SEQ ID NO: 1879386
uggacuuauuguuugugua

SEQ ID NO: 1903395 - RNA, 19 nt, Artificial Sequence
  Description of Artificial Sequence: Synthetic oligonucleotide
  Antisense strand to SEQ ID NO: 1903394
uacacaaacaauaagucca

SEQ ID NO: 1903396 - RNA, 19 nt, Artificial Sequence
  Description of Artificial Sequence: Synthetic oligonucleotide
  Sense strand starting at position 31 of SEQ ID NO: 1879386
ggacuuauuguuuguguau

SEQ ID NO: 1903397 - RNA, 19 nt, Artificial Sequence
  Description of Artificial Sequence: Synthetic oligonucleotide
  Antisense strand to SEQ ID NO: 1903396
auacacaaacaauaagucc

SEQ ID NO: 1903398 - RNA, 19 nt, Artificial Sequence
  Description of Artificial Sequence: Synthetic oligonucleotide
  Sense strand starting at position 32 of SEQ ID NO: 1879386
gacuuauuguuuguguaug

SEQ ID NO: 1903399 - RNA, 19 nt, Artificial Sequence
  Description of Artificial Sequence: Synthetic oligonucleotide
  Antisense strand to SEQ ID NO: 1903398
cauacacaaacaauaaguc

SEQ ID NO: 1903400 - RNA, 19 nt, Artificial Sequence
  Description of Artificial Sequence: Synthetic oligonucleotide
  Sense strand starting at position 34 of SEQ ID NO: 1879386
cuuauuguuuguguaugua

SEQ ID NO: 1903401 - RNA, 19 nt, Artificial Sequence
  Description of Artificial Sequence: Synthetic oligonucleotide
  Antisense strand to SEQ ID NO: 1903400
uacauacacaaacaauaag

SEQ ID NO: 1903402 - RNA, 19 nt, Artificial Sequence
  Description of Artificial Sequence: Synthetic oligonucleotide
  Sense strand starting at position 78 of SEQ ID NO: 1879386
guguguaugugucuaguau

SEQ ID NO: 1903403 - RNA, 19 nt, Artificial Sequence
  Description of Artificial Sequence: Synthetic oligonucleotide
  Antisense strand to SEQ ID NO: 1903402
auacuagacacauacacac

SEQ ID NO: 1903404 - RNA, 19 nt, Artificial Sequence
  Description of Artificial Sequence: Synthetic oligonucleotide
  Sense strand starting at position 79 of SEQ ID NO: 1879386
uguguaugugucuaguauu

SEQ ID NO: 1903405 - RNA, 19 nt, Artificial Sequence
  Description of Artificial Sequence: Synthetic oligonucleotide
  Antisense strand to SEQ ID NO: 1903404
aauacuagacacauacaca

SEQ ID NO: 1903406 - RNA, 19 nt, Artificial Sequence
  Description of Artificial Sequence: Synthetic oligonucleotide
  Sense strand starting at position 85 of SEQ ID NO: 1879386
ugugucuaguauuugggau

SEQ ID NO: 1903407 - RNA, 19 nt, Artificial Sequence
  Description of Artificial Sequence: Synthetic oligonucleotide
  Antisense strand to SEQ ID NO: 1903406
aucccaaauacuagacaca

SEQ ID NO: 1903408 - RNA, 19 nt, Artificial Sequence
  Description of Artificial Sequence: Synthetic oligonucleotide
  Sense strand starting at position 89 of SEQ ID NO: 1879386
ucuaguauuugggauggag

SEQ ID NO: 1903409 - RNA, 19 nt, Artificial Sequence
  Description of Artificial Sequence: Synthetic oligonucleotide
  Antisense strand to SEQ ID NO: 1903408
cuccaucccaaauacuaga

SEQ ID NO: 1903410 - RNA, 19 nt, Artificial Sequence
  Description of Artificial Sequence: Synthetic oligonucleotide
  Sense strand starting at position 1989 of SEQ ID NO: 1879386
augagaagugaugguaauu

SEQ ID NO: 1903411 - RNA, 19 nt, Artificial Sequence
  Description of Artificial Sequence: Synthetic oligonucleotide
  Antisense strand to SEQ ID NO: 1903410
aauuaccaucacuucucau

SEQ ID NO: 1903412 - RNA, 19 nt, Artificial Sequence
  Description of Artificial Sequence: Synthetic oligonucleotide
  Sense strand starting at position 1994 of SEQ ID NO: 1879386
aagugaugguaauuggacu

SEQ ID NO: 1903413 - RNA, 19 nt, Artificial Sequence
  Description of Artificial Sequence: Synthetic oligonucleotide
  Antisense strand to SEQ ID NO: 1903412
aguccaauuaccaucacuu

SEQ ID NO: 1903414 - RNA, 19 nt, Artificial Sequence
  Description of Artificial Sequence: Synthetic oligonucleotide
  Sense strand starting at position 1995 of SEQ ID NO: 1879386
agugaugguaauuggacua

SEQ ID NO: 1903415 - RNA, 19 nt, Artificial Sequence
  Description of Artificial Sequence: Synthetic oligonucleotide
  Antisense strand to SEQ ID NO: 1903414
uaguccaauuaccaucacu

SEQ ID NO: 1903416 - RNA, 19 nt, Artificial Sequence
  Description of Artificial Sequence: Synthetic oligonucleotide
  Sense strand starting at position 2129 of SEQ ID NO: 1879386
acucaaguuucuggauuaa

SEQ ID NO: 1903417 - RNA, 19 nt, Artificial Sequence
  Description of Artificial Sequence: Synthetic oligonucleotide
  Antisense strand to SEQ ID NO: 1903416
uuaauccagaaacuugagu

SEQ ID NO: 1903418 - RNA, 19 nt, Artificial Sequence
  Description of Artificial Sequence: Synthetic oligonucleotide
  Sense strand starting at position 2144 of SEQ ID NO: 1879386
uuaagaaaucuauguagca

SEQ ID NO: 1903419 - RNA, 19 nt, Artificial Sequence
  Description of Artificial Sequence: Synthetic oligonucleotide
  Antisense strand to SEQ ID NO: 1903418
ugcuacauagauuucuuaa

SEQ ID NO: 1903420 - RNA, 19 nt, Artificial Sequence
  Description of Artificial Sequence: Synthetic oligonucleotide
  Sense strand starting at position 2213 of SEQ ID NO: 1879386
gccgcuuaucaugauggga

SEQ ID NO: 1903421 - RNA, 19 nt, Artificial Sequence
  Description of Artificial Sequence: Synthetic oligonucleotide
  Antisense strand to SEQ ID NO: 1903420
ucccaucaugauaagcggc

SEQ ID NO: 1903422 - RNA, 19 nt, Artificial Sequence
  Description of Artificial Sequence: Synthetic oligonucleotide
  Sense strand starting at position 2321 of SEQ ID NO: 1879386
cuaaguacacaugguuaga

SEQ ID NO: 1903423 - RNA, 19 nt, Artificial Sequence
  Description of Artificial Sequence: Synthetic oligonucleotide
  Antisense strand to SEQ ID NO: 1903422
ucuaaccauguguacuuag

SEQ ID NO: 1903424 - RNA, 19 nt, Artificial Sequence
  Description of Artificial Sequence: Synthetic oligonucleotide
  Sense strand starting at position 2323 of SEQ ID NO: 1879386
aaguacacaugguuagaua

SEQ ID NO: 1903425 - RNA, 19 nt, Artificial Sequence
  Description of Artificial Sequence: Synthetic oligonucleotide
  Antisense strand to SEQ ID NO: 1903424
uaucuaaccauguguacuu

SEQ ID NO: 1903426 - RNA, 19 nt, Artificial Sequence
  Description of Artificial Sequence: Synthetic oligonucleotide
  Sense strand starting at position 2332 of SEQ ID NO: 1879386
ugguuagauaugugauugu

SEQ ID NO: 1903427 - RNA, 19 nt, Artificial Sequence
  Description of Artificial Sequence: Synthetic oligonucleotide
  Antisense strand to SEQ ID NO: 1903426
acaaucacauaucuaacca

SEQ ID NO: 1903428 - RNA, 19 nt, Artificial Sequence
  Description of Artificial Sequence: Synthetic oligonucleotide
  Sense strand starting at position 2341 of SEQ ID NO: 1879386
augugauuguacccaagcu

SEQ ID NO: 1903429 - RNA, 19 nt, Artificial Sequence
  Description of Artificial Sequence: Synthetic oligonucleotide
  Antisense strand to SEQ ID NO: 1903428
agcuuggguacaaucacau

SEQ ID NO: 1903430 - RNA, 19 nt, Artificial Sequence
  Description of Artificial Sequence: Synthetic oligonucleotide
  Sense strand starting at position 2374 of SEQ ID NO: 1879386
auugaagacagaugugcua

SEQ ID NO: 1903431 - RNA, 19 nt, Artificial Sequence
  Description of Artificial Sequence: Synthetic oligonucleotide
  Antisense strand to SEQ ID NO: 1903430
uagcacaucugucuucaau

SEQ ID NO: 1903432 - RNA, 19 nt, Artificial Sequence
  Description of Artificial Sequence: Synthetic oligonucleotide
  Sense strand starting at position 2381 of SEQ ID NO: 1879386
acagaugugcuaugugugu

SEQ ID NO: 1903433 - RNA, 19 nt, Artificial Sequence
  Description of Artificial Sequence: Synthetic oligonucleotide
  Antisense strand to SEQ ID NO: 1903432
acacacauagcacaucugu

SEQ ID NO: 1903434 - RNA, 19 nt, Artificial Sequence
  Description of Artificial Sequence: Synthetic oligonucleotide
  Sense strand starting at position 2383 of SEQ ID NO: 1879386
agaugugcuauguguguuu

SEQ ID NO: 1903435 - RNA, 19 nt, Artificial Sequence
  Description of Artificial Sequence: Synthetic oligonucleotide
  Antisense strand to SEQ ID NO: 1903434
aaacacacauagcacaucu

SEQ ID NO: 1903436 - RNA, 19 nt, Artificial Sequence
  Description of Artificial Sequence: Synthetic oligonucleotide
  Sense strand starting at position 2386 of SEQ ID NO: 1879386
ugugcuauguguguuuaga

SEQ ID NO: 1903437 - RNA, 19 nt, Artificial Sequence
  Description of Artificial Sequence: Synthetic oligonucleotide
  Antisense strand to SEQ ID NO: 1903436
ucuaaacacacauagcaca

SEQ ID NO: 1903438 - RNA, 19 nt, Artificial Sequence
  Description of Artificial Sequence: Synthetic oligonucleotide
  Sense strand starting at position 2399 of SEQ ID NO: 1879386
uuuagauaaugaggcaauu

SEQ ID NO: 1903439 - RNA, 19 nt, Artificial Sequence
  Description of Artificial Sequence: Synthetic oligonucleotide
  Antisense strand to SEQ ID NO: 1903438
aauugccucauuaucuaaa

SEQ ID NO: 1903440 - RNA, 19 nt, Artificial Sequence
  Description of Artificial Sequence: Synthetic oligonucleotide
  Sense strand starting at position 2502 of SEQ ID NO: 1879386
gaggaagaguuugagaaau

SEQ ID NO: 1903441 - RNA, 19 nt, Artificial Sequence
  Description of Artificial Sequence: Synthetic oligonucleotide
  Antisense strand to SEQ ID NO: 1903440
auuucucaaacucuuccuc

SEQ ID NO: 1903442 - RNA, 19 nt, Artificial Sequence
  Description of Artificial Sequence: Synthetic oligonucleotide
  Sense strand starting at position 2519 of SEQ ID NO: 1879386
augccuuucuuuguaugau

SEQ ID NO: 1903443 - RNA, 19 nt, Artificial Sequence
  Description of Artificial Sequence: Synthetic oligonucleotide
  Antisense strand to SEQ ID NO: 1903442
aucauacaaagaaaggcau

SEQ ID NO: 1903444 - RNA, 19 nt, Artificial Sequence
  Description of Artificial Sequence: Synthetic oligonucleotide
  Sense strand starting at position 2522 of SEQ ID NO: 1879386
ccuuucuuuguaugaugaa

SEQ ID NO: 1903445 - RNA, 19 nt, Artificial Sequence
  Description of Artificial Sequence: Synthetic oligonucleotide
  Antisense strand to SEQ ID NO: 1903444
uucaucauacaaagaaagg

SEQ ID NO: 1903446 - RNA, 19 nt, Artificial Sequence
  Description of Artificial Sequence: Synthetic oligonucleotide
  Sense strand starting at position 2523 of SEQ ID NO: 1879386
cuuucuuuguaugaugaaa

SEQ ID NO: 1903447 - RNA, 19 nt, Artificial Sequence
  Description of Artificial Sequence: Synthetic oligonucleotide
  Antisense strand to SEQ ID NO: 1903446
uuucaucauacaaagaaag

SEQ ID NO: 1903448 - RNA, 19 nt, Artificial Sequence
  Description of Artificial Sequence: Synthetic oligonucleotide
  Sense strand starting at position 2623 of SEQ ID NO: 1879386
cgguaaguauugcucuauc

SEQ ID NO: 1903449 - RNA, 19 nt, Artificial Sequence
  Description of Artificial Sequence: Synthetic oligonucleotide
  Antisense strand to SEQ ID NO: 1903448
gauagagcaauacuuaccg

SEQ ID NO: 1903450 - RNA, 19 nt, Artificial Sequence
  Description of Artificial Sequence: Synthetic oligonucleotide
  Sense strand starting at position 2708 of SEQ ID NO: 1879386
ggcucauaagcauaauaua

SEQ ID NO: 1903451 - RNA, 19 nt, Artificial Sequence
  Description of Artificial Sequence: Synthetic oligonucleotide
  Antisense strand to SEQ ID NO: 1903450
uauauuaugcuuaugagcc

SEQ ID NO: 1903452 - RNA, 19 nt, Artificial Sequence
  Description of Artificial Sequence: Synthetic oligonucleotide
  Sense strand starting at position 2831 of SEQ ID NO: 1879386
aguuguuagucauaaggga

SEQ ID NO: 1903453 - RNA, 19 nt, Artificial Sequence
  Description of Artificial Sequence: Synthetic oligonucleotide
  Antisense strand to SEQ ID NO: 1903452
ucccuuaugacuaacaacu

SEQ ID NO: 1903454 - RNA, 19 nt, Artificial Sequence
  Description of Artificial Sequence: Synthetic oligonucleotide
  Sense strand starting at position 2851 of SEQ ID NO: 1879386
augcaaauuucccugcagu

SEQ ID NO: 1903455 - RNA, 19 nt, Artificial Sequence
  Description of Artificial Sequence: Synthetic oligonucleotide
  Antisense strand to SEQ ID NO: 1903454
acugcagggaaauuugcau

SEQ ID NO: 1903456 - RNA, 19 nt, Artificial Sequence
  Description of Artificial Sequence: Synthetic oligonucleotide
  Sense strand starting at position 2852 of SEQ ID NO: 1879386
ugcaaauuucccugcaguc

SEQ ID NO: 1903457 - RNA, 19 nt, Artificial Sequence
  Description of Artificial Sequence: Synthetic oligonucleotide
  Antisense strand to SEQ ID NO: 1903456
gacugcagggaaauuugca

SEQ ID NO: 1903458 - RNA, 19 nt, Artificial Sequence
  Description of Artificial Sequence: Synthetic oligonucleotide
  Sense strand starting at position 3253 of SEQ ID NO: 1879386
acaagaacuuugguauauu

SEQ ID NO: 1903459 - RNA, 19 nt, Artificial Sequence
  Description of Artificial Sequence: Synthetic oligonucleotide
  Antisense strand to SEQ ID NO: 1903458
aauauaccaaaguucuugu

SEQ ID NO: 1903460 - RNA, 19 nt, Artificial Sequence
  Description of Artificial Sequence: Synthetic oligonucleotide
  Sense strand starting at position 3254 of SEQ ID NO: 1879386
caagaacuuugguauauug

SEQ ID NO: 1903461 - RNA, 19 nt, Artificial Sequence
  Description of Artificial Sequence: Synthetic oligonucleotide
  Antisense strand to SEQ ID NO: 1903460
caauauaccaaaguucuug

SEQ ID NO: 1903462 - RNA, 19 nt, Artificial Sequence
  Description of Artificial Sequence: Synthetic oligonucleotide
  Sense strand starting at position 3256 of SEQ ID NO: 1879386
agaacuuugguauauuguu

SEQ ID NO: 1903463 - RNA, 19 nt, Artificial Sequence
  Description of Artificial Sequence: Synthetic oligonucleotide
  Antisense strand to SEQ ID NO: 1903462
aacaauauaccaaaguucu

SEQ ID NO: 1903464 - RNA, 19 nt, Artificial Sequence
  Description of Artificial Sequence: Synthetic oligonucleotide
  Sense strand starting at position 3264 of SEQ ID NO: 1879386
gguauauuguuuguuggua

SEQ ID NO: 1903465 - RNA, 19 nt, Artificial Sequence
  Description of Artificial Sequence: Synthetic oligonucleotide
  Antisense strand to SEQ ID NO: 1903464
uaccaacaaacaauauacc

SEQ ID NO: 1903466 - RNA, 19 nt, Artificial Sequence
  Description of Artificial Sequence: Synthetic oligonucleotide
  Sense strand starting at position 3268 of SEQ ID NO: 1879386
uauuguuuguugguaggua

SEQ ID NO: 1903467 - RNA, 19 nt, Artificial Sequence
  Description of Artificial Sequence: Synthetic oligonucleotide
  Antisense strand to SEQ ID NO: 1903466
uaccuaccaacaaacaaua

SEQ ID NO: 1903468 - RNA, 19 nt, Artificial Sequence
  Description of Artificial Sequence: Synthetic oligonucleotide
  Sense strand starting at position 3932 of SEQ ID NO: 1879386
acauaugucuacucuauga

SEQ ID NO: 1903469 - RNA, 19 nt, Artificial Sequence
  Description of Artificial Sequence: Synthetic oligonucleotide
  Antisense strand to SEQ ID NO: 1903468
ucauagaguagacauaugu

SEQ ID NO: 1903470 - RNA, 19 nt, Artificial Sequence
  Description of Artificial Sequence: Synthetic oligonucleotide
  Sense strand starting at position 3936 of SEQ ID NO: 1879386
augucuacucuaugaccca

SEQ ID NO: 1903471 - RNA, 19 nt, Artificial Sequence
  Description of Artificial Sequence: Synthetic oligonucleotide
  Antisense strand to SEQ ID NO: 1903470
ugggucauagaguagacau

SEQ ID NO: 1903472 - RNA, 19 nt, Artificial Sequence
  Description of Artificial Sequence: Synthetic oligonucleotide
  Sense strand starting at position 303 of SEQ ID NO: 1879387
cuccuacauuguccagauu

SEQ ID NO: 1903473 - RNA, 19 nt, Artificial Sequence
  Description of Artificial Sequence: Synthetic oligonucleotide
  Antisense strand to SEQ ID NO: 1903472
aaucuggacaauguaggag

SEQ ID NO: 1903474 - RNA, 19 nt, Artificial Sequence
  Description of Artificial Sequence: Synthetic oligonucleotide
  Sense strand starting at position 306 of SEQ ID NO: 1879387
cuacauuguccagauuguu

SEQ ID NO: 1903475 - RNA, 19 nt, Artificial Sequence
  Description of Artificial Sequence: Synthetic oligonucleotide
  Antisense strand to SEQ ID NO: 1903474
aacaaucuggacaauguag

SEQ ID NO: 1903476 - RNA, 19 nt, Artificial Sequence
  Description of Artificial Sequence: Synthetic oligonucleotide
  Sense strand starting at position 314 of SEQ ID NO: 1879387
uccagauuguucuugaacu

SEQ ID NO: 1903477 - RNA, 19 nt, Artificial Sequence
  Description of Artificial Sequence: Synthetic oligonucleotide
  Antisense strand to SEQ ID NO: 1903476
aguucaagaacaaucugga

SEQ ID NO: 1903478 - RNA, 19 nt, Artificial Sequence
  Description of Artificial Sequence: Synthetic oligonucleotide
  Sense strand starting at position 423 of SEQ ID NO: 1879387
ucaugacuuugcucuggau

SEQ ID NO: 1903479 - RNA, 19 nt, Artificial Sequence
  Description of Artificial Sequence: Synthetic oligonucleotide
  Antisense strand to SEQ ID NO: 1903478
auccagagcaaagucauga

SEQ ID NO: 1903480 - RNA, 19 nt, Artificial Sequence
  Description of Artificial Sequence: Synthetic oligonucleotide
  Sense strand starting at position 467 of SEQ ID NO: 1879387
agaugucucuaagucucua

SEQ ID NO: 1903481 - RNA, 19 nt, Artificial Sequence
  Description of Artificial Sequence: Synthetic oligonucleotide
  Antisense strand to SEQ ID NO: 1903480
uagagacuuagagacaucu

SEQ ID NO: 1903482 - RNA, 19 nt, Artificial Sequence
  Description of Artificial Sequence: Synthetic oligonucleotide
  Sense strand starting at position 546 of SEQ ID NO: 1879387
gggaggaaguugguguaaa

SEQ ID NO: 1903483 - RNA, 19 nt, Artificial Sequence
  Description of Artificial Sequence: Synthetic oligonucleotide
  Antisense strand to SEQ ID NO: 1903482
uuuacaccaacuuccuccc

SEQ ID NO: 1903484 - RNA, 19 nt, Artificial Sequence
  Description of Artificial Sequence: Synthetic oligonucleotide
  Sense strand starting at position 550 of SEQ ID NO: 1879387
ggaaguugguguaaagaag

SEQ ID NO: 1903485 - RNA, 19 nt, Artificial Sequence
  Description of Artificial Sequence: Synthetic oligonucleotide
  Antisense strand to SEQ ID NO: 1903484
cuucuuuacaccaacuucc

SEQ ID NO: 1903486 - RNA, 19 nt, Artificial Sequence
  Description of Artificial Sequence: Synthetic oligonucleotide
  Sense strand starting at position 603 of SEQ ID NO: 1879387
ggaagacuucuugggagug

SEQ ID NO: 1903487 - RNA, 19 nt, Artificial Sequence
  Description of Artificial Sequence: Synthetic oligonucleotide
  Antisense strand to SEQ ID NO: 1903486
cacucccaagaagucuucc

SEQ ID NO: 1903488 - RNA, 19 nt, Artificial Sequence
  Description of Artificial Sequence: Synthetic oligonucleotide
  Sense strand starting at position 779 of SEQ ID NO: 1879387
acagauaaaugucucuuga

SEQ ID NO: 1903489 - RNA, 19 nt, Artificial Sequence
  Description of Artificial Sequence: Synthetic oligonucleotide
  Antisense strand to SEQ ID NO: 1903488
ucaagagacauuuaucugu

SEQ ID NO: 1903490 - RNA, 19 nt, Artificial Sequence
  Description of Artificial Sequence: Synthetic oligonucleotide
  Sense strand starting at position 781 of SEQ ID NO: 1879387
agauaaaugucucuugacc

SEQ ID NO: 1903491 - RNA, 19 nt, Artificial Sequence
  Description of Artificial Sequence: Synthetic oligonucleotide
  Antisense strand to SEQ ID NO: 1903490
ggucaagagacauuuaucu

SEQ ID NO: 1903492 - RNA, 19 nt, Artificial Sequence
  Description of Artificial Sequence: Synthetic oligonucleotide
  Sense strand starting at position 826 of SEQ ID NO: 1879387
ucuuaugacuugcuaggga

SEQ ID NO: 1903493 - RNA, 19 nt, Artificial Sequence
  Description of Artificial Sequence: Synthetic oligonucleotide
  Antisense strand to SEQ ID NO: 1903492
ucccuagcaagucauaaga

SEQ ID NO: 1903494 - RNA, 19 nt, Artificial Sequence
  Description of Artificial Sequence: Synthetic oligonucleotide
  Sense strand starting at position 1214 of SEQ ID NO: 1879387
cuggauucucgccaagaug

SEQ ID NO: 1903495 - RNA, 19 nt, Artificial Sequence
  Description of Artificial Sequence: Synthetic oligonucleotide
  Antisense strand to SEQ ID NO: 1903494
caucuuggcgagaauccag

SEQ ID NO: 1903496 - RNA, 19 nt, Artificial Sequence
  Description of Artificial Sequence: Synthetic oligonucleotide
  Sense strand starting at position 1304 of SEQ ID NO: 1879387
gagagacucucccugucuu

SEQ ID NO: 1903497 - RNA, 19 nt, Artificial Sequence
  Description of Artificial Sequence: Synthetic oligonucleotide
  Antisense strand to SEQ ID NO: 1903496
aagacagggagagucucuc

SEQ ID NO: 1903498 - RNA, 19 nt, Artificial Sequence
  Description of Artificial Sequence: Synthetic oligonucleotide
  Sense strand starting at position 1768 of SEQ ID NO: 1879387
uaagcuuugccuggaaaga

SEQ ID NO: 1903499 - RNA, 19 nt, Artificial Sequence
  Description of Artificial Sequence: Synthetic oligonucleotide
  Antisense strand to SEQ ID NO: 1903498
ucuuuccaggcaaagcuua

SEQ ID NO: 1903500 - RNA, 19 nt, Artificial Sequence
  Description of Artificial Sequence: Synthetic oligonucleotide
  Sense strand starting at position 1769 of SEQ ID NO: 1879387
aagcuuugccuggaaagaa

SEQ ID NO: 1903501 - RNA, 19 nt, Artificial Sequence
  Description of Artificial Sequence: Synthetic oligonucleotide
  Antisense strand to SEQ ID NO: 1903500
uucuuuccaggcaaagcuu

SEQ ID NO: 1903502 - RNA, 19 nt, Artificial Sequence
  Description of Artificial Sequence: Synthetic oligonucleotide
  Sense strand starting at position 1928 of SEQ ID NO: 1879387
cuggcucaugcucaagaau

SEQ ID NO: 1903503 - RNA, 19 nt, Artificial Sequence
  Description of Artificial Sequence: Synthetic oligonucleotide
  Antisense strand to SEQ ID NO: 1903502
auucuugagcaugagccag

SEQ ID NO: 1903504 - RNA, 19 nt, Artificial Sequence
  Description of Artificial Sequence: Synthetic oligonucleotide
  Sense strand starting at position 1931 of SEQ ID NO: 1879387
gcucaugcucaagaaugca

SEQ ID NO: 1903505 - RNA, 19 nt, Artificial Sequence
  Description of Artificial Sequence: Synthetic oligonucleotide
  Antisense strand to SEQ ID NO: 1903504
ugcauucuugagcaugagc

SEQ ID NO: 1903506 - RNA, 19 nt, Artificial Sequence
  Description of Artificial Sequence: Synthetic oligonucleotide
  Sense strand starting at position 2000 of SEQ ID NO: 1879387
ggaucucagacauguguga

SEQ ID NO: 1903507 - RNA, 19 nt, Artificial Sequence
  Description of Artificial Sequence: Synthetic oligonucleotide
  Antisense strand to SEQ ID NO: 1903506
ucacacaugucugagaucc

SEQ ID NO: 1903508 - RNA, 19 nt, Artificial Sequence
  Description of Artificial Sequence: Synthetic oligonucleotide
  Sense strand starting at position 2004 of SEQ ID NO: 1879387
cucagacaugugugaucca

SEQ ID NO: 1903509 - RNA, 19 nt, Artificial Sequence
  Description of Artificial Sequence: Synthetic oligonucleotide
  Antisense strand to SEQ ID NO: 1903508
uggaucacacaugucugag

SEQ ID NO: 1903510 - RNA, 19 nt, Artificial Sequence
  Description of Artificial Sequence: Synthetic oligonucleotide
  Sense strand starting at position 2007 of SEQ ID NO: 1879387
agacaugugugauccagga

SEQ ID NO: 1903511 - RNA, 19 nt, Artificial Sequence
  Description of Artificial Sequence: Synthetic oligonucleotide
  Antisense strand to SEQ ID NO: 1903510
uccuggaucacacaugucu

SEQ ID NO: 1903512 - RNA, 19 nt, Artificial Sequence
  Description of Artificial Sequence: Synthetic oligonucleotide
  Sense strand starting at position 2009 of SEQ ID NO: 1879387
acaugugugauccaggaug

SEQ ID NO: 1903513 - RNA, 19 nt, Artificial Sequence
  Description of Artificial Sequence: Synthetic oligonucleotide
  Antisense strand to SEQ ID NO: 1903512
cauccuggaucacacaugu

SEQ ID NO: 1903514 - RNA, 19 nt, Artificial Sequence
  Description of Artificial Sequence: Synthetic oligonucleotide
  Sense strand starting at position 2011 of SEQ ID NO: 1879387
augugugauccaggaugau

SEQ ID NO: 1903515 - RNA, 19 nt, Artificial Sequence
  Description of Artificial Sequence: Synthetic oligonucleotide
  Antisense strand to SEQ ID NO: 1903514
aucauccuggaucacacau

SEQ ID NO: 1903516 - RNA, 19 nt, Artificial Sequence
  Description of Artificial Sequence: Synthetic oligonucleotide
  Sense strand starting at position 2566 of SEQ ID NO: 1879387
gagacagagucucuuuaua

SEQ ID NO: 1903517 - RNA, 19 nt, Artificial Sequence
  Description of Artificial Sequence: Synthetic oligonucleotide
  Antisense strand to SEQ ID NO: 1903516
uauaaagagacucugucuc

SEQ ID NO: 1903518 - RNA, 19 nt, Artificial Sequence
  Description of Artificial Sequence: Synthetic oligonucleotide
  Sense strand starting at position 2593 of SEQ ID NO: 1879387
gcuggucuccuggacacaa

SEQ ID NO: 1903519 - RNA, 19 nt, Artificial Sequence
  Description of Artificial Sequence: Synthetic oligonucleotide
  Antisense strand to SEQ ID NO: 1903518
uuguguccaggagaccagc

SEQ ID NO: 1903520 - RNA, 19 nt, Artificial Sequence
  Description of Artificial Sequence: Synthetic oligonucleotide
  Sense strand starting at position 2941 of SEQ ID NO: 1879387
uaaacugagguccauaguu

SEQ ID NO: 1903521 - RNA, 19 nt, Artificial Sequence
  Description of Artificial Sequence: Synthetic oligonucleotide
  Antisense strand to SEQ ID NO: 1903520
aacuauggaccucaguuua

SEQ ID NO: 1903522 - RNA, 19 nt, Artificial Sequence
  Description of Artificial Sequence: Synthetic oligonucleotide
  Sense strand starting at position 2943 of SEQ ID NO: 1879387
aacugagguccauaguuua

SEQ ID NO: 1903523 - RNA, 19 nt, Artificial Sequence
  Description of Artificial Sequence: Synthetic oligonucleotide
  Antisense strand to SEQ ID NO: 1903522
uaaacuauggaccucaguu

SEQ ID NO: 1903524 - RNA, 19 nt, Artificial Sequence
  Description of Artificial Sequence: Synthetic oligonucleotide
  Sense strand starting at position 2968 of SEQ ID NO: 1879387
gguucacucguuguguuau

SEQ ID NO: 1903525 - RNA, 19 nt, Artificial Sequence
  Description of Artificial Sequence: Synthetic oligonucleotide
  Antisense strand to SEQ ID NO: 1903524
auaacacaacgagugaacc

SEQ ID NO: 1903526 - RNA, 19 nt, Artificial Sequence
  Description of Artificial Sequence: Synthetic oligonucleotide
  Sense strand starting at position 3035 of SEQ ID NO: 1879387
caguauccugcugaaugau

SEQ ID NO: 1903527 - RNA, 19 nt, Artificial Sequence
  Description of Artificial Sequence: Synthetic oligonucleotide
  Antisense strand to SEQ ID NO: 1903526
aucauucagcaggauacug

SEQ ID NO: 1903528 - RNA, 19 nt, Artificial Sequence
  Description of Artificial Sequence: Synthetic oligonucleotide
  Sense strand starting at position 3307 of SEQ ID NO: 1879387
guagcaaaucaugggaugu

SEQ ID NO: 1903529 - RNA, 19 nt, Artificial Sequence
  Description of Artificial Sequence: Synthetic oligonucleotide
  Antisense strand to SEQ ID NO: 1903528
acaucccaugauuugcuac

SEQ ID NO: 1903530 - RNA, 19 nt, Artificial Sequence
  Description of Artificial Sequence: Synthetic oligonucleotide
  Sense strand starting at position 3311 of SEQ ID NO: 1879387
caaaucaugggauguucca

SEQ ID NO: 1903531 - RNA, 19 nt, Artificial Sequence
  Description of Artificial Sequence: Synthetic oligonucleotide
  Antisense strand to SEQ ID NO: 1903530
uggaacaucccaugauuug

SEQ ID NO: 1903532 - RNA, 19 nt, Artificial Sequence
  Description of Artificial Sequence: Synthetic oligonucleotide
  Sense strand starting at position 3354 of SEQ ID NO: 1879387
guggaaagccucuggauua

SEQ ID NO: 1903533 - RNA, 19 nt, Artificial Sequence
  Description of Artificial Sequence: Synthetic oligonucleotide
  Antisense strand to SEQ ID NO: 1903532
uaauccagaggcuuuccac

SEQ ID NO: 1903534 - RNA, 19 nt, Artificial Sequence
  Description of Artificial Sequence: Synthetic oligonucleotide
  Sense strand starting at position 3381 of SEQ ID NO: 1879387
ucuucucaaugagugaagu

SEQ ID NO: 1903535 - RNA, 19 nt, Artificial Sequence
  Description of Artificial Sequence: Synthetic oligonucleotide
  Antisense strand to SEQ ID NO: 1903534
acuucacucauugagaaga

SEQ ID NO: 1903536 - RNA, 19 nt, Artificial Sequence
  Description of Artificial Sequence: Synthetic oligonucleotide
  Sense strand starting at position 3392 of SEQ ID NO: 1879387
agugaagugcuuuagucag

SEQ ID NO: 1903537 - RNA, 19 nt, Artificial Sequence
  Description of Artificial Sequence: Synthetic oligonucleotide
  Antisense strand to SEQ ID NO: 1903536
cugacuaaagcacuucacu

SEQ ID NO: 1903538 - RNA, 19 nt, Artificial Sequence
  Description of Artificial Sequence: Synthetic oligonucleotide
  Sense strand starting at position 3754 of SEQ ID NO: 1879387
ucaugcaaacuucgacuaa

SEQ ID NO: 1903539 - RNA, 19 nt, Artificial Sequence
  Description of Artificial Sequence: Synthetic oligonucleotide
  Antisense strand to SEQ ID NO: 1903538
uuagucgaaguuugcauga

SEQ ID NO: 1903540 - RNA, 19 nt, Artificial Sequence
  Description of Artificial Sequence: Synthetic oligonucleotide
  Sense strand starting at position 3758 of SEQ ID NO: 1879387
gcaaacuucgacuaaauca

SEQ ID NO: 1903541 - RNA, 19 nt, Artificial Sequence
  Description of Artificial Sequence: Synthetic oligonucleotide
  Antisense strand to SEQ ID NO: 1903540
ugauuuagucgaaguuugc

SEQ ID NO: 1903542 - RNA, 19 nt, Artificial Sequence
  Description of Artificial Sequence: Synthetic oligonucleotide
  Sense strand starting at position 3840 of SEQ ID NO: 1879387
cuagcaaugauugaggguu

SEQ ID NO: 1903543 - RNA, 19 nt, Artificial Sequence
  Description of Artificial Sequence: Synthetic oligonucleotide
  Antisense strand to SEQ ID NO: 1903542
aacccucaaucauugcuag

SEQ ID NO: 1903544 - RNA, 19 nt, Artificial Sequence
  Description of Artificial Sequence: Synthetic oligonucleotide
  Sense strand starting at position 3846 of SEQ ID NO: 1879387
augauugaggguugcuaca

SEQ ID NO: 1903545 - RNA, 19 nt, Artificial Sequence
  Description of Artificial Sequence: Synthetic oligonucleotide
  Antisense strand to SEQ ID NO: 1903544
uguagcaacccucaaucau

SEQ ID NO: 1903546 - RNA, 19 nt, Artificial Sequence
  Description of Artificial Sequence: Synthetic oligonucleotide
  Sense strand starting at position 3848 of SEQ ID NO: 1879387
gauugaggguugcuacaua

SEQ ID NO: 1903547 - RNA, 19 nt, Artificial Sequence
  Description of Artificial Sequence: Synthetic oligonucleotide
  Antisense strand to SEQ ID NO: 1903546
uauguagcaacccucaauc

SEQ ID NO: 1903548 - RNA, 19 nt, Artificial Sequence
  Description of Artificial Sequence: Synthetic oligonucleotide
  Sense strand starting at position 3882 of SEQ ID NO: 1879387
gcauuaugucauuagaguc

SEQ ID NO: 1903549 - RNA, 19 nt, Artificial Sequence
  Description of Artificial Sequence: Synthetic oligonucleotide
  Antisense strand to SEQ ID NO: 1903548
gacucuaaugacauaaugc

SEQ ID NO: 1903550 - RNA, 19 nt, Artificial Sequence
  Description of Artificial Sequence: Synthetic oligonucleotide
  Sense strand starting at position 3888 of SEQ ID NO: 1879387
ugucauuagagucaguucu

SEQ ID NO: 1903551 - RNA, 19 nt, Artificial Sequence
  Description of Artificial Sequence: Synthetic oligonucleotide
  Antisense strand to SEQ ID NO: 1903550
agaacugacucuaaugaca

SEQ ID NO: 1903552 - RNA, 19 nt, Artificial Sequence
  Description of Artificial Sequence: Synthetic oligonucleotide
  Sense strand starting at position 38 of SEQ ID NO: 1879388
gugggcaccacuugacaua

SEQ ID NO: 1903553 - RNA, 19 nt, Artificial Sequence
  Description of Artificial Sequence: Synthetic oligonucleotide
  Antisense strand to SEQ ID NO: 1903552
uaugucaaguggugcccac

SEQ ID NO: 1903554 - RNA, 19 nt, Artificial Sequence
  Description of Artificial Sequence: Synthetic oligonucleotide
  Sense strand starting at position 95 of SEQ ID NO: 1879388
gucucagugucacuuguuu

SEQ ID NO: 1903555 - RNA, 19 nt, Artificial Sequence
  Description of Artificial Sequence: Synthetic oligonucleotide
  Antisense strand to SEQ ID NO: 1903554
aaacaagugacacugagac

SEQ ID NO: 1903556 - RNA, 19 nt, Artificial Sequence
  Description of Artificial Sequence: Synthetic oligonucleotide
  Sense strand starting at position 1254 of SEQ ID NO: 1879388
uggugauggucacacaagu

SEQ ID NO: 1903557 - RNA, 19 nt, Artificial Sequence
  Description of Artificial Sequence: Synthetic oligonucleotide
  Antisense strand to SEQ ID NO: 1903556
acuugugugaccaucacca

SEQ ID NO: 1903558 - RNA, 19 nt, Artificial Sequence
  Description of Artificial Sequence: Synthetic oligonucleotide
  Sense strand starting at position 1639 of SEQ ID NO: 1879388
gccuguagcuaucggagaa

SEQ ID NO: 1903559 - RNA, 19 nt, Artificial Sequence
  Description of Artificial Sequence: Synthetic oligonucleotide
  Antisense strand to SEQ ID NO: 1903558
uucuccgauagcuacaggc

SEQ ID NO: 1903560 - RNA, 19 nt, Artificial Sequence
  Description of Artificial Sequence: Synthetic oligonucleotide
  Sense strand starting at position 1640 of SEQ ID NO: 1879388
ccuguagcuaucggagaac

SEQ ID NO: 1903561 - RNA, 19 nt, Artificial Sequence
  Description of Artificial Sequence: Synthetic oligonucleotide
  Antisense strand to SEQ ID NO: 1903560
guucuccgauagcuacagg

SEQ ID NO: 1903562 - RNA, 19 nt, Artificial Sequence
  Description of Artificial Sequence: Synthetic oligonucleotide
  Sense strand starting at position 1643 of SEQ ID NO: 1879388
guagcuaucggagaacaag

SEQ ID NO: 1903563 - RNA, 19 nt, Artificial Sequence
  Description of Artificial Sequence: Synthetic oligonucleotide
  Antisense strand to SEQ ID NO: 1903562
cuuguucuccgauagcuac

SEQ ID NO: 1903564 - RNA, 19 nt, Artificial Sequence
  Description of Artificial Sequence: Synthetic oligonucleotide
  Sense strand starting at position 2604 of SEQ ID NO: 1879388
auacauaacugucaagguu

SEQ ID NO: 1903565 - RNA, 19 nt, Artificial Sequence
  Description of Artificial Sequence: Synthetic oligonucleotide
  Antisense strand to SEQ ID NO: 1903564
aaccuugacaguuauguau

SEQ ID NO: 1903566 - RNA, 19 nt, Artificial Sequence
  Description of Artificial Sequence: Synthetic oligonucleotide
  Sense strand starting at position 2634 of SEQ ID NO: 1879388
acacgagcucugggcauuu

SEQ ID NO: 1903567 - RNA, 19 nt, Artificial Sequence
  Description of Artificial Sequence: Synthetic oligonucleotide
  Antisense strand to SEQ ID NO: 1903566
aaaugcccagagcucgugu

SEQ ID NO: 1903568 - RNA, 19 nt, Artificial Sequence
  Description of Artificial Sequence: Synthetic oligonucleotide
  Sense strand starting at position 2904 of SEQ ID NO: 1879388
ugguguugaucuccugaau

SEQ ID NO: 1903569 - RNA, 19 nt, Artificial Sequence
  Description of Artificial Sequence: Synthetic oligonucleotide
  Antisense strand to SEQ ID NO: 1903568
auucaggagaucaacacca

SEQ ID NO: 1903570 - RNA, 19 nt, Artificial Sequence
  Description of Artificial Sequence: Synthetic oligonucleotide
  Sense strand starting at position 3006 of SEQ ID NO: 1879388
aggaaaguaucuuggagag

SEQ ID NO: 1903571 - RNA, 19 nt, Artificial Sequence
  Description of Artificial Sequence: Synthetic oligonucleotide
  Antisense strand to SEQ ID NO: 1903570
cucuccaagauacuuuccu

SEQ ID NO: 1903572 - RNA, 19 nt, Artificial Sequence
  Description of Artificial Sequence: Synthetic oligonucleotide
  Sense strand starting at position 3008 of SEQ ID NO: 1879388
gaaaguaucuuggagagcu

SEQ ID NO: 1903573 - RNA, 19 nt, Artificial Sequence
  Description of Artificial Sequence: Synthetic oligonucleotide
  Antisense strand to SEQ ID NO: 1903572
agcucuccaagauacuuuc

SEQ ID NO: 1903574 - RNA, 19 nt, Artificial Sequence
  Description of Artificial Sequence: Synthetic oligonucleotide
  Sense strand starting at position 3010 of SEQ ID NO: 1879388
aaguaucuuggagagcuua

SEQ ID NO: 1903575 - RNA, 19 nt, Artificial Sequence
  Description of Artificial Sequence: Synthetic oligonucleotide
  Antisense strand to SEQ ID NO: 1903574
uaagcucuccaagauacuu

SEQ ID NO: 1903576 - RNA, 19 nt, Artificial Sequence
  Description of Artificial Sequence: Synthetic oligonucleotide
  Sense strand starting at position 3041 of SEQ ID NO: 1879388
uugggcaguucucagguau

SEQ ID NO: 1903577 - RNA, 19 nt, Artificial Sequence
  Description of Artificial Sequence: Synthetic oligonucleotide
  Antisense strand to SEQ ID NO: 1903576
auaccugagaacugcccaa

SEQ ID NO: 1903578 - RNA, 19 nt, Artificial Sequence
  Description of Artificial Sequence: Synthetic oligonucleotide
  Sense strand starting at position 3147 of SEQ ID NO: 1879388
auaagagucauuggagcau

SEQ ID NO: 1903579 - RNA, 19 nt, Artificial Sequence
  Description of Artificial Sequence: Synthetic oligonucleotide
  Antisense strand to SEQ ID NO: 1903578
augcuccaaugacucuuau

SEQ ID NO: 1903580 - RNA, 19 nt, Artificial Sequence
  Description of Artificial Sequence: Synthetic oligonucleotide
  Sense strand starting at position 3189 of SEQ ID NO: 1879388
ugguacaggccauaucauu

SEQ ID NO: 1903581 - RNA, 19 nt, Artificial Sequence
  Description of Artificial Sequence: Synthetic oligonucleotide
  Antisense strand to SEQ ID NO: 1903580
aaugauauggccuguacca

SEQ ID NO: 1903582 - RNA, 19 nt, Artificial Sequence
  Description of Artificial Sequence: Synthetic oligonucleotide
  Sense strand starting at position 3206 of SEQ ID NO: 1879388
uuaaaugguuaacacuaga

SEQ ID NO: 1903583 - RNA, 19 nt, Artificial Sequence
  Description of Artificial Sequence: Synthetic oligonucleotide
  Antisense strand to SEQ ID NO: 1903582
ucuaguguuaaccauuuaa

SEQ ID NO: 1903584 - RNA, 19 nt, Artificial Sequence
  Description of Artificial Sequence: Synthetic oligonucleotide
  Sense strand starting at position 3211 of SEQ ID NO: 1879388
ugguuaacacuagauagcu

SEQ ID NO: 1903585 - RNA, 19 nt, Artificial Sequence
  Description of Artificial Sequence: Synthetic oligonucleotide
  Antisense strand to SEQ ID NO: 1903584
agcuaucuaguguuaacca

SEQ ID NO: 1903586 - RNA, 19 nt, Artificial Sequence
  Description of Artificial Sequence: Synthetic oligonucleotide
  Sense strand starting at position 3488 of SEQ ID NO: 1879388
ggagauuucucucagccua

SEQ ID NO: 1903587 - RNA, 19 nt, Artificial Sequence
  Description of Artificial Sequence: Synthetic oligonucleotide
  Antisense strand to SEQ ID NO: 1903586
uaggcugagagaaaucucc

SEQ ID NO: 1903588 - RNA, 19 nt, Artificial Sequence
  Description of Artificial Sequence: Synthetic oligonucleotide
  Sense strand starting at position 3490 of SEQ ID NO: 1879388
agauuucucucagccuagu

SEQ ID NO: 1903589 - RNA, 19 nt, Artificial Sequence
  Description of Artificial Sequence: Synthetic oligonucleotide
  Antisense strand to SEQ ID NO: 1903588
acuaggcugagagaaaucu

SEQ ID NO: 1903590 - RNA, 19 nt, Artificial Sequence
  Description of Artificial Sequence: Synthetic oligonucleotide
  Sense strand starting at position 3493 of SEQ ID NO: 1879388
uuucucucagccuaguuua

SEQ ID NO: 1903591 - RNA, 19 nt, Artificial Sequence
  Description of Artificial Sequence: Synthetic oligonucleotide
  Antisense strand to SEQ ID NO: 1903590
uaaacuaggcugagagaaa

SEQ ID NO: 1903592 - RNA, 19 nt, Artificial Sequence
  Description of Artificial Sequence: Synthetic oligonucleotide
  Sense strand starting at position 3496 of SEQ ID NO: 1879388
cucucagccuaguuuaaga

SEQ ID NO: 1903593 - RNA, 19 nt, Artificial Sequence
  Description of Artificial Sequence: Synthetic oligonucleotide
  Antisense strand to SEQ ID NO: 1903592
ucuuaaacuaggcugagag

SEQ ID NO: 1903594 - RNA, 19 nt, Artificial Sequence
  Description of Artificial Sequence: Synthetic oligonucleotide
  Sense strand starting at position 3501 of SEQ ID NO: 1879388
agccuaguuuaagaucaca

SEQ ID NO: 1903595 - RNA, 19 nt, Artificial Sequence
  Description of Artificial Sequence: Synthetic oligonucleotide
  Antisense strand to SEQ ID NO: 1903594
ugugaucuuaaacuaggcu

SEQ ID NO: 1903596 - RNA, 19 nt, Artificial Sequence
  Description of Artificial Sequence: Synthetic oligonucleotide
  Sense strand starting at position 3531 of SEQ ID NO: 1879388
cccgauaucugguaucaac

SEQ ID NO: 1903597 - RNA, 19 nt, Artificial Sequence
  Description of Artificial Sequence: Synthetic oligonucleotide
  Antisense strand to SEQ ID NO: 1903596
guugauaccagauaucggg

SEQ ID NO: 1903598 - RNA, 19 nt, Artificial Sequence
  Description of Artificial Sequence: Synthetic oligonucleotide
  Sense strand starting at position 3534 of SEQ ID NO: 1879388
gauaucugguaucaacuga

SEQ ID NO: 1903599 - RNA, 19 nt, Artificial Sequence
  Description of Artificial Sequence: Synthetic oligonucleotide
  Antisense strand to SEQ ID NO: 1903598
ucaguugauaccagauauc

SEQ ID NO: 1903600 - RNA, 19 nt, Artificial Sequence
  Description of Artificial Sequence: Synthetic oligonucleotide
  Sense strand starting at position 3589 of SEQ ID NO: 1879388
cugcauugcugccuuagaa

SEQ ID NO: 1903601 - RNA, 19 nt, Artificial Sequence
  Description of Artificial Sequence: Synthetic oligonucleotide
  Antisense strand to SEQ ID NO: 1903600
uucuaaggcagcaaugcag

SEQ ID NO: 1903602 - RNA, 19 nt, Artificial Sequence
  Description of Artificial Sequence: Synthetic oligonucleotide
  Sense strand starting at position 3917 of SEQ ID NO: 1879388
auaagacaucugugugagu

SEQ ID NO: 1903603 - RNA, 19 nt, Artificial Sequence
  Description of Artificial Sequence: Synthetic oligonucleotide
  Antisense strand to SEQ ID NO: 1903602
acucacacagaugucuuau

SEQ ID NO: 1903604 - RNA, 19 nt, Artificial Sequence
  Description of Artificial Sequence: Synthetic oligonucleotide
  Sense strand starting at position 3918 of SEQ ID NO: 1879388
uaagacaucugugugagua

SEQ ID NO: 1903605 - RNA, 19 nt, Artificial Sequence
  Description of Artificial Sequence: Synthetic oligonucleotide
  Antisense strand to SEQ ID NO: 1903604
uacucacacagaugucuua

SEQ ID NO: 1903606 - RNA, 19 nt, Artificial Sequence
  Description of Artificial Sequence: Synthetic oligonucleotide
  Sense strand starting at position 3919 of SEQ ID NO: 1879388
aagacaucugugugaguau

SEQ ID NO: 1903607 - RNA, 19 nt, Artificial Sequence
  Description of Artificial Sequence: Synthetic oligonucleotide
  Antisense strand to SEQ ID NO: 1903606
auacucacacagaugucuu

SEQ ID NO: 1903608 - RNA, 19 nt, Artificial Sequence
  Description of Artificial Sequence: Synthetic oligonucleotide
  Sense strand starting at position 3920 of SEQ ID NO: 1879388
agacaucugugugaguaua

SEQ ID NO: 1903609 - RNA, 19 nt, Artificial Sequence
  Description of Artificial Sequence: Synthetic oligonucleotide
  Antisense strand to SEQ ID NO: 1903608
uauacucacacagaugucu

SEQ ID NO: 1903610 - RNA, 19 nt, Artificial Sequence
  Description of Artificial Sequence: Synthetic oligonucleotide
  Sense strand starting at position 3922 of SEQ ID NO: 1879388
acaucugugugaguauaua

SEQ ID NO: 1903611 - RNA, 19 nt, Artificial Sequence
  Description of Artificial Sequence: Synthetic oligonucleotide
  Antisense strand to SEQ ID NO: 1903610
uauauacucacacagaugu

SEQ ID NO: 1903612 - RNA, 19 nt, Artificial Sequence
  Description of Artificial Sequence: Synthetic oligonucleotide
  Sense strand starting at position 931 of SEQ ID NO: 1879390
gcuccauuugguggaguca

SEQ ID NO: 1903613 - RNA, 19 nt, Artificial Sequence
  Description of Artificial Sequence: Synthetic oligonucleotide
  Antisense strand to SEQ ID NO: 1903612
ugacuccaccaaauggagc

SEQ ID NO: 1903614 - RNA, 19 nt, Artificial Sequence
  Description of Artificial Sequence: Synthetic oligonucleotide
  Sense strand starting at position 3628 of SEQ ID NO: 1879390
ucccauuacuggguaggua

SEQ ID NO: 1903615 - RNA, 19 nt, Artificial Sequence
  Description of Artificial Sequence: Synthetic oligonucleotide
  Antisense strand to SEQ ID NO: 1903614
uaccuacccaguaauggga

SEQ ID NO: 1903616 - RNA, 19 nt, Artificial Sequence
  Description of Artificial Sequence: Synthetic oligonucleotide
  Sense strand starting at position 2649 of SEQ ID NO: 1879389
ucccauuacuggguaggua

SEQ ID NO: 1903617 - RNA, 19 nt, Artificial Sequence
  Description of Artificial Sequence: Synthetic oligonucleotide
  Antisense strand to SEQ ID NO: 1903616
uaccuacccaguaauggga

SEQ ID NO: 1903618 - RNA, 19 nt, Artificial Sequence
  Description of Artificial Sequence: Synthetic oligonucleotide
  Sense strand starting at position 3189 of SEQ ID NO: 1879389
aucacauuguacgacauaa

SEQ ID NO: 1903619 - RNA, 19 nt, Artificial Sequence
  Description of Artificial Sequence: Synthetic oligonucleotide
  Antisense strand to SEQ ID NO: 1903618
uuaugucguacaaugugau

SEQ ID NO: 1903620 - RNA, 19 nt, Artificial Sequence
  Description of Artificial Sequence: Synthetic oligonucleotide
  Sense strand starting at position 3777 of SEQ ID NO: 1879389
uuuggaguauuguagcuaa

SEQ ID NO: 1903621 - RNA, 19 nt, Artificial Sequence
  Description of Artificial Sequence: Synthetic oligonucleotide
  Antisense strand to SEQ ID NO: 1903620
uuagcuacaauacuccaaa

SEQ ID NO: 1903622 - RNA, 19 nt, Artificial Sequence
  Description of Artificial Sequence: Synthetic oligonucleotide
  Sense strand starting at position 3780 of SEQ ID NO: 1879389
ggaguauuguagcuaaaua

SEQ ID NO: 1903623 - RNA, 19 nt, Artificial Sequence
  Description of Artificial Sequence: Synthetic oligonucleotide
  Antisense strand to SEQ ID NO: 1903622
uauuuagcuacaauacucc

SEQ ID NO: 1903624 - RNA, 19 nt, Artificial Sequence
  Description of Artificial Sequence: Synthetic oligonucleotide
  Sense strand starting at position 49 of SEQ ID NO: 1879391
ggcccaacuugaucccuaa

SEQ ID NO: 1903625 - RNA, 19 nt, Artificial Sequence
  Description of Artificial Sequence: Synthetic oligonucleotide
  Antisense strand to SEQ ID NO: 1903624
uuagggaucaaguugggcc

SEQ ID NO: 1903626 - RNA, 19 nt, Artificial Sequence
  Description of Artificial Sequence: Synthetic oligonucleotide
  Sense strand starting at position 63 of SEQ ID NO: 1879391
ccuaaugagcuguaugauu

SEQ ID NO: 1903627 - RNA, 19 nt, Artificial Sequence
  Description of Artificial Sequence: Synthetic oligonucleotide
  Antisense strand to SEQ ID NO: 1903626
aaucauacagcucauuagg

SEQ ID NO: 1903628 - RNA, 19 nt, Artificial Sequence
  Description of Artificial Sequence: Synthetic oligonucleotide
  Sense strand starting at position 232 of SEQ ID NO: 1879391
agacaacaacucugguuua

SEQ ID NO: 1903629 - RNA, 19 nt, Artificial Sequence
  Description of Artificial Sequence: Synthetic oligonucleotide
  Antisense strand to SEQ ID NO: 1903628
uaaaccagaguuguugucu

SEQ ID NO: 1903630 - RNA, 19 nt, Artificial Sequence
  Description of Artificial Sequence: Synthetic oligonucleotide
  Sense strand starting at position 283 of SEQ ID NO: 1879391
uaugguggccucuaauuau

SEQ ID NO: 1903631 - RNA, 19 nt, Artificial Sequence
  Description of Artificial Sequence: Synthetic oligonucleotide
  Antisense strand to SEQ ID NO: 1903630
auaauuagaggccaccaua

SEQ ID NO: 1903632 - RNA, 19 nt, Artificial Sequence
  Description of Artificial Sequence: Synthetic oligonucleotide
  Sense strand starting at position 308 of SEQ ID NO: 1879391
cccucagaacugugaggau

SEQ ID NO: 1903633 - RNA, 19 nt, Artificial Sequence
  Description of Artificial Sequence: Synthetic oligonucleotide
  Antisense strand to SEQ ID NO: 1903632
auccucacaguucugaggg

SEQ ID NO: 1903634 - RNA, 19 nt, Artificial Sequence
  Description of Artificial Sequence: Synthetic oligonucleotide
  Sense strand starting at position 339 of SEQ ID NO: 1879391
cggucugagaagcauggaa

SEQ ID NO: 1903635 - RNA, 19 nt, Artificial Sequence
  Description of Artificial Sequence: Synthetic oligonucleotide
  Antisense strand to SEQ ID NO: 1903634
uuccaugcuucucagaccg

SEQ ID NO: 1903636 - RNA, 19 nt, Artificial Sequence
  Description of Artificial Sequence: Synthetic oligonucleotide
  Sense strand starting at position 341 of SEQ ID NO: 1879391
gucugagaagcauggaauc

SEQ ID NO: 1903637 - RNA, 19 nt, Artificial Sequence
  Description of Artificial Sequence: Synthetic oligonucleotide
  Antisense strand to SEQ ID NO: 1903636
gauuccaugcuucucagac

SEQ ID NO: 1903638 - RNA, 19 nt, Artificial Sequence
  Description of Artificial Sequence: Synthetic oligonucleotide
  Sense strand starting at position 566 of SEQ ID NO: 1879391
cccacagguuugguccaaa

SEQ ID NO: 1903639 - RNA, 19 nt, Artificial Sequence
  Description of Artificial Sequence: Synthetic oligonucleotide
  Antisense strand to SEQ ID NO: 1903638
uuuggaccaaaccuguggg

SEQ ID NO: 1903640 - RNA, 19 nt, Artificial Sequence
  Description of Artificial Sequence: Synthetic oligonucleotide
  Sense strand starting at position 598 of SEQ ID NO: 1879391
uguauuccacuguauucua

SEQ ID NO: 1903641 - RNA, 19 nt, Artificial Sequence
  Description of Artificial Sequence: Synthetic oligonucleotide
  Antisense strand to SEQ ID NO: 1903640
uagaauacaguggaauaca

SEQ ID NO: 1903642 - RNA, 19 nt, Artificial Sequence
  Description of Artificial Sequence: Synthetic oligonucleotide
  Sense strand starting at position 647 of SEQ ID NO: 1879391
cagacugaguuuccugaga

SEQ ID NO: 1903643 - RNA, 19 nt, Artificial Sequence
  Description of Artificial Sequence: Synthetic oligonucleotide
  Antisense strand to SEQ ID NO: 1903642
ucucaggaaacucagucug

SEQ ID NO: 1903644 - RNA, 19 nt, Artificial Sequence
  Description of Artificial Sequence: Synthetic oligonucleotide
  Sense strand starting at position 1287 of SEQ ID NO: 1879391
acauuagauccuugaaugu

SEQ ID NO: 1903645 - RNA, 19 nt, Artificial Sequence
  Description of Artificial Sequence: Synthetic oligonucleotide
  Antisense strand to SEQ ID NO: 1903644
acauucaaggaucuaaugu

SEQ ID NO: 1903646 - RNA, 19 nt, Artificial Sequence
  Description of Artificial Sequence: Synthetic oligonucleotide
  Sense strand starting at position 1305 of SEQ ID NO: 1879391
ugcguaucugcucugguua

SEQ ID NO: 1903647 - RNA, 19 nt, Artificial Sequence
  Description of Artificial Sequence: Synthetic oligonucleotide
  Antisense strand to SEQ ID NO: 1903646
uaaccagagcagauacgca

SEQ ID NO: 1903648 - RNA, 19 nt, Artificial Sequence
  Description of Artificial Sequence: Synthetic oligonucleotide
  Sense strand starting at position 1394 of SEQ ID NO: 1879391
aaggguuggagcugagaau

SEQ ID NO: 1903649 - RNA, 19 nt, Artificial Sequence
  Description of Artificial Sequence: Synthetic oligonucleotide
  Antisense strand to SEQ ID NO: 1903648
auucucagcuccaacccuu

SEQ ID NO: 1903650 - RNA, 19 nt, Artificial Sequence
  Description of Artificial Sequence: Synthetic oligonucleotide
  Sense strand starting at position 1405 of SEQ ID NO: 1879391
cugagaauuuaguccgucu

SEQ ID NO: 1903651 - RNA, 19 nt, Artificial Sequence
  Description of Artificial Sequence: Synthetic oligonucleotide
  Antisense strand to SEQ ID NO: 1903650
agacggacuaaauucucag

SEQ ID NO: 1903652 - RNA, 19 nt, Artificial Sequence
  Description of Artificial Sequence: Synthetic oligonucleotide
  Sense strand starting at position 1407 of SEQ ID NO: 1879391
gagaauuuaguccgucucu

SEQ ID NO: 1903653 - RNA, 19 nt, Artificial Sequence
  Description of Artificial Sequence: Synthetic oligonucleotide
  Antisense strand to SEQ ID NO: 1903652
agagacggacuaaauucuc

SEQ ID NO: 1903654 - RNA, 19 nt, Artificial Sequence
  Description of Artificial Sequence: Synthetic oligonucleotide
  Sense strand starting at position 1465 of SEQ ID NO: 1879391
cugaaauauuaacuggugu

SEQ ID NO: 1903655 - RNA, 19 nt, Artificial Sequence
  Description of Artificial Sequence: Synthetic oligonucleotide
  Antisense strand to SEQ ID NO: 1903654
acaccaguuaauauuucag

SEQ ID NO: 1903656 - RNA, 19 nt, Artificial Sequence
  Description of Artificial Sequence: Synthetic oligonucleotide
  Sense strand starting at position 1527 of SEQ ID NO: 1879391
cguucuacagcccagagau

SEQ ID NO: 1903657 - RNA, 19 nt, Artificial Sequence
  Description of Artificial Sequence: Synthetic oligonucleotide
  Antisense strand to SEQ ID NO: 1903656
aucucugggcuguagaacg

SEQ ID NO: 1903658 - RNA, 19 nt, Artificial Sequence
  Description of Artificial Sequence: Synthetic oligonucleotide
  Sense strand starting at position 1555 of SEQ ID NO: 1879391
auagaaaucuuacugugug

SEQ ID NO: 1903659 - RNA, 19 nt, Artificial Sequence
  Description of Artificial Sequence: Synthetic oligonucleotide
  Antisense strand to SEQ ID NO: 1903658
cacacaguaagauuucuau

SEQ ID NO: 1903660 - RNA, 19 nt, Artificial Sequence
  Description of Artificial Sequence: Synthetic oligonucleotide
  Sense strand starting at position 1739 of SEQ ID NO: 1879391
ucacucacuccaggaauga

SEQ ID NO: 1903661 - RNA, 19 nt, Artificial Sequence
  Description of Artificial Sequence: Synthetic oligonucleotide
  Antisense strand to SEQ ID NO: 1903660
ucauuccuggagugaguga

SEQ ID NO: 1903662 - RNA, 19 nt, Artificial Sequence
  Description of Artificial Sequence: Synthetic oligonucleotide
  Sense strand starting at position 1836 of SEQ ID NO: 1879391
uggucucccugacuuaaag

SEQ ID NO: 1903663 - RNA, 19 nt, Artificial Sequence
  Description of Artificial Sequence: Synthetic oligonucleotide
  Antisense strand to SEQ ID NO: 1903662
cuuuaagucagggagacca

SEQ ID NO: 1903664 - RNA, 19 nt, Artificial Sequence
  Description of Artificial Sequence: Synthetic oligonucleotide
  Sense strand starting at position 1934 of SEQ ID NO: 1879391
uuauuacgagagugaaaga

SEQ ID NO: 1903665 - RNA, 19 nt, Artificial Sequence
  Description of Artificial Sequence: Synthetic oligonucleotide
  Antisense strand to SEQ ID NO: 1903664
ucuuucacucucguaauaa

SEQ ID NO: 1903666 - RNA, 19 nt, Artificial Sequence
  Description of Artificial Sequence: Synthetic oligonucleotide
  Sense strand starting at position 2099 of SEQ ID NO: 1879391
cagagugaugauuggucca

SEQ ID NO: 1903667 - RNA, 19 nt, Artificial Sequence
  Description of Artificial Sequence: Synthetic oligonucleotide
  Antisense strand to SEQ ID NO: 1903666
uggaccaaucaucacucug

SEQ ID NO: 1903668 - RNA, 19 nt, Artificial Sequence
  Description of Artificial Sequence: Synthetic oligonucleotide
  Sense strand starting at position 2101 of SEQ ID NO: 1879391
gagugaugauugguccauu

SEQ ID NO: 1903669 - RNA, 19 nt, Artificial Sequence
  Description of Artificial Sequence: Synthetic oligonucleotide
  Antisense strand to SEQ ID NO: 1903668
aauggaccaaucaucacuc

SEQ ID NO: 1903670 - RNA, 19 nt, Artificial Sequence
  Description of Artificial Sequence: Synthetic oligonucleotide
  Sense strand starting at position 2273 of SEQ ID NO: 1879391
ucauguguccuccacuuaa

SEQ ID NO: 1903671 - RNA, 19 nt, Artificial Sequence
  Description of Artificial Sequence: Synthetic oligonucleotide
  Antisense strand to SEQ ID NO: 1903670
uuaaguggaggacacauga

SEQ ID NO: 1903672 - RNA, 19 nt, Artificial Sequence
  Description of Artificial Sequence: Synthetic oligonucleotide
  Sense strand starting at position 2308 of SEQ ID NO: 1879391
uccuuugcccagggauaca

SEQ ID NO: 1903673 - RNA, 19 nt, Artificial Sequence
  Description of Artificial Sequence: Synthetic oligonucleotide
  Antisense strand to SEQ ID NO: 1903672
uguaucccugggcaaagga

SEQ ID NO: 1903674 - RNA, 19 nt, Artificial Sequence
  Description of Artificial Sequence: Synthetic oligonucleotide
  Sense strand starting at position 2333 of SEQ ID NO: 1879391
auguguuaauaucucacua

SEQ ID NO: 1903675 - RNA, 19 nt, Artificial Sequence
  Description of Artificial Sequence: Synthetic oligonucleotide
  Antisense strand to SEQ ID NO: 1903674
uagugagauauuaacacau

SEQ ID NO: 1903676 - RNA, 19 nt, Artificial Sequence
  Description of Artificial Sequence: Synthetic oligonucleotide
  Sense strand starting at position 2412 of SEQ ID NO: 1879391
uacugaaccguuuaugauu

SEQ ID NO: 1903677 - RNA, 19 nt, Artificial Sequence
  Description of Artificial Sequence: Synthetic oligonucleotide
  Antisense strand to SEQ ID NO: 1903676
aaucauaaacgguucagua

SEQ ID NO: 1903678 - RNA, 19 nt, Artificial Sequence
  Description of Artificial Sequence: Synthetic oligonucleotide
  Sense strand starting at position 2576 of SEQ ID NO: 1879391
agaaacacucugugaccau

SEQ ID NO: 1903679 - RNA, 19 nt, Artificial Sequence
  Description of Artificial Sequence: Synthetic oligonucleotide
  Antisense strand to SEQ ID NO: 1903678
auggucacagaguguuucu

SEQ ID NO: 1903680 - RNA, 19 nt, Artificial Sequence
  Description of Artificial Sequence: Synthetic oligonucleotide
  Sense strand starting at position 2600 of SEQ ID NO: 1879391
uucccagagcaccaugaau

SEQ ID NO: 1903681 - RNA, 19 nt, Artificial Sequence
  Description of Artificial Sequence: Synthetic oligonucleotide
  Antisense strand to SEQ ID NO: 1903680
auucauggugcucugggaa

SEQ ID NO: 1903682 - RNA, 19 nt, Artificial Sequence
  Description of Artificial Sequence: Synthetic oligonucleotide
  Sense strand starting at position 2628 of SEQ ID NO: 1879391
cuaccauugugacucuaca

SEQ ID NO: 1903683 - RNA, 19 nt, Artificial Sequence
  Description of Artificial Sequence: Synthetic oligonucleotide
  Antisense strand to SEQ ID NO: 1903682
uguagagucacaaugguag

SEQ ID NO: 1903684 - RNA, 19 nt, Artificial Sequence
  Description of Artificial Sequence: Synthetic oligonucleotide
  Sense strand starting at position 2659 of SEQ ID NO: 1879391
guguauuugucuguauccu

SEQ ID NO: 1903685 - RNA, 19 nt, Artificial Sequence
  Description of Artificial Sequence: Synthetic oligonucleotide
  Antisense strand to SEQ ID NO: 1903684
aggauacagacaaauacac

SEQ ID NO: 1903686 - RNA, 19 nt, Artificial Sequence
  Description of Artificial Sequence: Synthetic oligonucleotide
  Sense strand starting at position 2739 of SEQ ID NO: 1879391
uaacuuggguuccuuagaa

SEQ ID NO: 1903687 - RNA, 19 nt, Artificial Sequence
  Description of Artificial Sequence: Synthetic oligonucleotide
  Antisense strand to SEQ ID NO: 1903686
uucuaaggaacccaaguua

SEQ ID NO: 1903688 - RNA, 19 nt, Artificial Sequence
  Description of Artificial Sequence: Synthetic oligonucleotide
  Sense strand starting at position 2768 of SEQ ID NO: 1879391
aggugagaauucuucuuac

SEQ ID NO: 1903689 - RNA, 19 nt, Artificial Sequence
  Description of Artificial Sequence: Synthetic oligonucleotide
  Antisense strand to SEQ ID NO: 1903688
guaagaagaauucucaccu

SEQ ID NO: 1903690 - RNA, 19 nt, Artificial Sequence
  Description of Artificial Sequence: Synthetic oligonucleotide
  Sense strand starting at position 3398 of SEQ ID NO: 1879391
cuucguuuaguucuaguuu

SEQ ID NO: 1903691 - RNA, 19 nt, Artificial Sequence
  Description of Artificial Sequence: Synthetic oligonucleotide
  Antisense strand to SEQ ID NO: 1903690
aaacuagaacuaaacgaag

SEQ ID NO: 1903692 - RNA, 19 nt, Artificial Sequence
  Description of Artificial Sequence: Synthetic oligonucleotide
  Sense strand starting at position 3454 of SEQ ID NO: 1879391
gagcacggccauuaauauu

SEQ ID NO: 1903693 - RNA, 19 nt, Artificial Sequence
  Description of Artificial Sequence: Synthetic oligonucleotide
  Antisense strand to SEQ ID NO: 1903692
aauauuaauggccgugcuc

SEQ ID NO: 1903694 - RNA, 19 nt, Artificial Sequence
  Description of Artificial Sequence: Synthetic oligonucleotide
  Sense strand starting at position 3532 of SEQ ID NO: 1879391
ucucaaauugagugggacu

SEQ ID NO: 1903695 - RNA, 19 nt, Artificial Sequence
  Description of Artificial Sequence: Synthetic oligonucleotide
  Antisense strand to SEQ ID NO: 1903694
agucccacucaauuugaga

SEQ ID NO: 1903696 - RNA, 19 nt, Artificial Sequence
  Description of Artificial Sequence: Synthetic oligonucleotide
  Sense strand starting at position 3533 of SEQ ID NO: 1879391
cucaaauugagugggacuu

SEQ ID NO: 1903697 - RNA, 19 nt, Artificial Sequence
  Description of Artificial Sequence: Synthetic oligonucleotide
  Antisense strand to SEQ ID NO: 1903696
aagucccacucaauuugag

SEQ ID NO: 1903698 - RNA, 19 nt, Artificial Sequence
  Description of Artificial Sequence: Synthetic oligonucleotide
  Sense strand starting at position 3534 of SEQ ID NO: 1879391
ucaaauugagugggacuua

SEQ ID NO: 1903699 - RNA, 19 nt, Artificial Sequence
  Description of Artificial Sequence: Synthetic oligonucleotide
  Antisense strand to SEQ ID NO: 1903698
uaagucccacucaauuuga

SEQ ID NO: 1903700 - RNA, 19 nt, Artificial Sequence
  Description of Artificial Sequence: Synthetic oligonucleotide
  Sense strand starting at position 3555 of SEQ ID NO: 1879391
gggagaagguuucugucaa

SEQ ID NO: 1903701 - RNA, 19 nt, Artificial Sequence
  Description of Artificial Sequence: Synthetic oligonucleotide
  Antisense strand to SEQ ID NO: 1903700
uugacagaaaccuucuccc

SEQ ID NO: 1903702 - RNA, 19 nt, Artificial Sequence
  Description of Artificial Sequence: Synthetic oligonucleotide
  Sense strand starting at position 3563 of SEQ ID NO: 1879391
guuucugucaauuaggaga

SEQ ID NO: 1903703 - RNA, 19 nt, Artificial Sequence
  Description of Artificial Sequence: Synthetic oligonucleotide
  Antisense strand to SEQ ID NO: 1903702
ucuccuaauugacagaaac

SEQ ID NO: 1903704 - RNA, 19 nt, Artificial Sequence
  Description of Artificial Sequence: Synthetic oligonucleotide
  Sense strand starting at position 182 of SEQ ID NO: 1879392
gucuuaaggagauguuaga

SEQ ID NO: 1903705 - RNA, 19 nt, Artificial Sequence
  Description of Artificial Sequence: Synthetic oligonucleotide
  Antisense strand to SEQ ID NO: 1903704
ucuaacaucuccuuaagac

SEQ ID NO: 1903706 - RNA, 19 nt, Artificial Sequence
  Description of Artificial Sequence: Synthetic oligonucleotide
  Sense strand starting at position 327 of SEQ ID NO: 1879392
cuggcauuccgcuaauuuc

SEQ ID NO: 1903707 - RNA, 19 nt, Artificial Sequence
  Description of Artificial Sequence: Synthetic oligonucleotide
  Antisense strand to SEQ ID NO: 1903706
gaaauuagcggaaugccag

SEQ ID NO: 1903708 - RNA, 19 nt, Artificial Sequence
  Description of Artificial Sequence: Synthetic oligonucleotide
  Sense strand starting at position 337 of SEQ ID NO: 1879392
gcuaauuucugccuggcua

SEQ ID NO: 1903709 - RNA, 19 nt, Artificial Sequence
  Description of Artificial Sequence: Synthetic oligonucleotide
  Antisense strand to SEQ ID NO: 1903708
uagccaggcagaaauuagc

SEQ ID NO: 1903710 - RNA, 19 nt, Artificial Sequence
  Description of Artificial Sequence: Synthetic oligonucleotide
  Sense strand starting at position 375 of SEQ ID NO: 1879392
auacacaugugagaggaaa

SEQ ID NO: 1903711 - RNA, 19 nt, Artificial Sequence
  Description of Artificial Sequence: Synthetic oligonucleotide
  Antisense strand to SEQ ID NO: 1903710
uuuccucucacauguguau

SEQ ID NO: 1903712 - RNA, 19 nt, Artificial Sequence
  Description of Artificial Sequence: Synthetic oligonucleotide
  Sense strand starting at position 439 of SEQ ID NO: 1879392
uguagcagaucuuuaacua

SEQ ID NO: 1903713 - RNA, 19 nt, Artificial Sequence
  Description of Artificial Sequence: Synthetic oligonucleotide
  Antisense strand to SEQ ID NO: 1903712
uaguuaaagaucugcuaca

SEQ ID NO: 1903714 - RNA, 19 nt, Artificial Sequence
  Description of Artificial Sequence: Synthetic oligonucleotide
  Sense strand starting at position 440 of SEQ ID NO: 1879392
guagcagaucuuuaacuau

SEQ ID NO: 1903715 - RNA, 19 nt, Artificial Sequence
  Description of Artificial Sequence: Synthetic oligonucleotide
  Antisense strand to SEQ ID NO: 1903714
auaguuaaagaucugcuac

SEQ ID NO: 1903716 - RNA, 19 nt, Artificial Sequence
  Description of Artificial Sequence: Synthetic oligonucleotide
  Sense strand starting at position 443 of SEQ ID NO: 1879392
gcagaucuuuaacuaugua

SEQ ID NO: 1903717 - RNA, 19 nt, Artificial Sequence
  Description of Artificial Sequence: Synthetic oligonucleotide
  Antisense strand to SEQ ID NO: 1903716
uacauaguuaaagaucugc

SEQ ID NO: 1903718 - RNA, 19 nt, Artificial Sequence
  Description of Artificial Sequence: Synthetic oligonucleotide
  Sense strand starting at position 464 of SEQ ID NO: 1879392
guuugaccuugggcaagua

SEQ ID NO: 1903719 - RNA, 19 nt, Artificial Sequence
  Description of Artificial Sequence: Synthetic oligonucleotide
  Antisense strand to SEQ ID NO: 1903718
uacuugcccaaggucaaac

SEQ ID NO: 1903720 - RNA, 19 nt, Artificial Sequence
  Description of Artificial Sequence: Synthetic oligonucleotide
  Sense strand starting at position 563 of SEQ ID NO: 1879392
gaggcuuuggguuguaaau

SEQ ID NO: 1903721 - RNA, 19 nt, Artificial Sequence
  Description of Artificial Sequence: Synthetic oligonucleotide
  Antisense strand to SEQ ID NO: 1903720
auuuacaacccaaagccuc

SEQ ID NO: 1903722 - RNA, 19 nt, Artificial Sequence
  Description of Artificial Sequence: Synthetic oligonucleotide
  Sense strand starting at position 569 of SEQ ID NO: 1879392
uuggguuguaaaugaccaa

SEQ ID NO: 1903723 - RNA, 19 nt, Artificial Sequence
  Description of Artificial Sequence: Synthetic oligonucleotide
  Antisense strand to SEQ ID NO: 1903722
uuggucauuuacaacccaa

SEQ ID NO: 1903724 - RNA, 19 nt, Artificial Sequence
  Description of Artificial Sequence: Synthetic oligonucleotide
  Sense strand starting at position 626 of SEQ ID NO: 1879392
augauauguauugggucau

SEQ ID NO: 1903725 - RNA, 19 nt, Artificial Sequence
  Description of Artificial Sequence: Synthetic oligonucleotide
  Antisense strand to SEQ ID NO: 1903724
augacccaauacauaucau

SEQ ID NO: 1903726 - RNA, 19 nt, Artificial Sequence
  Description of Artificial Sequence: Synthetic oligonucleotide
  Sense strand starting at position 681 of SEQ ID NO: 1879392
uaaaguuuccguuaguacu

SEQ ID NO: 1903727 - RNA, 19 nt, Artificial Sequence
  Description of Artificial Sequence: Synthetic oligonucleotide
  Antisense strand to SEQ ID NO: 1903726
aguacuaacggaaacuuua

SEQ ID NO: 1903728 - RNA, 19 nt, Artificial Sequence
  Description of Artificial Sequence: Synthetic oligonucleotide
  Sense strand starting at position 768 of SEQ ID NO: 1879392
ccagaaucucagggcuaca

SEQ ID NO: 1903729 - RNA, 19 nt, Artificial Sequence
  Description of Artificial Sequence: Synthetic oligonucleotide
  Antisense strand to SEQ ID NO: 1903728
uguagcccugagauucugg

SEQ ID NO: 1903730 - RNA, 19 nt, Artificial Sequence
  Description of Artificial Sequence: Synthetic oligonucleotide
  Sense strand starting at position 834 of SEQ ID NO: 1879392
uucugaaaguuaguccgau

SEQ ID NO: 1903731 - RNA, 19 nt, Artificial Sequence
  Description of Artificial Sequence: Synthetic oligonucleotide
  Antisense strand to SEQ ID NO: 1903730
aucggacuaacuuucagaa

SEQ ID NO: 1903732 - RNA, 19 nt, Artificial Sequence
  Description of Artificial Sequence: Synthetic oligonucleotide
  Sense strand starting at position 835 of SEQ ID NO: 1879392
ucugaaaguuaguccgauu

SEQ ID NO: 1903733 - RNA, 19 nt, Artificial Sequence
  Description of Artificial Sequence: Synthetic oligonucleotide
  Antisense strand to SEQ ID NO: 1903732
aaucggacuaacuuucaga

SEQ ID NO: 1903734 - RNA, 19 nt, Artificial Sequence
  Description of Artificial Sequence: Synthetic oligonucleotide
  Sense strand starting at position 888 of SEQ ID NO: 1879392
aucaucauagcuggaggau

SEQ ID NO: 1903735 - RNA, 19 nt, Artificial Sequence
  Description of Artificial Sequence: Synthetic oligonucleotide
  Antisense strand to SEQ ID NO: 1903734
auccuccagcuaugaugau

SEQ ID NO: 1903736 - RNA, 19 nt, Artificial Sequence
  Description of Artificial Sequence: Synthetic oligonucleotide
  Sense strand starting at position 913 of SEQ ID NO: 1879392
ugguuaucagcuuaaccuu

SEQ ID NO: 1903737 - RNA, 19 nt, Artificial Sequence
  Description of Artificial Sequence: Synthetic oligonucleotide
  Antisense strand to SEQ ID NO: 1903736
aagguuaagcugauaacca

SEQ ID NO: 1903738 - RNA, 19 nt, Artificial Sequence
  Description of Artificial Sequence: Synthetic oligonucleotide
  Sense strand starting at position 921 of SEQ ID NO: 1879392
agcuuaaccuuggcaauau

SEQ ID NO: 1903739 - RNA, 19 nt, Artificial Sequence
  Description of Artificial Sequence: Synthetic oligonucleotide
  Antisense strand to SEQ ID NO: 1903738
auauugccaagguuaagcu

SEQ ID NO: 1903740 - RNA, 19 nt, Artificial Sequence
  Description of Artificial Sequence: Synthetic oligonucleotide
  Sense strand starting at position 932 of SEQ ID NO: 1879392
ggcaauaugugcucuaaau

SEQ ID NO: 1903741 - RNA, 19 nt, Artificial Sequence
  Description of Artificial Sequence: Synthetic oligonucleotide
  Antisense strand to SEQ ID NO: 1903740
auuuagagcacauauugcc

SEQ ID NO: 1903742 - RNA, 19 nt, Artificial Sequence
  Description of Artificial Sequence: Synthetic oligonucleotide
  Sense strand starting at position 988 of SEQ ID NO: 1879392
aggaaucuuuaagaacaaa

SEQ ID NO: 1903743 - RNA, 19 nt, Artificial Sequence
  Description of Artificial Sequence: Synthetic oligonucleotide
  Antisense strand to SEQ ID NO: 1903742
uuuguucuuaaagauuccu

SEQ ID NO: 1903744 - RNA, 19 nt, Artificial Sequence
  Description of Artificial Sequence: Synthetic oligonucleotide
  Sense strand starting at position 1118 of SEQ ID NO: 1879392
ggagaaguaaguuggcuuu

SEQ ID NO: 1903745 - RNA, 19 nt, Artificial Sequence
  Description of Artificial Sequence: Synthetic oligonucleotide
  Antisense strand to SEQ ID NO: 1903744
aaagccaacuuacuucucc

SEQ ID NO: 1903746 - RNA, 19 nt, Artificial Sequence
  Description of Artificial Sequence: Synthetic oligonucleotide
  Sense strand starting at position 1120 of SEQ ID NO: 1879392
agaaguaaguuggcuuuaa

SEQ ID NO: 1903747 - RNA, 19 nt, Artificial Sequence
  Description of Artificial Sequence: Synthetic oligonucleotide
  Antisense strand to SEQ ID NO: 1903746
uuaaagccaacuuacuucu

SEQ ID NO: 1903748 - RNA, 19 nt, Artificial Sequence
  Description of Artificial Sequence: Synthetic oligonucleotide
  Sense strand starting at position 1121 of SEQ ID NO: 1879392
gaaguaaguuggcuuuaag

SEQ ID NO: 1903749 - RNA, 19 nt, Artificial Sequence
  Description of Artificial Sequence: Synthetic oligonucleotide
  Antisense strand to SEQ ID NO: 1903748
cuuaaagccaacuuacuuc

SEQ ID NO: 1903750 - RNA, 19 nt, Artificial Sequence
  Description of Artificial Sequence: Synthetic oligonucleotide
  Sense strand starting at position 1124 of SEQ ID NO: 1879392
guaaguuggcuuuaagcau

SEQ ID NO: 1903751 - RNA, 19 nt, Artificial Sequence
  Description of Artificial Sequence: Synthetic oligonucleotide
  Antisense strand to SEQ ID NO: 1903750
augcuuaaagccaacuuac

SEQ ID NO: 1903752 - RNA, 19 nt, Artificial Sequence
  Description of Artificial Sequence: Synthetic oligonucleotide
  Sense strand starting at position 1128 of SEQ ID NO: 1879392
guuggcuuuaagcaugaaa

SEQ ID NO: 1903753 - RNA, 19 nt, Artificial Sequence
  Description of Artificial Sequence: Synthetic oligonucleotide
  Antisense strand to SEQ ID NO: 1903752
uuucaugcuuaaagccaac

SEQ ID NO: 1903754 - RNA, 19 nt, Artificial Sequence
  Description of Artificial Sequence: Synthetic oligonucleotide
  Sense strand starting at position 1130 of SEQ ID NO: 1879392
uggcuuuaagcaugaaaga

SEQ ID NO: 1903755 - RNA, 19 nt, Artificial Sequence
  Description of Artificial Sequence: Synthetic oligonucleotide
  Antisense strand to SEQ ID NO: 1903754
ucuuucaugcuuaaagcca

SEQ ID NO: 1903756 - RNA, 19 nt, Artificial Sequence
  Description of Artificial Sequence: Synthetic oligonucleotide
  Sense strand starting at position 2006 of SEQ ID NO: 1879392
caugucucuuugguuaaag

SEQ ID NO: 1903757 - RNA, 19 nt, Artificial Sequence
  Description of Artificial Sequence: Synthetic oligonucleotide
  Antisense strand to SEQ ID NO: 1903756
cuuuaaccaaagagacaug

SEQ ID NO: 1903758 - RNA, 19 nt, Artificial Sequence
  Description of Artificial Sequence: Synthetic oligonucleotide
  Sense strand starting at position 2008 of SEQ ID NO: 1879392
ugucucuuugguuaaagca

SEQ ID NO: 1903759 - RNA, 19 nt, Artificial Sequence
  Description of Artificial Sequence: Synthetic oligonucleotide
  Antisense strand to SEQ ID NO: 1903758
ugcuuuaaccaaagagaca

SEQ ID NO: 1903760 - RNA, 19 nt, Artificial Sequence
  Description of Artificial Sequence: Synthetic oligonucleotide
  Sense strand starting at position 2192 of SEQ ID NO: 1879392
ucuggugaaggauguguaa

SEQ ID NO: 1903761 - RNA, 19 nt, Artificial Sequence
  Description of Artificial Sequence: Synthetic oligonucleotide
  Antisense strand to SEQ ID NO: 1903760
uuacacauccuucaccaga

SEQ ID NO: 1903762 - RNA, 19 nt, Artificial Sequence
  Description of Artificial Sequence: Synthetic oligonucleotide
  Sense strand starting at position 2194 of SEQ ID NO: 1879392
uggugaaggauguguaaca

SEQ ID NO: 1903763 - RNA, 19 nt, Artificial Sequence
  Description of Artificial Sequence: Synthetic oligonucleotide
  Antisense strand to SEQ ID NO: 1903762
uguuacacauccuucacca

SEQ ID NO: 1903764 - RNA, 19 nt, Artificial Sequence
  Description of Artificial Sequence: Synthetic oligonucleotide
  Sense strand starting at position 2195 of SEQ ID NO: 1879392
ggugaaggauguguaacau

SEQ ID NO: 1903765 - RNA, 19 nt, Artificial Sequence
  Description of Artificial Sequence: Synthetic oligonucleotide
  Antisense strand to SEQ ID NO: 1903764
auguuacacauccuucacc

SEQ ID NO: 1903766 - RNA, 19 nt, Artificial Sequence
  Description of Artificial Sequence: Synthetic oligonucleotide
  Sense strand starting at position 2248 of SEQ ID NO: 1879392
aguagacuuucccuccagu

SEQ ID NO: 1903767 - RNA, 19 nt, Artificial Sequence
  Description of Artificial Sequence: Synthetic oligonucleotide
  Antisense strand to SEQ ID NO: 1903766
acuggagggaaagucuacu

SEQ ID NO: 1903768 - RNA, 19 nt, Artificial Sequence
  Description of Artificial Sequence: Synthetic oligonucleotide
  Sense strand starting at position 2285 of SEQ ID NO: 1879392
uuacaugccuguucugaaa

SEQ ID NO: 1903769 - RNA, 19 nt, Artificial Sequence
  Description of Artificial Sequence: Synthetic oligonucleotide
  Antisense strand to SEQ ID NO: 1903768
uuucagaacaggcauguaa

SEQ ID NO: 1903770 - RNA, 19 nt, Artificial Sequence
  Description of Artificial Sequence: Synthetic oligonucleotide
  Sense strand starting at position 2373 of SEQ ID NO: 1879392
uuuauuacuggccauggaa

SEQ ID NO: 1903771 - RNA, 19 nt, Artificial Sequence
  Description of Artificial Sequence: Synthetic oligonucleotide
  Antisense strand to SEQ ID NO: 1903770
uuccauggccaguaauaaa

SEQ ID NO: 1903772 - RNA, 19 nt, Artificial Sequence
  Description of Artificial Sequence: Synthetic oligonucleotide
  Sense strand starting at position 3137 of SEQ ID NO: 1879392
gguagauauaaauggcaca

SEQ ID NO: 1903773 - RNA, 19 nt, Artificial Sequence
  Description of Artificial Sequence: Synthetic oligonucleotide
  Antisense strand to SEQ ID NO: 1903772
ugugccauuuauaucuacc

SEQ ID NO: 1903774 - RNA, 19 nt, Artificial Sequence
  Description of Artificial Sequence: Synthetic oligonucleotide
  Sense strand starting at position 3769 of SEQ ID NO: 1879392
ucuguacgugaguauauua

SEQ ID NO: 1903775 - RNA, 19 nt, Artificial Sequence
  Description of Artificial Sequence: Synthetic oligonucleotide
  Antisense strand to SEQ ID NO: 1903774
uaauauacucacguacaga

SEQ ID NO: 1903776 - RNA, 19 nt, Artificial Sequence
  Description of Artificial Sequence: Synthetic oligonucleotide
  Sense strand starting at position 3801 of SEQ ID NO: 1879392
uggauaaugugaccuauuc

SEQ ID NO: 1903777 - RNA, 19 nt, Artificial Sequence
  Description of Artificial Sequence: Synthetic oligonucleotide
  Antisense strand to SEQ ID NO: 1903776
gaauaggucacauuaucca

SEQ ID NO: 1903778 - RNA, 19 nt, Artificial Sequence
  Description of Artificial Sequence: Synthetic oligonucleotide
  Sense strand starting at position 3881 of SEQ ID NO: 1879392
agaccaauauuugaguuau

SEQ ID NO: 1903779 - RNA, 19 nt, Artificial Sequence
  Description of Artificial Sequence: Synthetic oligonucleotide
  Antisense strand to SEQ ID NO: 1903778
auaacucaaauauuggucu

SEQ ID NO: 1903780 - RNA, 19 nt, Artificial Sequence
  Description of Artificial Sequence: Synthetic oligonucleotide
  Sense strand starting at position 3900 of SEQ ID NO: 1879392
aguucuauguauuuagcua

SEQ ID NO: 1903781 - RNA, 19 nt, Artificial Sequence
  Description of Artificial Sequence: Synthetic oligonucleotide
  Antisense strand to SEQ ID NO: 1903780
uagcuaaauacauagaacu

SEQ ID NO: 1903782 - RNA, 19 nt, Artificial Sequence
  Description of Artificial Sequence: Synthetic oligonucleotide
  Sense strand starting at position 3934 of SEQ ID NO: 1879392
gcuuaaggaucauugaagu

SEQ ID NO: 1903783 - RNA, 19 nt, Artificial Sequence
  Description of Artificial Sequence: Synthetic oligonucleotide
  Antisense strand to SEQ ID NO: 1903782
acuucaaugauccuuaagc

SEQ ID NO: 1903784 - RNA, 19 nt, Artificial Sequence
  Description of Artificial Sequence: Synthetic oligonucleotide
  Sense strand starting at position 95 of SEQ ID NO: 1879393
gcuccuuccuggguggaau

SEQ ID NO: 1903785 - RNA, 19 nt, Artificial Sequence
  Description of Artificial Sequence: Synthetic oligonucleotide
  Antisense strand to SEQ ID NO: 1903784
auuccacccaggaaggagc

SEQ ID NO: 1903786 - RNA, 19 nt, Artificial Sequence
  Description of Artificial Sequence: Synthetic oligonucleotide
  Sense strand starting at position 129 of SEQ ID NO: 1879393
ugggcaaaccugugaggaa

SEQ ID NO: 1903787 - RNA, 19 nt, Artificial Sequence
  Description of Artificial Sequence: Synthetic oligonucleotide
  Antisense strand to SEQ ID NO: 1903786
uuccucacagguuugccca

SEQ ID NO: 1903788 - RNA, 19 nt, Artificial Sequence
  Description of Artificial Sequence: Synthetic oligonucleotide
  Sense strand starting at position 378 of SEQ ID NO: 1879393
cggugaagugaccgaauga

SEQ ID NO: 1903789 - RNA, 19 nt, Artificial Sequence
  Description of Artificial Sequence: Synthetic oligonucleotide
  Antisense strand to SEQ ID NO: 1903788
ucauucggucacuucaccg

SEQ ID NO: 1903790 - RNA, 19 nt, Artificial Sequence
  Description of Artificial Sequence: Synthetic oligonucleotide
  Sense strand starting at position 395 of SEQ ID NO: 1879393
gaaucauagccuggcagga

SEQ ID NO: 1903791 - RNA, 19 nt, Artificial Sequence
  Description of Artificial Sequence: Synthetic oligonucleotide
  Antisense strand to SEQ ID NO: 1903790
uccugccaggcuaugauuc

SEQ ID NO: 1903792 - RNA, 19 nt, Artificial Sequence
  Description of Artificial Sequence: Synthetic oligonucleotide
  Sense strand starting at position 511 of SEQ ID NO: 1879393
cuggaaguguccucaggau

SEQ ID NO: 1903793 - RNA, 19 nt, Artificial Sequence
  Description of Artificial Sequence: Synthetic oligonucleotide
  Antisense strand to SEQ ID NO: 1903792
auccugaggacacuuccag

SEQ ID NO: 1903794 - RNA, 19 nt, Artificial Sequence
  Description of Artificial Sequence: Synthetic oligonucleotide
  Sense strand starting at position 594 of SEQ ID NO: 1879393
ccgaguaagacucaagucu

SEQ ID NO: 1903795 - RNA, 19 nt, Artificial Sequence
  Description of Artificial Sequence: Synthetic oligonucleotide
  Antisense strand to SEQ ID NO: 1903794
agacuugagucuuacucgg

SEQ ID NO: 1903796 - RNA, 19 nt, Artificial Sequence
  Description of Artificial Sequence: Synthetic oligonucleotide
  Sense strand starting at position 628 of SEQ ID NO: 1879393
gcguuauggccaucaggcu

SEQ ID NO: 1903797 - RNA, 19 nt, Artificial Sequence
  Description of Artificial Sequence: Synthetic oligonucleotide
  Antisense strand to SEQ ID NO: 1903796
agccugauggccauaacgc

SEQ ID NO: 1903798 - RNA, 19 nt, Artificial Sequence
  Description of Artificial Sequence: Synthetic oligonucleotide
  Sense strand starting at position 647 of SEQ ID NO: 1879393
gugcucuuucuggacagga

SEQ ID NO: 1903799 - RNA, 19 nt, Artificial Sequence
  Description of Artificial Sequence: Synthetic oligonucleotide
  Antisense strand to SEQ ID NO: 1903798
uccuguccagaaagagcac

SEQ ID NO: 1903800 - RNA, 19 nt, Artificial Sequence
  Description of Artificial Sequence: Synthetic oligonucleotide
  Sense strand starting at position 724 of SEQ ID NO: 1879393
cuuuaauagugucucugaa

SEQ ID NO: 1903801 - RNA, 19 nt, Artificial Sequence
  Description of Artificial Sequence: Synthetic oligonucleotide
  Antisense strand to SEQ ID NO: 1903800
uucagagacacuauuaaag

SEQ ID NO: 1903802 - RNA, 19 nt, Artificial Sequence
  Description of Artificial Sequence: Synthetic oligonucleotide
  Sense strand starting at position 780 of SEQ ID NO: 1879393
cacagaaucucagugugag

SEQ ID NO: 1903803 - RNA, 19 nt, Artificial Sequence
  Description of Artificial Sequence: Synthetic oligonucleotide
  Antisense strand to SEQ ID NO: 1903802
cucacacugagauucugug

SEQ ID NO: 1903804 - RNA, 19 nt, Artificial Sequence
  Description of Artificial Sequence: Synthetic oligonucleotide
  Sense strand starting at position 783 of SEQ ID NO: 1879393
agaaucucagugugagcaa

SEQ ID NO: 1903805 - RNA, 19 nt, Artificial Sequence
  Description of Artificial Sequence: Synthetic oligonucleotide
  Antisense strand to SEQ ID NO: 1903804
uugcucacacugagauucu

SEQ ID NO: 1903806 - RNA, 19 nt, Artificial Sequence
  Description of Artificial Sequence: Synthetic oligonucleotide
  Sense strand starting at position 1000 of SEQ ID NO: 1879393
aagagaguccacugucaga

SEQ ID NO: 1903807 - RNA, 19 nt, Artificial Sequence
  Description of Artificial Sequence: Synthetic oligonucleotide
  Antisense strand to SEQ ID NO: 1903806
ucugacaguggacucucuu

SEQ ID NO: 1903808 - RNA, 19 nt, Artificial Sequence
  Description of Artificial Sequence: Synthetic oligonucleotide
  Sense strand starting at position 1067 of SEQ ID NO: 1879393
gagccuccuggcugacaua

SEQ ID NO: 1903809 - RNA, 19 nt, Artificial Sequence
  Description of Artificial Sequence: Synthetic oligonucleotide
  Antisense strand to SEQ ID NO: 1903808
uaugucagccaggaggcuc

SEQ ID NO: 1903810 - RNA, 19 nt, Artificial Sequence
  Description of Artificial Sequence: Synthetic oligonucleotide
  Sense strand starting at position 1102 of SEQ ID NO: 1879393
gauucucuugauggacagu

SEQ ID NO: 1903811 - RNA, 19 nt, Artificial Sequence
  Description of Artificial Sequence: Synthetic oligonucleotide
  Antisense strand to SEQ ID NO: 1903810
acuguccaucaagagaauc

SEQ ID NO: 1903812 - RNA, 19 nt, Artificial Sequence
  Description of Artificial Sequence: Synthetic oligonucleotide
  Sense strand starting at position 1307 of SEQ ID NO: 1879393
accuguauuuaucaagggu

SEQ ID NO: 1903813 - RNA, 19 nt, Artificial Sequence
  Description of Artificial Sequence: Synthetic oligonucleotide
  Antisense strand to SEQ ID NO: 1903812
acccuugauaaauacaggu

SEQ ID NO: 1903814 - RNA, 19 nt, Artificial Sequence
  Description of Artificial Sequence: Synthetic oligonucleotide
  Sense strand starting at position 1514 of SEQ ID NO: 1879393
auagguguccuccgaaaca

SEQ ID NO: 1903815 - RNA, 19 nt, Artificial Sequence
  Description of Artificial Sequence: Synthetic oligonucleotide
  Antisense strand to SEQ ID NO: 1903814
uguuucggaggacaccuau

SEQ ID NO: 1903816 - RNA, 19 nt, Artificial Sequence
  Description of Artificial Sequence: Synthetic oligonucleotide
  Sense strand starting at position 1538 of SEQ ID NO: 1879393
gccgauaacagaugaggaa

SEQ ID NO: 1903817 - RNA, 19 nt, Artificial Sequence
  Description of Artificial Sequence: Synthetic oligonucleotide
  Antisense strand to SEQ ID NO: 1903816
uuccucaucuguuaucggc

SEQ ID NO: 1903818 - RNA, 19 nt, Artificial Sequence
  Description of Artificial Sequence: Synthetic oligonucleotide
  Sense strand starting at position 1626 of SEQ ID NO: 1879393
gcugcugugcugucuccaa

SEQ ID NO: 1903819 - RNA, 19 nt, Artificial Sequence
  Description of Artificial Sequence: Synthetic oligonucleotide
  Antisense strand to SEQ ID NO: 1903818
uuggagacagcacagcagc

SEQ ID NO: 1903820 - RNA, 19 nt, Artificial Sequence
  Description of Artificial Sequence: Synthetic oligonucleotide
  Sense strand starting at position 1785 of SEQ ID NO: 1879393
uaauucugccacugugaug

SEQ ID NO: 1903821 - RNA, 19 nt, Artificial Sequence
  Description of Artificial Sequence: Synthetic oligonucleotide
  Antisense strand to SEQ ID NO: 1903820
caucacaguggcagaauua

SEQ ID NO: 1903822 - RNA, 19 nt, Artificial Sequence
  Description of Artificial Sequence: Synthetic oligonucleotide
  Sense strand starting at position 1796 of SEQ ID NO: 1879393
cugugaugugccugggaaa

SEQ ID NO: 1903823 - RNA, 19 nt, Artificial Sequence
  Description of Artificial Sequence: Synthetic oligonucleotide
  Antisense strand to SEQ ID NO: 1903822
uuucccaggcacaucacag

SEQ ID NO: 1903824 - RNA, 19 nt, Artificial Sequence
  Description of Artificial Sequence: Synthetic oligonucleotide
  Sense strand starting at position 1797 of SEQ ID NO: 1879393
ugugaugugccugggaaag

SEQ ID NO: 1903825 - RNA, 19 nt, Artificial Sequence
  Description of Artificial Sequence: Synthetic oligonucleotide
  Antisense strand to SEQ ID NO: 1903824
cuuucccaggcacaucaca

SEQ ID NO: 1903826 - RNA, 19 nt, Artificial Sequence
  Description of Artificial Sequence: Synthetic oligonucleotide
  Sense strand starting at position 2050 of SEQ ID NO: 1879393
uccuaccuaggaugauaau

SEQ ID NO: 1903827 - RNA, 19 nt, Artificial Sequence
  Description of Artificial Sequence: Synthetic oligonucleotide
  Antisense strand to SEQ ID NO: 1903826
auuaucauccuagguagga

SEQ ID NO: 1903828 - RNA, 19 nt, Artificial Sequence
  Description of Artificial Sequence: Synthetic oligonucleotide
  Sense strand starting at position 2227 of SEQ ID NO: 1879393
gagccaccucucugaugua

SEQ ID NO: 1903829 - RNA, 19 nt, Artificial Sequence
  Description of Artificial Sequence: Synthetic oligonucleotide
  Antisense strand to SEQ ID NO: 1903828
uacaucagagagguggcuc

SEQ ID NO: 1903830 - RNA, 19 nt, Artificial Sequence
  Description of Artificial Sequence: Synthetic oligonucleotide
  Sense strand starting at position 2298 of SEQ ID NO: 1879393
aagcuaaguccaggaagaa

SEQ ID NO: 1903831 - RNA, 19 nt, Artificial Sequence
  Description of Artificial Sequence: Synthetic oligonucleotide
  Antisense strand to SEQ ID NO: 1903830
uucuuccuggacuuagcuu

SEQ ID NO: 1903832 - RNA, 19 nt, Artificial Sequence
  Description of Artificial Sequence: Synthetic oligonucleotide
  Sense strand starting at position 2415 of SEQ ID NO: 1879393
uuugcuuauuagucaaaug

SEQ ID NO: 1903833 - RNA, 19 nt, Artificial Sequence
  Description of Artificial Sequence: Synthetic oligonucleotide
  Antisense strand to SEQ ID NO: 1903832
cauuugacuaauaagcaaa

SEQ ID NO: 1903834 - RNA, 19 nt, Artificial Sequence
  Description of Artificial Sequence: Synthetic oligonucleotide
  Sense strand starting at position 2495 of SEQ ID NO: 1879393
acuccaugaucccugaagu

SEQ ID NO: 1903835 - RNA, 19 nt, Artificial Sequence
  Description of Artificial Sequence: Synthetic oligonucleotide
  Antisense strand to SEQ ID NO: 1903834
acuucagggaucauggagu

SEQ ID NO: 1903836 - RNA, 19 nt, Artificial Sequence
  Description of Artificial Sequence: Synthetic oligonucleotide
  Sense strand starting at position 2496 of SEQ ID NO: 1879393
cuccaugaucccugaaguc

SEQ ID NO: 1903837 - RNA, 19 nt, Artificial Sequence
  Description of Artificial Sequence: Synthetic oligonucleotide
  Antisense strand to SEQ ID NO: 1903836
gacuucagggaucauggag

SEQ ID NO: 1903838 - RNA, 19 nt, Artificial Sequence
  Description of Artificial Sequence: Synthetic oligonucleotide
  Sense strand starting at position 2506 of SEQ ID NO: 1879393
ccugaagucucuuccagaa

SEQ ID NO: 1903839 - RNA, 19 nt, Artificial Sequence
  Description of Artificial Sequence: Synthetic oligonucleotide
  Antisense strand to SEQ ID NO: 1903838
uucuggaagagacuucagg

SEQ ID NO: 1903840 - RNA, 19 nt, Artificial Sequence
  Description of Artificial Sequence: Synthetic oligonucleotide
  Sense strand starting at position 2758 of SEQ ID NO: 1879393
gcgucaugaggaggaugaa

SEQ ID NO: 1903841 - RNA, 19 nt, Artificial Sequence
  Description of Artificial Sequence: Synthetic oligonucleotide
  Antisense strand to SEQ ID NO: 1903840
uucauccuccucaugacgc

SEQ ID NO: 1903842 - RNA, 19 nt, Artificial Sequence
  Description of Artificial Sequence: Synthetic oligonucleotide
  Sense strand starting at position 2811 of SEQ ID NO: 1879393
ucuugaugucucuaccuca

SEQ ID NO: 1903843 - RNA, 19 nt, Artificial Sequence
  Description of Artificial Sequence: Synthetic oligonucleotide
  Antisense strand to SEQ ID NO: 1903842
ugagguagagacaucaaga

SEQ ID NO: 1903844 - RNA, 19 nt, Artificial Sequence
  Description of Artificial Sequence: Synthetic oligonucleotide
  Sense strand starting at position 2909 of SEQ ID NO: 1879393
gagggcuaccagugauguu

SEQ ID NO: 1903845 - RNA, 19 nt, Artificial Sequence
  Description of Artificial Sequence: Synthetic oligonucleotide
  Antisense strand to SEQ ID NO: 1903844
aacaucacugguagcccuc

SEQ ID NO: 1903846 - RNA, 19 nt, Artificial Sequence
  Description of Artificial Sequence: Synthetic oligonucleotide
  Sense strand starting at position 2910 of SEQ ID NO: 1879393
agggcuaccagugauguuu

SEQ ID NO: 1903847 - RNA, 19 nt, Artificial Sequence
  Description of Artificial Sequence: Synthetic oligonucleotide
  Antisense strand to SEQ ID NO: 1903846
aaacaucacugguagcccu

SEQ ID NO: 1903848 - RNA, 19 nt, Artificial Sequence
  Description of Artificial Sequence: Synthetic oligonucleotide
  Sense strand starting at position 2942 of SEQ ID NO: 1879393
caaugaaugucagccuugu

SEQ ID NO: 1903849 - RNA, 19 nt, Artificial Sequence
  Description of Artificial Sequence: Synthetic oligonucleotide
  Antisense strand to SEQ ID NO: 1903848
acaaggcugacauucauug

SEQ ID NO: 1903850 - RNA, 19 nt, Artificial Sequence
  Description of Artificial Sequence: Synthetic oligonucleotide
  Sense strand starting at position 3417 of SEQ ID NO: 1879393
ggcaauuguauugggcaga

SEQ ID NO: 1903851 - RNA, 19 nt, Artificial Sequence
  Description of Artificial Sequence: Synthetic oligonucleotide
  Antisense strand to SEQ ID NO: 1903850
ucugcccaauacaauugcc

SEQ ID NO: 1903852 - RNA, 19 nt, Artificial Sequence
  Description of Artificial Sequence: Synthetic oligonucleotide
  Sense strand starting at position 3420 of SEQ ID NO: 1879393
aauuguauugggcagagca

SEQ ID NO: 1903853 - RNA, 19 nt, Artificial Sequence
  Description of Artificial Sequence: Synthetic oligonucleotide
  Antisense strand to SEQ ID NO: 1903852
ugcucugcccaauacaauu

SEQ ID NO: 1903854 - RNA, 19 nt, Artificial Sequence
  Description of Artificial Sequence: Synthetic oligonucleotide
  Sense strand starting at position 3422 of SEQ ID NO: 1879393
uuguauugggcagagcaga

SEQ ID NO: 1903855 - RNA, 19 nt, Artificial Sequence
  Description of Artificial Sequence: Synthetic oligonucleotide
  Antisense strand to SEQ ID NO: 1903854
ucugcucugcccaauacaa

SEQ ID NO: 1903856 - RNA, 19 nt, Artificial Sequence
  Description of Artificial Sequence: Synthetic oligonucleotide
  Sense strand starting at position 3690 of SEQ ID NO: 1879393
ugaguccauccauggagaa

SEQ ID NO: 1903857 - RNA, 19 nt, Artificial Sequence
  Description of Artificial Sequence: Synthetic oligonucleotide
  Antisense strand to SEQ ID NO: 1903856
uucuccauggauggacuca

SEQ ID NO: 1903858 - RNA, 19 nt, Artificial Sequence
  Description of Artificial Sequence: Synthetic oligonucleotide
  Sense strand starting at position 3904 of SEQ ID NO: 1879393
aagaaagugucagcuacaa

SEQ ID NO: 1903859 - RNA, 19 nt, Artificial Sequence
  Description of Artificial Sequence: Synthetic oligonucleotide
  Antisense strand to SEQ ID NO: 1903858
uuguagcugacacuuucuu

SEQ ID NO: 1903860 - RNA, 19 nt, Artificial Sequence
  Description of Artificial Sequence: Synthetic oligonucleotide
  Sense strand starting at position 3908 of SEQ ID NO: 1879393
aagugucagcuacaagaga

SEQ ID NO: 1903861 - RNA, 19 nt, Artificial Sequence
  Description of Artificial Sequence: Synthetic oligonucleotide
  Antisense strand to SEQ ID NO: 1903860
ucucuuguagcugacacuu

SEQ ID NO: 1903862 - RNA, 19 nt, Artificial Sequence
  Description of Artificial Sequence: Synthetic oligonucleotide
  Sense strand starting at position 3941 of SEQ ID NO: 1879393
ggacacucaucuccagauu

SEQ ID NO: 1903863 - RNA, 19 nt, Artificial Sequence
  Description of Artificial Sequence: Synthetic oligonucleotide
  Antisense strand to SEQ ID NO: 1903862
aaucuggagaugagugucc

SEQ ID NO: 1903864 - RNA, 19 nt, Artificial Sequence
  Description of Artificial Sequence: Synthetic oligonucleotide
  Sense strand starting at position 451 of SEQ ID NO: 1879394
cuaagcuuccuugauguca

SEQ ID NO: 1903865 - RNA, 19 nt, Artificial Sequence
  Description of Artificial Sequence: Synthetic oligonucleotide
  Antisense strand to SEQ ID NO: 1903864
ugacaucaaggaagcuuag

SEQ ID NO: 1903866 - RNA, 19 nt, Artificial Sequence
  Description of Artificial Sequence: Synthetic oligonucleotide
  Sense strand starting at position 481 of SEQ ID NO: 1879394
ggcaguucccacgaucuca

SEQ ID NO: 1903867 - RNA, 19 nt, Artificial Sequence
  Description of Artificial Sequence: Synthetic oligonucleotide
  Antisense strand to SEQ ID NO: 1903866
ugagaucgugggaacugcc

SEQ ID NO: 1903868 - RNA, 19 nt, Artificial Sequence
  Description of Artificial Sequence: Synthetic oligonucleotide
  Sense strand starting at position 604 of SEQ ID NO: 1879394
ccucuuacuguugaggaca

SEQ ID NO: 1903869 - RNA, 19 nt, Artificial Sequence
  Description of Artificial Sequence: Synthetic oligonucleotide
  Antisense strand to SEQ ID NO: 1903868
uguccucaacaguaagagg

SEQ ID NO: 1903870 - RNA, 19 nt, Artificial Sequence
  Description of Artificial Sequence: Synthetic oligonucleotide
  Sense strand starting at position 900 of SEQ ID NO: 1879394
ucauacucagagugacaca

SEQ ID NO: 1903871 - RNA, 19 nt, Artificial Sequence
  Description of Artificial Sequence: Synthetic oligonucleotide
  Antisense strand to SEQ ID NO: 1903870
ugugucacucugaguauga

SEQ ID NO: 1903872 - RNA, 19 nt, Artificial Sequence
  Description of Artificial Sequence: Synthetic oligonucleotide
  Sense strand starting at position 1399 of SEQ ID NO: 1879394
agagaugacauccguguua

SEQ ID NO: 1903873 - RNA, 19 nt, Artificial Sequence
  Description of Artificial Sequence: Synthetic oligonucleotide
  Antisense strand to SEQ ID NO: 1903872
uaacacggaugucaucucu

SEQ ID NO: 1903874 - RNA, 19 nt, Artificial Sequence
  Description of Artificial Sequence: Synthetic oligonucleotide
  Sense strand starting at position 1401 of SEQ ID NO: 1879394
agaugacauccguguuauu

SEQ ID NO: 1903875 - RNA, 19 nt, Artificial Sequence
  Description of Artificial Sequence: Synthetic oligonucleotide
  Antisense strand to SEQ ID NO: 1903874
aauaacacggaugucaucu

SEQ ID NO: 1903876 - RNA, 19 nt, Artificial Sequence
  Description of Artificial Sequence: Synthetic oligonucleotide
  Sense strand starting at position 1417 of SEQ ID NO: 1879394
auuauugcuccugagacuu

SEQ ID NO: 1903877 - RNA, 19 nt, Artificial Sequence
  Description of Artificial Sequence: Synthetic oligonucleotide
  Antisense strand to SEQ ID NO: 1903876
aagucucaggagcaauaau

SEQ ID NO: 1903878 - RNA, 19 nt, Artificial Sequence
  Description of Artificial Sequence: Synthetic oligonucleotide
  Sense strand starting at position 1425 of SEQ ID NO: 1879394
uccugagacuugccagaaa

SEQ ID NO: 1903879 - RNA, 19 nt, Artificial Sequence
  Description of Artificial Sequence: Synthetic oligonucleotide
  Antisense strand to SEQ ID NO: 1903878
uuucuggcaagucucagga

SEQ ID NO: 1903880 - RNA, 19 nt, Artificial Sequence
  Description of Artificial Sequence: Synthetic oligonucleotide
  Sense strand starting at position 1798 of SEQ ID NO: 1879394
cgggcucagacauacauau

SEQ ID NO: 1903881 - RNA, 19 nt, Artificial Sequence
  Description of Artificial Sequence: Synthetic oligonucleotide
  Antisense strand to SEQ ID NO: 1903880
auauguaugucugagcccg

SEQ ID NO: 1903882 - RNA, 19 nt, Artificial Sequence
  Description of Artificial Sequence: Synthetic oligonucleotide
  Sense strand starting at position 2076 of SEQ ID NO: 1879394
ugggacuuccuguggaaug

SEQ ID NO: 1903883 - RNA, 19 nt, Artificial Sequence
  Description of Artificial Sequence: Synthetic oligonucleotide
  Antisense strand to SEQ ID NO: 1903882
cauuccacaggaaguccca

SEQ ID NO: 1903884 - RNA, 19 nt, Artificial Sequence
  Description of Artificial Sequence: Synthetic oligonucleotide
  Sense strand starting at position 2078 of SEQ ID NO: 1879394
ggacuuccuguggaaugca

SEQ ID NO: 1903885 - RNA, 19 nt, Artificial Sequence
  Description of Artificial Sequence: Synthetic oligonucleotide
  Antisense strand to SEQ ID NO: 1903884
ugcauuccacaggaagucc

SEQ ID NO: 1903886 - RNA, 19 nt, Artificial Sequence
  Description of Artificial Sequence: Synthetic oligonucleotide
  Sense strand starting at position 2289 of SEQ ID NO: 1879394
agagguaacuuccucugau

SEQ ID NO: 1903887 - RNA, 19 nt, Artificial Sequence
  Description of Artificial Sequence: Synthetic oligonucleotide
  Antisense strand to SEQ ID NO: 1903886
aucagaggaaguuaccucu

SEQ ID NO: 1903888 - RNA, 19 nt, Artificial Sequence
  Description of Artificial Sequence: Synthetic oligonucleotide
  Sense strand starting at position 2290 of SEQ ID NO: 1879394
gagguaacuuccucugauu

SEQ ID NO: 1903889 - RNA, 19 nt, Artificial Sequence
  Description of Artificial Sequence: Synthetic oligonucleotide
  Antisense strand to SEQ ID NO: 1903888
aaucagaggaaguuaccuc

SEQ ID NO: 1903890 - RNA, 19 nt, Artificial Sequence
  Description of Artificial Sequence: Synthetic oligonucleotide
  Sense strand starting at position 2301 of SEQ ID NO: 1879394
cucugauucgaaggcauca

SEQ ID NO: 1903891 - RNA, 19 nt, Artificial Sequence
  Description of Artificial Sequence: Synthetic oligonucleotide
  Antisense strand to SEQ ID NO: 1903890
ugaugccuucgaaucagag

SEQ ID NO: 1903892 - RNA, 19 nt, Artificial Sequence
  Description of Artificial Sequence: Synthetic oligonucleotide
  Sense strand starting at position 2303 of SEQ ID NO: 1879394
cugauucgaaggcaucaua

SEQ ID NO: 1903893 - RNA, 19 nt, Artificial Sequence
  Description of Artificial Sequence: Synthetic oligonucleotide
  Antisense strand to SEQ ID NO: 1903892
uaugaugccuucgaaucag

SEQ ID NO: 1903894 - RNA, 19 nt, Artificial Sequence
  Description of Artificial Sequence: Synthetic oligonucleotide
  Sense strand starting at position 2315 of SEQ ID NO: 1879394
caucauauaggcuagugaa

SEQ ID NO: 1903895 - RNA, 19 nt, Artificial Sequence
  Description of Artificial Sequence: Synthetic oligonucleotide
  Antisense strand to SEQ ID NO: 1903894
uucacuagccuauaugaug

SEQ ID NO: 1903896 - RNA, 19 nt, Artificial Sequence
  Description of Artificial Sequence: Synthetic oligonucleotide
  Sense strand starting at position 2328 of SEQ ID NO: 1879394
agugaauggcacugagaau

SEQ ID NO: 1903897 - RNA, 19 nt, Artificial Sequence
  Description of Artificial Sequence: Synthetic oligonucleotide
  Antisense strand to SEQ ID NO: 1903896
auucucagugccauucacu

SEQ ID NO: 1903898 - RNA, 19 nt, Artificial Sequence
  Description of Artificial Sequence: Synthetic oligonucleotide
  Sense strand starting at position 2371 of SEQ ID NO: 1879394
gcaugugugggaugaggau

SEQ ID NO: 1903899 - RNA, 19 nt, Artificial Sequence
  Description of Artificial Sequence: Synthetic oligonucleotide
  Antisense strand to SEQ ID NO: 1903898
auccucaucccacacaugc

SEQ ID NO: 1903900 - RNA, 19 nt, Artificial Sequence
  Description of Artificial Sequence: Synthetic oligonucleotide
  Sense strand starting at position 2420 of SEQ ID NO: 1879394
gcaacacauccguagggaa

SEQ ID NO: 1903901 - RNA, 19 nt, Artificial Sequence
  Description of Artificial Sequence: Synthetic oligonucleotide
  Antisense strand to SEQ ID NO: 1903900
uucccuacggauguguugc

SEQ ID NO: 1903902 - RNA, 19 nt, Artificial Sequence
  Description of Artificial Sequence: Synthetic oligonucleotide
  Sense strand starting at position 2491 of SEQ ID NO: 1879394
cggcacuugagccagagau

SEQ ID NO: 1903903 - RNA, 19 nt, Artificial Sequence
  Description of Artificial Sequence: Synthetic oligonucleotide
  Antisense strand to SEQ ID NO: 1903902
aucucuggcucaagugccg

SEQ ID NO: 1903904 - RNA, 19 nt, Artificial Sequence
  Description of Artificial Sequence: Synthetic oligonucleotide
  Sense strand starting at position 2493 of SEQ ID NO: 1879394
gcacuugagccagagauuc

SEQ ID NO: 1903905 - RNA, 19 nt, Artificial Sequence
  Description of Artificial Sequence: Synthetic oligonucleotide
  Antisense strand to SEQ ID NO: 1903904
gaaucucuggcucaagugc

SEQ ID NO: 1903906 - RNA, 19 nt, Artificial Sequence
  Description of Artificial Sequence: Synthetic oligonucleotide
  Sense strand starting at position 2503 of SEQ ID NO: 1879394
cagagauucugcuuucgac

SEQ ID NO: 1903907 - RNA, 19 nt, Artificial Sequence
  Description of Artificial Sequence: Synthetic oligonucleotide
  Antisense strand to SEQ ID NO: 1903906
gucgaaagcagaaucucug

SEQ ID NO: 1903908 - RNA, 19 nt, Artificial Sequence
  Description of Artificial Sequence: Synthetic oligonucleotide
  Sense strand starting at position 2527 of SEQ ID NO: 1879394
ugcccauugagagguuaag

SEQ ID NO: 1903909 - RNA, 19 nt, Artificial Sequence
  Description of Artificial Sequence: Synthetic oligonucleotide
  Antisense strand to SEQ ID NO: 1903908
cuuaaccucucaaugggca

SEQ ID NO: 1903910 - RNA, 19 nt, Artificial Sequence
  Description of Artificial Sequence: Synthetic oligonucleotide
  Sense strand starting at position 2601 of SEQ ID NO: 1879394
cugggacugugguuaaauc

SEQ ID NO: 1903911 - RNA, 19 nt, Artificial Sequence
  Description of Artificial Sequence: Synthetic oligonucleotide
  Antisense strand to SEQ ID NO: 1903910
gauuuaaccacagucccag

SEQ ID NO: 1903912 - RNA, 19 nt, Artificial Sequence
  Description of Artificial Sequence: Synthetic oligonucleotide
  Sense strand starting at position 2602 of SEQ ID NO: 1879394
ugggacugugguuaaauca

SEQ ID NO: 1903913 - RNA, 19 nt, Artificial Sequence
  Description of Artificial Sequence: Synthetic oligonucleotide
  Antisense strand to SEQ ID NO: 1903912
ugauuuaaccacaguccca

SEQ ID NO: 1903914 - RNA, 19 nt, Artificial Sequence
  Description of Artificial Sequence: Synthetic oligonucleotide
  Sense strand starting at position 2610 of SEQ ID NO: 1879394
ugguuaaaucaacgugacu

SEQ ID NO: 1903915 - RNA, 19 nt, Artificial Sequence
  Description of Artificial Sequence: Synthetic oligonucleotide
  Antisense strand to SEQ ID NO: 1903914
agucacguugauuuaacca

SEQ ID NO: 1903916 - RNA, 19 nt, Artificial Sequence
  Description of Artificial Sequence: Synthetic oligonucleotide
  Sense strand starting at position 2647 of SEQ ID NO: 1879394
uguaaauuagggcaguaaa

SEQ ID NO: 1903917 - RNA, 19 nt, Artificial Sequence
  Description of Artificial Sequence: Synthetic oligonucleotide
  Antisense strand to SEQ ID NO: 1903916
uuuacugcccuaauuuaca

SEQ ID NO: 1903918 - RNA, 19 nt, Artificial Sequence
  Description of Artificial Sequence: Synthetic oligonucleotide
  Sense strand starting at position 2660 of SEQ ID NO: 1879394
aguaaaugaugucuacaug

SEQ ID NO: 1903919 - RNA, 19 nt, Artificial Sequence
  Description of Artificial Sequence: Synthetic oligonucleotide
  Antisense strand to SEQ ID NO: 1903918
cauguagacaucauuuacu

SEQ ID NO: 1903920 - RNA, 19 nt, Artificial Sequence
  Description of Artificial Sequence: Synthetic oligonucleotide
  Sense strand starting at position 2684 of SEQ ID NO: 1879394
ugguguuaugaauguuaaa

SEQ ID NO: 1903921 - RNA, 19 nt, Artificial Sequence
  Description of Artificial Sequence: Synthetic oligonucleotide
  Antisense strand to SEQ ID NO: 1903920
uuuaacauucauaacacca

SEQ ID NO: 1903922 - RNA, 19 nt, Artificial Sequence
  Description of Artificial Sequence: Synthetic oligonucleotide
  Sense strand starting at position 2719 of SEQ ID NO: 1879394
auagaauagugcuuagcau

SEQ ID NO: 1903923 - RNA, 19 nt, Artificial Sequence
  Description of Artificial Sequence: Synthetic oligonucleotide
  Antisense strand to SEQ ID NO: 1903922
augcuaagcacuauucuau

SEQ ID NO: 1903924 - RNA, 19 nt, Artificial Sequence
  Description of Artificial Sequence: Synthetic oligonucleotide
  Sense strand starting at position 2720 of SEQ ID NO: 1879394
uagaauagugcuuagcaua

SEQ ID NO: 1903925 - RNA, 19 nt, Artificial Sequence
  Description of Artificial Sequence: Synthetic oligonucleotide
  Antisense strand to SEQ ID NO: 1903924
uaugcuaagcacuauucua

SEQ ID NO: 1903926 - RNA, 19 nt, Artificial Sequence
  Description of Artificial Sequence: Synthetic oligonucleotide
  Sense strand starting at position 2787 of SEQ ID NO: 1879394
gauuauuuauuacagagug

SEQ ID NO: 1903927 - RNA, 19 nt, Artificial Sequence
  Description of Artificial Sequence: Synthetic oligonucleotide
  Antisense strand to SEQ ID NO: 1903926
cacucuguaauaaauaauc

SEQ ID NO: 1903928 - RNA, 19 nt, Artificial Sequence
  Description of Artificial Sequence: Synthetic oligonucleotide
  Sense strand starting at position 2841 of SEQ ID NO: 1879394
cuagcaagauccuuaggau

SEQ ID NO: 1903929 - RNA, 19 nt, Artificial Sequence
  Description of Artificial Sequence: Synthetic oligonucleotide
  Antisense strand to SEQ ID NO: 1903928
auccuaaggaucuugcuag

SEQ ID NO: 1903930 - RNA, 19 nt, Artificial Sequence
  Description of Artificial Sequence: Synthetic oligonucleotide
  Sense strand starting at position 2918 of SEQ ID NO: 1879394
acccgacgagcguuaugua

SEQ ID NO: 1903931 - RNA, 19 nt, Artificial Sequence
  Description of Artificial Sequence: Synthetic oligonucleotide
  Antisense strand to SEQ ID NO: 1903930
uacauaacgcucgucgggu

SEQ ID NO: 1903932 - RNA, 19 nt, Artificial Sequence
  Description of Artificial Sequence: Synthetic oligonucleotide
  Sense strand starting at position 2931 of SEQ ID NO: 1879394
uauguaaggagucgaguga

SEQ ID NO: 1903933 - RNA, 19 nt, Artificial Sequence
  Description of Artificial Sequence: Synthetic oligonucleotide
  Antisense strand to SEQ ID NO: 1903932
ucacucgacuccuuacaua

SEQ ID NO: 1903934 - RNA, 19 nt, Artificial Sequence
  Description of Artificial Sequence: Synthetic oligonucleotide
  Sense strand starting at position 2935 of SEQ ID NO: 1879394
uaaggagucgagugagaag

SEQ ID NO: 1903935 - RNA, 19 nt, Artificial Sequence
  Description of Artificial Sequence: Synthetic oligonucleotide
  Antisense strand to SEQ ID NO: 1903934
cuucucacucgacuccuua

SEQ ID NO: 1903936 - RNA, 19 nt, Artificial Sequence
  Description of Artificial Sequence: Synthetic oligonucleotide
  Sense strand starting at position 3013 of SEQ ID NO: 1879394
ccuggaucucuugaggcau

SEQ ID NO: 1903937 - RNA, 19 nt, Artificial Sequence
  Description of Artificial Sequence: Synthetic oligonucleotide
  Antisense strand to SEQ ID NO: 1903936
augccucaagagauccagg

SEQ ID NO: 1903938 - RNA, 19 nt, Artificial Sequence
  Description of Artificial Sequence: Synthetic oligonucleotide
  Sense strand starting at position 3091 of SEQ ID NO: 1879394
ggacauggacuuuguaaau

SEQ ID NO: 1903939 - RNA, 19 nt, Artificial Sequence
  Description of Artificial Sequence: Synthetic oligonucleotide
  Antisense strand to SEQ ID NO: 1903938
auuuacaaaguccaugucc

SEQ ID NO: 1903940 - RNA, 19 nt, Artificial Sequence
  Description of Artificial Sequence: Synthetic oligonucleotide
  Sense strand starting at position 3244 of SEQ ID NO: 1879394
gagcuagugagcuggaauu

SEQ ID NO: 1903941 - RNA, 19 nt, Artificial Sequence
  Description of Artificial Sequence: Synthetic oligonucleotide
  Antisense strand to SEQ ID NO: 1903940
aauuccagcucacuagcuc

SEQ ID NO: 1903942 - RNA, 19 nt, Artificial Sequence
  Description of Artificial Sequence: Synthetic oligonucleotide
  Sense strand starting at position 3271 of SEQ ID NO: 1879394
ggaacaggcuuuccuugau

SEQ ID NO: 1903943 - RNA, 19 nt, Artificial Sequence
  Description of Artificial Sequence: Synthetic oligonucleotide
  Antisense strand to SEQ ID NO: 1903942
aucaaggaaagccuguucc

SEQ ID NO: 1903944 - RNA, 19 nt, Artificial Sequence
  Description of Artificial Sequence: Synthetic oligonucleotide
  Sense strand starting at position 24 of SEQ ID NO: 1879395
guauuuggcuuguuuacaa

SEQ ID NO: 1903945 - RNA, 19 nt, Artificial Sequence
  Description of Artificial Sequence: Synthetic oligonucleotide
  Antisense strand to SEQ ID NO: 1903944
uuguaaacaagccaaauac

SEQ ID NO: 1903946 - RNA, 19 nt, Artificial Sequence
  Description of Artificial Sequence: Synthetic oligonucleotide
  Sense strand starting at position 64 of SEQ ID NO: 1879395
aguguccuauacucaacaa

SEQ ID NO: 1903947 - RNA, 19 nt, Artificial Sequence
  Description of Artificial Sequence: Synthetic oligonucleotide
  Antisense strand to SEQ ID NO: 1903946
uuguugaguauaggacacu

SEQ ID NO: 1903948 - RNA, 19 nt, Artificial Sequence
  Description of Artificial Sequence: Synthetic oligonucleotide
  Sense strand starting at position 87 of SEQ ID NO: 1879395
aagugagguuacuaaauuu

SEQ ID NO: 1903949 - RNA, 19 nt, Artificial Sequence
  Description of Artificial Sequence: Synthetic oligonucleotide
  Antisense strand to SEQ ID NO: 1903948
aaauuuaguaaccucacuu

SEQ ID NO: 1903950 - RNA, 19 nt, Artificial Sequence
  Description of Artificial Sequence: Synthetic oligonucleotide
  Sense strand starting at position 483 of SEQ ID NO: 1879395
ugacuaguucagggugacu

SEQ ID NO: 1903951 - RNA, 19 nt, Artificial Sequence
  Description of Artificial Sequence: Synthetic oligonucleotide
  Antisense strand to SEQ ID NO: 1903950
agucacccugaacuaguca

SEQ ID NO: 1903952 - RNA, 19 nt, Artificial Sequence
  Description of Artificial Sequence: Synthetic oligonucleotide
  Sense strand starting at position 508 of SEQ ID NO: 1879395
cagagucaacauuggaacu

SEQ ID NO: 1903953 - RNA, 19 nt, Artificial Sequence
  Description of Artificial Sequence: Synthetic oligonucleotide
  Antisense strand to SEQ ID NO: 1903952
aguuccaauguugacucug

SEQ ID NO: 1903954 - RNA, 19 nt, Artificial Sequence
  Description of Artificial Sequence: Synthetic oligonucleotide
  Sense strand starting at position 574 of SEQ ID NO: 1879395
ugcuaaucccagcagaauu

SEQ ID NO: 1903955 - RNA, 19 nt, Artificial Sequence
  Description of Artificial Sequence: Synthetic oligonucleotide
  Antisense strand to SEQ ID NO: 1903954
aauucugcugggauuagca

SEQ ID NO: 1903956 - RNA, 19 nt, Artificial Sequence
  Description of Artificial Sequence: Synthetic oligonucleotide
  Sense strand starting at position 616 of SEQ ID NO: 1879395
cuuugaggccucugagacu

SEQ ID NO: 1903957 - RNA, 19 nt, Artificial Sequence
  Description of Artificial Sequence: Synthetic oligonucleotide
  Antisense strand to SEQ ID NO: 1903956
agucucagaggccucaaag

SEQ ID NO: 1903958 - RNA, 19 nt, Artificial Sequence
  Description of Artificial Sequence: Synthetic oligonucleotide
  Sense strand starting at position 627 of SEQ ID NO: 1879395
cugagacuagaauguuagu

SEQ ID NO: 1903959 - RNA, 19 nt, Artificial Sequence
  Description of Artificial Sequence: Synthetic oligonucleotide
  Antisense strand to SEQ ID NO: 1903958
acuaacauucuagucucag

SEQ ID NO: 1903960 - RNA, 19 nt, Artificial Sequence
  Description of Artificial Sequence: Synthetic oligonucleotide
  Sense strand starting at position 668 of SEQ ID NO: 1879395
aguagucaauagucagaaa

SEQ ID NO: 1903961 - RNA, 19 nt, Artificial Sequence
  Description of Artificial Sequence: Synthetic oligonucleotide
  Antisense strand to SEQ ID NO: 1903960
uuucugacuauugacuacu

SEQ ID NO: 1903962 - RNA, 19 nt, Artificial Sequence
  Description of Artificial Sequence: Synthetic oligonucleotide
  Sense strand starting at position 889 of SEQ ID NO: 1879395
uagacaugauggucucacu

SEQ ID NO: 1903963 - RNA, 19 nt, Artificial Sequence
  Description of Artificial Sequence: Synthetic oligonucleotide
  Antisense strand to SEQ ID NO: 1903962
agugagaccaucaugucua

SEQ ID NO: 1903964 - RNA, 19 nt, Artificial Sequence
  Description of Artificial Sequence: Synthetic oligonucleotide
  Sense strand starting at position 1032 of SEQ ID NO: 1879395
gcuaaacugcauugauaca

SEQ ID NO: 1903965 - RNA, 19 nt, Artificial Sequence
  Description of Artificial Sequence: Synthetic oligonucleotide
  Antisense strand to SEQ ID NO: 1903964
uguaucaaugcaguuuagc

SEQ ID NO: 1903966 - RNA, 19 nt, Artificial Sequence
  Description of Artificial Sequence: Synthetic oligonucleotide
  Sense strand starting at position 1100 of SEQ ID NO: 1879395
agaguccucuguuuaagau

SEQ ID NO: 1903967 - RNA, 19 nt, Artificial Sequence
  Description of Artificial Sequence: Synthetic oligonucleotide
  Antisense strand to SEQ ID NO: 1903966
aucuuaaacagaggacucu

SEQ ID NO: 1903968 - RNA, 19 nt, Artificial Sequence
  Description of Artificial Sequence: Synthetic oligonucleotide
  Sense strand starting at position 1101 of SEQ ID NO: 1879395
gaguccucuguuuaagauu

SEQ ID NO: 1903969 - RNA, 19 nt, Artificial Sequence
  Description of Artificial Sequence: Synthetic oligonucleotide
  Antisense strand to SEQ ID NO: 1903968
aaucuuaaacagaggacuc

SEQ ID NO: 1903970 - RNA, 19 nt, Artificial Sequence
  Description of Artificial Sequence: Synthetic oligonucleotide
  Sense strand starting at position 1108 of SEQ ID NO: 1879395
cuguuuaagauuggguuaa

SEQ ID NO: 1903971 - RNA, 19 nt, Artificial Sequence
  Description of Artificial Sequence: Synthetic oligonucleotide
  Antisense strand to SEQ ID NO: 1903970
uuaacccaaucuuaaacag

SEQ ID NO: 1903972 - RNA, 19 nt, Artificial Sequence
  Description of Artificial Sequence: Synthetic oligonucleotide
  Sense strand starting at position 1110 of SEQ ID NO: 1879395
guuuaagauuggguuaaau

SEQ ID NO: 1903973 - RNA, 19 nt, Artificial Sequence
  Description of Artificial Sequence: Synthetic oligonucleotide
  Antisense strand to SEQ ID NO: 1903972
auuuaacccaaucuuaaac

SEQ ID NO: 1903974 - RNA, 19 nt, Artificial Sequence
  Description of Artificial Sequence: Synthetic oligonucleotide
  Sense strand starting at position 1643 of SEQ ID NO: 1879395
uaaucuagucguuagaauc

SEQ ID NO: 1903975 - RNA, 19 nt, Artificial Sequence
  Description of Artificial Sequence: Synthetic oligonucleotide
  Antisense strand to SEQ ID NO: 1903974
gauucuaacgacuagauua

SEQ ID NO: 1903976 - RNA, 19 nt, Artificial Sequence
  Description of Artificial Sequence: Synthetic oligonucleotide
  Sense strand starting at position 2023 of SEQ ID NO: 1879395
ugccaaggucaguauagaa

SEQ ID NO: 1903977 - RNA, 19 nt, Artificial Sequence
  Description of Artificial Sequence: Synthetic oligonucleotide
  Antisense strand to SEQ ID NO: 1903976
uucuauacugaccuuggca

SEQ ID NO: 1903978 - RNA, 19 nt, Artificial Sequence
  Description of Artificial Sequence: Synthetic oligonucleotide
  Sense strand starting at position 2030 of SEQ ID NO: 1879395
gucaguauagaauauucuu

SEQ ID NO: 1903979 - RNA, 19 nt, Artificial Sequence
  Description of Artificial Sequence: Synthetic oligonucleotide
  Antisense strand to SEQ ID NO: 1903978
aagaauauucuauacugac

SEQ ID NO: 1903980 - RNA, 19 nt, Artificial Sequence
  Description of Artificial Sequence: Synthetic oligonucleotide
  Sense strand starting at position 2056 of SEQ ID NO: 1879395
ucacuuguagaaugaauag

SEQ ID NO: 1903981 - RNA, 19 nt, Artificial Sequence
  Description of Artificial Sequence: Synthetic oligonucleotide
  Antisense strand to SEQ ID NO: 1903980
cuauucauucuacaaguga

SEQ ID NO: 1903982 - RNA, 19 nt, Artificial Sequence
  Description of Artificial Sequence: Synthetic oligonucleotide
  Sense strand starting at position 2080 of SEQ ID NO: 1879395
uuguaaggauuaucuauuc

SEQ ID NO: 1903983 - RNA, 19 nt, Artificial Sequence
  Description of Artificial Sequence: Synthetic oligonucleotide
  Antisense strand to SEQ ID NO: 1903982
gaauagauaauccuuacaa

SEQ ID NO: 1903984 - RNA, 19 nt, Artificial Sequence
  Description of Artificial Sequence: Synthetic oligonucleotide
  Sense strand starting at position 2162 of SEQ ID NO: 1879395
gcaaauuccaaguacggaa

SEQ ID NO: 1903985 - RNA, 19 nt, Artificial Sequence
  Description of Artificial Sequence: Synthetic oligonucleotide
  Antisense strand to SEQ ID NO: 1903984
uuccguacuuggaauuugc

SEQ ID NO: 1903986 - RNA, 19 nt, Artificial Sequence
  Description of Artificial Sequence: Synthetic oligonucleotide
  Sense strand starting at position 2280 of SEQ ID NO: 1879395
cuacaaaccuccguagaga

SEQ ID NO: 1903987 - RNA, 19 nt, Artificial Sequence
  Description of Artificial Sequence: Synthetic oligonucleotide
  Antisense strand to SEQ ID NO: 1903986
ucucuacggagguuuguag

SEQ ID NO: 1903988 - RNA, 19 nt, Artificial Sequence
  Description of Artificial Sequence: Synthetic oligonucleotide
  Sense strand starting at position 2433 of SEQ ID NO: 1879395
caguuagaucauuguaaug

SEQ ID NO: 1903989 - RNA, 19 nt, Artificial Sequence
  Description of Artificial Sequence: Synthetic oligonucleotide
  Antisense strand to SEQ ID NO: 1903988
cauuacaaugaucuaacug

SEQ ID NO: 1903990 - RNA, 19 nt, Artificial Sequence
  Description of Artificial Sequence: Synthetic oligonucleotide
  Sense strand starting at position 2653 of SEQ ID NO: 1879395
aggagaguucugcauccag

SEQ ID NO: 1903991 - RNA, 19 nt, Artificial Sequence
  Description of Artificial Sequence: Synthetic oligonucleotide
  Antisense strand to SEQ ID NO: 1903990
cuggaugcagaacucuccu

SEQ ID NO: 1903992 - RNA, 19 nt, Artificial Sequence
  Description of Artificial Sequence: Synthetic oligonucleotide
  Sense strand starting at position 2744 of SEQ ID NO: 1879395
auuugauucugagagcaac

SEQ ID NO: 1903993 - RNA, 19 nt, Artificial Sequence
  Description of Artificial Sequence: Synthetic oligonucleotide
  Antisense strand to SEQ ID NO: 1903992
guugcucucagaaucaaau

SEQ ID NO: 1903994 - RNA, 19 nt, Artificial Sequence
  Description of Artificial Sequence: Synthetic oligonucleotide
  Sense strand starting at position 2758 of SEQ ID NO: 1879395
gcaacagccucugucauuu

SEQ ID NO: 1903995 - RNA, 19 nt, Artificial Sequence
  Description of Artificial Sequence: Synthetic oligonucleotide
  Antisense strand to SEQ ID NO: 1903994
aaaugacagaggcuguugc

SEQ ID NO: 1903996 - RNA, 19 nt, Artificial Sequence
  Description of Artificial Sequence: Synthetic oligonucleotide
  Sense strand starting at position 2785 of SEQ ID NO: 1879395
ggagcauuccuauauaacu

SEQ ID NO: 1903997 - RNA, 19 nt, Artificial Sequence
  Description of Artificial Sequence: Synthetic oligonucleotide
  Antisense strand to SEQ ID NO: 1903996
aguuauauaggaaugcucc

SEQ ID NO: 1903998 - RNA, 19 nt, Artificial Sequence
  Description of Artificial Sequence: Synthetic oligonucleotide
  Sense strand starting at position 2821 of SEQ ID NO: 1879395
aaagaauacuuucuaggug

SEQ ID NO: 1903999 - RNA, 19 nt, Artificial Sequence
  Description of Artificial Sequence: Synthetic oligonucleotide
  Antisense strand to SEQ ID NO: 1903998
caccuagaaaguauucuuu

SEQ ID NO: 1904000 - RNA, 19 nt, Artificial Sequence
  Description of Artificial Sequence: Synthetic oligonucleotide
  Sense strand starting at position 2825 of SEQ ID NO: 1879395
aauacuuucuagguggaga

SEQ ID NO: 1904001 - RNA, 19 nt, Artificial Sequence
  Description of Artificial Sequence: Synthetic oligonucleotide
  Antisense strand to SEQ ID NO: 1904000
ucuccaccuagaaaguauu

SEQ ID NO: 1904002 - RNA, 19 nt, Artificial Sequence
  Description of Artificial Sequence: Synthetic oligonucleotide
  Sense strand starting at position 2826 of SEQ ID NO: 1879395
auacuuucuagguggagag

SEQ ID NO: 1904003 - RNA, 19 nt, Artificial Sequence
  Description of Artificial Sequence: Synthetic oligonucleotide
  Antisense strand to SEQ ID NO: 1904002
cucuccaccuagaaaguau

SEQ ID NO: 1904004 - RNA, 19 nt, Artificial Sequence
  Description of Artificial Sequence: Synthetic oligonucleotide
  Sense strand starting at position 2827 of SEQ ID NO: 1879395
uacuuucuagguggagaga

SEQ ID NO: 1904005 - RNA, 19 nt, Artificial Sequence
  Description of Artificial Sequence: Synthetic oligonucleotide
  Antisense strand to SEQ ID NO: 1904004
ucucuccaccuagaaagua

SEQ ID NO: 1904006 - RNA, 19 nt, Artificial Sequence
  Description of Artificial Sequence: Synthetic oligonucleotide
  Sense strand starting at position 2942 of SEQ ID NO: 1879395
augacuacauggucaagau

SEQ ID NO: 1904007 - RNA, 19 nt, Artificial Sequence
  Description of Artificial Sequence: Synthetic oligonucleotide
  Antisense strand to SEQ ID NO: 1904006
aucuugaccauguagucau

SEQ ID NO: 1904008 - RNA, 19 nt, Artificial Sequence
  Description of Artificial Sequence: Synthetic oligonucleotide
  Sense strand starting at position 2956 of SEQ ID NO: 1879395
aagauuccagaaugugauc

SEQ ID NO: 1904009 - RNA, 19 nt, Artificial Sequence
  Description of Artificial Sequence: Synthetic oligonucleotide
  Antisense strand to SEQ ID NO: 1904008
gaucacauucuggaaucuu

SEQ ID NO: 1904010 - RNA, 19 nt, Artificial Sequence
  Description of Artificial Sequence: Synthetic oligonucleotide
  Sense strand starting at position 2965 of SEQ ID NO: 1879395
gaaugugaucccgacgaca

SEQ ID NO: 1904011 - RNA, 19 nt, Artificial Sequence
  Description of Artificial Sequence: Synthetic oligonucleotide
  Antisense strand to SEQ ID NO: 1904010
ugucgucgggaucacauuc

SEQ ID NO: 1904012 - RNA, 19 nt, Artificial Sequence
  Description of Artificial Sequence: Synthetic oligonucleotide
  Sense strand starting at position 3078 of SEQ ID NO: 1879395
gaaggucaguguuugggaa

SEQ ID NO: 1904013 - RNA, 19 nt, Artificial Sequence
  Description of Artificial Sequence: Synthetic oligonucleotide
  Antisense strand to SEQ ID NO: 1904012
uucccaaacacugaccuuc

SEQ ID NO: 1904014 - RNA, 19 nt, Artificial Sequence
  Description of Artificial Sequence: Synthetic oligonucleotide
  Sense strand starting at position 3114 of SEQ ID NO: 1879395
gggcuauggagucacagau

SEQ ID NO: 1904015 - RNA, 19 nt, Artificial Sequence
  Description of Artificial Sequence: Synthetic oligonucleotide
  Antisense strand to SEQ ID NO: 1904014
aucugugacuccauagccc

SEQ ID NO: 1904016 - RNA, 19 nt, Artificial Sequence
  Description of Artificial Sequence: Synthetic oligonucleotide
  Sense strand starting at position 3264 of SEQ ID NO: 1879395
ugagauccacagugagguu

SEQ ID NO: 1904017 - RNA, 19 nt, Artificial Sequence
  Description of Artificial Sequence: Synthetic oligonucleotide
  Antisense strand to SEQ ID NO: 1904016
aaccucacuguggaucuca

SEQ ID NO: 1904018 - RNA, 19 nt, Artificial Sequence
  Description of Artificial Sequence: Synthetic oligonucleotide
  Sense strand starting at position 3294 of SEQ ID NO: 1879395
auucuaagacuuggcaagu

SEQ ID NO: 1904019 - RNA, 19 nt, Artificial Sequence
  Description of Artificial Sequence: Synthetic oligonucleotide
  Antisense strand to SEQ ID NO: 1904018
acuugccaagucuuagaau

SEQ ID NO: 1904020 - RNA, 19 nt, Artificial Sequence
  Description of Artificial Sequence: Synthetic oligonucleotide
  Sense strand starting at position 3353 of SEQ ID NO: 1879395
cugaccuugucaucaccua

SEQ ID NO: 1904021 - RNA, 19 nt, Artificial Sequence
  Description of Artificial Sequence: Synthetic oligonucleotide
  Antisense strand to SEQ ID NO: 1904020
uaggugaugacaaggucag

SEQ ID NO: 1904022 - RNA, 19 nt, Artificial Sequence
  Description of Artificial Sequence: Synthetic oligonucleotide
  Sense strand starting at position 3477 of SEQ ID NO: 1879395
gggccuccagucuauugau

SEQ ID NO: 1904023 - RNA, 19 nt, Artificial Sequence
  Description of Artificial Sequence: Synthetic oligonucleotide
  Antisense strand to SEQ ID NO: 1904022
aucaauagacuggaggccc

SEQ ID NO: 1904024 - RNA, 19 nt, Artificial Sequence
  Description of Artificial Sequence: Synthetic oligonucleotide
  Sense strand starting at position 2403 of SEQ ID NO: 1879396
cgaacaaaucucuacuugu

SEQ ID NO: 1904025 - RNA, 19 nt, Artificial Sequence
  Description of Artificial Sequence: Synthetic oligonucleotide
  Antisense strand to SEQ ID NO: 1904024
acaaguagagauuuguucg

SEQ ID NO: 1904026 - RNA, 19 nt, Artificial Sequence
  Description of Artificial Sequence: Synthetic oligonucleotide
  Sense strand starting at position 2501 of SEQ ID NO: 1879396
uuucuuccagaucgaagua

SEQ ID NO: 1904027 - RNA, 19 nt, Artificial Sequence
  Description of Artificial Sequence: Synthetic oligonucleotide
  Antisense strand to SEQ ID NO: 1904026
uacuucgaucuggaagaaa

SEQ ID NO: 1904028 - RNA, 19 nt, Artificial Sequence
  Description of Artificial Sequence: Synthetic oligonucleotide
  Sense strand starting at position 3179 of SEQ ID NO: 1879396
ucuguagaaucagugaaag

SEQ ID NO: 1904029 - RNA, 19 nt, Artificial Sequence
  Description of Artificial Sequence: Synthetic oligonucleotide
  Antisense strand to SEQ ID NO: 1904028
cuuucacugauucuacaga

SEQ ID NO: 1904030 - RNA, 19 nt, Artificial Sequence
  Description of Artificial Sequence: Synthetic oligonucleotide
  Sense strand starting at position 3190 of SEQ ID NO: 1879396
agugaaagauucuauguuc

SEQ ID NO: 1904031 - RNA, 19 nt, Artificial Sequence
  Description of Artificial Sequence: Synthetic oligonucleotide
  Antisense strand to SEQ ID NO: 1904030
gaacauagaaucuuucacu

SEQ ID NO: 1904032 - RNA, 19 nt, Artificial Sequence
  Description of Artificial Sequence: Synthetic oligonucleotide
  Sense strand starting at position 32 of SEQ ID NO: 1879397
agcuuaaauguauaugagu

SEQ ID NO: 1904033 - RNA, 19 nt, Artificial Sequence
  Description of Artificial Sequence: Synthetic oligonucleotide
  Antisense strand to SEQ ID NO: 1904032
acucauauacauuuaagcu

SEQ ID NO: 1904034 - RNA, 19 nt, Artificial Sequence
  Description of Artificial Sequence: Synthetic oligonucleotide
  Sense strand starting at position 115 of SEQ ID NO: 1879397
uggcgauuauaacuaauaa

SEQ ID NO: 1904035 - RNA, 19 nt, Artificial Sequence
  Description of Artificial Sequence: Synthetic oligonucleotide
  Antisense strand to SEQ ID NO: 1904034
uuauuaguuauaaucgcca

SEQ ID NO: 1904036 - RNA, 19 nt, Artificial Sequence
  Description of Artificial Sequence: Synthetic oligonucleotide
  Sense strand starting at position 180 of SEQ ID NO: 1879397
uuuagaagugauugcuaaa

SEQ ID NO: 1904037 - RNA, 19 nt, Artificial Sequence
  Description of Artificial Sequence: Synthetic oligonucleotide
  Antisense strand to SEQ ID NO: 1904036
uuuagcaaucacuucuaaa

SEQ ID NO: 1904038 - RNA, 19 nt, Artificial Sequence
  Description of Artificial Sequence: Synthetic oligonucleotide
  Sense strand starting at position 460 of SEQ ID NO: 1879397
ugauaagugcuguaaugag

SEQ ID NO: 1904039 - RNA, 19 nt, Artificial Sequence
  Description of Artificial Sequence: Synthetic oligonucleotide
  Antisense strand to SEQ ID NO: 1904038
cucauuacagcacuuauca

SEQ ID NO: 1904040 - RNA, 19 nt, Artificial Sequence
  Description of Artificial Sequence: Synthetic oligonucleotide
  Sense strand starting at position 467 of SEQ ID NO: 1879397
ugcuguaaugagggaaaga

SEQ ID NO: 1904041 - RNA, 19 nt, Artificial Sequence
  Description of Artificial Sequence: Synthetic oligonucleotide
  Antisense strand to SEQ ID NO: 1904040
ucuuucccucauuacagca

SEQ ID NO: 1904042 - RNA, 19 nt, Artificial Sequence
  Description of Artificial Sequence: Synthetic oligonucleotide
  Sense strand starting at position 967 of SEQ ID NO: 1879397
ggacucagcuacucaaacu

SEQ ID NO: 1904043 - RNA, 19 nt, Artificial Sequence
  Description of Artificial Sequence: Synthetic oligonucleotide
  Antisense strand to SEQ ID NO: 1904042
aguuugaguagcugagucc

SEQ ID NO: 1904044 - RNA, 19 nt, Artificial Sequence
  Description of Artificial Sequence: Synthetic oligonucleotide
  Sense strand starting at position 1075 of SEQ ID NO: 1879397
gugggaucuguuuaucaag

SEQ ID NO: 1904045 - RNA, 19 nt, Artificial Sequence
  Description of Artificial Sequence: Synthetic oligonucleotide
  Antisense strand to SEQ ID NO: 1904044
cuugauaaacagaucccac

SEQ ID NO: 1904046 - RNA, 19 nt, Artificial Sequence
  Description of Artificial Sequence: Synthetic oligonucleotide
  Sense strand starting at position 1077 of SEQ ID NO: 1879397
gggaucuguuuaucaagac

SEQ ID NO: 1904047 - RNA, 19 nt, Artificial Sequence
  Description of Artificial Sequence: Synthetic oligonucleotide
  Antisense strand to SEQ ID NO: 1904046
gucuugauaaacagauccc

SEQ ID NO: 1904048 - RNA, 19 nt, Artificial Sequence
  Description of Artificial Sequence: Synthetic oligonucleotide
  Sense strand starting at position 1115 of SEQ ID NO: 1879397
gaaggaucuuaucucagug

SEQ ID NO: 1904049 - RNA, 19 nt, Artificial Sequence
  Description of Artificial Sequence: Synthetic oligonucleotide
  Antisense strand to SEQ ID NO: 1904048
cacugagauaagauccuuc

SEQ ID NO: 1904050 - RNA, 19 nt, Artificial Sequence
  Description of Artificial Sequence: Synthetic oligonucleotide
  Sense strand starting at position 1152 of SEQ ID NO: 1879397
gcuggauugacugaaugcu

SEQ ID NO: 1904051 - RNA, 19 nt, Artificial Sequence
  Description of Artificial Sequence: Synthetic oligonucleotide
  Antisense strand to SEQ ID NO: 1904050
agcauucagucaauccagc

SEQ ID NO: 1904052 - RNA, 19 nt, Artificial Sequence
  Description of Artificial Sequence: Synthetic oligonucleotide
  Sense strand starting at position 1294 of SEQ ID NO: 1879397
gccaacucuggcuaaagaa

SEQ ID NO: 1904053 - RNA, 19 nt, Artificial Sequence
  Description of Artificial Sequence: Synthetic oligonucleotide
  Antisense strand to SEQ ID NO: 1904052
uucuuuagccagaguuggc

SEQ ID NO: 1904054 - RNA, 19 nt, Artificial Sequence
  Description of Artificial Sequence: Synthetic oligonucleotide
  Sense strand starting at position 1335 of SEQ ID NO: 1879397
gacucaagagcuugagauu

SEQ ID NO: 1904055 - RNA, 19 nt, Artificial Sequence
  Description of Artificial Sequence: Synthetic oligonucleotide
  Antisense strand to SEQ ID NO: 1904054
aaucucaagcucuugaguc

SEQ ID NO: 1904056 - RNA, 19 nt, Artificial Sequence
  Description of Artificial Sequence: Synthetic oligonucleotide
  Sense strand starting at position 1429 of SEQ ID NO: 1879397
aauaguagaucugagauuu

SEQ ID NO: 1904057 - RNA, 19 nt, Artificial Sequence
  Description of Artificial Sequence: Synthetic oligonucleotide
  Antisense strand to SEQ ID NO: 1904056
aaaucucagaucuacuauu

SEQ ID NO: 1904058 - RNA, 19 nt, Artificial Sequence
  Description of Artificial Sequence: Synthetic oligonucleotide
  Sense strand starting at position 1500 of SEQ ID NO: 1879397
acaucacaugucuaauagu

SEQ ID NO: 1904059 - RNA, 19 nt, Artificial Sequence
  Description of Artificial Sequence: Synthetic oligonucleotide
  Antisense strand to SEQ ID NO: 1904058
acuauuagacaugugaugu

SEQ ID NO: 1904060 - RNA, 19 nt, Artificial Sequence
  Description of Artificial Sequence: Synthetic oligonucleotide
  Sense strand starting at position 1750 of SEQ ID NO: 1879397
uguguuucccaccaacaau

SEQ ID NO: 1904061 - RNA, 19 nt, Artificial Sequence
  Description of Artificial Sequence: Synthetic oligonucleotide
  Antisense strand to SEQ ID NO: 1904060
auuguuggugggaaacaca

SEQ ID NO: 1904062 - RNA, 19 nt, Artificial Sequence
  Description of Artificial Sequence: Synthetic oligonucleotide
  Sense strand starting at position 1797 of SEQ ID NO: 1879397
ggaguuaucugaucaccua

SEQ ID NO: 1904063 - RNA, 19 nt, Artificial Sequence
  Description of Artificial Sequence: Synthetic oligonucleotide
  Antisense strand to SEQ ID NO: 1904062
uaggugaucagauaacucc

SEQ ID NO: 1904064 - RNA, 19 nt, Artificial Sequence
  Description of Artificial Sequence: Synthetic oligonucleotide
  Sense strand starting at position 1800 of SEQ ID NO: 1879397
guuaucugaucaccuagau

SEQ ID NO: 1904065 - RNA, 19 nt, Artificial Sequence
  Description of Artificial Sequence: Synthetic oligonucleotide
  Antisense strand to SEQ ID NO: 1904064
aucuaggugaucagauaac

SEQ ID NO: 1904066 - RNA, 19 nt, Artificial Sequence
  Description of Artificial Sequence: Synthetic oligonucleotide
  Sense strand starting at position 1897 of SEQ ID NO: 1879397
ggaguuauaugagccacua

SEQ ID NO: 1904067 - RNA, 19 nt, Artificial Sequence
  Description of Artificial Sequence: Synthetic oligonucleotide
  Antisense strand to SEQ ID NO: 1904066
uaguggcucauauaacucc

SEQ ID NO: 1904068 - RNA, 19 nt, Artificial Sequence
  Description of Artificial Sequence: Synthetic oligonucleotide
  Sense strand starting at position 1990 of SEQ ID NO: 1879397
cugugaaaugugcauaaua

SEQ ID NO: 1904069 - RNA, 19 nt, Artificial Sequence
  Description of Artificial Sequence: Synthetic oligonucleotide
  Antisense strand to SEQ ID NO: 1904068
uauuaugcacauuucacag

SEQ ID NO: 1904070 - RNA, 19 nt, Artificial Sequence
  Description of Artificial Sequence: Synthetic oligonucleotide
  Sense strand starting at position 2280 of SEQ ID NO: 1879397
ucugcauuugcugagcaua

SEQ ID NO: 1904071 - RNA, 19 nt, Artificial Sequence
  Description of Artificial Sequence: Synthetic oligonucleotide
  Antisense strand to SEQ ID NO: 1904070
uaugcucagcaaaugcaga

SEQ ID NO: 1904072 - RNA, 19 nt, Artificial Sequence
  Description of Artificial Sequence: Synthetic oligonucleotide
  Sense strand starting at position 2282 of SEQ ID NO: 1879397
ugcauuugcugagcauaau

SEQ ID NO: 1904073 - RNA, 19 nt, Artificial Sequence
  Description of Artificial Sequence: Synthetic oligonucleotide
  Antisense strand to SEQ ID NO: 1904072
auuaugcucagcaaaugca

SEQ ID NO: 1904074 - RNA, 19 nt, Artificial Sequence
  Description of Artificial Sequence: Synthetic oligonucleotide
  Sense strand starting at position 2382 of SEQ ID NO: 1879397
ggcugaacuuauuugcuau

SEQ ID NO: 1904075 - RNA, 19 nt, Artificial Sequence
  Description of Artificial Sequence: Synthetic oligonucleotide
  Antisense strand to SEQ ID NO: 1904074
auagcaaauaaguucagcc

SEQ ID NO: 1904076 - RNA, 19 nt, Artificial Sequence
  Description of Artificial Sequence: Synthetic oligonucleotide
  Sense strand starting at position 2448 of SEQ ID NO: 1879397
aagguagaggaucguauaa

SEQ ID NO: 1904077 - RNA, 19 nt, Artificial Sequence
  Description of Artificial Sequence: Synthetic oligonucleotide
  Antisense strand to SEQ ID NO: 1904076
uuauacgauccucuaccuu

SEQ ID NO: 1904078 - RNA, 19 nt, Artificial Sequence
  Description of Artificial Sequence: Synthetic oligonucleotide
  Sense strand starting at position 2533 of SEQ ID NO: 1879397
ccaggacccugaucuguaa

SEQ ID NO: 1904079 - RNA, 19 nt, Artificial Sequence
  Description of Artificial Sequence: Synthetic oligonucleotide
  Antisense strand to SEQ ID NO: 1904078
uuacagaucaggguccugg

SEQ ID NO: 1904080 - RNA, 19 nt, Artificial Sequence
  Description of Artificial Sequence: Synthetic oligonucleotide
  Sense strand starting at position 2536 of SEQ ID NO: 1879397
ggacccugaucuguaacaa

SEQ ID NO: 1904081 - RNA, 19 nt, Artificial Sequence
  Description of Artificial Sequence: Synthetic oligonucleotide
  Antisense strand to SEQ ID NO: 1904080
uuguuacagaucagggucc

SEQ ID NO: 1904082 - RNA, 19 nt, Artificial Sequence
  Description of Artificial Sequence: Synthetic oligonucleotide
  Sense strand starting at position 2556 of SEQ ID NO: 1879397
ggagaauuccaaugagcug

SEQ ID NO: 1904083 - RNA, 19 nt, Artificial Sequence
  Description of Artificial Sequence: Synthetic oligonucleotide
  Antisense strand to SEQ ID NO: 1904082
cagcucauuggaauucucc

SEQ ID NO: 1904084 - RNA, 19 nt, Artificial Sequence
  Description of Artificial Sequence: Synthetic oligonucleotide
  Sense strand starting at position 2959 of SEQ ID NO: 1879397
uagugagaacaacgauauc

SEQ ID NO: 1904085 - RNA, 19 nt, Artificial Sequence
  Description of Artificial Sequence: Synthetic oligonucleotide
  Antisense strand to SEQ ID NO: 1904084
gauaucguuguucucacua

SEQ ID NO: 1904086 - RNA, 19 nt, Artificial Sequence
  Description of Artificial Sequence: Synthetic oligonucleotide
  Sense strand starting at position 3055 of SEQ ID NO: 1879397
aguuguuaaccagacaacu

SEQ ID NO: 1904087 - RNA, 19 nt, Artificial Sequence
  Description of Artificial Sequence: Synthetic oligonucleotide
  Antisense strand to SEQ ID NO: 1904086
aguugucugguuaacaacu

SEQ ID NO: 1904088 - RNA, 19 nt, Artificial Sequence
  Description of Artificial Sequence: Synthetic oligonucleotide
  Sense strand starting at position 3176 of SEQ ID NO: 1879397
uuaggaaugcagugaaaug

SEQ ID NO: 1904089 - RNA, 19 nt, Artificial Sequence
  Description of Artificial Sequence: Synthetic oligonucleotide
  Antisense strand to SEQ ID NO: 1904088
cauuucacugcauuccuaa

SEQ ID NO: 1904090 - RNA, 19 nt, Artificial Sequence
  Description of Artificial Sequence: Synthetic oligonucleotide
  Sense strand starting at position 3316 of SEQ ID NO: 1879397
ugagguggcaguuaaacaa

SEQ ID NO: 1904091 - RNA, 19 nt, Artificial Sequence
  Description of Artificial Sequence: Synthetic oligonucleotide
  Antisense strand to SEQ ID NO: 1904090
uuguuuaacugccaccuca

SEQ ID NO: 1904092 - RNA, 19 nt, Artificial Sequence
  Description of Artificial Sequence: Synthetic oligonucleotide
  Sense strand starting at position 3495 of SEQ ID NO: 1879397
cuaagaugaguguauguga

SEQ ID NO: 1904093 - RNA, 19 nt, Artificial Sequence
  Description of Artificial Sequence: Synthetic oligonucleotide
  Antisense strand to SEQ ID NO: 1904092
ucacauacacucaucuuag

SEQ ID NO: 1904094 - RNA, 19 nt, Artificial Sequence
  Description of Artificial Sequence: Synthetic oligonucleotide
  Sense strand starting at position 3534 of SEQ ID NO: 1879397
cggauuggaggaugugaaa

SEQ ID NO: 1904095 - RNA, 19 nt, Artificial Sequence
  Description of Artificial Sequence: Synthetic oligonucleotide
  Antisense strand to SEQ ID NO: 1904094
uuucacauccuccaauccg

SEQ ID NO: 1904096 - RNA, 19 nt, Artificial Sequence
  Description of Artificial Sequence: Synthetic oligonucleotide
  Sense strand starting at position 3588 of SEQ ID NO: 1879397
cgggaccugcuacauaauu

SEQ ID NO: 1904097 - RNA, 19 nt, Artificial Sequence
  Description of Artificial Sequence: Synthetic oligonucleotide
  Antisense strand to SEQ ID NO: 1904096
aauuauguagcaggucccg

SEQ ID NO: 1904098 - RNA, 19 nt, Artificial Sequence
  Description of Artificial Sequence: Synthetic oligonucleotide
  Sense strand starting at position 3673 of SEQ ID NO: 1879397
ggugacaacugagcauuaa

SEQ ID NO: 1904099 - RNA, 19 nt, Artificial Sequence
  Description of Artificial Sequence: Synthetic oligonucleotide
  Antisense strand to SEQ ID NO: 1904098
uuaaugcucaguugucacc

SEQ ID NO: 1904100 - RNA, 19 nt, Artificial Sequence
  Description of Artificial Sequence: Synthetic oligonucleotide
  Sense strand starting at position 3674 of SEQ ID NO: 1879397
gugacaacugagcauuaau

SEQ ID NO: 1904101 - RNA, 19 nt, Artificial Sequence
  Description of Artificial Sequence: Synthetic oligonucleotide
  Antisense strand to SEQ ID NO: 1904100
auuaaugcucaguugucac

SEQ ID NO: 1904102 - RNA, 19 nt, Artificial Sequence
  Description of Artificial Sequence: Synthetic oligonucleotide
  Sense strand starting at position 3722 of SEQ ID NO: 1879397
cgccguguaacugcauaga

SEQ ID NO: 1904103 - RNA, 19 nt, Artificial Sequence
  Description of Artificial Sequence: Synthetic oligonucleotide
  Antisense strand to SEQ ID NO: 1904102
ucuaugcaguuacacggcg

SEQ ID NO: 1904104 - RNA, 19 nt, Artificial Sequence
  Description of Artificial Sequence: Synthetic oligonucleotide
  Sense strand starting at position 3737 of SEQ ID NO: 1879397
uagauugcacaccgaugaa

SEQ ID NO: 1904105 - RNA, 19 nt, Artificial Sequence
  Description of Artificial Sequence: Synthetic oligonucleotide
  Antisense strand to SEQ ID NO: 1904104
uucaucggugugcaaucua

SEQ ID NO: 1904106 - RNA, 19 nt, Artificial Sequence
  Description of Artificial Sequence: Synthetic oligonucleotide
  Sense strand starting at position 3777 of SEQ ID NO: 1879397
gagguaaacugguuuccag

SEQ ID NO: 1904107 - RNA, 19 nt, Artificial Sequence
  Description of Artificial Sequence: Synthetic oligonucleotide
  Antisense strand to SEQ ID NO: 1904106
cuggaaaccaguuuaccuc

SEQ ID NO: 1904108 - RNA, 19 nt, Artificial Sequence
  Description of Artificial Sequence: Synthetic oligonucleotide
  Sense strand starting at position 3794 of SEQ ID NO: 1879397
aggcuugguacagacgaua

SEQ ID NO: 1904109 - RNA, 19 nt, Artificial Sequence
  Description of Artificial Sequence: Synthetic oligonucleotide
  Antisense strand to SEQ ID NO: 1904108
uaucgucuguaccaagccu

SEQ ID NO: 1904110 - RNA, 19 nt, Artificial Sequence
  Description of Artificial Sequence: Synthetic oligonucleotide
  Sense strand starting at position 3885 of SEQ ID NO: 1879397
gcucuaauaugaucacaga

SEQ ID NO: 1904111 - RNA, 19 nt, Artificial Sequence
  Description of Artificial Sequence: Synthetic oligonucleotide
  Antisense strand to SEQ ID NO: 1904110
ucugugaucauauuagagc

SEQ ID NO: 1904112 - RNA, 19 nt, Artificial Sequence
  Description of Artificial Sequence: Synthetic oligonucleotide
  Sense strand starting at position 62 of SEQ ID NO: 1879398
aggaauuaaccuggucaug

SEQ ID NO: 1904113 - RNA, 19 nt, Artificial Sequence
  Description of Artificial Sequence: Synthetic oligonucleotide
  Antisense strand to SEQ ID NO: 1904112
caugaccagguuaauuccu

SEQ ID NO: 1904114 - RNA, 19 nt, Artificial Sequence
  Description of Artificial Sequence: Synthetic oligonucleotide
  Sense strand starting at position 126 of SEQ ID NO: 1879398
gaaaucgaguuuccaugga

SEQ ID NO: 1904115 - RNA, 19 nt, Artificial Sequence
  Description of Artificial Sequence: Synthetic oligonucleotide
  Antisense strand to SEQ ID NO: 1904114
uccauggaaacucgauuuc

SEQ ID NO: 1904116 - RNA, 19 nt, Artificial Sequence
  Description of Artificial Sequence: Synthetic oligonucleotide
  Sense strand starting at position 166 of SEQ ID NO: 1879398
agcagaaguuggugguuaa

SEQ ID NO: 1904117 - RNA, 19 nt, Artificial Sequence
  Description of Artificial Sequence: Synthetic oligonucleotide
  Antisense strand to SEQ ID NO: 1904116
uuaaccaccaacuucugcu

SEQ ID NO: 1904118 - RNA, 19 nt, Artificial Sequence
  Description of Artificial Sequence: Synthetic oligonucleotide
  Sense strand starting at position 167 of SEQ ID NO: 1879398
gcagaaguuggugguuaaa

SEQ ID NO: 1904119 - RNA, 19 nt, Artificial Sequence
  Description of Artificial Sequence: Synthetic oligonucleotide
  Antisense strand to SEQ ID NO: 1904118
uuuaaccaccaacuucugc

SEQ ID NO: 1904120 - RNA, 19 nt, Artificial Sequence
  Description of Artificial Sequence: Synthetic oligonucleotide
  Sense strand starting at position 244 of SEQ ID NO: 1879398
cgugcaguuguccagugua

SEQ ID NO: 1904121 - RNA, 19 nt, Artificial Sequence
  Description of Artificial Sequence: Synthetic oligonucleotide
  Antisense strand to SEQ ID NO: 1904120
uacacuggacaacugcacg

SEQ ID NO: 1904122 - RNA, 19 nt, Artificial Sequence
  Description of Artificial Sequence: Synthetic oligonucleotide
  Sense strand starting at position 247 of SEQ ID NO: 1879398
gcaguuguccaguguagga

SEQ ID NO: 1904123 - RNA, 19 nt, Artificial Sequence
  Description of Artificial Sequence: Synthetic oligonucleotide
  Antisense strand to SEQ ID NO: 1904122
uccuacacuggacaacugc

SEQ ID NO: 1904124 - RNA, 19 nt, Artificial Sequence
  Description of Artificial Sequence: Synthetic oligonucleotide
  Sense strand starting at position 315 of SEQ ID NO: 1879398
gucaguaggaaugagcuua

SEQ ID NO: 1904125 - RNA, 19 nt, Artificial Sequence
  Description of Artificial Sequence: Synthetic oligonucleotide
  Antisense strand to SEQ ID NO: 1904124
uaagcucauuccuacugac

SEQ ID NO: 1904126 - RNA, 19 nt, Artificial Sequence
  Description of Artificial Sequence: Synthetic oligonucleotide
  Sense strand starting at position 320 of SEQ ID NO: 1879398
uaggaaugagcuuacagca

SEQ ID NO: 1904127 - RNA, 19 nt, Artificial Sequence
  Description of Artificial Sequence: Synthetic oligonucleotide
  Antisense strand to SEQ ID NO: 1904126
ugcuguaagcucauuccua

SEQ ID NO: 1904128 - RNA, 19 nt, Artificial Sequence
  Description of Artificial Sequence: Synthetic oligonucleotide
  Sense strand starting at position 393 of SEQ ID NO: 1879398
agagcuagacuugguuuga

SEQ ID NO: 1904129 - RNA, 19 nt, Artificial Sequence
  Description of Artificial Sequence: Synthetic oligonucleotide
  Antisense strand to SEQ ID NO: 1904128
ucaaaccaagucuagcucu

SEQ ID NO: 1904130 - RNA, 19 nt, Artificial Sequence
  Description of Artificial Sequence: Synthetic oligonucleotide
  Sense strand starting at position 394 of SEQ ID NO: 1879398
gagcuagacuugguuugaa

SEQ ID NO: 1904131 - RNA, 19 nt, Artificial Sequence
  Description of Artificial Sequence: Synthetic oligonucleotide
  Antisense strand to SEQ ID NO: 1904130
uucaaaccaagucuagcuc

SEQ ID NO: 1904132 - RNA, 19 nt, Artificial Sequence
  Description of Artificial Sequence: Synthetic oligonucleotide
  Sense strand starting at position 1224 of SEQ ID NO: 1879398
ggaccugggugcagagaua

SEQ ID NO: 1904133 - RNA, 19 nt, Artificial Sequence
  Description of Artificial Sequence: Synthetic oligonucleotide
  Antisense strand to SEQ ID NO: 1904132
uaucucugcacccaggucc

SEQ ID NO: 1904134 - RNA, 19 nt, Artificial Sequence
  Description of Artificial Sequence: Synthetic oligonucleotide
  Sense strand starting at position 1237 of SEQ ID NO: 1879398
gagauaugggagugaccuu

SEQ ID NO: 1904135 - RNA, 19 nt, Artificial Sequence
  Description of Artificial Sequence: Synthetic oligonucleotide
  Antisense strand to SEQ ID NO: 1904134
aaggucacucccauaucuc

SEQ ID NO: 1904136 - RNA, 19 nt, Artificial Sequence
  Description of Artificial Sequence: Synthetic oligonucleotide
  Sense strand starting at position 1246 of SEQ ID NO: 1879398
gagugaccuugaguccuuu

SEQ ID NO: 1904137 - RNA, 19 nt, Artificial Sequence
  Description of Artificial Sequence: Synthetic oligonucleotide
  Antisense strand to SEQ ID NO: 1904136
aaaggacucaaggucacuc

SEQ ID NO: 1904138 - RNA, 19 nt, Artificial Sequence
  Description of Artificial Sequence: Synthetic oligonucleotide
  Sense strand starting at position 1250 of SEQ ID NO: 1879398
gaccuugaguccuuucuag

SEQ ID NO: 1904139 - RNA, 19 nt, Artificial Sequence
  Description of Artificial Sequence: Synthetic oligonucleotide
  Antisense strand to SEQ ID NO: 1904138
cuagaaaggacucaagguc

SEQ ID NO: 1904140 - RNA, 19 nt, Artificial Sequence
  Description of Artificial Sequence: Synthetic oligonucleotide
  Sense strand starting at position 1496 of SEQ ID NO: 1879398
guagaaagauggucagggu

SEQ ID NO: 1904141 - RNA, 19 nt, Artificial Sequence
  Description of Artificial Sequence: Synthetic oligonucleotide
  Antisense strand to SEQ ID NO: 1904140
acccugaccaucuuucuac

SEQ ID NO: 1904142 - RNA, 19 nt, Artificial Sequence
  Description of Artificial Sequence: Synthetic oligonucleotide
  Sense strand starting at position 1641 of SEQ ID NO: 1879398
cagugagcgcuuccuccau

SEQ ID NO: 1904143 - RNA, 19 nt, Artificial Sequence
  Description of Artificial Sequence: Synthetic oligonucleotide
  Antisense strand to SEQ ID NO: 1904142
auggaggaagcgcucacug

SEQ ID NO: 1904144 - RNA, 19 nt, Artificial Sequence
  Description of Artificial Sequence: Synthetic oligonucleotide
  Sense strand starting at position 1722 of SEQ ID NO: 1879398
agccgaaucuggguucgaa

SEQ ID NO: 1904145 - RNA, 19 nt, Artificial Sequence
  Description of Artificial Sequence: Synthetic oligonucleotide
  Antisense strand to SEQ ID NO: 1904144
uucgaacccagauucggcu

SEQ ID NO: 1904146 - RNA, 19 nt, Artificial Sequence
  Description of Artificial Sequence: Synthetic oligonucleotide
  Sense strand starting at position 1734 of SEQ ID NO: 1879398
guucgaaucugagcaggga

SEQ ID NO: 1904147 - RNA, 19 nt, Artificial Sequence
  Description of Artificial Sequence: Synthetic oligonucleotide
  Antisense strand to SEQ ID NO: 1904146
ucccugcucagauucgaac

SEQ ID NO: 1904148 - RNA, 19 nt, Artificial Sequence
  Description of Artificial Sequence: Synthetic oligonucleotide
  Sense strand starting at position 1986 of SEQ ID NO: 1879398
cgccacaggucuuauuaca

SEQ ID NO: 1904149 - RNA, 19 nt, Artificial Sequence
  Description of Artificial Sequence: Synthetic oligonucleotide
  Antisense strand to SEQ ID NO: 1904148
uguaauaagaccuguggcg

SEQ ID NO: 1904150 - RNA, 19 nt, Artificial Sequence
  Description of Artificial Sequence: Synthetic oligonucleotide
  Sense strand starting at position 2205 of SEQ ID NO: 1879398
ucucgauucccagauacuc

SEQ ID NO: 1904151 - RNA, 19 nt, Artificial Sequence
  Description of Artificial Sequence: Synthetic oligonucleotide
  Antisense strand to SEQ ID NO: 1904150
gaguaucugggaaucgaga

SEQ ID NO: 1904152 - RNA, 19 nt, Artificial Sequence
  Description of Artificial Sequence: Synthetic oligonucleotide
  Sense strand starting at position 2213 of SEQ ID NO: 1879398
cccagauacucagaugaga

SEQ ID NO: 1904153 - RNA, 19 nt, Artificial Sequence
  Description of Artificial Sequence: Synthetic oligonucleotide
  Antisense strand to SEQ ID NO: 1904152
ucucaucugaguaucuggg

SEQ ID NO: 1904154 - RNA, 19 nt, Artificial Sequence
  Description of Artificial Sequence: Synthetic oligonucleotide
  Sense strand starting at position 2226 of SEQ ID NO: 1879398
augagaaauccgcacucag

SEQ ID NO: 1904155 - RNA, 19 nt, Artificial Sequence
  Description of Artificial Sequence: Synthetic oligonucleotide
  Antisense strand to SEQ ID NO: 1904154
cugagugcggauuucucau

SEQ ID NO: 1904156 - RNA, 19 nt, Artificial Sequence
  Description of Artificial Sequence: Synthetic oligonucleotide
  Sense strand starting at position 2990 of SEQ ID NO: 1879398
ggacucgcguccgaacuau

SEQ ID NO: 1904157 - RNA, 19 nt, Artificial Sequence
  Description of Artificial Sequence: Synthetic oligonucleotide
  Antisense strand to SEQ ID NO: 1904156
auaguucggacgcgagucc

SEQ ID NO: 1904158 - RNA, 19 nt, Artificial Sequence
  Description of Artificial Sequence: Synthetic oligonucleotide
  Sense strand starting at position 3371 of SEQ ID NO: 1879398
augaauacauugcaaaguu

SEQ ID NO: 1904159 - RNA, 19 nt, Artificial Sequence
  Description of Artificial Sequence: Synthetic oligonucleotide
  Antisense strand to SEQ ID NO: 1904158
aacuuugcaauguauucau

SEQ ID NO: 1904160 - RNA, 19 nt, Artificial Sequence
  Description of Artificial Sequence: Synthetic oligonucleotide
  Sense strand starting at position 3417 of SEQ ID NO: 1879398
uugagugcucugugcgcau

SEQ ID NO: 1904161 - RNA, 19 nt, Artificial Sequence
  Description of Artificial Sequence: Synthetic oligonucleotide
  Antisense strand to SEQ ID NO: 1904160
augcgcacagagcacucaa

SEQ ID NO: 1904162 - RNA, 19 nt, Artificial Sequence
  Description of Artificial Sequence: Synthetic oligonucleotide
  Sense strand starting at position 71 of SEQ ID NO: 1879399
cuuuguauuugugcuugau

SEQ ID NO: 1904163 - RNA, 19 nt, Artificial Sequence
  Description of Artificial Sequence: Synthetic oligonucleotide
  Antisense strand to SEQ ID NO: 1904162
aucaagcacaaauacaaag

SEQ ID NO: 1904164 - RNA, 19 nt, Artificial Sequence
  Description of Artificial Sequence: Synthetic oligonucleotide
  Sense strand starting at position 73 of SEQ ID NO: 1879399
uuguauuugugcuugauac

SEQ ID NO: 1904165 - RNA, 19 nt, Artificial Sequence
  Description of Artificial Sequence: Synthetic oligonucleotide
  Antisense strand to SEQ ID NO: 1904164
guaucaagcacaaauacaa

SEQ ID NO: 1904166 - RNA, 19 nt, Artificial Sequence
  Description of Artificial Sequence: Synthetic oligonucleotide
  Sense strand starting at position 74 of SEQ ID NO: 1879399
uguauuugugcuugauacc

SEQ ID NO: 1904167 - RNA, 19 nt, Artificial Sequence
  Description of Artificial Sequence: Synthetic oligonucleotide
  Antisense strand to SEQ ID NO: 1904166
gguaucaagcacaaauaca

SEQ ID NO: 1904168 - RNA, 19 nt, Artificial Sequence
  Description of Artificial Sequence: Synthetic oligonucleotide
  Sense strand starting at position 261 of SEQ ID NO: 1879399
cuguuacuagagcaaauua

SEQ ID NO: 1904169 - RNA, 19 nt, Artificial Sequence
  Description of Artificial Sequence: Synthetic oligonucleotide
  Antisense strand to SEQ ID NO: 1904168
uaauuugcucuaguaacag

SEQ ID NO: 1904170 - RNA, 19 nt, Artificial Sequence
  Description of Artificial Sequence: Synthetic oligonucleotide
  Sense strand starting at position 414 of SEQ ID NO: 1879399
ucagcauuucuuuguagca

SEQ ID NO: 1904171 - RNA, 19 nt, Artificial Sequence
  Description of Artificial Sequence: Synthetic oligonucleotide
  Antisense strand to SEQ ID NO: 1904170
ugcuacaaagaaaugcuga

SEQ ID NO: 1904172 - RNA, 19 nt, Artificial Sequence
  Description of Artificial Sequence: Synthetic oligonucleotide
  Sense strand starting at position 471 of SEQ ID NO: 1879399
cugacaaugucaucagauu

SEQ ID NO: 1904173 - RNA, 19 nt, Artificial Sequence
  Description of Artificial Sequence: Synthetic oligonucleotide
  Antisense strand to SEQ ID NO: 1904172
aaucugaugacauugucag

SEQ ID NO: 1904174 - RNA, 19 nt, Artificial Sequence
  Description of Artificial Sequence: Synthetic oligonucleotide
  Sense strand starting at position 598 of SEQ ID NO: 1879399
cugucucaccuauaagaug

SEQ ID NO: 1904175 - RNA, 19 nt, Artificial Sequence
  Description of Artificial Sequence: Synthetic oligonucleotide
  Antisense strand to SEQ ID NO: 1904174
caucuuauaggugagacag

SEQ ID NO: 1904176 - RNA, 19 nt, Artificial Sequence
  Description of Artificial Sequence: Synthetic oligonucleotide
  Sense strand starting at position 885 of SEQ ID NO: 1879399
aauugaugcugugcaauuu

SEQ ID NO: 1904177 - RNA, 19 nt, Artificial Sequence
  Description of Artificial Sequence: Synthetic oligonucleotide
  Antisense strand to SEQ ID NO: 1904176
aaauugcacagcaucaauu

SEQ ID NO: 1904178 - RNA, 19 nt, Artificial Sequence
  Description of Artificial Sequence: Synthetic oligonucleotide
  Sense strand starting at position 993 of SEQ ID NO: 1879399
auacauuaauguuugugga

SEQ ID NO: 1904179 - RNA, 19 nt, Artificial Sequence
  Description of Artificial Sequence: Synthetic oligonucleotide
  Antisense strand to SEQ ID NO: 1904178
uccacaaacauuaauguau

SEQ ID NO: 1904180 - RNA, 19 nt, Artificial Sequence
  Description of Artificial Sequence: Synthetic oligonucleotide
  Sense strand starting at position 995 of SEQ ID NO: 1879399
acauuaauguuuguggaga

SEQ ID NO: 1904181 - RNA, 19 nt, Artificial Sequence
  Description of Artificial Sequence: Synthetic oligonucleotide
  Antisense strand to SEQ ID NO: 1904180
ucuccacaaacauuaaugu

SEQ ID NO: 1904182 - RNA, 19 nt, Artificial Sequence
  Description of Artificial Sequence: Synthetic oligonucleotide
  Sense strand starting at position 1000 of SEQ ID NO: 1879399
aauguuuguggagauucuu

SEQ ID NO: 1904183 - RNA, 19 nt, Artificial Sequence
  Description of Artificial Sequence: Synthetic oligonucleotide
  Antisense strand to SEQ ID NO: 1904182
aagaaucuccacaaacauu

SEQ ID NO: 1904184 - RNA, 19 nt, Artificial Sequence
  Description of Artificial Sequence: Synthetic oligonucleotide
  Sense strand starting at position 1064 of SEQ ID NO: 1879399
cuuuauaugcaauaguuga

SEQ ID NO: 1904185 - RNA, 19 nt, Artificial Sequence
  Description of Artificial Sequence: Synthetic oligonucleotide
  Antisense strand to SEQ ID NO: 1904184
ucaacuauugcauauaaag

SEQ ID NO: 1904186 - RNA, 19 nt, Artificial Sequence
  Description of Artificial Sequence: Synthetic oligonucleotide
  Sense strand starting at position 1078 of SEQ ID NO: 1879399
guugauuucugccuguuau

SEQ ID NO: 1904187 - RNA, 19 nt, Artificial Sequence
  Description of Artificial Sequence: Synthetic oligonucleotide
  Antisense strand to SEQ ID NO: 1904186
auaacaggcagaaaucaac

SEQ ID NO: 1904188 - RNA, 19 nt, Artificial Sequence
  Description of Artificial Sequence: Synthetic oligonucleotide
  Sense strand starting at position 1079 of SEQ ID NO: 1879399
uugauuucugccuguuaug

SEQ ID NO: 1904189 - RNA, 19 nt, Artificial Sequence
  Description of Artificial Sequence: Synthetic oligonucleotide
  Antisense strand to SEQ ID NO: 1904188
cauaacaggcagaaaucaa

SEQ ID NO: 1904190 - RNA, 19 nt, Artificial Sequence
  Description of Artificial Sequence: Synthetic oligonucleotide
  Sense strand starting at position 1164 of SEQ ID NO: 1879399
agccuagcccuauagauua

SEQ ID NO: 1904191 - RNA, 19 nt, Artificial Sequence
  Description of Artificial Sequence: Synthetic oligonucleotide
  Antisense strand to SEQ ID NO: 1904190
uaaucuauagggcuaggcu

SEQ ID NO: 1904192 - RNA, 19 nt, Artificial Sequence
  Description of Artificial Sequence: Synthetic oligonucleotide
  Sense strand starting at position 1384 of SEQ ID NO: 1879399
cacagucuugggcaaucua

SEQ ID NO: 1904193 - RNA, 19 nt, Artificial Sequence
  Description of Artificial Sequence: Synthetic oligonucleotide
  Antisense strand to SEQ ID NO: 1904192
uagauugcccaagacugug

SEQ ID NO: 1904194 - RNA, 19 nt, Artificial Sequence
  Description of Artificial Sequence: Synthetic oligonucleotide
  Sense strand starting at position 2032 of SEQ ID NO: 1879399
gacauuuauguaugucugu

SEQ ID NO: 1904195 - RNA, 19 nt, Artificial Sequence
  Description of Artificial Sequence: Synthetic oligonucleotide
  Antisense strand to SEQ ID NO: 1904194
acagacauacauaaauguc

SEQ ID NO: 1904196 - RNA, 19 nt, Artificial Sequence
  Description of Artificial Sequence: Synthetic oligonucleotide
  Sense strand starting at position 2162 of SEQ ID NO: 1879399
auaaguuagagauggcaga

SEQ ID NO: 1904197 - RNA, 19 nt, Artificial Sequence
  Description of Artificial Sequence: Synthetic oligonucleotide
  Antisense strand to SEQ ID NO: 1904196
ucugccaucucuaacuuau

SEQ ID NO: 1904198 - RNA, 19 nt, Artificial Sequence
  Description of Artificial Sequence: Synthetic oligonucleotide
  Sense strand starting at position 2438 of SEQ ID NO: 1879399
agagcugaucucuauuaug

SEQ ID NO: 1904199 - RNA, 19 nt, Artificial Sequence
  Description of Artificial Sequence: Synthetic oligonucleotide
  Antisense strand to SEQ ID NO: 1904198
cauaauagagaucagcucu

SEQ ID NO: 1904200 - RNA, 19 nt, Artificial Sequence
  Description of Artificial Sequence: Synthetic oligonucleotide
  Sense strand starting at position 2449 of SEQ ID NO: 1879399
cuauuaugucaugaaugca

SEQ ID NO: 1904201 - RNA, 19 nt, Artificial Sequence
  Description of Artificial Sequence: Synthetic oligonucleotide
  Antisense strand to SEQ ID NO: 1904200
ugcauucaugacauaauag

SEQ ID NO: 1904202 - RNA, 19 nt, Artificial Sequence
  Description of Artificial Sequence: Synthetic oligonucleotide
  Sense strand starting at position 2498 of SEQ ID NO: 1879399
uuagguaaaugaucuguaa

SEQ ID NO: 1904203 - RNA, 19 nt, Artificial Sequence
  Description of Artificial Sequence: Synthetic oligonucleotide
  Antisense strand to SEQ ID NO: 1904202
uuacagaucauuuaccuaa

SEQ ID NO: 1904204 - RNA, 19 nt, Artificial Sequence
  Description of Artificial Sequence: Synthetic oligonucleotide
  Sense strand starting at position 2500 of SEQ ID NO: 1879399
agguaaaugaucuguaagg

SEQ ID NO: 1904205 - RNA, 19 nt, Artificial Sequence
  Description of Artificial Sequence: Synthetic oligonucleotide
  Antisense strand to SEQ ID NO: 1904204
ccuuacagaucauuuaccu

SEQ ID NO: 1904206 - RNA, 19 nt, Artificial Sequence
  Description of Artificial Sequence: Synthetic oligonucleotide
  Sense strand starting at position 2506 of SEQ ID NO: 1879399
augaucuguaagggacauu

SEQ ID NO: 1904207 - RNA, 19 nt, Artificial Sequence
  Description of Artificial Sequence: Synthetic oligonucleotide
  Antisense strand to SEQ ID NO: 1904206
aaugucccuuacagaucau

SEQ ID NO: 1904208 - RNA, 19 nt, Artificial Sequence
  Description of Artificial Sequence: Synthetic oligonucleotide
  Sense strand starting at position 2793 of SEQ ID NO: 1879399
gacuuuguugaguagaugu

SEQ ID NO: 1904209 - RNA, 19 nt, Artificial Sequence
  Description of Artificial Sequence: Synthetic oligonucleotide
  Antisense strand to SEQ ID NO: 1904208
acaucuacucaacaaaguc

SEQ ID NO: 1904210 - RNA, 19 nt, Artificial Sequence
  Description of Artificial Sequence: Synthetic oligonucleotide
  Sense strand starting at position 2882 of SEQ ID NO: 1879399
accuuugcucuggaauaua

SEQ ID NO: 1904211 - RNA, 19 nt, Artificial Sequence
  Description of Artificial Sequence: Synthetic oligonucleotide
  Antisense strand to SEQ ID NO: 1904210
uauauuccagagcaaaggu

SEQ ID NO: 1904212 - RNA, 19 nt, Artificial Sequence
  Description of Artificial Sequence: Synthetic oligonucleotide
  Sense strand starting at position 2885 of SEQ ID NO: 1879399
uuugcucuggaauauauaa

SEQ ID NO: 1904213 - RNA, 19 nt, Artificial Sequence
  Description of Artificial Sequence: Synthetic oligonucleotide
  Antisense strand to SEQ ID NO: 1904212
uuauauauuccagagcaaa

SEQ ID NO: 1904214 - RNA, 19 nt, Artificial Sequence
  Description of Artificial Sequence: Synthetic oligonucleotide
  Sense strand starting at position 2925 of SEQ ID NO: 1879399
aggauaaucucuuuaguag

SEQ ID NO: 1904215 - RNA, 19 nt, Artificial Sequence
  Description of Artificial Sequence: Synthetic oligonucleotide
  Antisense strand to SEQ ID NO: 1904214
cuacuaaagagauuauccu

SEQ ID NO: 1904216 - RNA, 19 nt, Artificial Sequence
  Description of Artificial Sequence: Synthetic oligonucleotide
  Sense strand starting at position 2988 of SEQ ID NO: 1879399
gacuauagaguguagguau

SEQ ID NO: 1904217 - RNA, 19 nt, Artificial Sequence
  Description of Artificial Sequence: Synthetic oligonucleotide
  Antisense strand to SEQ ID NO: 1904216
auaccuacacucuauaguc

SEQ ID NO: 1904218 - RNA, 19 nt, Artificial Sequence
  Description of Artificial Sequence: Synthetic oligonucleotide
  Sense strand starting at position 2991 of SEQ ID NO: 1879399
uauagaguguagguauaau

SEQ ID NO: 1904219 - RNA, 19 nt, Artificial Sequence
  Description of Artificial Sequence: Synthetic oligonucleotide
  Antisense strand to SEQ ID NO: 1904218
auuauaccuacacucuaua

SEQ ID NO: 1904220 - RNA, 19 nt, Artificial Sequence
  Description of Artificial Sequence: Synthetic oligonucleotide
  Sense strand starting at position 3124 of SEQ ID NO: 1879399
ccaggugacaauuggacau

SEQ ID NO: 1904221 - RNA, 19 nt, Artificial Sequence
  Description of Artificial Sequence: Synthetic oligonucleotide
  Antisense strand to SEQ ID NO: 1904220
auguccaauugucaccugg

SEQ ID NO: 1904222 - RNA, 19 nt, Artificial Sequence
  Description of Artificial Sequence: Synthetic oligonucleotide
  Sense strand starting at position 3193 of SEQ ID NO: 1879399
acuguuauggacuagaugu

SEQ ID NO: 1904223 - RNA, 19 nt, Artificial Sequence
  Description of Artificial Sequence: Synthetic oligonucleotide
  Antisense strand to SEQ ID NO: 1904222
acaucuaguccauaacagu

SEQ ID NO: 1904224 - RNA, 19 nt, Artificial Sequence
  Description of Artificial Sequence: Synthetic oligonucleotide
  Sense strand starting at position 3274 of SEQ ID NO: 1879399
gguggcuuucggagguaau

SEQ ID NO: 1904225 - RNA, 19 nt, Artificial Sequence
  Description of Artificial Sequence: Synthetic oligonucleotide
  Antisense strand to SEQ ID NO: 1904224
auuaccuccgaaagccacc

SEQ ID NO: 1904226 - RNA, 19 nt, Artificial Sequence
  Description of Artificial Sequence: Synthetic oligonucleotide
  Sense strand starting at position 3320 of SEQ ID NO: 1879399
acuucucaugaugggauua

SEQ ID NO: 1904227 - RNA, 19 nt, Artificial Sequence
  Description of Artificial Sequence: Synthetic oligonucleotide
  Antisense strand to SEQ ID NO: 1904226
uaaucccaucaugagaagu

SEQ ID NO: 1904228 - RNA, 19 nt, Artificial Sequence
  Description of Artificial Sequence: Synthetic oligonucleotide
  Sense strand starting at position 3499 of SEQ ID NO: 1879399
ucuuccagucuugagaacu

SEQ ID NO: 1904229 - RNA, 19 nt, Artificial Sequence
  Description of Artificial Sequence: Synthetic oligonucleotide
  Antisense strand to SEQ ID NO: 1904228
aguucucaagacuggaaga

SEQ ID NO: 1904230 - RNA, 19 nt, Artificial Sequence
  Description of Artificial Sequence: Synthetic oligonucleotide
  Sense strand starting at position 3573 of SEQ ID NO: 1879399
gcagucucagaagacugau

SEQ ID NO: 1904231 - RNA, 19 nt, Artificial Sequence
  Description of Artificial Sequence: Synthetic oligonucleotide
  Antisense strand to SEQ ID NO: 1904230
aucagucuucugagacugc

SEQ ID NO: 1904232 - RNA, 19 nt, Artificial Sequence
  Description of Artificial Sequence: Synthetic oligonucleotide
  Sense strand starting at position 3576 of SEQ ID NO: 1879399
gucucagaagacugauaca

SEQ ID NO: 1904233 - RNA, 19 nt, Artificial Sequence
  Description of Artificial Sequence: Synthetic oligonucleotide
  Antisense strand to SEQ ID NO: 1904232
uguaucagucuucugagac

SEQ ID NO: 1904234 - RNA, 19 nt, Artificial Sequence
  Description of Artificial Sequence: Synthetic oligonucleotide
  Sense strand starting at position 3729 of SEQ ID NO: 1879399
caggaacauucgccauaag

SEQ ID NO: 1904235 - RNA, 19 nt, Artificial Sequence
  Description of Artificial Sequence: Synthetic oligonucleotide
  Antisense strand to SEQ ID NO: 1904234
cuuauggcgaauguuccug

SEQ ID NO: 1904236 - RNA, 19 nt, Artificial Sequence
  Description of Artificial Sequence: Synthetic oligonucleotide
  Sense strand starting at position 3732 of SEQ ID NO: 1879399
gaacauucgccauaagcag

SEQ ID NO: 1904237 - RNA, 19 nt, Artificial Sequence
  Description of Artificial Sequence: Synthetic oligonucleotide
  Antisense strand to SEQ ID NO: 1904236
cugcuuauggcgaauguuc

SEQ ID NO: 1904238 - RNA, 19 nt, Artificial Sequence
  Description of Artificial Sequence: Synthetic oligonucleotide
  Sense strand starting at position 3748 of SEQ ID NO: 1879399
caguacuagcaugaauuga

SEQ ID NO: 1904239 - RNA, 19 nt, Artificial Sequence
  Description of Artificial Sequence: Synthetic oligonucleotide
  Antisense strand to SEQ ID NO: 1904238
ucaauucaugcuaguacug

SEQ ID NO: 1904240 - RNA, 19 nt, Artificial Sequence
  Description of Artificial Sequence: Synthetic oligonucleotide
  Sense strand starting at position 3832 of SEQ ID NO: 1879399
ucuggagacuucucauuaa

SEQ ID NO: 1904241 - RNA, 19 nt, Artificial Sequence
  Description of Artificial Sequence: Synthetic oligonucleotide
  Antisense strand to SEQ ID NO: 1904240
uuaaugagaagucuccaga

SEQ ID NO: 1904242 - RNA, 19 nt, Artificial Sequence
  Description of Artificial Sequence: Synthetic oligonucleotide
  Sense strand starting at position 261 of SEQ ID NO: 1879400
ucaguuaggcaacagacau

SEQ ID NO: 1904243 - RNA, 19 nt, Artificial Sequence
  Description of Artificial Sequence: Synthetic oligonucleotide
  Antisense strand to SEQ ID NO: 1904242
augucuguugccuaacuga

SEQ ID NO: 1904244 - RNA, 19 nt, Artificial Sequence
  Description of Artificial Sequence: Synthetic oligonucleotide
  Sense strand starting at position 301 of SEQ ID NO: 1879400
ucuuauucucuagaaggcu

SEQ ID NO: 1904245 - RNA, 19 nt, Artificial Sequence
  Description of Artificial Sequence: Synthetic oligonucleotide
  Antisense strand to SEQ ID NO: 1904244
agccuucuagagaauaaga

SEQ ID NO: 1904246 - RNA, 19 nt, Artificial Sequence
  Description of Artificial Sequence: Synthetic oligonucleotide
  Sense strand starting at position 757 of SEQ ID NO: 1879400
ugucauuugucucccucaa

SEQ ID NO: 1904247 - RNA, 19 nt, Artificial Sequence
  Description of Artificial Sequence: Synthetic oligonucleotide
  Antisense strand to SEQ ID NO: 1904246
uugagggagacaaaugaca

SEQ ID NO: 1904248 - RNA, 19 nt, Artificial Sequence
  Description of Artificial Sequence: Synthetic oligonucleotide
  Sense strand starting at position 778 of SEQ ID NO: 1879400
aauuaagcucccugaggga

SEQ ID NO: 1904249 - RNA, 19 nt, Artificial Sequence
  Description of Artificial Sequence: Synthetic oligonucleotide
  Antisense strand to SEQ ID NO: 1904248
ucccucagggagcuuaauu

SEQ ID NO: 1904250 - RNA, 19 nt, Artificial Sequence
  Description of Artificial Sequence: Synthetic oligonucleotide
  Sense strand starting at position 837 of SEQ ID NO: 1879400
auggaucaaugcuucuuaa

SEQ ID NO: 1904251 - RNA, 19 nt, Artificial Sequence
  Description of Artificial Sequence: Synthetic oligonucleotide
  Antisense strand to SEQ ID NO: 1904250
uuaagaagcauugauccau

SEQ ID NO: 1904252 - RNA, 19 nt, Artificial Sequence
  Description of Artificial Sequence: Synthetic oligonucleotide
  Sense strand starting at position 1541 of SEQ ID NO: 1879400
ggaaaugcuuaacucagua

SEQ ID NO: 1904253 - RNA, 19 nt, Artificial Sequence
  Description of Artificial Sequence: Synthetic oligonucleotide
  Antisense strand to SEQ ID NO: 1904252
uacugaguuaagcauuucc

SEQ ID NO: 1904254 - RNA, 19 nt, Artificial Sequence
  Description of Artificial Sequence: Synthetic oligonucleotide
  Sense strand starting at position 1546 of SEQ ID NO: 1879400
ugcuuaacucaguaaauga

SEQ ID NO: 1904255 - RNA, 19 nt, Artificial Sequence
  Description of Artificial Sequence: Synthetic oligonucleotide
  Antisense strand to SEQ ID NO: 1904254
ucauuuacugaguuaagca

SEQ ID NO: 1904256 - RNA, 19 nt, Artificial Sequence
  Description of Artificial Sequence: Synthetic oligonucleotide
  Sense strand starting at position 1553 of SEQ ID NO: 1879400
cucaguaaaugaucaguuu

SEQ ID NO: 1904257 - RNA, 19 nt, Artificial Sequence
  Description of Artificial Sequence: Synthetic oligonucleotide
  Antisense strand to SEQ ID NO: 1904256
aaacugaucauuuacugag

SEQ ID NO: 1904258 - RNA, 19 nt, Artificial Sequence
  Description of Artificial Sequence: Synthetic oligonucleotide
  Sense strand starting at position 1556 of SEQ ID NO: 1879400
aguaaaugaucaguuucuu

SEQ ID NO: 1904259 - RNA, 19 nt, Artificial Sequence
  Description of Artificial Sequence: Synthetic oligonucleotide
  Antisense strand to SEQ ID NO: 1904258
aagaaacugaucauuuacu

SEQ ID NO: 1904260 - RNA, 19 nt, Artificial Sequence
  Description of Artificial Sequence: Synthetic oligonucleotide
  Sense strand starting at position 1631 of SEQ ID NO: 1879400
augaaauacucuguguauu

SEQ ID NO: 1904261 - RNA, 19 nt, Artificial Sequence
  Description of Artificial Sequence: Synthetic oligonucleotide
  Antisense strand to SEQ ID NO: 1904260
aauacacagaguauuucau

SEQ ID NO: 1904262 - RNA, 19 nt, Artificial Sequence
  Description of Artificial Sequence: Synthetic oligonucleotide
  Sense strand starting at position 1632 of SEQ ID NO: 1879400
ugaaauacucuguguauua

SEQ ID NO: 1904263 - RNA, 19 nt, Artificial Sequence
  Description of Artificial Sequence: Synthetic oligonucleotide
  Antisense strand to SEQ ID NO: 1904262
uaauacacagaguauuuca

SEQ ID NO: 1904264 - RNA, 19 nt, Artificial Sequence
  Description of Artificial Sequence: Synthetic oligonucleotide
  Sense strand starting at position 1787 of SEQ ID NO: 1879400
uugucagacaagugaaaga

SEQ ID NO: 1904265 - RNA, 19 nt, Artificial Sequence
  Description of Artificial Sequence: Synthetic oligonucleotide
  Antisense strand to SEQ ID NO: 1904264
ucuuucacuugucugacaa

SEQ ID NO: 1904266 - RNA, 19 nt, Artificial Sequence
  Description of Artificial Sequence: Synthetic oligonucleotide
  Sense strand starting at position 1807 of SEQ ID NO: 1879400
uaaagagaagugugugaca

SEQ ID NO: 1904267 - RNA, 19 nt, Artificial Sequence
  Description of Artificial Sequence: Synthetic oligonucleotide
  Antisense strand to SEQ ID NO: 1904266
ugucacacacuucucuuua

SEQ ID NO: 1904268 - RNA, 19 nt, Artificial Sequence
  Description of Artificial Sequence: Synthetic oligonucleotide
  Sense strand starting at position 1809 of SEQ ID NO: 1879400
aagagaagugugugacaca

SEQ ID NO: 1904269 - RNA, 19 nt, Artificial Sequence
  Description of Artificial Sequence: Synthetic oligonucleotide
  Antisense strand to SEQ ID NO: 1904268
ugugucacacacuucucuu

SEQ ID NO: 1904270 - RNA, 19 nt, Artificial Sequence
  Description of Artificial Sequence: Synthetic oligonucleotide
  Sense strand starting at position 2095 of SEQ ID NO: 1879400
gggagcuaugggcagaguu

SEQ ID NO: 1904271 - RNA, 19 nt, Artificial Sequence
  Description of Artificial Sequence: Synthetic oligonucleotide
  Antisense strand to SEQ ID NO: 1904270
aacucugcccauagcuccc

SEQ ID NO: 1904272 - RNA, 19 nt, Artificial Sequence
  Description of Artificial Sequence: Synthetic oligonucleotide
  Sense strand starting at position 2097 of SEQ ID NO: 1879400
gagcuaugggcagaguuag

SEQ ID NO: 1904273 - RNA, 19 nt, Artificial Sequence
  Description of Artificial Sequence: Synthetic oligonucleotide
  Antisense strand to SEQ ID NO: 1904272
cuaacucugcccauagcuc

SEQ ID NO: 1904274 - RNA, 19 nt, Artificial Sequence
  Description of Artificial Sequence: Synthetic oligonucleotide
  Sense strand starting at position 2109 of SEQ ID NO: 1879400
gaguuagaaguuuauauuc

SEQ ID NO: 1904275 - RNA, 19 nt, Artificial Sequence
  Description of Artificial Sequence: Synthetic oligonucleotide
  Antisense strand to SEQ ID NO: 1904274
gaauauaaacuucuaacuc

SEQ ID NO: 1904276 - RNA, 19 nt, Artificial Sequence
  Description of Artificial Sequence: Synthetic oligonucleotide
  Sense strand starting at position 2165 of SEQ ID NO: 1879400
ggagaacuauaacugccua

SEQ ID NO: 1904277 - RNA, 19 nt, Artificial Sequence
  Description of Artificial Sequence: Synthetic oligonucleotide
  Antisense strand to SEQ ID NO: 1904276
uaggcaguuauaguucucc

SEQ ID NO: 1904278 - RNA, 19 nt, Artificial Sequence
  Description of Artificial Sequence: Synthetic oligonucleotide
  Sense strand starting at position 2305 of SEQ ID NO: 1879400
ggguguaucauuugagcuc

SEQ ID NO: 1904279 - RNA, 19 nt, Artificial Sequence
  Description of Artificial Sequence: Synthetic oligonucleotide
  Antisense strand to SEQ ID NO: 1904278
gagcucaaaugauacaccc

SEQ ID NO: 1904280 - RNA, 19 nt, Artificial Sequence
  Description of Artificial Sequence: Synthetic oligonucleotide
  Sense strand starting at position 2609 of SEQ ID NO: 1879400
cugugcagucuucugugua

SEQ ID NO: 1904281 - RNA, 19 nt, Artificial Sequence
  Description of Artificial Sequence: Synthetic oligonucleotide
  Antisense strand to SEQ ID NO: 1904280
uacacagaagacugcacag

SEQ ID NO: 1904282 - RNA, 19 nt, Artificial Sequence
  Description of Artificial Sequence: Synthetic oligonucleotide
  Sense strand starting at position 2967 of SEQ ID NO: 1879400
caagguacuggucaucaca

SEQ ID NO: 1904283 - RNA, 19 nt, Artificial Sequence
  Description of Artificial Sequence: Synthetic oligonucleotide
  Antisense strand to SEQ ID NO: 1904282
ugugaugaccaguaccuug

SEQ ID NO: 1904284 - RNA, 19 nt, Artificial Sequence
  Description of Artificial Sequence: Synthetic oligonucleotide
  Sense strand starting at position 2969 of SEQ ID NO: 1879400
agguacuggucaucacaau

SEQ ID NO: 1904285 - RNA, 19 nt, Artificial Sequence
  Description of Artificial Sequence: Synthetic oligonucleotide
  Antisense strand to SEQ ID NO: 1904284
auugugaugaccaguaccu

SEQ ID NO: 1904286 - RNA, 19 nt, Artificial Sequence
  Description of Artificial Sequence: Synthetic oligonucleotide
  Sense strand starting at position 2970 of SEQ ID NO: 1879400
gguacuggucaucacaauu

SEQ ID NO: 1904287 - RNA, 19 nt, Artificial Sequence
  Description of Artificial Sequence: Synthetic oligonucleotide
  Antisense strand to SEQ ID NO: 1904286
aauugugaugaccaguacc

SEQ ID NO: 1904288 - RNA, 19 nt, Artificial Sequence
  Description of Artificial Sequence: Synthetic oligonucleotide
  Sense strand starting at position 2983 of SEQ ID NO: 1879400
acaauuaaguaguuuggau

SEQ ID NO: 1904289 - RNA, 19 nt, Artificial Sequence
  Description of Artificial Sequence: Synthetic oligonucleotide
  Antisense strand to SEQ ID NO: 1904288
auccaaacuacuuaauugu

SEQ ID NO: 1904290 - RNA, 19 nt, Artificial Sequence
  Description of Artificial Sequence: Synthetic oligonucleotide
  Sense strand starting at position 2985 of SEQ ID NO: 1879400
aauuaaguaguuuggauga

SEQ ID NO: 1904291 - RNA, 19 nt, Artificial Sequence
  Description of Artificial Sequence: Synthetic oligonucleotide
  Antisense strand to SEQ ID NO: 1904290
ucauccaaacuacuuaauu

SEQ ID NO: 1904292 - RNA, 19 nt, Artificial Sequence
  Description of Artificial Sequence: Synthetic oligonucleotide
  Sense strand starting at position 2998 of SEQ ID NO: 1879400
ggaugagggcacugacuuu

SEQ ID NO: 1904293 - RNA, 19 nt, Artificial Sequence
  Description of Artificial Sequence: Synthetic oligonucleotide
  Antisense strand to SEQ ID NO: 1904292
aaagucagugcccucaucc

SEQ ID NO: 1904294 - RNA, 19 nt, Artificial Sequence
  Description of Artificial Sequence: Synthetic oligonucleotide
  Sense strand starting at position 3007 of SEQ ID NO: 1879400
cacugacuuugggcuaaga

SEQ ID NO: 1904295 - RNA, 19 nt, Artificial Sequence
  Description of Artificial Sequence: Synthetic oligonucleotide
  Antisense strand to SEQ ID NO: 1904294
ucuuagcccaaagucagug

SEQ ID NO: 1904296 - RNA, 19 nt, Artificial Sequence
  Description of Artificial Sequence: Synthetic oligonucleotide
  Sense strand starting at position 3046 of SEQ ID NO: 1879400
agcuguucuguuucuguua

SEQ ID NO: 1904297 - RNA, 19 nt, Artificial Sequence
  Description of Artificial Sequence: Synthetic oligonucleotide
  Antisense strand to SEQ ID NO: 1904296
uaacagaaacagaacagcu

SEQ ID NO: 1904298 - RNA, 19 nt, Artificial Sequence
  Description of Artificial Sequence: Synthetic oligonucleotide
  Sense strand starting at position 3069 of SEQ ID NO: 1879400
acugucugggcugagauau

SEQ ID NO: 1904299 - RNA, 19 nt, Artificial Sequence
  Description of Artificial Sequence: Synthetic oligonucleotide
  Antisense strand to SEQ ID NO: 1904298
auaucucagcccagacagu

SEQ ID NO: 1904300 - RNA, 19 nt, Artificial Sequence
  Description of Artificial Sequence: Synthetic oligonucleotide
  Sense strand starting at position 3402 of SEQ ID NO: 1879400
agguucuaugcagaugauu

SEQ ID NO: 1904301 - RNA, 19 nt, Artificial Sequence
  Description of Artificial Sequence: Synthetic oligonucleotide
  Antisense strand to SEQ ID NO: 1904300
aaucaucugcauagaaccu

SEQ ID NO: 1904302 - RNA, 19 nt, Artificial Sequence
  Description of Artificial Sequence: Synthetic oligonucleotide
  Sense strand starting at position 3494 of SEQ ID NO: 1879400
cucuguucucuugaguaau

SEQ ID NO: 1904303 - RNA, 19 nt, Artificial Sequence
  Description of Artificial Sequence: Synthetic oligonucleotide
  Antisense strand to SEQ ID NO: 1904302
auuacucaagagaacagag

SEQ ID NO: 1904304 - RNA, 19 nt, Artificial Sequence
  Description of Artificial Sequence: Synthetic oligonucleotide
  Sense strand starting at position 3528 of SEQ ID NO: 1879400
ggauuagcauucuuugauc

SEQ ID NO: 1904305 - RNA, 19 nt, Artificial Sequence
  Description of Artificial Sequence: Synthetic oligonucleotide
  Antisense strand to SEQ ID NO: 1904304
gaucaaagaaugcuaaucc

SEQ ID NO: 1904306 - RNA, 19 nt, Artificial Sequence
  Description of Artificial Sequence: Synthetic oligonucleotide
  Sense strand starting at position 3592 of SEQ ID NO: 1879400
aauguucucuggccagaag

SEQ ID NO: 1904307 - RNA, 19 nt, Artificial Sequence
  Description of Artificial Sequence: Synthetic oligonucleotide
  Antisense strand to SEQ ID NO: 1904306
cuucuggccagagaacauu

SEQ ID NO: 1904308 - RNA, 19 nt, Artificial Sequence
  Description of Artificial Sequence: Synthetic oligonucleotide
  Sense strand starting at position 3593 of SEQ ID NO: 1879400
auguucucuggccagaaga

SEQ ID NO: 1904309 - RNA, 19 nt, Artificial Sequence
  Description of Artificial Sequence: Synthetic oligonucleotide
  Antisense strand to SEQ ID NO: 1904308
ucuucuggccagagaacau

SEQ ID NO: 1904310 - RNA, 19 nt, Artificial Sequence
  Description of Artificial Sequence: Synthetic oligonucleotide
  Sense strand starting at position 3595 of SEQ ID NO: 1879400
guucucuggccagaagaga

SEQ ID NO: 1904311 - RNA, 19 nt, Artificial Sequence
  Description of Artificial Sequence: Synthetic oligonucleotide
  Antisense strand to SEQ ID NO: 1904310
ucucuucuggccagagaac

SEQ ID NO: 1904312 - RNA, 19 nt, Artificial Sequence
  Description of Artificial Sequence: Synthetic oligonucleotide
  Sense strand starting at position 3657 of SEQ ID NO: 1879400
gaguacugucaugauaugu

SEQ ID NO: 1904313 - RNA, 19 nt, Artificial Sequence
  Description of Artificial Sequence: Synthetic oligonucleotide
  Antisense strand to SEQ ID NO: 1904312
acauaucaugacaguacuc

SEQ ID NO: 1904314 - RNA, 19 nt, Artificial Sequence
  Description of Artificial Sequence: Synthetic oligonucleotide
  Sense strand starting at position 3778 of SEQ ID NO: 1879400
ugagucccugccuaggaau

SEQ ID NO: 1904315 - RNA, 19 nt, Artificial Sequence
  Description of Artificial Sequence: Synthetic oligonucleotide
  Antisense strand to SEQ ID NO: 1904314
auuccuaggcagggacuca

SEQ ID NO: 1904316 - RNA, 19 nt, Artificial Sequence
  Description of Artificial Sequence: Synthetic oligonucleotide
  Sense strand starting at position 3851 of SEQ ID NO: 1879400
gggucagcgugcauuaagu

SEQ ID NO: 1904317 - RNA, 19 nt, Artificial Sequence
  Description of Artificial Sequence: Synthetic oligonucleotide
  Antisense strand to SEQ ID NO: 1904316
acuuaaugcacgcugaccc

SEQ ID NO: 1904318 - RNA, 19 nt, Artificial Sequence
  Description of Artificial Sequence: Synthetic oligonucleotide
  Sense strand starting at position 3865 of SEQ ID NO: 1879400
uaaguaacuggucaaugua

SEQ ID NO: 1904319 - RNA, 19 nt, Artificial Sequence
  Description of Artificial Sequence: Synthetic oligonucleotide
  Antisense strand to SEQ ID NO: 1904318
uacauugaccaguuacuua

SEQ ID NO: 1904320 - RNA, 19 nt, Artificial Sequence
  Description of Artificial Sequence: Synthetic oligonucleotide
  Sense strand starting at position 3868 of SEQ ID NO: 1879400
guaacuggucaauguagaa

SEQ ID NO: 1904321 - RNA, 19 nt, Artificial Sequence
  Description of Artificial Sequence: Synthetic oligonucleotide
  Antisense strand to SEQ ID NO: 1904320
uucuacauugaccaguuac

SEQ ID NO: 1904322 - RNA, 19 nt, Artificial Sequence
  Description of Artificial Sequence: Synthetic oligonucleotide
  Sense strand starting at position 12 of SEQ ID NO: 1879401
guguuuguccuauacaaga

SEQ ID NO: 1904323 - RNA, 19 nt, Artificial Sequence
  Description of Artificial Sequence: Synthetic oligonucleotide
  Antisense strand to SEQ ID NO: 1904322
ucuuguauaggacaaacac

SEQ ID NO: 1904324 - RNA, 19 nt, Artificial Sequence
  Description of Artificial Sequence: Synthetic oligonucleotide
  Sense strand starting at position 84 of SEQ ID NO: 1879401
ugaugauggauuggcacaa

SEQ ID NO: 1904325 - RNA, 19 nt, Artificial Sequence
  Description of Artificial Sequence: Synthetic oligonucleotide
  Antisense strand to SEQ ID NO: 1904324
uugugccaauccaucauca

SEQ ID NO: 1904326 - RNA, 19 nt, Artificial Sequence
  Description of Artificial Sequence: Synthetic oligonucleotide
  Sense strand starting at position 238 of SEQ ID NO: 1879401
gauaauucuggaugucucu

SEQ ID NO: 1904327 - RNA, 19 nt, Artificial Sequence
  Description of Artificial Sequence: Synthetic oligonucleotide
  Antisense strand to SEQ ID NO: 1904326
agagacauccagaauuauc

SEQ ID NO: 1904328 - RNA, 19 nt, Artificial Sequence
  Description of Artificial Sequence: Synthetic oligonucleotide
  Sense strand starting at position 244 of SEQ ID NO: 1879401
ucuggaugucucuaucaau

SEQ ID NO: 1904329 - RNA, 19 nt, Artificial Sequence
  Description of Artificial Sequence: Synthetic oligonucleotide
  Antisense strand to SEQ ID NO: 1904328
auugauagagacauccaga

SEQ ID NO: 1904330 - RNA, 19 nt, Artificial Sequence
  Description of Artificial Sequence: Synthetic oligonucleotide
  Sense strand starting at position 309 of SEQ ID NO: 1879401
gagacaucacgaggagcua

SEQ ID NO: 1904331 - RNA, 19 nt, Artificial Sequence
  Description of Artificial Sequence: Synthetic oligonucleotide
  Antisense strand to SEQ ID NO: 1904330
uagcuccucgugaugucuc

SEQ ID NO: 1904332 - RNA, 19 nt, Artificial Sequence
  Description of Artificial Sequence: Synthetic oligonucleotide
  Sense strand starting at position 330 of SEQ ID NO: 1879401
ccaauauaaguuuagaguu

SEQ ID NO: 1904333 - RNA, 19 nt, Artificial Sequence
  Description of Artificial Sequence: Synthetic oligonucleotide
  Antisense strand to SEQ ID NO: 1904332
aacucuaaacuuauauugg

SEQ ID NO: 1904334 - RNA, 19 nt, Artificial Sequence
  Description of Artificial Sequence: Synthetic oligonucleotide
  Sense strand starting at position 704 of SEQ ID NO: 1879401
uuggaugugagacguaaag

SEQ ID NO: 1904335 - RNA, 19 nt, Artificial Sequence
  Description of Artificial Sequence: Synthetic oligonucleotide
  Antisense strand to SEQ ID NO: 1904334
cuuuacgucucacauccaa

SEQ ID NO: 1904336 - RNA, 19 nt, Artificial Sequence
  Description of Artificial Sequence: Synthetic oligonucleotide
  Sense strand starting at position 842 of SEQ ID NO: 1879401
cuagauguuagucacaggu

SEQ ID NO: 1904337 - RNA, 19 nt, Artificial Sequence
  Description of Artificial Sequence: Synthetic oligonucleotide
  Antisense strand to SEQ ID NO: 1904336
accugugacuaacaucuag

SEQ ID NO: 1904338 - RNA, 19 nt, Artificial Sequence
  Description of Artificial Sequence: Synthetic oligonucleotide
  Sense strand starting at position 877 of SEQ ID NO: 1879401
uuagguuugccugggauuu

SEQ ID NO: 1904339 - RNA, 19 nt, Artificial Sequence
  Description of Artificial Sequence: Synthetic oligonucleotide
  Antisense strand to SEQ ID NO: 1904338
aaaucccaggcaaaccuaa

SEQ ID NO: 1904340 - RNA, 19 nt, Artificial Sequence
  Description of Artificial Sequence: Synthetic oligonucleotide
  Sense strand starting at position 947 of SEQ ID NO: 1879401
ggcaaaucaggauaguugu

SEQ ID NO: 1904341 - RNA, 19 nt, Artificial Sequence
  Description of Artificial Sequence: Synthetic oligonucleotide
  Antisense strand to SEQ ID NO: 1904340
acaacuauccugauuugcc

SEQ ID NO: 1904342 - RNA, 19 nt, Artificial Sequence
  Description of Artificial Sequence: Synthetic oligonucleotide
  Sense strand starting at position 950 of SEQ ID NO: 1879401
aaaucaggauaguugucua

SEQ ID NO: 1904343 - RNA, 19 nt, Artificial Sequence
  Description of Artificial Sequence: Synthetic oligonucleotide
  Antisense strand to SEQ ID NO: 1904342
uagacaacuauccugauuu

SEQ ID NO: 1904344 - RNA, 19 nt, Artificial Sequence
  Description of Artificial Sequence: Synthetic oligonucleotide
  Sense strand starting at position 982 of SEQ ID NO: 1879401
gucacaucuagcuggaaga

SEQ ID NO: 1904345 - RNA, 19 nt, Artificial Sequence
  Description of Artificial Sequence: Synthetic oligonucleotide
  Antisense strand to SEQ ID NO: 1904344
ucuuccagcuagaugugac

SEQ ID NO: 1904346 - RNA, 19 nt, Artificial Sequence
  Description of Artificial Sequence: Synthetic oligonucleotide
  Sense strand starting at position 1051 of SEQ ID NO: 1879401
gaaguucuguuaccaagga

SEQ ID NO: 1904347 - RNA, 19 nt, Artificial Sequence
  Description of Artificial Sequence: Synthetic oligonucleotide
  Antisense strand to SEQ ID NO: 1904346
uccuugguaacagaacuuc

SEQ ID NO: 1904348 - RNA, 19 nt, Artificial Sequence
  Description of Artificial Sequence: Synthetic oligonucleotide
  Sense strand starting at position 1055 of SEQ ID NO: 1879401
uucuguuaccaaggaggaa

SEQ ID NO: 1904349 - RNA, 19 nt, Artificial Sequence
  Description of Artificial Sequence: Synthetic oligonucleotide
  Antisense strand to SEQ ID NO: 1904348
uuccuccuugguaacagaa

SEQ ID NO: 1904350 - RNA, 19 nt, Artificial Sequence
  Description of Artificial Sequence: Synthetic oligonucleotide
  Sense strand starting at position 1131 of SEQ ID NO: 1879401
agcaaucuucuguaaugau

SEQ ID NO: 1904351 - RNA, 19 nt, Artificial Sequence
  Description of Artificial Sequence: Synthetic oligonucleotide
  Antisense strand to SEQ ID NO: 1904350
aucauuacagaagauugcu

SEQ ID NO: 1904352 - RNA, 19 nt, Artificial Sequence
  Description of Artificial Sequence: Synthetic oligonucleotide
  Sense strand starting at position 1140 of SEQ ID NO: 1879401
cuguaaugauuagugauca

SEQ ID NO: 1904353 - RNA, 19 nt, Artificial Sequence
  Description of Artificial Sequence: Synthetic oligonucleotide
  Antisense strand to SEQ ID NO: 1904352
ugaucacuaaucauuacag

SEQ ID NO: 1904354 - RNA, 19 nt, Artificial Sequence
  Description of Artificial Sequence: Synthetic oligonucleotide
  Sense strand starting at position 1375 of SEQ ID NO: 1879401
ggauuaagguagguaccua

SEQ ID NO: 1904355 - RNA, 19 nt, Artificial Sequence
  Description of Artificial Sequence: Synthetic oligonucleotide
  Antisense strand to SEQ ID NO: 1904354
uagguaccuaccuuaaucc

SEQ ID NO: 1904356 - RNA, 19 nt, Artificial Sequence
  Description of Artificial Sequence: Synthetic oligonucleotide
  Sense strand starting at position 1392 of SEQ ID NO: 1879401
uaaggaaggucauugcaaa

SEQ ID NO: 1904357 - RNA, 19 nt, Artificial Sequence
  Description of Artificial Sequence: Synthetic oligonucleotide
  Antisense strand to SEQ ID NO: 1904356
uuugcaaugaccuuccuua

SEQ ID NO: 1904358 - RNA, 19 nt, Artificial Sequence
  Description of Artificial Sequence: Synthetic oligonucleotide
  Sense strand starting at position 1551 of SEQ ID NO: 1879401
cuuuaauacucccugagga

SEQ ID NO: 1904359 - RNA, 19 nt, Artificial Sequence
  Description of Artificial Sequence: Synthetic oligonucleotide
  Antisense strand to SEQ ID NO: 1904358
uccucagggaguauuaaag

SEQ ID NO: 1904360 - RNA, 19 nt, Artificial Sequence
  Description of Artificial Sequence: Synthetic oligonucleotide
  Sense strand starting at position 1552 of SEQ ID NO: 1879401
uuuaauacucccugaggac

SEQ ID NO: 1904361 - RNA, 19 nt, Artificial Sequence
  Description of Artificial Sequence: Synthetic oligonucleotide
  Antisense strand to SEQ ID NO: 1904360
guccucagggaguauuaaa

SEQ ID NO: 1904362 - RNA, 19 nt, Artificial Sequence
  Description of Artificial Sequence: Synthetic oligonucleotide
  Sense strand starting at position 1741 of SEQ ID NO: 1879401
ucaggagcuuaauucucaa

SEQ ID NO: 1904363 - RNA, 19 nt, Artificial Sequence
  Description of Artificial Sequence: Synthetic oligonucleotide
  Antisense strand to SEQ ID NO: 1904362
uugagaauuaagcuccuga

SEQ ID NO: 1904364 - RNA, 19 nt, Artificial Sequence
  Description of Artificial Sequence: Synthetic oligonucleotide
  Sense strand starting at position 1744 of SEQ ID NO: 1879401
ggagcuuaauucucaaauu

SEQ ID NO: 1904365 - RNA, 19 nt, Artificial Sequence
  Description of Artificial Sequence: Synthetic oligonucleotide
  Antisense strand to SEQ ID NO: 1904364
aauuugagaauuaagcucc

SEQ ID NO: 1904366 - RNA, 19 nt, Artificial Sequence
  Description of Artificial Sequence: Synthetic oligonucleotide
  Sense strand starting at position 1780 of SEQ ID NO: 1879401
agaugcuugacaugaugua

SEQ ID NO: 1904367 - RNA, 19 nt, Artificial Sequence
  Description of Artificial Sequence: Synthetic oligonucleotide
  Antisense strand to SEQ ID NO: 1904366
uacaucaugucaagcaucu

SEQ ID NO: 1904368 - RNA, 19 nt, Artificial Sequence
  Description of Artificial Sequence: Synthetic oligonucleotide
  Sense strand starting at position 1781 of SEQ ID NO: 1879401
gaugcuugacaugauguaa

SEQ ID NO: 1904369 - RNA, 19 nt, Artificial Sequence
  Description of Artificial Sequence: Synthetic oligonucleotide
  Antisense strand to SEQ ID NO: 1904368
uuacaucaugucaagcauc

SEQ ID NO: 1904370 - RNA, 19 nt, Artificial Sequence
  Description of Artificial Sequence: Synthetic oligonucleotide
  Sense strand starting at position 1805 of SEQ ID NO: 1879401
cagagauuaugguauuuga

SEQ ID NO: 1904371 - RNA, 19 nt, Artificial Sequence
  Description of Artificial Sequence: Synthetic oligonucleotide
  Antisense strand to SEQ ID NO: 1904370
ucaaauaccauaaucucug

SEQ ID NO: 1904372 - RNA, 19 nt, Artificial Sequence
  Description of Artificial Sequence: Synthetic oligonucleotide
  Sense strand starting at position 2526 of SEQ ID NO: 1879401
ccggaaaucucaccuucca

SEQ ID NO: 1904373 - RNA, 19 nt, Artificial Sequence
  Description of Artificial Sequence: Synthetic oligonucleotide
  Antisense strand to SEQ ID NO: 1904372
uggaaggugagauuuccgg

SEQ ID NO: 1904374 - RNA, 19 nt, Artificial Sequence
  Description of Artificial Sequence: Synthetic oligonucleotide
  Sense strand starting at position 2612 of SEQ ID NO: 1879401
cguaaucauggaggaggua

SEQ ID NO: 1904375 - RNA, 19 nt, Artificial Sequence
  Description of Artificial Sequence: Synthetic oligonucleotide
  Antisense strand to SEQ ID NO: 1904374
uaccuccuccaugauuacg

SEQ ID NO: 1904376 - RNA, 19 nt, Artificial Sequence
  Description of Artificial Sequence: Synthetic oligonucleotide
  Sense strand starting at position 2924 of SEQ ID NO: 1879401
cuauuacugcacugaaaug

SEQ ID NO: 1904377 - RNA, 19 nt, Artificial Sequence
  Description of Artificial Sequence: Synthetic oligonucleotide
  Antisense strand to SEQ ID NO: 1904376
cauuucagugcaguaauag

SEQ ID NO: 1904378 - RNA, 19 nt, Artificial Sequence
  Description of Artificial Sequence: Synthetic oligonucleotide
  Sense strand starting at position 2955 of SEQ ID NO: 1879401
gucaucagugaccauuauu

SEQ ID NO: 1904379 - RNA, 19 nt, Artificial Sequence
  Description of Artificial Sequence: Synthetic oligonucleotide
  Antisense strand to SEQ ID NO: 1904378
aauaauggucacugaugac

SEQ ID NO: 1904380 - RNA, 19 nt, Artificial Sequence
  Description of Artificial Sequence: Synthetic oligonucleotide
  Sense strand starting at position 2982 of SEQ ID NO: 1879401
gccaauagccaaugaauau

SEQ ID NO: 1904381 - RNA, 19 nt, Artificial Sequence
  Description of Artificial Sequence: Synthetic oligonucleotide
  Antisense strand to SEQ ID NO: 1904380
auauucauuggcuauuggc

SEQ ID NO: 1904382 - RNA, 19 nt, Artificial Sequence
  Description of Artificial Sequence: Synthetic oligonucleotide
  Sense strand starting at position 3088 of SEQ ID NO: 1879401
auuugcuaccugugugacu

SEQ ID NO: 1904383 - RNA, 19 nt, Artificial Sequence
  Description of Artificial Sequence: Synthetic oligonucleotide
  Antisense strand to SEQ ID NO: 1904382
agucacacagguagcaaau

SEQ ID NO: 1904384 - RNA, 19 nt, Artificial Sequence
  Description of Artificial Sequence: Synthetic oligonucleotide
  Sense strand starting at position 3194 of SEQ ID NO: 1879401
uugacauguuaauuagaga

SEQ ID NO: 1904385 - RNA, 19 nt, Artificial Sequence
  Description of Artificial Sequence: Synthetic oligonucleotide
  Antisense strand to SEQ ID NO: 1904384
ucucuaauuaacaugucaa

SEQ ID NO: 1904386 - RNA, 19 nt, Artificial Sequence
  Description of Artificial Sequence: Synthetic oligonucleotide
  Sense strand starting at position 3283 of SEQ ID NO: 1879401
uuauccuucccuugagaga

SEQ ID NO: 1904387 - RNA, 19 nt, Artificial Sequence
  Description of Artificial Sequence: Synthetic oligonucleotide
  Antisense strand to SEQ ID NO: 1904386
ucucucaagggaaggauaa

SEQ ID NO: 1904388 - RNA, 19 nt, Artificial Sequence
  Description of Artificial Sequence: Synthetic oligonucleotide
  Sense strand starting at position 3396 of SEQ ID NO: 1879401
caugguaucuucuuggaau

SEQ ID NO: 1904389 - RNA, 19 nt, Artificial Sequence
  Description of Artificial Sequence: Synthetic oligonucleotide
  Antisense strand to SEQ ID NO: 1904388
auuccaagaagauaccaug

SEQ ID NO: 1904390 - RNA, 19 nt, Artificial Sequence
  Description of Artificial Sequence: Synthetic oligonucleotide
  Sense strand starting at position 3481 of SEQ ID NO: 1879401
ggcaaauaugggcaucuuu

SEQ ID NO: 1904391 - RNA, 19 nt, Artificial Sequence
  Description of Artificial Sequence: Synthetic oligonucleotide
  Antisense strand to SEQ ID NO: 1904390
aaagaugcccauauuugcc

SEQ ID NO: 1904392 - RNA, 19 nt, Artificial Sequence
  Description of Artificial Sequence: Synthetic oligonucleotide
  Sense strand starting at position 3530 of SEQ ID NO: 1879401
uccuaaauccaugagcugu

SEQ ID NO: 1904393 - RNA, 19 nt, Artificial Sequence
  Description of Artificial Sequence: Synthetic oligonucleotide
  Antisense strand to SEQ ID NO: 1904392
acagcucauggauuuagga

SEQ ID NO: 1904394 - RNA, 19 nt, Artificial Sequence
  Description of Artificial Sequence: Synthetic oligonucleotide
  Sense strand starting at position 3616 of SEQ ID NO: 1879401
ccugcucagccacagauaa

SEQ ID NO: 1904395 - RNA, 19 nt, Artificial Sequence
  Description of Artificial Sequence: Synthetic oligonucleotide
  Antisense strand to SEQ ID NO: 1904394
uuaucuguggcugagcagg

SEQ ID NO: 1904396 - RNA, 19 nt, Artificial Sequence
  Description of Artificial Sequence: Synthetic oligonucleotide
  Sense strand starting at position 3675 of SEQ ID NO: 1879401
guuaguacccuugaaauug

SEQ ID NO: 1904397 - RNA, 19 nt, Artificial Sequence
  Description of Artificial Sequence: Synthetic oligonucleotide
  Antisense strand to SEQ ID NO: 1904396
caauuucaaggguacuaac

SEQ ID NO: 1904398 - RNA, 19 nt, Artificial Sequence
  Description of Artificial Sequence: Synthetic oligonucleotide
  Sense strand starting at position 3685 of SEQ ID NO: 1879401
uugaaauugugacugaaua

SEQ ID NO: 1904399 - RNA, 19 nt, Artificial Sequence
  Description of Artificial Sequence: Synthetic oligonucleotide
  Antisense strand to SEQ ID NO: 1904398
uauucagucacaauuucaa

SEQ ID NO: 1904400 - RNA, 19 nt, Artificial Sequence
  Description of Artificial Sequence: Synthetic oligonucleotide
  Sense strand starting at position 3693 of SEQ ID NO: 1879401
gugacugaauaaucuguua

SEQ ID NO: 1904401 - RNA, 19 nt, Artificial Sequence
  Description of Artificial Sequence: Synthetic oligonucleotide
  Antisense strand to SEQ ID NO: 1904400
uaacagauuauucagucac

SEQ ID NO: 1904402 - RNA, 19 nt, Artificial Sequence
  Description of Artificial Sequence: Synthetic oligonucleotide
  Sense strand starting at position 21 of SEQ ID NO: 1879402
ucagaaaguuucuccagau

SEQ ID NO: 1904403 - RNA, 19 nt, Artificial Sequence
  Description of Artificial Sequence: Synthetic oligonucleotide
  Antisense strand to SEQ ID NO: 1904402
aucuggagaaacuuucuga

SEQ ID NO: 1904404 - RNA, 19 nt, Artificial Sequence
  Description of Artificial Sequence: Synthetic oligonucleotide
  Sense strand starting at position 110 of SEQ ID NO: 1879402
aucauagaguagcuuauua

SEQ ID NO: 1904405 - RNA, 19 nt, Artificial Sequence
  Description of Artificial Sequence: Synthetic oligonucleotide
  Antisense strand to SEQ ID NO: 1904404
uaauaagcuacucuaugau

SEQ ID NO: 1904406 - RNA, 19 nt, Artificial Sequence
  Description of Artificial Sequence: Synthetic oligonucleotide
  Sense strand starting at position 150 of SEQ ID NO: 1879402
acaugcauuugagaucauc

SEQ ID NO: 1904407 - RNA, 19 nt, Artificial Sequence
  Description of Artificial Sequence: Synthetic oligonucleotide
  Antisense strand to SEQ ID NO: 1904406
gaugaucucaaaugcaugu

SEQ ID NO: 1904408 - RNA, 19 nt, Artificial Sequence
  Description of Artificial Sequence: Synthetic oligonucleotide
  Sense strand starting at position 213 of SEQ ID NO: 1879402
guuguauuucaucguauag

SEQ ID NO: 1904409 - RNA, 19 nt, Artificial Sequence
  Description of Artificial Sequence: Synthetic oligonucleotide
  Antisense strand to SEQ ID NO: 1904408
cuauacgaugaaauacaac

SEQ ID NO: 1904410 - RNA, 19 nt, Artificial Sequence
  Description of Artificial Sequence: Synthetic oligonucleotide
  Sense strand starting at position 386 of SEQ ID NO: 1879402
uugauuauguccuccaaga

SEQ ID NO: 1904411 - RNA, 19 nt, Artificial Sequence
  Description of Artificial Sequence: Synthetic oligonucleotide
  Antisense strand to SEQ ID NO: 1904410
ucuuggaggacauaaucaa

SEQ ID NO: 1904412 - RNA, 19 nt, Artificial Sequence
  Description of Artificial Sequence: Synthetic oligonucleotide
  Sense strand starting at position 466 of SEQ ID NO: 1879402
augacaauauggcuuaaua

SEQ ID NO: 1904413 - RNA, 19 nt, Artificial Sequence
  Description of Artificial Sequence: Synthetic oligonucleotide
  Antisense strand to SEQ ID NO: 1904412
uauuaagccauauugucau

SEQ ID NO: 1904414 - RNA, 19 nt, Artificial Sequence
  Description of Artificial Sequence: Synthetic oligonucleotide
  Sense strand starting at position 933 of SEQ ID NO: 1879402
guccaucugcucuacugau

SEQ ID NO: 1904415 - RNA, 19 nt, Artificial Sequence
  Description of Artificial Sequence: Synthetic oligonucleotide
  Antisense strand to SEQ ID NO: 1904414
aucaguagagcagauggac

SEQ ID NO: 1904416 - RNA, 19 nt, Artificial Sequence
  Description of Artificial Sequence: Synthetic oligonucleotide
  Sense strand starting at position 1281 of SEQ ID NO: 1879402
aggguagaggcuugauuga

SEQ ID NO: 1904417 - RNA, 19 nt, Artificial Sequence
  Description of Artificial Sequence: Synthetic oligonucleotide
  Antisense strand to SEQ ID NO: 1904416
ucaaucaagccucuacccu

SEQ ID NO: 1904418 - RNA, 19 nt, Artificial Sequence
  Description of Artificial Sequence: Synthetic oligonucleotide
  Sense strand starting at position 1382 of SEQ ID NO: 1879402
gucugacacuaccuggaaa

SEQ ID NO: 1904419 - RNA, 19 nt, Artificial Sequence
  Description of Artificial Sequence: Synthetic oligonucleotide
  Antisense strand to SEQ ID NO: 1904418
uuuccagguagugucagac

SEQ ID NO: 1904420 - RNA, 19 nt, Artificial Sequence
  Description of Artificial Sequence: Synthetic oligonucleotide
  Sense strand starting at position 1442 of SEQ ID NO: 1879402
ugcgaagucaggcaaugau

SEQ ID NO: 1904421 - RNA, 19 nt, Artificial Sequence
  Description of Artificial Sequence: Synthetic oligonucleotide
  Antisense strand to SEQ ID NO: 1904420
aucauugccugacuucgca

SEQ ID NO: 1904422 - RNA, 19 nt, Artificial Sequence
  Description of Artificial Sequence: Synthetic oligonucleotide
  Sense strand starting at position 1445 of SEQ ID NO: 1879402
gaagucaggcaaugauugu

SEQ ID NO: 1904423 - RNA, 19 nt, Artificial Sequence
  Description of Artificial Sequence: Synthetic oligonucleotide
  Antisense strand to SEQ ID NO: 1904422
acaaucauugccugacuuc

SEQ ID NO: 1904424 - RNA, 19 nt, Artificial Sequence
  Description of Artificial Sequence: Synthetic oligonucleotide
  Sense strand starting at position 1449 of SEQ ID NO: 1879402
ucaggcaaugauuguccua

SEQ ID NO: 1904425 - RNA, 19 nt, Artificial Sequence
  Description of Artificial Sequence: Synthetic oligonucleotide
  Antisense strand to SEQ ID NO: 1904424
uaggacaaucauugccuga

SEQ ID NO: 1904426 - RNA, 19 nt, Artificial Sequence
  Description of Artificial Sequence: Synthetic oligonucleotide
  Sense strand starting at position 1451 of SEQ ID NO: 1879402
aggcaaugauuguccuaag

SEQ ID NO: 1904427 - RNA, 19 nt, Artificial Sequence
  Description of Artificial Sequence: Synthetic oligonucleotide
  Antisense strand to SEQ ID NO: 1904426
cuuaggacaaucauugccu

SEQ ID NO: 1904428 - RNA, 19 nt, Artificial Sequence
  Description of Artificial Sequence: Synthetic oligonucleotide
  Sense strand starting at position 1603 of SEQ ID NO: 1879402
uucccuccuccguagauua

SEQ ID NO: 1904429 - RNA, 19 nt, Artificial Sequence
  Description of Artificial Sequence: Synthetic oligonucleotide
  Antisense strand to SEQ ID NO: 1904428
uaaucuacggaggagggaa

SEQ ID NO: 1904430 - RNA, 19 nt, Artificial Sequence
  Description of Artificial Sequence: Synthetic oligonucleotide
  Sense strand starting at position 1666 of SEQ ID NO: 1879402
gcugcuuaccuguuugcua

SEQ ID NO: 1904431 - RNA, 19 nt, Artificial Sequence
  Description of Artificial Sequence: Synthetic oligonucleotide
  Antisense strand to SEQ ID NO: 1904430
uagcaaacagguaagcagc

SEQ ID NO: 1904432 - RNA, 19 nt, Artificial Sequence
  Description of Artificial Sequence: Synthetic oligonucleotide
  Sense strand starting at position 2660 of SEQ ID NO: 1879402
ucuggaagguuucugcaga

SEQ ID NO: 1904433 - RNA, 19 nt, Artificial Sequence
  Description of Artificial Sequence: Synthetic oligonucleotide
  Antisense strand to SEQ ID NO: 1904432
ucugcagaaaccuuccaga

SEQ ID NO: 1904434 - RNA, 19 nt, Artificial Sequence
  Description of Artificial Sequence: Synthetic oligonucleotide
  Sense strand starting at position 2784 of SEQ ID NO: 1879402
gggugcuugguaggaaaga

SEQ ID NO: 1904435 - RNA, 19 nt, Artificial Sequence
  Description of Artificial Sequence: Synthetic oligonucleotide
  Antisense strand to SEQ ID NO: 1904434
ucuuuccuaccaagcaccc

SEQ ID NO: 1904436 - RNA, 19 nt, Artificial Sequence
  Description of Artificial Sequence: Synthetic oligonucleotide
  Sense strand starting at position 2812 of SEQ ID NO: 1879402
gugugugcacgucuggaaa

SEQ ID NO: 1904437 - RNA, 19 nt, Artificial Sequence
  Description of Artificial Sequence: Synthetic oligonucleotide
  Antisense strand to SEQ ID NO: 1904436
uuuccagacgugcacacac

SEQ ID NO: 1904438 - RNA, 19 nt, Artificial Sequence
  Description of Artificial Sequence: Synthetic oligonucleotide
  Sense strand starting at position 2815 of SEQ ID NO: 1879402
ugugcacgucuggaaauaa

SEQ ID NO: 1904439 - RNA, 19 nt, Artificial Sequence
  Description of Artificial Sequence: Synthetic oligonucleotide
  Antisense strand to SEQ ID NO: 1904438
uuauuuccagacgugcaca

SEQ ID NO: 1904440 - RNA, 19 nt, Artificial Sequence
  Description of Artificial Sequence: Synthetic oligonucleotide
  Sense strand starting at position 2825 of SEQ ID NO: 1879402
uggaaauaacucuguccca

SEQ ID NO: 1904441 - RNA, 19 nt, Artificial Sequence
  Description of Artificial Sequence: Synthetic oligonucleotide
  Antisense strand to SEQ ID NO: 1904440
ugggacagaguuauuucca

SEQ ID NO: 1904442 - RNA, 19 nt, Artificial Sequence
  Description of Artificial Sequence: Synthetic oligonucleotide
  Sense strand starting at position 2826 of SEQ ID NO: 1879402
ggaaauaacucugucccaa

SEQ ID NO: 1904443 - RNA, 19 nt, Artificial Sequence
  Description of Artificial Sequence: Synthetic oligonucleotide
  Antisense strand to SEQ ID NO: 1904442
uugggacagaguuauuucc

SEQ ID NO: 1904444 - RNA, 19 nt, Artificial Sequence
  Description of Artificial Sequence: Synthetic oligonucleotide
  Sense strand starting at position 2882 of SEQ ID NO: 1879402
gccguuaacccacaauaaa

SEQ ID NO: 1904445 - RNA, 19 nt, Artificial Sequence
  Description of Artificial Sequence: Synthetic oligonucleotide
  Antisense strand to SEQ ID NO: 1904444
uuuauuguggguuaacggc

SEQ ID NO: 1904446 - RNA, 19 nt, Artificial Sequence
  Description of Artificial Sequence: Synthetic oligonucleotide
  Sense strand starting at position 2904 of SEQ ID NO: 1879402
caguuuguacucgggagaa

SEQ ID NO: 1904447 - RNA, 19 nt, Artificial Sequence
  Description of Artificial Sequence: Synthetic oligonucleotide
  Antisense strand to SEQ ID NO: 1904446
uucucccgaguacaaacug

SEQ ID NO: 1904448 - RNA, 19 nt, Artificial Sequence
  Description of Artificial Sequence: Synthetic oligonucleotide
  Sense strand starting at position 2906 of SEQ ID NO: 1879402
guuuguacucgggagaauu

SEQ ID NO: 1904449 - RNA, 19 nt, Artificial Sequence
  Description of Artificial Sequence: Synthetic oligonucleotide
  Antisense strand to SEQ ID NO: 1904448
aauucucccgaguacaaac

SEQ ID NO: 1904450 - RNA, 19 nt, Artificial Sequence
  Description of Artificial Sequence: Synthetic oligonucleotide
  Sense strand starting at position 2917 of SEQ ID NO: 1879402
ggagaauucuuguccuaga

SEQ ID NO: 1904451 - RNA, 19 nt, Artificial Sequence
  Description of Artificial Sequence: Synthetic oligonucleotide
  Antisense strand to SEQ ID NO: 1904450
ucuaggacaagaauucucc

SEQ ID NO: 1904452 - RNA, 19 nt, Artificial Sequence
  Description of Artificial Sequence: Synthetic oligonucleotide
  Sense strand starting at position 3018 of SEQ ID NO: 1879402
ugugauugcuauuuaguaa

SEQ ID NO: 1904453 - RNA, 19 nt, Artificial Sequence
  Description of Artificial Sequence: Synthetic oligonucleotide
  Antisense strand to SEQ ID NO: 1904452
uuacuaaauagcaaucaca

SEQ ID NO: 1904454 - RNA, 19 nt, Artificial Sequence
  Description of Artificial Sequence: Synthetic oligonucleotide
  Sense strand starting at position 3281 of SEQ ID NO: 1879402
cucuaauuucgagguaugu

SEQ ID NO: 1904455 - RNA, 19 nt, Artificial Sequence
  Description of Artificial Sequence: Synthetic oligonucleotide
  Antisense strand to SEQ ID NO: 1904454
acauaccucgaaauuagag

SEQ ID NO: 1904456 - RNA, 19 nt, Artificial Sequence
  Description of Artificial Sequence: Synthetic oligonucleotide
  Sense strand starting at position 3287 of SEQ ID NO: 1879402
uuucgagguauguaugauu

SEQ ID NO: 1904457 - RNA, 19 nt, Artificial Sequence
  Description of Artificial Sequence: Synthetic oligonucleotide
  Antisense strand to SEQ ID NO: 1904456
aaucauacauaccucgaaa

SEQ ID NO: 1904458 - RNA, 19 nt, Artificial Sequence
  Description of Artificial Sequence: Synthetic oligonucleotide
  Sense strand starting at position 3309 of SEQ ID NO: 1879402
gguaaacuccaucaggcua

SEQ ID NO: 1904459 - RNA, 19 nt, Artificial Sequence
  Description of Artificial Sequence: Synthetic oligonucleotide
  Antisense strand to SEQ ID NO: 1904458
uagccugauggaguuuacc

SEQ ID NO: 1904460 - RNA, 19 nt, Artificial Sequence
  Description of Artificial Sequence: Synthetic oligonucleotide
  Sense strand starting at position 3341 of SEQ ID NO: 1879402
cugagagagucuguuggaa

SEQ ID NO: 1904461 - RNA, 19 nt, Artificial Sequence
  Description of Artificial Sequence: Synthetic oligonucleotide
  Antisense strand to SEQ ID NO: 1904460
uuccaacagacucucucag

SEQ ID NO: 1904462 - RNA, 19 nt, Artificial Sequence
  Description of Artificial Sequence: Synthetic oligonucleotide
  Sense strand starting at position 3462 of SEQ ID NO: 1879402
caggauaaggcaugcuauu

SEQ ID NO: 1904463 - RNA, 19 nt, Artificial Sequence
  Description of Artificial Sequence: Synthetic oligonucleotide
  Antisense strand to SEQ ID NO: 1904462
aauagcaugccuuauccug

SEQ ID NO: 1904464 - RNA, 19 nt, Artificial Sequence
  Description of Artificial Sequence: Synthetic oligonucleotide
  Sense strand starting at position 3474 of SEQ ID NO: 1879402
ugcuauuugcugcauggua

SEQ ID NO: 1904465 - RNA, 19 nt, Artificial Sequence
  Description of Artificial Sequence: Synthetic oligonucleotide
  Antisense strand to SEQ ID NO: 1904464
uaccaugcagcaaauagca

SEQ ID NO: 1904466 - RNA, 19 nt, Artificial Sequence
  Description of Artificial Sequence: Synthetic oligonucleotide
  Sense strand starting at position 3476 of SEQ ID NO: 1879402
cuauuugcugcaugguaaa

SEQ ID NO: 1904467 - RNA, 19 nt, Artificial Sequence
  Description of Artificial Sequence: Synthetic oligonucleotide
  Antisense strand to SEQ ID NO: 1904466
uuuaccaugcagcaaauag

SEQ ID NO: 1904468 - RNA, 19 nt, Artificial Sequence
  Description of Artificial Sequence: Synthetic oligonucleotide
  Sense strand starting at position 3502 of SEQ ID NO: 1879402
uuuauagagcaggguaaua

SEQ ID NO: 1904469 - RNA, 19 nt, Artificial Sequence
  Description of Artificial Sequence: Synthetic oligonucleotide
  Antisense strand to SEQ ID NO: 1904468
uauuacccugcucuauaaa

SEQ ID NO: 1904470 - RNA, 19 nt, Artificial Sequence
  Description of Artificial Sequence: Synthetic oligonucleotide
  Sense strand starting at position 3531 of SEQ ID NO: 1879402
aguaauuaccuuuguugaa

SEQ ID NO: 1904471 - RNA, 19 nt, Artificial Sequence
  Description of Artificial Sequence: Synthetic oligonucleotide
  Antisense strand to SEQ ID NO: 1904470
uucaacaaagguaauuacu

SEQ ID NO: 1904472 - RNA, 19 nt, Artificial Sequence
  Description of Artificial Sequence: Synthetic oligonucleotide
  Sense strand starting at position 3532 of SEQ ID NO: 1879402
guaauuaccuuuguugaaa

SEQ ID NO: 1904473 - RNA, 19 nt, Artificial Sequence
  Description of Artificial Sequence: Synthetic oligonucleotide
  Antisense strand to SEQ ID NO: 1904472
uuucaacaaagguaauuac

SEQ ID NO: 1904474 - RNA, 19 nt, Artificial Sequence
  Description of Artificial Sequence: Synthetic oligonucleotide
  Sense strand starting at position 3661 of SEQ ID NO: 1879402
guggaagguuaggucugaa

SEQ ID NO: 1904475 - RNA, 19 nt, Artificial Sequence
  Description of Artificial Sequence: Synthetic oligonucleotide
  Antisense strand to SEQ ID NO: 1904474
uucagaccuaaccuuccac

SEQ ID NO: 1904476 - RNA, 19 nt, Artificial Sequence
  Description of Artificial Sequence: Synthetic oligonucleotide
  Sense strand starting at position 3664 of SEQ ID NO: 1879402
gaagguuaggucugaaaca

SEQ ID NO: 1904477 - RNA, 19 nt, Artificial Sequence
  Description of Artificial Sequence: Synthetic oligonucleotide
  Antisense strand to SEQ ID NO: 1904476
uguuucagaccuaaccuuc

SEQ ID NO: 1904478 - RNA, 19 nt, Artificial Sequence
  Description of Artificial Sequence: Synthetic oligonucleotide
  Sense strand starting at position 3965 of SEQ ID NO: 1879402
cuuuguagaugaccuauca

SEQ ID NO: 1904479 - RNA, 19 nt, Artificial Sequence
  Description of Artificial Sequence: Synthetic oligonucleotide
  Antisense strand to SEQ ID NO: 1904478
ugauaggucaucuacaaag

SEQ ID NO: 1904480 - RNA, 19 nt, Artificial Sequence
  Description of Artificial Sequence: Synthetic oligonucleotide
  Sense strand starting at position 3977 of SEQ ID NO: 1879402
ccuaucacagccugaagaa

SEQ ID NO: 1904481 - RNA, 19 nt, Artificial Sequence
  Description of Artificial Sequence: Synthetic oligonucleotide
  Antisense strand to SEQ ID NO: 1904480
uucuucaggcugugauagg

SEQ ID NO: 1904482 - RNA, 19 nt, Artificial Sequence
  Description of Artificial Sequence: Synthetic oligonucleotide
  Sense strand starting at position 696 of SEQ ID NO: 1879403
ucacuauacucugugacuu

SEQ ID NO: 1904483 - RNA, 19 nt, Artificial Sequence
  Description of Artificial Sequence: Synthetic oligonucleotide
  Antisense strand to SEQ ID NO: 1904482
aagucacagaguauaguga

SEQ ID NO: 1904484 - RNA, 19 nt, Artificial Sequence
  Description of Artificial Sequence: Synthetic oligonucleotide
  Sense strand starting at position 954 of SEQ ID NO: 1879403
gugacaugauuugagguca

SEQ ID NO: 1904485 - RNA, 19 nt, Artificial Sequence
  Description of Artificial Sequence: Synthetic oligonucleotide
  Antisense strand to SEQ ID NO: 1904484
ugaccucaaaucaugucac

SEQ ID NO: 1904486 - RNA, 19 nt, Artificial Sequence
  Description of Artificial Sequence: Synthetic oligonucleotide
  Sense strand starting at position 1050 of SEQ ID NO: 1879403
ggaaauaaucauugguagc

SEQ ID NO: 1904487 - RNA, 19 nt, Artificial Sequence
  Description of Artificial Sequence: Synthetic oligonucleotide
  Antisense strand to SEQ ID NO: 1904486
gcuaccaaugauuauuucc

SEQ ID NO: 1904488 - RNA, 19 nt, Artificial Sequence
  Description of Artificial Sequence: Synthetic oligonucleotide
  Sense strand starting at position 1100 of SEQ ID NO: 1879403
augaguuauuaacuuacag

SEQ ID NO: 1904489 - RNA, 19 nt, Artificial Sequence
  Description of Artificial Sequence: Synthetic oligonucleotide
  Antisense strand to SEQ ID NO: 1904488
cuguaaguuaauaacucau

SEQ ID NO: 1904490 - RNA, 19 nt, Artificial Sequence
  Description of Artificial Sequence: Synthetic oligonucleotide
  Sense strand starting at position 1218 of SEQ ID NO: 1879403
cccaguaagucaccaauua

SEQ ID NO: 1904491 - RNA, 19 nt, Artificial Sequence
  Description of Artificial Sequence: Synthetic oligonucleotide
  Antisense strand to SEQ ID NO: 1904490
uaauuggugacuuacuggg

SEQ ID NO: 1904492 - RNA, 19 nt, Artificial Sequence
  Description of Artificial Sequence: Synthetic oligonucleotide
  Sense strand starting at position 1385 of SEQ ID NO: 1879403
uagagagugguauguauua

SEQ ID NO: 1904493 - RNA, 19 nt, Artificial Sequence
  Description of Artificial Sequence: Synthetic oligonucleotide
  Antisense strand to SEQ ID NO: 1904492
uaauacauaccacucucua

SEQ ID NO: 1904494 - RNA, 19 nt, Artificial Sequence
  Description of Artificial Sequence: Synthetic oligonucleotide
  Sense strand starting at position 1387 of SEQ ID NO: 1879403
gagagugguauguauuaca

SEQ ID NO: 1904495 - RNA, 19 nt, Artificial Sequence
  Description of Artificial Sequence: Synthetic oligonucleotide
  Antisense strand to SEQ ID NO: 1904494
uguaauacauaccacucuc

SEQ ID NO: 1904496 - RNA, 19 nt, Artificial Sequence
  Description of Artificial Sequence: Synthetic oligonucleotide
  Sense strand starting at position 1426 of SEQ ID NO: 1879403
uaaauuaugggaugucauc

SEQ ID NO: 1904497 - RNA, 19 nt, Artificial Sequence
  Description of Artificial Sequence: Synthetic oligonucleotide
  Antisense strand to SEQ ID NO: 1904496
gaugacaucccauaauuua

SEQ ID NO: 1904498 - RNA, 19 nt, Artificial Sequence
  Description of Artificial Sequence: Synthetic oligonucleotide
  Sense strand starting at position 2079 of SEQ ID NO: 1879403
acggauuauccggagccaa

SEQ ID NO: 1904499 - RNA, 19 nt, Artificial Sequence
  Description of Artificial Sequence: Synthetic oligonucleotide
  Antisense strand to SEQ ID NO: 1904498
uuggcuccggauaauccgu

SEQ ID NO: 1904500 - RNA, 19 nt, Artificial Sequence
  Description of Artificial Sequence: Synthetic oligonucleotide
  Sense strand starting at position 2282 of SEQ ID NO: 1879403
gccagaucugcgucugugu

SEQ ID NO: 1904501 - RNA, 19 nt, Artificial Sequence
  Description of Artificial Sequence: Synthetic oligonucleotide
  Antisense strand to SEQ ID NO: 1904500
acacagacgcagaucuggc

SEQ ID NO: 1904502 - RNA, 19 nt, Artificial Sequence
  Description of Artificial Sequence: Synthetic oligonucleotide
  Sense strand starting at position 2474 of SEQ ID NO: 1879403
gccaguccucccugagaug

SEQ ID NO: 1904503 - RNA, 19 nt, Artificial Sequence
  Description of Artificial Sequence: Synthetic oligonucleotide
  Antisense strand to SEQ ID NO: 1904502
caucucagggaggacuggc

SEQ ID NO: 1904504 - RNA, 19 nt, Artificial Sequence
  Description of Artificial Sequence: Synthetic oligonucleotide
  Sense strand starting at position 2807 of SEQ ID NO: 1879403
gagggaaguuuagauggga

SEQ ID NO: 1904505 - RNA, 19 nt, Artificial Sequence
  Description of Artificial Sequence: Synthetic oligonucleotide
  Antisense strand to SEQ ID NO: 1904504
ucccaucuaaacuucccuc

SEQ ID NO: 1904506 - RNA, 19 nt, Artificial Sequence
  Description of Artificial Sequence: Synthetic oligonucleotide
  Sense strand starting at position 2810 of SEQ ID NO: 1879403
ggaaguuuagaugggaagu

SEQ ID NO: 1904507 - RNA, 19 nt, Artificial Sequence
  Description of Artificial Sequence: Synthetic oligonucleotide
  Antisense strand to SEQ ID NO: 1904506
acuucccaucuaaacuucc

SEQ ID NO: 1904508 - RNA, 19 nt, Artificial Sequence
  Description of Artificial Sequence: Synthetic oligonucleotide
  Sense strand starting at position 2811 of SEQ ID NO: 1879403
gaaguuuagaugggaagug

SEQ ID NO: 1904509 - RNA, 19 nt, Artificial Sequence
  Description of Artificial Sequence: Synthetic oligonucleotide
  Antisense strand to SEQ ID NO: 1904508
cacuucccaucuaaacuuc

SEQ ID NO: 1904510 - RNA, 19 nt, Artificial Sequence
  Description of Artificial Sequence: Synthetic oligonucleotide
  Sense strand starting at position 2826 of SEQ ID NO: 1879403
aguggaugggucugaggaa

SEQ ID NO: 1904511 - RNA, 19 nt, Artificial Sequence
  Description of Artificial Sequence: Synthetic oligonucleotide
  Antisense strand to SEQ ID NO: 1904510
uuccucagacccauccacu

SEQ ID NO: 1904512 - RNA, 19 nt, Artificial Sequence
  Description of Artificial Sequence: Synthetic oligonucleotide
  Sense strand starting at position 2867 of SEQ ID NO: 1879403
aggagagugaccugagcaa

SEQ ID NO: 1904513 - RNA, 19 nt, Artificial Sequence
  Description of Artificial Sequence: Synthetic oligonucleotide
  Antisense strand to SEQ ID NO: 1904512
uugcucaggucacucuccu

SEQ ID NO: 1904514 - RNA, 19 nt, Artificial Sequence
  Description of Artificial Sequence: Synthetic oligonucleotide
  Sense strand starting at position 3000 of SEQ ID NO: 1879403
ucccaaauuccuuaguggu

SEQ ID NO: 1904515 - RNA, 19 nt, Artificial Sequence
  Description of Artificial Sequence: Synthetic oligonucleotide
  Antisense strand to SEQ ID NO: 1904514
accacuaaggaauuuggga

SEQ ID NO: 1904516 - RNA, 19 nt, Artificial Sequence
  Description of Artificial Sequence: Synthetic oligonucleotide
  Sense strand starting at position 3002 of SEQ ID NO: 1879403
ccaaauuccuuagugguuu

SEQ ID NO: 1904517 - RNA, 19 nt, Artificial Sequence
  Description of Artificial Sequence: Synthetic oligonucleotide
  Antisense strand to SEQ ID NO: 1904516
aaaccacuaaggaauuugg

SEQ ID NO: 1904518 - RNA, 19 nt, Artificial Sequence
  Description of Artificial Sequence: Synthetic oligonucleotide
  Sense strand starting at position 3164 of SEQ ID NO: 1879403
uaaggauauugaugauuug

SEQ ID NO: 1904519 - RNA, 19 nt, Artificial Sequence
  Description of Artificial Sequence: Synthetic oligonucleotide
  Antisense strand to SEQ ID NO: 1904518
caaaucaucaauauccuua

SEQ ID NO: 1904520 - RNA, 19 nt, Artificial Sequence
  Description of Artificial Sequence: Synthetic oligonucleotide
  Sense strand starting at position 3170 of SEQ ID NO: 1879403
uauugaugauuugaguuag

SEQ ID NO: 1904521 - RNA, 19 nt, Artificial Sequence
  Description of Artificial Sequence: Synthetic oligonucleotide
  Antisense strand to SEQ ID NO: 1904520
cuaacucaaaucaucaaua

SEQ ID NO: 1904522 - RNA, 19 nt, Artificial Sequence
  Description of Artificial Sequence: Synthetic oligonucleotide
  Sense strand starting at position 3207 of SEQ ID NO: 1879403
ccucuauuccuuuguauga

SEQ ID NO: 1904523 - RNA, 19 nt, Artificial Sequence
  Description of Artificial Sequence: Synthetic oligonucleotide
  Antisense strand to SEQ ID NO: 1904522
ucauacaaaggaauagagg

SEQ ID NO: 1904524 - RNA, 19 nt, Artificial Sequence
  Description of Artificial Sequence: Synthetic oligonucleotide
  Sense strand starting at position 3208 of SEQ ID NO: 1879403
cucuauuccuuuguaugau

SEQ ID NO: 1904525 - RNA, 19 nt, Artificial Sequence
  Description of Artificial Sequence: Synthetic oligonucleotide
  Antisense strand to SEQ ID NO: 1904524
aucauacaaaggaauagag

SEQ ID NO: 1904526 - RNA, 19 nt, Artificial Sequence
  Description of Artificial Sequence: Synthetic oligonucleotide
  Sense strand starting at position 3218 of SEQ ID NO: 1879403
uuguaugaucucuguauuu

SEQ ID NO: 1904527 - RNA, 19 nt, Artificial Sequence
  Description of Artificial Sequence: Synthetic oligonucleotide
  Antisense strand to SEQ ID NO: 1904526
aaauacagagaucauacaa

SEQ ID NO: 1904528 - RNA, 19 nt, Artificial Sequence
  Description of Artificial Sequence: Synthetic oligonucleotide
  Sense strand starting at position 3231 of SEQ ID NO: 1879403
guauuuaauggcuguggca

SEQ ID NO: 1904529 - RNA, 19 nt, Artificial Sequence
  Description of Artificial Sequence: Synthetic oligonucleotide
  Antisense strand to SEQ ID NO: 1904528
ugccacagccauuaaauac

SEQ ID NO: 1904530 - RNA, 19 nt, Artificial Sequence
  Description of Artificial Sequence: Synthetic oligonucleotide
  Sense strand starting at position 3233 of SEQ ID NO: 1879403
auuuaauggcuguggcaua

SEQ ID NO: 1904531 - RNA, 19 nt, Artificial Sequence
  Description of Artificial Sequence: Synthetic oligonucleotide
  Antisense strand to SEQ ID NO: 1904530
uaugccacagccauuaaau

SEQ ID NO: 1904532 - RNA, 19 nt, Artificial Sequence
  Description of Artificial Sequence: Synthetic oligonucleotide
  Sense strand starting at position 3238 of SEQ ID NO: 1879403
auggcuguggcauaaaguu

SEQ ID NO: 1904533 - RNA, 19 nt, Artificial Sequence
  Description of Artificial Sequence: Synthetic oligonucleotide
  Antisense strand to SEQ ID NO: 1904532
aacuuuaugccacagccau

SEQ ID NO: 1904534 - RNA, 19 nt, Artificial Sequence
  Description of Artificial Sequence: Synthetic oligonucleotide
  Sense strand starting at position 3246 of SEQ ID NO: 1879403
ggcauaaaguuuccaacua

SEQ ID NO: 1904535 - RNA, 19 nt, Artificial Sequence
  Description of Artificial Sequence: Synthetic oligonucleotide
  Antisense strand to SEQ ID NO: 1904534
uaguuggaaacuuuaugcc

SEQ ID NO: 1904536 - RNA, 19 nt, Artificial Sequence
  Description of Artificial Sequence: Synthetic oligonucleotide
  Sense strand starting at position 3309 of SEQ ID NO: 1879403
gaaggaugaccuggauugu

SEQ ID NO: 1904537 - RNA, 19 nt, Artificial Sequence
  Description of Artificial Sequence: Synthetic oligonucleotide
  Antisense strand to SEQ ID NO: 1904536
acaauccaggucauccuuc

SEQ ID NO: 1904538 - RNA, 19 nt, Artificial Sequence
  Description of Artificial Sequence: Synthetic oligonucleotide
  Sense strand starting at position 3315 of SEQ ID NO: 1879403
ugaccuggauuguccuaga

SEQ ID NO: 1904539 - RNA, 19 nt, Artificial Sequence
  Description of Artificial Sequence: Synthetic oligonucleotide
  Antisense strand to SEQ ID NO: 1904538
ucuaggacaauccagguca

SEQ ID NO: 1904540 - RNA, 19 nt, Artificial Sequence
  Description of Artificial Sequence: Synthetic oligonucleotide
  Sense strand starting at position 3320 of SEQ ID NO: 1879403
uggauuguccuagaacuuu

SEQ ID NO: 1904541 - RNA, 19 nt, Artificial Sequence
  Description of Artificial Sequence: Synthetic oligonucleotide
  Antisense strand to SEQ ID NO: 1904540
aaaguucuaggacaaucca

SEQ ID NO: 1904542 - RNA, 19 nt, Artificial Sequence
  Description of Artificial Sequence: Synthetic oligonucleotide
  Sense strand starting at position 3326 of SEQ ID NO: 1879403
guccuagaacuuuguucca

SEQ ID NO: 1904543 - RNA, 19 nt, Artificial Sequence
  Description of Artificial Sequence: Synthetic oligonucleotide
  Antisense strand to SEQ ID NO: 1904542
uggaacaaaguucuaggac

SEQ ID NO: 1904544 - RNA, 19 nt, Artificial Sequence
  Description of Artificial Sequence: Synthetic oligonucleotide
  Sense strand starting at position 3366 of SEQ ID NO: 1879403
cgaauaaauugcucaaaga

SEQ ID NO: 1904545 - RNA, 19 nt, Artificial Sequence
  Description of Artificial Sequence: Synthetic oligonucleotide
  Antisense strand to SEQ ID NO: 1904544
ucuuugagcaauuuauucg

SEQ ID NO: 1904546 - RNA, 19 nt, Artificial Sequence
  Description of Artificial Sequence: Synthetic oligonucleotide
  Sense strand starting at position 3517 of SEQ ID NO: 1879403
aagacaaaucgcuguuacu

SEQ ID NO: 1904547 - RNA, 19 nt, Artificial Sequence
  Description of Artificial Sequence: Synthetic oligonucleotide
  Antisense strand to SEQ ID NO: 1904546
aguaacagcgauuugucuu

SEQ ID NO: 1904548 - RNA, 19 nt, Artificial Sequence
  Description of Artificial Sequence: Synthetic oligonucleotide
  Sense strand starting at position 3524 of SEQ ID NO: 1879403
aucgcuguuacuuaagagu

SEQ ID NO: 1904549 - RNA, 19 nt, Artificial Sequence
  Description of Artificial Sequence: Synthetic oligonucleotide
  Antisense strand to SEQ ID NO: 1904548
acucuuaaguaacagcgau

SEQ ID NO: 1904550 - RNA, 19 nt, Artificial Sequence
  Description of Artificial Sequence: Synthetic oligonucleotide
  Sense strand starting at position 3530 of SEQ ID NO: 1879403
guuacuuaagagugugaca

SEQ ID NO: 1904551 - RNA, 19 nt, Artificial Sequence
  Description of Artificial Sequence: Synthetic oligonucleotide
  Antisense strand to SEQ ID NO: 1904550
ugucacacucuuaaguaac

SEQ ID NO: 1904552 - RNA, 19 nt, Artificial Sequence
  Description of Artificial Sequence: Synthetic oligonucleotide
  Sense strand starting at position 3532 of SEQ ID NO: 1879403
uacuuaagagugugacaua

SEQ ID NO: 1904553 - RNA, 19 nt, Artificial Sequence
  Description of Artificial Sequence: Synthetic oligonucleotide
  Antisense strand to SEQ ID NO: 1904552
uaugucacacucuuaagua

SEQ ID NO: 1904554 - RNA, 19 nt, Artificial Sequence
  Description of Artificial Sequence: Synthetic oligonucleotide
  Sense strand starting at position 3539 of SEQ ID NO: 1879403
gagugugacauaugaucug

SEQ ID NO: 1904555 - RNA, 19 nt, Artificial Sequence
  Description of Artificial Sequence: Synthetic oligonucleotide
  Antisense strand to SEQ ID NO: 1904554
cagaucauaugucacacuc

SEQ ID NO: 1904556 - RNA, 19 nt, Artificial Sequence
  Description of Artificial Sequence: Synthetic oligonucleotide
  Sense strand starting at position 3593 of SEQ ID NO: 1879403
gccgcuaucguaucaaggu

SEQ ID NO: 1904557 - RNA, 19 nt, Artificial Sequence
  Description of Artificial Sequence: Synthetic oligonucleotide
  Antisense strand to SEQ ID NO: 1904556
accuugauacgauagcggc

SEQ ID NO: 1904558 - RNA, 19 nt, Artificial Sequence
  Description of Artificial Sequence: Synthetic oligonucleotide
  Sense strand starting at position 3776 of SEQ ID NO: 1879403
guguugguucugggaagga

SEQ ID NO: 1904559 - RNA, 19 nt, Artificial Sequence
  Description of Artificial Sequence: Synthetic oligonucleotide
  Antisense strand to SEQ ID NO: 1904558
uccuucccagaaccaacac

SEQ ID NO: 1904560 - RNA, 19 nt, Artificial Sequence
  Description of Artificial Sequence: Synthetic oligonucleotide
  Sense strand starting at position 3963 of SEQ ID NO: 1879403
acagcugccauguaaggau

SEQ ID NO: 1904561 - RNA, 19 nt, Artificial Sequence
  Description of Artificial Sequence: Synthetic oligonucleotide
  Antisense strand to SEQ ID NO: 1904560
auccuuacauggcagcugu

SEQ ID NO: 1904562 - RNA, 19 nt, Artificial Sequence
  Description of Artificial Sequence: Synthetic oligonucleotide
  Sense strand starting at position 8 of SEQ ID NO: 1879404
gagaaacuguuagucaagu

SEQ ID NO: 1904563 - RNA, 19 nt, Artificial Sequence
  Description of Artificial Sequence: Synthetic oligonucleotide
  Antisense strand to SEQ ID NO: 1904562
acuugacuaacaguuucuc

SEQ ID NO: 1904564 - RNA, 19 nt, Artificial Sequence
  Description of Artificial Sequence: Synthetic oligonucleotide
  Sense strand starting at position 9 of SEQ ID NO: 1879404
agaaacuguuagucaagua

SEQ ID NO: 1904565 - RNA, 19 nt, Artificial Sequence
  Description of Artificial Sequence: Synthetic oligonucleotide
  Antisense strand to SEQ ID NO: 1904564
uacuugacuaacaguuucu

SEQ ID NO: 1904566 - RNA, 19 nt, Artificial Sequence
  Description of Artificial Sequence: Synthetic oligonucleotide
  Sense strand starting at position 96 of SEQ ID NO: 1879404
aagugugauccaggaaaca

SEQ ID NO: 1904567 - RNA, 19 nt, Artificial Sequence
  Description of Artificial Sequence: Synthetic oligonucleotide
  Antisense strand to SEQ ID NO: 1904566
uguuuccuggaucacacuu

SEQ ID NO: 1904568 - RNA, 19 nt, Artificial Sequence
  Description of Artificial Sequence: Synthetic oligonucleotide
  Sense strand starting at position 141 of SEQ ID NO: 1879404
aagaguguucgggauuaag

SEQ ID NO: 1904569 - RNA, 19 nt, Artificial Sequence
  Description of Artificial Sequence: Synthetic oligonucleotide
  Antisense strand to SEQ ID NO: 1904568
cuuaaucccgaacacucuu

SEQ ID NO: 1904570 - RNA, 19 nt, Artificial Sequence
  Description of Artificial Sequence: Synthetic oligonucleotide
  Sense strand starting at position 903 of SEQ ID NO: 1879404
ucacuauacucugugacuu

SEQ ID NO: 1904571 - RNA, 19 nt, Artificial Sequence
  Description of Artificial Sequence: Synthetic oligonucleotide
  Antisense strand to SEQ ID NO: 1904570
aagucacagaguauaguga

SEQ ID NO: 1904572 - RNA, 19 nt, Artificial Sequence
  Description of Artificial Sequence: Synthetic oligonucleotide
  Sense strand starting at position 1161 of SEQ ID NO: 1879404
gugacaugauuugagguca

SEQ ID NO: 1904573 - RNA, 19 nt, Artificial Sequence
  Description of Artificial Sequence: Synthetic oligonucleotide
  Antisense strand to SEQ ID NO: 1904572
ugaccucaaaucaugucac

SEQ ID NO: 1904574 - RNA, 19 nt, Artificial Sequence
  Description of Artificial Sequence: Synthetic oligonucleotide
  Sense strand starting at position 1257 of SEQ ID NO: 1879404
ggaaauaaucauugguagc

SEQ ID NO: 1904575 - RNA, 19 nt, Artificial Sequence
  Description of Artificial Sequence: Synthetic oligonucleotide
  Antisense strand to SEQ ID NO: 1904574
gcuaccaaugauuauuucc

SEQ ID NO: 1904576 - RNA, 19 nt, Artificial Sequence
  Description of Artificial Sequence: Synthetic oligonucleotide
  Sense strand starting at position 1307 of SEQ ID NO: 1879404
augaguuauuaacuuacag

SEQ ID NO: 1904577 - RNA, 19 nt, Artificial Sequence
  Description of Artificial Sequence: Synthetic oligonucleotide
  Antisense strand to SEQ ID NO: 1904576
cuguaaguuaauaacucau

SEQ ID NO: 1904578 - RNA, 19 nt, Artificial Sequence
  Description of Artificial Sequence: Synthetic oligonucleotide
  Sense strand starting at position 1425 of SEQ ID NO: 1879404
cccaguaagucaccaauua

SEQ ID NO: 1904579 - RNA, 19 nt, Artificial Sequence
  Description of Artificial Sequence: Synthetic oligonucleotide
  Antisense strand to SEQ ID NO: 1904578
uaauuggugacuuacuggg

SEQ ID NO: 1904580 - RNA, 19 nt, Artificial Sequence
  Description of Artificial Sequence: Synthetic oligonucleotide
  Sense strand starting at position 1592 of SEQ ID NO: 1879404
uagagagugguauguauua

SEQ ID NO: 1904581 - RNA, 19 nt, Artificial Sequence
  Description of Artificial Sequence: Synthetic oligonucleotide
  Antisense strand to SEQ ID NO: 1904580
uaauacauaccacucucua

SEQ ID NO: 1904582 - RNA, 19 nt, Artificial Sequence
  Description of Artificial Sequence: Synthetic oligonucleotide
  Sense strand starting at position 1594 of SEQ ID NO: 1879404
gagagugguauguauuaca

SEQ ID NO: 1904583 - RNA, 19 nt, Artificial Sequence
  Description of Artificial Sequence: Synthetic oligonucleotide
  Antisense strand to SEQ ID NO: 1904582
uguaauacauaccacucuc

SEQ ID NO: 1904584 - RNA, 19 nt, Artificial Sequence
  Description of Artificial Sequence: Synthetic oligonucleotide
  Sense strand starting at position 1633 of SEQ ID NO: 1879404
uaaauuaugggaugucauc

SEQ ID NO: 1904585 - RNA, 19 nt, Artificial Sequence
  Description of Artificial Sequence: Synthetic oligonucleotide
  Antisense strand to SEQ ID NO: 1904584
gaugacaucccauaauuua

SEQ ID NO: 1904586 - RNA, 19 nt, Artificial Sequence
  Description of Artificial Sequence: Synthetic oligonucleotide
  Sense strand starting at position 2286 of SEQ ID NO: 1879404
acggauuauccggagccaa

SEQ ID NO: 1904587 - RNA, 19 nt, Artificial Sequence
  Description of Artificial Sequence: Synthetic oligonucleotide
  Antisense strand to SEQ ID NO: 1904586
uuggcuccggauaauccgu

SEQ ID NO: 1904588 - RNA, 19 nt, Artificial Sequence
  Description of Artificial Sequence: Synthetic oligonucleotide
  Sense strand starting at position 2489 of SEQ ID NO: 1879404
gccagaucugcgucugugu

SEQ ID NO: 1904589 - RNA, 19 nt, Artificial Sequence
  Description of Artificial Sequence: Synthetic oligonucleotide
  Antisense strand to SEQ ID NO: 1904588
acacagacgcagaucuggc

SEQ ID NO: 1904590 - RNA, 19 nt, Artificial Sequence
  Description of Artificial Sequence: Synthetic oligonucleotide
  Sense strand starting at position 3017 of SEQ ID NO: 1879404
ggaaguuuagaugggaagu

SEQ ID NO: 1904591 - RNA, 19 nt, Artificial Sequence
  Description of Artificial Sequence: Synthetic oligonucleotide
  Antisense strand to SEQ ID NO: 1904590
acuucccaucuaaacuucc

SEQ ID NO: 1904592 - RNA, 19 nt, Artificial Sequence
  Description of Artificial Sequence: Synthetic oligonucleotide
  Sense strand starting at position 3018 of SEQ ID NO: 1879404
gaaguuuagaugggaagug

SEQ ID NO: 1904593 - RNA, 19 nt, Artificial Sequence
  Description of Artificial Sequence: Synthetic oligonucleotide
  Antisense strand to SEQ ID NO: 1904592
cacuucccaucuaaacuuc

SEQ ID NO: 1904594 - RNA, 19 nt, Artificial Sequence
  Description of Artificial Sequence: Synthetic oligonucleotide
  Sense strand starting at position 3033 of SEQ ID NO: 1879404
aguggaugggucugaggaa

SEQ ID NO: 1904595 - RNA, 19 nt, Artificial Sequence
  Description of Artificial Sequence: Synthetic oligonucleotide
  Antisense strand to SEQ ID NO: 1904594
uuccucagacccauccacu

SEQ ID NO: 1904596 - RNA, 19 nt, Artificial Sequence
  Description of Artificial Sequence: Synthetic oligonucleotide
  Sense strand starting at position 3074 of SEQ ID NO: 1879404
aggagagugaccugagcaa

SEQ ID NO: 1904597 - RNA, 19 nt, Artificial Sequence
  Description of Artificial Sequence: Synthetic oligonucleotide
  Antisense strand to SEQ ID NO: 1904596
uugcucaggucacucuccu

SEQ ID NO: 1904598 - RNA, 19 nt, Artificial Sequence
  Description of Artificial Sequence: Synthetic oligonucleotide
  Sense strand starting at position 3207 of SEQ ID NO: 1879404
ucccaaauuccuuaguggu

SEQ ID NO: 1904599 - RNA, 19 nt, Artificial Sequence
  Description of Artificial Sequence: Synthetic oligonucleotide
  Antisense strand to SEQ ID NO: 1904598
accacuaaggaauuuggga

SEQ ID NO: 1904600 - RNA, 19 nt, Artificial Sequence
  Description of Artificial Sequence: Synthetic oligonucleotide
  Sense strand starting at position 3209 of SEQ ID NO: 1879404
ccaaauuccuuagugguuu

SEQ ID NO: 1904601 - RNA, 19 nt, Artificial Sequence
  Description of Artificial Sequence: Synthetic oligonucleotide
  Antisense strand to SEQ ID NO: 1904600
aaaccacuaaggaauuugg

SEQ ID NO: 1904602 - RNA, 19 nt, Artificial Sequence
  Description of Artificial Sequence: Synthetic oligonucleotide
  Sense strand starting at position 3371 of SEQ ID NO: 1879404
uaaggauauugaugauuug

SEQ ID NO: 1904603 - RNA, 19 nt, Artificial Sequence
  Description of Artificial Sequence: Synthetic oligonucleotide
  Antisense strand to SEQ ID NO: 1904602
caaaucaucaauauccuua

SEQ ID NO: 1904604 - RNA, 19 nt, Artificial Sequence
  Description of Artificial Sequence: Synthetic oligonucleotide
  Sense strand starting at position 3377 of SEQ ID NO: 1879404
uauugaugauuugaguuag

SEQ ID NO: 1904605 - RNA, 19 nt, Artificial Sequence
  Description of Artificial Sequence: Synthetic oligonucleotide
  Antisense strand to SEQ ID NO: 1904604
cuaacucaaaucaucaaua

SEQ ID NO: 1904606 - RNA, 19 nt, Artificial Sequence
  Description of Artificial Sequence: Synthetic oligonucleotide
  Sense strand starting at position 3414 of SEQ ID NO: 1879404
ccucuauuccuuuguauga

SEQ ID NO: 1904607 - RNA, 19 nt, Artificial Sequence
  Description of Artificial Sequence: Synthetic oligonucleotide
  Antisense strand to SEQ ID NO: 1904606
ucauacaaaggaauagagg

SEQ ID NO: 1904608 - RNA, 19 nt, Artificial Sequence
  Description of Artificial Sequence: Synthetic oligonucleotide
  Sense strand starting at position 3415 of SEQ ID NO: 1879404
cucuauuccuuuguaugau

SEQ ID NO: 1904609 - RNA, 19 nt, Artificial Sequence
  Description of Artificial Sequence: Synthetic oligonucleotide
  Antisense strand to SEQ ID NO: 1904608
aucauacaaaggaauagag

SEQ ID NO: 1904610 - RNA, 19 nt, Artificial Sequence
  Description of Artificial Sequence: Synthetic oligonucleotide
  Sense strand starting at position 3425 of SEQ ID NO: 1879404
uuguaugaucucuguauuu

SEQ ID NO: 1904611 - RNA, 19 nt, Artificial Sequence
  Description of Artificial Sequence: Synthetic oligonucleotide
  Antisense strand to SEQ ID NO: 1904610
aaauacagagaucauacaa

SEQ ID NO: 1904612 - RNA, 19 nt, Artificial Sequence
  Description of Artificial Sequence: Synthetic oligonucleotide
  Sense strand starting at position 3438 of SEQ ID NO: 1879404
guauuuaauggcuguggca

SEQ ID NO: 1904613 - RNA, 19 nt, Artificial Sequence
  Description of Artificial Sequence: Synthetic oligonucleotide
  Antisense strand to SEQ ID NO: 1904612
ugccacagccauuaaauac

SEQ ID NO: 1904614 - RNA, 19 nt, Artificial Sequence
  Description of Artificial Sequence: Synthetic oligonucleotide
  Sense strand starting at position 3440 of SEQ ID NO: 1879404
auuuaauggcuguggcaua

SEQ ID NO: 1904615 - RNA, 19 nt, Artificial Sequence
  Description of Artificial Sequence: Synthetic oligonucleotide
  Antisense strand to SEQ ID NO: 1904614
uaugccacagccauuaaau

SEQ ID NO: 1904616 - RNA, 19 nt, Artificial Sequence
  Description of Artificial Sequence: Synthetic oligonucleotide
  Sense strand starting at position 3445 of SEQ ID NO: 1879404
auggcuguggcauaaaguu

SEQ ID NO: 1904617 - RNA, 19 nt, Artificial Sequence
  Description of Artificial Sequence: Synthetic oligonucleotide
  Antisense strand to SEQ ID NO: 1904616
aacuuuaugccacagccau

SEQ ID NO: 1904618 - RNA, 19 nt, Artificial Sequence
  Description of Artificial Sequence: Synthetic oligonucleotide
  Sense strand starting at position 3453 of SEQ ID NO: 1879404
ggcauaaaguuuccaacua

SEQ ID NO: 1904619 - RNA, 19 nt, Artificial Sequence
  Description of Artificial Sequence: Synthetic oligonucleotide
  Antisense strand to SEQ ID NO: 1904618
uaguuggaaacuuuaugcc

SEQ ID NO: 1904620 - RNA, 19 nt, Artificial Sequence
  Description of Artificial Sequence: Synthetic oligonucleotide
  Sense strand starting at position 3516 of SEQ ID NO: 1879404
gaaggaugaccuggauugu

SEQ ID NO: 1904621 - RNA, 19 nt, Artificial Sequence
  Description of Artificial Sequence: Synthetic oligonucleotide
  Antisense strand to SEQ ID NO: 1904620
acaauccaggucauccuuc

SEQ ID NO: 1904622 - RNA, 19 nt, Artificial Sequence
  Description of Artificial Sequence: Synthetic oligonucleotide
  Sense strand starting at position 3522 of SEQ ID NO: 1879404
ugaccuggauuguccuaga

SEQ ID NO: 1904623 - RNA, 19 nt, Artificial Sequence
  Description of Artificial Sequence: Synthetic oligonucleotide
  Antisense strand to SEQ ID NO: 1904622
ucuaggacaauccagguca

SEQ ID NO: 1904624 - RNA, 19 nt, Artificial Sequence
  Description of Artificial Sequence: Synthetic oligonucleotide
  Sense strand starting at position 3527 of SEQ ID NO: 1879404
uggauuguccuagaacuuu

SEQ ID NO: 1904625 - RNA, 19 nt, Artificial Sequence
  Description of Artificial Sequence: Synthetic oligonucleotide
  Antisense strand to SEQ ID NO: 1904624
aaaguucuaggacaaucca

SEQ ID NO: 1904626 - RNA, 19 nt, Artificial Sequence
  Description of Artificial Sequence: Synthetic oligonucleotide
  Sense strand starting at position 3533 of SEQ ID NO: 1879404
guccuagaacuuuguucca

SEQ ID NO: 1904627 - RNA, 19 nt, Artificial Sequence
  Description of Artificial Sequence: Synthetic oligonucleotide
  Antisense strand to SEQ ID NO: 1904626
uggaacaaaguucuaggac

SEQ ID NO: 1904628 - RNA, 19 nt, Artificial Sequence
  Description of Artificial Sequence: Synthetic oligonucleotide
  Sense strand starting at position 3573 of SEQ ID NO: 1879404
cgaauaaauugcucaaaga

SEQ ID NO: 1904629 - RNA, 19 nt, Artificial Sequence
  Description of Artificial Sequence: Synthetic oligonucleotide
  Antisense strand to SEQ ID NO: 1904628
ucuuugagcaauuuauucg

SEQ ID NO: 1904630 - RNA, 19 nt, Artificial Sequence
  Description of Artificial Sequence: Synthetic oligonucleotide
  Sense strand starting at position 3724 of SEQ ID NO: 1879404
aagacaaaucgcuguuacu

SEQ ID NO: 1904631 - RNA, 19 nt, Artificial Sequence
  Description of Artificial Sequence: Synthetic oligonucleotide
  Antisense strand to SEQ ID NO: 1904630
aguaacagcgauuugucuu

SEQ ID NO: 1904632 - RNA, 19 nt, Artificial Sequence
  Description of Artificial Sequence: Synthetic oligonucleotide
  Sense strand starting at position 3737 of SEQ ID NO: 1879404
guuacuuaagagugugaca

SEQ ID NO: 1904633 - RNA, 19 nt, Artificial Sequence
  Description of Artificial Sequence: Synthetic oligonucleotide
  Antisense strand to SEQ ID NO: 1904632
ugucacacucuuaaguaac

SEQ ID NO: 1904634 - RNA, 19 nt, Artificial Sequence
  Description of Artificial Sequence: Synthetic oligonucleotide
  Sense strand starting at position 3739 of SEQ ID NO: 1879404
uacuuaagagugugacaua

SEQ ID NO: 1904635 - RNA, 19 nt, Artificial Sequence
  Description of Artificial Sequence: Synthetic oligonucleotide
  Antisense strand to SEQ ID NO: 1904634
uaugucacacucuuaagua

SEQ ID NO: 1904636 - RNA, 19 nt, Artificial Sequence
  Description of Artificial Sequence: Synthetic oligonucleotide
  Sense strand starting at position 3746 of SEQ ID NO: 1879404
gagugugacauaugaucug

SEQ ID NO: 1904637 - RNA, 19 nt, Artificial Sequence
  Description of Artificial Sequence: Synthetic oligonucleotide
  Antisense strand to SEQ ID NO: 1904636
cagaucauaugucacacuc

SEQ ID NO: 1904638 - RNA, 19 nt, Artificial Sequence
  Description of Artificial Sequence: Synthetic oligonucleotide
  Sense strand starting at position 3800 of SEQ ID NO: 1879404
gccgcuaucguaucaaggu

SEQ ID NO: 1904639 - RNA, 19 nt, Artificial Sequence
  Description of Artificial Sequence: Synthetic oligonucleotide
  Antisense strand to SEQ ID NO: 1904638
accuugauacgauagcggc

SEQ ID NO: 1904640 - RNA, 19 nt, Artificial Sequence
  Description of Artificial Sequence: Synthetic oligonucleotide
  Sense strand starting at position 3983 of SEQ ID NO: 1879404
guguugguucugggaagga

SEQ ID NO: 1904641 - RNA, 19 nt, Artificial Sequence
  Description of Artificial Sequence: Synthetic oligonucleotide
  Antisense strand to SEQ ID NO: 1904640
uccuucccagaaccaacac

SEQ ID NO: 1904642 - RNA, 19 nt, Artificial Sequence
  Description of Artificial Sequence: Synthetic oligonucleotide
  Sense strand starting at position 242 of SEQ ID NO: 1879405
ugcuuuaacuuagugcaua

SEQ ID NO: 1904643 - RNA, 19 nt, Artificial Sequence
  Description of Artificial Sequence: Synthetic oligonucleotide
  Antisense strand to SEQ ID NO: 1904642
uaugcacuaaguuaaagca

SEQ ID NO: 1904644 - RNA, 19 nt, Artificial Sequence
  Description of Artificial Sequence: Synthetic oligonucleotide
  Sense strand starting at position 295 of SEQ ID NO: 1879405
gcagccaaggccugugaua

SEQ ID NO: 1904645 - RNA, 19 nt, Artificial Sequence
  Description of Artificial Sequence: Synthetic oligonucleotide
  Antisense strand to SEQ ID NO: 1904644
uaucacaggccuuggcugc

SEQ ID NO: 1904646 - RNA, 19 nt, Artificial Sequence
  Description of Artificial Sequence: Synthetic oligonucleotide
  Sense strand starting at position 297 of SEQ ID NO: 1879405
agccaaggccugugauaac

SEQ ID NO: 1904647 - RNA, 19 nt, Artificial Sequence
  Description of Artificial Sequence: Synthetic oligonucleotide
  Antisense strand to SEQ ID NO: 1904646
guuaucacaggccuuggcu

SEQ ID NO: 1904648 - RNA, 19 nt, Artificial Sequence
  Description of Artificial Sequence: Synthetic oligonucleotide
  Sense strand starting at position 816 of SEQ ID NO: 1879405
acuuucuaagcaggugaaa

SEQ ID NO: 1904649 - RNA, 19 nt, Artificial Sequence
  Description of Artificial Sequence: Synthetic oligonucleotide
  Antisense strand to SEQ ID NO: 1904648
uuucaccugcuuagaaagu

SEQ ID NO: 1904650 - RNA, 19 nt, Artificial Sequence
  Description of Artificial Sequence: Synthetic oligonucleotide
  Sense strand starting at position 1136 of SEQ ID NO: 1879405
gcuuuauggaccugaguuu

SEQ ID NO: 1904651 - RNA, 19 nt, Artificial Sequence
  Description of Artificial Sequence: Synthetic oligonucleotide
  Antisense strand to SEQ ID NO: 1904650
aaacucagguccauaaagc

SEQ ID NO: 1904652 - RNA, 19 nt, Artificial Sequence
  Description of Artificial Sequence: Synthetic oligonucleotide
  Sense strand starting at position 1178 of SEQ ID NO: 1879405
acacguucccaguggaaau

SEQ ID NO: 1904653 - RNA, 19 nt, Artificial Sequence
  Description of Artificial Sequence: Synthetic oligonucleotide
  Antisense strand to SEQ ID NO: 1904652
auuuccacugggaacgugu

SEQ ID NO: 1904654 - RNA, 19 nt, Artificial Sequence
  Description of Artificial Sequence: Synthetic oligonucleotide
  Sense strand starting at position 1318 of SEQ ID NO: 1879405
ucuguuuauccuggaguca

SEQ ID NO: 1904655 - RNA, 19 nt, Artificial Sequence
  Description of Artificial Sequence: Synthetic oligonucleotide
  Antisense strand to SEQ ID NO: 1904654
ugacuccaggauaaacaga

SEQ ID NO: 1904656 - RNA, 19 nt, Artificial Sequence
  Description of Artificial Sequence: Synthetic oligonucleotide
  Sense strand starting at position 1319 of SEQ ID NO: 1879405
cuguuuauccuggagucac

SEQ ID NO: 1904657 - RNA, 19 nt, Artificial Sequence
  Description of Artificial Sequence: Synthetic oligonucleotide
  Antisense strand to SEQ ID NO: 1904656
gugacuccaggauaaacag

SEQ ID NO: 1904658 - RNA, 19 nt, Artificial Sequence
  Description of Artificial Sequence: Synthetic oligonucleotide
  Sense strand starting at position 1502 of SEQ ID NO: 1879405
ugguaacugcugcauguuu

SEQ ID NO: 1904659 - RNA, 19 nt, Artificial Sequence
  Description of Artificial Sequence: Synthetic oligonucleotide
  Antisense strand to SEQ ID NO: 1904658
aaacaugcagcaguuacca

SEQ ID NO: 1904660 - RNA, 19 nt, Artificial Sequence
  Description of Artificial Sequence: Synthetic oligonucleotide
  Sense strand starting at position 1513 of SEQ ID NO: 1879405
gcauguuuggcagagggaa

SEQ ID NO: 1904661 - RNA, 19 nt, Artificial Sequence
  Description of Artificial Sequence: Synthetic oligonucleotide
  Antisense strand to SEQ ID NO: 1904660
uucccucugccaaacaugc

SEQ ID NO: 1904662 - RNA, 19 nt, Artificial Sequence
  Description of Artificial Sequence: Synthetic oligonucleotide
  Sense strand starting at position 1590 of SEQ ID NO: 1879405
ggccguccaggguaaucau

SEQ ID NO: 1904663 - RNA, 19 nt, Artificial Sequence
  Description of Artificial Sequence: Synthetic oligonucleotide
  Antisense strand to SEQ ID NO: 1904662
augauuacccuggacggcc

SEQ ID NO: 1904664 - RNA, 19 nt, Artificial Sequence
  Description of Artificial Sequence: Synthetic oligonucleotide
  Sense strand starting at position 1704 of SEQ ID NO: 1879405
cuuauaugguuucccagaa

SEQ ID NO: 1904665 - RNA, 19 nt, Artificial Sequence
  Description of Artificial Sequence: Synthetic oligonucleotide
  Antisense strand to SEQ ID NO: 1904664
uucugggaaaccauauaag

SEQ ID NO: 1904666 - RNA, 19 nt, Artificial Sequence
  Description of Artificial Sequence: Synthetic oligonucleotide
  Sense strand starting at position 1705 of SEQ ID NO: 1879405
uuauaugguuucccagaac

SEQ ID NO: 1904667 - RNA, 19 nt, Artificial Sequence
  Description of Artificial Sequence: Synthetic oligonucleotide
  Antisense strand to SEQ ID NO: 1904666
guucugggaaaccauauaa

SEQ ID NO: 1904668 - RNA, 19 nt, Artificial Sequence
  Description of Artificial Sequence: Synthetic oligonucleotide
  Sense strand starting at position 2010 of SEQ ID NO: 1879405
aggucauucuucuugucca

SEQ ID NO: 1904669 - RNA, 19 nt, Artificial Sequence
  Description of Artificial Sequence: Synthetic oligonucleotide
  Antisense strand to SEQ ID NO: 1904668
uggacaagaagaaugaccu

SEQ ID NO: 1904670 - RNA, 19 nt, Artificial Sequence
  Description of Artificial Sequence: Synthetic oligonucleotide
  Sense strand starting at position 2023 of SEQ ID NO: 1879405
uguccagcuucucuguuaa

SEQ ID NO: 1904671 - RNA, 19 nt, Artificial Sequence
  Description of Artificial Sequence: Synthetic oligonucleotide
  Antisense strand to SEQ ID NO: 1904670
uuaacagagaagcuggaca

SEQ ID NO: 1904672 - RNA, 19 nt, Artificial Sequence
  Description of Artificial Sequence: Synthetic oligonucleotide
  Sense strand starting at position 2108 of SEQ ID NO: 1879405
acugaauuccugugagaua

SEQ ID NO: 1904673 - RNA, 19 nt, Artificial Sequence
  Description of Artificial Sequence: Synthetic oligonucleotide
  Antisense strand to SEQ ID NO: 1904672
uaucucacaggaauucagu

SEQ ID NO: 1904674 - RNA, 19 nt, Artificial Sequence
  Description of Artificial Sequence: Synthetic oligonucleotide
  Sense strand starting at position 2139 of SEQ ID NO: 1879405
uccuuaguaggcuguaauc

SEQ ID NO: 1904675 - RNA, 19 nt, Artificial Sequence
  Description of Artificial Sequence: Synthetic oligonucleotide
  Antisense strand to SEQ ID NO: 1904674
gauuacagccuacuaagga

SEQ ID NO: 1904676 - RNA, 19 nt, Artificial Sequence
  Description of Artificial Sequence: Synthetic oligonucleotide
  Sense strand starting at position 2204 of SEQ ID NO: 1879405
uuaugaagcuccgcugaga

SEQ ID NO: 1904677 - RNA, 19 nt, Artificial Sequence
  Description of Artificial Sequence: Synthetic oligonucleotide
  Antisense strand to SEQ ID NO: 1904676
ucucagcggagcuucauaa

SEQ ID NO: 1904678 - RNA, 19 nt, Artificial Sequence
  Description of Artificial Sequence: Synthetic oligonucleotide
  Sense strand starting at position 2207 of SEQ ID NO: 1879405
ugaagcuccgcugagaaau

SEQ ID NO: 1904679 - RNA, 19 nt, Artificial Sequence
  Description of Artificial Sequence: Synthetic oligonucleotide
  Antisense strand to SEQ ID NO: 1904678
auuucucagcggagcuuca

SEQ ID NO: 1904680 - RNA, 19 nt, Artificial Sequence
  Description of Artificial Sequence: Synthetic oligonucleotide
  Sense strand starting at position 2374 of SEQ ID NO: 1879405
acacguucuuguccaggga

SEQ ID NO: 1904681 - RNA, 19 nt, Artificial Sequence
  Description of Artificial Sequence: Synthetic oligonucleotide
  Antisense strand to SEQ ID NO: 1904680
ucccuggacaagaacgugu

SEQ ID NO: 1904682 - RNA, 19 nt, Artificial Sequence
  Description of Artificial Sequence: Synthetic oligonucleotide
  Sense strand starting at position 2375 of SEQ ID NO: 1879405
cacguucuuguccagggaa

SEQ ID NO: 1904683 - RNA, 19 nt, Artificial Sequence
  Description of Artificial Sequence: Synthetic oligonucleotide
  Antisense strand to SEQ ID NO: 1904682
uucccuggacaagaacgug

SEQ ID NO: 1904684 - RNA, 19 nt, Artificial Sequence
  Description of Artificial Sequence: Synthetic oligonucleotide
  Sense strand starting at position 2454 of SEQ ID NO: 1879405
aucaguacccagugucauu

SEQ ID NO: 1904685 - RNA, 19 nt, Artificial Sequence
  Description of Artificial Sequence: Synthetic oligonucleotide
  Antisense strand to SEQ ID NO: 1904684
aaugacacuggguacugau

SEQ ID NO: 1904686 - RNA, 19 nt, Artificial Sequence
  Description of Artificial Sequence: Synthetic oligonucleotide
  Sense strand starting at position 2511 of SEQ ID NO: 1879405
gcugaaagcugcuuccgaa

SEQ ID NO: 1904687 - RNA, 19 nt, Artificial Sequence
  Description of Artificial Sequence: Synthetic oligonucleotide
  Antisense strand to SEQ ID NO: 1904686
uucggaagcagcuuucagc

SEQ ID NO: 1904688 - RNA, 19 nt, Artificial Sequence
  Description of Artificial Sequence: Synthetic oligonucleotide
  Sense strand starting at position 2851 of SEQ ID NO: 1879405
acaggacuccuugggugaa

SEQ ID NO: 1904689 - RNA, 19 nt, Artificial Sequence
  Description of Artificial Sequence: Synthetic oligonucleotide
  Antisense strand to SEQ ID NO: 1904688
uucacccaaggaguccugu

SEQ ID NO: 1904690 - RNA, 19 nt, Artificial Sequence
  Description of Artificial Sequence: Synthetic oligonucleotide
  Sense strand starting at position 3026 of SEQ ID NO: 1879405
aauggaaucucagugcagu

SEQ ID NO: 1904691 - RNA, 19 nt, Artificial Sequence
  Description of Artificial Sequence: Synthetic oligonucleotide
  Antisense strand to SEQ ID NO: 1904690
acugcacugagauuccauu

SEQ ID NO: 1904692 - RNA, 19 nt, Artificial Sequence
  Description of Artificial Sequence: Synthetic oligonucleotide
  Sense strand starting at position 3027 of SEQ ID NO: 1879405
auggaaucucagugcaguu

SEQ ID NO: 1904693 - RNA, 19 nt, Artificial Sequence
  Description of Artificial Sequence: Synthetic oligonucleotide
  Antisense strand to SEQ ID NO: 1904692
aacugcacugagauuccau

SEQ ID NO: 1904694 - RNA, 19 nt, Artificial Sequence
  Description of Artificial Sequence: Synthetic oligonucleotide
  Sense strand starting at position 3039 of SEQ ID NO: 1879405
ugcaguuucgcuccuggau

SEQ ID NO: 1904695 - RNA, 19 nt, Artificial Sequence
  Description of Artificial Sequence: Synthetic oligonucleotide
  Antisense strand to SEQ ID NO: 1904694
auccaggagcgaaacugca

SEQ ID NO: 1904696 - RNA, 19 nt, Artificial Sequence
  Description of Artificial Sequence: Synthetic oligonucleotide
  Sense strand starting at position 3040 of SEQ ID NO: 1879405
gcaguuucgcuccuggauu

SEQ ID NO: 1904697 - RNA, 19 nt, Artificial Sequence
  Description of Artificial Sequence: Synthetic oligonucleotide
  Antisense strand to SEQ ID NO: 1904696
aauccaggagcgaaacugc

SEQ ID NO: 1904698 - RNA, 19 nt, Artificial Sequence
  Description of Artificial Sequence: Synthetic oligonucleotide
  Sense strand starting at position 3052 of SEQ ID NO: 1879405
cuggauuucuggugacucu

SEQ ID NO: 1904699 - RNA, 19 nt, Artificial Sequence
  Description of Artificial Sequence: Synthetic oligonucleotide
  Antisense strand to SEQ ID NO: 1904698
agagucaccagaaauccag

SEQ ID NO: 1904700 - RNA, 19 nt, Artificial Sequence
  Description of Artificial Sequence: Synthetic oligonucleotide
  Sense strand starting at position 3234 of SEQ ID NO: 1879405
ccaucuagacuuggaguaa

SEQ ID NO: 1904701 - RNA, 19 nt, Artificial Sequence
  Description of Artificial Sequence: Synthetic oligonucleotide
  Antisense strand to SEQ ID NO: 1904700
uuacuccaagucuagaugg

SEQ ID NO: 1904702 - RNA, 19 nt, Artificial Sequence
  Description of Artificial Sequence: Synthetic oligonucleotide
  Sense strand starting at position 3341 of SEQ ID NO: 1879405
aaaugagaauaaugguuga

SEQ ID NO: 1904703 - RNA, 19 nt, Artificial Sequence
  Description of Artificial Sequence: Synthetic oligonucleotide
  Antisense strand to SEQ ID NO: 1904702
ucaaccauuauucucauuu

SEQ ID NO: 1904704 - RNA, 19 nt, Artificial Sequence
  Description of Artificial Sequence: Synthetic oligonucleotide
  Sense strand starting at position 3537 of SEQ ID NO: 1879405
gccuuacacuuguccucau

SEQ ID NO: 1904705 - RNA, 19 nt, Artificial Sequence
  Description of Artificial Sequence: Synthetic oligonucleotide
  Antisense strand to SEQ ID NO: 1904704
augaggacaaguguaaggc

SEQ ID NO: 1904706 - RNA, 19 nt, Artificial Sequence
  Description of Artificial Sequence: Synthetic oligonucleotide
  Sense strand starting at position 3775 of SEQ ID NO: 1879405
acagaaggauuccauccua

SEQ ID NO: 1904707 - RNA, 19 nt, Artificial Sequence
  Description of Artificial Sequence: Synthetic oligonucleotide
  Antisense strand to SEQ ID NO: 1904706
uaggauggaauccuucugu

SEQ ID NO: 1904708 - RNA, 19 nt, Artificial Sequence
  Description of Artificial Sequence: Synthetic oligonucleotide
  Sense strand starting at position 3826 of SEQ ID NO: 1879405
augagauucuuauccauug

SEQ ID NO: 1904709 - RNA, 19 nt, Artificial Sequence
  Description of Artificial Sequence: Synthetic oligonucleotide
  Antisense strand to SEQ ID NO: 1904708
caauggauaagaaucucau

SEQ ID NO: 1904710 - RNA, 19 nt, Artificial Sequence
  Description of Artificial Sequence: Synthetic oligonucleotide
  Sense strand starting at position 3827 of SEQ ID NO: 1879405
ugagauucuuauccauuga

SEQ ID NO: 1904711 - RNA, 19 nt, Artificial Sequence
  Description of Artificial Sequence: Synthetic oligonucleotide
  Antisense strand to SEQ ID NO: 1904710
ucaauggauaagaaucuca

SEQ ID NO: 1904712 - RNA, 19 nt, Artificial Sequence
  Description of Artificial Sequence: Synthetic oligonucleotide
  Sense strand starting at position 3849 of SEQ ID NO: 1879405
cagagacaccgucaugcau

SEQ ID NO: 1904713 - RNA, 19 nt, Artificial Sequence
  Description of Artificial Sequence: Synthetic oligonucleotide
  Antisense strand to SEQ ID NO: 1904712
augcaugacggugucucug

SEQ ID NO: 1904714 - RNA, 19 nt, Artificial Sequence
  Description of Artificial Sequence: Synthetic oligonucleotide
  Sense strand starting at position 3886 of SEQ ID NO: 1879405
cagggauucgacgaaguga

SEQ ID NO: 1904715 - RNA, 19 nt, Artificial Sequence
  Description of Artificial Sequence: Synthetic oligonucleotide
  Antisense strand to SEQ ID NO: 1904714
ucacuucgucgaaucccug

SEQ ID NO: 1904716 - RNA, 19 nt, Artificial Sequence
  Description of Artificial Sequence: Synthetic oligonucleotide
  Sense strand starting at position 3922 of SEQ ID NO: 1879405
ccugcagugcccggagaaa

SEQ ID NO: 1904717 - RNA, 19 nt, Artificial Sequence
  Description of Artificial Sequence: Synthetic oligonucleotide
  Antisense strand to SEQ ID NO: 1904716
uuucuccgggcacugcagg

SEQ ID NO: 1904718 - RNA, 19 nt, Artificial Sequence
  Description of Artificial Sequence: Synthetic oligonucleotide
  Sense strand starting at position 3966 of SEQ ID NO: 1879405
ggaagguguguuuguguga

SEQ ID NO: 1904719 - RNA, 19 nt, Artificial Sequence
  Description of Artificial Sequence: Synthetic oligonucleotide
  Antisense strand to SEQ ID NO: 1904718
ucacacaaacacaccuucc

SEQ ID NO: 1904720 - RNA, 19 nt, Artificial Sequence
  Description of Artificial Sequence: Synthetic oligonucleotide
  Sense strand starting at position 3967 of SEQ ID NO: 1879405
gaagguguguuugugugaa

SEQ ID NO: 1904721 - RNA, 19 nt, Artificial Sequence
  Description of Artificial Sequence: Synthetic oligonucleotide
  Antisense strand to SEQ ID NO: 1904720
uucacacaaacacaccuuc

SEQ ID NO: 1904722 - RNA, 19 nt, Artificial Sequence
  Description of Artificial Sequence: Synthetic oligonucleotide
  Sense strand starting at position 53 of SEQ ID NO: 1879406
ugccgaaugcuuucugcca

SEQ ID NO: 1904723 - RNA, 19 nt, Artificial Sequence
  Description of Artificial Sequence: Synthetic oligonucleotide
  Antisense strand to SEQ ID NO: 1904722
uggcagaaagcauucggca

SEQ ID NO: 1904724 - RNA, 19 nt, Artificial Sequence
  Description of Artificial Sequence: Synthetic oligonucleotide
  Sense strand starting at position 106 of SEQ ID NO: 1879406
gcggguauugugaguauuc

SEQ ID NO: 1904725 - RNA, 19 nt, Artificial Sequence
  Description of Artificial Sequence: Synthetic oligonucleotide
  Antisense strand to SEQ ID NO: 1904724
gaauacucacaauacccgc

SEQ ID NO: 1904726 - RNA, 19 nt, Artificial Sequence
  Description of Artificial Sequence: Synthetic oligonucleotide
  Sense strand starting at position 108 of SEQ ID NO: 1879406
ggguauugugaguauucca

SEQ ID NO: 1904727 - RNA, 19 nt, Artificial Sequence
  Description of Artificial Sequence: Synthetic oligonucleotide
  Antisense strand to SEQ ID NO: 1904726
uggaauacucacaauaccc

SEQ ID NO: 1904728 - RNA, 19 nt, Artificial Sequence
  Description of Artificial Sequence: Synthetic oligonucleotide
  Sense strand starting at position 163 of SEQ ID NO: 1879406
gaggcaugcucuucgacac

SEQ ID NO: 1904729 - RNA, 19 nt, Artificial Sequence
  Description of Artificial Sequence: Synthetic oligonucleotide
  Antisense strand to SEQ ID NO: 1904728
gugucgaagagcaugccuc

SEQ ID NO: 1904730 - RNA, 19 nt, Artificial Sequence
  Description of Artificial Sequence: Synthetic oligonucleotide
  Sense strand starting at position 199 of SEQ ID NO: 1879406
cuucuaaaucuuuagggca

SEQ ID NO: 1904731 - RNA, 19 nt, Artificial Sequence
  Description of Artificial Sequence: Synthetic oligonucleotide
  Antisense strand to SEQ ID NO: 1904730
ugcccuaaagauuuagaag

SEQ ID NO: 1904732 - RNA, 19 nt, Artificial Sequence
  Description of Artificial Sequence: Synthetic oligonucleotide
  Sense strand starting at position 272 of SEQ ID NO: 1879406
ucacuaugauuccuuuagu

SEQ ID NO: 1904733 - RNA, 19 nt, Artificial Sequence
  Description of Artificial Sequence: Synthetic oligonucleotide
  Antisense strand to SEQ ID NO: 1904732
acuaaaggaaucauaguga

SEQ ID NO: 1904734 - RNA, 19 nt, Artificial Sequence
  Description of Artificial Sequence: Synthetic oligonucleotide
  Sense strand starting at position 275 of SEQ ID NO: 1879406
cuaugauuccuuuaguaag

SEQ ID NO: 1904735 - RNA, 19 nt, Artificial Sequence
  Description of Artificial Sequence: Synthetic oligonucleotide
  Antisense strand to SEQ ID NO: 1904734
cuuacuaaaggaaucauag

SEQ ID NO: 1904736 - RNA, 19 nt, Artificial Sequence
  Description of Artificial Sequence: Synthetic oligonucleotide
  Sense strand starting at position 277 of SEQ ID NO: 1879406
augauuccuuuaguaagau

SEQ ID NO: 1904737 - RNA, 19 nt, Artificial Sequence
  Description of Artificial Sequence: Synthetic oligonucleotide
  Antisense strand to SEQ ID NO: 1904736
aucuuacuaaaggaaucau

SEQ ID NO: 1904738 - RNA, 19 nt, Artificial Sequence
  Description of Artificial Sequence: Synthetic oligonucleotide
  Sense strand starting at position 401 of SEQ ID NO: 1879406
ugaggaccuuccuaagaaa

SEQ ID NO: 1904739 - RNA, 19 nt, Artificial Sequence
  Description of Artificial Sequence: Synthetic oligonucleotide
  Antisense strand to SEQ ID NO: 1904738
uuucuuaggaagguccuca

SEQ ID NO: 1904740 - RNA, 19 nt, Artificial Sequence
  Description of Artificial Sequence: Synthetic oligonucleotide
  Sense strand starting at position 618 of SEQ ID NO: 1879406
cuuguaauccaaggucagu

SEQ ID NO: 1904741 - RNA, 19 nt, Artificial Sequence
  Description of Artificial Sequence: Synthetic oligonucleotide
  Antisense strand to SEQ ID NO: 1904740
acugaccuuggauuacaag

SEQ ID NO: 1904742 - RNA, 19 nt, Artificial Sequence
  Description of Artificial Sequence: Synthetic oligonucleotide
  Sense strand starting at position 769 of SEQ ID NO: 1879406
aucugcucgucagcauuua

SEQ ID NO: 1904743 - RNA, 19 nt, Artificial Sequence
  Description of Artificial Sequence: Synthetic oligonucleotide
  Antisense strand to SEQ ID NO: 1904742
uaaaugcugacgagcagau

SEQ ID NO: 1904744 - RNA, 19 nt, Artificial Sequence
  Description of Artificial Sequence: Synthetic oligonucleotide
  Sense strand starting at position 770 of SEQ ID NO: 1879406
ucugcucgucagcauuuaa

SEQ ID NO: 1904745 - RNA, 19 nt, Artificial Sequence
  Description of Artificial Sequence: Synthetic oligonucleotide
  Antisense strand to SEQ ID NO: 1904744
uuaaaugcugacgagcaga

SEQ ID NO: 1904746 - RNA, 19 nt, Artificial Sequence
  Description of Artificial Sequence: Synthetic oligonucleotide
  Sense strand starting at position 968 of SEQ ID NO: 1879406
acgaaaucauuggcaauaa

SEQ ID NO: 1904747 - RNA, 19 nt, Artificial Sequence
  Description of Artificial Sequence: Synthetic oligonucleotide
  Antisense strand to SEQ ID NO: 1904746
uuauugccaaugauuucgu

SEQ ID NO: 1904748 - RNA, 19 nt, Artificial Sequence
  Description of Artificial Sequence: Synthetic oligonucleotide
  Sense strand starting at position 1350 of SEQ ID NO: 1879406
aagguaaacuucuugagug

SEQ ID NO: 1904749 - RNA, 19 nt, Artificial Sequence
  Description of Artificial Sequence: Synthetic oligonucleotide
  Antisense strand to SEQ ID NO: 1904748
cacucaagaaguuuaccuu

SEQ ID NO: 1904750 - RNA, 19 nt, Artificial Sequence
  Description of Artificial Sequence: Synthetic oligonucleotide
  Sense strand starting at position 1352 of SEQ ID NO: 1879406
gguaaacuucuugagugca

SEQ ID NO: 1904751 - RNA, 19 nt, Artificial Sequence
  Description of Artificial Sequence: Synthetic oligonucleotide
  Antisense strand to SEQ ID NO: 1904750
ugcacucaagaaguuuacc

SEQ ID NO: 1904752 - RNA, 19 nt, Artificial Sequence
  Description of Artificial Sequence: Synthetic oligonucleotide
  Sense strand starting at position 1357 of SEQ ID NO: 1879406
acuucuugagugcauaacu

SEQ ID NO: 1904753 - RNA, 19 nt, Artificial Sequence
  Description of Artificial Sequence: Synthetic oligonucleotide
  Antisense strand to SEQ ID NO: 1904752
aguuaugcacucaagaagu

SEQ ID NO: 1904754 - RNA, 19 nt, Artificial Sequence
  Description of Artificial Sequence: Synthetic oligonucleotide
  Sense strand starting at position 1362 of SEQ ID NO: 1879406
uugagugcauaacuuauaa

SEQ ID NO: 1904755 - RNA, 19 nt, Artificial Sequence
  Description of Artificial Sequence: Synthetic oligonucleotide
  Antisense strand to SEQ ID NO: 1904754
uuauaaguuaugcacucaa

SEQ ID NO: 1904756 - RNA, 19 nt, Artificial Sequence
  Description of Artificial Sequence: Synthetic oligonucleotide
  Sense strand starting at position 1413 of SEQ ID NO: 1879406
ccugcaguccgucuuugua

SEQ ID NO: 1904757 - RNA, 19 nt, Artificial Sequence
  Description of Artificial Sequence: Synthetic oligonucleotide
  Antisense strand to SEQ ID NO: 1904756
uacaaagacggacugcagg

SEQ ID NO: 1904758 - RNA, 19 nt, Artificial Sequence
  Description of Artificial Sequence: Synthetic oligonucleotide
  Sense strand starting at position 1733 of SEQ ID NO: 1879406
acaggcuggccucagaaua

SEQ ID NO: 1904759 - RNA, 19 nt, Artificial Sequence
  Description of Artificial Sequence: Synthetic oligonucleotide
  Antisense strand to SEQ ID NO: 1904758
uauucugaggccagccugu

SEQ ID NO: 1904760 - RNA, 19 nt, Artificial Sequence
  Description of Artificial Sequence: Synthetic oligonucleotide
  Sense strand starting at position 1741 of SEQ ID NO: 1879406
gccucagaauaggauagaa

SEQ ID NO: 1904761 - RNA, 19 nt, Artificial Sequence
  Description of Artificial Sequence: Synthetic oligonucleotide
  Antisense strand to SEQ ID NO: 1904760
uucuauccuauucugaggc

SEQ ID NO: 1904762 - RNA, 19 nt, Artificial Sequence
  Description of Artificial Sequence: Synthetic oligonucleotide
  Sense strand starting at position 1808 of SEQ ID NO: 1879406
uuuggaacuuacuuguuaa

SEQ ID NO: 1904763 - RNA, 19 nt, Artificial Sequence
  Description of Artificial Sequence: Synthetic oligonucleotide
  Antisense strand to SEQ ID NO: 1904762
uuaacaaguaaguuccaaa

SEQ ID NO: 1904764 - RNA, 19 nt, Artificial Sequence
  Description of Artificial Sequence: Synthetic oligonucleotide
  Sense strand starting at position 2029 of SEQ ID NO: 1879406
uggcuuaauugcuccuaaa

SEQ ID NO: 1904765 - RNA, 19 nt, Artificial Sequence
  Description of Artificial Sequence: Synthetic oligonucleotide
  Antisense strand to SEQ ID NO: 1904764
uuuaggagcaauuaagcca

SEQ ID NO: 1904766 - RNA, 19 nt, Artificial Sequence
  Description of Artificial Sequence: Synthetic oligonucleotide
  Sense strand starting at position 2084 of SEQ ID NO: 1879406
uggugcaacuacuuuauua

SEQ ID NO: 1904767 - RNA, 19 nt, Artificial Sequence
  Description of Artificial Sequence: Synthetic oligonucleotide
  Antisense strand to SEQ ID NO: 1904766
uaauaaaguaguugcacca

SEQ ID NO: 1904768 - RNA, 19 nt, Artificial Sequence
  Description of Artificial Sequence: Synthetic oligonucleotide
  Sense strand starting at position 2168 of SEQ ID NO: 1879406
gacgucuuucugggagaua

SEQ ID NO: 1904769 - RNA, 19 nt, Artificial Sequence
  Description of Artificial Sequence: Synthetic oligonucleotide
  Antisense strand to SEQ ID NO: 1904768
uaucucccagaaagacguc

SEQ ID NO: 1904770 - RNA, 19 nt, Artificial Sequence
  Description of Artificial Sequence: Synthetic oligonucleotide
  Sense strand starting at position 2246 of SEQ ID NO: 1879406
guguguuaauaguugauua

SEQ ID NO: 1904771 - RNA, 19 nt, Artificial Sequence
  Description of Artificial Sequence: Synthetic oligonucleotide
  Antisense strand to SEQ ID NO: 1904770
uaaucaacuauuaacacac

SEQ ID NO: 1904772 - RNA, 19 nt, Artificial Sequence
  Description of Artificial Sequence: Synthetic oligonucleotide
  Sense strand starting at position 2247 of SEQ ID NO: 1879406
uguguuaauaguugauuac

SEQ ID NO: 1904773 - RNA, 19 nt, Artificial Sequence
  Description of Artificial Sequence: Synthetic oligonucleotide
  Antisense strand to SEQ ID NO: 1904772
guaaucaacuauuaacaca

SEQ ID NO: 1904774 - RNA, 19 nt, Artificial Sequence
  Description of Artificial Sequence: Synthetic oligonucleotide
  Sense strand starting at position 2283 of SEQ ID NO: 1879406
gcccaaucccucugaggaa

SEQ ID NO: 1904775 - RNA, 19 nt, Artificial Sequence
  Description of Artificial Sequence: Synthetic oligonucleotide
  Antisense strand to SEQ ID NO: 1904774
uuccucagagggauugggc

SEQ ID NO: 1904776 - RNA, 19 nt, Artificial Sequence
  Description of Artificial Sequence: Synthetic oligonucleotide
  Sense strand starting at position 2320 of SEQ ID NO: 1879406
agaauugcucauggaauag

SEQ ID NO: 1904777 - RNA, 19 nt, Artificial Sequence
  Description of Artificial Sequence: Synthetic oligonucleotide
  Antisense strand to SEQ ID NO: 1904776
cuauuccaugagcaauucu

SEQ ID NO: 1904778 - RNA, 19 nt, Artificial Sequence
  Description of Artificial Sequence: Synthetic oligonucleotide
  Sense strand starting at position 3252 of SEQ ID NO: 1879406
acccuaagugucugcuaca

SEQ ID NO: 1904779 - RNA, 19 nt, Artificial Sequence
  Description of Artificial Sequence: Synthetic oligonucleotide
  Antisense strand to SEQ ID NO: 1904778
uguagcagacacuuagggu

SEQ ID NO: 1904780 - RNA, 19 nt, Artificial Sequence
  Description of Artificial Sequence: Synthetic oligonucleotide
  Sense strand starting at position 3253 of SEQ ID NO: 1879406
cccuaagugucugcuacaa

SEQ ID NO: 1904781 - RNA, 19 nt, Artificial Sequence
  Description of Artificial Sequence: Synthetic oligonucleotide
  Antisense strand to SEQ ID NO: 1904780
uuguagcagacacuuaggg

SEQ ID NO: 1904782 - RNA, 19 nt, Artificial Sequence
  Description of Artificial Sequence: Synthetic oligonucleotide
  Sense strand starting at position 3257 of SEQ ID NO: 1879406
aagugucugcuacaagcaa

SEQ ID NO: 1904783 - RNA, 19 nt, Artificial Sequence
  Description of Artificial Sequence: Synthetic oligonucleotide
  Antisense strand to SEQ ID NO: 1904782
uugcuuguagcagacacuu

SEQ ID NO: 1904784 - RNA, 19 nt, Artificial Sequence
  Description of Artificial Sequence: Synthetic oligonucleotide
  Sense strand starting at position 3264 of SEQ ID NO: 1879406
ugcuacaagcaagauguua

SEQ ID NO: 1904785 - RNA, 19 nt, Artificial Sequence
  Description of Artificial Sequence: Synthetic oligonucleotide
  Antisense strand to SEQ ID NO: 1904784
uaacaucuugcuuguagca

SEQ ID NO: 1904786 - RNA, 19 nt, Artificial Sequence
  Description of Artificial Sequence: Synthetic oligonucleotide
  Sense strand starting at position 3323 of SEQ ID NO: 1879406
gacagugugauggguauca

SEQ ID NO: 1904787 - RNA, 19 nt, Artificial Sequence
  Description of Artificial Sequence: Synthetic oligonucleotide
  Antisense strand to SEQ ID NO: 1904786
ugauacccaucacacuguc

SEQ ID NO: 1904788 - RNA, 19 nt, Artificial Sequence
  Description of Artificial Sequence: Synthetic oligonucleotide
  Sense strand starting at position 3364 of SEQ ID NO: 1879406
gagaucugcccuugaggaa

SEQ ID NO: 1904789 - RNA, 19 nt, Artificial Sequence
  Description of Artificial Sequence: Synthetic oligonucleotide
  Antisense strand to SEQ ID NO: 1904788
uuccucaagggcagaucuc

SEQ ID NO: 1904790 - RNA, 19 nt, Artificial Sequence
  Description of Artificial Sequence: Synthetic oligonucleotide
  Sense strand starting at position 3472 of SEQ ID NO: 1879406
gagacuucuuuggaaagaa

SEQ ID NO: 1904791 - RNA, 19 nt, Artificial Sequence
  Description of Artificial Sequence: Synthetic oligonucleotide
  Antisense strand to SEQ ID NO: 1904790
uucuuuccaaagaagucuc

SEQ ID NO: 1904792 - RNA, 19 nt, Artificial Sequence
  Description of Artificial Sequence: Synthetic oligonucleotide
  Sense strand starting at position 3632 of SEQ ID NO: 1879406
cuaugacaggucugggaga

SEQ ID NO: 1904793 - RNA, 19 nt, Artificial Sequence
  Description of Artificial Sequence: Synthetic oligonucleotide
  Antisense strand to SEQ ID NO: 1904792
ucucccagaccugucauag

SEQ ID NO: 1904794 - RNA, 19 nt, Artificial Sequence
  Description of Artificial Sequence: Synthetic oligonucleotide
  Sense strand starting at position 3634 of SEQ ID NO: 1879406
augacaggucugggagagu

SEQ ID NO: 1904795 - RNA, 19 nt, Artificial Sequence
  Description of Artificial Sequence: Synthetic oligonucleotide
  Antisense strand to SEQ ID NO: 1904794
acucucccagaccugucau

SEQ ID NO: 1904796 - RNA, 19 nt, Artificial Sequence
  Description of Artificial Sequence: Synthetic oligonucleotide
  Sense strand starting at position 3695 of SEQ ID NO: 1879406
ugccauguuguagauccua

SEQ ID NO: 1904797 - RNA, 19 nt, Artificial Sequence
  Description of Artificial Sequence: Synthetic oligonucleotide
  Antisense strand to SEQ ID NO: 1904796
uaggaucuacaacauggca

SEQ ID NO: 1904798 - RNA, 19 nt, Artificial Sequence
  Description of Artificial Sequence: Synthetic oligonucleotide
  Sense strand starting at position 3735 of SEQ ID NO: 1879406
guuugucauggguagcuaa

SEQ ID NO: 1904799 - RNA, 19 nt, Artificial Sequence
  Description of Artificial Sequence: Synthetic oligonucleotide
  Antisense strand to SEQ ID NO: 1904798
uuagcuacccaugacaaac

SEQ ID NO: 1904800 - RNA, 19 nt, Artificial Sequence
  Description of Artificial Sequence: Synthetic oligonucleotide
  Sense strand starting at position 3839 of SEQ ID NO: 1879406
ugagauguguggccagaug

SEQ ID NO: 1904801 - RNA, 19 nt, Artificial Sequence
  Description of Artificial Sequence: Synthetic oligonucleotide
  Antisense strand to SEQ ID NO: 1904800
caucuggccacacaucuca

SEQ ID NO: 1904802 - RNA, 19 nt, Artificial Sequence
  Description of Artificial Sequence: Synthetic oligonucleotide
  Sense strand starting at position 192 of SEQ ID NO: 1879407
uguugaaauucuuaagaac

SEQ ID NO: 1904803 - RNA, 19 nt, Artificial Sequence
  Description of Artificial Sequence: Synthetic oligonucleotide
  Antisense strand to SEQ ID NO: 1904802
guucuuaagaauuucaaca

SEQ ID NO: 1904804 - RNA, 19 nt, Artificial Sequence
  Description of Artificial Sequence: Synthetic oligonucleotide
  Sense strand starting at position 195 of SEQ ID NO: 1879407
ugaaauucuuaagaacaga

SEQ ID NO: 1904805 - RNA, 19 nt, Artificial Sequence
  Description of Artificial Sequence: Synthetic oligonucleotide
  Antisense strand to SEQ ID NO: 1904804
ucuguucuuaagaauuuca

SEQ ID NO: 1904806 - RNA, 19 nt, Artificial Sequence
  Description of Artificial Sequence: Synthetic oligonucleotide
  Sense strand starting at position 449 of SEQ ID NO: 1879407
ccgagauugcgucacucca

SEQ ID NO: 1904807 - RNA, 19 nt, Artificial Sequence
  Description of Artificial Sequence: Synthetic oligonucleotide
  Antisense strand to SEQ ID NO: 1904806
uggagugacgcaaucucgg

SEQ ID NO: 1904808 - RNA, 19 nt, Artificial Sequence
  Description of Artificial Sequence: Synthetic oligonucleotide
  Sense strand starting at position 485 of SEQ ID NO: 1879407
uagcgagacucccgucaaa

SEQ ID NO: 1904809 - RNA, 19 nt, Artificial Sequence
  Description of Artificial Sequence: Synthetic oligonucleotide
  Antisense strand to SEQ ID NO: 1904808
uuugacgggagucucgcua

SEQ ID NO: 1904810 - RNA, 19 nt, Artificial Sequence
  Description of Artificial Sequence: Synthetic oligonucleotide
  Sense strand starting at position 855 of SEQ ID NO: 1879407
gguccucagcuuuacaaac

SEQ ID NO: 1904811 - RNA, 19 nt, Artificial Sequence
  Description of Artificial Sequence: Synthetic oligonucleotide
  Antisense strand to SEQ ID NO: 1904810
guuuguaaagcugaggacc

SEQ ID NO: 1904812 - RNA, 19 nt, Artificial Sequence
  Description of Artificial Sequence: Synthetic oligonucleotide
  Sense strand starting at position 928 of SEQ ID NO: 1879407
gggcguguuugcuggagga

SEQ ID NO: 1904813 - RNA, 19 nt, Artificial Sequence
  Description of Artificial Sequence: Synthetic oligonucleotide
  Antisense strand to SEQ ID NO: 1904812
uccuccagcaaacacgccc

SEQ ID NO: 1904814 - RNA, 19 nt, Artificial Sequence
  Description of Artificial Sequence: Synthetic oligonucleotide
  Sense strand starting at position 955 of SEQ ID NO: 1879407
cgccguguguccauccaga

SEQ ID NO: 1904815 - RNA, 19 nt, Artificial Sequence
  Description of Artificial Sequence: Synthetic oligonucleotide
  Antisense strand to SEQ ID NO: 1904814
ucuggauggacacacggcg

SEQ ID NO: 1904816 - RNA, 19 nt, Artificial Sequence
  Description of Artificial Sequence: Synthetic oligonucleotide
  Sense strand starting at position 2286 of SEQ ID NO: 1879407
ucaccugcugucuggagaa

SEQ ID NO: 1904817 - RNA, 19 nt, Artificial Sequence
  Description of Artificial Sequence: Synthetic oligonucleotide
  Antisense strand to SEQ ID NO: 1904816
uucuccagacagcagguga

SEQ ID NO: 1904818 - RNA, 19 nt, Artificial Sequence
  Description of Artificial Sequence: Synthetic oligonucleotide
  Sense strand starting at position 2690 of SEQ ID NO: 1879407
gccacuuuccuaggaaggu

SEQ ID NO: 1904819 - RNA, 19 nt, Artificial Sequence
  Description of Artificial Sequence: Synthetic oligonucleotide
  Antisense strand to SEQ ID NO: 1904818
accuuccuaggaaaguggc

SEQ ID NO: 1904820 - RNA, 19 nt, Artificial Sequence
  Description of Artificial Sequence: Synthetic oligonucleotide
  Sense strand starting at position 2927 of SEQ ID NO: 1879407
ugcucauugcgugggugua

SEQ ID NO: 1904821 - RNA, 19 nt, Artificial Sequence
  Description of Artificial Sequence: Synthetic oligonucleotide
  Antisense strand to SEQ ID NO: 1904820
uacacccacgcaaugagca

SEQ ID NO: 1904822 - RNA, 19 nt, Artificial Sequence
  Description of Artificial Sequence: Synthetic oligonucleotide
  Sense strand starting at position 2928 of SEQ ID NO: 1879407
gcucauugcguggguguaa

SEQ ID NO: 1904823 - RNA, 19 nt, Artificial Sequence
  Description of Artificial Sequence: Synthetic oligonucleotide
  Antisense strand to SEQ ID NO: 1904822
uuacacccacgcaaugagc

SEQ ID NO: 1904824 - RNA, 19 nt, Artificial Sequence
  Description of Artificial Sequence: Synthetic oligonucleotide
  Sense strand starting at position 3117 of SEQ ID NO: 1879407
gcacauauacuuggaucuu

SEQ ID NO: 1904825 - RNA, 19 nt, Artificial Sequence
  Description of Artificial Sequence: Synthetic oligonucleotide
  Antisense strand to SEQ ID NO: 1904824
aagauccaaguauaugugc

SEQ ID NO: 1904826 - RNA, 19 nt, Artificial Sequence
  Description of Artificial Sequence: Synthetic oligonucleotide
  Sense strand starting at position 3169 of SEQ ID NO: 1879407
gauugaauuguuuagccca

SEQ ID NO: 1904827 - RNA, 19 nt, Artificial Sequence
  Description of Artificial Sequence: Synthetic oligonucleotide
  Antisense strand to SEQ ID NO: 1904826
ugggcuaaacaauucaauc

SEQ ID NO: 1904828 - RNA, 19 nt, Artificial Sequence
  Description of Artificial Sequence: Synthetic oligonucleotide
  Sense strand starting at position 3176 of SEQ ID NO: 1879407
uuguuuagcccaugcacau

SEQ ID NO: 1904829 - RNA, 19 nt, Artificial Sequence
  Description of Artificial Sequence: Synthetic oligonucleotide
  Antisense strand to SEQ ID NO: 1904828
augugcaugggcuaaacaa

SEQ ID NO: 1904830 - RNA, 19 nt, Artificial Sequence
  Description of Artificial Sequence: Synthetic oligonucleotide
  Sense strand starting at position 3206 of SEQ ID NO: 1879407
gauacacuguaguuagguu

SEQ ID NO: 1904831 - RNA, 19 nt, Artificial Sequence
  Description of Artificial Sequence: Synthetic oligonucleotide
  Antisense strand to SEQ ID NO: 1904830
aaccuaacuacaguguauc

SEQ ID NO: 1904832 - RNA, 19 nt, Artificial Sequence
  Description of Artificial Sequence: Synthetic oligonucleotide
  Sense strand starting at position 3210 of SEQ ID NO: 1879407
cacuguaguuagguuuaca

SEQ ID NO: 1904833 - RNA, 19 nt, Artificial Sequence
  Description of Artificial Sequence: Synthetic oligonucleotide
  Antisense strand to SEQ ID NO: 1904832
uguaaaccuaacuacagug

SEQ ID NO: 1904834 - RNA, 19 nt, Artificial Sequence
  Description of Artificial Sequence: Synthetic oligonucleotide
  Sense strand starting at position 3278 of SEQ ID NO: 1879407
cccuguuccuucuuuaagu

SEQ ID NO: 1904835 - RNA, 19 nt, Artificial Sequence
  Description of Artificial Sequence: Synthetic oligonucleotide
  Antisense strand to SEQ ID NO: 1904834
acuuaaagaaggaacaggg

SEQ ID NO: 1904836 - RNA, 19 nt, Artificial Sequence
  Description of Artificial Sequence: Synthetic oligonucleotide
  Sense strand starting at position 3294 of SEQ ID NO: 1879407
aguggauuaaagugaauau

SEQ ID NO: 1904837 - RNA, 19 nt, Artificial Sequence
  Description of Artificial Sequence: Synthetic oligonucleotide
  Antisense strand to SEQ ID NO: 1904836
auauucacuuuaauccacu

SEQ ID NO: 1904838 - RNA, 19 nt, Artificial Sequence
  Description of Artificial Sequence: Synthetic oligonucleotide
  Sense strand starting at position 3305 of SEQ ID NO: 1879407
gugaauauuuccuaaugua

SEQ ID NO: 1904839 - RNA, 19 nt, Artificial Sequence
  Description of Artificial Sequence: Synthetic oligonucleotide
  Antisense strand to SEQ ID NO: 1904838
uacauuaggaaauauucac

SEQ ID NO: 1904840 - RNA, 19 nt, Artificial Sequence
  Description of Artificial Sequence: Synthetic oligonucleotide
  Sense strand starting at position 3368 of SEQ ID NO: 1879407
uuuccagugcuuuauguuu

SEQ ID NO: 1904841 - RNA, 19 nt, Artificial Sequence
  Description of Artificial Sequence: Synthetic oligonucleotide
  Antisense strand to SEQ ID NO: 1904840
aaacauaaagcacuggaaa

SEQ ID NO: 1904842 - RNA, 19 nt, Artificial Sequence
  Description of Artificial Sequence: Synthetic oligonucleotide
  Sense strand starting at position 3389 of SEQ ID NO: 1879407
ccguauacagcuuaaucuu

SEQ ID NO: 1904843 - RNA, 19 nt, Artificial Sequence
  Description of Artificial Sequence: Synthetic oligonucleotide
  Antisense strand to SEQ ID NO: 1904842
aagauuaagcuguauacgg

SEQ ID NO: 1904844 - RNA, 19 nt, Artificial Sequence
  Description of Artificial Sequence: Synthetic oligonucleotide
  Sense strand starting at position 3434 of SEQ ID NO: 1879407
ucagauuuguacuagguua

SEQ ID NO: 1904845 - RNA, 19 nt, Artificial Sequence
  Description of Artificial Sequence: Synthetic oligonucleotide
  Antisense strand to SEQ ID NO: 1904844
uaaccuaguacaaaucuga

SEQ ID NO: 1904846 - RNA, 19 nt, Artificial Sequence
  Description of Artificial Sequence: Synthetic oligonucleotide
  Sense strand starting at position 3445 of SEQ ID NO: 1879407
cuagguuaauuccaaguga

SEQ ID NO: 1904847 - RNA, 19 nt, Artificial Sequence
  Description of Artificial Sequence: Synthetic oligonucleotide
  Antisense strand to SEQ ID NO: 1904846
ucacuuggaauuaaccuag

SEQ ID NO: 1904848 - RNA, 19 nt, Artificial Sequence
  Description of Artificial Sequence: Synthetic oligonucleotide
  Sense strand starting at position 3471 of SEQ ID NO: 1879407
auguuacucuuauaugguu

SEQ ID NO: 1904849 - RNA, 19 nt, Artificial Sequence
  Description of Artificial Sequence: Synthetic oligonucleotide
  Antisense strand to SEQ ID NO: 1904848
aaccauauaagaguaacau

SEQ ID NO: 1904850 - RNA, 19 nt, Artificial Sequence
  Description of Artificial Sequence: Synthetic oligonucleotide
  Sense strand starting at position 3512 of SEQ ID NO: 1879407
uguauuacaucugauaaug

SEQ ID NO: 1904851 - RNA, 19 nt, Artificial Sequence
  Description of Artificial Sequence: Synthetic oligonucleotide
  Antisense strand to SEQ ID NO: 1904850
cauuaucagauguaauaca

SEQ ID NO: 1904852 - RNA, 19 nt, Artificial Sequence
  Description of Artificial Sequence: Synthetic oligonucleotide
  Sense strand starting at position 3537 of SEQ ID NO: 1879407
acucaacaguacuguguua

SEQ ID NO: 1904853 - RNA, 19 nt, Artificial Sequence
  Description of Artificial Sequence: Synthetic oligonucleotide
  Antisense strand to SEQ ID NO: 1904852
uaacacaguacuguugagu

SEQ ID NO: 1904854 - RNA, 19 nt, Artificial Sequence
  Description of Artificial Sequence: Synthetic oligonucleotide
  Sense strand starting at position 3539 of SEQ ID NO: 1879407
ucaacaguacuguguuauc

SEQ ID NO: 1904855 - RNA, 19 nt, Artificial Sequence
  Description of Artificial Sequence: Synthetic oligonucleotide
  Antisense strand to SEQ ID NO: 1904854
gauaacacaguacuguuga

SEQ ID NO: 1904856 - RNA, 19 nt, Artificial Sequence
  Description of Artificial Sequence: Synthetic oligonucleotide
  Sense strand starting at position 3542 of SEQ ID NO: 1879407
acaguacuguguuaucauu

SEQ ID NO: 1904857 - RNA, 19 nt, Artificial Sequence
  Description of Artificial Sequence: Synthetic oligonucleotide
  Antisense strand to SEQ ID NO: 1904856
aaugauaacacaguacugu

SEQ ID NO: 1904858 - RNA, 19 nt, Artificial Sequence
  Description of Artificial Sequence: Synthetic oligonucleotide
  Sense strand starting at position 3548 of SEQ ID NO: 1879407
cuguguuaucauuauuacu

SEQ ID NO: 1904859 - RNA, 19 nt, Artificial Sequence
  Description of Artificial Sequence: Synthetic oligonucleotide
  Antisense strand to SEQ ID NO: 1904858
aguaauaaugauaacacag

SEQ ID NO: 1904860 - RNA, 19 nt, Artificial Sequence
  Description of Artificial Sequence: Synthetic oligonucleotide
  Sense strand starting at position 3565 of SEQ ID NO: 1879407
cuuucugucuguggucauu

SEQ ID NO: 1904861 - RNA, 19 nt, Artificial Sequence
  Description of Artificial Sequence: Synthetic oligonucleotide
  Antisense strand to SEQ ID NO: 1904860
aaugaccacagacagaaag

SEQ ID NO: 1904862 - RNA, 19 nt, Artificial Sequence
  Description of Artificial Sequence: Synthetic oligonucleotide
  Sense strand starting at position 3575 of SEQ ID NO: 1879407
guggucauuuccuuagcca

SEQ ID NO: 1904863 - RNA, 19 nt, Artificial Sequence
  Description of Artificial Sequence: Synthetic oligonucleotide
  Antisense strand to SEQ ID NO: 1904862
uggcuaaggaaaugaccac

SEQ ID NO: 1904864 - RNA, 19 nt, Artificial Sequence
  Description of Artificial Sequence: Synthetic oligonucleotide
  Sense strand starting at position 3636 of SEQ ID NO: 1879407
uauaguacaugucuguaua

SEQ ID NO: 1904865 - RNA, 19 nt, Artificial Sequence
  Description of Artificial Sequence: Synthetic oligonucleotide
  Antisense strand to SEQ ID NO: 1904864
uauacagacauguacuaua

SEQ ID NO: 1904866 - RNA, 19 nt, Artificial Sequence
  Description of Artificial Sequence: Synthetic oligonucleotide
  Sense strand starting at position 3637 of SEQ ID NO: 1879407
auaguacaugucuguauau

SEQ ID NO: 1904867 - RNA, 19 nt, Artificial Sequence
  Description of Artificial Sequence: Synthetic oligonucleotide
  Antisense strand to SEQ ID NO: 1904866
auauacagacauguacuau

SEQ ID NO: 1904868 - RNA, 19 nt, Artificial Sequence
  Description of Artificial Sequence: Synthetic oligonucleotide
  Sense strand starting at position 3638 of SEQ ID NO: 1879407
uaguacaugucuguauaua

SEQ ID NO: 1904869 - RNA, 19 nt, Artificial Sequence
  Description of Artificial Sequence: Synthetic oligonucleotide
  Antisense strand to SEQ ID NO: 1904868
uauauacagacauguacua

SEQ ID NO: 1904870 - RNA, 19 nt, Artificial Sequence
  Description of Artificial Sequence: Synthetic oligonucleotide
  Sense strand starting at position 3833 of SEQ ID NO: 1879407
uuucuuguaaagugaguuu

SEQ ID NO: 1904871 - RNA, 19 nt, Artificial Sequence
  Description of Artificial Sequence: Synthetic oligonucleotide
  Antisense strand to SEQ ID NO: 1904870
aaacucacuuuacaagaaa

SEQ ID NO: 1904872 - RNA, 19 nt, Artificial Sequence
  Description of Artificial Sequence: Synthetic oligonucleotide
  Sense strand starting at position 16 of SEQ ID NO: 1879408
ccaaauauuccuggagagc

SEQ ID NO: 1904873 - RNA, 19 nt, Artificial Sequence
  Description of Artificial Sequence: Synthetic oligonucleotide
  Antisense strand to SEQ ID NO: 1904872
gcucuccaggaauauuugg

SEQ ID NO: 1904874 - RNA, 19 nt, Artificial Sequence
  Description of Artificial Sequence: Synthetic oligonucleotide
  Sense strand starting at position 27 of SEQ ID NO: 1879408
uggagagcccuuugagaca

SEQ ID NO: 1904875 - RNA, 19 nt, Artificial Sequence
  Description of Artificial Sequence: Synthetic oligonucleotide
  Antisense strand to SEQ ID NO: 1904874
ugucucaaagggcucucca

SEQ ID NO: 1904876 - RNA, 19 nt, Artificial Sequence
  Description of Artificial Sequence: Synthetic oligonucleotide
  Sense strand starting at position 86 of SEQ ID NO: 1879408
gacugcuuuggccaaugau

SEQ ID NO: 1904877 - RNA, 19 nt, Artificial Sequence
  Description of Artificial Sequence: Synthetic oligonucleotide
  Antisense strand to SEQ ID NO: 1904876
aucauuggccaaagcaguc

SEQ ID NO: 1904878 - RNA, 19 nt, Artificial Sequence
  Description of Artificial Sequence: Synthetic oligonucleotide
  Sense strand starting at position 102 of SEQ ID NO: 1879408
gauguaugggcagaaguga

SEQ ID NO: 1904879 - RNA, 19 nt, Artificial Sequence
  Description of Artificial Sequence: Synthetic oligonucleotide
  Antisense strand to SEQ ID NO: 1904878
ucacuucugcccauacauc

SEQ ID NO: 1904880 - RNA, 19 nt, Artificial Sequence
  Description of Artificial Sequence: Synthetic oligonucleotide
  Sense strand starting at position 129 of SEQ ID NO: 1879408
auaaguggaugcucugaca

SEQ ID NO: 1904881 - RNA, 19 nt, Artificial Sequence
  Description of Artificial Sequence: Synthetic oligonucleotide
  Antisense strand to SEQ ID NO: 1904880
ugucagagcauccacuuau

SEQ ID NO: 1904882 - RNA, 19 nt, Artificial Sequence
  Description of Artificial Sequence: Synthetic oligonucleotide
  Sense strand starting at position 275 of SEQ ID NO: 1879408
ggucauguagcagaaauga

SEQ ID NO: 1904883 - RNA, 19 nt, Artificial Sequence
  Description of Artificial Sequence: Synthetic oligonucleotide
  Antisense strand to SEQ ID NO: 1904882
ucauuucugcuacaugacc

SEQ ID NO: 1904884 - RNA, 19 nt, Artificial Sequence
  Description of Artificial Sequence: Synthetic oligonucleotide
  Sense strand starting at position 306 of SEQ ID NO: 1879408
ggaauaagccacugauaug

SEQ ID NO: 1904885 - RNA, 19 nt, Artificial Sequence
  Description of Artificial Sequence: Synthetic oligonucleotide
  Antisense strand to SEQ ID NO: 1904884
cauaucaguggcuuauucc

SEQ ID NO: 1904886 - RNA, 19 nt, Artificial Sequence
  Description of Artificial Sequence: Synthetic oligonucleotide
  Sense strand starting at position 353 of SEQ ID NO: 1879408
acugccuuuccugacagaa

SEQ ID NO: 1904887 - RNA, 19 nt, Artificial Sequence
  Description of Artificial Sequence: Synthetic oligonucleotide
  Antisense strand to SEQ ID NO: 1904886
uucugucaggaaaggcagu

SEQ ID NO: 1904888 - RNA, 19 nt, Artificial Sequence
  Description of Artificial Sequence: Synthetic oligonucleotide
  Sense strand starting at position 445 of SEQ ID NO: 1879408
cggaacucuccugauugua

SEQ ID NO: 1904889 - RNA, 19 nt, Artificial Sequence
  Description of Artificial Sequence: Synthetic oligonucleotide
  Antisense strand to SEQ ID NO: 1904888
uacaaucaggagaguuccg

SEQ ID NO: 1904890 - RNA, 19 nt, Artificial Sequence
  Description of Artificial Sequence: Synthetic oligonucleotide
  Sense strand starting at position 447 of SEQ ID NO: 1879408
gaacucuccugauuguaag

SEQ ID NO: 1904891 - RNA, 19 nt, Artificial Sequence
  Description of Artificial Sequence: Synthetic oligonucleotide
  Antisense strand to SEQ ID NO: 1904890
cuuacaaucaggagaguuc

SEQ ID NO: 1904892 - RNA, 19 nt, Artificial Sequence
  Description of Artificial Sequence: Synthetic oligonucleotide
  Sense strand starting at position 493 of SEQ ID NO: 1879408
gggcguuaacaugaacaga

SEQ ID NO: 1904893 - RNA, 19 nt, Artificial Sequence
  Description of Artificial Sequence: Synthetic oligonucleotide
  Antisense strand to SEQ ID NO: 1904892
ucuguucauguuaacgccc

SEQ ID NO: 1904894 - RNA, 19 nt, Artificial Sequence
  Description of Artificial Sequence: Synthetic oligonucleotide
  Sense strand starting at position 662 of SEQ ID NO: 1879408
agagcucugaacggaguua

SEQ ID NO: 1904895 - RNA, 19 nt, Artificial Sequence
  Description of Artificial Sequence: Synthetic oligonucleotide
  Antisense strand to SEQ ID NO: 1904894
uaacuccguucagagcucu

SEQ ID NO: 1904896 - RNA, 19 nt, Artificial Sequence
  Description of Artificial Sequence: Synthetic oligonucleotide
  Sense strand starting at position 673 of SEQ ID NO: 1879408
cggaguuacagucagagga

SEQ ID NO: 1904897 - RNA, 19 nt, Artificial Sequence
  Description of Artificial Sequence: Synthetic oligonucleotide
  Antisense strand to SEQ ID NO: 1904896
uccucugacuguaacuccg

SEQ ID NO: 1904898 - RNA, 19 nt, Artificial Sequence
  Description of Artificial Sequence: Synthetic oligonucleotide
  Sense strand starting at position 723 of SEQ ID NO: 1879408
cgcuauuuccucugcagau

SEQ ID NO: 1904899 - RNA, 19 nt, Artificial Sequence
  Description of Artificial Sequence: Synthetic oligonucleotide
  Antisense strand to SEQ ID NO: 1904898
aucugcagaggaaauagcg

SEQ ID NO: 1904900 - RNA, 19 nt, Artificial Sequence
  Description of Artificial Sequence: Synthetic oligonucleotide
  Sense strand starting at position 724 of SEQ ID NO: 1879408
gcuauuuccucugcagaua

SEQ ID NO: 1904901 - RNA, 19 nt, Artificial Sequence
  Description of Artificial Sequence: Synthetic oligonucleotide
  Antisense strand to SEQ ID NO: 1904900
uaucugcagaggaaauagc

SEQ ID NO: 1904902 - RNA, 19 nt, Artificial Sequence
  Description of Artificial Sequence: Synthetic oligonucleotide
  Sense strand starting at position 758 of SEQ ID NO: 1879408
gaaaguuugccagaguaga

SEQ ID NO: 1904903 - RNA, 19 nt, Artificial Sequence
  Description of Artificial Sequence: Synthetic oligonucleotide
  Antisense strand to SEQ ID NO: 1904902
ucuacucuggcaaacuuuc

SEQ ID NO: 1904904 - RNA, 19 nt, Artificial Sequence
  Description of Artificial Sequence: Synthetic oligonucleotide
  Sense strand starting at position 947 of SEQ ID NO: 1879408
aggagaaugccuggcagau

SEQ ID NO: 1904905 - RNA, 19 nt, Artificial Sequence
  Description of Artificial Sequence: Synthetic oligonucleotide
  Antisense strand to SEQ ID NO: 1904904
aucugccaggcauucuccu

SEQ ID NO: 1904906 - RNA, 19 nt, Artificial Sequence
  Description of Artificial Sequence: Synthetic oligonucleotide
  Sense strand starting at position 959 of SEQ ID NO: 1879408
ggcagauaauaaguguuua

SEQ ID NO: 1904907 - RNA, 19 nt, Artificial Sequence
  Description of Artificial Sequence: Synthetic oligonucleotide
  Antisense strand to SEQ ID NO: 1904906
uaaacacuuauuaucugcc

SEQ ID NO: 1904908 - RNA, 19 nt, Artificial Sequence
  Description of Artificial Sequence: Synthetic oligonucleotide
  Sense strand starting at position 1071 of SEQ ID NO: 1879408
aggagaauguucucuccuu

SEQ ID NO: 1904909 - RNA, 19 nt, Artificial Sequence
  Description of Artificial Sequence: Synthetic oligonucleotide
  Antisense strand to SEQ ID NO: 1904908
aaggagagaacauucuccu

SEQ ID NO: 1904910 - RNA, 19 nt, Artificial Sequence
  Description of Artificial Sequence: Synthetic oligonucleotide
  Sense strand starting at position 1072 of SEQ ID NO: 1879408
ggagaauguucucuccuug

SEQ ID NO: 1904911 - RNA, 19 nt, Artificial Sequence
  Description of Artificial Sequence: Synthetic oligonucleotide
  Antisense strand to SEQ ID NO: 1904910
caaggagagaacauucucc

SEQ ID NO: 1904912 - RNA, 19 nt, Artificial Sequence
  Description of Artificial Sequence: Synthetic oligonucleotide
  Sense strand starting at position 1078 of SEQ ID NO: 1879408
uguucucuccuugaggaag

SEQ ID NO: 1904913 - RNA, 19 nt, Artificial Sequence
  Description of Artificial Sequence: Synthetic oligonucleotide
  Antisense strand to SEQ ID NO: 1904912
cuuccucaaggagagaaca

SEQ ID NO: 1904914 - RNA, 19 nt, Artificial Sequence
  Description of Artificial Sequence: Synthetic oligonucleotide
  Sense strand starting at position 1102 of SEQ ID NO: 1879408
ggaucuugucaucacugua

SEQ ID NO: 1904915 - RNA, 19 nt, Artificial Sequence
  Description of Artificial Sequence: Synthetic oligonucleotide
  Antisense strand to SEQ ID NO: 1904914
uacagugaugacaagaucc

SEQ ID NO: 1904916 - RNA, 19 nt, Artificial Sequence
  Description of Artificial Sequence: Synthetic oligonucleotide
  Sense strand starting at position 1107 of SEQ ID NO: 1879408
uugucaucacuguauaccu

SEQ ID NO: 1904917 - RNA, 19 nt, Artificial Sequence
  Description of Artificial Sequence: Synthetic oligonucleotide
  Antisense strand to SEQ ID NO: 1904916
agguauacagugaugacaa

SEQ ID NO: 1904918 - RNA, 19 nt, Artificial Sequence
  Description of Artificial Sequence: Synthetic oligonucleotide
  Sense strand starting at position 1261 of SEQ ID NO: 1879408
uugguuucugaacacucaa

SEQ ID NO: 1904919 - RNA, 19 nt, Artificial Sequence
  Description of Artificial Sequence: Synthetic oligonucleotide
  Antisense strand to SEQ ID NO: 1904918
uugaguguucagaaaccaa

SEQ ID NO: 1904920 - RNA, 19 nt, Artificial Sequence
  Description of Artificial Sequence: Synthetic oligonucleotide
  Sense strand starting at position 1338 of SEQ ID NO: 1879408
agcagcgaagucugaauuu

SEQ ID NO: 1904921 - RNA, 19 nt, Artificial Sequence
  Description of Artificial Sequence: Synthetic oligonucleotide
  Antisense strand to SEQ ID NO: 1904920
aaauucagacuucgcugcu

SEQ ID NO: 1904922 - RNA, 19 nt, Artificial Sequence
  Description of Artificial Sequence: Synthetic oligonucleotide
  Sense strand starting at position 1468 of SEQ ID NO: 1879408
ugcuucucacaggaaagua

SEQ ID NO: 1904923 - RNA, 19 nt, Artificial Sequence
  Description of Artificial Sequence: Synthetic oligonucleotide
  Antisense strand to SEQ ID NO: 1904922
uacuuuccugugagaagca

SEQ ID NO: 1904924 - RNA, 19 nt, Artificial Sequence
  Description of Artificial Sequence: Synthetic oligonucleotide
  Sense strand starting at position 1689 of SEQ ID NO: 1879408
cggaggaguuccgugauuu

SEQ ID NO: 1904925 - RNA, 19 nt, Artificial Sequence
  Description of Artificial Sequence: Synthetic oligonucleotide
  Antisense strand to SEQ ID NO: 1904924
aaaucacggaacuccuccg

SEQ ID NO: 1904926 - RNA, 19 nt, Artificial Sequence
  Description of Artificial Sequence: Synthetic oligonucleotide
  Sense strand starting at position 1693 of SEQ ID NO: 1879408
ggaguuccgugauuugcuu

SEQ ID NO: 1904927 - RNA, 19 nt, Artificial Sequence
  Description of Artificial Sequence: Synthetic oligonucleotide
  Antisense strand to SEQ ID NO: 1904926
aagcaaaucacggaacucc

SEQ ID NO: 1904928 - RNA, 19 nt, Artificial Sequence
  Description of Artificial Sequence: Synthetic oligonucleotide
  Sense strand starting at position 1752 of SEQ ID NO: 1879408
ucccgacuucgggauucuu

SEQ ID NO: 1904929 - RNA, 19 nt, Artificial Sequence
  Description of Artificial Sequence: Synthetic oligonucleotide
  Antisense strand to SEQ ID NO: 1904928
aagaaucccgaagucggga

SEQ ID NO: 1904930 - RNA, 19 nt, Artificial Sequence
  Description of Artificial Sequence: Synthetic oligonucleotide
  Sense strand starting at position 2123 of SEQ ID NO: 1879408
ccgaguuucggaucgccua

SEQ ID NO: 1904931 - RNA, 19 nt, Artificial Sequence
  Description of Artificial Sequence: Synthetic oligonucleotide
  Antisense strand to SEQ ID NO: 1904930
uaggcgauccgaaacucgg

SEQ ID NO: 1904932 - RNA, 19 nt, Artificial Sequence
  Description of Artificial Sequence: Synthetic oligonucleotide
  Sense strand starting at position 2288 of SEQ ID NO: 1879408
uccaguuucgggcaauaca

SEQ ID NO: 1904933 - RNA, 19 nt, Artificial Sequence
  Description of Artificial Sequence: Synthetic oligonucleotide
  Antisense strand to SEQ ID NO: 1904932
uguauugcccgaaacugga

SEQ ID NO: 1904934 - RNA, 19 nt, Artificial Sequence
  Description of Artificial Sequence: Synthetic oligonucleotide
  Sense strand starting at position 2291 of SEQ ID NO: 1879408
aguuucgggcaauacaaau

SEQ ID NO: 1904935 - RNA, 19 nt, Artificial Sequence
  Description of Artificial Sequence: Synthetic oligonucleotide
  Antisense strand to SEQ ID NO: 1904934
auuuguauugcccgaaacu

SEQ ID NO: 1904936 - RNA, 19 nt, Artificial Sequence
  Description of Artificial Sequence: Synthetic oligonucleotide
  Sense strand starting at position 2354 of SEQ ID NO: 1879408
uccugaacuugaccgagau

SEQ ID NO: 1904937 - RNA, 19 nt, Artificial Sequence
  Description of Artificial Sequence: Synthetic oligonucleotide
  Antisense strand to SEQ ID NO: 1904936
aucucggucaaguucagga

SEQ ID NO: 1904938 - RNA, 19 nt, Artificial Sequence
  Description of Artificial Sequence: Synthetic oligonucleotide
  Sense strand starting at position 3035 of SEQ ID NO: 1879408
gggugacaucaugggcuau

SEQ ID NO: 1904939 - RNA, 19 nt, Artificial Sequence
  Description of Artificial Sequence: Synthetic oligonucleotide
  Antisense strand to SEQ ID NO: 1904938
auagcccaugaugucaccc

SEQ ID NO: 1904940 - RNA, 19 nt, Artificial Sequence
  Description of Artificial Sequence: Synthetic oligonucleotide
  Sense strand starting at position 3755 of SEQ ID NO: 1879408
aagugaguucgccugcgga

SEQ ID NO: 1904941 - RNA, 19 nt, Artificial Sequence
  Description of Artificial Sequence: Synthetic oligonucleotide
  Antisense strand to SEQ ID NO: 1904940
uccgcaggcgaacucacuu

SEQ ID NO: 1904942 - RNA, 19 nt, Artificial Sequence
  Description of Artificial Sequence: Synthetic oligonucleotide
  Sense strand starting at position 3757 of SEQ ID NO: 1879408
gugaguucgccugcggacu

SEQ ID NO: 1904943 - RNA, 19 nt, Artificial Sequence
  Description of Artificial Sequence: Synthetic oligonucleotide
  Antisense strand to SEQ ID NO: 1904942
aguccgcaggcgaacucac

SEQ ID NO: 1904944 - RNA, 19 nt, Artificial Sequence
  Description of Artificial Sequence: Synthetic oligonucleotide
  Sense strand starting at position 3794 of SEQ ID NO: 1879408
cgaagagcgcucagugagu

SEQ ID NO: 1904945 - RNA, 19 nt, Artificial Sequence
  Description of Artificial Sequence: Synthetic oligonucleotide
  Antisense strand to SEQ ID NO: 1904944
acucacugagcgcucuucg

SEQ ID NO: 1904946 - RNA, 19 nt, Artificial Sequence
  Description of Artificial Sequence: Synthetic oligonucleotide
  Sense strand starting at position 3842 of SEQ ID NO: 1879408
gcgcgagucgacaaguaag

SEQ ID NO: 1904947 - RNA, 19 nt, Artificial Sequence
  Description of Artificial Sequence: Synthetic oligonucleotide
  Antisense strand to SEQ ID NO: 1904946
cuuacuugucgacucgcgc

SEQ ID NO: 1904948 - RNA, 19 nt, Artificial Sequence
  Description of Artificial Sequence: Synthetic oligonucleotide
  Sense strand starting at position 3845 of SEQ ID NO: 1879408
cgagucgacaaguaagagu

SEQ ID NO: 1904949 - RNA, 19 nt, Artificial Sequence
  Description of Artificial Sequence: Synthetic oligonucleotide
  Antisense strand to SEQ ID NO: 1904948
acucuuacuugucgacucg

SEQ ID NO: 1904950 - RNA, 19 nt, Artificial Sequence
  Description of Artificial Sequence: Synthetic oligonucleotide
  Sense strand starting at position 3956 of SEQ ID NO: 1879408
agagaaacuuucccuguca

SEQ ID NO: 1904951 - RNA, 19 nt, Artificial Sequence
  Description of Artificial Sequence: Synthetic oligonucleotide
  Antisense strand to SEQ ID NO: 1904950
ugacagggaaaguuucucu

SEQ ID NO: 1904952 - RNA, 19 nt, Artificial Sequence
  Description of Artificial Sequence: Synthetic oligonucleotide
  Sense strand starting at position 23 of SEQ ID NO: 1879409
guuccagaaaugugggaca

SEQ ID NO: 1904953 - RNA, 19 nt, Artificial Sequence
  Description of Artificial Sequence: Synthetic oligonucleotide
  Antisense strand to SEQ ID NO: 1904952
ugucccacauuucuggaac

SEQ ID NO: 1904954 - RNA, 19 nt, Artificial Sequence
  Description of Artificial Sequence: Synthetic oligonucleotide
  Sense strand starting at position 36 of SEQ ID NO: 1879409
gggacaugugagcauagua

SEQ ID NO: 1904955 - RNA, 19 nt, Artificial Sequence
  Description of Artificial Sequence: Synthetic oligonucleotide
  Antisense strand to SEQ ID NO: 1904954
uacuaugcucacauguccc

SEQ ID NO: 1904956 - RNA, 19 nt, Artificial Sequence
  Description of Artificial Sequence: Synthetic oligonucleotide
  Sense strand starting at position 74 of SEQ ID NO: 1879409
gcaagcucugguugaaucu

SEQ ID NO: 1904957 - RNA, 19 nt, Artificial Sequence
  Description of Artificial Sequence: Synthetic oligonucleotide
  Antisense strand to SEQ ID NO: 1904956
agauucaaccagagcuugc

SEQ ID NO: 1904958 - RNA, 19 nt, Artificial Sequence
  Description of Artificial Sequence: Synthetic oligonucleotide
  Sense strand starting at position 121 of SEQ ID NO: 1879409
auagauuaugaaugcccaa

SEQ ID NO: 1904959 - RNA, 19 nt, Artificial Sequence
  Description of Artificial Sequence: Synthetic oligonucleotide
  Antisense strand to SEQ ID NO: 1904958
uugggcauucauaaucuau

SEQ ID NO: 1904960 - RNA, 19 nt, Artificial Sequence
  Description of Artificial Sequence: Synthetic oligonucleotide
  Sense strand starting at position 156 of SEQ ID NO: 1879409
cuaacucagccucgagaga

SEQ ID NO: 1904961 - RNA, 19 nt, Artificial Sequence
  Description of Artificial Sequence: Synthetic oligonucleotide
  Antisense strand to SEQ ID NO: 1904960
ucucucgaggcugaguuag

SEQ ID NO: 1904962 - RNA, 19 nt, Artificial Sequence
  Description of Artificial Sequence: Synthetic oligonucleotide
  Sense strand starting at position 157 of SEQ ID NO: 1879409
uaacucagccucgagagaa

SEQ ID NO: 1904963 - RNA, 19 nt, Artificial Sequence
  Description of Artificial Sequence: Synthetic oligonucleotide
  Antisense strand to SEQ ID NO: 1904962
uucucucgaggcugaguua

SEQ ID NO: 1904964 - RNA, 19 nt, Artificial Sequence
  Description of Artificial Sequence: Synthetic oligonucleotide
  Sense strand starting at position 167 of SEQ ID NO: 1879409
ucgagagaauggucagcau

SEQ ID NO: 1904965 - RNA, 19 nt, Artificial Sequence
  Description of Artificial Sequence: Synthetic oligonucleotide
  Antisense strand to SEQ ID NO: 1904964
augcugaccauucucucga

SEQ ID NO: 1904966 - RNA, 19 nt, Artificial Sequence
  Description of Artificial Sequence: Synthetic oligonucleotide
  Sense strand starting at position 171 of SEQ ID NO: 1879409
gagaauggucagcauaggu

SEQ ID NO: 1904967 - RNA, 19 nt, Artificial Sequence
  Description of Artificial Sequence: Synthetic oligonucleotide
  Antisense strand to SEQ ID NO: 1904966
accuaugcugaccauucuc

SEQ ID NO: 1904968 - RNA, 19 nt, Artificial Sequence
  Description of Artificial Sequence: Synthetic oligonucleotide
  Sense strand starting at position 221 of SEQ ID NO: 1879409
ccuucaguagugugagaga

SEQ ID NO: 1904969 - RNA, 19 nt, Artificial Sequence
  Description of Artificial Sequence: Synthetic oligonucleotide
  Antisense strand to SEQ ID NO: 1904968
ucucucacacuacugaagg

SEQ ID NO: 1904970 - RNA, 19 nt, Artificial Sequence
  Description of Artificial Sequence: Synthetic oligonucleotide
  Sense strand starting at position 259 of SEQ ID NO: 1879409
ugguauagacaaugaugua

SEQ ID NO: 1904971 - RNA, 19 nt, Artificial Sequence
  Description of Artificial Sequence: Synthetic oligonucleotide
  Antisense strand to SEQ ID NO: 1904970
uacaucauugucuauacca

SEQ ID NO: 1904972 - RNA, 19 nt, Artificial Sequence
  Description of Artificial Sequence: Synthetic oligonucleotide
  Sense strand starting at position 266 of SEQ ID NO: 1879409
gacaaugauguaugcagga

SEQ ID NO: 1904973 - RNA, 19 nt, Artificial Sequence
  Description of Artificial Sequence: Synthetic oligonucleotide
  Antisense strand to SEQ ID NO: 1904972
uccugcauacaucauuguc

SEQ ID NO: 1904974 - RNA, 19 nt, Artificial Sequence
  Description of Artificial Sequence: Synthetic oligonucleotide
  Sense strand starting at position 398 of SEQ ID NO: 1879409
ggcuguagauuugcugaua

SEQ ID NO: 1904975 - RNA, 19 nt, Artificial Sequence
  Description of Artificial Sequence: Synthetic oligonucleotide
  Antisense strand to SEQ ID NO: 1904974
uaucagcaaaucuacagcc

SEQ ID NO: 1904976 - RNA, 19 nt, Artificial Sequence
  Description of Artificial Sequence: Synthetic oligonucleotide
  Sense strand starting at position 399 of SEQ ID NO: 1879409
gcuguagauuugcugauac

SEQ ID NO: 1904977 - RNA, 19 nt, Artificial Sequence
  Description of Artificial Sequence: Synthetic oligonucleotide
  Antisense strand to SEQ ID NO: 1904976
guaucagcaaaucuacagc

SEQ ID NO: 1904978 - RNA, 19 nt, Artificial Sequence
  Description of Artificial Sequence: Synthetic oligonucleotide
  Sense strand starting at position 403 of SEQ ID NO: 1879409
uagauuugcugauacuuag

SEQ ID NO: 1904979 - RNA, 19 nt, Artificial Sequence
  Description of Artificial Sequence: Synthetic oligonucleotide
  Antisense strand to SEQ ID NO: 1904978
cuaaguaucagcaaaucua

SEQ ID NO: 1904980 - RNA, 19 nt, Artificial Sequence
  Description of Artificial Sequence: Synthetic oligonucleotide
  Sense strand starting at position 497 of SEQ ID NO: 1879409
ggucuuaaacauuaggcaa

SEQ ID NO: 1904981 - RNA, 19 nt, Artificial Sequence
  Description of Artificial Sequence: Synthetic oligonucleotide
  Antisense strand to SEQ ID NO: 1904980
uugccuaauguuuaagacc

SEQ ID NO: 1904982 - RNA, 19 nt, Artificial Sequence
  Description of Artificial Sequence: Synthetic oligonucleotide
  Sense strand starting at position 668 of SEQ ID NO: 1879409
ugcaaccaucuagauagua

SEQ ID NO: 1904983 - RNA, 19 nt, Artificial Sequence
  Description of Artificial Sequence: Synthetic oligonucleotide
  Antisense strand to SEQ ID NO: 1904982
uacuaucuagaugguugca

SEQ ID NO: 1904984 - RNA, 19 nt, Artificial Sequence
  Description of Artificial Sequence: Synthetic oligonucleotide
  Sense strand starting at position 750 of SEQ ID NO: 1879409
gacggagugacugggaaau

SEQ ID NO: 1904985 - RNA, 19 nt, Artificial Sequence
  Description of Artificial Sequence: Synthetic oligonucleotide
  Antisense strand to SEQ ID NO: 1904984
auuucccagucacuccguc

SEQ ID NO: 1904986 - RNA, 19 nt, Artificial Sequence
  Description of Artificial Sequence: Synthetic oligonucleotide
  Sense strand starting at position 769 of SEQ ID NO: 1879409
gaugguaucgcugacagaa

SEQ ID NO: 1904987 - RNA, 19 nt, Artificial Sequence
  Description of Artificial Sequence: Synthetic oligonucleotide
  Antisense strand to SEQ ID NO: 1904986
uucugucagcgauaccauc

SEQ ID NO: 1904988 - RNA, 19 nt, Artificial Sequence
  Description of Artificial Sequence: Synthetic oligonucleotide
  Sense strand starting at position 793 of SEQ ID NO: 1879409
gaucaagagcuuuggagag

SEQ ID NO: 1904989 - RNA, 19 nt, Artificial Sequence
  Description of Artificial Sequence: Synthetic oligonucleotide
  Antisense strand to SEQ ID NO: 1904988
cucuccaaagcucuugauc

SEQ ID NO: 1904990 - RNA, 19 nt, Artificial Sequence
  Description of Artificial Sequence: Synthetic oligonucleotide
  Sense strand starting at position 1238 of SEQ ID NO: 1879409
cacgguguuggguagaagu

SEQ ID NO: 1904991 - RNA, 19 nt, Artificial Sequence
  Description of Artificial Sequence: Synthetic oligonucleotide
  Antisense strand to SEQ ID NO: 1904990
acuucuacccaacaccgug

SEQ ID NO: 1904992 - RNA, 19 nt, Artificial Sequence
  Description of Artificial Sequence: Synthetic oligonucleotide
  Sense strand starting at position 1240 of SEQ ID NO: 1879409
cgguguuggguagaaguua

SEQ ID NO: 1904993 - RNA, 19 nt, Artificial Sequence
  Description of Artificial Sequence: Synthetic oligonucleotide
  Antisense strand to SEQ ID NO: 1904992
uaacuucuacccaacaccg

SEQ ID NO: 1904994 - RNA, 19 nt, Artificial Sequence
  Description of Artificial Sequence: Synthetic oligonucleotide
  Sense strand starting at position 1241 of SEQ ID NO: 1879409
gguguuggguagaaguuau

SEQ ID NO: 1904995 - RNA, 19 nt, Artificial Sequence
  Description of Artificial Sequence: Synthetic oligonucleotide
  Antisense strand to SEQ ID NO: 1904994
auaacuucuacccaacacc

SEQ ID NO: 1904996 - RNA, 19 nt, Artificial Sequence
  Description of Artificial Sequence: Synthetic oligonucleotide
  Sense strand starting at position 1248 of SEQ ID NO: 1879409
gguagaaguuauccucauu

SEQ ID NO: 1904997 - RNA, 19 nt, Artificial Sequence
  Description of Artificial Sequence: Synthetic oligonucleotide
  Antisense strand to SEQ ID NO: 1904996
aaugaggauaacuucuacc

SEQ ID NO: 1904998 - RNA, 19 nt, Artificial Sequence
  Description of Artificial Sequence: Synthetic oligonucleotide
  Sense strand starting at position 1329 of SEQ ID NO: 1879409
aggccagauucuuucucga

SEQ ID NO: 1904999 - RNA, 19 nt, Artificial Sequence
  Description of Artificial Sequence: Synthetic oligonucleotide
  Antisense strand to SEQ ID NO: 1904998
ucgagaaagaaucuggccu

SEQ ID NO: 1905000 - RNA, 19 nt, Artificial Sequence
  Description of Artificial Sequence: Synthetic oligonucleotide
  Sense strand starting at position 1331 of SEQ ID NO: 1879409
gccagauucuuucucgaga

SEQ ID NO: 1905001 - RNA, 19 nt, Artificial Sequence
  Description of Artificial Sequence: Synthetic oligonucleotide
  Antisense strand to SEQ ID NO: 1905000
ucucgagaaagaaucuggc

SEQ ID NO: 1905002 - RNA, 19 nt, Artificial Sequence
  Description of Artificial Sequence: Synthetic oligonucleotide
  Sense strand starting at position 1332 of SEQ ID NO: 1879409
ccagauucuuucucgagaa

SEQ ID NO: 1905003 - RNA, 19 nt, Artificial Sequence
  Description of Artificial Sequence: Synthetic oligonucleotide
  Antisense strand to SEQ ID NO: 1905002
uucucgagaaagaaucugg

SEQ ID NO: 1905004 - RNA, 19 nt, Artificial Sequence
  Description of Artificial Sequence: Synthetic oligonucleotide
  Sense strand starting at position 1336 of SEQ ID NO: 1879409
auucuuucucgagaagguc

SEQ ID NO: 1905005 - RNA, 19 nt, Artificial Sequence
  Description of Artificial Sequence: Synthetic oligonucleotide
  Antisense strand to SEQ ID NO: 1905004
gaccuucucgagaaagaau

SEQ ID NO: 1905006 - RNA, 19 nt, Artificial Sequence
  Description of Artificial Sequence: Synthetic oligonucleotide
  Sense strand starting at position 1541 of SEQ ID NO: 1879409
cuugaaugguucucagcaa

SEQ ID NO: 1905007 - RNA, 19 nt, Artificial Sequence
  Description of Artificial Sequence: Synthetic oligonucleotide
  Antisense strand to SEQ ID NO: 1905006
uugcugagaaccauucaag

SEQ ID NO: 1905008 - RNA, 19 nt, Artificial Sequence
  Description of Artificial Sequence: Synthetic oligonucleotide
  Sense strand starting at position 1600 of SEQ ID NO: 1879409
gugggauuaccacggaaau

SEQ ID NO: 1905009 - RNA, 19 nt, Artificial Sequence
  Description of Artificial Sequence: Synthetic oligonucleotide
  Antisense strand to SEQ ID NO: 1905008
auuuccgugguaaucccac

SEQ ID NO: 1905010 - RNA, 19 nt, Artificial Sequence
  Description of Artificial Sequence: Synthetic oligonucleotide
  Sense strand starting at position 1656 of SEQ ID NO: 1879409
gaacccauuucgucuaguu

SEQ ID NO: 1905011 - RNA, 19 nt, Artificial Sequence
  Description of Artificial Sequence: Synthetic oligonucleotide
  Antisense strand to SEQ ID NO: 1905010
aacuagacgaaauggguuc

SEQ ID NO: 1905012 - RNA, 19 nt, Artificial Sequence
  Description of Artificial Sequence: Synthetic oligonucleotide
  Sense strand starting at position 1720 of SEQ ID NO: 1879409
agugguucugaccgugaau

SEQ ID NO: 1905013 - RNA, 19 nt, Artificial Sequence
  Description of Artificial Sequence: Synthetic oligonucleotide
  Antisense strand to SEQ ID NO: 1905012
auucacggucagaaccacu

SEQ ID NO: 1905014 - RNA, 19 nt, Artificial Sequence
  Description of Artificial Sequence: Synthetic oligonucleotide
  Sense strand starting at position 1723 of SEQ ID NO: 1879409
gguucugaccgugaauggu

SEQ ID NO: 1905015 - RNA, 19 nt, Artificial Sequence
  Description of Artificial Sequence: Synthetic oligonucleotide
  Antisense strand to SEQ ID NO: 1905014
accauucacggucagaacc

SEQ ID NO: 1905016 - RNA, 19 nt, Artificial Sequence
  Description of Artificial Sequence: Synthetic oligonucleotide
  Sense strand starting at position 1729 of SEQ ID NO: 1879409
gaccgugaaugguuggaaa

SEQ ID NO: 1905017 - RNA, 19 nt, Artificial Sequence
  Description of Artificial Sequence: Synthetic oligonucleotide
  Antisense strand to SEQ ID NO: 1905016
uuuccaaccauucacgguc

SEQ ID NO: 1905018 - RNA, 19 nt, Artificial Sequence
  Description of Artificial Sequence: Synthetic oligonucleotide
  Sense strand starting at position 2739 of SEQ ID NO: 1879409
cuggacccucgagaucuua

SEQ ID NO: 1905019 - RNA, 19 nt, Artificial Sequence
  Description of Artificial Sequence: Synthetic oligonucleotide
  Antisense strand to SEQ ID NO: 1905018
uaagaucucgaggguccag

SEQ ID NO: 1905020 - RNA, 19 nt, Artificial Sequence
  Description of Artificial Sequence: Synthetic oligonucleotide
  Sense strand starting at position 3228 of SEQ ID NO: 1879409
uaaggaagguucucugacu

SEQ ID NO: 1905021 - RNA, 19 nt, Artificial Sequence
  Description of Artificial Sequence: Synthetic oligonucleotide
  Antisense strand to SEQ ID NO: 1905020
agucagagaaccuuccuua

SEQ ID NO: 1905022 - RNA, 19 nt, Artificial Sequence
  Description of Artificial Sequence: Synthetic oligonucleotide
  Sense strand starting at position 3320 of SEQ ID NO: 1879409
cuuccuggcccugaaacuu

SEQ ID NO: 1905023 - RNA, 19 nt, Artificial Sequence
  Description of Artificial Sequence: Synthetic oligonucleotide
  Antisense strand to SEQ ID NO: 1905022
aaguuucagggccaggaag

SEQ ID NO: 1905024 - RNA, 19 nt, Artificial Sequence
  Description of Artificial Sequence: Synthetic oligonucleotide
  Sense strand starting at position 3444 of SEQ ID NO: 1879409
acccuagagcucuagaauc

SEQ ID NO: 1905025 - RNA, 19 nt, Artificial Sequence
  Description of Artificial Sequence: Synthetic oligonucleotide
  Antisense strand to SEQ ID NO: 1905024
gauucuagagcucuagggu

SEQ ID NO: 1905026 - RNA, 19 nt, Artificial Sequence
  Description of Artificial Sequence: Synthetic oligonucleotide
  Sense strand starting at position 3560 of SEQ ID NO: 1879409
uacacuuguccuggaagca

SEQ ID NO: 1905027 - RNA, 19 nt, Artificial Sequence
  Description of Artificial Sequence: Synthetic oligonucleotide
  Antisense strand to SEQ ID NO: 1905026
ugcuuccaggacaagugua

SEQ ID NO: 1905028 - RNA, 19 nt, Artificial Sequence
  Description of Artificial Sequence: Synthetic oligonucleotide
  Sense strand starting at position 3610 of SEQ ID NO: 1879409
uuucucugcuaaguggaaa

SEQ ID NO: 1905029 - RNA, 19 nt, Artificial Sequence
  Description of Artificial Sequence: Synthetic oligonucleotide
  Antisense strand to SEQ ID NO: 1905028
uuuccacuuagcagagaaa

SEQ ID NO: 1905030 - RNA, 19 nt, Artificial Sequence
  Description of Artificial Sequence: Synthetic oligonucleotide
  Sense strand starting at position 3625 of SEQ ID NO: 1879409
gaaagaggguccuagaacu

SEQ ID NO: 1905031 - RNA, 19 nt, Artificial Sequence
  Description of Artificial Sequence: Synthetic oligonucleotide
  Antisense strand to SEQ ID NO: 1905030
aguucuaggacccucuuuc

SEQ ID NO: 1905032 - RNA, 19 nt, Artificial Sequence
  Description of Artificial Sequence: Synthetic oligonucleotide
  Sense strand starting at position 424 of SEQ ID NO: 1879410
agcacagucuuuguaauag

SEQ ID NO: 1905033 - RNA, 19 nt, Artificial Sequence
  Description of Artificial Sequence: Synthetic oligonucleotide
  Antisense strand to SEQ ID NO: 1905032
cuauuacaaagacugugcu

SEQ ID NO: 1905034 - RNA, 19 nt, Artificial Sequence
  Description of Artificial Sequence: Synthetic oligonucleotide
  Sense strand starting at position 484 of SEQ ID NO: 1879410
auaaguaaccagugguaua

SEQ ID NO: 1905035 - RNA, 19 nt, Artificial Sequence
  Description of Artificial Sequence: Synthetic oligonucleotide
  Antisense strand to SEQ ID NO: 1905034
uauaccacugguuacuuau

SEQ ID NO: 1905036 - RNA, 19 nt, Artificial Sequence
  Description of Artificial Sequence: Synthetic oligonucleotide
  Sense strand starting at position 601 of SEQ ID NO: 1879410
ucacauaauuauggaauga

SEQ ID NO: 1905037 - RNA, 19 nt, Artificial Sequence
  Description of Artificial Sequence: Synthetic oligonucleotide
  Antisense strand to SEQ ID NO: 1905036
ucauuccauaauuauguga

SEQ ID NO: 1905038 - RNA, 19 nt, Artificial Sequence
  Description of Artificial Sequence: Synthetic oligonucleotide
  Sense strand starting at position 612 of SEQ ID NO: 1879410
uggaaugacuccguuuaca

SEQ ID NO: 1905039 - RNA, 19 nt, Artificial Sequence
  Description of Artificial Sequence: Synthetic oligonucleotide
  Antisense strand to SEQ ID NO: 1905038
uguaaacggagucauucca

SEQ ID NO: 1905040 - RNA, 19 nt, Artificial Sequence
  Description of Artificial Sequence: Synthetic oligonucleotide
  Sense strand starting at position 672 of SEQ ID NO: 1879410
gaugcauacagagguggua

SEQ ID NO: 1905041 - RNA, 19 nt, Artificial Sequence
  Description of Artificial Sequence: Synthetic oligonucleotide
  Antisense strand to SEQ ID NO: 1905040
uaccaccucuguaugcauc

SEQ ID NO: 1905042 - RNA, 19 nt, Artificial Sequence
  Description of Artificial Sequence: Synthetic oligonucleotide
  Sense strand starting at position 674 of SEQ ID NO: 1879410
ugcauacagaggugguaaa

SEQ ID NO: 1905043 - RNA, 19 nt, Artificial Sequence
  Description of Artificial Sequence: Synthetic oligonucleotide
  Antisense strand to SEQ ID NO: 1905042
uuuaccaccucuguaugca

SEQ ID NO: 1905044 - RNA, 19 nt, Artificial Sequence
  Description of Artificial Sequence: Synthetic oligonucleotide
  Sense strand starting at position 822 of SEQ ID NO: 1879410
aaguuaggugauggauaca

SEQ ID NO: 1905045 - RNA, 19 nt, Artificial Sequence
  Description of Artificial Sequence: Synthetic oligonucleotide
  Antisense strand to SEQ ID NO: 1905044
uguauccaucaccuaacuu

SEQ ID NO: 1905046 - RNA, 19 nt, Artificial Sequence
  Description of Artificial Sequence: Synthetic oligonucleotide
  Sense strand starting at position 943 of SEQ ID NO: 1879410
uaggauacaugccuaugau

SEQ ID NO: 1905047 - RNA, 19 nt, Artificial Sequence
  Description of Artificial Sequence: Synthetic oligonucleotide
  Antisense strand to SEQ ID NO: 1905046
aucauaggcauguauccua

SEQ ID NO: 1905048 - RNA, 19 nt, Artificial Sequence
  Description of Artificial Sequence: Synthetic oligonucleotide
  Sense strand starting at position 946 of SEQ ID NO: 1879410
gauacaugccuaugaugag

SEQ ID NO: 1905049 - RNA, 19 nt, Artificial Sequence
  Description of Artificial Sequence: Synthetic oligonucleotide
  Antisense strand to SEQ ID NO: 1905048
cucaucauaggcauguauc

SEQ ID NO: 1905050 - RNA, 19 nt, Artificial Sequence
  Description of Artificial Sequence: Synthetic oligonucleotide
  Sense strand starting at position 968 of SEQ ID NO: 1879410
gagagaauguaacaaagga

SEQ ID NO: 1905051 - RNA, 19 nt, Artificial Sequence
  Description of Artificial Sequence: Synthetic oligonucleotide
  Antisense strand to SEQ ID NO: 1905050
uccuuuguuacauucucuc

SEQ ID NO: 1905052 - RNA, 19 nt, Artificial Sequence
  Description of Artificial Sequence: Synthetic oligonucleotide
  Sense strand starting at position 1213 of SEQ ID NO: 1879410
caguuuagccuuugcagaa

SEQ ID NO: 1905053 - RNA, 19 nt, Artificial Sequence
  Description of Artificial Sequence: Synthetic oligonucleotide
  Antisense strand to SEQ ID NO: 1905052
uucugcaaaggcuaaacug

SEQ ID NO: 1905054 - RNA, 19 nt, Artificial Sequence
  Description of Artificial Sequence: Synthetic oligonucleotide
  Sense strand starting at position 1214 of SEQ ID NO: 1879410
aguuuagccuuugcagaau

SEQ ID NO: 1905055 - RNA, 19 nt, Artificial Sequence
  Description of Artificial Sequence: Synthetic oligonucleotide
  Antisense strand to SEQ ID NO: 1905054
auucugcaaaggcuaaacu

SEQ ID NO: 1905056 - RNA, 19 nt, Artificial Sequence
  Description of Artificial Sequence: Synthetic oligonucleotide
  Sense strand starting at position 1225 of SEQ ID NO: 1879410
ugcagaauuucucaagggu

SEQ ID NO: 1905057 - RNA, 19 nt, Artificial Sequence
  Description of Artificial Sequence: Synthetic oligonucleotide
  Antisense strand to SEQ ID NO: 1905056
acccuugagaaauucugca

SEQ ID NO: 1905058 - RNA, 19 nt, Artificial Sequence
  Description of Artificial Sequence: Synthetic oligonucleotide
  Sense strand starting at position 1239 of SEQ ID NO: 1879410
aggguaacaucagcauaau

SEQ ID NO: 1905059 - RNA, 19 nt, Artificial Sequence
  Description of Artificial Sequence: Synthetic oligonucleotide
  Antisense strand to SEQ ID NO: 1905058
auuaugcugauguuacccu

SEQ ID NO: 1905060 - RNA, 19 nt, Artificial Sequence
  Description of Artificial Sequence: Synthetic oligonucleotide
  Sense strand starting at position 1267 of SEQ ID NO: 1879410
cuguaagcccgugagugua

SEQ ID NO: 1905061 - RNA, 19 nt, Artificial Sequence
  Description of Artificial Sequence: Synthetic oligonucleotide
  Antisense strand to SEQ ID NO: 1905060
uacacucacgggcuuacag

SEQ ID NO: 1905062 - RNA, 19 nt, Artificial Sequence
  Description of Artificial Sequence: Synthetic oligonucleotide
  Sense strand starting at position 1280 of SEQ ID NO: 1879410
aguguaagccuguaaagug

SEQ ID NO: 1905063 - RNA, 19 nt, Artificial Sequence
  Description of Artificial Sequence: Synthetic oligonucleotide
  Antisense strand to SEQ ID NO: 1905062
cacuuuacaggcuuacacu

SEQ ID NO: 1905064 - RNA, 19 nt, Artificial Sequence
  Description of Artificial Sequence: Synthetic oligonucleotide
  Sense strand starting at position 1301 of SEQ ID NO: 1879410
gugcucaugcgagggauca

SEQ ID NO: 1905065 - RNA, 19 nt, Artificial Sequence
  Description of Artificial Sequence: Synthetic oligonucleotide
  Antisense strand to SEQ ID NO: 1905064
ugaucccucgcaugagcac

SEQ ID NO: 1905066 - RNA, 19 nt, Artificial Sequence
  Description of Artificial Sequence: Synthetic oligonucleotide
  Sense strand starting at position 1317 of SEQ ID NO: 1879410
ucaggucugaccugggaaa

SEQ ID NO: 1905067 - RNA, 19 nt, Artificial Sequence
  Description of Artificial Sequence: Synthetic oligonucleotide
  Antisense strand to SEQ ID NO: 1905066
uuucccaggucagaccuga

SEQ ID NO: 1905068 - RNA, 19 nt, Artificial Sequence
  Description of Artificial Sequence: Synthetic oligonucleotide
  Sense strand starting at position 1319 of SEQ ID NO: 1879410
aggucugaccugggaaacu

SEQ ID NO: 1905069 - RNA, 19 nt, Artificial Sequence
  Description of Artificial Sequence: Synthetic oligonucleotide
  Antisense strand to SEQ ID NO: 1905068
aguuucccaggucagaccu

SEQ ID NO: 1905070 - RNA, 19 nt, Artificial Sequence
  Description of Artificial Sequence: Synthetic oligonucleotide
  Sense strand starting at position 1386 of SEQ ID NO: 1879410
ugaguucugcgguaugggu

SEQ ID NO: 1905071 - RNA, 19 nt, Artificial Sequence
  Description of Artificial Sequence: Synthetic oligonucleotide
  Antisense strand to SEQ ID NO: 1905070
acccauaccgcagaacuca

SEQ ID NO: 1905072 - RNA, 19 nt, Artificial Sequence
  Description of Artificial Sequence: Synthetic oligonucleotide
  Sense strand starting at position 1393 of SEQ ID NO: 1879410
ugcgguaugggugacagua

SEQ ID NO: 1905073 - RNA, 19 nt, Artificial Sequence
  Description of Artificial Sequence: Synthetic oligonucleotide
  Antisense strand to SEQ ID NO: 1905072
uacugucacccauaccgca

SEQ ID NO: 1905074 - RNA, 19 nt, Artificial Sequence
  Description of Artificial Sequence: Synthetic oligonucleotide
  Sense strand starting at position 1407 of SEQ ID NO: 1879410
caguauucuuguguggaca

SEQ ID NO: 1905075 - RNA, 19 nt, Artificial Sequence
  Description of Artificial Sequence: Synthetic oligonucleotide
  Antisense strand to SEQ ID NO: 1905074
uguccacacaagaauacug

SEQ ID NO: 1905076 - RNA, 19 nt, Artificial Sequence
  Description of Artificial Sequence: Synthetic oligonucleotide
  Sense strand starting at position 1408 of SEQ ID NO: 1879410
aguauucuuguguggacag

SEQ ID NO: 1905077 - RNA, 19 nt, Artificial Sequence
  Description of Artificial Sequence: Synthetic oligonucleotide
  Antisense strand to SEQ ID NO: 1905076
cuguccacacaagaauacu

SEQ ID NO: 1905078 - RNA, 19 nt, Artificial Sequence
  Description of Artificial Sequence: Synthetic oligonucleotide
  Sense strand starting at position 1410 of SEQ ID NO: 1879410
uauucuuguguggacagua

SEQ ID NO: 1905079 - RNA, 19 nt, Artificial Sequence
  Description of Artificial Sequence: Synthetic oligonucleotide
  Antisense strand to SEQ ID NO: 1905078
uacuguccacacaagaaua

SEQ ID NO: 1905080 - RNA, 19 nt, Artificial Sequence
  Description of Artificial Sequence: Synthetic oligonucleotide
  Sense strand starting at position 1486 of SEQ ID NO: 1879410
ugugcaucugcugacugaa

SEQ ID NO: 1905081 - RNA, 19 nt, Artificial Sequence
  Description of Artificial Sequence: Synthetic oligonucleotide
  Antisense strand to SEQ ID NO: 1905080
uucagucagcagaugcaca

SEQ ID NO: 1905082 - RNA, 19 nt, Artificial Sequence
  Description of Artificial Sequence: Synthetic oligonucleotide
  Sense strand starting at position 1516 of SEQ ID NO: 1879410
guccuaguaaaguacagau

SEQ ID NO: 1905083 - RNA, 19 nt, Artificial Sequence
  Description of Artificial Sequence: Synthetic oligonucleotide
  Antisense strand to SEQ ID NO: 1905082
aucuguacuuuacuaggac

SEQ ID NO: 1905084 - RNA, 19 nt, Artificial Sequence
  Description of Artificial Sequence: Synthetic oligonucleotide
  Sense strand starting at position 1640 of SEQ ID NO: 1879410
ggauguaccugucuauaac

SEQ ID NO: 1905085 - RNA, 19 nt, Artificial Sequence
  Description of Artificial Sequence: Synthetic oligonucleotide
  Antisense strand to SEQ ID NO: 1905084
guuauagacagguacaucc

SEQ ID NO: 1905086 - RNA, 19 nt, Artificial Sequence
  Description of Artificial Sequence: Synthetic oligonucleotide
  Sense strand starting at position 1643 of SEQ ID NO: 1879410
uguaccugucuauaaccau

SEQ ID NO: 1905087 - RNA, 19 nt, Artificial Sequence
  Description of Artificial Sequence: Synthetic oligonucleotide
  Antisense strand to SEQ ID NO: 1905086
augguuauagacagguaca

SEQ ID NO: 1905088 - RNA, 19 nt, Artificial Sequence
  Description of Artificial Sequence: Synthetic oligonucleotide
  Sense strand starting at position 1761 of SEQ ID NO: 1879410
aguucuuagguccgagugu

SEQ ID NO: 1905089 - RNA, 19 nt, Artificial Sequence
  Description of Artificial Sequence: Synthetic oligonucleotide
  Antisense strand to SEQ ID NO: 1905088
acacucggaccuaagaacu

SEQ ID NO: 1905090 - RNA, 19 nt, Artificial Sequence
  Description of Artificial Sequence: Synthetic oligonucleotide
  Sense strand starting at position 1773 of SEQ ID NO: 1879410
cgaguguucgcggcuuuac

SEQ ID NO: 1905091 - RNA, 19 nt, Artificial Sequence
  Description of Artificial Sequence: Synthetic oligonucleotide
  Antisense strand to SEQ ID NO: 1905090
guaaagccgcgaacacucg

SEQ ID NO: 1905092 - RNA, 19 nt, Artificial Sequence
  Description of Artificial Sequence: Synthetic oligonucleotide
  Sense strand starting at position 1784 of SEQ ID NO: 1879410
ggcuuuaccuguccuggua

SEQ ID NO: 1905093 - RNA, 19 nt, Artificial Sequence
  Description of Artificial Sequence: Synthetic oligonucleotide
  Antisense strand to SEQ ID NO: 1905092
uaccaggacagguaaagcc

SEQ ID NO: 1905094 - RNA, 19 nt, Artificial Sequence
  Description of Artificial Sequence: Synthetic oligonucleotide
  Sense strand starting at position 1860 of SEQ ID NO: 1879410
cgugcuuaucuugcgcaua

SEQ ID NO: 1905095 - RNA, 19 nt, Artificial Sequence
  Description of Artificial Sequence: Synthetic oligonucleotide
  Antisense strand to SEQ ID NO: 1905094
uaugcgcaagauaagcacg

SEQ ID NO: 1905096 - RNA, 19 nt, Artificial Sequence
  Description of Artificial Sequence: Synthetic oligonucleotide
  Sense strand starting at position 2396 of SEQ ID NO: 1879410
ccagguuccugaucgggau

SEQ ID NO: 1905097 - RNA, 19 nt, Artificial Sequence
  Description of Artificial Sequence: Synthetic oligonucleotide
  Antisense strand to SEQ ID NO: 1905096
aucccgaucaggaaccugg

SEQ ID NO: 1905098 - RNA, 19 nt, Artificial Sequence
  Description of Artificial Sequence: Synthetic oligonucleotide
  Sense strand starting at position 2999 of SEQ ID NO: 1879410
cccuguugguuguucagua

SEQ ID NO: 1905099 - RNA, 19 nt, Artificial Sequence
  Description of Artificial Sequence: Synthetic oligonucleotide
  Antisense strand to SEQ ID NO: 1905098
uacugaacaaccaacaggg

SEQ ID NO: 1905100 - RNA, 19 nt, Artificial Sequence
  Description of Artificial Sequence: Synthetic oligonucleotide
  Sense strand starting at position 3495 of SEQ ID NO: 1879410
agguaagugucacuucugu

SEQ ID NO: 1905101 - RNA, 19 nt, Artificial Sequence
  Description of Artificial Sequence: Synthetic oligonucleotide
  Antisense strand to SEQ ID NO: 1905100
acagaagugacacuuaccu

SEQ ID NO: 1905102 - RNA, 19 nt, Artificial Sequence
  Description of Artificial Sequence: Synthetic oligonucleotide
  Sense strand starting at position 3597 of SEQ ID NO: 1879410
agaagugacuuccuucuua

SEQ ID NO: 1905103 - RNA, 19 nt, Artificial Sequence
  Description of Artificial Sequence: Synthetic oligonucleotide
  Antisense strand to SEQ ID NO: 1905102
uaagaaggaagucacuucu

SEQ ID NO: 1905104 - RNA, 19 nt, Artificial Sequence
  Description of Artificial Sequence: Synthetic oligonucleotide
  Sense strand starting at position 3601 of SEQ ID NO: 1879410
gugacuuccuucuuaggga

SEQ ID NO: 1905105 - RNA, 19 nt, Artificial Sequence
  Description of Artificial Sequence: Synthetic oligonucleotide
  Antisense strand to SEQ ID NO: 1905104
ucccuaagaaggaagucac

SEQ ID NO: 1905106 - RNA, 19 nt, Artificial Sequence
  Description of Artificial Sequence: Synthetic oligonucleotide
  Sense strand starting at position 3609 of SEQ ID NO: 1879410
cuucuuagggacuggucua

SEQ ID NO: 1905107 - RNA, 19 nt, Artificial Sequence
  Description of Artificial Sequence: Synthetic oligonucleotide
  Antisense strand to SEQ ID NO: 1905106
uagaccagucccuaagaag

SEQ ID NO: 1905108 - RNA, 19 nt, Artificial Sequence
  Description of Artificial Sequence: Synthetic oligonucleotide
  Sense strand starting at position 3663 of SEQ ID NO: 1879410
gcuacugguaagugacaga

SEQ ID NO: 1905109 - RNA, 19 nt, Artificial Sequence
  Description of Artificial Sequence: Synthetic oligonucleotide
  Antisense strand to SEQ ID NO: 1905108
ucugucacuuaccaguagc

SEQ ID NO: 1905110 - RNA, 19 nt, Artificial Sequence
  Description of Artificial Sequence: Synthetic oligonucleotide
  Sense strand starting at position 3972 of SEQ ID NO: 1879410
gaggccuucuugucucaga

SEQ ID NO: 1905111 - RNA, 19 nt, Artificial Sequence
  Description of Artificial Sequence: Synthetic oligonucleotide
  Antisense strand to SEQ ID NO: 1905110
ucugagacaagaaggccuc

SEQ ID NO: 1905112 - RNA, 19 nt, Artificial Sequence
  Description of Artificial Sequence: Synthetic oligonucleotide
  Sense strand starting at position 97 of SEQ ID NO: 1879411
uggauuuggguucguuuca

SEQ ID NO: 1905113 - RNA, 19 nt, Artificial Sequence
  Description of Artificial Sequence: Synthetic oligonucleotide
  Antisense strand to SEQ ID NO: 1905112
ugaaacgaacccaaaucca

SEQ ID NO: 1905114 - RNA, 19 nt, Artificial Sequence
  Description of Artificial Sequence: Synthetic oligonucleotide
  Sense strand starting at position 98 of SEQ ID NO: 1879411
ggauuuggguucguuucaa

SEQ ID NO: 1905115 - RNA, 19 nt, Artificial Sequence
  Description of Artificial Sequence: Synthetic oligonucleotide
  Antisense strand to SEQ ID NO: 1905114
uugaaacgaacccaaaucc

SEQ ID NO: 1905116 - RNA, 19 nt, Artificial Sequence
  Description of Artificial Sequence: Synthetic oligonucleotide
  Sense strand starting at position 1548 of SEQ ID NO: 1879411
gcagcagcugucgccaaau

SEQ ID NO: 1905117 - RNA, 19 nt, Artificial Sequence
  Description of Artificial Sequence: Synthetic oligonucleotide
  Antisense strand to SEQ ID NO: 1905116
auuuggcgacagcugcugc

SEQ ID NO: 1905118 - RNA, 19 nt, Artificial Sequence
  Description of Artificial Sequence: Synthetic oligonucleotide
  Sense strand starting at position 1550 of SEQ ID NO: 1879411
agcagcugucgccaaauga

SEQ ID NO: 1905119 - RNA, 19 nt, Artificial Sequence
  Description of Artificial Sequence: Synthetic oligonucleotide
  Antisense strand to SEQ ID NO: 1905118
ucauuuggcgacagcugcu

SEQ ID NO: 1905120 - RNA, 19 nt, Artificial Sequence
  Description of Artificial Sequence: Synthetic oligonucleotide
  Sense strand starting at position 459 of SEQ ID NO: 1879412
cagagaaccucuucggcaa

SEQ ID NO: 1905121 - RNA, 19 nt, Artificial Sequence
  Description of Artificial Sequence: Synthetic oligonucleotide
  Antisense strand to SEQ ID NO: 1905120
uugccgaagagguucucug

SEQ ID NO: 1905122 - RNA, 19 nt, Artificial Sequence
  Description of Artificial Sequence: Synthetic oligonucleotide
  Sense strand starting at position 463 of SEQ ID NO: 1879412
gaaccucuucggcaagguu

SEQ ID NO: 1905123 - RNA, 19 nt, Artificial Sequence
  Description of Artificial Sequence: Synthetic oligonucleotide
  Antisense strand to SEQ ID NO: 1905122
aaccuugccgaagagguuc

SEQ ID NO: 1905124 - RNA, 19 nt, Artificial Sequence
  Description of Artificial Sequence: Synthetic oligonucleotide
  Sense strand starting at position 770 of SEQ ID NO: 1879412
ggaggugauuaguuccaua

SEQ ID NO: 1905125 - RNA, 19 nt, Artificial Sequence
  Description of Artificial Sequence: Synthetic oligonucleotide
  Antisense strand to SEQ ID NO: 1905124
uauggaacuaaucaccucc

SEQ ID NO: 1905126 - RNA, 19 nt, Artificial Sequence
  Description of Artificial Sequence: Synthetic oligonucleotide
  Sense strand starting at position 848 of SEQ ID NO: 1879412
agcaguuuguaaccuugaa

SEQ ID NO: 1905127 - RNA, 19 nt, Artificial Sequence
  Description of Artificial Sequence: Synthetic oligonucleotide
  Antisense strand to SEQ ID NO: 1905126
uucaagguuacaaacugcu

SEQ ID NO: 1905128 - RNA, 19 nt, Artificial Sequence
  Description of Artificial Sequence: Synthetic oligonucleotide
  Sense strand starting at position 852 of SEQ ID NO: 1879412
guuuguaaccuugaaacac

SEQ ID NO: 1905129 - RNA, 19 nt, Artificial Sequence
  Description of Artificial Sequence: Synthetic oligonucleotide
  Antisense strand to SEQ ID NO: 1905128
guguuucaagguuacaaac

SEQ ID NO: 1905130 - RNA, 19 nt, Artificial Sequence
  Description of Artificial Sequence: Synthetic oligonucleotide
  Sense strand starting at position 1005 of SEQ ID NO: 1879412
gcuugucuucuuuaggaca

SEQ ID NO: 1905131 - RNA, 19 nt, Artificial Sequence
  Description of Artificial Sequence: Synthetic oligonucleotide
  Antisense strand to SEQ ID NO: 1905130
uguccuaaagaagacaagc

SEQ ID NO: 1905132 - RNA, 19 nt, Artificial Sequence
  Description of Artificial Sequence: Synthetic oligonucleotide
  Sense strand starting at position 1796 of SEQ ID NO: 1879412
aaagaugucgcaggacuuu

SEQ ID NO: 1905133 - RNA, 19 nt, Artificial Sequence
  Description of Artificial Sequence: Synthetic oligonucleotide
  Antisense strand to SEQ ID NO: 1905132
aaaguccugcgacaucuuu

SEQ ID NO: 1905134 - RNA, 19 nt, Artificial Sequence
  Description of Artificial Sequence: Synthetic oligonucleotide
  Sense strand starting at position 1878 of SEQ ID NO: 1879412
ggcuguuugaagggugaga

SEQ ID NO: 1905135 - RNA, 19 nt, Artificial Sequence
  Description of Artificial Sequence: Synthetic oligonucleotide
  Antisense strand to SEQ ID NO: 1905134
ucucacccuucaaacagcc

SEQ ID NO: 1905136 - RNA, 19 nt, Artificial Sequence
  Description of Artificial Sequence: Synthetic oligonucleotide
  Sense strand starting at position 1880 of SEQ ID NO: 1879412
cuguuugaagggugagaga

SEQ ID NO: 1905137 - RNA, 19 nt, Artificial Sequence
  Description of Artificial Sequence: Synthetic oligonucleotide
  Antisense strand to SEQ ID NO: 1905136
ucucucacccuucaaacag

SEQ ID NO: 1905138 - RNA, 19 nt, Artificial Sequence
  Description of Artificial Sequence: Synthetic oligonucleotide
  Sense strand starting at position 2170 of SEQ ID NO: 1879412
ucauacucuggcuaaaugu

SEQ ID NO: 1905139 - RNA, 19 nt, Artificial Sequence
  Description of Artificial Sequence: Synthetic oligonucleotide
  Antisense strand to SEQ ID NO: 1905138
acauuuagccagaguauga

SEQ ID NO: 1905140 - RNA, 19 nt, Artificial Sequence
  Description of Artificial Sequence: Synthetic oligonucleotide
  Sense strand starting at position 2205 of SEQ ID NO: 1879412
auuaaauuccaguggugau

SEQ ID NO: 1905141 - RNA, 19 nt, Artificial Sequence
  Description of Artificial Sequence: Synthetic oligonucleotide
  Antisense strand to SEQ ID NO: 1905140
aucaccacuggaauuuaau

SEQ ID NO: 1905142 - RNA, 19 nt, Artificial Sequence
  Description of Artificial Sequence: Synthetic oligonucleotide
  Sense strand starting at position 2223 of SEQ ID NO: 1879412
uugccugucagggagguaa

SEQ ID NO: 1905143 - RNA, 19 nt, Artificial Sequence
  Description of Artificial Sequence: Synthetic oligonucleotide
  Antisense strand to SEQ ID NO: 1905142
uuaccucccugacaggcaa

SEQ ID NO: 1905144 - RNA, 19 nt, Artificial Sequence
  Description of Artificial Sequence: Synthetic oligonucleotide
  Sense strand starting at position 2257 of SEQ ID NO: 1879412
agugaauacagucauggca

SEQ ID NO: 1905145 - RNA, 19 nt, Artificial Sequence
  Description of Artificial Sequence: Synthetic oligonucleotide
  Antisense strand to SEQ ID NO: 1905144
ugccaugacuguauucacu

SEQ ID NO: 1905146 - RNA, 19 nt, Artificial Sequence
  Description of Artificial Sequence: Synthetic oligonucleotide
  Sense strand starting at position 2260 of SEQ ID NO: 1879412
gaauacagucauggcauau

SEQ ID NO: 1905147 - RNA, 19 nt, Artificial Sequence
  Description of Artificial Sequence: Synthetic oligonucleotide
  Antisense strand to SEQ ID NO: 1905146
auaugccaugacuguauuc

SEQ ID NO: 1905148 - RNA, 19 nt, Artificial Sequence
  Description of Artificial Sequence: Synthetic oligonucleotide
  Sense strand starting at position 2405 of SEQ ID NO: 1879412
aguguuaagucuuugagga

SEQ ID NO: 1905149 - RNA, 19 nt, Artificial Sequence
  Description of Artificial Sequence: Synthetic oligonucleotide
  Antisense strand to SEQ ID NO: 1905148
uccucaaagacuuaacacu

SEQ ID NO: 1905150 - RNA, 19 nt, Artificial Sequence
  Description of Artificial Sequence: Synthetic oligonucleotide
  Sense strand starting at position 2406 of SEQ ID NO: 1879412
guguuaagucuuugaggaa

SEQ ID NO: 1905151 - RNA, 19 nt, Artificial Sequence
  Description of Artificial Sequence: Synthetic oligonucleotide
  Antisense strand to SEQ ID NO: 1905150
uuccucaaagacuuaacac

SEQ ID NO: 1905152 - RNA, 19 nt, Artificial Sequence
  Description of Artificial Sequence: Synthetic oligonucleotide
  Sense strand starting at position 2421 of SEQ ID NO: 1879412
ggaauagccuccuuaagga

SEQ ID NO: 1905153 - RNA, 19 nt, Artificial Sequence
  Description of Artificial Sequence: Synthetic oligonucleotide
  Antisense strand to SEQ ID NO: 1905152
uccuuaaggaggcuauucc

SEQ ID NO: 1905154 - RNA, 19 nt, Artificial Sequence
  Description of Artificial Sequence: Synthetic oligonucleotide
  Sense strand starting at position 2565 of SEQ ID NO: 1879412
gguguuuccguggcuugaa

SEQ ID NO: 1905155 - RNA, 19 nt, Artificial Sequence
  Description of Artificial Sequence: Synthetic oligonucleotide
  Antisense strand to SEQ ID NO: 1905154
uucaagccacggaaacacc

SEQ ID NO: 1905156 - RNA, 19 nt, Artificial Sequence
  Description of Artificial Sequence: Synthetic oligonucleotide
  Sense strand starting at position 2821 of SEQ ID NO: 1879412
gauguuuaugcugggauuc

SEQ ID NO: 1905157 - RNA, 19 nt, Artificial Sequence
  Description of Artificial Sequence: Synthetic oligonucleotide
  Antisense strand to SEQ ID NO: 1905156
gaaucccagcauaaacauc

SEQ ID NO: 1905158 - RNA, 19 nt, Artificial Sequence
  Description of Artificial Sequence: Synthetic oligonucleotide
  Sense strand starting at position 3138 of SEQ ID NO: 1879412
uuacuaggagcgggaaauu

SEQ ID NO: 1905159 - RNA, 19 nt, Artificial Sequence
  Description of Artificial Sequence: Synthetic oligonucleotide
  Antisense strand to SEQ ID NO: 1905158
aauuucccgcuccuaguaa

SEQ ID NO: 1905160 - RNA, 19 nt, Artificial Sequence
  Description of Artificial Sequence: Synthetic oligonucleotide
  Sense strand starting at position 3214 of SEQ ID NO: 1879412
ggaaauguguaauucuuag

SEQ ID NO: 1905161 - RNA, 19 nt, Artificial Sequence
  Description of Artificial Sequence: Synthetic oligonucleotide
  Antisense strand to SEQ ID NO: 1905160
cuaagaauuacacauuucc

SEQ ID NO: 1905162 - RNA, 19 nt, Artificial Sequence
  Description of Artificial Sequence: Synthetic oligonucleotide
  Sense strand starting at position 3340 of SEQ ID NO: 1879412
agaaacauuuccuacagga

SEQ ID NO: 1905163 - RNA, 19 nt, Artificial Sequence
  Description of Artificial Sequence: Synthetic oligonucleotide
  Antisense strand to SEQ ID NO: 1905162
uccuguaggaaauguuucu

SEQ ID NO: 1905164 - RNA, 19 nt, Artificial Sequence
  Description of Artificial Sequence: Synthetic oligonucleotide
  Sense strand starting at position 3410 of SEQ ID NO: 1879412
ugaagugugaaauggucaa

SEQ ID NO: 1905165 - RNA, 19 nt, Artificial Sequence
  Description of Artificial Sequence: Synthetic oligonucleotide
  Antisense strand to SEQ ID NO: 1905164
uugaccauuucacacuuca

SEQ ID NO: 1905166 - RNA, 19 nt, Artificial Sequence
  Description of Artificial Sequence: Synthetic oligonucleotide
  Sense strand starting at position 3414 of SEQ ID NO: 1879412
gugugaaauggucaauuau

SEQ ID NO: 1905167 - RNA, 19 nt, Artificial Sequence
  Description of Artificial Sequence: Synthetic oligonucleotide
  Antisense strand to SEQ ID NO: 1905166
auaauugaccauuucacac

SEQ ID NO: 1905168 - RNA, 19 nt, Artificial Sequence
  Description of Artificial Sequence: Synthetic oligonucleotide
  Sense strand starting at position 3423 of SEQ ID NO: 1879412
ggucaauuauaacuggaua

SEQ ID NO: 1905169 - RNA, 19 nt, Artificial Sequence
  Description of Artificial Sequence: Synthetic oligonucleotide
  Antisense strand to SEQ ID NO: 1905168
uauccaguuauaauugacc

SEQ ID NO: 1905170 - RNA, 19 nt, Artificial Sequence
  Description of Artificial Sequence: Synthetic oligonucleotide
  Sense strand starting at position 3441 of SEQ ID NO: 1879412
aaacaaaguugcuuggaua

SEQ ID NO: 1905171 - RNA, 19 nt, Artificial Sequence
  Description of Artificial Sequence: Synthetic oligonucleotide
  Antisense strand to SEQ ID NO: 1905170
uauccaagcaacuuuguuu

SEQ ID NO: 1905172 - RNA, 19 nt, Artificial Sequence
  Description of Artificial Sequence: Synthetic oligonucleotide
  Sense strand starting at position 3556 of SEQ ID NO: 1879412
ggaagaugacuuugugagc

SEQ ID NO: 1905173 - RNA, 19 nt, Artificial Sequence
  Description of Artificial Sequence: Synthetic oligonucleotide
  Antisense strand to SEQ ID NO: 1905172
gcucacaaagucaucuucc

SEQ ID NO: 1905174 - RNA, 19 nt, Artificial Sequence
  Description of Artificial Sequence: Synthetic oligonucleotide
  Sense strand starting at position 3557 of SEQ ID NO: 1879412
gaagaugacuuugugagca

SEQ ID NO: 1905175 - RNA, 19 nt, Artificial Sequence
  Description of Artificial Sequence: Synthetic oligonucleotide
  Antisense strand to SEQ ID NO: 1905174
ugcucacaaagucaucuuc

SEQ ID NO: 1905176 - RNA, 19 nt, Artificial Sequence
  Description of Artificial Sequence: Synthetic oligonucleotide
  Sense strand starting at position 3561 of SEQ ID NO: 1879412
augacuuugugagcaaauu

SEQ ID NO: 1905177 - RNA, 19 nt, Artificial Sequence
  Description of Artificial Sequence: Synthetic oligonucleotide
  Antisense strand to SEQ ID NO: 1905176
aauuugcucacaaagucau

SEQ ID NO: 1905178 - RNA, 19 nt, Artificial Sequence
  Description of Artificial Sequence: Synthetic oligonucleotide
  Sense strand starting at position 3562 of SEQ ID NO: 1879412
ugacuuugugagcaaauuc

SEQ ID NO: 1905179 - RNA, 19 nt, Artificial Sequence
  Description of Artificial Sequence: Synthetic oligonucleotide
  Antisense strand to SEQ ID NO: 1905178
gaauuugcucacaaaguca

SEQ ID NO: 1905180 - RNA, 19 nt, Artificial Sequence
  Description of Artificial Sequence: Synthetic oligonucleotide
  Sense strand starting at position 3693 of SEQ ID NO: 1879412
uugaauuucuaugagguag

SEQ ID NO: 1905181 - RNA, 19 nt, Artificial Sequence
  Description of Artificial Sequence: Synthetic oligonucleotide
  Antisense strand to SEQ ID NO: 1905180
cuaccucauagaaauucaa

SEQ ID NO: 1905182 - RNA, 19 nt, Artificial Sequence
  Description of Artificial Sequence: Synthetic oligonucleotide
  Sense strand starting at position 3695 of SEQ ID NO: 1879412
gaauuucuaugagguagac

SEQ ID NO: 1905183 - RNA, 19 nt, Artificial Sequence
  Description of Artificial Sequence: Synthetic oligonucleotide
  Antisense strand to SEQ ID NO: 1905182
gucuaccucauagaaauuc

SEQ ID NO: 1905184 - RNA, 19 nt, Artificial Sequence
  Description of Artificial Sequence: Synthetic oligonucleotide
  Sense strand starting at position 3753 of SEQ ID NO: 1879412
auuuaaucuugggaaauac

SEQ ID NO: 1905185 - RNA, 19 nt, Artificial Sequence
  Description of Artificial Sequence: Synthetic oligonucleotide
  Antisense strand to SEQ ID NO: 1905184
guauuucccaagauuaaau

SEQ ID NO: 1905186 - RNA, 19 nt, Artificial Sequence
  Description of Artificial Sequence: Synthetic oligonucleotide
  Sense strand starting at position 3858 of SEQ ID NO: 1879412
gcuugagauagguaucaca

SEQ ID NO: 1905187 - RNA, 19 nt, Artificial Sequence
  Description of Artificial Sequence: Synthetic oligonucleotide
  Antisense strand to SEQ ID NO: 1905186
ugugauaccuaucucaagc

SEQ ID NO: 1905188 - RNA, 19 nt, Artificial Sequence
  Description of Artificial Sequence: Synthetic oligonucleotide
  Sense strand starting at position 3868 of SEQ ID NO: 1879412
gguaucacacuuugaugca

SEQ ID NO: 1905189 - RNA, 19 nt, Artificial Sequence
  Description of Artificial Sequence: Synthetic oligonucleotide
  Antisense strand to SEQ ID NO: 1905188
ugcaucaaagugugauacc

SEQ ID NO: 1905190 - RNA, 19 nt, Artificial Sequence
  Description of Artificial Sequence: Synthetic oligonucleotide
  Sense strand starting at position 3899 of SEQ ID NO: 1879412
gcugaaauaucacuuauga

SEQ ID NO: 1905191 - RNA, 19 nt, Artificial Sequence
  Description of Artificial Sequence: Synthetic oligonucleotide
  Antisense strand to SEQ ID NO: 1905190
ucauaagugauauuucagc

SEQ ID NO: 1905192 - RNA, 19 nt, Artificial Sequence
  Description of Artificial Sequence: Synthetic oligonucleotide
  Sense strand starting at position 3912 of SEQ ID NO: 1879412
uuaugaaaccugugauucc

SEQ ID NO: 1905193 - RNA, 19 nt, Artificial Sequence
  Description of Artificial Sequence: Synthetic oligonucleotide
  Antisense strand to SEQ ID NO: 1905192
ggaaucacagguuucauaa

SEQ ID NO: 1905194 - RNA, 19 nt, Artificial Sequence
  Description of Artificial Sequence: Synthetic oligonucleotide
  Sense strand starting at position 3919 of SEQ ID NO: 1879412
accugugauuccuugacug

SEQ ID NO: 1905195 - RNA, 19 nt, Artificial Sequence
  Description of Artificial Sequence: Synthetic oligonucleotide
  Antisense strand to SEQ ID NO: 1905194
cagucaaggaaucacaggu

SEQ ID NO: 1905196 - RNA, 19 nt, Artificial Sequence
  Description of Artificial Sequence: Synthetic oligonucleotide
  Sense strand starting at position 3921 of SEQ ID NO: 1879412
cugugauuccuugacugag

SEQ ID NO: 1905197 - RNA, 19 nt, Artificial Sequence
  Description of Artificial Sequence: Synthetic oligonucleotide
  Antisense strand to SEQ ID NO: 1905196
cucagucaaggaaucacag

SEQ ID NO: 1905198 - RNA, 19 nt, Artificial Sequence
  Description of Artificial Sequence: Synthetic oligonucleotide
  Sense strand starting at position 3923 of SEQ ID NO: 1879412
gugauuccuugacugagag

SEQ ID NO: 1905199 - RNA, 19 nt, Artificial Sequence
  Description of Artificial Sequence: Synthetic oligonucleotide
  Antisense strand to SEQ ID NO: 1905198
cucucagucaaggaaucac

SEQ ID NO: 1905200 - RNA, 19 nt, Artificial Sequence
  Description of Artificial Sequence: Synthetic oligonucleotide
  Sense strand starting at position 28 of SEQ ID NO: 1879414
gguaauguuuaacucauaa

SEQ ID NO: 1905201 - RNA, 19 nt, Artificial Sequence
  Description of Artificial Sequence: Synthetic oligonucleotide
  Antisense strand to SEQ ID NO: 1905200
uuaugaguuaaacauuacc

SEQ ID NO: 1905202 - RNA, 19 nt, Artificial Sequence
  Description of Artificial Sequence: Synthetic oligonucleotide
  Sense strand starting at position 46 of SEQ ID NO: 1879414
aaaugaggauagucauucu

SEQ ID NO: 1905203 - RNA, 19 nt, Artificial Sequence
  Description of Artificial Sequence: Synthetic oligonucleotide
  Antisense strand to SEQ ID NO: 1905202
agaaugacuauccucauuu

SEQ ID NO: 1905204 - RNA, 19 nt, Artificial Sequence
  Description of Artificial Sequence: Synthetic oligonucleotide
  Sense strand starting at position 49 of SEQ ID NO: 1879414
ugaggauagucauucucua

SEQ ID NO: 1905205 - RNA, 19 nt, Artificial Sequence
  Description of Artificial Sequence: Synthetic oligonucleotide
  Antisense strand to SEQ ID NO: 1905204
uagagaaugacuauccuca

SEQ ID NO: 1905206 - RNA, 19 nt, Artificial Sequence
  Description of Artificial Sequence: Synthetic oligonucleotide
  Sense strand starting at position 137 of SEQ ID NO: 1879414
gcaggagguauugauaggu

SEQ ID NO: 1905207 - RNA, 19 nt, Artificial Sequence
  Description of Artificial Sequence: Synthetic oligonucleotide
  Antisense strand to SEQ ID NO: 1905206
accuaucaauaccuccugc

SEQ ID NO: 1905208 - RNA, 19 nt, Artificial Sequence
  Description of Artificial Sequence: Synthetic oligonucleotide
  Sense strand starting at position 141 of SEQ ID NO: 1879414
gagguauugauagguaaag

SEQ ID NO: 1905209 - RNA, 19 nt, Artificial Sequence
  Description of Artificial Sequence: Synthetic oligonucleotide
  Antisense strand to SEQ ID NO: 1905208
cuuuaccuaucaauaccuc

SEQ ID NO: 1905210 - RNA, 19 nt, Artificial Sequence
  Description of Artificial Sequence: Synthetic oligonucleotide
  Sense strand starting at position 147 of SEQ ID NO: 1879414
uugauagguaaaggaguau

SEQ ID NO: 1905211 - RNA, 19 nt, Artificial Sequence
  Description of Artificial Sequence: Synthetic oligonucleotide
  Antisense strand to SEQ ID NO: 1905210
auacuccuuuaccuaucaa

SEQ ID NO: 1905212 - RNA, 19 nt, Artificial Sequence
  Description of Artificial Sequence: Synthetic oligonucleotide
  Sense strand starting at position 158 of SEQ ID NO: 1879414
aggaguaucugguuugguu

SEQ ID NO: 1905213 - RNA, 19 nt, Artificial Sequence
  Description of Artificial Sequence: Synthetic oligonucleotide
  Antisense strand to SEQ ID NO: 1905212
aaccaaaccagauacuccu

SEQ ID NO: 1905214 - RNA, 19 nt, Artificial Sequence
  Description of Artificial Sequence: Synthetic oligonucleotide
  Sense strand starting at position 179 of SEQ ID NO: 1879414
uagucaaagggaugguuua

SEQ ID NO: 1905215 - RNA, 19 nt, Artificial Sequence
  Description of Artificial Sequence: Synthetic oligonucleotide
  Antisense strand to SEQ ID NO: 1905214
uaaaccaucccuuugacua

SEQ ID NO: 1905216 - RNA, 19 nt, Artificial Sequence
  Description of Artificial Sequence: Synthetic oligonucleotide
  Sense strand starting at position 469 of SEQ ID NO: 1879414
ccuuucugucuuggagaga

SEQ ID NO: 1905217 - RNA, 19 nt, Artificial Sequence
  Description of Artificial Sequence: Synthetic oligonucleotide
  Antisense strand to SEQ ID NO: 1905216
ucucuccaagacagaaagg

SEQ ID NO: 1905218 - RNA, 19 nt, Artificial Sequence
  Description of Artificial Sequence: Synthetic oligonucleotide
  Sense strand starting at position 564 of SEQ ID NO: 1879414
ugauuucuguaagaucaau

SEQ ID NO: 1905219 - RNA, 19 nt, Artificial Sequence
  Description of Artificial Sequence: Synthetic oligonucleotide
  Antisense strand to SEQ ID NO: 1905218
auugaucuuacagaaauca

SEQ ID NO: 1905220 - RNA, 19 nt, Artificial Sequence
  Description of Artificial Sequence: Synthetic oligonucleotide
  Sense strand starting at position 662 of SEQ ID NO: 1879414
ggacacuguagaugcauaa

SEQ ID NO: 1905221 - RNA, 19 nt, Artificial Sequence
  Description of Artificial Sequence: Synthetic oligonucleotide
  Antisense strand to SEQ ID NO: 1905220
uuaugcaucuacagugucc

SEQ ID NO: 1905222 - RNA, 19 nt, Artificial Sequence
  Description of Artificial Sequence: Synthetic oligonucleotide
  Sense strand starting at position 666 of SEQ ID NO: 1879414
acuguagaugcauaauagu

SEQ ID NO: 1905223 - RNA, 19 nt, Artificial Sequence
  Description of Artificial Sequence: Synthetic oligonucleotide
  Antisense strand to SEQ ID NO: 1905222
acuauuaugcaucuacagu

SEQ ID NO: 1905224 - RNA, 19 nt, Artificial Sequence
  Description of Artificial Sequence: Synthetic oligonucleotide
  Sense strand starting at position 703 of SEQ ID NO: 1879414
cucugugagcuaggaaguu

SEQ ID NO: 1905225 - RNA, 19 nt, Artificial Sequence
  Description of Artificial Sequence: Synthetic oligonucleotide
  Antisense strand to SEQ ID NO: 1905224
aacuuccuagcucacagag

SEQ ID NO: 1905226 - RNA, 19 nt, Artificial Sequence
  Description of Artificial Sequence: Synthetic oligonucleotide
  Sense strand starting at position 709 of SEQ ID NO: 1879414
gagcuaggaaguuguauuc

SEQ ID NO: 1905227 - RNA, 19 nt, Artificial Sequence
  Description of Artificial Sequence: Synthetic oligonucleotide
  Antisense strand to SEQ ID NO: 1905226
gaauacaacuuccuagcuc

SEQ ID NO: 1905228 - RNA, 19 nt, Artificial Sequence
  Description of Artificial Sequence: Synthetic oligonucleotide
  Sense strand starting at position 970 of SEQ ID NO: 1879414
ggaguagcaacauguauca

SEQ ID NO: 1905229 - RNA, 19 nt, Artificial Sequence
  Description of Artificial Sequence: Synthetic oligonucleotide
  Antisense strand to SEQ ID NO: 1905228
ugauacauguugcuacucc

SEQ ID NO: 1905230 - RNA, 19 nt, Artificial Sequence
  Description of Artificial Sequence: Synthetic oligonucleotide
  Sense strand starting at position 2295 of SEQ ID NO: 1879414
uggccagucgauuauuagu

SEQ ID NO: 1905231 - RNA, 19 nt, Artificial Sequence
  Description of Artificial Sequence: Synthetic oligonucleotide
  Antisense strand to SEQ ID NO: 1905230
acuaauaaucgacuggcca

SEQ ID NO: 1905232 - RNA, 19 nt, Artificial Sequence
  Description of Artificial Sequence: Synthetic oligonucleotide
  Sense strand starting at position 2331 of SEQ ID NO: 1879414
agaugcugucaucguauaa

SEQ ID NO: 1905233 - RNA, 19 nt, Artificial Sequence
  Description of Artificial Sequence: Synthetic oligonucleotide
  Antisense strand to SEQ ID NO: 1905232
uuauacgaugacagcaucu

SEQ ID NO: 1905234 - RNA, 19 nt, Artificial Sequence
  Description of Artificial Sequence: Synthetic oligonucleotide
  Sense strand starting at position 2335 of SEQ ID NO: 1879414
gcugucaucguauaaacau

SEQ ID NO: 1905235 - RNA, 19 nt, Artificial Sequence
  Description of Artificial Sequence: Synthetic oligonucleotide
  Antisense strand to SEQ ID NO: 1905234
auguuuauacgaugacagc

SEQ ID NO: 1905236 - RNA, 19 nt, Artificial Sequence
  Description of Artificial Sequence: Synthetic oligonucleotide
  Sense strand starting at position 2390 of SEQ ID NO: 1879414
aggugcucugucugggaaa

SEQ ID NO: 1905237 - RNA, 19 nt, Artificial Sequence
  Description of Artificial Sequence: Synthetic oligonucleotide
  Antisense strand to SEQ ID NO: 1905236
uuucccagacagagcaccu

SEQ ID NO: 1905238 - RNA, 19 nt, Artificial Sequence
  Description of Artificial Sequence: Synthetic oligonucleotide
  Sense strand starting at position 2392 of SEQ ID NO: 1879414
gugcucugucugggaaaca

SEQ ID NO: 1905239 - RNA, 19 nt, Artificial Sequence
  Description of Artificial Sequence: Synthetic oligonucleotide
  Antisense strand to SEQ ID NO: 1905238
uguuucccagacagagcac

SEQ ID NO: 1905240 - RNA, 19 nt, Artificial Sequence
  Description of Artificial Sequence: Synthetic oligonucleotide
  Sense strand starting at position 2557 of SEQ ID NO: 1879414
cuguuugaccucgaccaga

SEQ ID NO: 1905241 - RNA, 19 nt, Artificial Sequence
  Description of Artificial Sequence: Synthetic oligonucleotide
  Antisense strand to SEQ ID NO: 1905240
ucuggucgaggucaaacag

SEQ ID NO: 1905242 - RNA, 19 nt, Artificial Sequence
  Description of Artificial Sequence: Synthetic oligonucleotide
  Sense strand starting at position 2619 of SEQ ID NO: 1879414
uugguaucuccauguaauc

SEQ ID NO: 1905243 - RNA, 19 nt, Artificial Sequence
  Description of Artificial Sequence: Synthetic oligonucleotide
  Antisense strand to SEQ ID NO: 1905242
gauuacauggagauaccaa

SEQ ID NO: 1905244 - RNA, 19 nt, Artificial Sequence
  Description of Artificial Sequence: Synthetic oligonucleotide
  Sense strand starting at position 2790 of SEQ ID NO: 1879414
gcuugaagggucuguacca

SEQ ID NO: 1905245 - RNA, 19 nt, Artificial Sequence
  Description of Artificial Sequence: Synthetic oligonucleotide
  Antisense strand to SEQ ID NO: 1905244
ugguacagacccuucaagc

SEQ ID NO: 1905246 - RNA, 19 nt, Artificial Sequence
  Description of Artificial Sequence: Synthetic oligonucleotide
  Sense strand starting at position 2791 of SEQ ID NO: 1879414
cuugaagggucuguaccaa

SEQ ID NO: 1905247 - RNA, 19 nt, Artificial Sequence
  Description of Artificial Sequence: Synthetic oligonucleotide
  Antisense strand to SEQ ID NO: 1905246
uugguacagacccuucaag

SEQ ID NO: 1905248 - RNA, 19 nt, Artificial Sequence
  Description of Artificial Sequence: Synthetic oligonucleotide
  Sense strand starting at position 2799 of SEQ ID NO: 1879414
gucuguaccaaguggucau

SEQ ID NO: 1905249 - RNA, 19 nt, Artificial Sequence
  Description of Artificial Sequence: Synthetic oligonucleotide
  Antisense strand to SEQ ID NO: 1905248
augaccacuugguacagac

SEQ ID NO: 1905250 - RNA, 19 nt, Artificial Sequence
  Description of Artificial Sequence: Synthetic oligonucleotide
  Sense strand starting at position 2803 of SEQ ID NO: 1879414
guaccaaguggucaugguu

SEQ ID NO: 1905251 - RNA, 19 nt, Artificial Sequence
  Description of Artificial Sequence: Synthetic oligonucleotide
  Antisense strand to SEQ ID NO: 1905250
aaccaugaccacuugguac

SEQ ID NO: 1905252 - RNA, 19 nt, Artificial Sequence
  Description of Artificial Sequence: Synthetic oligonucleotide
  Sense strand starting at position 2812 of SEQ ID NO: 1879414
ggucaugguuccuuccaga

SEQ ID NO: 1905253 - RNA, 19 nt, Artificial Sequence
  Description of Artificial Sequence: Synthetic oligonucleotide
  Antisense strand to SEQ ID NO: 1905252
ucuggaaggaaccaugacc

SEQ ID NO: 1905254 - RNA, 19 nt, Artificial Sequence
  Description of Artificial Sequence: Synthetic oligonucleotide
  Sense strand starting at position 2832 of SEQ ID NO: 1879414
acagcaaaccgugauucua

SEQ ID NO: 1905255 - RNA, 19 nt, Artificial Sequence
  Description of Artificial Sequence: Synthetic oligonucleotide
  Antisense strand to SEQ ID NO: 1905254
uagaaucacgguuugcugu

SEQ ID NO: 1905256 - RNA, 19 nt, Artificial Sequence
  Description of Artificial Sequence: Synthetic oligonucleotide
  Sense strand starting at position 2987 of SEQ ID NO: 1879414
agcaaacguguuggaacau

SEQ ID NO: 1905257 - RNA, 19 nt, Artificial Sequence
  Description of Artificial Sequence: Synthetic oligonucleotide
  Antisense strand to SEQ ID NO: 1905256
auguuccaacacguuugcu

SEQ ID NO: 1905258 - RNA, 19 nt, Artificial Sequence
  Description of Artificial Sequence: Synthetic oligonucleotide
  Sense strand starting at position 3076 of SEQ ID NO: 1879414
uacagauuccauggcugga

SEQ ID NO: 1905259 - RNA, 19 nt, Artificial Sequence
  Description of Artificial Sequence: Synthetic oligonucleotide
  Antisense strand to SEQ ID NO: 1905258
uccagccauggaaucugua

SEQ ID NO: 1905260 - RNA, 19 nt, Artificial Sequence
  Description of Artificial Sequence: Synthetic oligonucleotide
  Sense strand starting at position 3150 of SEQ ID NO: 1879414
ccugacaauuguuuagacu

SEQ ID NO: 1905261 - RNA, 19 nt, Artificial Sequence
  Description of Artificial Sequence: Synthetic oligonucleotide
  Antisense strand to SEQ ID NO: 1905260
agucuaaacaauugucagg

SEQ ID NO: 1905262 - RNA, 19 nt, Artificial Sequence
  Description of Artificial Sequence: Synthetic oligonucleotide
  Sense strand starting at position 3151 of SEQ ID NO: 1879414
cugacaauuguuuagacuu

SEQ ID NO: 1905263 - RNA, 19 nt, Artificial Sequence
  Description of Artificial Sequence: Synthetic oligonucleotide
  Antisense strand to SEQ ID NO: 1905262
aagucuaaacaauugucag

SEQ ID NO: 1905264 - RNA, 19 nt, Artificial Sequence
  Description of Artificial Sequence: Synthetic oligonucleotide
  Sense strand starting at position 3193 of SEQ ID NO: 1879414
ccaacaguuuaucuggcua

SEQ ID NO: 1905265 - RNA, 19 nt, Artificial Sequence
  Description of Artificial Sequence: Synthetic oligonucleotide
  Antisense strand to SEQ ID NO: 1905264
uagccagauaaacuguugg

SEQ ID NO: 1905266 - RNA, 19 nt, Artificial Sequence
  Description of Artificial Sequence: Synthetic oligonucleotide
  Sense strand starting at position 3198 of SEQ ID NO: 1879414
aguuuaucuggcuaccagu

SEQ ID NO: 1905267 - RNA, 19 nt, Artificial Sequence
  Description of Artificial Sequence: Synthetic oligonucleotide
  Antisense strand to SEQ ID NO: 1905266
acugguagccagauaaacu

SEQ ID NO: 1905268 - RNA, 19 nt, Artificial Sequence
  Description of Artificial Sequence: Synthetic oligonucleotide
  Sense strand starting at position 3313 of SEQ ID NO: 1879414
ggucaugcugccuaguaac

SEQ ID NO: 1905269 - RNA, 19 nt, Artificial Sequence
  Description of Artificial Sequence: Synthetic oligonucleotide
  Antisense strand to SEQ ID NO: 1905268
guuacuaggcagcaugacc

SEQ ID NO: 1905270 - RNA, 19 nt, Artificial Sequence
  Description of Artificial Sequence: Synthetic oligonucleotide
  Sense strand starting at position 3482 of SEQ ID NO: 1879414
gaaagauguuggcaaggaa

SEQ ID NO: 1905271 - RNA, 19 nt, Artificial Sequence
  Description of Artificial Sequence: Synthetic oligonucleotide
  Antisense strand to SEQ ID NO: 1905270
uuccuugccaacaucuuuc

SEQ ID NO: 1905272 - RNA, 19 nt, Artificial Sequence
  Description of Artificial Sequence: Synthetic oligonucleotide
  Sense strand starting at position 3485 of SEQ ID NO: 1879414
agauguuggcaaggaaagu

SEQ ID NO: 1905273 - RNA, 19 nt, Artificial Sequence
  Description of Artificial Sequence: Synthetic oligonucleotide
  Antisense strand to SEQ ID NO: 1905272
acuuuccuugccaacaucu

SEQ ID NO: 1905274 - RNA, 19 nt, Artificial Sequence
  Description of Artificial Sequence: Synthetic oligonucleotide
  Sense strand starting at position 3538 of SEQ ID NO: 1879414
ucaccuaacucugagauga

SEQ ID NO: 1905275 - RNA, 19 nt, Artificial Sequence
  Description of Artificial Sequence: Synthetic oligonucleotide
  Antisense strand to SEQ ID NO: 1905274
ucaucucagaguuagguga

SEQ ID NO: 1905276 - RNA, 19 nt, Artificial Sequence
  Description of Artificial Sequence: Synthetic oligonucleotide
  Sense strand starting at position 3549 of SEQ ID NO: 1879414
ugagaugaaugcguuccuu

SEQ ID NO: 1905277 - RNA, 19 nt, Artificial Sequence
  Description of Artificial Sequence: Synthetic oligonucleotide
  Antisense strand to SEQ ID NO: 1905276
aaggaacgcauucaucuca

SEQ ID NO: 1905278 - RNA, 19 nt, Artificial Sequence
  Description of Artificial Sequence: Synthetic oligonucleotide
  Sense strand starting at position 3801 of SEQ ID NO: 1879414
gccagaccucuuuaugguu

SEQ ID NO: 1905279 - RNA, 19 nt, Artificial Sequence
  Description of Artificial Sequence: Synthetic oligonucleotide
  Antisense strand to SEQ ID NO: 1905278
aaccauaaagaggucuggc

SEQ ID NO: 1905280 - RNA, 19 nt, Artificial Sequence
  Description of Artificial Sequence: Synthetic oligonucleotide
  Sense strand starting at position 174 of SEQ ID NO: 1879413
gcugucaucguauaaacau

SEQ ID NO: 1905281 - RNA, 19 nt, Artificial Sequence
  Description of Artificial Sequence: Synthetic oligonucleotide
  Antisense strand to SEQ ID NO: 1905280
auguuuauacgaugacagc

SEQ ID NO: 1905282 - RNA, 19 nt, Artificial Sequence
  Description of Artificial Sequence: Synthetic oligonucleotide
  Sense strand starting at position 229 of SEQ ID NO: 1879413
aggugcucugucugggaaa

SEQ ID NO: 1905283 - RNA, 19 nt, Artificial Sequence
  Description of Artificial Sequence: Synthetic oligonucleotide
  Antisense strand to SEQ ID NO: 1905282
uuucccagacagagcaccu

SEQ ID NO: 1905284 - RNA, 19 nt, Artificial Sequence
  Description of Artificial Sequence: Synthetic oligonucleotide
  Sense strand starting at position 396 of SEQ ID NO: 1879413
cuguuugaccucgaccaga

SEQ ID NO: 1905285 - RNA, 19 nt, Artificial Sequence
  Description of Artificial Sequence: Synthetic oligonucleotide
  Antisense strand to SEQ ID NO: 1905284
ucuggucgaggucaaacag

SEQ ID NO: 1905286 - RNA, 19 nt, Artificial Sequence
  Description of Artificial Sequence: Synthetic oligonucleotide
  Sense strand starting at position 458 of SEQ ID NO: 1879413
uugguaucuccauguaauc

SEQ ID NO: 1905287 - RNA, 19 nt, Artificial Sequence
  Description of Artificial Sequence: Synthetic oligonucleotide
  Antisense strand to SEQ ID NO: 1905286
gauuacauggagauaccaa

SEQ ID NO: 1905288 - RNA, 19 nt, Artificial Sequence
  Description of Artificial Sequence: Synthetic oligonucleotide
  Sense strand starting at position 630 of SEQ ID NO: 1879413
cuugaagggucuguaccaa

SEQ ID NO: 1905289 - RNA, 19 nt, Artificial Sequence
  Description of Artificial Sequence: Synthetic oligonucleotide
  Antisense strand to SEQ ID NO: 1905288
uugguacagacccuucaag

SEQ ID NO: 1905290 - RNA, 19 nt, Artificial Sequence
  Description of Artificial Sequence: Synthetic oligonucleotide
  Sense strand starting at position 642 of SEQ ID NO: 1879413
guaccaaguggucaugguu

SEQ ID NO: 1905291 - RNA, 19 nt, Artificial Sequence
  Description of Artificial Sequence: Synthetic oligonucleotide
  Antisense strand to SEQ ID NO: 1905290
aaccaugaccacuugguac

SEQ ID NO: 1905292 - RNA, 19 nt, Artificial Sequence
  Description of Artificial Sequence: Synthetic oligonucleotide
  Sense strand starting at position 651 of SEQ ID NO: 1879413
ggucaugguuccuuccaga

SEQ ID NO: 1905293 - RNA, 19 nt, Artificial Sequence
  Description of Artificial Sequence: Synthetic oligonucleotide
  Antisense strand to SEQ ID NO: 1905292
ucuggaaggaaccaugacc

SEQ ID NO: 1905294 - RNA, 19 nt, Artificial Sequence
  Description of Artificial Sequence: Synthetic oligonucleotide
  Sense strand starting at position 671 of SEQ ID NO: 1879413
acagcaaaccgugauucua

SEQ ID NO: 1905295 - RNA, 19 nt, Artificial Sequence
  Description of Artificial Sequence: Synthetic oligonucleotide
  Antisense strand to SEQ ID NO: 1905294
uagaaucacgguuugcugu

SEQ ID NO: 1905296 - RNA, 19 nt, Artificial Sequence
  Description of Artificial Sequence: Synthetic oligonucleotide
  Sense strand starting at position 826 of SEQ ID NO: 1879413
agcaaacguguuggaacau

SEQ ID NO: 1905297 - RNA, 19 nt, Artificial Sequence
  Description of Artificial Sequence: Synthetic oligonucleotide
  Antisense strand to SEQ ID NO: 1905296
auguuccaacacguuugcu

SEQ ID NO: 1905298 - RNA, 19 nt, Artificial Sequence
  Description of Artificial Sequence: Synthetic oligonucleotide
  Sense strand starting at position 915 of SEQ ID NO: 1879413
uacagauuccauggcugga

SEQ ID NO: 1905299 - RNA, 19 nt, Artificial Sequence
  Description of Artificial Sequence: Synthetic oligonucleotide
  Antisense strand to SEQ ID NO: 1905298
uccagccauggaaucugua

SEQ ID NO: 1905300 - RNA, 19 nt, Artificial Sequence
  Description of Artificial Sequence: Synthetic oligonucleotide
  Sense strand starting at position 989 of SEQ ID NO: 1879413
ccugacaauuguuuagacu

SEQ ID NO: 1905301 - RNA, 19 nt, Artificial Sequence
  Description of Artificial Sequence: Synthetic oligonucleotide
  Antisense strand to SEQ ID NO: 1905300
agucuaaacaauugucagg

SEQ ID NO: 1905302 - RNA, 19 nt, Artificial Sequence
  Description of Artificial Sequence: Synthetic oligonucleotide
  Sense strand starting at position 990 of SEQ ID NO: 1879413
cugacaauuguuuagacuu

SEQ ID NO: 1905303 - RNA, 19 nt, Artificial Sequence
  Description of Artificial Sequence: Synthetic oligonucleotide
  Antisense strand to SEQ ID NO: 1905302
aagucuaaacaauugucag

SEQ ID NO: 1905304 - RNA, 19 nt, Artificial Sequence
  Description of Artificial Sequence: Synthetic oligonucleotide
  Sense strand starting at position 1032 of SEQ ID NO: 1879413
ccaacaguuuaucuggcua

SEQ ID NO: 1905305 - RNA, 19 nt, Artificial Sequence
  Description of Artificial Sequence: Synthetic oligonucleotide
  Antisense strand to SEQ ID NO: 1905304
uagccagauaaacuguugg

SEQ ID NO: 1905306 - RNA, 19 nt, Artificial Sequence
  Description of Artificial Sequence: Synthetic oligonucleotide
  Sense strand starting at position 1037 of SEQ ID NO: 1879413
aguuuaucuggcuaccagu

SEQ ID NO: 1905307 - RNA, 19 nt, Artificial Sequence
  Description of Artificial Sequence: Synthetic oligonucleotide
  Antisense strand to SEQ ID NO: 1905306
acugguagccagauaaacu

SEQ ID NO: 1905308 - RNA, 19 nt, Artificial Sequence
  Description of Artificial Sequence: Synthetic oligonucleotide
  Sense strand starting at position 1324 of SEQ ID NO: 1879413
agauguuggcaaggaaagu

SEQ ID NO: 1905309 - RNA, 19 nt, Artificial Sequence
  Description of Artificial Sequence: Synthetic oligonucleotide
  Antisense strand to SEQ ID NO: 1905308
acuuuccuugccaacaucu

SEQ ID NO: 1905310 - RNA, 19 nt, Artificial Sequence
  Description of Artificial Sequence: Synthetic oligonucleotide
  Sense strand starting at position 1640 of SEQ ID NO: 1879413
gccagaccucuuuaugguu

SEQ ID NO: 1905311 - RNA, 19 nt, Artificial Sequence
  Description of Artificial Sequence: Synthetic oligonucleotide
  Antisense strand to SEQ ID NO: 1905310
aaccauaaagaggucuggc

SEQ ID NO: 1905312 - RNA, 19 nt, Artificial Sequence
  Description of Artificial Sequence: Synthetic oligonucleotide
  Sense strand starting at position 2108 of SEQ ID NO: 1879413
gagcaauagcuccaguuag

SEQ ID NO: 1905313 - RNA, 19 nt, Artificial Sequence
  Description of Artificial Sequence: Synthetic oligonucleotide
  Antisense strand to SEQ ID NO: 1905312
cuaacuggagcuauugcuc

SEQ ID NO: 1905314 - RNA, 19 nt, Artificial Sequence
  Description of Artificial Sequence: Synthetic oligonucleotide
  Sense strand starting at position 2248 of SEQ ID NO: 1879413
agcuguauucugcagaaag

SEQ ID NO: 1905315 - RNA, 19 nt, Artificial Sequence
  Description of Artificial Sequence: Synthetic oligonucleotide
  Antisense strand to SEQ ID NO: 1905314
cuuucugcagaauacagcu

SEQ ID NO: 1905316 - RNA, 19 nt, Artificial Sequence
  Description of Artificial Sequence: Synthetic oligonucleotide
  Sense strand starting at position 2455 of SEQ ID NO: 1879413
uggugcuggccucacaaua

SEQ ID NO: 1905317 - RNA, 19 nt, Artificial Sequence
  Description of Artificial Sequence: Synthetic oligonucleotide
  Antisense strand to SEQ ID NO: 1905316
uauugugaggccagcacca

SEQ ID NO: 1905318 - RNA, 19 nt, Artificial Sequence
  Description of Artificial Sequence: Synthetic oligonucleotide
  Sense strand starting at position 2734 of SEQ ID NO: 1879413
uucucucuggacuaugauu

SEQ ID NO: 1905319 - RNA, 19 nt, Artificial Sequence
  Description of Artificial Sequence: Synthetic oligonucleotide
  Antisense strand to SEQ ID NO: 1905318
aaucauaguccagagagaa

SEQ ID NO: 1905320 - RNA, 19 nt, Artificial Sequence
  Description of Artificial Sequence: Synthetic oligonucleotide
  Sense strand starting at position 2888 of SEQ ID NO: 1879413
gccacuuuccaugagcacu

SEQ ID NO: 1905321 - RNA, 19 nt, Artificial Sequence
  Description of Artificial Sequence: Synthetic oligonucleotide
  Antisense strand to SEQ ID NO: 1905320
agugcucauggaaaguggc

SEQ ID NO: 1905322 - RNA, 19 nt, Artificial Sequence
  Description of Artificial Sequence: Synthetic oligonucleotide
  Sense strand starting at position 2935 of SEQ ID NO: 1879413
augauauauugucuccaug

SEQ ID NO: 1905323 - RNA, 19 nt, Artificial Sequence
  Description of Artificial Sequence: Synthetic oligonucleotide
  Antisense strand to SEQ ID NO: 1905322
cauggagacaauauaucau

SEQ ID NO: 1905324 - RNA, 19 nt, Artificial Sequence
  Description of Artificial Sequence: Synthetic oligonucleotide
  Sense strand starting at position 2952 of SEQ ID NO: 1879413
ugcagaaucuucucuaguc

SEQ ID NO: 1905325 - RNA, 19 nt, Artificial Sequence
  Description of Artificial Sequence: Synthetic oligonucleotide
  Antisense strand to SEQ ID NO: 1905324
gacuagagaagauucugca

SEQ ID NO: 1905326 - RNA, 19 nt, Artificial Sequence
  Description of Artificial Sequence: Synthetic oligonucleotide
  Sense strand starting at position 2953 of SEQ ID NO: 1879413
gcagaaucuucucuaguca

SEQ ID NO: 1905327 - RNA, 19 nt, Artificial Sequence
  Description of Artificial Sequence: Synthetic oligonucleotide
  Antisense strand to SEQ ID NO: 1905326
ugacuagagaagauucugc

SEQ ID NO: 1905328 - RNA, 19 nt, Artificial Sequence
  Description of Artificial Sequence: Synthetic oligonucleotide
  Sense strand starting at position 2964 of SEQ ID NO: 1879413
ucuagucaugacuagcuau

SEQ ID NO: 1905329 - RNA, 19 nt, Artificial Sequence
  Description of Artificial Sequence: Synthetic oligonucleotide
  Antisense strand to SEQ ID NO: 1905328
auagcuagucaugacuaga

SEQ ID NO: 1905330 - RNA, 19 nt, Artificial Sequence
  Description of Artificial Sequence: Synthetic oligonucleotide
  Sense strand starting at position 2971 of SEQ ID NO: 1879413
augacuagcuauccagaua

SEQ ID NO: 1905331 - RNA, 19 nt, Artificial Sequence
  Description of Artificial Sequence: Synthetic oligonucleotide
  Antisense strand to SEQ ID NO: 1905330
uaucuggauagcuagucau

SEQ ID NO: 1905332 - RNA, 19 nt, Artificial Sequence
  Description of Artificial Sequence: Synthetic oligonucleotide
  Sense strand starting at position 2974 of SEQ ID NO: 1879413
acuagcuauccagauagua

SEQ ID NO: 1905333 - RNA, 19 nt, Artificial Sequence
  Description of Artificial Sequence: Synthetic oligonucleotide
  Antisense strand to SEQ ID NO: 1905332
uacuaucuggauagcuagu

SEQ ID NO: 1905334 - RNA, 19 nt, Artificial Sequence
  Description of Artificial Sequence: Synthetic oligonucleotide
  Sense strand starting at position 3060 of SEQ ID NO: 1879413
cgcuucuggagugauugau

SEQ ID NO: 1905335 - RNA, 19 nt, Artificial Sequence
  Description of Artificial Sequence: Synthetic oligonucleotide
  Antisense strand to SEQ ID NO: 1905334
aucaaucacuccagaagcg

SEQ ID NO: 1905336 - RNA, 19 nt, Artificial Sequence
  Description of Artificial Sequence: Synthetic oligonucleotide
  Sense strand starting at position 3070 of SEQ ID NO: 1879413
gugauugauccagagaggc

SEQ ID NO: 1905337 - RNA, 19 nt, Artificial Sequence
  Description of Artificial Sequence: Synthetic oligonucleotide
  Antisense strand to SEQ ID NO: 1905336
gccucucuggaucaaucac

SEQ ID NO: 1905338 - RNA, 19 nt, Artificial Sequence
  Description of Artificial Sequence: Synthetic oligonucleotide
  Sense strand starting at position 3346 of SEQ ID NO: 1879413
agcaucaugcugggaacuu

SEQ ID NO: 1905339 - RNA, 19 nt, Artificial Sequence
  Description of Artificial Sequence: Synthetic oligonucleotide
  Antisense strand to SEQ ID NO: 1905338
aaguucccagcaugaugcu

SEQ ID NO: 1905340 - RNA, 19 nt, Artificial Sequence
  Description of Artificial Sequence: Synthetic oligonucleotide
  Sense strand starting at position 3504 of SEQ ID NO: 1879413
cacgucuucccugagagcu

SEQ ID NO: 1905341 - RNA, 19 nt, Artificial Sequence
  Description of Artificial Sequence: Synthetic oligonucleotide
  Antisense strand to SEQ ID NO: 1905340
agcucucagggaagacgug

SEQ ID NO: 1905342 - RNA, 19 nt, Artificial Sequence
  Description of Artificial Sequence: Synthetic oligonucleotide
  Sense strand starting at position 3514 of SEQ ID NO: 1879413
cugagagcucuuggaccau

SEQ ID NO: 1905343 - RNA, 19 nt, Artificial Sequence
  Description of Artificial Sequence: Synthetic oligonucleotide
  Antisense strand to SEQ ID NO: 1905342
augguccaagagcucucag

SEQ ID NO: 1905344 - RNA, 19 nt, Artificial Sequence
  Description of Artificial Sequence: Synthetic oligonucleotide
  Sense strand starting at position 3703 of SEQ ID NO: 1879413
agagauguccuguacaccu

SEQ ID NO: 1905345 - RNA, 19 nt, Artificial Sequence
  Description of Artificial Sequence: Synthetic oligonucleotide
  Antisense strand to SEQ ID NO: 1905344
agguguacaggacaucucu

SEQ ID NO: 1905346 - RNA, 19 nt, Artificial Sequence
  Description of Artificial Sequence: Synthetic oligonucleotide
  Sense strand starting at position 3731 of SEQ ID NO: 1879413
guguuagaauacucuguau

SEQ ID NO: 1905347 - RNA, 19 nt, Artificial Sequence
  Description of Artificial Sequence: Synthetic oligonucleotide
  Antisense strand to SEQ ID NO: 1905346
auacagaguauucuaacac

SEQ ID NO: 1905348 - RNA, 19 nt, Artificial Sequence
  Description of Artificial Sequence: Synthetic oligonucleotide
  Sense strand starting at position 3733 of SEQ ID NO: 1879413
guuagaauacucuguauau

SEQ ID NO: 1905349 - RNA, 19 nt, Artificial Sequence
  Description of Artificial Sequence: Synthetic oligonucleotide
  Antisense strand to SEQ ID NO: 1905348
auauacagaguauucuaac

SEQ ID NO: 1905350 - RNA, 19 nt, Artificial Sequence
  Description of Artificial Sequence: Synthetic oligonucleotide
  Sense strand starting at position 3772 of SEQ ID NO: 1879413
cugugagcucuuugaauga

SEQ ID NO: 1905351 - RNA, 19 nt, Artificial Sequence
  Description of Artificial Sequence: Synthetic oligonucleotide
  Antisense strand to SEQ ID NO: 1905350
ucauucaaagagcucacag

SEQ ID NO: 1905352 - RNA, 19 nt, Artificial Sequence
  Description of Artificial Sequence: Synthetic oligonucleotide
  Sense strand starting at position 3776 of SEQ ID NO: 1879413
gagcucuuugaaugagagu

SEQ ID NO: 1905353 - RNA, 19 nt, Artificial Sequence
  Description of Artificial Sequence: Synthetic oligonucleotide
  Antisense strand to SEQ ID NO: 1905352
acucucauucaaagagcuc

SEQ ID NO: 1905354 - RNA, 19 nt, Artificial Sequence
  Description of Artificial Sequence: Synthetic oligonucleotide
  Sense strand starting at position 3787 of SEQ ID NO: 1879413
augagagucuuguucaggu

SEQ ID NO: 1905355 - RNA, 19 nt, Artificial Sequence
  Description of Artificial Sequence: Synthetic oligonucleotide
  Antisense strand to SEQ ID NO: 1905354
accugaacaagacucucau

SEQ ID NO: 1905356 - RNA, 19 nt, Artificial Sequence
  Description of Artificial Sequence: Synthetic oligonucleotide
  Sense strand starting at position 3855 of SEQ ID NO: 1879413
acaacaccucuguguucua

SEQ ID NO: 1905357 - RNA, 19 nt, Artificial Sequence
  Description of Artificial Sequence: Synthetic oligonucleotide
  Antisense strand to SEQ ID NO: 1905356
uagaacacagagguguugu

SEQ ID NO: 1905358 - RNA, 19 nt, Artificial Sequence
  Description of Artificial Sequence: Synthetic oligonucleotide
  Sense strand starting at position 3858 of SEQ ID NO: 1879413
acaccucuguguucuaaga

SEQ ID NO: 1905359 - RNA, 19 nt, Artificial Sequence
  Description of Artificial Sequence: Synthetic oligonucleotide
  Antisense strand to SEQ ID NO: 1905358
ucuuagaacacagaggugu

SEQ ID NO: 1905360 - RNA, 19 nt, Artificial Sequence
  Description of Artificial Sequence: Synthetic oligonucleotide
  Sense strand starting at position 23 of SEQ ID NO: 1879415
uuguaaucaucucaaggac

SEQ ID NO: 1905361 - RNA, 19 nt, Artificial Sequence
  Description of Artificial Sequence: Synthetic oligonucleotide
  Antisense strand to SEQ ID NO: 1905360
guccuugagaugauuacaa

SEQ ID NO: 1905362 - RNA, 19 nt, Artificial Sequence
  Description of Artificial Sequence: Synthetic oligonucleotide
  Sense strand starting at position 66 of SEQ ID NO: 1879415
ccgugcuacagaugaggaa

SEQ ID NO: 1905363 - RNA, 19 nt, Artificial Sequence
  Description of Artificial Sequence: Synthetic oligonucleotide
  Antisense strand to SEQ ID NO: 1905362
uuccucaucuguagcacgg

SEQ ID NO: 1905364 - RNA, 19 nt, Artificial Sequence
  Description of Artificial Sequence: Synthetic oligonucleotide
  Sense strand starting at position 141 of SEQ ID NO: 1879415
agguuaagaucccaagucu

SEQ ID NO: 1905365 - RNA, 19 nt, Artificial Sequence
  Description of Artificial Sequence: Synthetic oligonucleotide
  Antisense strand to SEQ ID NO: 1905364
agacuugggaucuuaaccu

SEQ ID NO: 1905366 - RNA, 19 nt, Artificial Sequence
  Description of Artificial Sequence: Synthetic oligonucleotide
  Sense strand starting at position 193 of SEQ ID NO: 1879415
agagcuuuccagugcagag

SEQ ID NO: 1905367 - RNA, 19 nt, Artificial Sequence
  Description of Artificial Sequence: Synthetic oligonucleotide
  Antisense strand to SEQ ID NO: 1905366
cucugcacuggaaagcucu

SEQ ID NO: 1905368 - RNA, 19 nt, Artificial Sequence
  Description of Artificial Sequence: Synthetic oligonucleotide
  Sense strand starting at position 243 of SEQ ID NO: 1879415
cccuucucugagcaauaga

SEQ ID NO: 1905369 - RNA, 19 nt, Artificial Sequence
  Description of Artificial Sequence: Synthetic oligonucleotide
  Antisense strand to SEQ ID NO: 1905368
ucuauugcucagagaaggg

SEQ ID NO: 1905370 - RNA, 19 nt, Artificial Sequence
  Description of Artificial Sequence: Synthetic oligonucleotide
  Sense strand starting at position 278 of SEQ ID NO: 1879415
agcucauuccaggauguga

SEQ ID NO: 1905371 - RNA, 19 nt, Artificial Sequence
  Description of Artificial Sequence: Synthetic oligonucleotide
  Antisense strand to SEQ ID NO: 1905370
ucacauccuggaaugagcu

SEQ ID NO: 1905372 - RNA, 19 nt, Artificial Sequence
  Description of Artificial Sequence: Synthetic oligonucleotide
  Sense strand starting at position 287 of SEQ ID NO: 1879415
caggaugugagucauagug

SEQ ID NO: 1905373 - RNA, 19 nt, Artificial Sequence
  Description of Artificial Sequence: Synthetic oligonucleotide
  Antisense strand to SEQ ID NO: 1905372
cacuaugacucacauccug

SEQ ID NO: 1905374 - RNA, 19 nt, Artificial Sequence
  Description of Artificial Sequence: Synthetic oligonucleotide
  Sense strand starting at position 289 of SEQ ID NO: 1879415
ggaugugagucauagugag

SEQ ID NO: 1905375 - RNA, 19 nt, Artificial Sequence
  Description of Artificial Sequence: Synthetic oligonucleotide
  Antisense strand to SEQ ID NO: 1905374
cucacuaugacucacaucc

SEQ ID NO: 1905376 - RNA, 19 nt, Artificial Sequence
  Description of Artificial Sequence: Synthetic oligonucleotide
  Sense strand starting at position 301 of SEQ ID NO: 1879415
uagugagaagcccaaguua

SEQ ID NO: 1905377 - RNA, 19 nt, Artificial Sequence
  Description of Artificial Sequence: Synthetic oligonucleotide
  Antisense strand to SEQ ID NO: 1905376
uaacuugggcuucucacua

SEQ ID NO: 1905378 - RNA, 19 nt, Artificial Sequence
  Description of Artificial Sequence: Synthetic oligonucleotide
  Sense strand starting at position 310 of SEQ ID NO: 1879415
gcccaaguuaaucacgaga

SEQ ID NO: 1905379 - RNA, 19 nt, Artificial Sequence
  Description of Artificial Sequence: Synthetic oligonucleotide
  Antisense strand to SEQ ID NO: 1905378
ucucgugauuaacuugggc

SEQ ID NO: 1905380 - RNA, 19 nt, Artificial Sequence
  Description of Artificial Sequence: Synthetic oligonucleotide
  Sense strand starting at position 312 of SEQ ID NO: 1879415
ccaaguuaaucacgagaca

SEQ ID NO: 1905381 - RNA, 19 nt, Artificial Sequence
  Description of Artificial Sequence: Synthetic oligonucleotide
  Antisense strand to SEQ ID NO: 1905380
ugucucgugauuaacuugg

SEQ ID NO: 1905382 - RNA, 19 nt, Artificial Sequence
  Description of Artificial Sequence: Synthetic oligonucleotide
  Sense strand starting at position 335 of SEQ ID NO: 1879415
aggcucuaacuuggagaaa

SEQ ID NO: 1905383 - RNA, 19 nt, Artificial Sequence
  Description of Artificial Sequence: Synthetic oligonucleotide
  Antisense strand to SEQ ID NO: 1905382
uuucuccaaguuagagccu

SEQ ID NO: 1905384 - RNA, 19 nt, Artificial Sequence
  Description of Artificial Sequence: Synthetic oligonucleotide
  Sense strand starting at position 336 of SEQ ID NO: 1879415
ggcucuaacuuggagaaau

SEQ ID NO: 1905385 - RNA, 19 nt, Artificial Sequence
  Description of Artificial Sequence: Synthetic oligonucleotide
  Antisense strand to SEQ ID NO: 1905384
auuucuccaaguuagagcc

SEQ ID NO: 1905386 - RNA, 19 nt, Artificial Sequence
  Description of Artificial Sequence: Synthetic oligonucleotide
  Sense strand starting at position 433 of SEQ ID NO: 1879415
gaggauaucguccgucacu

SEQ ID NO: 1905387 - RNA, 19 nt, Artificial Sequence
  Description of Artificial Sequence: Synthetic oligonucleotide
  Antisense strand to SEQ ID NO: 1905386
agugacggacgauauccuc

SEQ ID NO: 1905388 - RNA, 19 nt, Artificial Sequence
  Description of Artificial Sequence: Synthetic oligonucleotide
  Sense strand starting at position 537 of SEQ ID NO: 1879415
caccaaacuccaggugaga

SEQ ID NO: 1905389 - RNA, 19 nt, Artificial Sequence
  Description of Artificial Sequence: Synthetic oligonucleotide
  Antisense strand to SEQ ID NO: 1905388
ucucaccuggaguuuggug

SEQ ID NO: 1905390 - RNA, 19 nt, Artificial Sequence
  Description of Artificial Sequence: Synthetic oligonucleotide
  Sense strand starting at position 552 of SEQ ID NO: 1879415
gagagucagcagugacuuu

SEQ ID NO: 1905391 - RNA, 19 nt, Artificial Sequence
  Description of Artificial Sequence: Synthetic oligonucleotide
  Antisense strand to SEQ ID NO: 1905390
aaagucacugcugacucuc

SEQ ID NO: 1905392 - RNA, 19 nt, Artificial Sequence
  Description of Artificial Sequence: Synthetic oligonucleotide
  Sense strand starting at position 674 of SEQ ID NO: 1879415
gagcgaauucgccaccaag

SEQ ID NO: 1905393 - RNA, 19 nt, Artificial Sequence
  Description of Artificial Sequence: Synthetic oligonucleotide
  Antisense strand to SEQ ID NO: 1905392
cuugguggcgaauucgcuc

SEQ ID NO: 1905394 - RNA, 19 nt, Artificial Sequence
  Description of Artificial Sequence: Synthetic oligonucleotide
  Sense strand starting at position 702 of SEQ ID NO: 1879415
cagccaaagcguucugcau

SEQ ID NO: 1905395 - RNA, 19 nt, Artificial Sequence
  Description of Artificial Sequence: Synthetic oligonucleotide
  Antisense strand to SEQ ID NO: 1905394
augcagaacgcuuuggcug

SEQ ID NO: 1905396 - RNA, 19 nt, Artificial Sequence
  Description of Artificial Sequence: Synthetic oligonucleotide
  Sense strand starting at position 800 of SEQ ID NO: 1879415
ccuguucucuucguaguca

SEQ ID NO: 1905397 - RNA, 19 nt, Artificial Sequence
  Description of Artificial Sequence: Synthetic oligonucleotide
  Antisense strand to SEQ ID NO: 1905396
ugacuacgaagagaacagg

SEQ ID NO: 1905398 - RNA, 19 nt, Artificial Sequence
  Description of Artificial Sequence: Synthetic oligonucleotide
  Sense strand starting at position 804 of SEQ ID NO: 1879415
uucucuucguagucacaca

SEQ ID NO: 1905399 - RNA, 19 nt, Artificial Sequence
  Description of Artificial Sequence: Synthetic oligonucleotide
  Antisense strand to SEQ ID NO: 1905398
ugugugacuacgaagagaa

SEQ ID NO: 1905400 - RNA, 19 nt, Artificial Sequence
  Description of Artificial Sequence: Synthetic oligonucleotide
  Sense strand starting at position 828 of SEQ ID NO: 1879415
cgucauuacuuucuccuua

SEQ ID NO: 1905401 - RNA, 19 nt, Artificial Sequence
  Description of Artificial Sequence: Synthetic oligonucleotide
  Antisense strand to SEQ ID NO: 1905400
uaaggagaaaguaaugacg

SEQ ID NO: 1905402 - RNA, 19 nt, Artificial Sequence
  Description of Artificial Sequence: Synthetic oligonucleotide
  Sense strand starting at position 1490 of SEQ ID NO: 1879415
ucacauauaucauuagguu

SEQ ID NO: 1905403 - RNA, 19 nt, Artificial Sequence
  Description of Artificial Sequence: Synthetic oligonucleotide
  Antisense strand to SEQ ID NO: 1905402
aaccuaaugauauauguga

SEQ ID NO: 1905404 - RNA, 19 nt, Artificial Sequence
  Description of Artificial Sequence: Synthetic oligonucleotide
  Sense strand starting at position 1829 of SEQ ID NO: 1879415
uguggaguccuuuacacag

SEQ ID NO: 1905405 - RNA, 19 nt, Artificial Sequence
  Description of Artificial Sequence: Synthetic oligonucleotide
  Antisense strand to SEQ ID NO: 1905404
cuguguaaaggacuccaca

SEQ ID NO: 1905406 - RNA, 19 nt, Artificial Sequence
  Description of Artificial Sequence: Synthetic oligonucleotide
  Sense strand starting at position 1831 of SEQ ID NO: 1879415
uggaguccuuuacacagua

SEQ ID NO: 1905407 - RNA, 19 nt, Artificial Sequence
  Description of Artificial Sequence: Synthetic oligonucleotide
  Antisense strand to SEQ ID NO: 1905406
uacuguguaaaggacucca

SEQ ID NO: 1905408 - RNA, 19 nt, Artificial Sequence
  Description of Artificial Sequence: Synthetic oligonucleotide
  Sense strand starting at position 1933 of SEQ ID NO: 1879415
cuacaacagucguaauuau

SEQ ID NO: 1905409 - RNA, 19 nt, Artificial Sequence
  Description of Artificial Sequence: Synthetic oligonucleotide
  Antisense strand to SEQ ID NO: 1905408
auaauuacgacuguuguag

SEQ ID NO: 1905410 - RNA, 19 nt, Artificial Sequence
  Description of Artificial Sequence: Synthetic oligonucleotide
  Sense strand starting at position 2269 of SEQ ID NO: 1879415
gacccagaguccugaccau

SEQ ID NO: 1905411 - RNA, 19 nt, Artificial Sequence
  Description of Artificial Sequence: Synthetic oligonucleotide
  Antisense strand to SEQ ID NO: 1905410
auggucaggacucuggguc

SEQ ID NO: 1905412 - RNA, 19 nt, Artificial Sequence
  Description of Artificial Sequence: Synthetic oligonucleotide
  Sense strand starting at position 2389 of SEQ ID NO: 1879415
cugggaugcucucuugaug

SEQ ID NO: 1905413 - RNA, 19 nt, Artificial Sequence
  Description of Artificial Sequence: Synthetic oligonucleotide
  Antisense strand to SEQ ID NO: 1905412
caucaagagagcaucccag

SEQ ID NO: 1905414 - RNA, 19 nt, Artificial Sequence
  Description of Artificial Sequence: Synthetic oligonucleotide
  Sense strand starting at position 2398 of SEQ ID NO: 1879415
ucucuugaugccugcuuua

SEQ ID NO: 1905415 - RNA, 19 nt, Artificial Sequence
  Description of Artificial Sequence: Synthetic oligonucleotide
  Antisense strand to SEQ ID NO: 1905414
uaaagcaggcaucaagaga

SEQ ID NO: 1905416 - RNA, 19 nt, Artificial Sequence
  Description of Artificial Sequence: Synthetic oligonucleotide
  Sense strand starting at position 2401 of SEQ ID NO: 1879415
cuugaugccugcuuuauuu

SEQ ID NO: 1905417 - RNA, 19 nt, Artificial Sequence
  Description of Artificial Sequence: Synthetic oligonucleotide
  Antisense strand to SEQ ID NO: 1905416
aaauaaagcaggcaucaag

SEQ ID NO: 1905418 - RNA, 19 nt, Artificial Sequence
  Description of Artificial Sequence: Synthetic oligonucleotide
  Sense strand starting at position 2749 of SEQ ID NO: 1879415
gccucucucgugggaaaga

SEQ ID NO: 1905419 - RNA, 19 nt, Artificial Sequence
  Description of Artificial Sequence: Synthetic oligonucleotide
  Antisense strand to SEQ ID NO: 1905418
ucuuucccacgagagaggc

SEQ ID NO: 1905420 - RNA, 19 nt, Artificial Sequence
  Description of Artificial Sequence: Synthetic oligonucleotide
  Sense strand starting at position 2750 of SEQ ID NO: 1879415
ccucucucgugggaaagaa

SEQ ID NO: 1905421 - RNA, 19 nt, Artificial Sequence
  Description of Artificial Sequence: Synthetic oligonucleotide
  Antisense strand to SEQ ID NO: 1905420
uucuuucccacgagagagg

SEQ ID NO: 1905422 - RNA, 19 nt, Artificial Sequence
  Description of Artificial Sequence: Synthetic oligonucleotide
  Sense strand starting at position 2785 of SEQ ID NO: 1879415
ucagcugcagcuuaaauau

SEQ ID NO: 1905423 - RNA, 19 nt, Artificial Sequence
  Description of Artificial Sequence: Synthetic oligonucleotide
  Antisense strand to SEQ ID NO: 1905422
auauuuaagcugcagcuga

SEQ ID NO: 1905424 - RNA, 19 nt, Artificial Sequence
  Description of Artificial Sequence: Synthetic oligonucleotide
  Sense strand starting at position 2794 of SEQ ID NO: 1879415
gcuuaaauaucagaccaag

SEQ ID NO: 1905425 - RNA, 19 nt, Artificial Sequence
  Description of Artificial Sequence: Synthetic oligonucleotide
  Antisense strand to SEQ ID NO: 1905424
cuuggucugauauuuaagc

SEQ ID NO: 1905426 - RNA, 19 nt, Artificial Sequence
  Description of Artificial Sequence: Synthetic oligonucleotide
  Sense strand starting at position 3174 of SEQ ID NO: 1879415
acaagaauuugcugcuaau

SEQ ID NO: 1905427 - RNA, 19 nt, Artificial Sequence
  Description of Artificial Sequence: Synthetic oligonucleotide
  Antisense strand to SEQ ID NO: 1905426
auuagcagcaaauucuugu

SEQ ID NO: 1905428 - RNA, 19 nt, Artificial Sequence
  Description of Artificial Sequence: Synthetic oligonucleotide
  Sense strand starting at position 3227 of SEQ ID NO: 1879415
caucccuguuagguugaaa

SEQ ID NO: 1905429 - RNA, 19 nt, Artificial Sequence
  Description of Artificial Sequence: Synthetic oligonucleotide
  Antisense strand to SEQ ID NO: 1905428
uuucaaccuaacagggaug

SEQ ID NO: 1905430 - RNA, 19 nt, Artificial Sequence
  Description of Artificial Sequence: Synthetic oligonucleotide
  Sense strand starting at position 3230 of SEQ ID NO: 1879415
cccuguuagguugaaagau

SEQ ID NO: 1905431 - RNA, 19 nt, Artificial Sequence
  Description of Artificial Sequence: Synthetic oligonucleotide
  Antisense strand to SEQ ID NO: 1905430
aucuuucaaccuaacaggg

SEQ ID NO: 1905432 - RNA, 19 nt, Artificial Sequence
  Description of Artificial Sequence: Synthetic oligonucleotide
  Sense strand starting at position 3396 of SEQ ID NO: 1879415
ucaguuccuguacgugauu

SEQ ID NO: 1905433 - RNA, 19 nt, Artificial Sequence
  Description of Artificial Sequence: Synthetic oligonucleotide
  Antisense strand to SEQ ID NO: 1905432
aaucacguacaggaacuga

SEQ ID NO: 1905434 - RNA, 19 nt, Artificial Sequence
  Description of Artificial Sequence: Synthetic oligonucleotide
  Sense strand starting at position 3584 of SEQ ID NO: 1879415
ccugaaggcuguuaggaga

SEQ ID NO: 1905435 - RNA, 19 nt, Artificial Sequence
  Description of Artificial Sequence: Synthetic oligonucleotide
  Antisense strand to SEQ ID NO: 1905434
ucuccuaacagccuucagg

SEQ ID NO: 1905436 - RNA, 19 nt, Artificial Sequence
  Description of Artificial Sequence: Synthetic oligonucleotide
  Sense strand starting at position 3690 of SEQ ID NO: 1879415
agacgacccaguugcuaua

SEQ ID NO: 1905437 - RNA, 19 nt, Artificial Sequence
  Description of Artificial Sequence: Synthetic oligonucleotide
  Antisense strand to SEQ ID NO: 1905436
uauagcaacugggucgucu

SEQ ID NO: 1905438 - RNA, 19 nt, Artificial Sequence
  Description of Artificial Sequence: Synthetic oligonucleotide
  Sense strand starting at position 3754 of SEQ ID NO: 1879415
agggucuuaggcugcuaaa

SEQ ID NO: 1905439 - RNA, 19 nt, Artificial Sequence
  Description of Artificial Sequence: Synthetic oligonucleotide
  Antisense strand to SEQ ID NO: 1905438
uuuagcagccuaagacccu

SEQ ID NO: 1905440 - RNA, 19 nt, Artificial Sequence
  Description of Artificial Sequence: Synthetic oligonucleotide
  Sense strand starting at position 1513 of SEQ ID NO: 1879416
uuuguuaaauuaccgagau

SEQ ID NO: 1905441 - RNA, 19 nt, Artificial Sequence
  Description of Artificial Sequence: Synthetic oligonucleotide
  Antisense strand to SEQ ID NO: 1905440
aucucgguaauuuaacaaa

SEQ ID NO: 1905442 - RNA, 19 nt, Artificial Sequence
  Description of Artificial Sequence: Synthetic oligonucleotide
  Sense strand starting at position 1517 of SEQ ID NO: 1879416
uuaaauuaccgagauguuu

SEQ ID NO: 1905443 - RNA, 19 nt, Artificial Sequence
  Description of Artificial Sequence: Synthetic oligonucleotide
  Antisense strand to SEQ ID NO: 1905442
aaacaucucgguaauuuaa

SEQ ID NO: 1905444 - RNA, 19 nt, Artificial Sequence
  Description of Artificial Sequence: Synthetic oligonucleotide
  Sense strand starting at position 1575 of SEQ ID NO: 1879416
auaggaauaucuuucugug

SEQ ID NO: 1905445 - RNA, 19 nt, Artificial Sequence
  Description of Artificial Sequence: Synthetic oligonucleotide
  Antisense strand to SEQ ID NO: 1905444
cacagaaagauauuccuau

SEQ ID NO: 1905446 - RNA, 19 nt, Artificial Sequence
  Description of Artificial Sequence: Synthetic oligonucleotide
  Sense strand starting at position 1577 of SEQ ID NO: 1879416
aggaauaucuuucuguguu

SEQ ID NO: 1905447 - RNA, 19 nt, Artificial Sequence
  Description of Artificial Sequence: Synthetic oligonucleotide
  Antisense strand to SEQ ID NO: 1905446
aacacagaaagauauuccu

SEQ ID NO: 1905448 - RNA, 19 nt, Artificial Sequence
  Description of Artificial Sequence: Synthetic oligonucleotide
  Sense strand starting at position 1681 of SEQ ID NO: 1879416
accaguuucuuccucacga

SEQ ID NO: 1905449 - RNA, 19 nt, Artificial Sequence
  Description of Artificial Sequence: Synthetic oligonucleotide
  Antisense strand to SEQ ID NO: 1905448
ucgugaggaagaaacuggu

SEQ ID NO: 1905450 - RNA, 19 nt, Artificial Sequence
  Description of Artificial Sequence: Synthetic oligonucleotide
  Sense strand starting at position 1827 of SEQ ID NO: 1879416
guggacuucucucuaugaa

SEQ ID NO: 1905451 - RNA, 19 nt, Artificial Sequence
  Description of Artificial Sequence: Synthetic oligonucleotide
  Antisense strand to SEQ ID NO: 1905450
uucauagagagaaguccac

SEQ ID NO: 1905452 - RNA, 19 nt, Artificial Sequence
  Description of Artificial Sequence: Synthetic oligonucleotide
  Sense strand starting at position 1901 of SEQ ID NO: 1879416
gauagcaguugacauuuau

SEQ ID NO: 1905453 - RNA, 19 nt, Artificial Sequence
  Description of Artificial Sequence: Synthetic oligonucleotide
  Antisense strand to SEQ ID NO: 1905452
auaaaugucaacugcuauc

SEQ ID NO: 1905454 - RNA, 19 nt, Artificial Sequence
  Description of Artificial Sequence: Synthetic oligonucleotide
  Sense strand starting at position 1911 of SEQ ID NO: 1879416
gacauuuauugaggacuua

SEQ ID NO: 1905455 - RNA, 19 nt, Artificial Sequence
  Description of Artificial Sequence: Synthetic oligonucleotide
  Antisense strand to SEQ ID NO: 1905454
uaaguccucaauaaauguc

SEQ ID NO: 1905456 - RNA, 19 nt, Artificial Sequence
  Description of Artificial Sequence: Synthetic oligonucleotide
  Sense strand starting at position 1962 of SEQ ID NO: 1879416
acauguuauuuccaggaca

SEQ ID NO: 1905457 - RNA, 19 nt, Artificial Sequence
  Description of Artificial Sequence: Synthetic oligonucleotide
  Antisense strand to SEQ ID NO: 1905456
uguccuggaaauaacaugu

SEQ ID NO: 1905458 - RNA, 19 nt, Artificial Sequence
  Description of Artificial Sequence: Synthetic oligonucleotide
  Sense strand starting at position 2026 of SEQ ID NO: 1879416
agcuuaggcagagagguua

SEQ ID NO: 1905459 - RNA, 19 nt, Artificial Sequence
  Description of Artificial Sequence: Synthetic oligonucleotide
  Antisense strand to SEQ ID NO: 1905458
uaaccucucugccuaagcu

SEQ ID NO: 1905460 - RNA, 19 nt, Artificial Sequence
  Description of Artificial Sequence: Synthetic oligonucleotide
  Sense strand starting at position 2041 of SEQ ID NO: 1879416
guuagaauuugcuuacguu

SEQ ID NO: 1905461 - RNA, 19 nt, Artificial Sequence
  Description of Artificial Sequence: Synthetic oligonucleotide
  Antisense strand to SEQ ID NO: 1905460
aacguaagcaaauucuaac

SEQ ID NO: 1905462 - RNA, 19 nt, Artificial Sequence
  Description of Artificial Sequence: Synthetic oligonucleotide
  Sense strand starting at position 2091 of SEQ ID NO: 1879416
cuuaaagggccaggauuaa

SEQ ID NO: 1905463 - RNA, 19 nt, Artificial Sequence
  Description of Artificial Sequence: Synthetic oligonucleotide
  Antisense strand to SEQ ID NO: 1905462
uuaauccuggcccuuuaag

SEQ ID NO: 1905464 - RNA, 19 nt, Artificial Sequence
  Description of Artificial Sequence: Synthetic oligonucleotide
  Sense strand starting at position 2265 of SEQ ID NO: 1879416
ccacguguugcaguuacua

SEQ ID NO: 1905465 - RNA, 19 nt, Artificial Sequence
  Description of Artificial Sequence: Synthetic oligonucleotide
  Antisense strand to SEQ ID NO: 1905464
uaguaacugcaacacgugg

SEQ ID NO: 1905466 - RNA, 19 nt, Artificial Sequence
  Description of Artificial Sequence: Synthetic oligonucleotide
  Sense strand starting at position 2276 of SEQ ID NO: 1879416
aguuacuagcaaugaguga

SEQ ID NO: 1905467 - RNA, 19 nt, Artificial Sequence
  Description of Artificial Sequence: Synthetic oligonucleotide
  Antisense strand to SEQ ID NO: 1905466
ucacucauugcuaguaacu

SEQ ID NO: 1905468 - RNA, 19 nt, Artificial Sequence
  Description of Artificial Sequence: Synthetic oligonucleotide
  Sense strand starting at position 2281 of SEQ ID NO: 1879416
cuagcaaugagugagucuu

SEQ ID NO: 1905469 - RNA, 19 nt, Artificial Sequence
  Description of Artificial Sequence: Synthetic oligonucleotide
  Antisense strand to SEQ ID NO: 1905468
aagacucacucauugcuag

SEQ ID NO: 1905470 - RNA, 19 nt, Artificial Sequence
  Description of Artificial Sequence: Synthetic oligonucleotide
  Sense strand starting at position 2287 of SEQ ID NO: 1879416
augagugagucuuuggcca

SEQ ID NO: 1905471 - RNA, 19 nt, Artificial Sequence
  Description of Artificial Sequence: Synthetic oligonucleotide
  Antisense strand to SEQ ID NO: 1905470
uggccaaagacucacucau

SEQ ID NO: 1905472 - RNA, 19 nt, Artificial Sequence
  Description of Artificial Sequence: Synthetic oligonucleotide
  Sense strand starting at position 2320 of SEQ ID NO: 1879416
cacagugucugcuugauaa

SEQ ID NO: 1905473 - RNA, 19 nt, Artificial Sequence
  Description of Artificial Sequence: Synthetic oligonucleotide
  Antisense strand to SEQ ID NO: 1905472
uuaucaagcagacacugug

SEQ ID NO: 1905474 - RNA, 19 nt, Artificial Sequence
  Description of Artificial Sequence: Synthetic oligonucleotide
  Sense strand starting at position 2536 of SEQ ID NO: 1879416
agaucauuacuccacguua

SEQ ID NO: 1905475 - RNA, 19 nt, Artificial Sequence
  Description of Artificial Sequence: Synthetic oligonucleotide
  Antisense strand to SEQ ID NO: 1905474
uaacguggaguaaugaucu

SEQ ID NO: 1905476 - RNA, 19 nt, Artificial Sequence
  Description of Artificial Sequence: Synthetic oligonucleotide
  Sense strand starting at position 2538 of SEQ ID NO: 1879416
aucauuacuccacguuauu

SEQ ID NO: 1905477 - RNA, 19 nt, Artificial Sequence
  Description of Artificial Sequence: Synthetic oligonucleotide
  Antisense strand to SEQ ID NO: 1905476
aauaacguggaguaaugau

SEQ ID NO: 1905478 - RNA, 19 nt, Artificial Sequence
  Description of Artificial Sequence: Synthetic oligonucleotide
  Sense strand starting at position 2593 of SEQ ID NO: 1879416
gucgguaaugaccaaggua

SEQ ID NO: 1905479 - RNA, 19 nt, Artificial Sequence
  Description of Artificial Sequence: Synthetic oligonucleotide
  Antisense strand to SEQ ID NO: 1905478
uaccuuggucauuaccgac

SEQ ID NO: 1905480 - RNA, 19 nt, Artificial Sequence
  Description of Artificial Sequence: Synthetic oligonucleotide
  Sense strand starting at position 2754 of SEQ ID NO: 1879416
acaagagccaggcaugauu

SEQ ID NO: 1905481 - RNA, 19 nt, Artificial Sequence
  Description of Artificial Sequence: Synthetic oligonucleotide
  Antisense strand to SEQ ID NO: 1905480
aaucaugccuggcucuugu

SEQ ID NO: 1905482 - RNA, 19 nt, Artificial Sequence
  Description of Artificial Sequence: Synthetic oligonucleotide
  Sense strand starting at position 2996 of SEQ ID NO: 1879416
gcguaagagcaugauagga

SEQ ID NO: 1905483 - RNA, 19 nt, Artificial Sequence
  Description of Artificial Sequence: Synthetic oligonucleotide
  Antisense strand to SEQ ID NO: 1905482
uccuaucaugcucuuacgc

SEQ ID NO: 1905484 - RNA, 19 nt, Artificial Sequence
  Description of Artificial Sequence: Synthetic oligonucleotide
  Sense strand starting at position 3100 of SEQ ID NO: 1879416
ugggcacugacuuggcaau

SEQ ID NO: 1905485 - RNA, 19 nt, Artificial Sequence
  Description of Artificial Sequence: Synthetic oligonucleotide
  Antisense strand to SEQ ID NO: 1905484
auugccaagucagugccca

SEQ ID NO: 1905486 - RNA, 19 nt, Artificial Sequence
  Description of Artificial Sequence: Synthetic oligonucleotide
  Sense strand starting at position 3106 of SEQ ID NO: 1879416
cugacuuggcaauguaaca

SEQ ID NO: 1905487 - RNA, 19 nt, Artificial Sequence
  Description of Artificial Sequence: Synthetic oligonucleotide
  Antisense strand to SEQ ID NO: 1905486
uguuacauugccaagucag

SEQ ID NO: 1905488 - RNA, 19 nt, Artificial Sequence
  Description of Artificial Sequence: Synthetic oligonucleotide
  Sense strand starting at position 3241 of SEQ ID NO: 1879416
ugauuaaagccuugcauuc

SEQ ID NO: 1905489 - RNA, 19 nt, Artificial Sequence
  Description of Artificial Sequence: Synthetic oligonucleotide
  Antisense strand to SEQ ID NO: 1905488
gaaugcaaggcuuuaauca

SEQ ID NO: 1905490 - RNA, 19 nt, Artificial Sequence
  Description of Artificial Sequence: Synthetic oligonucleotide
  Sense strand starting at position 3285 of SEQ ID NO: 1879416
gugcucuuagcacuuugua

SEQ ID NO: 1905491 - RNA, 19 nt, Artificial Sequence
  Description of Artificial Sequence: Synthetic oligonucleotide
  Antisense strand to SEQ ID NO: 1905490
uacaaagugcuaagagcac

SEQ ID NO: 1905492 - RNA, 19 nt, Artificial Sequence
  Description of Artificial Sequence: Synthetic oligonucleotide
  Sense strand starting at position 3297 of SEQ ID NO: 1879416
cuuuguaagcaauaugaac

SEQ ID NO: 1905493 - RNA, 19 nt, Artificial Sequence
  Description of Artificial Sequence: Synthetic oligonucleotide
  Antisense strand to SEQ ID NO: 1905492
guucauauugcuuacaaag

SEQ ID NO: 1905494 - RNA, 19 nt, Artificial Sequence
  Description of Artificial Sequence: Synthetic oligonucleotide
  Sense strand starting at position 3353 of SEQ ID NO: 1879416
auagcuaucagcuggaaga

SEQ ID NO: 1905495 - RNA, 19 nt, Artificial Sequence
  Description of Artificial Sequence: Synthetic oligonucleotide
  Antisense strand to SEQ ID NO: 1905494
ucuuccagcugauagcuau

SEQ ID NO: 1905496 - RNA, 19 nt, Artificial Sequence
  Description of Artificial Sequence: Synthetic oligonucleotide
  Sense strand starting at position 3354 of SEQ ID NO: 1879416
uagcuaucagcuggaagag

SEQ ID NO: 1905497 - RNA, 19 nt, Artificial Sequence
  Description of Artificial Sequence: Synthetic oligonucleotide
  Antisense strand to SEQ ID NO: 1905496
cucuuccagcugauagcua

SEQ ID NO: 1905498 - RNA, 19 nt, Artificial Sequence
  Description of Artificial Sequence: Synthetic oligonucleotide
  Sense strand starting at position 3452 of SEQ ID NO: 1879416
cucuuucuaguccgggauu

SEQ ID NO: 1905499 - RNA, 19 nt, Artificial Sequence
  Description of Artificial Sequence: Synthetic oligonucleotide
  Antisense strand to SEQ ID NO: 1905498
aaucccggacuagaaagag

SEQ ID NO: 1905500 - RNA, 19 nt, Artificial Sequence
  Description of Artificial Sequence: Synthetic oligonucleotide
  Sense strand starting at position 3593 of SEQ ID NO: 1879416
cuuggaaguccugaggagu

SEQ ID NO: 1905501 - RNA, 19 nt, Artificial Sequence
  Description of Artificial Sequence: Synthetic oligonucleotide
  Antisense strand to SEQ ID NO: 1905500
acuccucaggacuuccaag

SEQ ID NO: 1905502 - RNA, 19 nt, Artificial Sequence
  Description of Artificial Sequence: Synthetic oligonucleotide
  Sense strand starting at position 3617 of SEQ ID NO: 1879416
caggguauccuguagaaug

SEQ ID NO: 1905503 - RNA, 19 nt, Artificial Sequence
  Description of Artificial Sequence: Synthetic oligonucleotide
  Antisense strand to SEQ ID NO: 1905502
cauucuacaggauacccug

SEQ ID NO: 1905504 - RNA, 19 nt, Artificial Sequence
  Description of Artificial Sequence: Synthetic oligonucleotide
  Sense strand starting at position 3619 of SEQ ID NO: 1879416
ggguauccuguagaauguu

SEQ ID NO: 1905505 - RNA, 19 nt, Artificial Sequence
  Description of Artificial Sequence: Synthetic oligonucleotide
  Antisense strand to SEQ ID NO: 1905504
aacauucuacaggauaccc

SEQ ID NO: 1905506 - RNA, 19 nt, Artificial Sequence
  Description of Artificial Sequence: Synthetic oligonucleotide
  Sense strand starting at position 3625 of SEQ ID NO: 1879416
ccuguagaauguucuccaa

SEQ ID NO: 1905507 - RNA, 19 nt, Artificial Sequence
  Description of Artificial Sequence: Synthetic oligonucleotide
  Antisense strand to SEQ ID NO: 1905506
uuggagaacauucuacagg

SEQ ID NO: 1905508 - RNA, 19 nt, Artificial Sequence
  Description of Artificial Sequence: Synthetic oligonucleotide
  Sense strand starting at position 3627 of SEQ ID NO: 1879416
uguagaauguucuccaauc

SEQ ID NO: 1905509 - RNA, 19 nt, Artificial Sequence
  Description of Artificial Sequence: Synthetic oligonucleotide
  Antisense strand to SEQ ID NO: 1905508
gauuggagaacauucuaca

SEQ ID NO: 1905510 - RNA, 19 nt, Artificial Sequence
  Description of Artificial Sequence: Synthetic oligonucleotide
  Sense strand starting at position 3640 of SEQ ID NO: 1879416
ccaaucugaguuugucuga

SEQ ID NO: 1905511 - RNA, 19 nt, Artificial Sequence
  Description of Artificial Sequence: Synthetic oligonucleotide
  Antisense strand to SEQ ID NO: 1905510
ucagacaaacucagauugg

SEQ ID NO: 1905512 - RNA, 19 nt, Artificial Sequence
  Description of Artificial Sequence: Synthetic oligonucleotide
  Sense strand starting at position 3688 of SEQ ID NO: 1879416
gauuauggguuucugggaa

SEQ ID NO: 1905513 - RNA, 19 nt, Artificial Sequence
  Description of Artificial Sequence: Synthetic oligonucleotide
  Antisense strand to SEQ ID NO: 1905512
uucccagaaacccauaauc

SEQ ID NO: 1905514 - RNA, 19 nt, Artificial Sequence
  Description of Artificial Sequence: Synthetic oligonucleotide
  Sense strand starting at position 3740 of SEQ ID NO: 1879416
uauucuauugaggguauau

SEQ ID NO: 1905515 - RNA, 19 nt, Artificial Sequence
  Description of Artificial Sequence: Synthetic oligonucleotide
  Antisense strand to SEQ ID NO: 1905514
auauacccucaauagaaua

SEQ ID NO: 1905516 - RNA, 19 nt, Artificial Sequence
  Description of Artificial Sequence: Synthetic oligonucleotide
  Sense strand starting at position 3752 of SEQ ID NO: 1879416
gguauaugauaaccacaug

SEQ ID NO: 1905517 - RNA, 19 nt, Artificial Sequence
  Description of Artificial Sequence: Synthetic oligonucleotide
  Antisense strand to SEQ ID NO: 1905516
caugugguuaucauauacc

SEQ ID NO: 1905518 - RNA, 19 nt, Artificial Sequence
  Description of Artificial Sequence: Synthetic oligonucleotide
  Sense strand starting at position 3791 of SEQ ID NO: 1879416
ccucaucacuugguuaaug

SEQ ID NO: 1905519 - RNA, 19 nt, Artificial Sequence
  Description of Artificial Sequence: Synthetic oligonucleotide
  Antisense strand to SEQ ID NO: 1905518
cauuaaccaagugaugagg

SEQ ID NO: 1905520 - RNA, 19 nt, Artificial Sequence
  Description of Artificial Sequence: Synthetic oligonucleotide
  Sense strand starting at position 2365 of SEQ ID NO: 1879417
cgucgagggcuugacauuu

SEQ ID NO: 1905521 - RNA, 19 nt, Artificial Sequence
  Description of Artificial Sequence: Synthetic oligonucleotide
  Antisense strand to SEQ ID NO: 1905520
aaaugucaagcccucgacg

SEQ ID NO: 1905522 - RNA, 19 nt, Artificial Sequence
  Description of Artificial Sequence: Synthetic oligonucleotide
  Sense strand starting at position 2410 of SEQ ID NO: 1879417
cguagagauggugacuuua

SEQ ID NO: 1905523 - RNA, 19 nt, Artificial Sequence
  Description of Artificial Sequence: Synthetic oligonucleotide
  Antisense strand to SEQ ID NO: 1905522
uaaagucaccaucucuacg

SEQ ID NO: 1905524 - RNA, 19 nt, Artificial Sequence
  Description of Artificial Sequence: Synthetic oligonucleotide
  Sense strand starting at position 2707 of SEQ ID NO: 1879417
agggcaagauugugccuua

SEQ ID NO: 1905525 - RNA, 19 nt, Artificial Sequence
  Description of Artificial Sequence: Synthetic oligonucleotide
  Antisense strand to SEQ ID NO: 1905524
uaaggcacaaucuugcccu

SEQ ID NO: 1905526 - RNA, 19 nt, Artificial Sequence
  Description of Artificial Sequence: Synthetic oligonucleotide
  Sense strand starting at position 2708 of SEQ ID NO: 1879417
gggcaagauugugccuuaa

SEQ ID NO: 1905527 - RNA, 19 nt, Artificial Sequence
  Description of Artificial Sequence: Synthetic oligonucleotide
  Antisense strand to SEQ ID NO: 1905526
uuaaggcacaaucuugccc

SEQ ID NO: 1905528 - RNA, 19 nt, Artificial Sequence
  Description of Artificial Sequence: Synthetic oligonucleotide
  Sense strand starting at position 2792 of SEQ ID NO: 1879417
aauggagucugguucuguu

SEQ ID NO: 1905529 - RNA, 19 nt, Artificial Sequence
  Description of Artificial Sequence: Synthetic oligonucleotide
  Antisense strand to SEQ ID NO: 1905528
aacagaaccagacuccauu

SEQ ID NO: 1905530 - RNA, 19 nt, Artificial Sequence
  Description of Artificial Sequence: Synthetic oligonucleotide
  Sense strand starting at position 3365 of SEQ ID NO: 1879417
cacguaauacccugugugu

SEQ ID NO: 1905531 - RNA, 19 nt, Artificial Sequence
  Description of Artificial Sequence: Synthetic oligonucleotide
  Antisense strand to SEQ ID NO: 1905530
acacacaggguauuacgug

SEQ ID NO: 1905532 - RNA, 19 nt, Artificial Sequence
  Description of Artificial Sequence: Synthetic oligonucleotide
  Sense strand starting at position 3381 of SEQ ID NO: 1879417
uguguuauauuguguggau

SEQ ID NO: 1905533 - RNA, 19 nt, Artificial Sequence
  Description of Artificial Sequence: Synthetic oligonucleotide
  Antisense strand to SEQ ID NO: 1905532
auccacacaauauaacaca

SEQ ID NO: 1905534 - RNA, 19 nt, Artificial Sequence
  Description of Artificial Sequence: Synthetic oligonucleotide
  Sense strand starting at position 3382 of SEQ ID NO: 1879417
guguuauauuguguggaug

SEQ ID NO: 1905535 - RNA, 19 nt, Artificial Sequence
  Description of Artificial Sequence: Synthetic oligonucleotide
  Antisense strand to SEQ ID NO: 1905534
cauccacacaauauaacac

SEQ ID NO: 1905536 - RNA, 19 nt, Artificial Sequence
  Description of Artificial Sequence: Synthetic oligonucleotide
  Sense strand starting at position 3383 of SEQ ID NO: 1879417
uguuauauuguguggaugu

SEQ ID NO: 1905537 - RNA, 19 nt, Artificial Sequence
  Description of Artificial Sequence: Synthetic oligonucleotide
  Antisense strand to SEQ ID NO: 1905536
acauccacacaauauaaca

SEQ ID NO: 1905538 - RNA, 19 nt, Artificial Sequence
  Description of Artificial Sequence: Synthetic oligonucleotide
  Sense strand starting at position 3384 of SEQ ID NO: 1879417
guuauauuguguggaugug

SEQ ID NO: 1905539 - RNA, 19 nt, Artificial Sequence
  Description of Artificial Sequence: Synthetic oligonucleotide
  Antisense strand to SEQ ID NO: 1905538
cacauccacacaauauaac

SEQ ID NO: 1905540 - RNA, 19 nt, Artificial Sequence
  Description of Artificial Sequence: Synthetic oligonucleotide
  Sense strand starting at position 3390 of SEQ ID NO: 1879417
uuguguggauguguuauau

SEQ ID NO: 1905541 - RNA, 19 nt, Artificial Sequence
  Description of Artificial Sequence: Synthetic oligonucleotide
  Antisense strand to SEQ ID NO: 1905540
auauaacacauccacacaa

SEQ ID NO: 1905542 - RNA, 19 nt, Artificial Sequence
  Description of Artificial Sequence: Synthetic oligonucleotide
  Sense strand starting at position 3394 of SEQ ID NO: 1879417
guggauguguuauauuaau

SEQ ID NO: 1905543 - RNA, 19 nt, Artificial Sequence
  Description of Artificial Sequence: Synthetic oligonucleotide
  Antisense strand to SEQ ID NO: 1905542
auuaauauaacacauccac

SEQ ID NO: 1905544 - RNA, 19 nt, Artificial Sequence
  Description of Artificial Sequence: Synthetic oligonucleotide
  Sense strand starting at position 3432 of SEQ ID NO: 1879417
uuaacauuguagcuguuua

SEQ ID NO: 1905545 - RNA, 19 nt, Artificial Sequence
  Description of Artificial Sequence: Synthetic oligonucleotide
  Antisense strand to SEQ ID NO: 1905544
uaaacagcuacaauguuaa

SEQ ID NO: 1905546 - RNA, 19 nt, Artificial Sequence
  Description of Artificial Sequence: Synthetic oligonucleotide
  Sense strand starting at position 3478 of SEQ ID NO: 1879417
guaggucuuugugcacaua

SEQ ID NO: 1905547 - RNA, 19 nt, Artificial Sequence
  Description of Artificial Sequence: Synthetic oligonucleotide
  Antisense strand to SEQ ID NO: 1905546
uaugugcacaaagaccuac

SEQ ID NO: 1905548 - RNA, 19 nt, Artificial Sequence
  Description of Artificial Sequence: Synthetic oligonucleotide
  Sense strand starting at position 3479 of SEQ ID NO: 1879417
uaggucuuugugcacauau

SEQ ID NO: 1905549 - RNA, 19 nt, Artificial Sequence
  Description of Artificial Sequence: Synthetic oligonucleotide
  Antisense strand to SEQ ID NO: 1905548
auaugugcacaaagaccua

SEQ ID NO: 1905550 - RNA, 19 nt, Artificial Sequence
  Description of Artificial Sequence: Synthetic oligonucleotide
  Sense strand starting at position 3501 of SEQ ID NO: 1879417
guauauuuguaggcugauu

SEQ ID NO: 1905551 - RNA, 19 nt, Artificial Sequence
  Description of Artificial Sequence: Synthetic oligonucleotide
  Antisense strand to SEQ ID NO: 1905550
aaucagccuacaaauauac

SEQ ID NO: 1905552 - RNA, 19 nt, Artificial Sequence
  Description of Artificial Sequence: Synthetic oligonucleotide
  Sense strand starting at position 3592 of SEQ ID NO: 1879417
acuagugacuuguuuagcu

SEQ ID NO: 1905553 - RNA, 19 nt, Artificial Sequence
  Description of Artificial Sequence: Synthetic oligonucleotide
  Antisense strand to SEQ ID NO: 1905552
agcuaaacaagucacuagu

SEQ ID NO: 1905554 - RNA, 19 nt, Artificial Sequence
  Description of Artificial Sequence: Synthetic oligonucleotide
  Sense strand starting at position 3596 of SEQ ID NO: 1879417
gugacuuguuuagcuacau

SEQ ID NO: 1905555 - RNA, 19 nt, Artificial Sequence
  Description of Artificial Sequence: Synthetic oligonucleotide
  Antisense strand to SEQ ID NO: 1905554
auguagcuaaacaagucac

SEQ ID NO: 1905556 - RNA, 19 nt, Artificial Sequence
  Description of Artificial Sequence: Synthetic oligonucleotide
  Sense strand starting at position 3597 of SEQ ID NO: 1879417
ugacuuguuuagcuacauu

SEQ ID NO: 1905557 - RNA, 19 nt, Artificial Sequence
  Description of Artificial Sequence: Synthetic oligonucleotide
  Antisense strand to SEQ ID NO: 1905556
aauguagcuaaacaaguca

SEQ ID NO: 1905558 - RNA, 19 nt, Artificial Sequence
  Description of Artificial Sequence: Synthetic oligonucleotide
  Sense strand starting at position 3715 of SEQ ID NO: 1879417
gcucuaaggucaccaauga

SEQ ID NO: 1905559 - RNA, 19 nt, Artificial Sequence
  Description of Artificial Sequence: Synthetic oligonucleotide
  Antisense strand to SEQ ID NO: 1905558
ucauuggugaccuuagagc

SEQ ID NO: 1905560 - RNA, 19 nt, Artificial Sequence
  Description of Artificial Sequence: Synthetic oligonucleotide
  Sense strand starting at position 3738 of SEQ ID NO: 1879417
cauguuguccuauggacaa

SEQ ID NO: 1905561 - RNA, 19 nt, Artificial Sequence
  Description of Artificial Sequence: Synthetic oligonucleotide
  Antisense strand to SEQ ID NO: 1905560
uuguccauaggacaacaug

SEQ ID NO: 1905562 - RNA, 19 nt, Artificial Sequence
  Description of Artificial Sequence: Synthetic oligonucleotide
  Sense strand starting at position 3804 of SEQ ID NO: 1879417
accauucucuccuuuguga

SEQ ID NO: 1905563 - RNA, 19 nt, Artificial Sequence
  Description of Artificial Sequence: Synthetic oligonucleotide
  Antisense strand to SEQ ID NO: 1905562
ucacaaaggagagaauggu

SEQ ID NO: 1905564 - RNA, 19 nt, Artificial Sequence
  Description of Artificial Sequence: Synthetic oligonucleotide
  Sense strand starting at position 3921 of SEQ ID NO: 1879417
gagcuuugguuaccaucua

SEQ ID NO: 1905565 - RNA, 19 nt, Artificial Sequence
  Description of Artificial Sequence: Synthetic oligonucleotide
  Antisense strand to SEQ ID NO: 1905564
uagaugguaaccaaagcuc

SEQ ID NO: 1905566 - RNA, 19 nt, Artificial Sequence
  Description of Artificial Sequence: Synthetic oligonucleotide
  Sense strand starting at position 3958 of SEQ ID NO: 1879417
agugaagucucccuuccua

SEQ ID NO: 1905567 - RNA, 19 nt, Artificial Sequence
  Description of Artificial Sequence: Synthetic oligonucleotide
  Antisense strand to SEQ ID NO: 1905566
uaggaagggagacuucacu

SEQ ID NO: 1905568 - RNA, 19 nt, Artificial Sequence
  Description of Artificial Sequence: Synthetic oligonucleotide
  Sense strand starting at position 78 of SEQ ID NO: 1879418
gcuggagaaugcuuauucu

SEQ ID NO: 1905569 - RNA, 19 nt, Artificial Sequence
  Description of Artificial Sequence: Synthetic oligonucleotide
  Antisense strand to SEQ ID NO: 1905568
agaauaagcauucuccagc

SEQ ID NO: 1905570 - RNA, 19 nt, Artificial Sequence
  Description of Artificial Sequence: Synthetic oligonucleotide
  Sense strand starting at position 81 of SEQ ID NO: 1879418
ggagaaugcuuauucuccu

SEQ ID NO: 1905571 - RNA, 19 nt, Artificial Sequence
  Description of Artificial Sequence: Synthetic oligonucleotide
  Antisense strand to SEQ ID NO: 1905570
aggagaauaagcauucucc

SEQ ID NO: 1905572 - RNA, 19 nt, Artificial Sequence
  Description of Artificial Sequence: Synthetic oligonucleotide
  Sense strand starting at position 88 of SEQ ID NO: 1879418
gcuuauucuccuggcaaau

SEQ ID NO: 1905573 - RNA, 19 nt, Artificial Sequence
  Description of Artificial Sequence: Synthetic oligonucleotide
  Antisense strand to SEQ ID NO: 1905572
auuugccaggagaauaagc

SEQ ID NO: 1905574 - RNA, 19 nt, Artificial Sequence
  Description of Artificial Sequence: Synthetic oligonucleotide
  Sense strand starting at position 101 of SEQ ID NO: 1879418
gcaaauagcaacuguggaa

SEQ ID NO: 1905575 - RNA, 19 nt, Artificial Sequence
  Description of Artificial Sequence: Synthetic oligonucleotide
  Antisense strand to SEQ ID NO: 1905574
uuccacaguugcuauuugc

SEQ ID NO: 1905576 - RNA, 19 nt, Artificial Sequence
  Description of Artificial Sequence: Synthetic oligonucleotide
  Sense strand starting at position 219 of SEQ ID NO: 1879418
ccaguaguaccacaucauu

SEQ ID NO: 1905577 - RNA, 19 nt, Artificial Sequence
  Description of Artificial Sequence: Synthetic oligonucleotide
  Antisense strand to SEQ ID NO: 1905576
aaugaugugguacuacugg

SEQ ID NO: 1905578 - RNA, 19 nt, Artificial Sequence
  Description of Artificial Sequence: Synthetic oligonucleotide
  Sense strand starting at position 357 of SEQ ID NO: 1879418
gcaagucacgguguuguua

SEQ ID NO: 1905579 - RNA, 19 nt, Artificial Sequence
  Description of Artificial Sequence: Synthetic oligonucleotide
  Antisense strand to SEQ ID NO: 1905578
uaacaacaccgugacuugc

SEQ ID NO: 1905580 - RNA, 19 nt, Artificial Sequence
  Description of Artificial Sequence: Synthetic oligonucleotide
  Sense strand starting at position 371 of SEQ ID NO: 1879418
uguuauuauuacccugaug

SEQ ID NO: 1905581 - RNA, 19 nt, Artificial Sequence
  Description of Artificial Sequence: Synthetic oligonucleotide
  Antisense strand to SEQ ID NO: 1905580
caucaggguaauaauaaca

SEQ ID NO: 1905582 - RNA, 19 nt, Artificial Sequence
  Description of Artificial Sequence: Synthetic oligonucleotide
  Sense strand starting at position 373 of SEQ ID NO: 1879418
uuauuauuacccugaugug

SEQ ID NO: 1905583 - RNA, 19 nt, Artificial Sequence
  Description of Artificial Sequence: Synthetic oligonucleotide
  Antisense strand to SEQ ID NO: 1905582
cacaucaggguaauaauaa

SEQ ID NO: 1905584 - RNA, 19 nt, Artificial Sequence
  Description of Artificial Sequence: Synthetic oligonucleotide
  Sense strand starting at position 379 of SEQ ID NO: 1879418
uuacccugauguguaauaa

SEQ ID NO: 1905585 - RNA, 19 nt, Artificial Sequence
  Description of Artificial Sequence: Synthetic oligonucleotide
  Antisense strand to SEQ ID NO: 1905584
uuauuacacaucaggguaa

SEQ ID NO: 1905586 - RNA, 19 nt, Artificial Sequence
  Description of Artificial Sequence: Synthetic oligonucleotide
  Sense strand starting at position 390 of SEQ ID NO: 1879418
uguaauaaaucuguguggu

SEQ ID NO: 1905587 - RNA, 19 nt, Artificial Sequence
  Description of Artificial Sequence: Synthetic oligonucleotide
  Antisense strand to SEQ ID NO: 1905586
accacacagauuuauuaca

SEQ ID NO: 1905588 - RNA, 19 nt, Artificial Sequence
  Description of Artificial Sequence: Synthetic oligonucleotide
  Sense strand starting at position 391 of SEQ ID NO: 1879418
guaauaaaucuguguggug

SEQ ID NO: 1905589 - RNA, 19 nt, Artificial Sequence
  Description of Artificial Sequence: Synthetic oligonucleotide
  Antisense strand to SEQ ID NO: 1905588
caccacacagauuuauuac

SEQ ID NO: 1905590 - RNA, 19 nt, Artificial Sequence
  Description of Artificial Sequence: Synthetic oligonucleotide
  Sense strand starting at position 393 of SEQ ID NO: 1879418
aauaaaucuguguggugca

SEQ ID NO: 1905591 - RNA, 19 nt, Artificial Sequence
  Description of Artificial Sequence: Synthetic oligonucleotide
  Antisense strand to SEQ ID NO: 1905590
ugcaccacacagauuuauu

SEQ ID NO: 1905592 - RNA, 19 nt, Artificial Sequence
  Description of Artificial Sequence: Synthetic oligonucleotide
  Sense strand starting at position 462 of SEQ ID NO: 1879418
auuguaacagcucaaagau

SEQ ID NO: 1905593 - RNA, 19 nt, Artificial Sequence
  Description of Artificial Sequence: Synthetic oligonucleotide
  Antisense strand to SEQ ID NO: 1905592
aucuuugagcuguuacaau

SEQ ID NO: 1905594 - RNA, 19 nt, Artificial Sequence
  Description of Artificial Sequence: Synthetic oligonucleotide
  Sense strand starting at position 470 of SEQ ID NO: 1879418
agcucaaagaugugaguuu

SEQ ID NO: 1905595 - RNA, 19 nt, Artificial Sequence
  Description of Artificial Sequence: Synthetic oligonucleotide
  Antisense strand to SEQ ID NO: 1905594
aaacucacaucuuugagcu

SEQ ID NO: 1905596 - RNA, 19 nt, Artificial Sequence
  Description of Artificial Sequence: Synthetic oligonucleotide
  Sense strand starting at position 503 of SEQ ID NO: 1879418
aguagaggaagcugugaaa

SEQ ID NO: 1905597 - RNA, 19 nt, Artificial Sequence
  Description of Artificial Sequence: Synthetic oligonucleotide
  Antisense strand to SEQ ID NO: 1905596
uuucacagcuuccucuacu

SEQ ID NO: 1905598 - RNA, 19 nt, Artificial Sequence
  Description of Artificial Sequence: Synthetic oligonucleotide
  Sense strand starting at position 506 of SEQ ID NO: 1879418
agaggaagcugugaaauuu

SEQ ID NO: 1905599 - RNA, 19 nt, Artificial Sequence
  Description of Artificial Sequence: Synthetic oligonucleotide
  Antisense strand to SEQ ID NO: 1905598
aaauuucacagcuuccucu

SEQ ID NO: 1905600 - RNA, 19 nt, Artificial Sequence
  Description of Artificial Sequence: Synthetic oligonucleotide
  Sense strand starting at position 539 of SEQ ID NO: 1879418
agcauacucgaauguaguu

SEQ ID NO: 1905601 - RNA, 19 nt, Artificial Sequence
  Description of Artificial Sequence: Synthetic oligonucleotide
  Antisense strand to SEQ ID NO: 1905600
aacuacauucgaguaugcu

SEQ ID NO: 1905602 - RNA, 19 nt, Artificial Sequence
  Description of Artificial Sequence: Synthetic oligonucleotide
  Sense strand starting at position 544 of SEQ ID NO: 1879418
acucgaauguaguuuguaa

SEQ ID NO: 1905603 - RNA, 19 nt, Artificial Sequence
  Description of Artificial Sequence: Synthetic oligonucleotide
  Antisense strand to SEQ ID NO: 1905602
uuacaaacuacauucgagu

SEQ ID NO: 1905604 - RNA, 19 nt, Artificial Sequence
  Description of Artificial Sequence: Synthetic oligonucleotide
  Sense strand starting at position 648 of SEQ ID NO: 1879418
uuacaauggccacaagagu

SEQ ID NO: 1905605 - RNA, 19 nt, Artificial Sequence
  Description of Artificial Sequence: Synthetic oligonucleotide
  Antisense strand to SEQ ID NO: 1905604
acucuuguggccauuguaa

SEQ ID NO: 1905606 - RNA, 19 nt, Artificial Sequence
  Description of Artificial Sequence: Synthetic oligonucleotide
  Sense strand starting at position 2612 of SEQ ID NO: 1879418
cugaguucugcugagcuga

SEQ ID NO: 1905607 - RNA, 19 nt, Artificial Sequence
  Description of Artificial Sequence: Synthetic oligonucleotide
  Antisense strand to SEQ ID NO: 1905606
ucagcucagcagaacucag

SEQ ID NO: 1905608 - RNA, 19 nt, Artificial Sequence
  Description of Artificial Sequence: Synthetic oligonucleotide
  Sense strand starting at position 2662 of SEQ ID NO: 1879418
uggugauaaaccugagcga

SEQ ID NO: 1905609 - RNA, 19 nt, Artificial Sequence
  Description of Artificial Sequence: Synthetic oligonucleotide
  Antisense strand to SEQ ID NO: 1905608
ucgcucagguuuaucacca

SEQ ID NO: 1905610 - RNA, 19 nt, Artificial Sequence
  Description of Artificial Sequence: Synthetic oligonucleotide
  Sense strand starting at position 2663 of SEQ ID NO: 1879418
ggugauaaaccugagcgau

SEQ ID NO: 1905611 - RNA, 19 nt, Artificial Sequence
  Description of Artificial Sequence: Synthetic oligonucleotide
  Antisense strand to SEQ ID NO: 1905610
aucgcucagguuuaucacc

SEQ ID NO: 1905612 - RNA, 19 nt, Artificial Sequence
  Description of Artificial Sequence: Synthetic oligonucleotide
  Sense strand starting at position 2709 of SEQ ID NO: 1879418
ucauuaaagucagcaaaug

SEQ ID NO: 1905613 - RNA, 19 nt, Artificial Sequence
  Description of Artificial Sequence: Synthetic oligonucleotide
  Antisense strand to SEQ ID NO: 1905612
cauuugcugacuuuaauga

SEQ ID NO: 1905614 - RNA, 19 nt, Artificial Sequence
  Description of Artificial Sequence: Synthetic oligonucleotide
  Sense strand starting at position 2748 of SEQ ID NO: 1879418
caggcugaguuugugcuaa

SEQ ID NO: 1905615 - RNA, 19 nt, Artificial Sequence
  Description of Artificial Sequence: Synthetic oligonucleotide
  Antisense strand to SEQ ID NO: 1905614
uuagcacaaacucagccug

SEQ ID NO: 1905616 - RNA, 19 nt, Artificial Sequence
  Description of Artificial Sequence: Synthetic oligonucleotide
  Sense strand starting at position 2760 of SEQ ID NO: 1879418
gugcuaaucugucuauuua

SEQ ID NO: 1905617 - RNA, 19 nt, Artificial Sequence
  Description of Artificial Sequence: Synthetic oligonucleotide
  Antisense strand to SEQ ID NO: 1905616
uaaauagacagauuagcac

SEQ ID NO: 1905618 - RNA, 19 nt, Artificial Sequence
  Description of Artificial Sequence: Synthetic oligonucleotide
  Sense strand starting at position 2856 of SEQ ID NO: 1879418
gaugucugucaacgaugca

SEQ ID NO: 1905619 - RNA, 19 nt, Artificial Sequence
  Description of Artificial Sequence: Synthetic oligonucleotide
  Antisense strand to SEQ ID NO: 1905618
ugcaucguugacagacauc

SEQ ID NO: 1905620 - RNA, 19 nt, Artificial Sequence
  Description of Artificial Sequence: Synthetic oligonucleotide
  Sense strand starting at position 2859 of SEQ ID NO: 1879418
gucugucaacgaugcacau

SEQ ID NO: 1905621 - RNA, 19 nt, Artificial Sequence
  Description of Artificial Sequence: Synthetic oligonucleotide
  Antisense strand to SEQ ID NO: 1905620
augugcaucguugacagac

SEQ ID NO: 1905622 - RNA, 19 nt, Artificial Sequence
  Description of Artificial Sequence: Synthetic oligonucleotide
  Sense strand starting at position 3047 of SEQ ID NO: 1879418
cccacuucuuugguagcaa

SEQ ID NO: 1905623 - RNA, 19 nt, Artificial Sequence
  Description of Artificial Sequence: Synthetic oligonucleotide
  Antisense strand to SEQ ID NO: 1905622
uugcuaccaaagaaguggg

SEQ ID NO: 1905624 - RNA, 19 nt, Artificial Sequence
  Description of Artificial Sequence: Synthetic oligonucleotide
  Sense strand starting at position 3151 of SEQ ID NO: 1879418
guuacagagucuuccaucu

SEQ ID NO: 1905625 - RNA, 19 nt, Artificial Sequence
  Description of Artificial Sequence: Synthetic oligonucleotide
  Antisense strand to SEQ ID NO: 1905624
agauggaagacucuguaac

SEQ ID NO: 1905626 - RNA, 19 nt, Artificial Sequence
  Description of Artificial Sequence: Synthetic oligonucleotide
  Sense strand starting at position 3262 of SEQ ID NO: 1879418
ugaacaaugggaggcuauu

SEQ ID NO: 1905627 - RNA, 19 nt, Artificial Sequence
  Description of Artificial Sequence: Synthetic oligonucleotide
  Antisense strand to SEQ ID NO: 1905626
aauagccucccauuguuca

SEQ ID NO: 1905628 - RNA, 19 nt, Artificial Sequence
  Description of Artificial Sequence: Synthetic oligonucleotide
  Sense strand starting at position 3274 of SEQ ID NO: 1879418
ggcuauugagcacagaguu

SEQ ID NO: 1905629 - RNA, 19 nt, Artificial Sequence
  Description of Artificial Sequence: Synthetic oligonucleotide
  Antisense strand to SEQ ID NO: 1905628
aacucugugcucaauagcc

SEQ ID NO: 1905630 - RNA, 19 nt, Artificial Sequence
  Description of Artificial Sequence: Synthetic oligonucleotide
  Sense strand starting at position 3280 of SEQ ID NO: 1879418
ugagcacagaguugauauu

SEQ ID NO: 1905631 - RNA, 19 nt, Artificial Sequence
  Description of Artificial Sequence: Synthetic oligonucleotide
  Antisense strand to SEQ ID NO: 1905630
aauaucaacucugugcuca

SEQ ID NO: 1905632 - RNA, 19 nt, Artificial Sequence
  Description of Artificial Sequence: Synthetic oligonucleotide
  Sense strand starting at position 3616 of SEQ ID NO: 1879418
ccacaucuggccugauuga

SEQ ID NO: 1905633 - RNA, 19 nt, Artificial Sequence
  Description of Artificial Sequence: Synthetic oligonucleotide
  Antisense strand to SEQ ID NO: 1905632
ucaaucaggccagaugugg

SEQ ID NO: 1905634 - RNA, 19 nt, Artificial Sequence
  Description of Artificial Sequence: Synthetic oligonucleotide
  Sense strand starting at position 3648 of SEQ ID NO: 1879418
cuucuaguuuauucuguaa

SEQ ID NO: 1905635 - RNA, 19 nt, Artificial Sequence
  Description of Artificial Sequence: Synthetic oligonucleotide
  Antisense strand to SEQ ID NO: 1905634
uuacagaauaaacuagaag

SEQ ID NO: 1905636 - RNA, 19 nt, Artificial Sequence
  Description of Artificial Sequence: Synthetic oligonucleotide
  Sense strand starting at position 3651 of SEQ ID NO: 1879418
cuaguuuauucuguaacca

SEQ ID NO: 1905637 - RNA, 19 nt, Artificial Sequence
  Description of Artificial Sequence: Synthetic oligonucleotide
  Antisense strand to SEQ ID NO: 1905636
ugguuacagaauaaacuag

SEQ ID NO: 1905638 - RNA, 19 nt, Artificial Sequence
  Description of Artificial Sequence: Synthetic oligonucleotide
  Sense strand starting at position 3750 of SEQ ID NO: 1879418
augauugacucccuuggua

SEQ ID NO: 1905639 - RNA, 19 nt, Artificial Sequence
  Description of Artificial Sequence: Synthetic oligonucleotide
  Antisense strand to SEQ ID NO: 1905638
uaccaagggagucaaucau

SEQ ID NO: 1905640 - RNA, 19 nt, Artificial Sequence
  Description of Artificial Sequence: Synthetic oligonucleotide
  Sense strand starting at position 3752 of SEQ ID NO: 1879418
gauugacucccuugguaau

SEQ ID NO: 1905641 - RNA, 19 nt, Artificial Sequence
  Description of Artificial Sequence: Synthetic oligonucleotide
  Antisense strand to SEQ ID NO: 1905640
auuaccaagggagucaauc

SEQ ID NO: 1905642 - RNA, 19 nt, Artificial Sequence
  Description of Artificial Sequence: Synthetic oligonucleotide
  Sense strand starting at position 3834 of SEQ ID NO: 1879418
gcuugagucucauuuauua

SEQ ID NO: 1905643 - RNA, 19 nt, Artificial Sequence
  Description of Artificial Sequence: Synthetic oligonucleotide
  Antisense strand to SEQ ID NO: 1905642
uaauaaaugagacucaagc

SEQ ID NO: 1905644 - RNA, 19 nt, Artificial Sequence
  Description of Artificial Sequence: Synthetic oligonucleotide
  Sense strand starting at position 3880 of SEQ ID NO: 1879418
auucucugaguuuacauau

SEQ ID NO: 1905645 - RNA, 19 nt, Artificial Sequence
  Description of Artificial Sequence: Synthetic oligonucleotide
  Antisense strand to SEQ ID NO: 1905644
auauguaaacucagagaau

SEQ ID NO: 1905646 - RNA, 19 nt, Artificial Sequence
  Description of Artificial Sequence: Synthetic oligonucleotide
  Sense strand starting at position 3889 of SEQ ID NO: 1879418
guuuacauauucuugugaa

SEQ ID NO: 1905647 - RNA, 19 nt, Artificial Sequence
  Description of Artificial Sequence: Synthetic oligonucleotide
  Antisense strand to SEQ ID NO: 1905646
uucacaagaauauguaaac

SEQ ID NO: 1905648 - RNA, 19 nt, Artificial Sequence
  Description of Artificial Sequence: Synthetic oligonucleotide
  Sense strand starting at position 4 of SEQ ID NO: 1879419
ugacucaugcuuuaaaguc

SEQ ID NO: 1905649 - RNA, 19 nt, Artificial Sequence
  Description of Artificial Sequence: Synthetic oligonucleotide
  Antisense strand to SEQ ID NO: 1905648
gacuuuaaagcaugaguca

SEQ ID NO: 1905650 - RNA, 19 nt, Artificial Sequence
  Description of Artificial Sequence: Synthetic oligonucleotide
  Sense strand starting at position 45 of SEQ ID NO: 1879419
auuguagugagugaauaug

SEQ ID NO: 1905651 - RNA, 19 nt, Artificial Sequence
  Description of Artificial Sequence: Synthetic oligonucleotide
  Antisense strand to SEQ ID NO: 1905650
cauauucacucacuacaau

SEQ ID NO: 1905652 - RNA, 19 nt, Artificial Sequence
  Description of Artificial Sequence: Synthetic oligonucleotide
  Sense strand starting at position 101 of SEQ ID NO: 1879419
gcuaaauggaaugguuuau

SEQ ID NO: 1905653 - RNA, 19 nt, Artificial Sequence
  Description of Artificial Sequence: Synthetic oligonucleotide
  Antisense strand to SEQ ID NO: 1905652
auaaaccauuccauuuagc

SEQ ID NO: 1905654 - RNA, 19 nt, Artificial Sequence
  Description of Artificial Sequence: Synthetic oligonucleotide
  Sense strand starting at position 262 of SEQ ID NO: 1879419
uuuagagguguuuaucaaa

SEQ ID NO: 1905655 - RNA, 19 nt, Artificial Sequence
  Description of Artificial Sequence: Synthetic oligonucleotide
  Antisense strand to SEQ ID NO: 1905654
uuugauaaacaccucuaaa

SEQ ID NO: 1905656 - RNA, 19 nt, Artificial Sequence
  Description of Artificial Sequence: Synthetic oligonucleotide
  Sense strand starting at position 310 of SEQ ID NO: 1879419
gguuauauaguacagaucu

SEQ ID NO: 1905657 - RNA, 19 nt, Artificial Sequence
  Description of Artificial Sequence: Synthetic oligonucleotide
  Antisense strand to SEQ ID NO: 1905656
agaucuguacuauauaacc

SEQ ID NO: 1905658 - RNA, 19 nt, Artificial Sequence
  Description of Artificial Sequence: Synthetic oligonucleotide
  Sense strand starting at position 470 of SEQ ID NO: 1879419
gcuauuaggaaaugagcua

SEQ ID NO: 1905659 - RNA, 19 nt, Artificial Sequence
  Description of Artificial Sequence: Synthetic oligonucleotide
  Antisense strand to SEQ ID NO: 1905658
uagcucauuuccuaauagc

SEQ ID NO: 1905660 - RNA, 19 nt, Artificial Sequence
  Description of Artificial Sequence: Synthetic oligonucleotide
  Sense strand starting at position 481 of SEQ ID NO: 1879419
augagcuaauuaguauaga

SEQ ID NO: 1905661 - RNA, 19 nt, Artificial Sequence
  Description of Artificial Sequence: Synthetic oligonucleotide
  Antisense strand to SEQ ID NO: 1905660
ucuauacuaauuagcucau

SEQ ID NO: 1905662 - RNA, 19 nt, Artificial Sequence
  Description of Artificial Sequence: Synthetic oligonucleotide
  Sense strand starting at position 599 of SEQ ID NO: 1879419
augguauuaccauauguaa

SEQ ID NO: 1905663 - RNA, 19 nt, Artificial Sequence
  Description of Artificial Sequence: Synthetic oligonucleotide
  Antisense strand to SEQ ID NO: 1905662
uuacauaugguaauaccau

SEQ ID NO: 1905664 - RNA, 19 nt, Artificial Sequence
  Description of Artificial Sequence: Synthetic oligonucleotide
  Sense strand starting at position 855 of SEQ ID NO: 1879419
gcagacaacaguuaugagu

SEQ ID NO: 1905665 - RNA, 19 nt, Artificial Sequence
  Description of Artificial Sequence: Synthetic oligonucleotide
  Antisense strand to SEQ ID NO: 1905664
acucauaacuguugucugc

SEQ ID NO: 1905666 - RNA, 19 nt, Artificial Sequence
  Description of Artificial Sequence: Synthetic oligonucleotide
  Sense strand starting at position 870 of SEQ ID NO: 1879419
gaguguagcagauagaaug

SEQ ID NO: 1905667 - RNA, 19 nt, Artificial Sequence
  Description of Artificial Sequence: Synthetic oligonucleotide
  Antisense strand to SEQ ID NO: 1905666
cauucuaucugcuacacuc

SEQ ID NO: 1905668 - RNA, 19 nt, Artificial Sequence
  Description of Artificial Sequence: Synthetic oligonucleotide
  Sense strand starting at position 1121 of SEQ ID NO: 1879419
uuggaaguaugagucuauu

SEQ ID NO: 1905669 - RNA, 19 nt, Artificial Sequence
  Description of Artificial Sequence: Synthetic oligonucleotide
  Antisense strand to SEQ ID NO: 1905668
aauagacucauacuuccaa

SEQ ID NO: 1905670 - RNA, 19 nt, Artificial Sequence
  Description of Artificial Sequence: Synthetic oligonucleotide
  Sense strand starting at position 1131 of SEQ ID NO: 1879419
gagucuauuucucugcagu

SEQ ID NO: 1905671 - RNA, 19 nt, Artificial Sequence
  Description of Artificial Sequence: Synthetic oligonucleotide
  Antisense strand to SEQ ID NO: 1905670
acugcagagaaauagacuc

SEQ ID NO: 1905672 - RNA, 19 nt, Artificial Sequence
  Description of Artificial Sequence: Synthetic oligonucleotide
  Sense strand starting at position 1132 of SEQ ID NO: 1879419
agucuauuucucugcagua

SEQ ID NO: 1905673 - RNA, 19 nt, Artificial Sequence
  Description of Artificial Sequence: Synthetic oligonucleotide
  Antisense strand to SEQ ID NO: 1905672
uacugcagagaaauagacu

SEQ ID NO: 1905674 - RNA, 19 nt, Artificial Sequence
  Description of Artificial Sequence: Synthetic oligonucleotide
  Sense strand starting at position 1133 of SEQ ID NO: 1879419
gucuauuucucugcaguau

SEQ ID NO: 1905675 - RNA, 19 nt, Artificial Sequence
  Description of Artificial Sequence: Synthetic oligonucleotide
  Antisense strand to SEQ ID NO: 1905674
auacugcagagaaauagac

SEQ ID NO: 1905676 - RNA, 19 nt, Artificial Sequence
  Description of Artificial Sequence: Synthetic oligonucleotide
  Sense strand starting at position 1446 of SEQ ID NO: 1879419
ugauguuggaguugagaga

SEQ ID NO: 1905677 - RNA, 19 nt, Artificial Sequence
  Description of Artificial Sequence: Synthetic oligonucleotide
  Antisense strand to SEQ ID NO: 1905676
ucucucaacuccaacauca

SEQ ID NO: 1905678 - RNA, 19 nt, Artificial Sequence
  Description of Artificial Sequence: Synthetic oligonucleotide
  Sense strand starting at position 1466 of SEQ ID NO: 1879419
gggauagauugcuucccaa

SEQ ID NO: 1905679 - RNA, 19 nt, Artificial Sequence
  Description of Artificial Sequence: Synthetic oligonucleotide
  Antisense strand to SEQ ID NO: 1905678
uugggaagcaaucuauccc

SEQ ID NO: 1905680 - RNA, 19 nt, Artificial Sequence
  Description of Artificial Sequence: Synthetic oligonucleotide
  Sense strand starting at position 1469 of SEQ ID NO: 1879419
auagauugcuucccaagac

SEQ ID NO: 1905681 - RNA, 19 nt, Artificial Sequence
  Description of Artificial Sequence: Synthetic oligonucleotide
  Antisense strand to SEQ ID NO: 1905680
gucuugggaagcaaucuau

SEQ ID NO: 1905682 - RNA, 19 nt, Artificial Sequence
  Description of Artificial Sequence: Synthetic oligonucleotide
  Sense strand starting at position 1473 of SEQ ID NO: 1879419
auugcuucccaagacauga

SEQ ID NO: 1905683 - RNA, 19 nt, Artificial Sequence
  Description of Artificial Sequence: Synthetic oligonucleotide
  Antisense strand to SEQ ID NO: 1905682
ucaugucuugggaagcaau

SEQ ID NO: 1905684 - RNA, 19 nt, Artificial Sequence
  Description of Artificial Sequence: Synthetic oligonucleotide
  Sense strand starting at position 1489 of SEQ ID NO: 1879419
ugaggauacuucuuggagu

SEQ ID NO: 1905685 - RNA, 19 nt, Artificial Sequence
  Description of Artificial Sequence: Synthetic oligonucleotide
  Antisense strand to SEQ ID NO: 1905684
acuccaagaaguauccuca

SEQ ID NO: 1905686 - RNA, 19 nt, Artificial Sequence
  Description of Artificial Sequence: Synthetic oligonucleotide
  Sense strand starting at position 1491 of SEQ ID NO: 1879419
aggauacuucuuggaguaa

SEQ ID NO: 1905687 - RNA, 19 nt, Artificial Sequence
  Description of Artificial Sequence: Synthetic oligonucleotide
  Antisense strand to SEQ ID NO: 1905686
uuacuccaagaaguauccu

SEQ ID NO: 1905688 - RNA, 19 nt, Artificial Sequence
  Description of Artificial Sequence: Synthetic oligonucleotide
  Sense strand starting at position 1510 of SEQ ID NO: 1879419
uuggcauugaguuauaaug

SEQ ID NO: 1905689 - RNA, 19 nt, Artificial Sequence
  Description of Artificial Sequence: Synthetic oligonucleotide
  Antisense strand to SEQ ID NO: 1905688
cauuauaacucaaugccaa

SEQ ID NO: 1905690 - RNA, 19 nt, Artificial Sequence
  Description of Artificial Sequence: Synthetic oligonucleotide
  Sense strand starting at position 1517 of SEQ ID NO: 1879419
ugaguuauaauguauggua

SEQ ID NO: 1905691 - RNA, 19 nt, Artificial Sequence
  Description of Artificial Sequence: Synthetic oligonucleotide
  Antisense strand to SEQ ID NO: 1905690
uaccauacauuauaacuca

SEQ ID NO: 1905692 - RNA, 19 nt, Artificial Sequence
  Description of Artificial Sequence: Synthetic oligonucleotide
  Sense strand starting at position 1524 of SEQ ID NO: 1879419
uaauguaugguagaguuaa

SEQ ID NO: 1905693 - RNA, 19 nt, Artificial Sequence
  Description of Artificial Sequence: Synthetic oligonucleotide
  Antisense strand to SEQ ID NO: 1905692
uuaacucuaccauacauua

SEQ ID NO: 1905694 - RNA, 19 nt, Artificial Sequence
  Description of Artificial Sequence: Synthetic oligonucleotide
  Sense strand starting at position 1759 of SEQ ID NO: 1879419
aguacagucucaucugaaa

SEQ ID NO: 1905695 - RNA, 19 nt, Artificial Sequence
  Description of Artificial Sequence: Synthetic oligonucleotide
  Antisense strand to SEQ ID NO: 1905694
uuucagaugagacuguacu

SEQ ID NO: 1905696 - RNA, 19 nt, Artificial Sequence
  Description of Artificial Sequence: Synthetic oligonucleotide
  Sense strand starting at position 2052 of SEQ ID NO: 1879419
guauccuauugguuagaag

SEQ ID NO: 1905697 - RNA, 19 nt, Artificial Sequence
  Description of Artificial Sequence: Synthetic oligonucleotide
  Antisense strand to SEQ ID NO: 1905696
cuucuaaccaauaggauac

SEQ ID NO: 1905698 - RNA, 19 nt, Artificial Sequence
  Description of Artificial Sequence: Synthetic oligonucleotide
  Sense strand starting at position 2318 of SEQ ID NO: 1879419
aggaaaccauuguuacauu

SEQ ID NO: 1905699 - RNA, 19 nt, Artificial Sequence
  Description of Artificial Sequence: Synthetic oligonucleotide
  Antisense strand to SEQ ID NO: 1905698
aauguaacaaugguuuccu

SEQ ID NO: 1905700 - RNA, 19 nt, Artificial Sequence
  Description of Artificial Sequence: Synthetic oligonucleotide
  Sense strand starting at position 2635 of SEQ ID NO: 1879419
ugggaaaugucucuauaag

SEQ ID NO: 1905701 - RNA, 19 nt, Artificial Sequence
  Description of Artificial Sequence: Synthetic oligonucleotide
  Antisense strand to SEQ ID NO: 1905700
cuuauagagacauuuccca

SEQ ID NO: 1905702 - RNA, 19 nt, Artificial Sequence
  Description of Artificial Sequence: Synthetic oligonucleotide
  Sense strand starting at position 2672 of SEQ ID NO: 1879419
gagacacucagguguggaa

SEQ ID NO: 1905703 - RNA, 19 nt, Artificial Sequence
  Description of Artificial Sequence: Synthetic oligonucleotide
  Antisense strand to SEQ ID NO: 1905702
uuccacaccugagugucuc

SEQ ID NO: 1905704 - RNA, 19 nt, Artificial Sequence
  Description of Artificial Sequence: Synthetic oligonucleotide
  Sense strand starting at position 2723 of SEQ ID NO: 1879419
aaaggugaaccuuguaaac

SEQ ID NO: 1905705 - RNA, 19 nt, Artificial Sequence
  Description of Artificial Sequence: Synthetic oligonucleotide
  Antisense strand to SEQ ID NO: 1905704
guuuacaagguucaccuuu

SEQ ID NO: 1905706 - RNA, 19 nt, Artificial Sequence
  Description of Artificial Sequence: Synthetic oligonucleotide
  Sense strand starting at position 2784 of SEQ ID NO: 1879419
acaguaguaugucuaggaa

SEQ ID NO: 1905707 - RNA, 19 nt, Artificial Sequence
  Description of Artificial Sequence: Synthetic oligonucleotide
  Antisense strand to SEQ ID NO: 1905706
uuccuagacauacuacugu

SEQ ID NO: 1905708 - RNA, 19 nt, Artificial Sequence
  Description of Artificial Sequence: Synthetic oligonucleotide
  Sense strand starting at position 3123 of SEQ ID NO: 1879419
ucagaacuguugcugaaga

SEQ ID NO: 1905709 - RNA, 19 nt, Artificial Sequence
  Description of Artificial Sequence: Synthetic oligonucleotide
  Antisense strand to SEQ ID NO: 1905708
ucuucagcaacaguucuga

SEQ ID NO: 1905710 - RNA, 19 nt, Artificial Sequence
  Description of Artificial Sequence: Synthetic oligonucleotide
  Sense strand starting at position 3197 of SEQ ID NO: 1879419
gaagucacuagguaaaggu

SEQ ID NO: 1905711 - RNA, 19 nt, Artificial Sequence
  Description of Artificial Sequence: Synthetic oligonucleotide
  Antisense strand to SEQ ID NO: 1905710
accuuuaccuagugacuuc

SEQ ID NO: 1905712 - RNA, 19 nt, Artificial Sequence
  Description of Artificial Sequence: Synthetic oligonucleotide
  Sense strand starting at position 3224 of SEQ ID NO: 1879419
agaguauaagacugagcaa

SEQ ID NO: 1905713 - RNA, 19 nt, Artificial Sequence
  Description of Artificial Sequence: Synthetic oligonucleotide
  Antisense strand to SEQ ID NO: 1905712
uugcucagucuuauacucu

SEQ ID NO: 1905714 - RNA, 19 nt, Artificial Sequence
  Description of Artificial Sequence: Synthetic oligonucleotide
  Sense strand starting at position 3453 of SEQ ID NO: 1879419
aaaguugaaucuuuagagu

SEQ ID NO: 1905715 - RNA, 19 nt, Artificial Sequence
  Description of Artificial Sequence: Synthetic oligonucleotide
  Antisense strand to SEQ ID NO: 1905714
acucuaaagauucaacuuu

SEQ ID NO: 1905716 - RNA, 19 nt, Artificial Sequence
  Description of Artificial Sequence: Synthetic oligonucleotide
  Sense strand starting at position 3459 of SEQ ID NO: 1879419
gaaucuuuagaguggucaa

SEQ ID NO: 1905717 - RNA, 19 nt, Artificial Sequence
  Description of Artificial Sequence: Synthetic oligonucleotide
  Antisense strand to SEQ ID NO: 1905716
uugaccacucuaaagauuc

SEQ ID NO: 1905718 - RNA, 19 nt, Artificial Sequence
  Description of Artificial Sequence: Synthetic oligonucleotide
  Sense strand starting at position 3665 of SEQ ID NO: 1879419
uguaguaauguauaaucca

SEQ ID NO: 1905719 - RNA, 19 nt, Artificial Sequence
  Description of Artificial Sequence: Synthetic oligonucleotide
  Antisense strand to SEQ ID NO: 1905718
uggauuauacauuacuaca

SEQ ID NO: 1905720 - RNA, 19 nt, Artificial Sequence
  Description of Artificial Sequence: Synthetic oligonucleotide
  Sense strand starting at position 3668 of SEQ ID NO: 1879419
aguaauguauaauccagag

SEQ ID NO: 1905721 - RNA, 19 nt, Artificial Sequence
  Description of Artificial Sequence: Synthetic oligonucleotide
  Antisense strand to SEQ ID NO: 1905720
cucuggauuauacauuacu

SEQ ID NO: 1905722 - RNA, 19 nt, Artificial Sequence
  Description of Artificial Sequence: Synthetic oligonucleotide
  Sense strand starting at position 3744 of SEQ ID NO: 1879419
ucaucucuucgugagagau

SEQ ID NO: 1905723 - RNA, 19 nt, Artificial Sequence
  Description of Artificial Sequence: Synthetic oligonucleotide
  Antisense strand to SEQ ID NO: 1905722
aucucucacgaagagauga

SEQ ID NO: 1905724 - RNA, 19 nt, Artificial Sequence
  Description of Artificial Sequence: Synthetic oligonucleotide
  Sense strand starting at position 3785 of SEQ ID NO: 1879419
gaaacugaagcguaagauu

SEQ ID NO: 1905725 - RNA, 19 nt, Artificial Sequence
  Description of Artificial Sequence: Synthetic oligonucleotide
  Antisense strand to SEQ ID NO: 1905724
aaucuuacgcuucaguuuc

SEQ ID NO: 1905726 - RNA, 19 nt, Artificial Sequence
  Description of Artificial Sequence: Synthetic oligonucleotide
  Sense strand starting at position 3814 of SEQ ID NO: 1879419
gugagugaucaggaagcaa

SEQ ID NO: 1905727 - RNA, 19 nt, Artificial Sequence
  Description of Artificial Sequence: Synthetic oligonucleotide
  Antisense strand to SEQ ID NO: 1905726
uugcuuccugaucacucac

SEQ ID NO: 1905728 - RNA, 19 nt, Artificial Sequence
  Description of Artificial Sequence: Synthetic oligonucleotide
  Sense strand starting at position 193 of SEQ ID NO: 1879420
uuacaagggccuuacuauu

SEQ ID NO: 1905729 - RNA, 19 nt, Artificial Sequence
  Description of Artificial Sequence: Synthetic oligonucleotide
  Antisense strand to SEQ ID NO: 1905728
aauaguaaggcccuuguaa

SEQ ID NO: 1905730 - RNA, 19 nt, Artificial Sequence
  Description of Artificial Sequence: Synthetic oligonucleotide
  Sense strand starting at position 220 of SEQ ID NO: 1879420
aggaaagcaguuuaacuuu

SEQ ID NO: 1905731 - RNA, 19 nt, Artificial Sequence
  Description of Artificial Sequence: Synthetic oligonucleotide
  Antisense strand to SEQ ID NO: 1905730
aaaguuaaacugcuuuccu

SEQ ID NO: 1905732 - RNA, 19 nt, Artificial Sequence
  Description of Artificial Sequence: Synthetic oligonucleotide
  Sense strand starting at position 437 of SEQ ID NO: 1879420
gaagauagucuagggcuga

SEQ ID NO: 1905733 - RNA, 19 nt, Artificial Sequence
  Description of Artificial Sequence: Synthetic oligonucleotide
  Antisense strand to SEQ ID NO: 1905732
ucagcccuagacuaucuuc

SEQ ID NO: 1905734 - RNA, 19 nt, Artificial Sequence
  Description of Artificial Sequence: Synthetic oligonucleotide
  Sense strand starting at position 442 of SEQ ID NO: 1879420
uagucuagggcugaguuua

SEQ ID NO: 1905735 - RNA, 19 nt, Artificial Sequence
  Description of Artificial Sequence: Synthetic oligonucleotide
  Antisense strand to SEQ ID NO: 1905734
uaaacucagcccuagacua

SEQ ID NO: 1905736 - RNA, 19 nt, Artificial Sequence
  Description of Artificial Sequence: Synthetic oligonucleotide
  Sense strand starting at position 506 of SEQ ID NO: 1879420
ucauaagaauugcugaaua

SEQ ID NO: 1905737 - RNA, 19 nt, Artificial Sequence
  Description of Artificial Sequence: Synthetic oligonucleotide
  Antisense strand to SEQ ID NO: 1905736
uauucagcaauucuuauga

SEQ ID NO: 1905738 - RNA, 19 nt, Artificial Sequence
  Description of Artificial Sequence: Synthetic oligonucleotide
  Sense strand starting at position 722 of SEQ ID NO: 1879420
gauauaagauuguucugaa

SEQ ID NO: 1905739 - RNA, 19 nt, Artificial Sequence
  Description of Artificial Sequence: Synthetic oligonucleotide
  Antisense strand to SEQ ID NO: 1905738
uucagaacaaucuuauauc

SEQ ID NO: 1905740 - RNA, 19 nt, Artificial Sequence
  Description of Artificial Sequence: Synthetic oligonucleotide
  Sense strand starting at position 742 of SEQ ID NO: 1879420
acugcuuagauguaacgga

SEQ ID NO: 1905741 - RNA, 19 nt, Artificial Sequence
  Description of Artificial Sequence: Synthetic oligonucleotide
  Antisense strand to SEQ ID NO: 1905740
uccguuacaucuaagcagu

SEQ ID NO: 1905742 - RNA, 19 nt, Artificial Sequence
  Description of Artificial Sequence: Synthetic oligonucleotide
  Sense strand starting at position 746 of SEQ ID NO: 1879420
cuuagauguaacggagacu

SEQ ID NO: 1905743 - RNA, 19 nt, Artificial Sequence
  Description of Artificial Sequence: Synthetic oligonucleotide
  Antisense strand to SEQ ID NO: 1905742
agucuccguuacaucuaag

SEQ ID NO: 1905744 - RNA, 19 nt, Artificial Sequence
  Description of Artificial Sequence: Synthetic oligonucleotide
  Sense strand starting at position 850 of SEQ ID NO: 1879420
acuauauaacccugguaga

SEQ ID NO: 1905745 - RNA, 19 nt, Artificial Sequence
  Description of Artificial Sequence: Synthetic oligonucleotide
  Antisense strand to SEQ ID NO: 1905744
ucuaccaggguuauauagu

SEQ ID NO: 1905746 - RNA, 19 nt, Artificial Sequence
  Description of Artificial Sequence: Synthetic oligonucleotide
  Sense strand starting at position 851 of SEQ ID NO: 1879420
cuauauaacccugguagaa

SEQ ID NO: 1905747 - RNA, 19 nt, Artificial Sequence
  Description of Artificial Sequence: Synthetic oligonucleotide
  Antisense strand to SEQ ID NO: 1905746
uucuaccaggguuauauag

SEQ ID NO: 1905748 - RNA, 19 nt, Artificial Sequence
  Description of Artificial Sequence: Synthetic oligonucleotide
  Sense strand starting at position 870 of SEQ ID NO: 1879420
ccaguaucacaccaaaugu

SEQ ID NO: 1905749 - RNA, 19 nt, Artificial Sequence
  Description of Artificial Sequence: Synthetic oligonucleotide
  Antisense strand to SEQ ID NO: 1905748
acauuuggugugauacugg

SEQ ID NO: 1905750 - RNA, 19 nt, Artificial Sequence
  Description of Artificial Sequence: Synthetic oligonucleotide
  Sense strand starting at position 880 of SEQ ID NO: 1879420
accaaauguguuugauaaa

SEQ ID NO: 1905751 - RNA, 19 nt, Artificial Sequence
  Description of Artificial Sequence: Synthetic oligonucleotide
  Antisense strand to SEQ ID NO: 1905750
uuuaucaaacacauuuggu

SEQ ID NO: 1905752 - RNA, 19 nt, Artificial Sequence
  Description of Artificial Sequence: Synthetic oligonucleotide
  Sense strand starting at position 1081 of SEQ ID NO: 1879420
gcuauugaaucagucuaca

SEQ ID NO: 1905753 - RNA, 19 nt, Artificial Sequence
  Description of Artificial Sequence: Synthetic oligonucleotide
  Antisense strand to SEQ ID NO: 1905752
uguagacugauucaauagc

SEQ ID NO: 1905754 - RNA, 19 nt, Artificial Sequence
  Description of Artificial Sequence: Synthetic oligonucleotide
  Sense strand starting at position 1118 of SEQ ID NO: 1879420
acuacaauuuguguuguca

SEQ ID NO: 1905755 - RNA, 19 nt, Artificial Sequence
  Description of Artificial Sequence: Synthetic oligonucleotide
  Antisense strand to SEQ ID NO: 1905754
ugacaacacaaauuguagu

SEQ ID NO: 1905756 - RNA, 19 nt, Artificial Sequence
  Description of Artificial Sequence: Synthetic oligonucleotide
  Sense strand starting at position 1148 of SEQ ID NO: 1879420
gacuuuaaagcaugaguca

SEQ ID NO: 1905757 - RNA, 19 nt, Artificial Sequence
  Description of Artificial Sequence: Synthetic oligonucleotide
  Antisense strand to SEQ ID NO: 1905756
ugacucaugcuuuaaaguc

SEQ ID NO: 1905758 - RNA, 19 nt, Artificial Sequence
  Description of Artificial Sequence: Synthetic oligonucleotide
  Sense strand starting at position 1149 of SEQ ID NO: 1879420
acuuuaaagcaugagucau

SEQ ID NO: 1905759 - RNA, 19 nt, Artificial Sequence
  Description of Artificial Sequence: Synthetic oligonucleotide
  Antisense strand to SEQ ID NO: 1905758
augacucaugcuuuaaagu

SEQ ID NO: 1905760 - RNA, 19 nt, Artificial Sequence
  Description of Artificial Sequence: Synthetic oligonucleotide
  Sense strand starting at position 1151 of SEQ ID NO: 1879420
uuuaaagcaugagucauaa

SEQ ID NO: 1905761 - RNA, 19 nt, Artificial Sequence
  Description of Artificial Sequence: Synthetic oligonucleotide
  Antisense strand to SEQ ID NO: 1905760
uuaugacucaugcuuuaaa

SEQ ID NO: 1905762 - RNA, 19 nt, Artificial Sequence
  Description of Artificial Sequence: Synthetic oligonucleotide
  Sense strand starting at position 1171 of SEQ ID NO: 1879420
gccugugaagugcuauugu

SEQ ID NO: 1905763 - RNA, 19 nt, Artificial Sequence
  Description of Artificial Sequence: Synthetic oligonucleotide
  Antisense strand to SEQ ID NO: 1905762
acaauagcacuucacaggc

SEQ ID NO: 1905764 - RNA, 19 nt, Artificial Sequence
  Description of Artificial Sequence: Synthetic oligonucleotide
  Sense strand starting at position 1390 of SEQ ID NO: 1879420
ucauuaucaugaguacauu

SEQ ID NO: 1905765 - RNA, 19 nt, Artificial Sequence
  Description of Artificial Sequence: Synthetic oligonucleotide
  Antisense strand to SEQ ID NO: 1905764
aauguacucaugauaauga

SEQ ID NO: 1905766 - RNA, 19 nt, Artificial Sequence
  Description of Artificial Sequence: Synthetic oligonucleotide
  Sense strand starting at position 1453 of SEQ ID NO: 1879420
ugugaaucugcacauauaa

SEQ ID NO: 1905767 - RNA, 19 nt, Artificial Sequence
  Description of Artificial Sequence: Synthetic oligonucleotide
  Antisense strand to SEQ ID NO: 1905766
uuauaugugcagauucaca

SEQ ID NO: 1905768 - RNA, 19 nt, Artificial Sequence
  Description of Artificial Sequence: Synthetic oligonucleotide
  Sense strand starting at position 1537 of SEQ ID NO: 1879420
gcagaacagcuagaguaau

SEQ ID NO: 1905769 - RNA, 19 nt, Artificial Sequence
  Description of Artificial Sequence: Synthetic oligonucleotide
  Antisense strand to SEQ ID NO: 1905768
auuacucuagcuguucugc

SEQ ID NO: 1905770 - RNA, 19 nt, Artificial Sequence
  Description of Artificial Sequence: Synthetic oligonucleotide
  Sense strand starting at position 1754 of SEQ ID NO: 1879420
gggugugauagcuauacug

SEQ ID NO: 1905771 - RNA, 19 nt, Artificial Sequence
  Description of Artificial Sequence: Synthetic oligonucleotide
  Antisense strand to SEQ ID NO: 1905770
caguauagcuaucacaccc

SEQ ID NO: 1905772 - RNA, 19 nt, Artificial Sequence
  Description of Artificial Sequence: Synthetic oligonucleotide
  Sense strand starting at position 1787 of SEQ ID NO: 1879420
cuugaauguccuugaauau

SEQ ID NO: 1905773 - RNA, 19 nt, Artificial Sequence
  Description of Artificial Sequence: Synthetic oligonucleotide
  Antisense strand to SEQ ID NO: 1905772
auauucaaggacauucaag

SEQ ID NO: 1905774 - RNA, 19 nt, Artificial Sequence
  Description of Artificial Sequence: Synthetic oligonucleotide
  Sense strand starting at position 1788 of SEQ ID NO: 1879420
uugaauguccuugaauauc

SEQ ID NO: 1905775 - RNA, 19 nt, Artificial Sequence
  Description of Artificial Sequence: Synthetic oligonucleotide
  Antisense strand to SEQ ID NO: 1905774
gauauucaaggacauucaa

SEQ ID NO: 1905776 - RNA, 19 nt, Artificial Sequence
  Description of Artificial Sequence: Synthetic oligonucleotide
  Sense strand starting at position 1909 of SEQ ID NO: 1879420
agagaagucuuuguagguc

SEQ ID NO: 1905777 - RNA, 19 nt, Artificial Sequence
  Description of Artificial Sequence: Synthetic oligonucleotide
  Antisense strand to SEQ ID NO: 1905776
gaccuacaaagacuucucu

SEQ ID NO: 1905778 - RNA, 19 nt, Artificial Sequence
  Description of Artificial Sequence: Synthetic oligonucleotide
  Sense strand starting at position 2116 of SEQ ID NO: 1879420
agggaugaguggaacagua

SEQ ID NO: 1905779 - RNA, 19 nt, Artificial Sequence
  Description of Artificial Sequence: Synthetic oligonucleotide
  Antisense strand to SEQ ID NO: 1905778
uacuguuccacucaucccu

SEQ ID NO: 1905780 - RNA, 19 nt, Artificial Sequence
  Description of Artificial Sequence: Synthetic oligonucleotide
  Sense strand starting at position 2201 of SEQ ID NO: 1879420
augugacuuuaggcaauua

SEQ ID NO: 1905781 - RNA, 19 nt, Artificial Sequence
  Description of Artificial Sequence: Synthetic oligonucleotide
  Antisense strand to SEQ ID NO: 1905780
uaauugccuaaagucacau

SEQ ID NO: 1905782 - RNA, 19 nt, Artificial Sequence
  Description of Artificial Sequence: Synthetic oligonucleotide
  Sense strand starting at position 2239 of SEQ ID NO: 1879420
uuuccucaucgguagaaau

SEQ ID NO: 1905783 - RNA, 19 nt, Artificial Sequence
  Description of Artificial Sequence: Synthetic oligonucleotide
  Antisense strand to SEQ ID NO: 1905782
auuucuaccgaugaggaaa

SEQ ID NO: 1905784 - RNA, 19 nt, Artificial Sequence
  Description of Artificial Sequence: Synthetic oligonucleotide
  Sense strand starting at position 2241 of SEQ ID NO: 1879420
uccucaucgguagaaauaa

SEQ ID NO: 1905785 - RNA, 19 nt, Artificial Sequence
  Description of Artificial Sequence: Synthetic oligonucleotide
  Antisense strand to SEQ ID NO: 1905784
uuauuucuaccgaugagga

SEQ ID NO: 1905786 - RNA, 19 nt, Artificial Sequence
  Description of Artificial Sequence: Synthetic oligonucleotide
  Sense strand starting at position 2321 of SEQ ID NO: 1879420
uuaacuuguugauugauac

SEQ ID NO: 1905787 - RNA, 19 nt, Artificial Sequence
  Description of Artificial Sequence: Synthetic oligonucleotide
  Antisense strand to SEQ ID NO: 1905786
guaucaaucaacaaguuaa

SEQ ID NO: 1905788 - RNA, 19 nt, Artificial Sequence
  Description of Artificial Sequence: Synthetic oligonucleotide
  Sense strand starting at position 2586 of SEQ ID NO: 1879420
caacauaaucguuagugau

SEQ ID NO: 1905789 - RNA, 19 nt, Artificial Sequence
  Description of Artificial Sequence: Synthetic oligonucleotide
  Antisense strand to SEQ ID NO: 1905788
aucacuaacgauuauguug

SEQ ID NO: 1905790 - RNA, 19 nt, Artificial Sequence
  Description of Artificial Sequence: Synthetic oligonucleotide
  Sense strand starting at position 2820 of SEQ ID NO: 1879420
ugacuagugggcugaugau

SEQ ID NO: 1905791 - RNA, 19 nt, Artificial Sequence
  Description of Artificial Sequence: Synthetic oligonucleotide
  Antisense strand to SEQ ID NO: 1905790
aucaucagcccacuaguca

SEQ ID NO: 1905792 - RNA, 19 nt, Artificial Sequence
  Description of Artificial Sequence: Synthetic oligonucleotide
  Sense strand starting at position 2996 of SEQ ID NO: 1879420
uuugcaacauuauuggaaa

SEQ ID NO: 1905793 - RNA, 19 nt, Artificial Sequence
  Description of Artificial Sequence: Synthetic oligonucleotide
  Antisense strand to SEQ ID NO: 1905792
uuuccaauaauguugcaaa

SEQ ID NO: 1905794 - RNA, 19 nt, Artificial Sequence
  Description of Artificial Sequence: Synthetic oligonucleotide
  Sense strand starting at position 3008 of SEQ ID NO: 1879420
uuggaaauauagucccuaa

SEQ ID NO: 1905795 - RNA, 19 nt, Artificial Sequence
  Description of Artificial Sequence: Synthetic oligonucleotide
  Antisense strand to SEQ ID NO: 1905794
uuagggacuauauuuccaa

SEQ ID NO: 1905796 - RNA, 19 nt, Artificial Sequence
  Description of Artificial Sequence: Synthetic oligonucleotide
  Sense strand starting at position 3185 of SEQ ID NO: 1879420
gaccaaucuguuuggguca

SEQ ID NO: 1905797 - RNA, 19 nt, Artificial Sequence
  Description of Artificial Sequence: Synthetic oligonucleotide
  Antisense strand to SEQ ID NO: 1905796
ugacccaaacagauugguc

SEQ ID NO: 1905798 - RNA, 19 nt, Artificial Sequence
  Description of Artificial Sequence: Synthetic oligonucleotide
  Sense strand starting at position 3188 of SEQ ID NO: 1879420
caaucuguuugggucaaua

SEQ ID NO: 1905799 - RNA, 19 nt, Artificial Sequence
  Description of Artificial Sequence: Synthetic oligonucleotide
  Antisense strand to SEQ ID NO: 1905798
uauugacccaaacagauug

SEQ ID NO: 1905800 - RNA, 19 nt, Artificial Sequence
  Description of Artificial Sequence: Synthetic oligonucleotide
  Sense strand starting at position 3190 of SEQ ID NO: 1879420
aucuguuugggucaauaug

SEQ ID NO: 1905801 - RNA, 19 nt, Artificial Sequence
  Description of Artificial Sequence: Synthetic oligonucleotide
  Antisense strand to SEQ ID NO: 1905800
cauauugacccaaacagau

SEQ ID NO: 1905802 - RNA, 19 nt, Artificial Sequence
  Description of Artificial Sequence: Synthetic oligonucleotide
  Sense strand starting at position 3358 of SEQ ID NO: 1879420
uagggcuuucuuuaguaaa

SEQ ID NO: 1905803 - RNA, 19 nt, Artificial Sequence
  Description of Artificial Sequence: Synthetic oligonucleotide
  Antisense strand to SEQ ID NO: 1905802
uuuacuaaagaaagcccua

SEQ ID NO: 1905804 - RNA, 19 nt, Artificial Sequence
  Description of Artificial Sequence: Synthetic oligonucleotide
  Sense strand starting at position 3524 of SEQ ID NO: 1879420
agggaacccacaugaguuu

SEQ ID NO: 1905805 - RNA, 19 nt, Artificial Sequence
  Description of Artificial Sequence: Synthetic oligonucleotide
  Antisense strand to SEQ ID NO: 1905804
aaacucauguggguucccu

SEQ ID NO: 1905806 - RNA, 19 nt, Artificial Sequence
  Description of Artificial Sequence: Synthetic oligonucleotide
  Sense strand starting at position 3704 of SEQ ID NO: 1879420
uuugaauuacagugagaug

SEQ ID NO: 1905807 - RNA, 19 nt, Artificial Sequence
  Description of Artificial Sequence: Synthetic oligonucleotide
  Antisense strand to SEQ ID NO: 1905806
caucucacuguaauucaaa

SEQ ID NO: 1905808 - RNA, 19 nt, Artificial Sequence
  Description of Artificial Sequence: Synthetic oligonucleotide
  Sense strand starting at position 5 of SEQ ID NO: 1879421
ugguaagagagcugagacu

SEQ ID NO: 1905809 - RNA, 19 nt, Artificial Sequence
  Description of Artificial Sequence: Synthetic oligonucleotide
  Antisense strand to SEQ ID NO: 1905808
agucucagcucucuuacca

SEQ ID NO: 1905810 - RNA, 19 nt, Artificial Sequence
  Description of Artificial Sequence: Synthetic oligonucleotide
  Sense strand starting at position 16 of SEQ ID NO: 1879421
cugagacuuugugcccuaa

SEQ ID NO: 1905811 - RNA, 19 nt, Artificial Sequence
  Description of Artificial Sequence: Synthetic oligonucleotide
  Antisense strand to SEQ ID NO: 1905810
uuagggcacaaagucucag

SEQ ID NO: 1905812 - RNA, 19 nt, Artificial Sequence
  Description of Artificial Sequence: Synthetic oligonucleotide
  Sense strand starting at position 20 of SEQ ID NO: 1879421
gacuuugugcccuaaggga

SEQ ID NO: 1905813 - RNA, 19 nt, Artificial Sequence
  Description of Artificial Sequence: Synthetic oligonucleotide
  Antisense strand to SEQ ID NO: 1905812
ucccuuagggcacaaaguc

SEQ ID NO: 1905814 - RNA, 19 nt, Artificial Sequence
  Description of Artificial Sequence: Synthetic oligonucleotide
  Sense strand starting at position 244 of SEQ ID NO: 1879421
agacgagaauauguccaga

SEQ ID NO: 1905815 - RNA, 19 nt, Artificial Sequence
  Description of Artificial Sequence: Synthetic oligonucleotide
  Antisense strand to SEQ ID NO: 1905814
ucuggacauauucucgucu

SEQ ID NO: 1905816 - RNA, 19 nt, Artificial Sequence
  Description of Artificial Sequence: Synthetic oligonucleotide
  Sense strand starting at position 314 of SEQ ID NO: 1879421
aggcaaucaucuuuguaga

SEQ ID NO: 1905817 - RNA, 19 nt, Artificial Sequence
  Description of Artificial Sequence: Synthetic oligonucleotide
  Antisense strand to SEQ ID NO: 1905816
ucuacaaagaugauugccu

SEQ ID NO: 1905818 - RNA, 19 nt, Artificial Sequence
  Description of Artificial Sequence: Synthetic oligonucleotide
  Sense strand starting at position 315 of SEQ ID NO: 1879421
ggcaaucaucuuuguagac

SEQ ID NO: 1905819 - RNA, 19 nt, Artificial Sequence
  Description of Artificial Sequence: Synthetic oligonucleotide
  Antisense strand to SEQ ID NO: 1905818
gucuacaaagaugauugcc

SEQ ID NO: 1905820 - RNA, 19 nt, Artificial Sequence
  Description of Artificial Sequence: Synthetic oligonucleotide
  Sense strand starting at position 459 of SEQ ID NO: 1879421
gccuaauggcguuacagaa

SEQ ID NO: 1905821 - RNA, 19 nt, Artificial Sequence
  Description of Artificial Sequence: Synthetic oligonucleotide
  Antisense strand to SEQ ID NO: 1905820
uucuguaacgccauuaggc

SEQ ID NO: 1905822 - RNA, 19 nt, Artificial Sequence
  Description of Artificial Sequence: Synthetic oligonucleotide
  Sense strand starting at position 469 of SEQ ID NO: 1879421
guuacagaacggugaaaca

SEQ ID NO: 1905823 - RNA, 19 nt, Artificial Sequence
  Description of Artificial Sequence: Synthetic oligonucleotide
  Antisense strand to SEQ ID NO: 1905822
uguuucaccguucuguaac

SEQ ID NO: 1905824 - RNA, 19 nt, Artificial Sequence
  Description of Artificial Sequence: Synthetic oligonucleotide
  Sense strand starting at position 1140 of SEQ ID NO: 1879421
ccuggaggccaguauucua

SEQ ID NO: 1905825 - RNA, 19 nt, Artificial Sequence
  Description of Artificial Sequence: Synthetic oligonucleotide
  Antisense strand to SEQ ID NO: 1905824
uagaauacuggccuccagg

SEQ ID NO: 1905826 - RNA, 19 nt, Artificial Sequence
  Description of Artificial Sequence: Synthetic oligonucleotide
  Sense strand starting at position 1148 of SEQ ID NO: 1879421
ccaguauucuaagugaggu

SEQ ID NO: 1905827 - RNA, 19 nt, Artificial Sequence
  Description of Artificial Sequence: Synthetic oligonucleotide
  Antisense strand to SEQ ID NO: 1905826
accucacuuagaauacugg

SEQ ID NO: 1905828 - RNA, 19 nt, Artificial Sequence
  Description of Artificial Sequence: Synthetic oligonucleotide
  Sense strand starting at position 1150 of SEQ ID NO: 1879421
aguauucuaagugagguaa

SEQ ID NO: 1905829 - RNA, 19 nt, Artificial Sequence
  Description of Artificial Sequence: Synthetic oligonucleotide
  Antisense strand to SEQ ID NO: 1905828
uuaccucacuuagaauacu

SEQ ID NO: 1905830 - RNA, 19 nt, Artificial Sequence
  Description of Artificial Sequence: Synthetic oligonucleotide
  Sense strand starting at position 1474 of SEQ ID NO: 1879421
gcaauauggagucagcugu

SEQ ID NO: 1905831 - RNA, 19 nt, Artificial Sequence
  Description of Artificial Sequence: Synthetic oligonucleotide
  Antisense strand to SEQ ID NO: 1905830
acagcugacuccauauugc

SEQ ID NO: 1905832 - RNA, 19 nt, Artificial Sequence
  Description of Artificial Sequence: Synthetic oligonucleotide
  Sense strand starting at position 1491 of SEQ ID NO: 1879421
guguuagauuucucucagu

SEQ ID NO: 1905833 - RNA, 19 nt, Artificial Sequence
  Description of Artificial Sequence: Synthetic oligonucleotide
  Antisense strand to SEQ ID NO: 1905832
acugagagaaaucuaacac

SEQ ID NO: 1905834 - RNA, 19 nt, Artificial Sequence
  Description of Artificial Sequence: Synthetic oligonucleotide
  Sense strand starting at position 1567 of SEQ ID NO: 1879421
gguagaucccuaugggaag

SEQ ID NO: 1905835 - RNA, 19 nt, Artificial Sequence
  Description of Artificial Sequence: Synthetic oligonucleotide
  Antisense strand to SEQ ID NO: 1905834
cuucccauagggaucuacc

SEQ ID NO: 1905836 - RNA, 19 nt, Artificial Sequence
  Description of Artificial Sequence: Synthetic oligonucleotide
  Sense strand starting at position 1590 of SEQ ID NO: 1879421
gaguccagcccagaucuua

SEQ ID NO: 1905837 - RNA, 19 nt, Artificial Sequence
  Description of Artificial Sequence: Synthetic oligonucleotide
  Antisense strand to SEQ ID NO: 1905836
uaagaucugggcuggacuc

SEQ ID NO: 1905838 - RNA, 19 nt, Artificial Sequence
  Description of Artificial Sequence: Synthetic oligonucleotide
  Sense strand starting at position 1988 of SEQ ID NO: 1879421
uaagcaucucacuggaagu

SEQ ID NO: 1905839 - RNA, 19 nt, Artificial Sequence
  Description of Artificial Sequence: Synthetic oligonucleotide
  Antisense strand to SEQ ID NO: 1905838
acuuccagugagaugcuua

SEQ ID NO: 1905840 - RNA, 19 nt, Artificial Sequence
  Description of Artificial Sequence: Synthetic oligonucleotide
  Sense strand starting at position 1999 of SEQ ID NO: 1879421
cuggaagugucuucgaaug

SEQ ID NO: 1905841 - RNA, 19 nt, Artificial Sequence
  Description of Artificial Sequence: Synthetic oligonucleotide
  Antisense strand to SEQ ID NO: 1905840
cauucgaagacacuuccag

SEQ ID NO: 1905842 - RNA, 19 nt, Artificial Sequence
  Description of Artificial Sequence: Synthetic oligonucleotide
  Sense strand starting at position 2004 of SEQ ID NO: 1879421
agugucuucgaauggaagu

SEQ ID NO: 1905843 - RNA, 19 nt, Artificial Sequence
  Description of Artificial Sequence: Synthetic oligonucleotide
  Antisense strand to SEQ ID NO: 1905842
acuuccauucgaagacacu

SEQ ID NO: 1905844 - RNA, 19 nt, Artificial Sequence
  Description of Artificial Sequence: Synthetic oligonucleotide
  Sense strand starting at position 2363 of SEQ ID NO: 1879421
gaucucagucaauguagaa

SEQ ID NO: 1905845 - RNA, 19 nt, Artificial Sequence
  Description of Artificial Sequence: Synthetic oligonucleotide
  Antisense strand to SEQ ID NO: 1905844
uucuacauugacugagauc

SEQ ID NO: 1905846 - RNA, 19 nt, Artificial Sequence
  Description of Artificial Sequence: Synthetic oligonucleotide
  Sense strand starting at position 2564 of SEQ ID NO: 1879421
gugcuuccaggucauaaga

SEQ ID NO: 1905847 - RNA, 19 nt, Artificial Sequence
  Description of Artificial Sequence: Synthetic oligonucleotide
  Antisense strand to SEQ ID NO: 1905846
ucuuaugaccuggaagcac

SEQ ID NO: 1905848 - RNA, 19 nt, Artificial Sequence
  Description of Artificial Sequence: Synthetic oligonucleotide
  Sense strand starting at position 2587 of SEQ ID NO: 1879421
aaagguugauaagagauga

SEQ ID NO: 1905849 - RNA, 19 nt, Artificial Sequence
  Description of Artificial Sequence: Synthetic oligonucleotide
  Antisense strand to SEQ ID NO: 1905848
ucaucucuuaucaaccuuu

SEQ ID NO: 1905850 - RNA, 19 nt, Artificial Sequence
  Description of Artificial Sequence: Synthetic oligonucleotide
  Sense strand starting at position 2604 of SEQ ID NO: 1879421
gaaagauugcauugagucc

SEQ ID NO: 1905851 - RNA, 19 nt, Artificial Sequence
  Description of Artificial Sequence: Synthetic oligonucleotide
  Antisense strand to SEQ ID NO: 1905850
ggacucaaugcaaucuuuc

SEQ ID NO: 1905852 - RNA, 19 nt, Artificial Sequence
  Description of Artificial Sequence: Synthetic oligonucleotide
  Sense strand starting at position 2611 of SEQ ID NO: 1879421
ugcauugaguccuugauca

SEQ ID NO: 1905853 - RNA, 19 nt, Artificial Sequence
  Description of Artificial Sequence: Synthetic oligonucleotide
  Antisense strand to SEQ ID NO: 1905852
ugaucaaggacucaaugca

SEQ ID NO: 1905854 - RNA, 19 nt, Artificial Sequence
  Description of Artificial Sequence: Synthetic oligonucleotide
  Sense strand starting at position 2738 of SEQ ID NO: 1879421
ggaugacuuucugucugca

SEQ ID NO: 1905855 - RNA, 19 nt, Artificial Sequence
  Description of Artificial Sequence: Synthetic oligonucleotide
  Antisense strand to SEQ ID NO: 1905854
ugcagacagaaagucaucc

SEQ ID NO: 1905856 - RNA, 19 nt, Artificial Sequence
  Description of Artificial Sequence: Synthetic oligonucleotide
  Sense strand starting at position 2855 of SEQ ID NO: 1879421
gcaguuugugagggaggua

SEQ ID NO: 1905857 - RNA, 19 nt, Artificial Sequence
  Description of Artificial Sequence: Synthetic oligonucleotide
  Antisense strand to SEQ ID NO: 1905856
uaccucccucacaaacugc

SEQ ID NO: 1905858 - RNA, 19 nt, Artificial Sequence
  Description of Artificial Sequence: Synthetic oligonucleotide
  Sense strand starting at position 2856 of SEQ ID NO: 1879421
caguuugugagggagguau

SEQ ID NO: 1905859 - RNA, 19 nt, Artificial Sequence
  Description of Artificial Sequence: Synthetic oligonucleotide
  Antisense strand to SEQ ID NO: 1905858
auaccucccucacaaacug

SEQ ID NO: 1905860 - RNA, 19 nt, Artificial Sequence
  Description of Artificial Sequence: Synthetic oligonucleotide
  Sense strand starting at position 2864 of SEQ ID NO: 1879421
gagggagguauguagcuau

SEQ ID NO: 1905861 - RNA, 19 nt, Artificial Sequence
  Description of Artificial Sequence: Synthetic oligonucleotide
  Antisense strand to SEQ ID NO: 1905860
auagcuacauaccucccuc

SEQ ID NO: 1905862 - RNA, 19 nt, Artificial Sequence
  Description of Artificial Sequence: Synthetic oligonucleotide
  Sense strand starting at position 2867 of SEQ ID NO: 1879421
ggagguauguagcuaucuu

SEQ ID NO: 1905863 - RNA, 19 nt, Artificial Sequence
  Description of Artificial Sequence: Synthetic oligonucleotide
  Antisense strand to SEQ ID NO: 1905862
aagauagcuacauaccucc

SEQ ID NO: 1905864 - RNA, 19 nt, Artificial Sequence
  Description of Artificial Sequence: Synthetic oligonucleotide
  Sense strand starting at position 2871 of SEQ ID NO: 1879421
guauguagcuaucuuauuu

SEQ ID NO: 1905865 - RNA, 19 nt, Artificial Sequence
  Description of Artificial Sequence: Synthetic oligonucleotide
  Antisense strand to SEQ ID NO: 1905864
aaauaagauagcuacauac

SEQ ID NO: 1905866 - RNA, 19 nt, Artificial Sequence
  Description of Artificial Sequence: Synthetic oligonucleotide
  Sense strand starting at position 2906 of SEQ ID NO: 1879421
guggguuugccugacauag

SEQ ID NO: 1905867 - RNA, 19 nt, Artificial Sequence
  Description of Artificial Sequence: Synthetic oligonucleotide
  Antisense strand to SEQ ID NO: 1905866
cuaugucaggcaaacccac

SEQ ID NO: 1905868 - RNA, 19 nt, Artificial Sequence
  Description of Artificial Sequence: Synthetic oligonucleotide
  Sense strand starting at position 3043 of SEQ ID NO: 1879421
aaacgaaccuguucugaga

SEQ ID NO: 1905869 - RNA, 19 nt, Artificial Sequence
  Description of Artificial Sequence: Synthetic oligonucleotide
  Antisense strand to SEQ ID NO: 1905868
ucucagaacagguucguuu

SEQ ID NO: 1905870 - RNA, 19 nt, Artificial Sequence
  Description of Artificial Sequence: Synthetic oligonucleotide
  Sense strand starting at position 3201 of SEQ ID NO: 1879421
ugccacucgcaaugaauuu

SEQ ID NO: 1905871 - RNA, 19 nt, Artificial Sequence
  Description of Artificial Sequence: Synthetic oligonucleotide
  Antisense strand to SEQ ID NO: 1905870
aaauucauugcgaguggca

SEQ ID NO: 1905872 - RNA, 19 nt, Artificial Sequence
  Description of Artificial Sequence: Synthetic oligonucleotide
  Sense strand starting at position 3207 of SEQ ID NO: 1879421
ucgcaaugaauuugcgaca

SEQ ID NO: 1905873 - RNA, 19 nt, Artificial Sequence
  Description of Artificial Sequence: Synthetic oligonucleotide
  Antisense strand to SEQ ID NO: 1905872
ugucgcaaauucauugcga

SEQ ID NO: 1905874 - RNA, 19 nt, Artificial Sequence
  Description of Artificial Sequence: Synthetic oligonucleotide
  Sense strand starting at position 3232 of SEQ ID NO: 1879421
uuaguugacugcucugaac

SEQ ID NO: 1905875 - RNA, 19 nt, Artificial Sequence
  Description of Artificial Sequence: Synthetic oligonucleotide
  Antisense strand to SEQ ID NO: 1905874
guucagagcagucaacuaa

SEQ ID NO: 1905876 - RNA, 19 nt, Artificial Sequence
  Description of Artificial Sequence: Synthetic oligonucleotide
  Sense strand starting at position 3234 of SEQ ID NO: 1879421
aguugacugcucugaaccu

SEQ ID NO: 1905877 - RNA, 19 nt, Artificial Sequence
  Description of Artificial Sequence: Synthetic oligonucleotide
  Antisense strand to SEQ ID NO: 1905876
agguucagagcagucaacu

SEQ ID NO: 1905878 - RNA, 19 nt, Artificial Sequence
  Description of Artificial Sequence: Synthetic oligonucleotide
  Sense strand starting at position 3275 of SEQ ID NO: 1879421
gggccuuaaggccaguuau

SEQ ID NO: 1905879 - RNA, 19 nt, Artificial Sequence
  Description of Artificial Sequence: Synthetic oligonucleotide
  Antisense strand to SEQ ID NO: 1905878
auaacuggccuuaaggccc

SEQ ID NO: 1905880 - RNA, 19 nt, Artificial Sequence
  Description of Artificial Sequence: Synthetic oligonucleotide
  Sense strand starting at position 3374 of SEQ ID NO: 1879421
aggaacuuucccugccaga

SEQ ID NO: 1905881 - RNA, 19 nt, Artificial Sequence
  Description of Artificial Sequence: Synthetic oligonucleotide
  Antisense strand to SEQ ID NO: 1905880
ucuggcagggaaaguuccu

SEQ ID NO: 1905882 - RNA, 19 nt, Artificial Sequence
  Description of Artificial Sequence: Synthetic oligonucleotide
  Sense strand starting at position 3397 of SEQ ID NO: 1879421
auuggucccucugcuuaaa

SEQ ID NO: 1905883 - RNA, 19 nt, Artificial Sequence
  Description of Artificial Sequence: Synthetic oligonucleotide
  Antisense strand to SEQ ID NO: 1905882
uuuaagcagagggaccaau

SEQ ID NO: 1905884 - RNA, 19 nt, Artificial Sequence
  Description of Artificial Sequence: Synthetic oligonucleotide
  Sense strand starting at position 3420 of SEQ ID NO: 1879421
ggaccaaaucugcauugcu

SEQ ID NO: 1905885 - RNA, 19 nt, Artificial Sequence
  Description of Artificial Sequence: Synthetic oligonucleotide
  Antisense strand to SEQ ID NO: 1905884
agcaaugcagauuuggucc

SEQ ID NO: 1905886 - RNA, 19 nt, Artificial Sequence
  Description of Artificial Sequence: Synthetic oligonucleotide
  Sense strand starting at position 3444 of SEQ ID NO: 1879421
cccagugccuagguuaaga

SEQ ID NO: 1905887 - RNA, 19 nt, Artificial Sequence
  Description of Artificial Sequence: Synthetic oligonucleotide
  Antisense strand to SEQ ID NO: 1905886
ucuuaaccuaggcacuggg

SEQ ID NO: 1905888 - RNA, 19 nt, Artificial Sequence
  Description of Artificial Sequence: Synthetic oligonucleotide
  Sense strand starting at position 216 of SEQ ID NO: 1879422
ccgauaucauaccauugca

SEQ ID NO: 1905889 - RNA, 19 nt, Artificial Sequence
  Description of Artificial Sequence: Synthetic oligonucleotide
  Antisense strand to SEQ ID NO: 1905888
ugcaaugguaugauaucgg

SEQ ID NO: 1905890 - RNA, 19 nt, Artificial Sequence
  Description of Artificial Sequence: Synthetic oligonucleotide
  Sense strand starting at position 307 of SEQ ID NO: 1879422
uguaauagcuguuugguca

SEQ ID NO: 1905891 - RNA, 19 nt, Artificial Sequence
  Description of Artificial Sequence: Synthetic oligonucleotide
  Antisense strand to SEQ ID NO: 1905890
ugaccaaacagcuauuaca

SEQ ID NO: 1905892 - RNA, 19 nt, Artificial Sequence
  Description of Artificial Sequence: Synthetic oligonucleotide
  Sense strand starting at position 311 of SEQ ID NO: 1879422
auagcuguuuggucaggau

SEQ ID NO: 1905893 - RNA, 19 nt, Artificial Sequence
  Description of Artificial Sequence: Synthetic oligonucleotide
  Antisense strand to SEQ ID NO: 1905892
auccugaccaaacagcuau

SEQ ID NO: 1905894 - RNA, 19 nt, Artificial Sequence
  Description of Artificial Sequence: Synthetic oligonucleotide
  Sense strand starting at position 331 of SEQ ID NO: 1879422
gggucaaugcuguaacaaa

SEQ ID NO: 1905895 - RNA, 19 nt, Artificial Sequence
  Description of Artificial Sequence: Synthetic oligonucleotide
  Antisense strand to SEQ ID NO: 1905894
uuuguuacagcauugaccc

SEQ ID NO: 1905896 - RNA, 19 nt, Artificial Sequence
  Description of Artificial Sequence: Synthetic oligonucleotide
  Sense strand starting at position 364 of SEQ ID NO: 1879422
guggguugugacuaagaaa

SEQ ID NO: 1905897 - RNA, 19 nt, Artificial Sequence
  Description of Artificial Sequence: Synthetic oligonucleotide
  Antisense strand to SEQ ID NO: 1905896
uuucuuagucacaacccac

SEQ ID NO: 1905898 - RNA, 19 nt, Artificial Sequence
  Description of Artificial Sequence: Synthetic oligonucleotide
  Sense strand starting at position 367 of SEQ ID NO: 1879422
gguugugacuaagaaagcu

SEQ ID NO: 1905899 - RNA, 19 nt, Artificial Sequence
  Description of Artificial Sequence: Synthetic oligonucleotide
  Antisense strand to SEQ ID NO: 1905898
agcuuucuuagucacaacc

SEQ ID NO: 1905900 - RNA, 19 nt, Artificial Sequence
  Description of Artificial Sequence: Synthetic oligonucleotide
  Sense strand starting at position 383 of SEQ ID NO: 1879422
gcucauuucuuguucccau

SEQ ID NO: 1905901 - RNA, 19 nt, Artificial Sequence
  Description of Artificial Sequence: Synthetic oligonucleotide
  Antisense strand to SEQ ID NO: 1905900
augggaacaagaaaugagc

SEQ ID NO: 1905902 - RNA, 19 nt, Artificial Sequence
  Description of Artificial Sequence: Synthetic oligonucleotide
  Sense strand starting at position 434 of SEQ ID NO: 1879422
gaauuagcuccauguaguc

SEQ ID NO: 1905903 - RNA, 19 nt, Artificial Sequence
  Description of Artificial Sequence: Synthetic oligonucleotide
  Antisense strand to SEQ ID NO: 1905902
gacuacauggagcuaauuc

SEQ ID NO: 1905904 - RNA, 19 nt, Artificial Sequence
  Description of Artificial Sequence: Synthetic oligonucleotide
  Sense strand starting at position 488 of SEQ ID NO: 1879422
ugccaucuccuaggguauu

SEQ ID NO: 1905905 - RNA, 19 nt, Artificial Sequence
  Description of Artificial Sequence: Synthetic oligonucleotide
  Antisense strand to SEQ ID NO: 1905904
aauacccuaggagauggca

SEQ ID NO: 1905906 - RNA, 19 nt, Artificial Sequence
  Description of Artificial Sequence: Synthetic oligonucleotide
  Sense strand starting at position 857 of SEQ ID NO: 1879422
uggagaacuucucagugaa

SEQ ID NO: 1905907 - RNA, 19 nt, Artificial Sequence
  Description of Artificial Sequence: Synthetic oligonucleotide
  Antisense strand to SEQ ID NO: 1905906
uucacugagaaguucucca

SEQ ID NO: 1905908 - RNA, 19 nt, Artificial Sequence
  Description of Artificial Sequence: Synthetic oligonucleotide
  Sense strand starting at position 884 of SEQ ID NO: 1879422
uugccauugccugaaccua

SEQ ID NO: 1905909 - RNA, 19 nt, Artificial Sequence
  Description of Artificial Sequence: Synthetic oligonucleotide
  Antisense strand to SEQ ID NO: 1905908
uagguucaggcaauggcaa

SEQ ID NO: 1905910 - RNA, 19 nt, Artificial Sequence
  Description of Artificial Sequence: Synthetic oligonucleotide
  Sense strand starting at position 958 of SEQ ID NO: 1879422
gugugaugcacuggagacu

SEQ ID NO: 1905911 - RNA, 19 nt, Artificial Sequence
  Description of Artificial Sequence: Synthetic oligonucleotide
  Antisense strand to SEQ ID NO: 1905910
agucuccagugcaucacac

SEQ ID NO: 1905912 - RNA, 19 nt, Artificial Sequence
  Description of Artificial Sequence: Synthetic oligonucleotide
  Sense strand starting at position 967 of SEQ ID NO: 1879422
acuggagacuuacaaggua

SEQ ID NO: 1905913 - RNA, 19 nt, Artificial Sequence
  Description of Artificial Sequence: Synthetic oligonucleotide
  Antisense strand to SEQ ID NO: 1905912
uaccuuguaagucuccagu

SEQ ID NO: 1905914 - RNA, 19 nt, Artificial Sequence
  Description of Artificial Sequence: Synthetic oligonucleotide
  Sense strand starting at position 979 of SEQ ID NO: 1879422
caagguaucccaugaagua

SEQ ID NO: 1905915 - RNA, 19 nt, Artificial Sequence
  Description of Artificial Sequence: Synthetic oligonucleotide
  Antisense strand to SEQ ID NO: 1905914
uacuucaugggauaccuug

SEQ ID NO: 1905916 - RNA, 19 nt, Artificial Sequence
  Description of Artificial Sequence: Synthetic oligonucleotide
  Sense strand starting at position 1066 of SEQ ID NO: 1879422
agucaauagcacugagaac

SEQ ID NO: 1905917 - RNA, 19 nt, Artificial Sequence
  Description of Artificial Sequence: Synthetic oligonucleotide
  Antisense strand to SEQ ID NO: 1905916
guucucagugcuauugacu

SEQ ID NO: 1905918 - RNA, 19 nt, Artificial Sequence
  Description of Artificial Sequence: Synthetic oligonucleotide
  Sense strand starting at position 1305 of SEQ ID NO: 1879422
gaggcuaaggcgcgagaau

SEQ ID NO: 1905919 - RNA, 19 nt, Artificial Sequence
  Description of Artificial Sequence: Synthetic oligonucleotide
  Antisense strand to SEQ ID NO: 1905918
auucucgcgccuuagccuc

SEQ ID NO: 1905920 - RNA, 19 nt, Artificial Sequence
  Description of Artificial Sequence: Synthetic oligonucleotide
  Sense strand starting at position 1316 of SEQ ID NO: 1879422
gcgagaaucggcugaacug

SEQ ID NO: 1905921 - RNA, 19 nt, Artificial Sequence
  Description of Artificial Sequence: Synthetic oligonucleotide
  Antisense strand to SEQ ID NO: 1905920
caguucagccgauucucgc

SEQ ID NO: 1905922 - RNA, 19 nt, Artificial Sequence
  Description of Artificial Sequence: Synthetic oligonucleotide
  Sense strand starting at position 1451 of SEQ ID NO: 1879422
aggugaugagucuggaaag

SEQ ID NO: 1905923 - RNA, 19 nt, Artificial Sequence
  Description of Artificial Sequence: Synthetic oligonucleotide
  Antisense strand to SEQ ID NO: 1905922
cuuuccagacucaucaccu

SEQ ID NO: 1905924 - RNA, 19 nt, Artificial Sequence
  Description of Artificial Sequence: Synthetic oligonucleotide
  Sense strand starting at position 1514 of SEQ ID NO: 1879422
aaacacuuguguuaggguu

SEQ ID NO: 1905925 - RNA, 19 nt, Artificial Sequence
  Description of Artificial Sequence: Synthetic oligonucleotide
  Antisense strand to SEQ ID NO: 1905924
aacccuaacacaaguguuu

SEQ ID NO: 1905926 - RNA, 19 nt, Artificial Sequence
  Description of Artificial Sequence: Synthetic oligonucleotide
  Sense strand starting at position 2031 of SEQ ID NO: 1879422
ggucauaauuaugccuaaa

SEQ ID NO: 1905927 - RNA, 19 nt, Artificial Sequence
  Description of Artificial Sequence: Synthetic oligonucleotide
  Antisense strand to SEQ ID NO: 1905926
uuuaggcauaauuaugacc

SEQ ID NO: 1905928 - RNA, 19 nt, Artificial Sequence
  Description of Artificial Sequence: Synthetic oligonucleotide
  Sense strand starting at position 2294 of SEQ ID NO: 1879422
cauggucauaggugguauu

SEQ ID NO: 1905929 - RNA, 19 nt, Artificial Sequence
  Description of Artificial Sequence: Synthetic oligonucleotide
  Antisense strand to SEQ ID NO: 1905928
aauaccaccuaugaccaug

SEQ ID NO: 1905930 - RNA, 19 nt, Artificial Sequence
  Description of Artificial Sequence: Synthetic oligonucleotide
  Sense strand starting at position 2297 of SEQ ID NO: 1879422
ggucauaggugguauugau

SEQ ID NO: 1905931 - RNA, 19 nt, Artificial Sequence
  Description of Artificial Sequence: Synthetic oligonucleotide
  Antisense strand to SEQ ID NO: 1905930
aucaauaccaccuaugacc

SEQ ID NO: 1905932 - RNA, 19 nt, Artificial Sequence
  Description of Artificial Sequence: Synthetic oligonucleotide
  Sense strand starting at position 2301 of SEQ ID NO: 1879422
auaggugguauugaugauu

SEQ ID NO: 1905933 - RNA, 19 nt, Artificial Sequence
  Description of Artificial Sequence: Synthetic oligonucleotide
  Antisense strand to SEQ ID NO: 1905932
aaucaucaauaccaccuau

SEQ ID NO: 1905934 - RNA, 19 nt, Artificial Sequence
  Description of Artificial Sequence: Synthetic oligonucleotide
  Sense strand starting at position 2447 of SEQ ID NO: 1879422
ccuggauugcgcuauugua

SEQ ID NO: 1905935 - RNA, 19 nt, Artificial Sequence
  Description of Artificial Sequence: Synthetic oligonucleotide
  Antisense strand to SEQ ID NO: 1905934
uacaauagcgcaauccagg

SEQ ID NO: 1905936 - RNA, 19 nt, Artificial Sequence
  Description of Artificial Sequence: Synthetic oligonucleotide
  Sense strand starting at position 2449 of SEQ ID NO: 1879422
uggauugcgcuauuguagu

SEQ ID NO: 1905937 - RNA, 19 nt, Artificial Sequence
  Description of Artificial Sequence: Synthetic oligonucleotide
  Antisense strand to SEQ ID NO: 1905936
acuacaauagcgcaaucca

SEQ ID NO: 1905938 - RNA, 19 nt, Artificial Sequence
  Description of Artificial Sequence: Synthetic oligonucleotide
  Sense strand starting at position 2455 of SEQ ID NO: 1879422
gcgcuauuguaguuuccca

SEQ ID NO: 1905939 - RNA, 19 nt, Artificial Sequence
  Description of Artificial Sequence: Synthetic oligonucleotide
  Antisense strand to SEQ ID NO: 1905938
ugggaaacuacaauagcgc

SEQ ID NO: 1905940 - RNA, 19 nt, Artificial Sequence
  Description of Artificial Sequence: Synthetic oligonucleotide
  Sense strand starting at position 2513 of SEQ ID NO: 1879422
ucuaaaggauguccuguau

SEQ ID NO: 1905941 - RNA, 19 nt, Artificial Sequence
  Description of Artificial Sequence: Synthetic oligonucleotide
  Antisense strand to SEQ ID NO: 1905940
auacaggacauccuuuaga

SEQ ID NO: 1905942 - RNA, 19 nt, Artificial Sequence
  Description of Artificial Sequence: Synthetic oligonucleotide
  Sense strand starting at position 2517 of SEQ ID NO: 1879422
aaggauguccuguauucca

SEQ ID NO: 1905943 - RNA, 19 nt, Artificial Sequence
  Description of Artificial Sequence: Synthetic oligonucleotide
  Antisense strand to SEQ ID NO: 1905942
uggaauacaggacauccuu

SEQ ID NO: 1905944 - RNA, 19 nt, Artificial Sequence
  Description of Artificial Sequence: Synthetic oligonucleotide
  Sense strand starting at position 2811 of SEQ ID NO: 1879422
aagagcgcucuguaacaca

SEQ ID NO: 1905945 - RNA, 19 nt, Artificial Sequence
  Description of Artificial Sequence: Synthetic oligonucleotide
  Antisense strand to SEQ ID NO: 1905944
uguguuacagagcgcucuu

SEQ ID NO: 1905946 - RNA, 19 nt, Artificial Sequence
  Description of Artificial Sequence: Synthetic oligonucleotide
  Sense strand starting at position 3211 of SEQ ID NO: 1879422
augagauacucugacucaa

SEQ ID NO: 1905947 - RNA, 19 nt, Artificial Sequence
  Description of Artificial Sequence: Synthetic oligonucleotide
  Antisense strand to SEQ ID NO: 1905946
uugagucagaguaucucau

SEQ ID NO: 1905948 - RNA, 19 nt, Artificial Sequence
  Description of Artificial Sequence: Synthetic oligonucleotide
  Sense strand starting at position 3213 of SEQ ID NO: 1879422
gagauacucugacucaagu

SEQ ID NO: 1905949 - RNA, 19 nt, Artificial Sequence
  Description of Artificial Sequence: Synthetic oligonucleotide
  Antisense strand to SEQ ID NO: 1905948
acuugagucagaguaucuc

SEQ ID NO: 1905950 - RNA, 19 nt, Artificial Sequence
  Description of Artificial Sequence: Synthetic oligonucleotide
  Sense strand starting at position 3279 of SEQ ID NO: 1879422
aagccuaugcaccgaguua

SEQ ID NO: 1905951 - RNA, 19 nt, Artificial Sequence
  Description of Artificial Sequence: Synthetic oligonucleotide
  Antisense strand to SEQ ID NO: 1905950
uaacucggugcauaggcuu

SEQ ID NO: 1905952 - RNA, 19 nt, Artificial Sequence
  Description of Artificial Sequence: Synthetic oligonucleotide
  Sense strand starting at position 3280 of SEQ ID NO: 1879422
agccuaugcaccgaguuaa

SEQ ID NO: 1905953 - RNA, 19 nt, Artificial Sequence
  Description of Artificial Sequence: Synthetic oligonucleotide
  Antisense strand to SEQ ID NO: 1905952
uuaacucggugcauaggcu

SEQ ID NO: 1905954 - RNA, 19 nt, Artificial Sequence
  Description of Artificial Sequence: Synthetic oligonucleotide
  Sense strand starting at position 3352 of SEQ ID NO: 1879422
ggaugaagauauuaaaguu

SEQ ID NO: 1905955 - RNA, 19 nt, Artificial Sequence
  Description of Artificial Sequence: Synthetic oligonucleotide
  Antisense strand to SEQ ID NO: 1905954
aacuuuaauaucuucaucc

SEQ ID NO: 1905956 - RNA, 19 nt, Artificial Sequence
  Description of Artificial Sequence: Synthetic oligonucleotide
  Sense strand starting at position 3484 of SEQ ID NO: 1879422
gggcaaguacuugaccuuu

SEQ ID NO: 1905957 - RNA, 19 nt, Artificial Sequence
  Description of Artificial Sequence: Synthetic oligonucleotide
  Antisense strand to SEQ ID NO: 1905956
aaaggucaaguacuugccc

SEQ ID NO: 1905958 - RNA, 19 nt, Artificial Sequence
  Description of Artificial Sequence: Synthetic oligonucleotide
  Sense strand starting at position 3629 of SEQ ID NO: 1879422
uacgcuguuagguauaaga

SEQ ID NO: 1905959 - RNA, 19 nt, Artificial Sequence
  Description of Artificial Sequence: Synthetic oligonucleotide
  Antisense strand to SEQ ID NO: 1905958
ucuuauaccuaacagcgua

SEQ ID NO: 1905960 - RNA, 19 nt, Artificial Sequence
  Description of Artificial Sequence: Synthetic oligonucleotide
  Sense strand starting at position 3640 of SEQ ID NO: 1879422
guauaagaggccuaccuuu

SEQ ID NO: 1905961 - RNA, 19 nt, Artificial Sequence
  Description of Artificial Sequence: Synthetic oligonucleotide
  Antisense strand to SEQ ID NO: 1905960
aaagguaggccucuuauac

SEQ ID NO: 1905962 - RNA, 19 nt, Artificial Sequence
  Description of Artificial Sequence: Synthetic oligonucleotide
  Sense strand starting at position 3850 of SEQ ID NO: 1879422
ggaaccacugauugaugua

SEQ ID NO: 1905963 - RNA, 19 nt, Artificial Sequence
  Description of Artificial Sequence: Synthetic oligonucleotide
  Antisense strand to SEQ ID NO: 1905962
uacaucaaucagugguucc

SEQ ID NO: 1905964 - RNA, 19 nt, Artificial Sequence
  Description of Artificial Sequence: Synthetic oligonucleotide
  Sense strand starting at position 3853 of SEQ ID NO: 1879422
accacugauugauguagua

SEQ ID NO: 1905965 - RNA, 19 nt, Artificial Sequence
  Description of Artificial Sequence: Synthetic oligonucleotide
  Antisense strand to SEQ ID NO: 1905964
uacuacaucaaucaguggu

SEQ ID NO: 1905966 - RNA, 19 nt, Artificial Sequence
  Description of Artificial Sequence: Synthetic oligonucleotide
  Sense strand starting at position 3862 of SEQ ID NO: 1879422
ugauguaguaguuagaaca

SEQ ID NO: 1905967 - RNA, 19 nt, Artificial Sequence
  Description of Artificial Sequence: Synthetic oligonucleotide
  Antisense strand to SEQ ID NO: 1905966
uguucuaacuacuacauca

SEQ ID NO: 1905968 - RNA, 19 nt, Artificial Sequence
  Description of Artificial Sequence: Synthetic oligonucleotide
  Sense strand starting at position 2 of SEQ ID NO: 1879423
ucuuguugccuggguauuu

SEQ ID NO: 1905969 - RNA, 19 nt, Artificial Sequence
  Description of Artificial Sequence: Synthetic oligonucleotide
  Antisense strand to SEQ ID NO: 1905968
aaauacccaggcaacaaga

SEQ ID NO: 1905970 - RNA, 19 nt, Artificial Sequence
  Description of Artificial Sequence: Synthetic oligonucleotide
  Sense strand starting at position 3 of SEQ ID NO: 1879423
cuuguugccuggguauuua

SEQ ID NO: 1905971 - RNA, 19 nt, Artificial Sequence
  Description of Artificial Sequence: Synthetic oligonucleotide
  Antisense strand to SEQ ID NO: 1905970
uaaauacccaggcaacaag

SEQ ID NO: 1905972 - RNA, 19 nt, Artificial Sequence
  Description of Artificial Sequence: Synthetic oligonucleotide
  Sense strand starting at position 50 of SEQ ID NO: 1879423
gugaauaagucuuuggaga

SEQ ID NO: 1905973 - RNA, 19 nt, Artificial Sequence
  Description of Artificial Sequence: Synthetic oligonucleotide
  Antisense strand to SEQ ID NO: 1905972
ucuccaaagacuuauucac

SEQ ID NO: 1905974 - RNA, 19 nt, Artificial Sequence
  Description of Artificial Sequence: Synthetic oligonucleotide
  Sense strand starting at position 75 of SEQ ID NO: 1879423
cuacuaaaguuucuaaguu

SEQ ID NO: 1905975 - RNA, 19 nt, Artificial Sequence
  Description of Artificial Sequence: Synthetic oligonucleotide
  Antisense strand to SEQ ID NO: 1905974
aacuuagaaacuuuaguag

SEQ ID NO: 1905976 - RNA, 19 nt, Artificial Sequence
  Description of Artificial Sequence: Synthetic oligonucleotide
  Sense strand starting at position 182 of SEQ ID NO: 1879423
acaugagaacugugagguu

SEQ ID NO: 1905977 - RNA, 19 nt, Artificial Sequence
  Description of Artificial Sequence: Synthetic oligonucleotide
  Antisense strand to SEQ ID NO: 1905976
aaccucacaguucucaugu

SEQ ID NO: 1905978 - RNA, 19 nt, Artificial Sequence
  Description of Artificial Sequence: Synthetic oligonucleotide
  Sense strand starting at position 283 of SEQ ID NO: 1879423
ggaaauaauuauguacucu

SEQ ID NO: 1905979 - RNA, 19 nt, Artificial Sequence
  Description of Artificial Sequence: Synthetic oligonucleotide
  Antisense strand to SEQ ID NO: 1905978
agaguacauaauuauuucc

SEQ ID NO: 1905980 - RNA, 19 nt, Artificial Sequence
  Description of Artificial Sequence: Synthetic oligonucleotide
  Sense strand starting at position 454 of SEQ ID NO: 1879423
gugaccagacuguaucuua

SEQ ID NO: 1905981 - RNA, 19 nt, Artificial Sequence
  Description of Artificial Sequence: Synthetic oligonucleotide
  Antisense strand to SEQ ID NO: 1905980
uaagauacagucuggucac

SEQ ID NO: 1905982 - RNA, 19 nt, Artificial Sequence
  Description of Artificial Sequence: Synthetic oligonucleotide
  Sense strand starting at position 639 of SEQ ID NO: 1879423
ggaaauguuguaggauauu

SEQ ID NO: 1905983 - RNA, 19 nt, Artificial Sequence
  Description of Artificial Sequence: Synthetic oligonucleotide
  Antisense strand to SEQ ID NO: 1905982
aauauccuacaacauuucc

SEQ ID NO: 1905984 - RNA, 19 nt, Artificial Sequence
  Description of Artificial Sequence: Synthetic oligonucleotide
  Sense strand starting at position 673 of SEQ ID NO: 1879423
agaucuggacuacguuaaa

SEQ ID NO: 1905985 - RNA, 19 nt, Artificial Sequence
  Description of Artificial Sequence: Synthetic oligonucleotide
  Antisense strand to SEQ ID NO: 1905984
uuuaacguaguccagaucu

SEQ ID NO: 1905986 - RNA, 19 nt, Artificial Sequence
  Description of Artificial Sequence: Synthetic oligonucleotide
  Sense strand starting at position 676 of SEQ ID NO: 1879423
ucuggacuacguuaaauaa

SEQ ID NO: 1905987 - RNA, 19 nt, Artificial Sequence
  Description of Artificial Sequence: Synthetic oligonucleotide
  Antisense strand to SEQ ID NO: 1905986
uuauuuaacguaguccaga

SEQ ID NO: 1905988 - RNA, 19 nt, Artificial Sequence
  Description of Artificial Sequence: Synthetic oligonucleotide
  Sense strand starting at position 769 of SEQ ID NO: 1879423
cuuaacauucgacaugguu

SEQ ID NO: 1905989 - RNA, 19 nt, Artificial Sequence
  Description of Artificial Sequence: Synthetic oligonucleotide
  Antisense strand to SEQ ID NO: 1905988
aaccaugucgaauguuaag

SEQ ID NO: 1905990 - RNA, 19 nt, Artificial Sequence
  Description of Artificial Sequence: Synthetic oligonucleotide
  Sense strand starting at position 808 of SEQ ID NO: 1879423
uuuggauagucuccagaga

SEQ ID NO: 1905991 - RNA, 19 nt, Artificial Sequence
  Description of Artificial Sequence: Synthetic oligonucleotide
  Antisense strand to SEQ ID NO: 1905990
ucucuggagacuauccaaa

SEQ ID NO: 1905992 - RNA, 19 nt, Artificial Sequence
  Description of Artificial Sequence: Synthetic oligonucleotide
  Sense strand starting at position 1560 of SEQ ID NO: 1879423
guuauuuacucaguguaca

SEQ ID NO: 1905993 - RNA, 19 nt, Artificial Sequence
  Description of Artificial Sequence: Synthetic oligonucleotide
  Antisense strand to SEQ ID NO: 1905992
uguacacugaguaaauaac

SEQ ID NO: 1905994 - RNA, 19 nt, Artificial Sequence
  Description of Artificial Sequence: Synthetic oligonucleotide
  Sense strand starting at position 1630 of SEQ ID NO: 1879423
aaauuacuuacguggguga

SEQ ID NO: 1905995 - RNA, 19 nt, Artificial Sequence
  Description of Artificial Sequence: Synthetic oligonucleotide
  Antisense strand to SEQ ID NO: 1905994
ucacccacguaaguaauuu

SEQ ID NO: 1905996 - RNA, 19 nt, Artificial Sequence
  Description of Artificial Sequence: Synthetic oligonucleotide
  Sense strand starting at position 1633 of SEQ ID NO: 1879423
uuacuuacgugggugaaga

SEQ ID NO: 1905997 - RNA, 19 nt, Artificial Sequence
  Description of Artificial Sequence: Synthetic oligonucleotide
  Antisense strand to SEQ ID NO: 1905996
ucuucacccacguaaguaa

SEQ ID NO: 1905998 - RNA, 19 nt, Artificial Sequence
  Description of Artificial Sequence: Synthetic oligonucleotide
  Sense strand starting at position 1634 of SEQ ID NO: 1879423
uacuuacgugggugaagaa

SEQ ID NO: 1905999 - RNA, 19 nt, Artificial Sequence
  Description of Artificial Sequence: Synthetic oligonucleotide
  Antisense strand to SEQ ID NO: 1905998
uucuucacccacguaagua

SEQ ID NO: 1906000 - RNA, 19 nt, Artificial Sequence
  Description of Artificial Sequence: Synthetic oligonucleotide
  Sense strand starting at position 1644 of SEQ ID NO: 1879423
ggugaagaagguugggauu

SEQ ID NO: 1906001 - RNA, 19 nt, Artificial Sequence
  Description of Artificial Sequence: Synthetic oligonucleotide
  Antisense strand to SEQ ID NO: 1906000
aaucccaaccuucuucacc

SEQ ID NO: 1906002 - RNA, 19 nt, Artificial Sequence
  Description of Artificial Sequence: Synthetic oligonucleotide
  Sense strand starting at position 1646 of SEQ ID NO: 1879423
ugaagaagguugggauuua

SEQ ID NO: 1906003 - RNA, 19 nt, Artificial Sequence
  Description of Artificial Sequence: Synthetic oligonucleotide
  Antisense strand to SEQ ID NO: 1906002
uaaaucccaaccuucuuca

SEQ ID NO: 1906004 - RNA, 19 nt, Artificial Sequence
  Description of Artificial Sequence: Synthetic oligonucleotide
  Sense strand starting at position 1657 of SEQ ID NO: 1879423
gggauuuaguucuaggaag

SEQ ID NO: 1906005 - RNA, 19 nt, Artificial Sequence
  Description of Artificial Sequence: Synthetic oligonucleotide
  Antisense strand to SEQ ID NO: 1906004
cuuccuagaacuaaauccc

SEQ ID NO: 1906006 - RNA, 19 nt, Artificial Sequence
  Description of Artificial Sequence: Synthetic oligonucleotide
  Sense strand starting at position 1668 of SEQ ID NO: 1879423
cuaggaaguccuuaguuuc

SEQ ID NO: 1906007 - RNA, 19 nt, Artificial Sequence
  Description of Artificial Sequence: Synthetic oligonucleotide
  Antisense strand to SEQ ID NO: 1906006
gaaacuaaggacuuccuag

SEQ ID NO: 1906008 - RNA, 19 nt, Artificial Sequence
  Description of Artificial Sequence: Synthetic oligonucleotide
  Sense strand starting at position 2010 of SEQ ID NO: 1879423
ucuuauuuagcuuguucua

SEQ ID NO: 1906009 - RNA, 19 nt, Artificial Sequence
  Description of Artificial Sequence: Synthetic oligonucleotide
  Antisense strand to SEQ ID NO: 1906008
uagaacaagcuaaauaaga

SEQ ID NO: 1906010 - RNA, 19 nt, Artificial Sequence
  Description of Artificial Sequence: Synthetic oligonucleotide
  Sense strand starting at position 2108 of SEQ ID NO: 1879423
ugauuacuaaugugaagug

SEQ ID NO: 1906011 - RNA, 19 nt, Artificial Sequence
  Description of Artificial Sequence: Synthetic oligonucleotide
  Antisense strand to SEQ ID NO: 1906010
cacuucacauuaguaauca

SEQ ID NO: 1906012 - RNA, 19 nt, Artificial Sequence
  Description of Artificial Sequence: Synthetic oligonucleotide
  Sense strand starting at position 2193 of SEQ ID NO: 1879423
ucauaauuaugagcuugga

SEQ ID NO: 1906013 - RNA, 19 nt, Artificial Sequence
  Description of Artificial Sequence: Synthetic oligonucleotide
  Antisense strand to SEQ ID NO: 1906012
uccaagcucauaauuauga

SEQ ID NO: 1906014 - RNA, 19 nt, Artificial Sequence
  Description of Artificial Sequence: Synthetic oligonucleotide
  Sense strand starting at position 2421 of SEQ ID NO: 1879423
acagucaguucuccaaauc

SEQ ID NO: 1906015 - RNA, 19 nt, Artificial Sequence
  Description of Artificial Sequence: Synthetic oligonucleotide
  Antisense strand to SEQ ID NO: 1906014
gauuuggagaacugacugu

SEQ ID NO: 1906016 - RNA, 19 nt, Artificial Sequence
  Description of Artificial Sequence: Synthetic oligonucleotide
  Sense strand starting at position 2577 of SEQ ID NO: 1879423
aagagaucauuugggauag

SEQ ID NO: 1906017 - RNA, 19 nt, Artificial Sequence
  Description of Artificial Sequence: Synthetic oligonucleotide
  Antisense strand to SEQ ID NO: 1906016
cuaucccaaaugaucucuu

SEQ ID NO: 1906018 - RNA, 19 nt, Artificial Sequence
  Description of Artificial Sequence: Synthetic oligonucleotide
  Sense strand starting at position 2578 of SEQ ID NO: 1879423
agagaucauuugggauaga

SEQ ID NO: 1906019 - RNA, 19 nt, Artificial Sequence
  Description of Artificial Sequence: Synthetic oligonucleotide
  Antisense strand to SEQ ID NO: 1906018
ucuaucccaaaugaucucu

SEQ ID NO: 1906020 - RNA, 19 nt, Artificial Sequence
  Description of Artificial Sequence: Synthetic oligonucleotide
  Sense strand starting at position 2620 of SEQ ID NO: 1879423
uuugaagaugcuuaggcaa

SEQ ID NO: 1906021 - RNA, 19 nt, Artificial Sequence
  Description of Artificial Sequence: Synthetic oligonucleotide
  Antisense strand to SEQ ID NO: 1906020
uugccuaagcaucuucaaa

SEQ ID NO: 1906022 - RNA, 19 nt, Artificial Sequence
  Description of Artificial Sequence: Synthetic oligonucleotide
  Sense strand starting at position 2657 of SEQ ID NO: 1879423
ggaguugagugguuaccaa

SEQ ID NO: 1906023 - RNA, 19 nt, Artificial Sequence
  Description of Artificial Sequence: Synthetic oligonucleotide
  Antisense strand to SEQ ID NO: 1906022
uugguaaccacucaacucc

SEQ ID NO: 1906024 - RNA, 19 nt, Artificial Sequence
  Description of Artificial Sequence: Synthetic oligonucleotide
  Sense strand starting at position 2665 of SEQ ID NO: 1879423
gugguuaccaauggagaag

SEQ ID NO: 1906025 - RNA, 19 nt, Artificial Sequence
  Description of Artificial Sequence: Synthetic oligonucleotide
  Antisense strand to SEQ ID NO: 1906024
cuucuccauugguaaccac

SEQ ID NO: 1906026 - RNA, 19 nt, Artificial Sequence
  Description of Artificial Sequence: Synthetic oligonucleotide
  Sense strand starting at position 2682 of SEQ ID NO: 1879423
aggacauucuuaguaacug

SEQ ID NO: 1906027 - RNA, 19 nt, Artificial Sequence
  Description of Artificial Sequence: Synthetic oligonucleotide
  Antisense strand to SEQ ID NO: 1906026
caguuacuaagaauguccu

SEQ ID NO: 1906028 - RNA, 19 nt, Artificial Sequence
  Description of Artificial Sequence: Synthetic oligonucleotide
  Sense strand starting at position 2746 of SEQ ID NO: 1879423
gggcauuauuuauacaaac

SEQ ID NO: 1906029 - RNA, 19 nt, Artificial Sequence
  Description of Artificial Sequence: Synthetic oligonucleotide
  Antisense strand to SEQ ID NO: 1906028
guuuguauaaauaaugccc

SEQ ID NO: 1906030 - RNA, 19 nt, Artificial Sequence
  Description of Artificial Sequence: Synthetic oligonucleotide
  Sense strand starting at position 2929 of SEQ ID NO: 1879423
uuuaaaguuagguggaaga

SEQ ID NO: 1906031 - RNA, 19 nt, Artificial Sequence
  Description of Artificial Sequence: Synthetic oligonucleotide
  Antisense strand to SEQ ID NO: 1906030
ucuuccaccuaacuuuaaa

SEQ ID NO: 1906032 - RNA, 19 nt, Artificial Sequence
  Description of Artificial Sequence: Synthetic oligonucleotide
  Sense strand starting at position 2985 of SEQ ID NO: 1879423
aauagaucaguuugacgau

SEQ ID NO: 1906033 - RNA, 19 nt, Artificial Sequence
  Description of Artificial Sequence: Synthetic oligonucleotide
  Antisense strand to SEQ ID NO: 1906032
aucgucaaacugaucuauu

SEQ ID NO: 1906034 - RNA, 19 nt, Artificial Sequence
  Description of Artificial Sequence: Synthetic oligonucleotide
  Sense strand starting at position 3088 of SEQ ID NO: 1879423
gucacugaguagguugaaa

SEQ ID NO: 1906035 - RNA, 19 nt, Artificial Sequence
  Description of Artificial Sequence: Synthetic oligonucleotide
  Antisense strand to SEQ ID NO: 1906034
uuucaaccuacucagugac

SEQ ID NO: 1906036 - RNA, 19 nt, Artificial Sequence
  Description of Artificial Sequence: Synthetic oligonucleotide
  Sense strand starting at position 3218 of SEQ ID NO: 1879423
acaauaagggcuugcacua

SEQ ID NO: 1906037 - RNA, 19 nt, Artificial Sequence
  Description of Artificial Sequence: Synthetic oligonucleotide
  Antisense strand to SEQ ID NO: 1906036
uagugcaagcccuuauugu

SEQ ID NO: 1906038 - RNA, 19 nt, Artificial Sequence
  Description of Artificial Sequence: Synthetic oligonucleotide
  Sense strand starting at position 3285 of SEQ ID NO: 1879423
agaagaacaaucugcguga

SEQ ID NO: 1906039 - RNA, 19 nt, Artificial Sequence
  Description of Artificial Sequence: Synthetic oligonucleotide
  Antisense strand to SEQ ID NO: 1906038
ucacgcagauuguucuucu

SEQ ID NO: 1906040 - RNA, 19 nt, Artificial Sequence
  Description of Artificial Sequence: Synthetic oligonucleotide
  Sense strand starting at position 3286 of SEQ ID NO: 1879423
gaagaacaaucugcgugau

SEQ ID NO: 1906041 - RNA, 19 nt, Artificial Sequence
  Description of Artificial Sequence: Synthetic oligonucleotide
  Antisense strand to SEQ ID NO: 1906040
aucacgcagauuguucuuc

SEQ ID NO: 1906042 - RNA, 19 nt, Artificial Sequence
  Description of Artificial Sequence: Synthetic oligonucleotide
  Sense strand starting at position 3292 of SEQ ID NO: 1879423
caaucugcgugauuuggca

SEQ ID NO: 1906043 - RNA, 19 nt, Artificial Sequence
  Description of Artificial Sequence: Synthetic oligonucleotide
  Antisense strand to SEQ ID NO: 1906042
ugccaaaucacgcagauug

SEQ ID NO: 1906044 - RNA, 19 nt, Artificial Sequence
  Description of Artificial Sequence: Synthetic oligonucleotide
  Sense strand starting at position 3620 of SEQ ID NO: 1879423
ucuuauuagggauguaaua

SEQ ID NO: 1906045 - RNA, 19 nt, Artificial Sequence
  Description of Artificial Sequence: Synthetic oligonucleotide
  Antisense strand to SEQ ID NO: 1906044
uauuacaucccuaauaaga

SEQ ID NO: 1906046 - RNA, 19 nt, Artificial Sequence
  Description of Artificial Sequence: Synthetic oligonucleotide
  Sense strand starting at position 3662 of SEQ ID NO: 1879423
augagcuauuauccaugau

SEQ ID NO: 1906047 - RNA, 19 nt, Artificial Sequence
  Description of Artificial Sequence: Synthetic oligonucleotide
  Antisense strand to SEQ ID NO: 1906046
aucauggauaauagcucau

SEQ ID NO: 1906048 - RNA, 19 nt, Artificial Sequence
  Description of Artificial Sequence: Synthetic oligonucleotide
  Sense strand starting at position 117 of SEQ ID NO: 1879424
gugcguaaaugucugaacu

SEQ ID NO: 1906049 - RNA, 19 nt, Artificial Sequence
  Description of Artificial Sequence: Synthetic oligonucleotide
  Antisense strand to SEQ ID NO: 1906048
aguucagacauuuacgcac

SEQ ID NO: 1906050 - RNA, 19 nt, Artificial Sequence
  Description of Artificial Sequence: Synthetic oligonucleotide
  Sense strand starting at position 118 of SEQ ID NO: 1879424
ugcguaaaugucugaacuc

SEQ ID NO: 1906051 - RNA, 19 nt, Artificial Sequence
  Description of Artificial Sequence: Synthetic oligonucleotide
  Antisense strand to SEQ ID NO: 1906050
gaguucagacauuuacgca

SEQ ID NO: 1906052 - RNA, 19 nt, Artificial Sequence
  Description of Artificial Sequence: Synthetic oligonucleotide
  Sense strand starting at position 125 of SEQ ID NO: 1879424
augucugaacuccagugau

SEQ ID NO: 1906053 - RNA, 19 nt, Artificial Sequence
  Description of Artificial Sequence: Synthetic oligonucleotide
  Antisense strand to SEQ ID NO: 1906052
aucacuggaguucagacau

SEQ ID NO: 1906054 - RNA, 19 nt, Artificial Sequence
  Description of Artificial Sequence: Synthetic oligonucleotide
  Sense strand starting at position 128 of SEQ ID NO: 1879424
ucugaacuccagugaugag

SEQ ID NO: 1906055 - RNA, 19 nt, Artificial Sequence
  Description of Artificial Sequence: Synthetic oligonucleotide
  Antisense strand to SEQ ID NO: 1906054
cucaucacuggaguucaga

SEQ ID NO: 1906056 - RNA, 19 nt, Artificial Sequence
  Description of Artificial Sequence: Synthetic oligonucleotide
  Sense strand starting at position 1191 of SEQ ID NO: 1879424
ugaacuagguguucuccaa

SEQ ID NO: 1906057 - RNA, 19 nt, Artificial Sequence
  Description of Artificial Sequence: Synthetic oligonucleotide
  Antisense strand to SEQ ID NO: 1906056
uuggagaacaccuaguuca

SEQ ID NO: 1906058 - RNA, 19 nt, Artificial Sequence
  Description of Artificial Sequence: Synthetic oligonucleotide
  Sense strand starting at position 1249 of SEQ ID NO: 1879424
uuucuaagagccugucacu

SEQ ID NO: 1906059 - RNA, 19 nt, Artificial Sequence
  Description of Artificial Sequence: Synthetic oligonucleotide
  Antisense strand to SEQ ID NO: 1906058
agugacaggcucuuagaaa

SEQ ID NO: 1906060 - RNA, 19 nt, Artificial Sequence
  Description of Artificial Sequence: Synthetic oligonucleotide
  Sense strand starting at position 1573 of SEQ ID NO: 1879424
uagccuguagucugaguua

SEQ ID NO: 1906061 - RNA, 19 nt, Artificial Sequence
  Description of Artificial Sequence: Synthetic oligonucleotide
  Antisense strand to SEQ ID NO: 1906060
uaacucagacuacaggcua

SEQ ID NO: 1906062 - RNA, 19 nt, Artificial Sequence
  Description of Artificial Sequence: Synthetic oligonucleotide
  Sense strand starting at position 1576 of SEQ ID NO: 1879424
ccuguagucugaguuaggu

SEQ ID NO: 1906063 - RNA, 19 nt, Artificial Sequence
  Description of Artificial Sequence: Synthetic oligonucleotide
  Antisense strand to SEQ ID NO: 1906062
accuaacucagacuacagg

SEQ ID NO: 1906064 - RNA, 19 nt, Artificial Sequence
  Description of Artificial Sequence: Synthetic oligonucleotide
  Sense strand starting at position 1707 of SEQ ID NO: 1879424
cccucaaugugugcaauga

SEQ ID NO: 1906065 - RNA, 19 nt, Artificial Sequence
  Description of Artificial Sequence: Synthetic oligonucleotide
  Antisense strand to SEQ ID NO: 1906064
ucauugcacacauugaggg

SEQ ID NO: 1906066 - RNA, 19 nt, Artificial Sequence
  Description of Artificial Sequence: Synthetic oligonucleotide
  Sense strand starting at position 1708 of SEQ ID NO: 1879424
ccucaaugugugcaaugaa

SEQ ID NO: 1906067 - RNA, 19 nt, Artificial Sequence
  Description of Artificial Sequence: Synthetic oligonucleotide
  Antisense strand to SEQ ID NO: 1906066
uucauugcacacauugagg

SEQ ID NO: 1906068 - RNA, 19 nt, Artificial Sequence
  Description of Artificial Sequence: Synthetic oligonucleotide
  Sense strand starting at position 1711 of SEQ ID NO: 1879424
caaugugugcaaugaaggu

SEQ ID NO: 1906069 - RNA, 19 nt, Artificial Sequence
  Description of Artificial Sequence: Synthetic oligonucleotide
  Antisense strand to SEQ ID NO: 1906068
accuucauugcacacauug

SEQ ID NO: 1906070 - RNA, 19 nt, Artificial Sequence
  Description of Artificial Sequence: Synthetic oligonucleotide
  Sense strand starting at position 1799 of SEQ ID NO: 1879424
ggacauuccucagauccuu

SEQ ID NO: 1906071 - RNA, 19 nt, Artificial Sequence
  Description of Artificial Sequence: Synthetic oligonucleotide
  Antisense strand to SEQ ID NO: 1906070
aaggaucugaggaaugucc

SEQ ID NO: 1906072 - RNA, 19 nt, Artificial Sequence
  Description of Artificial Sequence: Synthetic oligonucleotide
  Sense strand starting at position 2132 of SEQ ID NO: 1879424
uuugucaaagucugauguu

SEQ ID NO: 1906073 - RNA, 19 nt, Artificial Sequence
  Description of Artificial Sequence: Synthetic oligonucleotide
  Antisense strand to SEQ ID NO: 1906072
aacaucagacuuugacaaa

SEQ ID NO: 1906074 - RNA, 19 nt, Artificial Sequence
  Description of Artificial Sequence: Synthetic oligonucleotide
  Sense strand starting at position 2135 of SEQ ID NO: 1879424
gucaaagucugauguuuac

SEQ ID NO: 1906075 - RNA, 19 nt, Artificial Sequence
  Description of Artificial Sequence: Synthetic oligonucleotide
  Antisense strand to SEQ ID NO: 1906074
guaaacaucagacuuugac

SEQ ID NO: 1906076 - RNA, 19 nt, Artificial Sequence
  Description of Artificial Sequence: Synthetic oligonucleotide
  Sense strand starting at position 2179 of SEQ ID NO: 1879424
gagugacuacaugguaaac

SEQ ID NO: 1906077 - RNA, 19 nt, Artificial Sequence
  Description of Artificial Sequence: Synthetic oligonucleotide
  Antisense strand to SEQ ID NO: 1906076
guuuaccauguagucacuc

SEQ ID NO: 1906078 - RNA, 19 nt, Artificial Sequence
  Description of Artificial Sequence: Synthetic oligonucleotide
  Sense strand starting at position 2181 of SEQ ID NO: 1879424
gugacuacaugguaaacau

SEQ ID NO: 1906079 - RNA, 19 nt, Artificial Sequence
  Description of Artificial Sequence: Synthetic oligonucleotide
  Antisense strand to SEQ ID NO: 1906078
auguuuaccauguagucac

SEQ ID NO: 1906080 - RNA, 19 nt, Artificial Sequence
  Description of Artificial Sequence: Synthetic oligonucleotide
  Sense strand starting at position 2207 of SEQ ID NO: 1879424
guuaaacguucccugagga

SEQ ID NO: 1906081 - RNA, 19 nt, Artificial Sequence
  Description of Artificial Sequence: Synthetic oligonucleotide
  Antisense strand to SEQ ID NO: 1906080
uccucagggaacguuuaac

SEQ ID NO: 1906082 - RNA, 19 nt, Artificial Sequence
  Description of Artificial Sequence: Synthetic oligonucleotide
  Sense strand starting at position 2208 of SEQ ID NO: 1879424
uuaaacguucccugaggaa

SEQ ID NO: 1906083 - RNA, 19 nt, Artificial Sequence
  Description of Artificial Sequence: Synthetic oligonucleotide
  Antisense strand to SEQ ID NO: 1906082
uuccucagggaacguuuaa

SEQ ID NO: 1906084 - RNA, 19 nt, Artificial Sequence
  Description of Artificial Sequence: Synthetic oligonucleotide
  Sense strand starting at position 2211 of SEQ ID NO: 1879424
aacguucccugaggaauga

SEQ ID NO: 1906085 - RNA, 19 nt, Artificial Sequence
  Description of Artificial Sequence: Synthetic oligonucleotide
  Antisense strand to SEQ ID NO: 1906084
ucauuccucagggaacguu

SEQ ID NO: 1906086 - RNA, 19 nt, Artificial Sequence
  Description of Artificial Sequence: Synthetic oligonucleotide
  Sense strand starting at position 2430 of SEQ ID NO: 1879424
gcccgaggccucugagaca

SEQ ID NO: 1906087 - RNA, 19 nt, Artificial Sequence
  Description of Artificial Sequence: Synthetic oligonucleotide
  Antisense strand to SEQ ID NO: 1906086
ugucucagaggccucgggc

SEQ ID NO: 1906088 - RNA, 19 nt, Artificial Sequence
  Description of Artificial Sequence: Synthetic oligonucleotide
  Sense strand starting at position 2683 of SEQ ID NO: 1879424
cugaacucgcaguaaugaa

SEQ ID NO: 1906089 - RNA, 19 nt, Artificial Sequence
  Description of Artificial Sequence: Synthetic oligonucleotide
  Antisense strand to SEQ ID NO: 1906088
uucauuacugcgaguucag

SEQ ID NO: 1906090 - RNA, 19 nt, Artificial Sequence
  Description of Artificial Sequence: Synthetic oligonucleotide
  Sense strand starting at position 2719 of SEQ ID NO: 1879424
ggcagauccaccugugugu

SEQ ID NO: 1906091 - RNA, 19 nt, Artificial Sequence
  Description of Artificial Sequence: Synthetic oligonucleotide
  Antisense strand to SEQ ID NO: 1906090
acacacagguggaucugcc

SEQ ID NO: 1906092 - RNA, 19 nt, Artificial Sequence
  Description of Artificial Sequence: Synthetic oligonucleotide
  Sense strand starting at position 2770 of SEQ ID NO: 1879424
guguuucucucagaauuuc

SEQ ID NO: 1906093 - RNA, 19 nt, Artificial Sequence
  Description of Artificial Sequence: Synthetic oligonucleotide
  Antisense strand to SEQ ID NO: 1906092
gaaauucugagagaaacac

SEQ ID NO: 1906094 - RNA, 19 nt, Artificial Sequence
  Description of Artificial Sequence: Synthetic oligonucleotide
  Sense strand starting at position 2823 of SEQ ID NO: 1879424
cucuucuucugcugaaguu

SEQ ID NO: 1906095 - RNA, 19 nt, Artificial Sequence
  Description of Artificial Sequence: Synthetic oligonucleotide
  Antisense strand to SEQ ID NO: 1906094
aacuucagcagaagaagag

SEQ ID NO: 1906096 - RNA, 19 nt, Artificial Sequence
  Description of Artificial Sequence: Synthetic oligonucleotide
  Sense strand starting at position 3176 of SEQ ID NO: 1879424
ccaguaagacucugucaua

SEQ ID NO: 1906097 - RNA, 19 nt, Artificial Sequence
  Description of Artificial Sequence: Synthetic oligonucleotide
  Antisense strand to SEQ ID NO: 1906096
uaugacagagucuuacugg

SEQ ID NO: 1906098 - RNA, 19 nt, Artificial Sequence
  Description of Artificial Sequence: Synthetic oligonucleotide
  Sense strand starting at position 3179 of SEQ ID NO: 1879424
guaagacucugucauacca

SEQ ID NO: 1906099 - RNA, 19 nt, Artificial Sequence
  Description of Artificial Sequence: Synthetic oligonucleotide
  Antisense strand to SEQ ID NO: 1906098
ugguaugacagagucuuac

SEQ ID NO: 1906100 - RNA, 19 nt, Artificial Sequence
  Description of Artificial Sequence: Synthetic oligonucleotide
  Sense strand starting at position 3410 of SEQ ID NO: 1879424
gucucuaagaguugagauu

SEQ ID NO: 1906101 - RNA, 19 nt, Artificial Sequence
  Description of Artificial Sequence: Synthetic oligonucleotide
  Antisense strand to SEQ ID NO: 1906100
aaucucaacucuuagagac

SEQ ID NO: 1906102 - RNA, 19 nt, Artificial Sequence
  Description of Artificial Sequence: Synthetic oligonucleotide
  Sense strand starting at position 3453 of SEQ ID NO: 1879424
uggguuugggagggagauu

SEQ ID NO: 1906103 - RNA, 19 nt, Artificial Sequence
  Description of Artificial Sequence: Synthetic oligonucleotide
  Antisense strand to SEQ ID NO: 1906102
aaucucccucccaaaccca

SEQ ID NO: 1906104 - RNA, 19 nt, Artificial Sequence
  Description of Artificial Sequence: Synthetic oligonucleotide
  Sense strand starting at position 3465 of SEQ ID NO: 1879424
ggagauugauccucccaua

SEQ ID NO: 1906105 - RNA, 19 nt, Artificial Sequence
  Description of Artificial Sequence: Synthetic oligonucleotide
  Antisense strand to SEQ ID NO: 1906104
uaugggaggaucaaucucc

SEQ ID NO: 1906106 - RNA, 19 nt, Artificial Sequence
  Description of Artificial Sequence: Synthetic oligonucleotide
  Sense strand starting at position 3696 of SEQ ID NO: 1879424
caggauucaugggucgaga

SEQ ID NO: 1906107 - RNA, 19 nt, Artificial Sequence
  Description of Artificial Sequence: Synthetic oligonucleotide
  Antisense strand to SEQ ID NO: 1906106
ucucgacccaugaauccug

SEQ ID NO: 1906108 - RNA, 19 nt, Artificial Sequence
  Description of Artificial Sequence: Synthetic oligonucleotide
  Sense strand starting at position 3698 of SEQ ID NO: 1879424
ggauucaugggucgagaua

SEQ ID NO: 1906109 - RNA, 19 nt, Artificial Sequence
  Description of Artificial Sequence: Synthetic oligonucleotide
  Antisense strand to SEQ ID NO: 1906108
uaucucgacccaugaaucc

SEQ ID NO: 1906110 - RNA, 19 nt, Artificial Sequence
  Description of Artificial Sequence: Synthetic oligonucleotide
  Sense strand starting at position 3795 of SEQ ID NO: 1879424
guagauauuugaugaacag

SEQ ID NO: 1906111 - RNA, 19 nt, Artificial Sequence
  Description of Artificial Sequence: Synthetic oligonucleotide
  Antisense strand to SEQ ID NO: 1906110
cuguucaucaaauaucuac

SEQ ID NO: 1906112 - RNA, 19 nt, Artificial Sequence
  Description of Artificial Sequence: Synthetic oligonucleotide
  Sense strand starting at position 107 of SEQ ID NO: 1879425
gagauagggcccuagaguu

SEQ ID NO: 1906113 - RNA, 19 nt, Artificial Sequence
  Description of Artificial Sequence: Synthetic oligonucleotide
  Antisense strand to SEQ ID NO: 1906112
aacucuagggcccuaucuc

SEQ ID NO: 1906114 - RNA, 19 nt, Artificial Sequence
  Description of Artificial Sequence: Synthetic oligonucleotide
  Sense strand starting at position 174 of SEQ ID NO: 1879425
gcagguccgucuucagaga

SEQ ID NO: 1906115 - RNA, 19 nt, Artificial Sequence
  Description of Artificial Sequence: Synthetic oligonucleotide
  Antisense strand to SEQ ID NO: 1906114
ucucugaagacggaccugc

SEQ ID NO: 1906116 - RNA, 19 nt, Artificial Sequence
  Description of Artificial Sequence: Synthetic oligonucleotide
  Sense strand starting at position 189 of SEQ ID NO: 1879425
gagagcuucucccuaaguu

SEQ ID NO: 1906117 - RNA, 19 nt, Artificial Sequence
  Description of Artificial Sequence: Synthetic oligonucleotide
  Antisense strand to SEQ ID NO: 1906116
aacuuagggagaagcucuc

SEQ ID NO: 1906118 - RNA, 19 nt, Artificial Sequence
  Description of Artificial Sequence: Synthetic oligonucleotide
  Sense strand starting at position 1033 of SEQ ID NO: 1879425
gugcgaaucccuuagggaa

SEQ ID NO: 1906119 - RNA, 19 nt, Artificial Sequence
  Description of Artificial Sequence: Synthetic oligonucleotide
  Antisense strand to SEQ ID NO: 1906118
uucccuaagggauucgcac

SEQ ID NO: 1906120 - RNA, 19 nt, Artificial Sequence
  Description of Artificial Sequence: Synthetic oligonucleotide
  Sense strand starting at position 1290 of SEQ ID NO: 1879425
gcagcaggcugcugugaau

SEQ ID NO: 1906121 - RNA, 19 nt, Artificial Sequence
  Description of Artificial Sequence: Synthetic oligonucleotide
  Antisense strand to SEQ ID NO: 1906120
auucacagcagccugcugc

SEQ ID NO: 1906122 - RNA, 19 nt, Artificial Sequence
  Description of Artificial Sequence: Synthetic oligonucleotide
  Sense strand starting at position 1797 of SEQ ID NO: 1879425
ccggucuuucccugagugu

SEQ ID NO: 1906123 - RNA, 19 nt, Artificial Sequence
  Description of Artificial Sequence: Synthetic oligonucleotide
  Antisense strand to SEQ ID NO: 1906122
acacucagggaaagaccgg

SEQ ID NO: 1906124 - RNA, 19 nt, Artificial Sequence
  Description of Artificial Sequence: Synthetic oligonucleotide
  Sense strand starting at position 1990 of SEQ ID NO: 1879425
ccgcgucguuagcuggaaa

SEQ ID NO: 1906125 - RNA, 19 nt, Artificial Sequence
  Description of Artificial Sequence: Synthetic oligonucleotide
  Antisense strand to SEQ ID NO: 1906124
uuuccagcuaacgacgcgg

SEQ ID NO: 1906126 - RNA, 19 nt, Artificial Sequence
  Description of Artificial Sequence: Synthetic oligonucleotide
  Sense strand starting at position 1993 of SEQ ID NO: 1879425
cgucguuagcuggaaacca

SEQ ID NO: 1906127 - RNA, 19 nt, Artificial Sequence
  Description of Artificial Sequence: Synthetic oligonucleotide
  Antisense strand to SEQ ID NO: 1906126
ugguuuccagcuaacgacg

SEQ ID NO: 1906128 - RNA, 19 nt, Artificial Sequence
  Description of Artificial Sequence: Synthetic oligonucleotide
  Sense strand starting at position 2240 of SEQ ID NO: 1879425
caccuuuguuugcccgaga

SEQ ID NO: 1906129 - RNA, 19 nt, Artificial Sequence
  Description of Artificial Sequence: Synthetic oligonucleotide
  Antisense strand to SEQ ID NO: 1906128
ucucgggcaaacaaaggug

SEQ ID NO: 1906130 - RNA, 19 nt, Artificial Sequence
  Description of Artificial Sequence: Synthetic oligonucleotide
  Sense strand starting at position 2243 of SEQ ID NO: 1879425
cuuuguuugcccgagagcu

SEQ ID NO: 1906131 - RNA, 19 nt, Artificial Sequence
  Description of Artificial Sequence: Synthetic oligonucleotide
  Antisense strand to SEQ ID NO: 1906130
agcucucgggcaaacaaag

SEQ ID NO: 1906132 - RNA, 19 nt, Artificial Sequence
  Description of Artificial Sequence: Synthetic oligonucleotide
  Sense strand starting at position 2272 of SEQ ID NO: 1879425
cccaauuaacgugggcaaa

SEQ ID NO: 1906133 - RNA, 19 nt, Artificial Sequence
  Description of Artificial Sequence: Synthetic oligonucleotide
  Antisense strand to SEQ ID NO: 1906132
uuugcccacguuaauuggg

SEQ ID NO: 1906134 - RNA, 19 nt, Artificial Sequence
  Description of Artificial Sequence: Synthetic oligonucleotide
  Sense strand starting at position 2273 of SEQ ID NO: 1879425
ccaauuaacgugggcaaau

SEQ ID NO: 1906135 - RNA, 19 nt, Artificial Sequence
  Description of Artificial Sequence: Synthetic oligonucleotide
  Antisense strand to SEQ ID NO: 1906134
auuugcccacguuaauugg

SEQ ID NO: 1906136 - RNA, 19 nt, Artificial Sequence
  Description of Artificial Sequence: Synthetic oligonucleotide
  Sense strand starting at position 2439 of SEQ ID NO: 1879425
gcuggauccuacuuucuca

SEQ ID NO: 1906137 - RNA, 19 nt, Artificial Sequence
  Description of Artificial Sequence: Synthetic oligonucleotide
  Antisense strand to SEQ ID NO: 1906136
ugagaaaguaggauccagc

SEQ ID NO: 1906138 - RNA, 19 nt, Artificial Sequence
  Description of Artificial Sequence: Synthetic oligonucleotide
  Sense strand starting at position 2442 of SEQ ID NO: 1879425
ggauccuacuuucucagaa

SEQ ID NO: 1906139 - RNA, 19 nt, Artificial Sequence
  Description of Artificial Sequence: Synthetic oligonucleotide
  Antisense strand to SEQ ID NO: 1906138
uucugagaaaguaggaucc

SEQ ID NO: 1906140 - RNA, 19 nt, Artificial Sequence
  Description of Artificial Sequence: Synthetic oligonucleotide
  Sense strand starting at position 2446 of SEQ ID NO: 1879425
ccuacuuucucagaagguu

SEQ ID NO: 1906141 - RNA, 19 nt, Artificial Sequence
  Description of Artificial Sequence: Synthetic oligonucleotide
  Antisense strand to SEQ ID NO: 1906140
aaccuucugagaaaguagg

SEQ ID NO: 1906142 - RNA, 19 nt, Artificial Sequence
  Description of Artificial Sequence: Synthetic oligonucleotide
  Sense strand starting at position 2990 of SEQ ID NO: 1879425
ccagcauugcaaggagaau

SEQ ID NO: 1906143 - RNA, 19 nt, Artificial Sequence
  Description of Artificial Sequence: Synthetic oligonucleotide
  Antisense strand to SEQ ID NO: 1906142
auucuccuugcaaugcugg

SEQ ID NO: 1906144 - RNA, 19 nt, Artificial Sequence
  Description of Artificial Sequence: Synthetic oligonucleotide
  Sense strand starting at position 3116 of SEQ ID NO: 1879425
gguugaggucuuuauguca

SEQ ID NO: 1906145 - RNA, 19 nt, Artificial Sequence
  Description of Artificial Sequence: Synthetic oligonucleotide
  Antisense strand to SEQ ID NO: 1906144
ugacauaaagaccucaacc

SEQ ID NO: 1906146 - RNA, 19 nt, Artificial Sequence
  Description of Artificial Sequence: Synthetic oligonucleotide
  Sense strand starting at position 3121 of SEQ ID NO: 1879425
aggucuuuaugucagagac

SEQ ID NO: 1906147 - RNA, 19 nt, Artificial Sequence
  Description of Artificial Sequence: Synthetic oligonucleotide
  Antisense strand to SEQ ID NO: 1906146
gucucugacauaaagaccu

SEQ ID NO: 1906148 - RNA, 19 nt, Artificial Sequence
  Description of Artificial Sequence: Synthetic oligonucleotide
  Sense strand starting at position 3123 of SEQ ID NO: 1879425
gucuuuaugucagagaccu

SEQ ID NO: 1906149 - RNA, 19 nt, Artificial Sequence
  Description of Artificial Sequence: Synthetic oligonucleotide
  Antisense strand to SEQ ID NO: 1906148
aggucucugacauaaagac

SEQ ID NO: 1906150 - RNA, 19 nt, Artificial Sequence
  Description of Artificial Sequence: Synthetic oligonucleotide
  Sense strand starting at position 3131 of SEQ ID NO: 1879425
gucagagaccuuugaacca

SEQ ID NO: 1906151 - RNA, 19 nt, Artificial Sequence
  Description of Artificial Sequence: Synthetic oligonucleotide
  Antisense strand to SEQ ID NO: 1906150
ugguucaaaggucucugac

SEQ ID NO: 1906152 - RNA, 19 nt, Artificial Sequence
  Description of Artificial Sequence: Synthetic oligonucleotide
  Sense strand starting at position 3257 of SEQ ID NO: 1879425
gcacaagacuggucacaaa

SEQ ID NO: 1906153 - RNA, 19 nt, Artificial Sequence
  Description of Artificial Sequence: Synthetic oligonucleotide
  Antisense strand to SEQ ID NO: 1906152
uuugugaccagucuugugc

SEQ ID NO: 1906154 - RNA, 19 nt, Artificial Sequence
  Description of Artificial Sequence: Synthetic oligonucleotide
  Sense strand starting at position 3291 of SEQ ID NO: 1879425
acaagaugcugugaagaag

SEQ ID NO: 1906155 - RNA, 19 nt, Artificial Sequence
  Description of Artificial Sequence: Synthetic oligonucleotide
  Antisense strand to SEQ ID NO: 1906154
cuucuucacagcaucuugu

SEQ ID NO: 1906156 - RNA, 19 nt, Artificial Sequence
  Description of Artificial Sequence: Synthetic oligonucleotide
  Sense strand starting at position 3350 of SEQ ID NO: 1879425
ugcucauuaugcgcugauu

SEQ ID NO: 1906157 - RNA, 19 nt, Artificial Sequence
  Description of Artificial Sequence: Synthetic oligonucleotide
  Antisense strand to SEQ ID NO: 1906156
aaucagcgcauaaugagca

SEQ ID NO: 1906158 - RNA, 19 nt, Artificial Sequence
  Description of Artificial Sequence: Synthetic oligonucleotide
  Sense strand starting at position 3352 of SEQ ID NO: 1879425
cucauuaugcgcugauuau

SEQ ID NO: 1906159 - RNA, 19 nt, Artificial Sequence
  Description of Artificial Sequence: Synthetic oligonucleotide
  Antisense strand to SEQ ID NO: 1906158
auaaucagcgcauaaugag

SEQ ID NO: 1906160 - RNA, 19 nt, Artificial Sequence
  Description of Artificial Sequence: Synthetic oligonucleotide
  Sense strand starting at position 3353 of SEQ ID NO: 1879425
ucauuaugcgcugauuaua

SEQ ID NO: 1906161 - RNA, 19 nt, Artificial Sequence
  Description of Artificial Sequence: Synthetic oligonucleotide
  Antisense strand to SEQ ID NO: 1906160
uauaaucagcgcauaauga

SEQ ID NO: 1906162 - RNA, 19 nt, Artificial Sequence
  Description of Artificial Sequence: Synthetic oligonucleotide
  Sense strand starting at position 3356 of SEQ ID NO: 1879425
uuaugcgcugauuauaaua

SEQ ID NO: 1906163 - RNA, 19 nt, Artificial Sequence
  Description of Artificial Sequence: Synthetic oligonucleotide
  Antisense strand to SEQ ID NO: 1906162
uauuauaaucagcgcauaa

SEQ ID NO: 1906164 - RNA, 19 nt, Artificial Sequence
  Description of Artificial Sequence: Synthetic oligonucleotide
  Sense strand starting at position 3361 of SEQ ID NO: 1879425
cgcugauuauaauacauua

SEQ ID NO: 1906165 - RNA, 19 nt, Artificial Sequence
  Description of Artificial Sequence: Synthetic oligonucleotide
  Antisense strand to SEQ ID NO: 1906164
uaauguauuauaaucagcg

SEQ ID NO: 1906166 - RNA, 19 nt, Artificial Sequence
  Description of Artificial Sequence: Synthetic oligonucleotide
  Sense strand starting at position 3369 of SEQ ID NO: 1879425
auaauacauuagcaugaga

SEQ ID NO: 1906167 - RNA, 19 nt, Artificial Sequence
  Description of Artificial Sequence: Synthetic oligonucleotide
  Antisense strand to SEQ ID NO: 1906166
ucucaugcuaauguauuau

SEQ ID NO: 1906168 - RNA, 19 nt, Artificial Sequence
  Description of Artificial Sequence: Synthetic oligonucleotide
  Sense strand starting at position 3523 of SEQ ID NO: 1879425
acaccauguuuaguacaua

SEQ ID NO: 1906169 - RNA, 19 nt, Artificial Sequence
  Description of Artificial Sequence: Synthetic oligonucleotide
  Antisense strand to SEQ ID NO: 1906168
uauguacuaaacauggugu

SEQ ID NO: 1906170 - RNA, 19 nt, Artificial Sequence
  Description of Artificial Sequence: Synthetic oligonucleotide
  Sense strand starting at position 3526 of SEQ ID NO: 1879425
ccauguuuaguacauauca

SEQ ID NO: 1906171 - RNA, 19 nt, Artificial Sequence
  Description of Artificial Sequence: Synthetic oligonucleotide
  Antisense strand to SEQ ID NO: 1906170
ugauauguacuaaacaugg

SEQ ID NO: 1906172 - RNA, 19 nt, Artificial Sequence
  Description of Artificial Sequence: Synthetic oligonucleotide
  Sense strand starting at position 3556 of SEQ ID NO: 1879425
uaaguauucucaguggagu

SEQ ID NO: 1906173 - RNA, 19 nt, Artificial Sequence
  Description of Artificial Sequence: Synthetic oligonucleotide
  Antisense strand to SEQ ID NO: 1906172
acuccacugagaauacuua

SEQ ID NO: 1906174 - RNA, 19 nt, Artificial Sequence
  Description of Artificial Sequence: Synthetic oligonucleotide
  Sense strand starting at position 3557 of SEQ ID NO: 1879425
aaguauucucaguggagua

SEQ ID NO: 1906175 - RNA, 19 nt, Artificial Sequence
  Description of Artificial Sequence: Synthetic oligonucleotide
  Antisense strand to SEQ ID NO: 1906174
uacuccacugagaauacuu

SEQ ID NO: 1906176 - RNA, 19 nt, Artificial Sequence
  Description of Artificial Sequence: Synthetic oligonucleotide
  Sense strand starting at position 3558 of SEQ ID NO: 1879425
aguauucucaguggaguag

SEQ ID NO: 1906177 - RNA, 19 nt, Artificial Sequence
  Description of Artificial Sequence: Synthetic oligonucleotide
  Antisense strand to SEQ ID NO: 1906176
cuacuccacugagaauacu

SEQ ID NO: 1906178 - RNA, 19 nt, Artificial Sequence
  Description of Artificial Sequence: Synthetic oligonucleotide
  Sense strand starting at position 3645 of SEQ ID NO: 1879425
ucaguuuaucaguggacuc

SEQ ID NO: 1906179 - RNA, 19 nt, Artificial Sequence
  Description of Artificial Sequence: Synthetic oligonucleotide
  Antisense strand to SEQ ID NO: 1906178
gaguccacugauaaacuga

SEQ ID NO: 1906180 - RNA, 19 nt, Artificial Sequence
  Description of Artificial Sequence: Synthetic oligonucleotide
  Sense strand starting at position 3667 of SEQ ID NO: 1879425
caaacuguuucuugcucga

SEQ ID NO: 1906181 - RNA, 19 nt, Artificial Sequence
  Description of Artificial Sequence: Synthetic oligonucleotide
  Antisense strand to SEQ ID NO: 1906180
ucgagcaagaaacaguuug

SEQ ID NO: 1906182 - RNA, 19 nt, Artificial Sequence
  Description of Artificial Sequence: Synthetic oligonucleotide
  Sense strand starting at position 3707 of SEQ ID NO: 1879425
aucccuuuccggugacauu

SEQ ID NO: 1906183 - RNA, 19 nt, Artificial Sequence
  Description of Artificial Sequence: Synthetic oligonucleotide
  Antisense strand to SEQ ID NO: 1906182
aaugucaccggaaagggau

SEQ ID NO: 1906184 - RNA, 19 nt, Artificial Sequence
  Description of Artificial Sequence: Synthetic oligonucleotide
  Sense strand starting at position 346 of SEQ ID NO: 1879426
caugcaauggagugugaaa

SEQ ID NO: 1906185 - RNA, 19 nt, Artificial Sequence
  Description of Artificial Sequence: Synthetic oligonucleotide
  Antisense strand to SEQ ID NO: 1906184
uuucacacuccauugcaug

SEQ ID NO: 1906186 - RNA, 19 nt, Artificial Sequence
  Description of Artificial Sequence: Synthetic oligonucleotide
  Sense strand starting at position 386 of SEQ ID NO: 1879426
caggaaaucggccauguaa

SEQ ID NO: 1906187 - RNA, 19 nt, Artificial Sequence
  Description of Artificial Sequence: Synthetic oligonucleotide
  Antisense strand to SEQ ID NO: 1906186
uuacauggccgauuuccug

SEQ ID NO: 1906188 - RNA, 19 nt, Artificial Sequence
  Description of Artificial Sequence: Synthetic oligonucleotide
  Sense strand starting at position 388 of SEQ ID NO: 1879426
ggaaaucggccauguaaga

SEQ ID NO: 1906189 - RNA, 19 nt, Artificial Sequence
  Description of Artificial Sequence: Synthetic oligonucleotide
  Antisense strand to SEQ ID NO: 1906188
ucuuacauggccgauuucc

SEQ ID NO: 1906190 - RNA, 19 nt, Artificial Sequence
  Description of Artificial Sequence: Synthetic oligonucleotide
  Sense strand starting at position 422 of SEQ ID NO: 1879426
cgauuuauucaguggugac

SEQ ID NO: 1906191 - RNA, 19 nt, Artificial Sequence
  Description of Artificial Sequence: Synthetic oligonucleotide
  Antisense strand to SEQ ID NO: 1906190
gucaccacugaauaaaucg

SEQ ID NO: 1906192 - RNA, 19 nt, Artificial Sequence
  Description of Artificial Sequence: Synthetic oligonucleotide
  Sense strand starting at position 727 of SEQ ID NO: 1879426
ggcugaaaccaauggauua

SEQ ID NO: 1906193 - RNA, 19 nt, Artificial Sequence
  Description of Artificial Sequence: Synthetic oligonucleotide
  Antisense strand to SEQ ID NO: 1906192
uaauccauugguuucagcc

SEQ ID NO: 1906194 - RNA, 19 nt, Artificial Sequence
  Description of Artificial Sequence: Synthetic oligonucleotide
  Sense strand starting at position 796 of SEQ ID NO: 1879426
guaaguuaucaauaaugca

SEQ ID NO: 1906195 - RNA, 19 nt, Artificial Sequence
  Description of Artificial Sequence: Synthetic oligonucleotide
  Antisense strand to SEQ ID NO: 1906194
ugcauuauugauaacuuac

SEQ ID NO: 1906196 - RNA, 19 nt, Artificial Sequence
  Description of Artificial Sequence: Synthetic oligonucleotide
  Sense strand starting at position 828 of SEQ ID NO: 1879426
cucggugagagcuaagaga

SEQ ID NO: 1906197 - RNA, 19 nt, Artificial Sequence
  Description of Artificial Sequence: Synthetic oligonucleotide
  Antisense strand to SEQ ID NO: 1906196
ucucuuagcucucaccgag

SEQ ID NO: 1906198 - RNA, 19 nt, Artificial Sequence
  Description of Artificial Sequence: Synthetic oligonucleotide
  Sense strand starting at position 953 of SEQ ID NO: 1879426
gcaauaaauggcggacaga

SEQ ID NO: 1906199 - RNA, 19 nt, Artificial Sequence
  Description of Artificial Sequence: Synthetic oligonucleotide
  Antisense strand to SEQ ID NO: 1906198
ucuguccgccauuuauugc

SEQ ID NO: 1906200 - RNA, 19 nt, Artificial Sequence
  Description of Artificial Sequence: Synthetic oligonucleotide
  Sense strand starting at position 988 of SEQ ID NO: 1879426
ggcagcuguaguuaaacaa

SEQ ID NO: 1906201 - RNA, 19 nt, Artificial Sequence
  Description of Artificial Sequence: Synthetic oligonucleotide
  Antisense strand to SEQ ID NO: 1906200
uuguuuaacuacagcugcc

SEQ ID NO: 1906202 - RNA, 19 nt, Artificial Sequence
  Description of Artificial Sequence: Synthetic oligonucleotide
  Sense strand starting at position 1547 of SEQ ID NO: 1879426
uuauguuguccucucguca

SEQ ID NO: 1906203 - RNA, 19 nt, Artificial Sequence
  Description of Artificial Sequence: Synthetic oligonucleotide
  Antisense strand to SEQ ID NO: 1906202
ugacgagaggacaacauaa

SEQ ID NO: 1906204 - RNA, 19 nt, Artificial Sequence
  Description of Artificial Sequence: Synthetic oligonucleotide
  Sense strand starting at position 1982 of SEQ ID NO: 1879426
gaugaucacgcaugacuua

SEQ ID NO: 1906205 - RNA, 19 nt, Artificial Sequence
  Description of Artificial Sequence: Synthetic oligonucleotide
  Antisense strand to SEQ ID NO: 1906204
uaagucaugcgugaucauc

SEQ ID NO: 1906206 - RNA, 19 nt, Artificial Sequence
  Description of Artificial Sequence: Synthetic oligonucleotide
  Sense strand starting at position 1987 of SEQ ID NO: 1879426
ucacgcaugacuuagugaa

SEQ ID NO: 1906207 - RNA, 19 nt, Artificial Sequence
  Description of Artificial Sequence: Synthetic oligonucleotide
  Antisense strand to SEQ ID NO: 1906206
uucacuaagucaugcguga

SEQ ID NO: 1906208 - RNA, 19 nt, Artificial Sequence
  Description of Artificial Sequence: Synthetic oligonucleotide
  Sense strand starting at position 1991 of SEQ ID NO: 1879426
gcaugacuuagugaaugug

SEQ ID NO: 1906209 - RNA, 19 nt, Artificial Sequence
  Description of Artificial Sequence: Synthetic oligonucleotide
  Antisense strand to SEQ ID NO: 1906208
cacauucacuaagucaugc

SEQ ID NO: 1906210 - RNA, 19 nt, Artificial Sequence
  Description of Artificial Sequence: Synthetic oligonucleotide
  Sense strand starting at position 1994 of SEQ ID NO: 1879426
ugacuuagugaaugugaag

SEQ ID NO: 1906211 - RNA, 19 nt, Artificial Sequence
  Description of Artificial Sequence: Synthetic oligonucleotide
  Antisense strand to SEQ ID NO: 1906210
cuucacauucacuaaguca

SEQ ID NO: 1906212 - RNA, 19 nt, Artificial Sequence
  Description of Artificial Sequence: Synthetic oligonucleotide
  Sense strand starting at position 2154 of SEQ ID NO: 1879426
agcugugucgugguacaga

SEQ ID NO: 1906213 - RNA, 19 nt, Artificial Sequence
  Description of Artificial Sequence: Synthetic oligonucleotide
  Antisense strand to SEQ ID NO: 1906212
ucuguaccacgacacagcu

SEQ ID NO: 1906214 - RNA, 19 nt, Artificial Sequence
  Description of Artificial Sequence: Synthetic oligonucleotide
  Sense strand starting at position 2390 of SEQ ID NO: 1879426
ggacaaugguguccacaug

SEQ ID NO: 1906215 - RNA, 19 nt, Artificial Sequence
  Description of Artificial Sequence: Synthetic oligonucleotide
  Antisense strand to SEQ ID NO: 1906214
cauguggacaccauugucc

SEQ ID NO: 1906216 - RNA, 19 nt, Artificial Sequence
  Description of Artificial Sequence: Synthetic oligonucleotide
  Sense strand starting at position 2391 of SEQ ID NO: 1879426
gacaaugguguccacaugu

SEQ ID NO: 1906217 - RNA, 19 nt, Artificial Sequence
  Description of Artificial Sequence: Synthetic oligonucleotide
  Antisense strand to SEQ ID NO: 1906216
acauguggacaccauuguc

SEQ ID NO: 1906218 - RNA, 19 nt, Artificial Sequence
  Description of Artificial Sequence: Synthetic oligonucleotide
  Sense strand starting at position 2599 of SEQ ID NO: 1879426
gaauguuggcuccauaagg

SEQ ID NO: 1906219 - RNA, 19 nt, Artificial Sequence
  Description of Artificial Sequence: Synthetic oligonucleotide
  Antisense strand to SEQ ID NO: 1906218
ccuuauggagccaacauuc

SEQ ID NO: 1906220 - RNA, 19 nt, Artificial Sequence
  Description of Artificial Sequence: Synthetic oligonucleotide
  Sense strand starting at position 2607 of SEQ ID NO: 1879426
gcuccauaaggacagguau

SEQ ID NO: 1906221 - RNA, 19 nt, Artificial Sequence
  Description of Artificial Sequence: Synthetic oligonucleotide
  Antisense strand to SEQ ID NO: 1906220
auaccuguccuuauggagc

SEQ ID NO: 1906222 - RNA, 19 nt, Artificial Sequence
  Description of Artificial Sequence: Synthetic oligonucleotide
  Sense strand starting at position 2622 of SEQ ID NO: 1879426
guaucuuguccgucuuguu

SEQ ID NO: 1906223 - RNA, 19 nt, Artificial Sequence
  Description of Artificial Sequence: Synthetic oligonucleotide
  Antisense strand to SEQ ID NO: 1906222
aacaagacggacaagauac

SEQ ID NO: 1906224 - RNA, 19 nt, Artificial Sequence
  Description of Artificial Sequence: Synthetic oligonucleotide
  Sense strand starting at position 2671 of SEQ ID NO: 1879426
guagaaauucgauacguac

SEQ ID NO: 1906225 - RNA, 19 nt, Artificial Sequence
  Description of Artificial Sequence: Synthetic oligonucleotide
  Antisense strand to SEQ ID NO: 1906224
guacguaucgaauuucuac

SEQ ID NO: 1906226 - RNA, 19 nt, Artificial Sequence
  Description of Artificial Sequence: Synthetic oligonucleotide
  Sense strand starting at position 2674 of SEQ ID NO: 1879426
gaaauucgauacguacuga

SEQ ID NO: 1906227 - RNA, 19 nt, Artificial Sequence
  Description of Artificial Sequence: Synthetic oligonucleotide
  Antisense strand to SEQ ID NO: 1906226
ucaguacguaucgaauuuc

SEQ ID NO: 1906228 - RNA, 19 nt, Artificial Sequence
  Description of Artificial Sequence: Synthetic oligonucleotide
  Sense strand starting at position 2679 of SEQ ID NO: 1879426
ucgauacguacugaaugaa

SEQ ID NO: 1906229 - RNA, 19 nt, Artificial Sequence
  Description of Artificial Sequence: Synthetic oligonucleotide
  Antisense strand to SEQ ID NO: 1906228
uucauucaguacguaucga

SEQ ID NO: 1906230 - RNA, 19 nt, Artificial Sequence
  Description of Artificial Sequence: Synthetic oligonucleotide
  Sense strand starting at position 2829 of SEQ ID NO: 1879426
accagugggcacuaacauu

SEQ ID NO: 1906231 - RNA, 19 nt, Artificial Sequence
  Description of Artificial Sequence: Synthetic oligonucleotide
  Antisense strand to SEQ ID NO: 1906230
aauguuagugcccacuggu

SEQ ID NO: 1906232 - RNA, 19 nt, Artificial Sequence
  Description of Artificial Sequence: Synthetic oligonucleotide
  Sense strand starting at position 2915 of SEQ ID NO: 1879426
ggcuaaucaugauugaaag

SEQ ID NO: 1906233 - RNA, 19 nt, Artificial Sequence
  Description of Artificial Sequence: Synthetic oligonucleotide
  Antisense strand to SEQ ID NO: 1906232
cuuucaaucaugauuagcc

SEQ ID NO: 1906234 - RNA, 19 nt, Artificial Sequence
  Description of Artificial Sequence: Synthetic oligonucleotide
  Sense strand starting at position 2916 of SEQ ID NO: 1879426
gcuaaucaugauugaaagg

SEQ ID NO: 1906235 - RNA, 19 nt, Artificial Sequence
  Description of Artificial Sequence: Synthetic oligonucleotide
  Antisense strand to SEQ ID NO: 1906234
ccuuucaaucaugauuagc

SEQ ID NO: 1906236 - RNA, 19 nt, Artificial Sequence
  Description of Artificial Sequence: Synthetic oligonucleotide
  Sense strand starting at position 2934 of SEQ ID NO: 1879426
gcugaagcaguugaaugau

SEQ ID NO: 1906237 - RNA, 19 nt, Artificial Sequence
  Description of Artificial Sequence: Synthetic oligonucleotide
  Antisense strand to SEQ ID NO: 1906236
aucauucaacugcuucagc

SEQ ID NO: 1906238 - RNA, 19 nt, Artificial Sequence
  Description of Artificial Sequence: Synthetic oligonucleotide
  Sense strand starting at position 3342 of SEQ ID NO: 1879426
acucaaggguguuuaggua

SEQ ID NO: 1906239 - RNA, 19 nt, Artificial Sequence
  Description of Artificial Sequence: Synthetic oligonucleotide
  Antisense strand to SEQ ID NO: 1906238
uaccuaaacacccuugagu

SEQ ID NO: 1906240 - RNA, 19 nt, Artificial Sequence
  Description of Artificial Sequence: Synthetic oligonucleotide
  Sense strand starting at position 3364 of SEQ ID NO: 1879426
augacuguacuagguuaua

SEQ ID NO: 1906241 - RNA, 19 nt, Artificial Sequence
  Description of Artificial Sequence: Synthetic oligonucleotide
  Antisense strand to SEQ ID NO: 1906240
uauaaccuaguacagucau

SEQ ID NO: 1906242 - RNA, 19 nt, Artificial Sequence
  Description of Artificial Sequence: Synthetic oligonucleotide
  Sense strand starting at position 3476 of SEQ ID NO: 1879426
gcucauaugcuauauaaga

SEQ ID NO: 1906243 - RNA, 19 nt, Artificial Sequence
  Description of Artificial Sequence: Synthetic oligonucleotide
  Antisense strand to SEQ ID NO: 1906242
ucuuauauagcauaugagc

SEQ ID NO: 1906244 - RNA, 19 nt, Artificial Sequence
  Description of Artificial Sequence: Synthetic oligonucleotide
  Sense strand starting at position 3484 of SEQ ID NO: 1879426
gcuauauaagauuacugua

SEQ ID NO: 1906245 - RNA, 19 nt, Artificial Sequence
  Description of Artificial Sequence: Synthetic oligonucleotide
  Antisense strand to SEQ ID NO: 1906244
uacaguaaucuuauauagc

SEQ ID NO: 1906246 - RNA, 19 nt, Artificial Sequence
  Description of Artificial Sequence: Synthetic oligonucleotide
  Sense strand starting at position 3550 of SEQ ID NO: 1879426
cuuccuuaucuguauauga

SEQ ID NO: 1906247 - RNA, 19 nt, Artificial Sequence
  Description of Artificial Sequence: Synthetic oligonucleotide
  Antisense strand to SEQ ID NO: 1906246
ucauauacagauaaggaag

SEQ ID NO: 1906248 - RNA, 19 nt, Artificial Sequence
  Description of Artificial Sequence: Synthetic oligonucleotide
  Sense strand starting at position 3552 of SEQ ID NO: 1879426
uccuuaucuguauaugaag

SEQ ID NO: 1906249 - RNA, 19 nt, Artificial Sequence
  Description of Artificial Sequence: Synthetic oligonucleotide
  Antisense strand to SEQ ID NO: 1906248
cuucauauacagauaagga

SEQ ID NO: 1906250 - RNA, 19 nt, Artificial Sequence
  Description of Artificial Sequence: Synthetic oligonucleotide
  Sense strand starting at position 3606 of SEQ ID NO: 1879426
gcauaugaucuguauauga

SEQ ID NO: 1906251 - RNA, 19 nt, Artificial Sequence
  Description of Artificial Sequence: Synthetic oligonucleotide
  Antisense strand to SEQ ID NO: 1906250
ucauauacagaucauaugc

SEQ ID NO: 1906252 - RNA, 19 nt, Artificial Sequence
  Description of Artificial Sequence: Synthetic oligonucleotide
  Sense strand starting at position 3627 of SEQ ID NO: 1879426
agcaauagguggguuugaa

SEQ ID NO: 1906253 - RNA, 19 nt, Artificial Sequence
  Description of Artificial Sequence: Synthetic oligonucleotide
  Antisense strand to SEQ ID NO: 1906252
uucaaacccaccuauugcu

SEQ ID NO: 1906254 - RNA, 19 nt, Artificial Sequence
  Description of Artificial Sequence: Synthetic oligonucleotide
  Sense strand starting at position 3677 of SEQ ID NO: 1879426
cuuagacaaguuuacguaa

SEQ ID NO: 1906255 - RNA, 19 nt, Artificial Sequence
  Description of Artificial Sequence: Synthetic oligonucleotide
  Antisense strand to SEQ ID NO: 1906254
uuacguaaacuugucuaag

SEQ ID NO: 1906256 - RNA, 19 nt, Artificial Sequence
  Description of Artificial Sequence: Synthetic oligonucleotide
  Sense strand starting at position 3719 of SEQ ID NO: 1879426
aucuguuacaugggugaua

SEQ ID NO: 1906257 - RNA, 19 nt, Artificial Sequence
  Description of Artificial Sequence: Synthetic oligonucleotide
  Antisense strand to SEQ ID NO: 1906256
uaucacccauguaacagau

SEQ ID NO: 1906258 - RNA, 19 nt, Artificial Sequence
  Description of Artificial Sequence: Synthetic oligonucleotide
  Sense strand starting at position 3720 of SEQ ID NO: 1879426
ucuguuacaugggugauau

SEQ ID NO: 1906259 - RNA, 19 nt, Artificial Sequence
  Description of Artificial Sequence: Synthetic oligonucleotide
  Antisense strand to SEQ ID NO: 1906258
auaucacccauguaacaga

SEQ ID NO: 1906260 - RNA, 19 nt, Artificial Sequence
  Description of Artificial Sequence: Synthetic oligonucleotide
  Sense strand starting at position 3722 of SEQ ID NO: 1879426
uguuacaugggugauauua

SEQ ID NO: 1906261 - RNA, 19 nt, Artificial Sequence
  Description of Artificial Sequence: Synthetic oligonucleotide
  Antisense strand to SEQ ID NO: 1906260
uaauaucacccauguaaca

SEQ ID NO: 1906262 - RNA, 19 nt, Artificial Sequence
  Description of Artificial Sequence: Synthetic oligonucleotide
  Sense strand starting at position 3732 of SEQ ID NO: 1879426
gugauauuaauagggugua

SEQ ID NO: 1906263 - RNA, 19 nt, Artificial Sequence
  Description of Artificial Sequence: Synthetic oligonucleotide
  Antisense strand to SEQ ID NO: 1906262
uacacccuauuaauaucac

SEQ ID NO: 1906264 - RNA, 19 nt, Artificial Sequence
  Description of Artificial Sequence: Synthetic oligonucleotide
  Sense strand starting at position 323 of SEQ ID NO: 1879427
uuacaugaagucugaaaug

SEQ ID NO: 1906265 - RNA, 19 nt, Artificial Sequence
  Description of Artificial Sequence: Synthetic oligonucleotide
  Antisense strand to SEQ ID NO: 1906264
cauuucagacuucauguaa

SEQ ID NO: 1906266 - RNA, 19 nt, Artificial Sequence
  Description of Artificial Sequence: Synthetic oligonucleotide
  Sense strand starting at position 362 of SEQ ID NO: 1879427
cugcuugucaugggaauuc

SEQ ID NO: 1906267 - RNA, 19 nt, Artificial Sequence
  Description of Artificial Sequence: Synthetic oligonucleotide
  Antisense strand to SEQ ID NO: 1906266
gaauucccaugacaagcag

SEQ ID NO: 1906268 - RNA, 19 nt, Artificial Sequence
  Description of Artificial Sequence: Synthetic oligonucleotide
  Sense strand starting at position 415 of SEQ ID NO: 1879427
augagauggugucuggcua

SEQ ID NO: 1906269 - RNA, 19 nt, Artificial Sequence
  Description of Artificial Sequence: Synthetic oligonucleotide
  Antisense strand to SEQ ID NO: 1906268
uagccagacaccaucucau

SEQ ID NO: 1906270 - RNA, 19 nt, Artificial Sequence
  Description of Artificial Sequence: Synthetic oligonucleotide
  Sense strand starting at position 617 of SEQ ID NO: 1879427
ggaagacuuucuuccuauu

SEQ ID NO: 1906271 - RNA, 19 nt, Artificial Sequence
  Description of Artificial Sequence: Synthetic oligonucleotide
  Antisense strand to SEQ ID NO: 1906270
aauaggaagaaagucuucc

SEQ ID NO: 1906272 - RNA, 19 nt, Artificial Sequence
  Description of Artificial Sequence: Synthetic oligonucleotide
  Sense strand starting at position 752 of SEQ ID NO: 1879427
accugucuucuggauuaug

SEQ ID NO: 1906273 - RNA, 19 nt, Artificial Sequence
  Description of Artificial Sequence: Synthetic oligonucleotide
  Antisense strand to SEQ ID NO: 1906272
cauaauccagaagacaggu

SEQ ID NO: 1906274 - RNA, 19 nt, Artificial Sequence
  Description of Artificial Sequence: Synthetic oligonucleotide
  Sense strand starting at position 755 of SEQ ID NO: 1879427
ugucuucuggauuaugagu

SEQ ID NO: 1906275 - RNA, 19 nt, Artificial Sequence
  Description of Artificial Sequence: Synthetic oligonucleotide
  Antisense strand to SEQ ID NO: 1906274
acucauaauccagaagaca

SEQ ID NO: 1906276 - RNA, 19 nt, Artificial Sequence
  Description of Artificial Sequence: Synthetic oligonucleotide
  Sense strand starting at position 760 of SEQ ID NO: 1879427
ucuggauuaugagucucuu

SEQ ID NO: 1906277 - RNA, 19 nt, Artificial Sequence
  Description of Artificial Sequence: Synthetic oligonucleotide
  Antisense strand to SEQ ID NO: 1906276
aagagacucauaauccaga

SEQ ID NO: 1906278 - RNA, 19 nt, Artificial Sequence
  Description of Artificial Sequence: Synthetic oligonucleotide
  Sense strand starting at position 806 of SEQ ID NO: 1879427
uggcccagugccuagaaua

SEQ ID NO: 1906279 - RNA, 19 nt, Artificial Sequence
  Description of Artificial Sequence: Synthetic oligonucleotide
  Antisense strand to SEQ ID NO: 1906278
uauucuaggcacugggcca

SEQ ID NO: 1906280 - RNA, 19 nt, Artificial Sequence
  Description of Artificial Sequence: Synthetic oligonucleotide
  Sense strand starting at position 904 of SEQ ID NO: 1879427
aguaccagucucuaagacu

SEQ ID NO: 1906281 - RNA, 19 nt, Artificial Sequence
  Description of Artificial Sequence: Synthetic oligonucleotide
  Antisense strand to SEQ ID NO: 1906280
agucuuagagacugguacu

SEQ ID NO: 1906282 - RNA, 19 nt, Artificial Sequence
  Description of Artificial Sequence: Synthetic oligonucleotide
  Sense strand starting at position 1062 of SEQ ID NO: 1879427
ccaugucuacauggaaacu

SEQ ID NO: 1906283 - RNA, 19 nt, Artificial Sequence
  Description of Artificial Sequence: Synthetic oligonucleotide
  Antisense strand to SEQ ID NO: 1906282
aguuuccauguagacaugg

SEQ ID NO: 1906284 - RNA, 19 nt, Artificial Sequence
  Description of Artificial Sequence: Synthetic oligonucleotide
  Sense strand starting at position 1114 of SEQ ID NO: 1879427
cugugaauagagugaguaa

SEQ ID NO: 1906285 - RNA, 19 nt, Artificial Sequence
  Description of Artificial Sequence: Synthetic oligonucleotide
  Antisense strand to SEQ ID NO: 1906284
uuacucacucuauucacag

SEQ ID NO: 1906286 - RNA, 19 nt, Artificial Sequence
  Description of Artificial Sequence: Synthetic oligonucleotide
  Sense strand starting at position 1499 of SEQ ID NO: 1879427
acagucagcuccucuagaa

SEQ ID NO: 1906287 - RNA, 19 nt, Artificial Sequence
  Description of Artificial Sequence: Synthetic oligonucleotide
  Antisense strand to SEQ ID NO: 1906286
uucuagaggagcugacugu

SEQ ID NO: 1906288 - RNA, 19 nt, Artificial Sequence
  Description of Artificial Sequence: Synthetic oligonucleotide
  Sense strand starting at position 1512 of SEQ ID NO: 1879427
cuagaaguccauggcaaga

SEQ ID NO: 1906289 - RNA, 19 nt, Artificial Sequence
  Description of Artificial Sequence: Synthetic oligonucleotide
  Antisense strand to SEQ ID NO: 1906288
ucuugccauggacuucuag

SEQ ID NO: 1906290 - RNA, 19 nt, Artificial Sequence
  Description of Artificial Sequence: Synthetic oligonucleotide
  Sense strand starting at position 1744 of SEQ ID NO: 1879427
acgcaaugugcguauauuu

SEQ ID NO: 1906291 - RNA, 19 nt, Artificial Sequence
  Description of Artificial Sequence: Synthetic oligonucleotide
  Antisense strand to SEQ ID NO: 1906290
aaauauacgcacauugcgu

SEQ ID NO: 1906292 - RNA, 19 nt, Artificial Sequence
  Description of Artificial Sequence: Synthetic oligonucleotide
  Sense strand starting at position 1803 of SEQ ID NO: 1879427
aagagcuaggccuaauuga

SEQ ID NO: 1906293 - RNA, 19 nt, Artificial Sequence
  Description of Artificial Sequence: Synthetic oligonucleotide
  Antisense strand to SEQ ID NO: 1906292
ucaauuaggccuagcucuu

SEQ ID NO: 1906294 - RNA, 19 nt, Artificial Sequence
  Description of Artificial Sequence: Synthetic oligonucleotide
  Sense strand starting at position 1810 of SEQ ID NO: 1879427
aggccuaauugaucuuaaa

SEQ ID NO: 1906295 - RNA, 19 nt, Artificial Sequence
  Description of Artificial Sequence: Synthetic oligonucleotide
  Antisense strand to SEQ ID NO: 1906294
uuuaagaucaauuaggccu

SEQ ID NO: 1906296 - RNA, 19 nt, Artificial Sequence
  Description of Artificial Sequence: Synthetic oligonucleotide
  Sense strand starting at position 1832 of SEQ ID NO: 1879427
cucaguggucucuagggua

SEQ ID NO: 1906297 - RNA, 19 nt, Artificial Sequence
  Description of Artificial Sequence: Synthetic oligonucleotide
  Antisense strand to SEQ ID NO: 1906296
uacccuagagaccacugag

SEQ ID NO: 1906298 - RNA, 19 nt, Artificial Sequence
  Description of Artificial Sequence: Synthetic oligonucleotide
  Sense strand starting at position 1845 of SEQ ID NO: 1879427
aggguagauaggugccaaa

SEQ ID NO: 1906299 - RNA, 19 nt, Artificial Sequence
  Description of Artificial Sequence: Synthetic oligonucleotide
  Antisense strand to SEQ ID NO: 1906298
uuuggcaccuaucuacccu

SEQ ID NO: 1906300 - RNA, 19 nt, Artificial Sequence
  Description of Artificial Sequence: Synthetic oligonucleotide
  Sense strand starting at position 1875 of SEQ ID NO: 1879427
ggaaucauuuaccacaggu

SEQ ID NO: 1906301 - RNA, 19 nt, Artificial Sequence
  Description of Artificial Sequence: Synthetic oligonucleotide
  Antisense strand to SEQ ID NO: 1906300
accugugguaaaugauucc

SEQ ID NO: 1906302 - RNA, 19 nt, Artificial Sequence
  Description of Artificial Sequence: Synthetic oligonucleotide
  Sense strand starting at position 1950 of SEQ ID NO: 1879427
cuaugagagccuuggagag

SEQ ID NO: 1906303 - RNA, 19 nt, Artificial Sequence
  Description of Artificial Sequence: Synthetic oligonucleotide
  Antisense strand to SEQ ID NO: 1906302
cucuccaaggcucucauag

SEQ ID NO: 1906304 - RNA, 19 nt, Artificial Sequence
  Description of Artificial Sequence: Synthetic oligonucleotide
  Sense strand starting at position 2001 of SEQ ID NO: 1879427
aggaacuuauuagacaaua

SEQ ID NO: 1906305 - RNA, 19 nt, Artificial Sequence
  Description of Artificial Sequence: Synthetic oligonucleotide
  Antisense strand to SEQ ID NO: 1906304
uauugucuaauaaguuccu

SEQ ID NO: 1906306 - RNA, 19 nt, Artificial Sequence
  Description of Artificial Sequence: Synthetic oligonucleotide
  Sense strand starting at position 2250 of SEQ ID NO: 1879427
accacuagauguuugauga

SEQ ID NO: 1906307 - RNA, 19 nt, Artificial Sequence
  Description of Artificial Sequence: Synthetic oligonucleotide
  Antisense strand to SEQ ID NO: 1906306
ucaucaaacaucuaguggu

SEQ ID NO: 1906308 - RNA, 19 nt, Artificial Sequence
  Description of Artificial Sequence: Synthetic oligonucleotide
  Sense strand starting at position 2251 of SEQ ID NO: 1879427
ccacuagauguuugaugaa

SEQ ID NO: 1906309 - RNA, 19 nt, Artificial Sequence
  Description of Artificial Sequence: Synthetic oligonucleotide
  Antisense strand to SEQ ID NO: 1906308
uucaucaaacaucuagugg

SEQ ID NO: 1906310 - RNA, 19 nt, Artificial Sequence
  Description of Artificial Sequence: Synthetic oligonucleotide
  Sense strand starting at position 2365 of SEQ ID NO: 1879427
ggucuuuacugagugggua

SEQ ID NO: 1906311 - RNA, 19 nt, Artificial Sequence
  Description of Artificial Sequence: Synthetic oligonucleotide
  Antisense strand to SEQ ID NO: 1906310
uacccacucaguaaagacc

SEQ ID NO: 1906312 - RNA, 19 nt, Artificial Sequence
  Description of Artificial Sequence: Synthetic oligonucleotide
  Sense strand starting at position 2603 of SEQ ID NO: 1879427
gcccuucuacuagaaugua

SEQ ID NO: 1906313 - RNA, 19 nt, Artificial Sequence
  Description of Artificial Sequence: Synthetic oligonucleotide
  Antisense strand to SEQ ID NO: 1906312
uacauucuaguagaagggc

SEQ ID NO: 1906314 - RNA, 19 nt, Artificial Sequence
  Description of Artificial Sequence: Synthetic oligonucleotide
  Sense strand starting at position 2653 of SEQ ID NO: 1879427
uguuuaacacuguagucaa

SEQ ID NO: 1906315 - RNA, 19 nt, Artificial Sequence
  Description of Artificial Sequence: Synthetic oligonucleotide
  Antisense strand to SEQ ID NO: 1906314
uugacuacaguguuaaaca

SEQ ID NO: 1906316 - RNA, 19 nt, Artificial Sequence
  Description of Artificial Sequence: Synthetic oligonucleotide
  Sense strand starting at position 2706 of SEQ ID NO: 1879427
acuuaacauuuguggaaug

SEQ ID NO: 1906317 - RNA, 19 nt, Artificial Sequence
  Description of Artificial Sequence: Synthetic oligonucleotide
  Antisense strand to SEQ ID NO: 1906316
cauuccacaaauguuaagu

SEQ ID NO: 1906318 - RNA, 19 nt, Artificial Sequence
  Description of Artificial Sequence: Synthetic oligonucleotide
  Sense strand starting at position 2707 of SEQ ID NO: 1879427
cuuaacauuuguggaauga

SEQ ID NO: 1906319 - RNA, 19 nt, Artificial Sequence
  Description of Artificial Sequence: Synthetic oligonucleotide
  Antisense strand to SEQ ID NO: 1906318
ucauuccacaaauguuaag

SEQ ID NO: 1906320 - RNA, 19 nt, Artificial Sequence
  Description of Artificial Sequence: Synthetic oligonucleotide
  Sense strand starting at position 2742 of SEQ ID NO: 1879427
guaaguggagcugaaagua

SEQ ID NO: 1906321 - RNA, 19 nt, Artificial Sequence
  Description of Artificial Sequence: Synthetic oligonucleotide
  Antisense strand to SEQ ID NO: 1906320
uacuuucagcuccacuuac

SEQ ID NO: 1906322 - RNA, 19 nt, Artificial Sequence
  Description of Artificial Sequence: Synthetic oligonucleotide
  Sense strand starting at position 2750 of SEQ ID NO: 1879427
agcugaaaguagguuagaa

SEQ ID NO: 1906323 - RNA, 19 nt, Artificial Sequence
  Description of Artificial Sequence: Synthetic oligonucleotide
  Antisense strand to SEQ ID NO: 1906322
uucuaaccuacuuucagcu

SEQ ID NO: 1906324 - RNA, 19 nt, Artificial Sequence
  Description of Artificial Sequence: Synthetic oligonucleotide
  Sense strand starting at position 2950 of SEQ ID NO: 1879427
uaaguaaauucuguugggu

SEQ ID NO: 1906325 - RNA, 19 nt, Artificial Sequence
  Description of Artificial Sequence: Synthetic oligonucleotide
  Antisense strand to SEQ ID NO: 1906324
acccaacagaauuuacuua

SEQ ID NO: 1906326 - RNA, 19 nt, Artificial Sequence
  Description of Artificial Sequence: Synthetic oligonucleotide
  Sense strand starting at position 2953 of SEQ ID NO: 1879427
guaaauucuguuggguuga

SEQ ID NO: 1906327 - RNA, 19 nt, Artificial Sequence
  Description of Artificial Sequence: Synthetic oligonucleotide
  Antisense strand to SEQ ID NO: 1906326
ucaacccaacagaauuuac

SEQ ID NO: 1906328 - RNA, 19 nt, Artificial Sequence
  Description of Artificial Sequence: Synthetic oligonucleotide
  Sense strand starting at position 2955 of SEQ ID NO: 1879427
aaauucuguuggguugaau

SEQ ID NO: 1906329 - RNA, 19 nt, Artificial Sequence
  Description of Artificial Sequence: Synthetic oligonucleotide
  Antisense strand to SEQ ID NO: 1906328
auucaacccaacagaauuu

SEQ ID NO: 1906330 - RNA, 19 nt, Artificial Sequence
  Description of Artificial Sequence: Synthetic oligonucleotide
  Sense strand starting at position 3150 of SEQ ID NO: 1879427
ccaugcuuugacuacaagu

SEQ ID NO: 1906331 - RNA, 19 nt, Artificial Sequence
  Description of Artificial Sequence: Synthetic oligonucleotide
  Antisense strand to SEQ ID NO: 1906330
acuuguagucaaagcaugg

SEQ ID NO: 1906332 - RNA, 19 nt, Artificial Sequence
  Description of Artificial Sequence: Synthetic oligonucleotide
  Sense strand starting at position 3360 of SEQ ID NO: 1879427
cugggaaaguugcuuaugu

SEQ ID NO: 1906333 - RNA, 19 nt, Artificial Sequence
  Description of Artificial Sequence: Synthetic oligonucleotide
  Antisense strand to SEQ ID NO: 1906332
acauaagcaacuuucccag

SEQ ID NO: 1906334 - RNA, 19 nt, Artificial Sequence
  Description of Artificial Sequence: Synthetic oligonucleotide
  Sense strand starting at position 3361 of SEQ ID NO: 1879427
ugggaaaguugcuuauguc

SEQ ID NO: 1906335 - RNA, 19 nt, Artificial Sequence
  Description of Artificial Sequence: Synthetic oligonucleotide
  Antisense strand to SEQ ID NO: 1906334
gacauaagcaacuuuccca

SEQ ID NO: 1906336 - RNA, 19 nt, Artificial Sequence
  Description of Artificial Sequence: Synthetic oligonucleotide
  Sense strand starting at position 3362 of SEQ ID NO: 1879427
gggaaaguugcuuauguca

SEQ ID NO: 1906337 - RNA, 19 nt, Artificial Sequence
  Description of Artificial Sequence: Synthetic oligonucleotide
  Antisense strand to SEQ ID NO: 1906336
ugacauaagcaacuuuccc

SEQ ID NO: 1906338 - RNA, 19 nt, Artificial Sequence
  Description of Artificial Sequence: Synthetic oligonucleotide
  Sense strand starting at position 3527 of SEQ ID NO: 1879427
gauauugcuguuggugaga

SEQ ID NO: 1906339 - RNA, 19 nt, Artificial Sequence
  Description of Artificial Sequence: Synthetic oligonucleotide
  Antisense strand to SEQ ID NO: 1906338
ucucaccaacagcaauauc

SEQ ID NO: 1906340 - RNA, 19 nt, Artificial Sequence
  Description of Artificial Sequence: Synthetic oligonucleotide
  Sense strand starting at position 3618 of SEQ ID NO: 1879427
agucacuuaucuuugguaa

SEQ ID NO: 1906341 - RNA, 19 nt, Artificial Sequence
  Description of Artificial Sequence: Synthetic oligonucleotide
  Antisense strand to SEQ ID NO: 1906340
uuaccaaagauaagugacu

SEQ ID NO: 1906342 - RNA, 19 nt, Artificial Sequence
  Description of Artificial Sequence: Synthetic oligonucleotide
  Sense strand starting at position 3619 of SEQ ID NO: 1879427
gucacuuaucuuugguaaa

SEQ ID NO: 1906343 - RNA, 19 nt, Artificial Sequence
  Description of Artificial Sequence: Synthetic oligonucleotide
  Antisense strand to SEQ ID NO: 1906342
uuuaccaaagauaagugac

SEQ ID NO: 1906344 - RNA, 19 nt, Artificial Sequence
  Description of Artificial Sequence: Synthetic oligonucleotide
  Sense strand starting at position 62 of SEQ ID NO: 1879428
acaccaguccuaugagauu

SEQ ID NO: 1906345 - RNA, 19 nt, Artificial Sequence
  Description of Artificial Sequence: Synthetic oligonucleotide
  Antisense strand to SEQ ID NO: 1906344
aaucucauaggacuggugu

SEQ ID NO: 1906346 - RNA, 19 nt, Artificial Sequence
  Description of Artificial Sequence: Synthetic oligonucleotide
  Sense strand starting at position 167 of SEQ ID NO: 1879428
aggacuucagcauguggau

SEQ ID NO: 1906347 - RNA, 19 nt, Artificial Sequence
  Description of Artificial Sequence: Synthetic oligonucleotide
  Antisense strand to SEQ ID NO: 1906346
auccacaugcugaaguccu

SEQ ID NO: 1906348 - RNA, 19 nt, Artificial Sequence
  Description of Artificial Sequence: Synthetic oligonucleotide
  Sense strand starting at position 427 of SEQ ID NO: 1879428
ggcggcauaugacucuaua

SEQ ID NO: 1906349 - RNA, 19 nt, Artificial Sequence
  Description of Artificial Sequence: Synthetic oligonucleotide
  Antisense strand to SEQ ID NO: 1906348
uauagagucauaugccgcc

SEQ ID NO: 1906350 - RNA, 19 nt, Artificial Sequence
  Description of Artificial Sequence: Synthetic oligonucleotide
  Sense strand starting at position 430 of SEQ ID NO: 1879428
ggcauaugacucuauaguc

SEQ ID NO: 1906351 - RNA, 19 nt, Artificial Sequence
  Description of Artificial Sequence: Synthetic oligonucleotide
  Antisense strand to SEQ ID NO: 1906350
gacuauagagucauaugcc

SEQ ID NO: 1906352 - RNA, 19 nt, Artificial Sequence
  Description of Artificial Sequence: Synthetic oligonucleotide
  Sense strand starting at position 1082 of SEQ ID NO: 1879428
uccacuggcuccuuuaaga

SEQ ID NO: 1906353 - RNA, 19 nt, Artificial Sequence
  Description of Artificial Sequence: Synthetic oligonucleotide
  Antisense strand to SEQ ID NO: 1906352
ucuuaaaggagccagugga

SEQ ID NO: 1906354 - RNA, 19 nt, Artificial Sequence
  Description of Artificial Sequence: Synthetic oligonucleotide
  Sense strand starting at position 1340 of SEQ ID NO: 1879428
caauaaacguucccugaga

SEQ ID NO: 1906355 - RNA, 19 nt, Artificial Sequence
  Description of Artificial Sequence: Synthetic oligonucleotide
  Antisense strand to SEQ ID NO: 1906354
ucucagggaacguuuauug

SEQ ID NO: 1906356 - RNA, 19 nt, Artificial Sequence
  Description of Artificial Sequence: Synthetic oligonucleotide
  Sense strand starting at position 1342 of SEQ ID NO: 1879428
auaaacguucccugagaac

SEQ ID NO: 1906357 - RNA, 19 nt, Artificial Sequence
  Description of Artificial Sequence: Synthetic oligonucleotide
  Antisense strand to SEQ ID NO: 1906356
guucucagggaacguuuau

SEQ ID NO: 1906358 - RNA, 19 nt, Artificial Sequence
  Description of Artificial Sequence: Synthetic oligonucleotide
  Sense strand starting at position 1429 of SEQ ID NO: 1879428
guugcugcaucacuuauuu

SEQ ID NO: 1906359 - RNA, 19 nt, Artificial Sequence
  Description of Artificial Sequence: Synthetic oligonucleotide
  Antisense strand to SEQ ID NO: 1906358
aaauaagugaugcagcaac

SEQ ID NO: 1906360 - RNA, 19 nt, Artificial Sequence
  Description of Artificial Sequence: Synthetic oligonucleotide
  Sense strand starting at position 1838 of SEQ ID NO: 1879428
cucugaguccuugaccuua

SEQ ID NO: 1906361 - RNA, 19 nt, Artificial Sequence
  Description of Artificial Sequence: Synthetic oligonucleotide
  Antisense strand to SEQ ID NO: 1906360
uaaggucaaggacucagag

SEQ ID NO: 1906362 - RNA, 19 nt, Artificial Sequence
  Description of Artificial Sequence: Synthetic oligonucleotide
  Sense strand starting at position 1840 of SEQ ID NO: 1879428
cugaguccuugaccuuauu

SEQ ID NO: 1906363 - RNA, 19 nt, Artificial Sequence
  Description of Artificial Sequence: Synthetic oligonucleotide
  Antisense strand to SEQ ID NO: 1906362
aauaaggucaaggacucag

SEQ ID NO: 1906364 - RNA, 19 nt, Artificial Sequence
  Description of Artificial Sequence: Synthetic oligonucleotide
  Sense strand starting at position 1848 of SEQ ID NO: 1879428
uugaccuuauuuggauaau

SEQ ID NO: 1906365 - RNA, 19 nt, Artificial Sequence
  Description of Artificial Sequence: Synthetic oligonucleotide
  Antisense strand to SEQ ID NO: 1906364
auuauccaaauaaggucaa

SEQ ID NO: 1906366 - RNA, 19 nt, Artificial Sequence
  Description of Artificial Sequence: Synthetic oligonucleotide
  Sense strand starting at position 1849 of SEQ ID NO: 1879428
ugaccuuauuuggauaaug

SEQ ID NO: 1906367 - RNA, 19 nt, Artificial Sequence
  Description of Artificial Sequence: Synthetic oligonucleotide
  Antisense strand to SEQ ID NO: 1906366
cauuauccaaauaagguca

SEQ ID NO: 1906368 - RNA, 19 nt, Artificial Sequence
  Description of Artificial Sequence: Synthetic oligonucleotide
  Sense strand starting at position 1890 of SEQ ID NO: 1879428
aggacuguccugggaaugu

SEQ ID NO: 1906369 - RNA, 19 nt, Artificial Sequence
  Description of Artificial Sequence: Synthetic oligonucleotide
  Antisense strand to SEQ ID NO: 1906368
acauucccaggacaguccu

SEQ ID NO: 1906370 - RNA, 19 nt, Artificial Sequence
  Description of Artificial Sequence: Synthetic oligonucleotide
  Sense strand starting at position 2021 of SEQ ID NO: 1879428
ugauauugcuguuuccaug

SEQ ID NO: 1906371 - RNA, 19 nt, Artificial Sequence
  Description of Artificial Sequence: Synthetic oligonucleotide
  Antisense strand to SEQ ID NO: 1906370
cauggaaacagcaauauca

SEQ ID NO: 1906372 - RNA, 19 nt, Artificial Sequence
  Description of Artificial Sequence: Synthetic oligonucleotide
  Sense strand starting at position 2121 of SEQ ID NO: 1879428
cguguccucagcuuaaugu

SEQ ID NO: 1906373 - RNA, 19 nt, Artificial Sequence
  Description of Artificial Sequence: Synthetic oligonucleotide
  Antisense strand to SEQ ID NO: 1906372
acauuaagcugaggacacg

SEQ ID NO: 1906374 - RNA, 19 nt, Artificial Sequence
  Description of Artificial Sequence: Synthetic oligonucleotide
  Sense strand starting at position 2190 of SEQ ID NO: 1879428
ggaggaauugccugugugu

SEQ ID NO: 1906375 - RNA, 19 nt, Artificial Sequence
  Description of Artificial Sequence: Synthetic oligonucleotide
  Antisense strand to SEQ ID NO: 1906374
acacacaggcaauuccucc

SEQ ID NO: 1906376 - RNA, 19 nt, Artificial Sequence
  Description of Artificial Sequence: Synthetic oligonucleotide
  Sense strand starting at position 2227 of SEQ ID NO: 1879428
ggcaucagucaucgucaca

SEQ ID NO: 1906377 - RNA, 19 nt, Artificial Sequence
  Description of Artificial Sequence: Synthetic oligonucleotide
  Antisense strand to SEQ ID NO: 1906376
ugugacgaugacugaugcc

SEQ ID NO: 1906378 - RNA, 19 nt, Artificial Sequence
  Description of Artificial Sequence: Synthetic oligonucleotide
  Sense strand starting at position 2425 of SEQ ID NO: 1879428
agcuguuugacuuggagca

SEQ ID NO: 1906379 - RNA, 19 nt, Artificial Sequence
  Description of Artificial Sequence: Synthetic oligonucleotide
  Antisense strand to SEQ ID NO: 1906378
ugcuccaagucaaacagcu

SEQ ID NO: 1906380 - RNA, 19 nt, Artificial Sequence
  Description of Artificial Sequence: Synthetic oligonucleotide
  Sense strand starting at position 2426 of SEQ ID NO: 1879428
gcuguuugacuuggagcaa

SEQ ID NO: 1906381 - RNA, 19 nt, Artificial Sequence
  Description of Artificial Sequence: Synthetic oligonucleotide
  Antisense strand to SEQ ID NO: 1906380
uugcuccaagucaaacagc

SEQ ID NO: 1906382 - RNA, 19 nt, Artificial Sequence
  Description of Artificial Sequence: Synthetic oligonucleotide
  Sense strand starting at position 2936 of SEQ ID NO: 1879428
uccuccuugccagggauua

SEQ ID NO: 1906383 - RNA, 19 nt, Artificial Sequence
  Description of Artificial Sequence: Synthetic oligonucleotide
  Antisense strand to SEQ ID NO: 1906382
uaaucccuggcaaggagga

SEQ ID NO: 1906384 - RNA, 19 nt, Artificial Sequence
  Description of Artificial Sequence: Synthetic oligonucleotide
  Sense strand starting at position 2937 of SEQ ID NO: 1879428
ccuccuugccagggauuau

SEQ ID NO: 1906385 - RNA, 19 nt, Artificial Sequence
  Description of Artificial Sequence: Synthetic oligonucleotide
  Antisense strand to SEQ ID NO: 1906384
auaaucccuggcaaggagg

SEQ ID NO: 1906386 - RNA, 19 nt, Artificial Sequence
  Description of Artificial Sequence: Synthetic oligonucleotide
  Sense strand starting at position 3028 of SEQ ID NO: 1879428
gccaaucagagaggugaga

SEQ ID NO: 1906387 - RNA, 19 nt, Artificial Sequence
  Description of Artificial Sequence: Synthetic oligonucleotide
  Antisense strand to SEQ ID NO: 1906386
ucucaccucucugauuggc

SEQ ID NO: 1906388 - RNA, 19 nt, Artificial Sequence
  Description of Artificial Sequence: Synthetic oligonucleotide
  Sense strand starting at position 3088 of SEQ ID NO: 1879428
ugagcaagcuccucucauu

SEQ ID NO: 1906389 - RNA, 19 nt, Artificial Sequence
  Description of Artificial Sequence: Synthetic oligonucleotide
  Antisense strand to SEQ ID NO: 1906388
aaugagaggagcuugcuca

SEQ ID NO: 1906390 - RNA, 19 nt, Artificial Sequence
  Description of Artificial Sequence: Synthetic oligonucleotide
  Sense strand starting at position 3232 of SEQ ID NO: 1879428
cugugcucacaugagauaa

SEQ ID NO: 1906391 - RNA, 19 nt, Artificial Sequence
  Description of Artificial Sequence: Synthetic oligonucleotide
  Antisense strand to SEQ ID NO: 1906390
uuaucucaugugagcacag

SEQ ID NO: 1906392 - RNA, 19 nt, Artificial Sequence
  Description of Artificial Sequence: Synthetic oligonucleotide
  Sense strand starting at position 3246 of SEQ ID NO: 1879428
gauaauagaucucuguggu

SEQ ID NO: 1906393 - RNA, 19 nt, Artificial Sequence
  Description of Artificial Sequence: Synthetic oligonucleotide
  Antisense strand to SEQ ID NO: 1906392
accacagagaucuauuauc

SEQ ID NO: 1906394 - RNA, 19 nt, Artificial Sequence
  Description of Artificial Sequence: Synthetic oligonucleotide
  Sense strand starting at position 3247 of SEQ ID NO: 1879428
auaauagaucucugugguu

SEQ ID NO: 1906395 - RNA, 19 nt, Artificial Sequence
  Description of Artificial Sequence: Synthetic oligonucleotide
  Antisense strand to SEQ ID NO: 1906394
aaccacagagaucuauuau

SEQ ID NO: 1906396 - RNA, 19 nt, Artificial Sequence
  Description of Artificial Sequence: Synthetic oligonucleotide
  Sense strand starting at position 3249 of SEQ ID NO: 1879428
aauagaucucugugguuaa

SEQ ID NO: 1906397 - RNA, 19 nt, Artificial Sequence
  Description of Artificial Sequence: Synthetic oligonucleotide
  Antisense strand to SEQ ID NO: 1906396
uuaaccacagagaucuauu

SEQ ID NO: 1906398 - RNA, 19 nt, Artificial Sequence
  Description of Artificial Sequence: Synthetic oligonucleotide
  Sense strand starting at position 3252 of SEQ ID NO: 1879428
agaucucugugguuaagcu

SEQ ID NO: 1906399 - RNA, 19 nt, Artificial Sequence
  Description of Artificial Sequence: Synthetic oligonucleotide
  Antisense strand to SEQ ID NO: 1906398
agcuuaaccacagagaucu

SEQ ID NO: 1906400 - RNA, 19 nt, Artificial Sequence
  Description of Artificial Sequence: Synthetic oligonucleotide
  Sense strand starting at position 3253 of SEQ ID NO: 1879428
gaucucugugguuaagcua

SEQ ID NO: 1906401 - RNA, 19 nt, Artificial Sequence
  Description of Artificial Sequence: Synthetic oligonucleotide
  Antisense strand to SEQ ID NO: 1906400
uagcuuaaccacagagauc

SEQ ID NO: 1906402 - RNA, 19 nt, Artificial Sequence
  Description of Artificial Sequence: Synthetic oligonucleotide
  Sense strand starting at position 3370 of SEQ ID NO: 1879428
uguccaacccugggagaaa

SEQ ID NO: 1906403 - RNA, 19 nt, Artificial Sequence
  Description of Artificial Sequence: Synthetic oligonucleotide
  Antisense strand to SEQ ID NO: 1906402
uuucucccaggguuggaca

SEQ ID NO: 1906404 - RNA, 19 nt, Artificial Sequence
  Description of Artificial Sequence: Synthetic oligonucleotide
  Sense strand starting at position 3449 of SEQ ID NO: 1879428
agguuaucaccagaaguuu

SEQ ID NO: 1906405 - RNA, 19 nt, Artificial Sequence
  Description of Artificial Sequence: Synthetic oligonucleotide
  Antisense strand to SEQ ID NO: 1906404
aaacuucuggugauaaccu

SEQ ID NO: 1906406 - RNA, 19 nt, Artificial Sequence
  Description of Artificial Sequence: Synthetic oligonucleotide
  Sense strand starting at position 3458 of SEQ ID NO: 1879428
ccagaaguuuaagcuucuu

SEQ ID NO: 1906407 - RNA, 19 nt, Artificial Sequence
  Description of Artificial Sequence: Synthetic oligonucleotide
  Antisense strand to SEQ ID NO: 1906406
aagaagcuuaaacuucugg

SEQ ID NO: 1906408 - RNA, 19 nt, Artificial Sequence
  Description of Artificial Sequence: Synthetic oligonucleotide
  Sense strand starting at position 3463 of SEQ ID NO: 1879428
aguuuaagcuucuugagaa

SEQ ID NO: 1906409 - RNA, 19 nt, Artificial Sequence
  Description of Artificial Sequence: Synthetic oligonucleotide
  Antisense strand to SEQ ID NO: 1906408
uucucaagaagcuuaaacu

SEQ ID NO: 1906410 - RNA, 19 nt, Artificial Sequence
  Description of Artificial Sequence: Synthetic oligonucleotide
  Sense strand starting at position 3585 of SEQ ID NO: 1879428
uuccuauugcagcaugaca

SEQ ID NO: 1906411 - RNA, 19 nt, Artificial Sequence
  Description of Artificial Sequence: Synthetic oligonucleotide
  Antisense strand to SEQ ID NO: 1906410
ugucaugcugcaauaggaa

SEQ ID NO: 1906412 - RNA, 19 nt, Artificial Sequence
  Description of Artificial Sequence: Synthetic oligonucleotide
  Sense strand starting at position 3752 of SEQ ID NO: 1879428
ugcaaaucaaugcgaggau

SEQ ID NO: 1906413 - RNA, 19 nt, Artificial Sequence
  Description of Artificial Sequence: Synthetic oligonucleotide
  Antisense strand to SEQ ID NO: 1906412
auccucgcauugauuugca

SEQ ID NO: 1906414 - RNA, 19 nt, Artificial Sequence
  Description of Artificial Sequence: Synthetic oligonucleotide
  Sense strand starting at position 3755 of SEQ ID NO: 1879428
aaaucaaugcgaggauucu

SEQ ID NO: 1906415 - RNA, 19 nt, Artificial Sequence
  Description of Artificial Sequence: Synthetic oligonucleotide
  Antisense strand to SEQ ID NO: 1906414
agaauccucgcauugauuu

SEQ ID NO: 1906416 - RNA, 19 nt, Artificial Sequence
  Description of Artificial Sequence: Synthetic oligonucleotide
  Sense strand starting at position 3756 of SEQ ID NO: 1879428
aaucaaugcgaggauucua

SEQ ID NO: 1906417 - RNA, 19 nt, Artificial Sequence
  Description of Artificial Sequence: Synthetic oligonucleotide
  Antisense strand to SEQ ID NO: 1906416
uagaauccucgcauugauu

SEQ ID NO: 1906418 - RNA, 19 nt, Artificial Sequence
  Description of Artificial Sequence: Synthetic oligonucleotide
  Sense strand starting at position 3864 of SEQ ID NO: 1879428
cugauuaaaugauuaggca

SEQ ID NO: 1906419 - RNA, 19 nt, Artificial Sequence
  Description of Artificial Sequence: Synthetic oligonucleotide
  Antisense strand to SEQ ID NO: 1906418
ugccuaaucauuuaaucag

SEQ ID NO: 1906420 - RNA, 19 nt, Artificial Sequence
  Description of Artificial Sequence: Synthetic oligonucleotide
  Sense strand starting at position 3903 of SEQ ID NO: 1879428
aguguaguaacagagauug

SEQ ID NO: 1906421 - RNA, 19 nt, Artificial Sequence
  Description of Artificial Sequence: Synthetic oligonucleotide
  Antisense strand to SEQ ID NO: 1906420
caaucucuguuacuacacu

SEQ ID NO: 1906422 - RNA, 19 nt, Artificial Sequence
  Description of Artificial Sequence: Synthetic oligonucleotide
  Sense strand starting at position 3909 of SEQ ID NO: 1879428
guaacagagauuggaugua

SEQ ID NO: 1906423 - RNA, 19 nt, Artificial Sequence
  Description of Artificial Sequence: Synthetic oligonucleotide
  Antisense strand to SEQ ID NO: 1906422
uacauccaaucucuguuac

SEQ ID NO: 1906424 - RNA, 19 nt, Artificial Sequence
  Description of Artificial Sequence: Synthetic oligonucleotide
  Sense strand starting at position 479 of SEQ ID NO: 1879429
ugagauuauugacuggcuu

SEQ ID NO: 1906425 - RNA, 19 nt, Artificial Sequence
  Description of Artificial Sequence: Synthetic oligonucleotide
  Antisense strand to SEQ ID NO: 1906424
aagccagucaauaaucuca

SEQ ID NO: 1906426 - RNA, 19 nt, Artificial Sequence
  Description of Artificial Sequence: Synthetic oligonucleotide
  Sense strand starting at position 480 of SEQ ID NO: 1879429
gagauuauugacuggcuuu

SEQ ID NO: 1906427 - RNA, 19 nt, Artificial Sequence
  Description of Artificial Sequence: Synthetic oligonucleotide
  Antisense strand to SEQ ID NO: 1906426
aaagccagucaauaaucuc

SEQ ID NO: 1906428 - RNA, 19 nt, Artificial Sequence
  Description of Artificial Sequence: Synthetic oligonucleotide
  Sense strand starting at position 556 of SEQ ID NO: 1879429
gggccuuaucuauguccuu

SEQ ID NO: 1906429 - RNA, 19 nt, Artificial Sequence
  Description of Artificial Sequence: Synthetic oligonucleotide
  Antisense strand to SEQ ID NO: 1906428
aaggacauagauaaggccc

SEQ ID NO: 1906430 - RNA, 19 nt, Artificial Sequence
  Description of Artificial Sequence: Synthetic oligonucleotide
  Sense strand starting at position 557 of SEQ ID NO: 1879429
ggccuuaucuauguccuuu

SEQ ID NO: 1906431 - RNA, 19 nt, Artificial Sequence
  Description of Artificial Sequence: Synthetic oligonucleotide
  Antisense strand to SEQ ID NO: 1906430
aaaggacauagauaaggcc

SEQ ID NO: 1906432 - RNA, 19 nt, Artificial Sequence
  Description of Artificial Sequence: Synthetic oligonucleotide
  Sense strand starting at position 563 of SEQ ID NO: 1879429
aucuauguccuuugaaaga

SEQ ID NO: 1906433 - RNA, 19 nt, Artificial Sequence
  Description of Artificial Sequence: Synthetic oligonucleotide
  Antisense strand to SEQ ID NO: 1906432
ucuuucaaaggacauagau

SEQ ID NO: 1906434 - RNA, 19 nt, Artificial Sequence
  Description of Artificial Sequence: Synthetic oligonucleotide
  Sense strand starting at position 658 of SEQ ID NO: 1879429
ugauguauugaaugcuacu

SEQ ID NO: 1906435 - RNA, 19 nt, Artificial Sequence
  Description of Artificial Sequence: Synthetic oligonucleotide
  Antisense strand to SEQ ID NO: 1906434
aguagcauucaauacauca

SEQ ID NO: 1906436 - RNA, 19 nt, Artificial Sequence
  Description of Artificial Sequence: Synthetic oligonucleotide
  Sense strand starting at position 664 of SEQ ID NO: 1879429
auugaaugcuacuuuagaa

SEQ ID NO: 1906437 - RNA, 19 nt, Artificial Sequence
  Description of Artificial Sequence: Synthetic oligonucleotide
  Antisense strand to SEQ ID NO: 1906436
uucuaaaguagcauucaau

SEQ ID NO: 1906438 - RNA, 19 nt, Artificial Sequence
  Description of Artificial Sequence: Synthetic oligonucleotide
  Sense strand starting at position 1302 of SEQ ID NO: 1879429
accuguaaucccgacaacu

SEQ ID NO: 1906439 - RNA, 19 nt, Artificial Sequence
  Description of Artificial Sequence: Synthetic oligonucleotide
  Antisense strand to SEQ ID NO: 1906438
aguugucgggauuacaggu

SEQ ID NO: 1906440 - RNA, 19 nt, Artificial Sequence
  Description of Artificial Sequence: Synthetic oligonucleotide
  Sense strand starting at position 1333 of SEQ ID NO: 1879429
gugagaagaucgccucaac

SEQ ID NO: 1906441 - RNA, 19 nt, Artificial Sequence
  Description of Artificial Sequence: Synthetic oligonucleotide
  Antisense strand to SEQ ID NO: 1906440
guugaggcgaucuucucac

SEQ ID NO: 1906442 - RNA, 19 nt, Artificial Sequence
  Description of Artificial Sequence: Synthetic oligonucleotide
  Sense strand starting at position 1336 of SEQ ID NO: 1879429
agaagaucgccucaacuca

SEQ ID NO: 1906443 - RNA, 19 nt, Artificial Sequence
  Description of Artificial Sequence: Synthetic oligonucleotide
  Antisense strand to SEQ ID NO: 1906442
ugaguugaggcgaucuucu

SEQ ID NO: 1906444 - RNA, 19 nt, Artificial Sequence
  Description of Artificial Sequence: Synthetic oligonucleotide
  Sense strand starting at position 1689 of SEQ ID NO: 1879429
agccuugaaucuuuggguu

SEQ ID NO: 1906445 - RNA, 19 nt, Artificial Sequence
  Description of Artificial Sequence: Synthetic oligonucleotide
  Antisense strand to SEQ ID NO: 1906444
aacccaaagauucaaggcu

SEQ ID NO: 1906446 - RNA, 19 nt, Artificial Sequence
  Description of Artificial Sequence: Synthetic oligonucleotide
  Sense strand starting at position 2668 of SEQ ID NO: 1879429
uguuaaugauaacagaagu

SEQ ID NO: 1906447 - RNA, 19 nt, Artificial Sequence
  Description of Artificial Sequence: Synthetic oligonucleotide
  Antisense strand to SEQ ID NO: 1906446
acuucuguuaucauuaaca

SEQ ID NO: 1906448 - RNA, 19 nt, Artificial Sequence
  Description of Artificial Sequence: Synthetic oligonucleotide
  Sense strand starting at position 2679 of SEQ ID NO: 1879429
acagaaguuugagaaucag

SEQ ID NO: 1906449 - RNA, 19 nt, Artificial Sequence
  Description of Artificial Sequence: Synthetic oligonucleotide
  Antisense strand to SEQ ID NO: 1906448
cugauucucaaacuucugu

SEQ ID NO: 1906450 - RNA, 19 nt, Artificial Sequence
  Description of Artificial Sequence: Synthetic oligonucleotide
  Sense strand starting at position 2685 of SEQ ID NO: 1879429
guuugagaaucagagauaa

SEQ ID NO: 1906451 - RNA, 19 nt, Artificial Sequence
  Description of Artificial Sequence: Synthetic oligonucleotide
  Antisense strand to SEQ ID NO: 1906450
uuaucucugauucucaaac

SEQ ID NO: 1906452 - RNA, 19 nt, Artificial Sequence
  Description of Artificial Sequence: Synthetic oligonucleotide
  Sense strand starting at position 2697 of SEQ ID NO: 1879429
gagauaaauuguguaauga

SEQ ID NO: 1906453 - RNA, 19 nt, Artificial Sequence
  Description of Artificial Sequence: Synthetic oligonucleotide
  Antisense strand to SEQ ID NO: 1906452
ucauuacacaauuuaucuc

SEQ ID NO: 1906454 - RNA, 19 nt, Artificial Sequence
  Description of Artificial Sequence: Synthetic oligonucleotide
  Sense strand starting at position 2778 of SEQ ID NO: 1879429
uaagucauuugacgaauag

SEQ ID NO: 1906455 - RNA, 19 nt, Artificial Sequence
  Description of Artificial Sequence: Synthetic oligonucleotide
  Antisense strand to SEQ ID NO: 1906454
cuauucgucaaaugacuua

SEQ ID NO: 1906456 - RNA, 19 nt, Artificial Sequence
  Description of Artificial Sequence: Synthetic oligonucleotide
  Sense strand starting at position 2951 of SEQ ID NO: 1879429
aggguacauuuauaauacu

SEQ ID NO: 1906457 - RNA, 19 nt, Artificial Sequence
  Description of Artificial Sequence: Synthetic oligonucleotide
  Antisense strand to SEQ ID NO: 1906456
aguauuauaaauguacccu

SEQ ID NO: 1906458 - RNA, 19 nt, Artificial Sequence
  Description of Artificial Sequence: Synthetic oligonucleotide
  Sense strand starting at position 3157 of SEQ ID NO: 1879429
uuagguuaguuugcagaau

SEQ ID NO: 1906459 - RNA, 19 nt, Artificial Sequence
  Description of Artificial Sequence: Synthetic oligonucleotide
  Antisense strand to SEQ ID NO: 1906458
auucugcaaacuaaccuaa

SEQ ID NO: 1906460 - RNA, 19 nt, Artificial Sequence
  Description of Artificial Sequence: Synthetic oligonucleotide
  Sense strand starting at position 3181 of SEQ ID NO: 1879429
uggcuucuagcacaauagu

SEQ ID NO: 1906461 - RNA, 19 nt, Artificial Sequence
  Description of Artificial Sequence: Synthetic oligonucleotide
  Antisense strand to SEQ ID NO: 1906460
acuauugugcuagaagcca

SEQ ID NO: 1906462 - RNA, 19 nt, Artificial Sequence
  Description of Artificial Sequence: Synthetic oligonucleotide
  Sense strand starting at position 3218 of SEQ ID NO: 1879429
accugacaauuacugguua

SEQ ID NO: 1906463 - RNA, 19 nt, Artificial Sequence
  Description of Artificial Sequence: Synthetic oligonucleotide
  Antisense strand to SEQ ID NO: 1906462
uaaccaguaauugucaggu

SEQ ID NO: 1906464 - RNA, 19 nt, Artificial Sequence
  Description of Artificial Sequence: Synthetic oligonucleotide
  Sense strand starting at position 3237 of SEQ ID NO: 1879429
acuacagcucugugacaga

SEQ ID NO: 1906465 - RNA, 19 nt, Artificial Sequence
  Description of Artificial Sequence: Synthetic oligonucleotide
  Antisense strand to SEQ ID NO: 1906464
ucugucacagagcuguagu

SEQ ID NO: 1906466 - RNA, 19 nt, Artificial Sequence
  Description of Artificial Sequence: Synthetic oligonucleotide
  Sense strand starting at position 3247 of SEQ ID NO: 1879429
ugugacagauugucaucuu

SEQ ID NO: 1906467 - RNA, 19 nt, Artificial Sequence
  Description of Artificial Sequence: Synthetic oligonucleotide
  Antisense strand to SEQ ID NO: 1906466
aagaugacaaucugucaca

SEQ ID NO: 1906468 - RNA, 19 nt, Artificial Sequence
  Description of Artificial Sequence: Synthetic oligonucleotide
  Sense strand starting at position 3362 of SEQ ID NO: 1879429
ggaacaaggugucauaaac

SEQ ID NO: 1906469 - RNA, 19 nt, Artificial Sequence
  Description of Artificial Sequence: Synthetic oligonucleotide
  Antisense strand to SEQ ID NO: 1906468
guuuaugacaccuuguucc

SEQ ID NO: 1906470 - RNA, 19 nt, Artificial Sequence
  Description of Artificial Sequence: Synthetic oligonucleotide
  Sense strand starting at position 3436 of SEQ ID NO: 1879429
aaggcauuauggcaggaua

SEQ ID NO: 1906471 - RNA, 19 nt, Artificial Sequence
  Description of Artificial Sequence: Synthetic oligonucleotide
  Antisense strand to SEQ ID NO: 1906470
uauccugccauaaugccuu

SEQ ID NO: 1906472 - RNA, 19 nt, Artificial Sequence
  Description of Artificial Sequence: Synthetic oligonucleotide
  Sense strand starting at position 3438 of SEQ ID NO: 1879429
ggcauuauggcaggauaaa

SEQ ID NO: 1906473 - RNA, 19 nt, Artificial Sequence
  Description of Artificial Sequence: Synthetic oligonucleotide
  Antisense strand to SEQ ID NO: 1906472
uuuauccugccauaaugcc

SEQ ID NO: 1906474 - RNA, 19 nt, Artificial Sequence
  Description of Artificial Sequence: Synthetic oligonucleotide
  Sense strand starting at position 3516 of SEQ ID NO: 1879429
gcuucuaugucagcaauca

SEQ ID NO: 1906475 - RNA, 19 nt, Artificial Sequence
  Description of Artificial Sequence: Synthetic oligonucleotide
  Antisense strand to SEQ ID NO: 1906474
ugauugcugacauagaagc

SEQ ID NO: 1906476 - RNA, 19 nt, Artificial Sequence
  Description of Artificial Sequence: Synthetic oligonucleotide
  Sense strand starting at position 3579 of SEQ ID NO: 1879429
ggauaauccuccugagagg

SEQ ID NO: 1906477 - RNA, 19 nt, Artificial Sequence
  Description of Artificial Sequence: Synthetic oligonucleotide
  Antisense strand to SEQ ID NO: 1906476
ccucucaggaggauuaucc

SEQ ID NO: 1906478 - RNA, 19 nt, Artificial Sequence
  Description of Artificial Sequence: Synthetic oligonucleotide
  Sense strand starting at position 3613 of SEQ ID NO: 1879429
ugaauaauagcgcaguuua

SEQ ID NO: 1906479 - RNA, 19 nt, Artificial Sequence
  Description of Artificial Sequence: Synthetic oligonucleotide
  Antisense strand to SEQ ID NO: 1906478
uaaacugcgcuauuauuca

SEQ ID NO: 1906480 - RNA, 19 nt, Artificial Sequence
  Description of Artificial Sequence: Synthetic oligonucleotide
  Sense strand starting at position 3631 of SEQ ID NO: 1879429
accgguuaccuguauauag

SEQ ID NO: 1906481 - RNA, 19 nt, Artificial Sequence
  Description of Artificial Sequence: Synthetic oligonucleotide
  Antisense strand to SEQ ID NO: 1906480
cuauauacagguaaccggu

SEQ ID NO: 1906482 - RNA, 19 nt, Artificial Sequence
  Description of Artificial Sequence: Synthetic oligonucleotide
  Sense strand starting at position 3633 of SEQ ID NO: 1879429
cgguuaccuguauauagua

SEQ ID NO: 1906483 - RNA, 19 nt, Artificial Sequence
  Description of Artificial Sequence: Synthetic oligonucleotide
  Antisense strand to SEQ ID NO: 1906482
uacuauauacagguaaccg

SEQ ID NO: 1906484 - RNA, 19 nt, Artificial Sequence
  Description of Artificial Sequence: Synthetic oligonucleotide
  Sense strand starting at position 3638 of SEQ ID NO: 1879429
accuguauauaguaacaua

SEQ ID NO: 1906485 - RNA, 19 nt, Artificial Sequence
  Description of Artificial Sequence: Synthetic oligonucleotide
  Antisense strand to SEQ ID NO: 1906484
uauguuacuauauacaggu

SEQ ID NO: 1906486 - RNA, 19 nt, Artificial Sequence
  Description of Artificial Sequence: Synthetic oligonucleotide
  Sense strand starting at position 3733 of SEQ ID NO: 1879429
guuagacaguucucaguuc

SEQ ID NO: 1906487 - RNA, 19 nt, Artificial Sequence
  Description of Artificial Sequence: Synthetic oligonucleotide
  Antisense strand to SEQ ID NO: 1906486
gaacugagaacugucuaac

SEQ ID NO: 1906488 - RNA, 19 nt, Artificial Sequence
  Description of Artificial Sequence: Synthetic oligonucleotide
  Sense strand starting at position 3781 of SEQ ID NO: 1879429
gagggaguuggcuaagcaa

SEQ ID NO: 1906489 - RNA, 19 nt, Artificial Sequence
  Description of Artificial Sequence: Synthetic oligonucleotide
  Antisense strand to SEQ ID NO: 1906488
uugcuuagccaacucccuc

SEQ ID NO: 1906490 - RNA, 19 nt, Artificial Sequence
  Description of Artificial Sequence: Synthetic oligonucleotide
  Sense strand starting at position 3840 of SEQ ID NO: 1879429
agcaaagaccuuggaguaa

SEQ ID NO: 1906491 - RNA, 19 nt, Artificial Sequence
  Description of Artificial Sequence: Synthetic oligonucleotide
  Antisense strand to SEQ ID NO: 1906490
uuacuccaaggucuuugcu

SEQ ID NO: 1906492 - RNA, 19 nt, Artificial Sequence
  Description of Artificial Sequence: Synthetic oligonucleotide
  Sense strand starting at position 3853 of SEQ ID NO: 1879429
gaguaagcgugccugagau

SEQ ID NO: 1906493 - RNA, 19 nt, Artificial Sequence
  Description of Artificial Sequence: Synthetic oligonucleotide
  Antisense strand to SEQ ID NO: 1906492
aucucaggcacgcuuacuc

SEQ ID NO: 1906494 - RNA, 19 nt, Artificial Sequence
  Description of Artificial Sequence: Synthetic oligonucleotide
  Sense strand starting at position 3909 of SEQ ID NO: 1879429
agauuagaagcacguagua

SEQ ID NO: 1906495 - RNA, 19 nt, Artificial Sequence
  Description of Artificial Sequence: Synthetic oligonucleotide
  Antisense strand to SEQ ID NO: 1906494
uacuacgugcuucuaaucu

SEQ ID NO: 1906496 - RNA, 19 nt, Artificial Sequence
  Description of Artificial Sequence: Synthetic oligonucleotide
  Sense strand starting at position 3974 of SEQ ID NO: 1879429
caaagaggacuuugucauc

SEQ ID NO: 1906497 - RNA, 19 nt, Artificial Sequence
  Description of Artificial Sequence: Synthetic oligonucleotide
  Antisense strand to SEQ ID NO: 1906496
gaugacaaaguccucuuug

SEQ ID NO: 1906498 - RNA, 19 nt, Artificial Sequence
  Description of Artificial Sequence: Synthetic oligonucleotide
  Sense strand starting at position 3979 of SEQ ID NO: 1879429
aggacuuugucaucguugu

SEQ ID NO: 1906499 - RNA, 19 nt, Artificial Sequence
  Description of Artificial Sequence: Synthetic oligonucleotide
  Antisense strand to SEQ ID NO: 1906498
acaacgaugacaaaguccu

SEQ ID NO: 1906500 - RNA, 19 nt, Artificial Sequence
  Description of Artificial Sequence: Synthetic oligonucleotide
  Sense strand starting at position 3980 of SEQ ID NO: 1879429
ggacuuugucaucguugua

SEQ ID NO: 1906501 - RNA, 19 nt, Artificial Sequence
  Description of Artificial Sequence: Synthetic oligonucleotide
  Antisense strand to SEQ ID NO: 1906500
uacaacgaugacaaagucc

SEQ ID NO: 1906502 - RNA, 19 nt, Artificial Sequence
  Description of Artificial Sequence: Synthetic oligonucleotide
  Sense strand starting at position 3983 of SEQ ID NO: 1879429
cuuugucaucguuguaaga

SEQ ID NO: 1906503 - RNA, 19 nt, Artificial Sequence
  Description of Artificial Sequence: Synthetic oligonucleotide
  Antisense strand to SEQ ID NO: 1906502
ucuuacaacgaugacaaag

SEQ ID NO: 1906504 - RNA, 19 nt, Artificial Sequence
  Description of Artificial Sequence: Synthetic oligonucleotide
  Sense strand starting at position 23 of SEQ ID NO: 1879430
ggagcauuccugugguccu

SEQ ID NO: 1906505 - RNA, 19 nt, Artificial Sequence
  Description of Artificial Sequence: Synthetic oligonucleotide
  Antisense strand to SEQ ID NO: 1906504
aggaccacaggaaugcucc

SEQ ID NO: 1906506 - RNA, 19 nt, Artificial Sequence
  Description of Artificial Sequence: Synthetic oligonucleotide
  Sense strand starting at position 227 of SEQ ID NO: 1879430
ugacgugaugugggagcaa

SEQ ID NO: 1906507 - RNA, 19 nt, Artificial Sequence
  Description of Artificial Sequence: Synthetic oligonucleotide
  Antisense strand to SEQ ID NO: 1906506
uugcucccacaucacguca

SEQ ID NO: 1906508 - RNA, 19 nt, Artificial Sequence
  Description of Artificial Sequence: Synthetic oligonucleotide
  Sense strand starting at position 274 of SEQ ID NO: 1879430
gggcuugaguguccaaaug

SEQ ID NO: 1906509 - RNA, 19 nt, Artificial Sequence
  Description of Artificial Sequence: Synthetic oligonucleotide
  Antisense strand to SEQ ID NO: 1906508
cauuuggacacucaagccc

SEQ ID NO: 1906510 - RNA, 19 nt, Artificial Sequence
  Description of Artificial Sequence: Synthetic oligonucleotide
  Sense strand starting at position 362 of SEQ ID NO: 1879430
aaggaaggguuuggacaaa

SEQ ID NO: 1906511 - RNA, 19 nt, Artificial Sequence
  Description of Artificial Sequence: Synthetic oligonucleotide
  Antisense strand to SEQ ID NO: 1906510
uuuguccaaacccuuccuu

SEQ ID NO: 1906512 - RNA, 19 nt, Artificial Sequence
  Description of Artificial Sequence: Synthetic oligonucleotide
  Sense strand starting at position 386 of SEQ ID NO: 1879430
ggcuguuccauccagaaag

SEQ ID NO: 1906513 - RNA, 19 nt, Artificial Sequence
  Description of Artificial Sequence: Synthetic oligonucleotide
  Antisense strand to SEQ ID NO: 1906512
cuuucuggauggaacagcc

SEQ ID NO: 1906514 - RNA, 19 nt, Artificial Sequence
  Description of Artificial Sequence: Synthetic oligonucleotide
  Sense strand starting at position 403 of SEQ ID NO: 1879430
agcgcauacuugucagaac

SEQ ID NO: 1906515 - RNA, 19 nt, Artificial Sequence
  Description of Artificial Sequence: Synthetic oligonucleotide
  Antisense strand to SEQ ID NO: 1906514
guucugacaaguaugcgcu

SEQ ID NO: 1906516 - RNA, 19 nt, Artificial Sequence
  Description of Artificial Sequence: Synthetic oligonucleotide
  Sense strand starting at position 467 of SEQ ID NO: 1879430
ggcugacuuaccugaaguc

SEQ ID NO: 1906517 - RNA, 19 nt, Artificial Sequence
  Description of Artificial Sequence: Synthetic oligonucleotide
  Antisense strand to SEQ ID NO: 1906516
gacuucagguaagucagcc

SEQ ID NO: 1906518 - RNA, 19 nt, Artificial Sequence
  Description of Artificial Sequence: Synthetic oligonucleotide
  Sense strand starting at position 536 of SEQ ID NO: 1879430
agggcauuccuccacuguu

SEQ ID NO: 1906519 - RNA, 19 nt, Artificial Sequence
  Description of Artificial Sequence: Synthetic oligonucleotide
  Antisense strand to SEQ ID NO: 1906518
aacaguggaggaaugcccu

SEQ ID NO: 1906520 - RNA, 19 nt, Artificial Sequence
  Description of Artificial Sequence: Synthetic oligonucleotide
  Sense strand starting at position 601 of SEQ ID NO: 1879430
ccacguuccugggucgaga

SEQ ID NO: 1906521 - RNA, 19 nt, Artificial Sequence
  Description of Artificial Sequence: Synthetic oligonucleotide
  Antisense strand to SEQ ID NO: 1906520
ucucgacccaggaacgugg

SEQ ID NO: 1906522 - RNA, 19 nt, Artificial Sequence
  Description of Artificial Sequence: Synthetic oligonucleotide
  Sense strand starting at position 640 of SEQ ID NO: 1879430
gcaaguugacaucaacgaa

SEQ ID NO: 1906523 - RNA, 19 nt, Artificial Sequence
  Description of Artificial Sequence: Synthetic oligonucleotide
  Antisense strand to SEQ ID NO: 1906522
uucguugaugucaacuugc

SEQ ID NO: 1906524 - RNA, 19 nt, Artificial Sequence
  Description of Artificial Sequence: Synthetic oligonucleotide
  Sense strand starting at position 673 of SEQ ID NO: 1879430
gcccuucgauuccuauuga

SEQ ID NO: 1906525 - RNA, 19 nt, Artificial Sequence
  Description of Artificial Sequence: Synthetic oligonucleotide
  Antisense strand to SEQ ID NO: 1906524
ucaauaggaaucgaagggc

SEQ ID NO: 1906526 - RNA, 19 nt, Artificial Sequence
  Description of Artificial Sequence: Synthetic oligonucleotide
  Sense strand starting at position 699 of SEQ ID NO: 1879430
aguuucugaggcugaguua

SEQ ID NO: 1906527 - RNA, 19 nt, Artificial Sequence
  Description of Artificial Sequence: Synthetic oligonucleotide
  Antisense strand to SEQ ID NO: 1906526
uaacucagccucagaaacu

SEQ ID NO: 1906528 - RNA, 19 nt, Artificial Sequence
  Description of Artificial Sequence: Synthetic oligonucleotide
  Sense strand starting at position 728 of SEQ ID NO: 1879430
cugggucagucccuguuua

SEQ ID NO: 1906529 - RNA, 19 nt, Artificial Sequence
  Description of Artificial Sequence: Synthetic oligonucleotide
  Antisense strand to SEQ ID NO: 1906528
uaaacagggacugacccag

SEQ ID NO: 1906530 - RNA, 19 nt, Artificial Sequence
  Description of Artificial Sequence: Synthetic oligonucleotide
  Sense strand starting at position 732 of SEQ ID NO: 1879430
gucagucccuguuuacuca

SEQ ID NO: 1906531 - RNA, 19 nt, Artificial Sequence
  Description of Artificial Sequence: Synthetic oligonucleotide
  Antisense strand to SEQ ID NO: 1906530
ugaguaaacagggacugac

SEQ ID NO: 1906532 - RNA, 19 nt, Artificial Sequence
  Description of Artificial Sequence: Synthetic oligonucleotide
  Sense strand starting at position 1063 of SEQ ID NO: 1879430
cuguaaucccagugacacu

SEQ ID NO: 1906533 - RNA, 19 nt, Artificial Sequence
  Description of Artificial Sequence: Synthetic oligonucleotide
  Antisense strand to SEQ ID NO: 1906532
agugucacugggauuacag

SEQ ID NO: 1906534 - RNA, 19 nt, Artificial Sequence
  Description of Artificial Sequence: Synthetic oligonucleotide
  Sense strand starting at position 1094 of SEQ ID NO: 1879430
agaggaaucccuugagucc

SEQ ID NO: 1906535 - RNA, 19 nt, Artificial Sequence
  Description of Artificial Sequence: Synthetic oligonucleotide
  Antisense strand to SEQ ID NO: 1906534
ggacucaagggauuccucu

SEQ ID NO: 1906536 - RNA, 19 nt, Artificial Sequence
  Description of Artificial Sequence: Synthetic oligonucleotide
  Sense strand starting at position 1531 of SEQ ID NO: 1879430
ggaggauguaauggugaac

SEQ ID NO: 1906537 - RNA, 19 nt, Artificial Sequence
  Description of Artificial Sequence: Synthetic oligonucleotide
  Antisense strand to SEQ ID NO: 1906536
guucaccauuacauccucc

SEQ ID NO: 1906538 - RNA, 19 nt, Artificial Sequence
  Description of Artificial Sequence: Synthetic oligonucleotide
  Sense strand starting at position 1619 of SEQ ID NO: 1879430
gcgaauaaauaagccagau

SEQ ID NO: 1906539 - RNA, 19 nt, Artificial Sequence
  Description of Artificial Sequence: Synthetic oligonucleotide
  Antisense strand to SEQ ID NO: 1906538
aucuggcuuauuuauucgc

SEQ ID NO: 1906540 - RNA, 19 nt, Artificial Sequence
  Description of Artificial Sequence: Synthetic oligonucleotide
  Sense strand starting at position 1633 of SEQ ID NO: 1879430
cagauagguucugugaaua

SEQ ID NO: 1906541 - RNA, 19 nt, Artificial Sequence
  Description of Artificial Sequence: Synthetic oligonucleotide
  Antisense strand to SEQ ID NO: 1906540
uauucacagaaccuaucug

SEQ ID NO: 1906542 - RNA, 19 nt, Artificial Sequence
  Description of Artificial Sequence: Synthetic oligonucleotide
  Sense strand starting at position 1798 of SEQ ID NO: 1879430
cgagcugccggugugaaau

SEQ ID NO: 1906543 - RNA, 19 nt, Artificial Sequence
  Description of Artificial Sequence: Synthetic oligonucleotide
  Antisense strand to SEQ ID NO: 1906542
auuucacaccggcagcucg

SEQ ID NO: 1906544 - RNA, 19 nt, Artificial Sequence
  Description of Artificial Sequence: Synthetic oligonucleotide
  Sense strand starting at position 1840 of SEQ ID NO: 1879430
uguccucgcucaucagaca

SEQ ID NO: 1906545 - RNA, 19 nt, Artificial Sequence
  Description of Artificial Sequence: Synthetic oligonucleotide
  Antisense strand to SEQ ID NO: 1906544
ugucugaugagcgaggaca

SEQ ID NO: 1906546 - RNA, 19 nt, Artificial Sequence
  Description of Artificial Sequence: Synthetic oligonucleotide
  Sense strand starting at position 1987 of SEQ ID NO: 1879430
cagcaaauguggcuuguua

SEQ ID NO: 1906547 - RNA, 19 nt, Artificial Sequence
  Description of Artificial Sequence: Synthetic oligonucleotide
  Antisense strand to SEQ ID NO: 1906546
uaacaagccacauuugcug

SEQ ID NO: 1906548 - RNA, 19 nt, Artificial Sequence
  Description of Artificial Sequence: Synthetic oligonucleotide
  Sense strand starting at position 1991 of SEQ ID NO: 1879430
aaauguggcuuguuauacu

SEQ ID NO: 1906549 - RNA, 19 nt, Artificial Sequence
  Description of Artificial Sequence: Synthetic oligonucleotide
  Antisense strand to SEQ ID NO: 1906548
aguauaacaagccacauuu

SEQ ID NO: 1906550 - RNA, 19 nt, Artificial Sequence
  Description of Artificial Sequence: Synthetic oligonucleotide
  Sense strand starting at position 2048 of SEQ ID NO: 1879430
ucacgauuggccugauuuc

SEQ ID NO: 1906551 - RNA, 19 nt, Artificial Sequence
  Description of Artificial Sequence: Synthetic oligonucleotide
  Antisense strand to SEQ ID NO: 1906550
gaaaucaggccaaucguga

SEQ ID NO: 1906552 - RNA, 19 nt, Artificial Sequence
  Description of Artificial Sequence: Synthetic oligonucleotide
  Sense strand starting at position 2059 of SEQ ID NO: 1879430
cugauuuccucagaugacg

SEQ ID NO: 1906553 - RNA, 19 nt, Artificial Sequence
  Description of Artificial Sequence: Synthetic oligonucleotide
  Antisense strand to SEQ ID NO: 1906552
cgucaucugaggaaaucag

SEQ ID NO: 1906554 - RNA, 19 nt, Artificial Sequence
  Description of Artificial Sequence: Synthetic oligonucleotide
  Sense strand starting at position 2644 of SEQ ID NO: 1879430
gggaaagucugagagcaaa

SEQ ID NO: 1906555 - RNA, 19 nt, Artificial Sequence
  Description of Artificial Sequence: Synthetic oligonucleotide
  Antisense strand to SEQ ID NO: 1906554
uuugcucucagacuuuccc

SEQ ID NO: 1906556 - RNA, 19 nt, Artificial Sequence
  Description of Artificial Sequence: Synthetic oligonucleotide
  Sense strand starting at position 2702 of SEQ ID NO: 1879430
ccguaacuuugggcaaaug

SEQ ID NO: 1906557 - RNA, 19 nt, Artificial Sequence
  Description of Artificial Sequence: Synthetic oligonucleotide
  Antisense strand to SEQ ID NO: 1906556
cauuugcccaaaguuacgg

SEQ ID NO: 1906558 - RNA, 19 nt, Artificial Sequence
  Description of Artificial Sequence: Synthetic oligonucleotide
  Sense strand starting at position 2703 of SEQ ID NO: 1879430
cguaacuuugggcaaauga

SEQ ID NO: 1906559 - RNA, 19 nt, Artificial Sequence
  Description of Artificial Sequence: Synthetic oligonucleotide
  Antisense strand to SEQ ID NO: 1906558
ucauuugcccaaaguuacg

SEQ ID NO: 1906560 - RNA, 19 nt, Artificial Sequence
  Description of Artificial Sequence: Synthetic oligonucleotide
  Sense strand starting at position 2742 of SEQ ID NO: 1879430
gcaucuauacaucgccaau

SEQ ID NO: 1906561 - RNA, 19 nt, Artificial Sequence
  Description of Artificial Sequence: Synthetic oligonucleotide
  Antisense strand to SEQ ID NO: 1906560
auuggcgauguauagaugc

SEQ ID NO: 1906562 - RNA, 19 nt, Artificial Sequence
  Description of Artificial Sequence: Synthetic oligonucleotide
  Sense strand starting at position 2893 of SEQ ID NO: 1879430
gucauuacccaaggaguuu

SEQ ID NO: 1906563 - RNA, 19 nt, Artificial Sequence
  Description of Artificial Sequence: Synthetic oligonucleotide
  Antisense strand to SEQ ID NO: 1906562
aaacuccuuggguaaugac

SEQ ID NO: 1906564 - RNA, 19 nt, Artificial Sequence
  Description of Artificial Sequence: Synthetic oligonucleotide
  Sense strand starting at position 3288 of SEQ ID NO: 1879430
gcucauuucuaugaggaau

SEQ ID NO: 1906565 - RNA, 19 nt, Artificial Sequence
  Description of Artificial Sequence: Synthetic oligonucleotide
  Antisense strand to SEQ ID NO: 1906564
auuccucauagaaaugagc

SEQ ID NO: 1906566 - RNA, 19 nt, Artificial Sequence
  Description of Artificial Sequence: Synthetic oligonucleotide
  Sense strand starting at position 3306 of SEQ ID NO: 1879430
uagaaaugaugucccugaa

SEQ ID NO: 1906567 - RNA, 19 nt, Artificial Sequence
  Description of Artificial Sequence: Synthetic oligonucleotide
  Antisense strand to SEQ ID NO: 1906566
uucagggacaucauuucua

SEQ ID NO: 1906568 - RNA, 19 nt, Artificial Sequence
  Description of Artificial Sequence: Synthetic oligonucleotide
  Sense strand starting at position 3321 of SEQ ID NO: 1879430
ugaauccauuucugggaca

SEQ ID NO: 1906569 - RNA, 19 nt, Artificial Sequence
  Description of Artificial Sequence: Synthetic oligonucleotide
  Antisense strand to SEQ ID NO: 1906568
ugucccagaaauggauuca

SEQ ID NO: 1906570 - RNA, 19 nt, Artificial Sequence
  Description of Artificial Sequence: Synthetic oligonucleotide
  Sense strand starting at position 3359 of SEQ ID NO: 1879430
guuucuaguacagguugaa

SEQ ID NO: 1906571 - RNA, 19 nt, Artificial Sequence
  Description of Artificial Sequence: Synthetic oligonucleotide
  Antisense strand to SEQ ID NO: 1906570
uucaaccuguacuagaaac

SEQ ID NO: 1906572 - RNA, 19 nt, Artificial Sequence
  Description of Artificial Sequence: Synthetic oligonucleotide
  Sense strand starting at position 3371 of SEQ ID NO: 1879430
gguugaauaugcuucucau

SEQ ID NO: 1906573 - RNA, 19 nt, Artificial Sequence
  Description of Artificial Sequence: Synthetic oligonucleotide
  Antisense strand to SEQ ID NO: 1906572
augagaagcauauucaacc

SEQ ID NO: 1906574 - RNA, 19 nt, Artificial Sequence
  Description of Artificial Sequence: Synthetic oligonucleotide
  Sense strand starting at position 3755 of SEQ ID NO: 1879430
gcauaauaugcuuaucagu

SEQ ID NO: 1906575 - RNA, 19 nt, Artificial Sequence
  Description of Artificial Sequence: Synthetic oligonucleotide
  Antisense strand to SEQ ID NO: 1906574
acugauaagcauauuaugc

SEQ ID NO: 1906576 - RNA, 19 nt, Artificial Sequence
  Description of Artificial Sequence: Synthetic oligonucleotide
  Sense strand starting at position 3757 of SEQ ID NO: 1879430
auaauaugcuuaucaguug

SEQ ID NO: 1906577 - RNA, 19 nt, Artificial Sequence
  Description of Artificial Sequence: Synthetic oligonucleotide
  Antisense strand to SEQ ID NO: 1906576
caacugauaagcauauuau

SEQ ID NO: 1906578 - RNA, 19 nt, Artificial Sequence
  Description of Artificial Sequence: Synthetic oligonucleotide
  Sense strand starting at position 3802 of SEQ ID NO: 1879430
uccguaaugcuccaaugaa

SEQ ID NO: 1906579 - RNA, 19 nt, Artificial Sequence
  Description of Artificial Sequence: Synthetic oligonucleotide
  Antisense strand to SEQ ID NO: 1906578
uucauuggagcauuacgga

SEQ ID NO: 1906580 - RNA, 19 nt, Artificial Sequence
  Description of Artificial Sequence: Synthetic oligonucleotide
  Sense strand starting at position 3959 of SEQ ID NO: 1879430
auugcaaagcauuguaaua

SEQ ID NO: 1906581 - RNA, 19 nt, Artificial Sequence
  Description of Artificial Sequence: Synthetic oligonucleotide
  Antisense strand to SEQ ID NO: 1906580
uauuacaaugcuuugcaau

SEQ ID NO: 1906582 - RNA, 19 nt, Artificial Sequence
  Description of Artificial Sequence: Synthetic oligonucleotide
  Sense strand starting at position 3972 of SEQ ID NO: 1879430
guaauaagaugccaagaaa

SEQ ID NO: 1906583 - RNA, 19 nt, Artificial Sequence
  Description of Artificial Sequence: Synthetic oligonucleotide
  Antisense strand to SEQ ID NO: 1906582
uuucuuggcaucuuauuac

SEQ ID NO: 1906584 - RNA, 19 nt, Artificial Sequence
  Description of Artificial Sequence: Synthetic oligonucleotide
  Sense strand starting at position 10 of SEQ ID NO: 1879431
uaguucuauggguguauuu

SEQ ID NO: 1906585 - RNA, 19 nt, Artificial Sequence
  Description of Artificial Sequence: Synthetic oligonucleotide
  Antisense strand to SEQ ID NO: 1906584
aaauacacccauagaacua

SEQ ID NO: 1906586 - RNA, 19 nt, Artificial Sequence
  Description of Artificial Sequence: Synthetic oligonucleotide
  Sense strand starting at position 29 of SEQ ID NO: 1879431
acauguaaagagugauuaa

SEQ ID NO: 1906587 - RNA, 19 nt, Artificial Sequence
  Description of Artificial Sequence: Synthetic oligonucleotide
  Antisense strand to SEQ ID NO: 1906586
uuaaucacucuuuacaugu

SEQ ID NO: 1906588 - RNA, 19 nt, Artificial Sequence
  Description of Artificial Sequence: Synthetic oligonucleotide
  Sense strand starting at position 32 of SEQ ID NO: 1879431
uguaaagagugauuaagcu

SEQ ID NO: 1906589 - RNA, 19 nt, Artificial Sequence
  Description of Artificial Sequence: Synthetic oligonucleotide
  Antisense strand to SEQ ID NO: 1906588
agcuuaaucacucuuuaca

SEQ ID NO: 1906590 - RNA, 19 nt, Artificial Sequence
  Description of Artificial Sequence: Synthetic oligonucleotide
  Sense strand starting at position 42 of SEQ ID NO: 1879431
gauuaagcugugcacuuaa

SEQ ID NO: 1906591 - RNA, 19 nt, Artificial Sequence
  Description of Artificial Sequence: Synthetic oligonucleotide
  Antisense strand to SEQ ID NO: 1906590
uuaagugcacagcuuaauc

SEQ ID NO: 1906592 - RNA, 19 nt, Artificial Sequence
  Description of Artificial Sequence: Synthetic oligonucleotide
  Sense strand starting at position 187 of SEQ ID NO: 1879431
uugguaauacauuagugau

SEQ ID NO: 1906593 - RNA, 19 nt, Artificial Sequence
  Description of Artificial Sequence: Synthetic oligonucleotide
  Antisense strand to SEQ ID NO: 1906592
aucacuaauguauuaccaa

SEQ ID NO: 1906594 - RNA, 19 nt, Artificial Sequence
  Description of Artificial Sequence: Synthetic oligonucleotide
  Sense strand starting at position 413 of SEQ ID NO: 1879431
ucuuauaguccugaguuaa

SEQ ID NO: 1906595 - RNA, 19 nt, Artificial Sequence
  Description of Artificial Sequence: Synthetic oligonucleotide
  Antisense strand to SEQ ID NO: 1906594
uuaacucaggacuauaaga

SEQ ID NO: 1906596 - RNA, 19 nt, Artificial Sequence
  Description of Artificial Sequence: Synthetic oligonucleotide
  Sense strand starting at position 474 of SEQ ID NO: 1879431
ccauuaugagauugucaua

SEQ ID NO: 1906597 - RNA, 19 nt, Artificial Sequence
  Description of Artificial Sequence: Synthetic oligonucleotide
  Antisense strand to SEQ ID NO: 1906596
uaugacaaucucauaaugg

SEQ ID NO: 1906598 - RNA, 19 nt, Artificial Sequence
  Description of Artificial Sequence: Synthetic oligonucleotide
  Sense strand starting at position 523 of SEQ ID NO: 1879431
gugcauuaccaagggagau

SEQ ID NO: 1906599 - RNA, 19 nt, Artificial Sequence
  Description of Artificial Sequence: Synthetic oligonucleotide
  Antisense strand to SEQ ID NO: 1906598
aucucccuugguaaugcac

SEQ ID NO: 1906600 - RNA, 19 nt, Artificial Sequence
  Description of Artificial Sequence: Synthetic oligonucleotide
  Sense strand starting at position 524 of SEQ ID NO: 1879431
ugcauuaccaagggagauu

SEQ ID NO: 1906601 - RNA, 19 nt, Artificial Sequence
  Description of Artificial Sequence: Synthetic oligonucleotide
  Antisense strand to SEQ ID NO: 1906600
aaucucccuugguaaugca

SEQ ID NO: 1906602 - RNA, 19 nt, Artificial Sequence
  Description of Artificial Sequence: Synthetic oligonucleotide
  Sense strand starting at position 561 of SEQ ID NO: 1879431
gccuuucuacuauaauggu

SEQ ID NO: 1906603 - RNA, 19 nt, Artificial Sequence
  Description of Artificial Sequence: Synthetic oligonucleotide
  Antisense strand to SEQ ID NO: 1906602
accauuauaguagaaaggc

SEQ ID NO: 1906604 - RNA, 19 nt, Artificial Sequence
  Description of Artificial Sequence: Synthetic oligonucleotide
  Sense strand starting at position 649 of SEQ ID NO: 1879431
aggaguaauuaguuugaua

SEQ ID NO: 1906605 - RNA, 19 nt, Artificial Sequence
  Description of Artificial Sequence: Synthetic oligonucleotide
  Antisense strand to SEQ ID NO: 1906604
uaucaaacuaauuacuccu

SEQ ID NO: 1906606 - RNA, 19 nt, Artificial Sequence
  Description of Artificial Sequence: Synthetic oligonucleotide
  Sense strand starting at position 661 of SEQ ID NO: 1879431
uuugauaauuaguucgaga

SEQ ID NO: 1906607 - RNA, 19 nt, Artificial Sequence
  Description of Artificial Sequence: Synthetic oligonucleotide
  Antisense strand to SEQ ID NO: 1906606
ucucgaacuaauuaucaaa

SEQ ID NO: 1906608 - RNA, 19 nt, Artificial Sequence
  Description of Artificial Sequence: Synthetic oligonucleotide
  Sense strand starting at position 663 of SEQ ID NO: 1879431
ugauaauuaguucgagaug

SEQ ID NO: 1906609 - RNA, 19 nt, Artificial Sequence
  Description of Artificial Sequence: Synthetic oligonucleotide
  Antisense strand to SEQ ID NO: 1906608
caucucgaacuaauuauca

SEQ ID NO: 1906610 - RNA, 19 nt, Artificial Sequence
  Description of Artificial Sequence: Synthetic oligonucleotide
  Sense strand starting at position 666 of SEQ ID NO: 1879431
uaauuaguucgagauguca

SEQ ID NO: 1906611 - RNA, 19 nt, Artificial Sequence
  Description of Artificial Sequence: Synthetic oligonucleotide
  Antisense strand to SEQ ID NO: 1906610
ugacaucucgaacuaauua

SEQ ID NO: 1906612 - RNA, 19 nt, Artificial Sequence
  Description of Artificial Sequence: Synthetic oligonucleotide
  Sense strand starting at position 731 of SEQ ID NO: 1879431
uaucuuaugcuggaugauu

SEQ ID NO: 1906613 - RNA, 19 nt, Artificial Sequence
  Description of Artificial Sequence: Synthetic oligonucleotide
  Antisense strand to SEQ ID NO: 1906612
aaucauccagcauaagaua

SEQ ID NO: 1906614 - RNA, 19 nt, Artificial Sequence
  Description of Artificial Sequence: Synthetic oligonucleotide
  Sense strand starting at position 916 of SEQ ID NO: 1879431
ggguguuguagacauuaau

SEQ ID NO: 1906615 - RNA, 19 nt, Artificial Sequence
  Description of Artificial Sequence: Synthetic oligonucleotide
  Antisense strand to SEQ ID NO: 1906614
auuaaugucuacaacaccc

SEQ ID NO: 1906616 - RNA, 19 nt, Artificial Sequence
  Description of Artificial Sequence: Synthetic oligonucleotide
  Sense strand starting at position 919 of SEQ ID NO: 1879431
uguuguagacauuaaucau

SEQ ID NO: 1906617 - RNA, 19 nt, Artificial Sequence
  Description of Artificial Sequence: Synthetic oligonucleotide
  Antisense strand to SEQ ID NO: 1906616
augauuaaugucuacaaca

SEQ ID NO: 1906618 - RNA, 19 nt, Artificial Sequence
  Description of Artificial Sequence: Synthetic oligonucleotide
  Sense strand starting at position 929 of SEQ ID NO: 1879431
auuaaucaugaaugcugaa

SEQ ID NO: 1906619 - RNA, 19 nt, Artificial Sequence
  Description of Artificial Sequence: Synthetic oligonucleotide
  Antisense strand to SEQ ID NO: 1906618
uucagcauucaugauuaau

SEQ ID NO: 1906620 - RNA, 19 nt, Artificial Sequence
  Description of Artificial Sequence: Synthetic oligonucleotide
  Sense strand starting at position 1033 of SEQ ID NO: 1879431
acucgacuucuuuaaagcu

SEQ ID NO: 1906621 - RNA, 19 nt, Artificial Sequence
  Description of Artificial Sequence: Synthetic oligonucleotide
  Antisense strand to SEQ ID NO: 1906620
agcuuuaaagaagucgagu

SEQ ID NO: 1906622 - RNA, 19 nt, Artificial Sequence
  Description of Artificial Sequence: Synthetic oligonucleotide
  Sense strand starting at position 1120 of SEQ ID NO: 1879431
ccuugucccugauuuaguu

SEQ ID NO: 1906623 - RNA, 19 nt, Artificial Sequence
  Description of Artificial Sequence: Synthetic oligonucleotide
  Antisense strand to SEQ ID NO: 1906622
aacuaaaucagggacaagg

SEQ ID NO: 1906624 - RNA, 19 nt, Artificial Sequence
  Description of Artificial Sequence: Synthetic oligonucleotide
  Sense strand starting at position 1146 of SEQ ID NO: 1879431
cauuucugcuguucggaau

SEQ ID NO: 1906625 - RNA, 19 nt, Artificial Sequence
  Description of Artificial Sequence: Synthetic oligonucleotide
  Antisense strand to SEQ ID NO: 1906624
auuccgaacagcagaaaug

SEQ ID NO: 1906626 - RNA, 19 nt, Artificial Sequence
  Description of Artificial Sequence: Synthetic oligonucleotide
  Sense strand starting at position 1147 of SEQ ID NO: 1879431
auuucugcuguucggaauu

SEQ ID NO: 1906627 - RNA, 19 nt, Artificial Sequence
  Description of Artificial Sequence: Synthetic oligonucleotide
  Antisense strand to SEQ ID NO: 1906626
aauuccgaacagcagaaau

SEQ ID NO: 1906628 - RNA, 19 nt, Artificial Sequence
  Description of Artificial Sequence: Synthetic oligonucleotide
  Sense strand starting at position 1153 of SEQ ID NO: 1879431
gcuguucggaauuaugaga

SEQ ID NO: 1906629 - RNA, 19 nt, Artificial Sequence
  Description of Artificial Sequence: Synthetic oligonucleotide
  Antisense strand to SEQ ID NO: 1906628
ucucauaauuccgaacagc

SEQ ID NO: 1906630 - RNA, 19 nt, Artificial Sequence
  Description of Artificial Sequence: Synthetic oligonucleotide
  Sense strand starting at position 1190 of SEQ ID NO: 1879431
agcaguagucauggagaaa

SEQ ID NO: 1906631 - RNA, 19 nt, Artificial Sequence
  Description of Artificial Sequence: Synthetic oligonucleotide
  Antisense strand to SEQ ID NO: 1906630
uuucuccaugacuacugcu

SEQ ID NO: 1906632 - RNA, 19 nt, Artificial Sequence
  Description of Artificial Sequence: Synthetic oligonucleotide
  Sense strand starting at position 1191 of SEQ ID NO: 1879431
gcaguagucauggagaaau

SEQ ID NO: 1906633 - RNA, 19 nt, Artificial Sequence
  Description of Artificial Sequence: Synthetic oligonucleotide
  Antisense strand to SEQ ID NO: 1906632
auuucuccaugacuacugc

SEQ ID NO: 1906634 - RNA, 19 nt, Artificial Sequence
  Description of Artificial Sequence: Synthetic oligonucleotide
  Sense strand starting at position 1327 of SEQ ID NO: 1879431
gggagaucugucuaacagc

SEQ ID NO: 1906635 - RNA, 19 nt, Artificial Sequence
  Description of Artificial Sequence: Synthetic oligonucleotide
  Antisense strand to SEQ ID NO: 1906634
gcuguuagacagaucuccc

SEQ ID NO: 1906636 - RNA, 19 nt, Artificial Sequence
  Description of Artificial Sequence: Synthetic oligonucleotide
  Sense strand starting at position 1406 of SEQ ID NO: 1879431
cggaaauuaguggguaaau

SEQ ID NO: 1906637 - RNA, 19 nt, Artificial Sequence
  Description of Artificial Sequence: Synthetic oligonucleotide
  Antisense strand to SEQ ID NO: 1906636
auuuacccacuaauuuccg

SEQ ID NO: 1906638 - RNA, 19 nt, Artificial Sequence
  Description of Artificial Sequence: Synthetic oligonucleotide
  Sense strand starting at position 1407 of SEQ ID NO: 1879431
ggaaauuaguggguaaauu

SEQ ID NO: 1906639 - RNA, 19 nt, Artificial Sequence
  Description of Artificial Sequence: Synthetic oligonucleotide
  Antisense strand to SEQ ID NO: 1906638
aauuuacccacuaauuucc

SEQ ID NO: 1906640 - RNA, 19 nt, Artificial Sequence
  Description of Artificial Sequence: Synthetic oligonucleotide
  Sense strand starting at position 1417 of SEQ ID NO: 1879431
ggguaaauuuaugaacauu

SEQ ID NO: 1906641 - RNA, 19 nt, Artificial Sequence
  Description of Artificial Sequence: Synthetic oligonucleotide
  Antisense strand to SEQ ID NO: 1906640
aauguucauaaauuuaccc

SEQ ID NO: 1906642 - RNA, 19 nt, Artificial Sequence
  Description of Artificial Sequence: Synthetic oligonucleotide
  Sense strand starting at position 1714 of SEQ ID NO: 1879431
agaagcagugaguaaaugu

SEQ ID NO: 1906643 - RNA, 19 nt, Artificial Sequence
  Description of Artificial Sequence: Synthetic oligonucleotide
  Antisense strand to SEQ ID NO: 1906642
acauuuacucacugcuucu

SEQ ID NO: 1906644 - RNA, 19 nt, Artificial Sequence
  Description of Artificial Sequence: Synthetic oligonucleotide
  Sense strand starting at position 1827 of SEQ ID NO: 1879431
cacacagaacugugugaaa

SEQ ID NO: 1906645 - RNA, 19 nt, Artificial Sequence
  Description of Artificial Sequence: Synthetic oligonucleotide
  Antisense strand to SEQ ID NO: 1906644
uuucacacaguucugugug

SEQ ID NO: 1906646 - RNA, 19 nt, Artificial Sequence
  Description of Artificial Sequence: Synthetic oligonucleotide
  Sense strand starting at position 1829 of SEQ ID NO: 1879431
cacagaacugugugaaauu

SEQ ID NO: 1906647 - RNA, 19 nt, Artificial Sequence
  Description of Artificial Sequence: Synthetic oligonucleotide
  Antisense strand to SEQ ID NO: 1906646
aauuucacacaguucugug

SEQ ID NO: 1906648 - RNA, 19 nt, Artificial Sequence
  Description of Artificial Sequence: Synthetic oligonucleotide
  Sense strand starting at position 2569 of SEQ ID NO: 1879431
auguucuaccacugacaga

SEQ ID NO: 1906649 - RNA, 19 nt, Artificial Sequence
  Description of Artificial Sequence: Synthetic oligonucleotide
  Antisense strand to SEQ ID NO: 1906648
ucugucagugguagaacau

SEQ ID NO: 1906650 - RNA, 19 nt, Artificial Sequence
  Description of Artificial Sequence: Synthetic oligonucleotide
  Sense strand starting at position 2974 of SEQ ID NO: 1879431
acaauuagggucugaagca

SEQ ID NO: 1906651 - RNA, 19 nt, Artificial Sequence
  Description of Artificial Sequence: Synthetic oligonucleotide
  Antisense strand to SEQ ID NO: 1906650
ugcuucagacccuaauugu

SEQ ID NO: 1906652 - RNA, 19 nt, Artificial Sequence
  Description of Artificial Sequence: Synthetic oligonucleotide
  Sense strand starting at position 3011 of SEQ ID NO: 1879431
agcaguccuacagaagagu

SEQ ID NO: 1906653 - RNA, 19 nt, Artificial Sequence
  Description of Artificial Sequence: Synthetic oligonucleotide
  Antisense strand to SEQ ID NO: 1906652
acucuucuguaggacugcu

SEQ ID NO: 1906654 - RNA, 19 nt, Artificial Sequence
  Description of Artificial Sequence: Synthetic oligonucleotide
  Sense strand starting at position 3289 of SEQ ID NO: 1879431
acaaacuuuguugagcuaa

SEQ ID NO: 1906655 - RNA, 19 nt, Artificial Sequence
  Description of Artificial Sequence: Synthetic oligonucleotide
  Antisense strand to SEQ ID NO: 1906654
uuagcucaacaaaguuugu

SEQ ID NO: 1906656 - RNA, 19 nt, Artificial Sequence
  Description of Artificial Sequence: Synthetic oligonucleotide
  Sense strand starting at position 3291 of SEQ ID NO: 1879431
aaacuuuguugagcuaaag

SEQ ID NO: 1906657 - RNA, 19 nt, Artificial Sequence
  Description of Artificial Sequence: Synthetic oligonucleotide
  Antisense strand to SEQ ID NO: 1906656
cuuuagcucaacaaaguuu

SEQ ID NO: 1906658 - RNA, 19 nt, Artificial Sequence
  Description of Artificial Sequence: Synthetic oligonucleotide
  Sense strand starting at position 3444 of SEQ ID NO: 1879431
caaugcaaucacgaguauu

SEQ ID NO: 1906659 - RNA, 19 nt, Artificial Sequence
  Description of Artificial Sequence: Synthetic oligonucleotide
  Antisense strand to SEQ ID NO: 1906658
aauacucgugauugcauug

SEQ ID NO: 1906660 - RNA, 19 nt, Artificial Sequence
  Description of Artificial Sequence: Synthetic oligonucleotide
  Sense strand starting at position 3619 of SEQ ID NO: 1879431
cugauugggcuaugugaaa

SEQ ID NO: 1906661 - RNA, 19 nt, Artificial Sequence
  Description of Artificial Sequence: Synthetic oligonucleotide
  Antisense strand to SEQ ID NO: 1906660
uuucacauagcccaaucag

SEQ ID NO: 1906662 - RNA, 19 nt, Artificial Sequence
  Description of Artificial Sequence: Synthetic oligonucleotide
  Sense strand starting at position 3897 of SEQ ID NO: 1879431
acccuacaagcuugaugaa

SEQ ID NO: 1906663 - RNA, 19 nt, Artificial Sequence
  Description of Artificial Sequence: Synthetic oligonucleotide
  Antisense strand to SEQ ID NO: 1906662
uucaucaagcuuguagggu

SEQ ID NO: 1906664 - RNA, 19 nt, Artificial Sequence
  Description of Artificial Sequence: Synthetic oligonucleotide
  Sense strand starting at position 63 of SEQ ID NO: 1879432
ugugccuguagauagaauu

SEQ ID NO: 1906665 - RNA, 19 nt, Artificial Sequence
  Description of Artificial Sequence: Synthetic oligonucleotide
  Antisense strand to SEQ ID NO: 1906664
aauucuaucuacaggcaca

SEQ ID NO: 1906666 - RNA, 19 nt, Artificial Sequence
  Description of Artificial Sequence: Synthetic oligonucleotide
  Sense strand starting at position 78 of SEQ ID NO: 1879432
aauuucugauguuagaaug

SEQ ID NO: 1906667 - RNA, 19 nt, Artificial Sequence
  Description of Artificial Sequence: Synthetic oligonucleotide
  Antisense strand to SEQ ID NO: 1906666
cauucuaacaucagaaauu

SEQ ID NO: 1906668 - RNA, 19 nt, Artificial Sequence
  Description of Artificial Sequence: Synthetic oligonucleotide
  Sense strand starting at position 88 of SEQ ID NO: 1879432
guuagaaugauaggagcuu

SEQ ID NO: 1906669 - RNA, 19 nt, Artificial Sequence
  Description of Artificial Sequence: Synthetic oligonucleotide
  Antisense strand to SEQ ID NO: 1906668
aagcuccuaucauucuaac

SEQ ID NO: 1906670 - RNA, 19 nt, Artificial Sequence
  Description of Artificial Sequence: Synthetic oligonucleotide
  Sense strand starting at position 320 of SEQ ID NO: 1879432
gggagacauaguugaaguu

SEQ ID NO: 1906671 - RNA, 19 nt, Artificial Sequence
  Description of Artificial Sequence: Synthetic oligonucleotide
  Antisense strand to SEQ ID NO: 1906670
aacuucaacuaugucuccc

SEQ ID NO: 1906672 - RNA, 19 nt, Artificial Sequence
  Description of Artificial Sequence: Synthetic oligonucleotide
  Sense strand starting at position 527 of SEQ ID NO: 1879432
gauacaaaugcugguuaag

SEQ ID NO: 1906673 - RNA, 19 nt, Artificial Sequence
  Description of Artificial Sequence: Synthetic oligonucleotide
  Antisense strand to SEQ ID NO: 1906672
cuuaaccagcauuuguauc

SEQ ID NO: 1906674 - RNA, 19 nt, Artificial Sequence
  Description of Artificial Sequence: Synthetic oligonucleotide
  Sense strand starting at position 1107 of SEQ ID NO: 1879432
gcauuagaauauuccauug

SEQ ID NO: 1906675 - RNA, 19 nt, Artificial Sequence
  Description of Artificial Sequence: Synthetic oligonucleotide
  Antisense strand to SEQ ID NO: 1906674
caauggaauauucuaaugc

SEQ ID NO: 1906676 - RNA, 19 nt, Artificial Sequence
  Description of Artificial Sequence: Synthetic oligonucleotide
  Sense strand starting at position 1223 of SEQ ID NO: 1879432
gacguaguaucauuugucu

SEQ ID NO: 1906677 - RNA, 19 nt, Artificial Sequence
  Description of Artificial Sequence: Synthetic oligonucleotide
  Antisense strand to SEQ ID NO: 1906676
agacaaaugauacuacguc

SEQ ID NO: 1906678 - RNA, 19 nt, Artificial Sequence
  Description of Artificial Sequence: Synthetic oligonucleotide
  Sense strand starting at position 1563 of SEQ ID NO: 1879432
auccucugccauggaaauu

SEQ ID NO: 1906679 - RNA, 19 nt, Artificial Sequence
  Description of Artificial Sequence: Synthetic oligonucleotide
  Antisense strand to SEQ ID NO: 1906678
aauuuccauggcagaggau

SEQ ID NO: 1906680 - RNA, 19 nt, Artificial Sequence
  Description of Artificial Sequence: Synthetic oligonucleotide
  Sense strand starting at position 1582 of SEQ ID NO: 1879432
gggaaacaguuccuaugau

SEQ ID NO: 1906681 - RNA, 19 nt, Artificial Sequence
  Description of Artificial Sequence: Synthetic oligonucleotide
  Antisense strand to SEQ ID NO: 1906680
aucauaggaacuguuuccc

SEQ ID NO: 1906682 - RNA, 19 nt, Artificial Sequence
  Description of Artificial Sequence: Synthetic oligonucleotide
  Sense strand starting at position 1605 of SEQ ID NO: 1879432
ugaugccuuggcugaauuu

SEQ ID NO: 1906683 - RNA, 19 nt, Artificial Sequence
  Description of Artificial Sequence: Synthetic oligonucleotide
  Antisense strand to SEQ ID NO: 1906682
aaauucagccaaggcauca

SEQ ID NO: 1906684 - RNA, 19 nt, Artificial Sequence
  Description of Artificial Sequence: Synthetic oligonucleotide
  Sense strand starting at position 1722 of SEQ ID NO: 1879432
ggagaaucgcuuuaugauu

SEQ ID NO: 1906685 - RNA, 19 nt, Artificial Sequence
  Description of Artificial Sequence: Synthetic oligonucleotide
  Antisense strand to SEQ ID NO: 1906684
aaucauaaagcgauucucc

SEQ ID NO: 1906686 - RNA, 19 nt, Artificial Sequence
  Description of Artificial Sequence: Synthetic oligonucleotide
  Sense strand starting at position 1763 of SEQ ID NO: 1879432
gaaaguaguaaaggugagu

SEQ ID NO: 1906687 - RNA, 19 nt, Artificial Sequence
  Description of Artificial Sequence: Synthetic oligonucleotide
  Antisense strand to SEQ ID NO: 1906686
acucaccuuuacuacuuuc

SEQ ID NO: 1906688 - RNA, 19 nt, Artificial Sequence
  Description of Artificial Sequence: Synthetic oligonucleotide
  Sense strand starting at position 1861 of SEQ ID NO: 1879432
gaggcauauuaaguuucua

SEQ ID NO: 1906689 - RNA, 19 nt, Artificial Sequence
  Description of Artificial Sequence: Synthetic oligonucleotide
  Antisense strand to SEQ ID NO: 1906688
uagaaacuuaauaugccuc

SEQ ID NO: 1906690 - RNA, 19 nt, Artificial Sequence
  Description of Artificial Sequence: Synthetic oligonucleotide
  Sense strand starting at position 1935 of SEQ ID NO: 1879432
uugggauaucccugaguuc

SEQ ID NO: 1906691 - RNA, 19 nt, Artificial Sequence
  Description of Artificial Sequence: Synthetic oligonucleotide
  Antisense strand to SEQ ID NO: 1906690
gaacucagggauaucccaa

SEQ ID NO: 1906692 - RNA, 19 nt, Artificial Sequence
  Description of Artificial Sequence: Synthetic oligonucleotide
  Sense strand starting at position 1936 of SEQ ID NO: 1879432
ugggauaucccugaguucu

SEQ ID NO: 1906693 - RNA, 19 nt, Artificial Sequence
  Description of Artificial Sequence: Synthetic oligonucleotide
  Antisense strand to SEQ ID NO: 1906692
agaacucagggauauccca

SEQ ID NO: 1906694 - RNA, 19 nt, Artificial Sequence
  Description of Artificial Sequence: Synthetic oligonucleotide
  Sense strand starting at position 2038 of SEQ ID NO: 1879432
guggguggucuuuaugaug

SEQ ID NO: 1906695 - RNA, 19 nt, Artificial Sequence
  Description of Artificial Sequence: Synthetic oligonucleotide
  Antisense strand to SEQ ID NO: 1906694
caucauaaagaccacccac

SEQ ID NO: 1906696 - RNA, 19 nt, Artificial Sequence
  Description of Artificial Sequence: Synthetic oligonucleotide
  Sense strand starting at position 2116 of SEQ ID NO: 1879432
gccuguauuggcuagaaga

SEQ ID NO: 1906697 - RNA, 19 nt, Artificial Sequence
  Description of Artificial Sequence: Synthetic oligonucleotide
  Antisense strand to SEQ ID NO: 1906696
ucuucuagccaauacaggc

SEQ ID NO: 1906698 - RNA, 19 nt, Artificial Sequence
  Description of Artificial Sequence: Synthetic oligonucleotide
  Sense strand starting at position 2126 of SEQ ID NO: 1879432
gcuagaagaaaucaugugu

SEQ ID NO: 1906699 - RNA, 19 nt, Artificial Sequence
  Description of Artificial Sequence: Synthetic oligonucleotide
  Antisense strand to SEQ ID NO: 1906698
acacaugauuucuucuagc

SEQ ID NO: 1906700 - RNA, 19 nt, Artificial Sequence
  Description of Artificial Sequence: Synthetic oligonucleotide
  Sense strand starting at position 2131 of SEQ ID NO: 1879432
aagaaaucauguguguaag

SEQ ID NO: 1906701 - RNA, 19 nt, Artificial Sequence
  Description of Artificial Sequence: Synthetic oligonucleotide
  Antisense strand to SEQ ID NO: 1906700
cuuacacacaugauuucuu

SEQ ID NO: 1906702 - RNA, 19 nt, Artificial Sequence
  Description of Artificial Sequence: Synthetic oligonucleotide
  Sense strand starting at position 2134 of SEQ ID NO: 1879432
aaaucauguguguaagggu

SEQ ID NO: 1906703 - RNA, 19 nt, Artificial Sequence
  Description of Artificial Sequence: Synthetic oligonucleotide
  Antisense strand to SEQ ID NO: 1906702
acccuuacacacaugauuu

SEQ ID NO: 1906704 - RNA, 19 nt, Artificial Sequence
  Description of Artificial Sequence: Synthetic oligonucleotide
  Sense strand starting at position 2279 of SEQ ID NO: 1879432
cucacuaugcuugagaauu

SEQ ID NO: 1906705 - RNA, 19 nt, Artificial Sequence
  Description of Artificial Sequence: Synthetic oligonucleotide
  Antisense strand to SEQ ID NO: 1906704
aauucucaagcauagugag

SEQ ID NO: 1906706 - RNA, 19 nt, Artificial Sequence
  Description of Artificial Sequence: Synthetic oligonucleotide
  Sense strand starting at position 2624 of SEQ ID NO: 1879432
acauuaucugcugaguuac

SEQ ID NO: 1906707 - RNA, 19 nt, Artificial Sequence
  Description of Artificial Sequence: Synthetic oligonucleotide
  Antisense strand to SEQ ID NO: 1906706
guaacucagcagauaaugu

SEQ ID NO: 1906708 - RNA, 19 nt, Artificial Sequence
  Description of Artificial Sequence: Synthetic oligonucleotide
  Sense strand starting at position 2742 of SEQ ID NO: 1879432
gacagaauucugugcaaga

SEQ ID NO: 1906709 - RNA, 19 nt, Artificial Sequence
  Description of Artificial Sequence: Synthetic oligonucleotide
  Antisense strand to SEQ ID NO: 1906708
ucuugcacagaauucuguc

SEQ ID NO: 1906710 - RNA, 19 nt, Artificial Sequence
  Description of Artificial Sequence: Synthetic oligonucleotide
  Sense strand starting at position 2743 of SEQ ID NO: 1879432
acagaauucugugcaagau

SEQ ID NO: 1906711 - RNA, 19 nt, Artificial Sequence
  Description of Artificial Sequence: Synthetic oligonucleotide
  Antisense strand to SEQ ID NO: 1906710
aucuugcacagaauucugu

SEQ ID NO: 1906712 - RNA, 19 nt, Artificial Sequence
  Description of Artificial Sequence: Synthetic oligonucleotide
  Sense strand starting at position 2744 of SEQ ID NO: 1879432
cagaauucugugcaagauu

SEQ ID NO: 1906713 - RNA, 19 nt, Artificial Sequence
  Description of Artificial Sequence: Synthetic oligonucleotide
  Antisense strand to SEQ ID NO: 1906712
aaucuugcacagaauucug

SEQ ID NO: 1906714 - RNA, 19 nt, Artificial Sequence
  Description of Artificial Sequence: Synthetic oligonucleotide
  Sense strand starting at position 2797 of SEQ ID NO: 1879432
uaagaaagcuaugugguaa

SEQ ID NO: 1906715 - RNA, 19 nt, Artificial Sequence
  Description of Artificial Sequence: Synthetic oligonucleotide
  Antisense strand to SEQ ID NO: 1906714
uuaccacauagcuuucuua

SEQ ID NO: 1906716 - RNA, 19 nt, Artificial Sequence
  Description of Artificial Sequence: Synthetic oligonucleotide
  Sense strand starting at position 2924 of SEQ ID NO: 1879432
agaauaugauaagugugau

SEQ ID NO: 1906717 - RNA, 19 nt, Artificial Sequence
  Description of Artificial Sequence: Synthetic oligonucleotide
  Antisense strand to SEQ ID NO: 1906716
aucacacuuaucauauucu

SEQ ID NO: 1906718 - RNA, 19 nt, Artificial Sequence
  Description of Artificial Sequence: Synthetic oligonucleotide
  Sense strand starting at position 2990 of SEQ ID NO: 1879432
ugugguugugguagagcaa

SEQ ID NO: 1906719 - RNA, 19 nt, Artificial Sequence
  Description of Artificial Sequence: Synthetic oligonucleotide
  Antisense strand to SEQ ID NO: 1906718
uugcucuaccacaaccaca

SEQ ID NO: 1906720 - RNA, 19 nt, Artificial Sequence
  Description of Artificial Sequence: Synthetic oligonucleotide
  Sense strand starting at position 3204 of SEQ ID NO: 1879432
cccaacuaguucuugagau

SEQ ID NO: 1906721 - RNA, 19 nt, Artificial Sequence
  Description of Artificial Sequence: Synthetic oligonucleotide
  Antisense strand to SEQ ID NO: 1906720
aucucaagaacuaguuggg

SEQ ID NO: 1906722 - RNA, 19 nt, Artificial Sequence
  Description of Artificial Sequence: Synthetic oligonucleotide
  Sense strand starting at position 3206 of SEQ ID NO: 1879432
caacuaguucuugagaugu

SEQ ID NO: 1906723 - RNA, 19 nt, Artificial Sequence
  Description of Artificial Sequence: Synthetic oligonucleotide
  Antisense strand to SEQ ID NO: 1906722
acaucucaagaacuaguug

SEQ ID NO: 1906724 - RNA, 19 nt, Artificial Sequence
  Description of Artificial Sequence: Synthetic oligonucleotide
  Sense strand starting at position 3221 of SEQ ID NO: 1879432
auguuaugugguuaucaaa

SEQ ID NO: 1906725 - RNA, 19 nt, Artificial Sequence
  Description of Artificial Sequence: Synthetic oligonucleotide
  Antisense strand to SEQ ID NO: 1906724
uuugauaaccacauaacau

SEQ ID NO: 1906726 - RNA, 19 nt, Artificial Sequence
  Description of Artificial Sequence: Synthetic oligonucleotide
  Sense strand starting at position 3447 of SEQ ID NO: 1879432
guacaagggcuccaauaua

SEQ ID NO: 1906727 - RNA, 19 nt, Artificial Sequence
  Description of Artificial Sequence: Synthetic oligonucleotide
  Antisense strand to SEQ ID NO: 1906726
uauauuggagcccuuguac

SEQ ID NO: 1906728 - RNA, 19 nt, Artificial Sequence
  Description of Artificial Sequence: Synthetic oligonucleotide
  Sense strand starting at position 3578 of SEQ ID NO: 1879432
gugucacugaacuauggga

SEQ ID NO: 1906729 - RNA, 19 nt, Artificial Sequence
  Description of Artificial Sequence: Synthetic oligonucleotide
  Antisense strand to SEQ ID NO: 1906728
ucccauaguucagugacac

SEQ ID NO: 1906730 - RNA, 19 nt, Artificial Sequence
  Description of Artificial Sequence: Synthetic oligonucleotide
  Sense strand starting at position 3580 of SEQ ID NO: 1879432
gucacugaacuaugggaau

SEQ ID NO: 1906731 - RNA, 19 nt, Artificial Sequence
  Description of Artificial Sequence: Synthetic oligonucleotide
  Antisense strand to SEQ ID NO: 1906730
auucccauaguucagugac

SEQ ID NO: 1906732 - RNA, 19 nt, Artificial Sequence
  Description of Artificial Sequence: Synthetic oligonucleotide
  Sense strand starting at position 3631 of SEQ ID NO: 1879432
uguugugugaaugaacauc

SEQ ID NO: 1906733 - RNA, 19 nt, Artificial Sequence
  Description of Artificial Sequence: Synthetic oligonucleotide
  Antisense strand to SEQ ID NO: 1906732
gauguucauucacacaaca

SEQ ID NO: 1906734 - RNA, 19 nt, Artificial Sequence
  Description of Artificial Sequence: Synthetic oligonucleotide
  Sense strand starting at position 3663 of SEQ ID NO: 1879432
acacaaauguagguaguau

SEQ ID NO: 1906735 - RNA, 19 nt, Artificial Sequence
  Description of Artificial Sequence: Synthetic oligonucleotide
  Antisense strand to SEQ ID NO: 1906734
auacuaccuacauuugugu

SEQ ID NO: 1906736 - RNA, 19 nt, Artificial Sequence
  Description of Artificial Sequence: Synthetic oligonucleotide
  Sense strand starting at position 3801 of SEQ ID NO: 1879432
uuggcuauauuugcaugua

SEQ ID NO: 1906737 - RNA, 19 nt, Artificial Sequence
  Description of Artificial Sequence: Synthetic oligonucleotide
  Antisense strand to SEQ ID NO: 1906736
uacaugcaaauauagccaa

SEQ ID NO: 1906738 - RNA, 19 nt, Artificial Sequence
  Description of Artificial Sequence: Synthetic oligonucleotide
  Sense strand starting at position 3804 of SEQ ID NO: 1879432
gcuauauuugcauguaacc

SEQ ID NO: 1906739 - RNA, 19 nt, Artificial Sequence
  Description of Artificial Sequence: Synthetic oligonucleotide
  Antisense strand to SEQ ID NO: 1906738
gguuacaugcaaauauagc

SEQ ID NO: 1906740 - RNA, 19 nt, Artificial Sequence
  Description of Artificial Sequence: Synthetic oligonucleotide
  Sense strand starting at position 3856 of SEQ ID NO: 1879432
cuagauuacguguaauaca

SEQ ID NO: 1906741 - RNA, 19 nt, Artificial Sequence
  Description of Artificial Sequence: Synthetic oligonucleotide
  Antisense strand to SEQ ID NO: 1906740
uguauuacacguaaucuag

SEQ ID NO: 1906742 - RNA, 19 nt, Artificial Sequence
  Description of Artificial Sequence: Synthetic oligonucleotide
  Sense strand starting at position 3980 of SEQ ID NO: 1879432
caaagaacucuguacuggu

SEQ ID NO: 1906743 - RNA, 19 nt, Artificial Sequence
  Description of Artificial Sequence: Synthetic oligonucleotide
  Antisense strand to SEQ ID NO: 1906742
accaguacagaguucuuug

SEQ ID NO: 1906744 - RNA, 19 nt, Artificial Sequence
  Description of Artificial Sequence: Synthetic oligonucleotide
  Sense strand starting at position 235 of SEQ ID NO: 1879433
uaaauugcaguaggauaau

SEQ ID NO: 1906745 - RNA, 19 nt, Artificial Sequence
  Description of Artificial Sequence: Synthetic oligonucleotide
  Antisense strand to SEQ ID NO: 1906744
auuauccuacugcaauuua

SEQ ID NO: 1906746 - RNA, 19 nt, Artificial Sequence
  Description of Artificial Sequence: Synthetic oligonucleotide
  Sense strand starting at position 579 of SEQ ID NO: 1879433
acaauaugccauuguggau

SEQ ID NO: 1906747 - RNA, 19 nt, Artificial Sequence
  Description of Artificial Sequence: Synthetic oligonucleotide
  Antisense strand to SEQ ID NO: 1906746
auccacaauggcauauugu

SEQ ID NO: 1906748 - RNA, 19 nt, Artificial Sequence
  Description of Artificial Sequence: Synthetic oligonucleotide
  Sense strand starting at position 607 of SEQ ID NO: 1879433
uuguaucuggugcaauaau

SEQ ID NO: 1906749 - RNA, 19 nt, Artificial Sequence
  Description of Artificial Sequence: Synthetic oligonucleotide
  Antisense strand to SEQ ID NO: 1906748
auuauugcaccagauacaa

SEQ ID NO: 1906750 - RNA, 19 nt, Artificial Sequence
  Description of Artificial Sequence: Synthetic oligonucleotide
  Sense strand starting at position 666 of SEQ ID NO: 1879433
uuaauauaccugcgaaaug

SEQ ID NO: 1906751 - RNA, 19 nt, Artificial Sequence
  Description of Artificial Sequence: Synthetic oligonucleotide
  Antisense strand to SEQ ID NO: 1906750
cauuucgcagguauauuaa

SEQ ID NO: 1906752 - RNA, 19 nt, Artificial Sequence
  Description of Artificial Sequence: Synthetic oligonucleotide
  Sense strand starting at position 671 of SEQ ID NO: 1879433
auaccugcgaaaugugaaa

SEQ ID NO: 1906753 - RNA, 19 nt, Artificial Sequence
  Description of Artificial Sequence: Synthetic oligonucleotide
  Antisense strand to SEQ ID NO: 1906752
uuucacauuucgcagguau

SEQ ID NO: 1906754 - RNA, 19 nt, Artificial Sequence
  Description of Artificial Sequence: Synthetic oligonucleotide
  Sense strand starting at position 1013 of SEQ ID NO: 1879433
cccagcucgugauuuacau

SEQ ID NO: 1906755 - RNA, 19 nt, Artificial Sequence
  Description of Artificial Sequence: Synthetic oligonucleotide
  Antisense strand to SEQ ID NO: 1906754
auguaaaucacgagcuggg

SEQ ID NO: 1906756 - RNA, 19 nt, Artificial Sequence
  Description of Artificial Sequence: Synthetic oligonucleotide
  Sense strand starting at position 1229 of SEQ ID NO: 1879433
gagagugaggcggauaauu

SEQ ID NO: 1906757 - RNA, 19 nt, Artificial Sequence
  Description of Artificial Sequence: Synthetic oligonucleotide
  Antisense strand to SEQ ID NO: 1906756
aauuauccgccucacucuc

SEQ ID NO: 1906758 - RNA, 19 nt, Artificial Sequence
  Description of Artificial Sequence: Synthetic oligonucleotide
  Sense strand starting at position 1231 of SEQ ID NO: 1879433
gagugaggcggauaauucu

SEQ ID NO: 1906759 - RNA, 19 nt, Artificial Sequence
  Description of Artificial Sequence: Synthetic oligonucleotide
  Antisense strand to SEQ ID NO: 1906758
agaauuauccgccucacuc

SEQ ID NO: 1906760 - RNA, 19 nt, Artificial Sequence
  Description of Artificial Sequence: Synthetic oligonucleotide
  Sense strand starting at position 1371 of SEQ ID NO: 1879433
uaaggagaguacuccgagu

SEQ ID NO: 1906761 - RNA, 19 nt, Artificial Sequence
  Description of Artificial Sequence: Synthetic oligonucleotide
  Antisense strand to SEQ ID NO: 1906760
acucggaguacucuccuua

SEQ ID NO: 1906762 - RNA, 19 nt, Artificial Sequence
  Description of Artificial Sequence: Synthetic oligonucleotide
  Sense strand starting at position 1373 of SEQ ID NO: 1879433
aggagaguacuccgaguag

SEQ ID NO: 1906763 - RNA, 19 nt, Artificial Sequence
  Description of Artificial Sequence: Synthetic oligonucleotide
  Antisense strand to SEQ ID NO: 1906762
cuacucggaguacucuccu

SEQ ID NO: 1906764 - RNA, 19 nt, Artificial Sequence
  Description of Artificial Sequence: Synthetic oligonucleotide
  Sense strand starting at position 1462 of SEQ ID NO: 1879433
ggcaguucccuugggaaac

SEQ ID NO: 1906765 - RNA, 19 nt, Artificial Sequence
  Description of Artificial Sequence: Synthetic oligonucleotide
  Antisense strand to SEQ ID NO: 1906764
guuucccaagggaacugcc

SEQ ID NO: 1906766 - RNA, 19 nt, Artificial Sequence
  Description of Artificial Sequence: Synthetic oligonucleotide
  Sense strand starting at position 1619 of SEQ ID NO: 1879433
gcuaaucuuaccgaucgau

SEQ ID NO: 1906767 - RNA, 19 nt, Artificial Sequence
  Description of Artificial Sequence: Synthetic oligonucleotide
  Antisense strand to SEQ ID NO: 1906766
aucgaucgguaagauuagc

SEQ ID NO: 1906768 - RNA, 19 nt, Artificial Sequence
  Description of Artificial Sequence: Synthetic oligonucleotide
  Sense strand starting at position 1722 of SEQ ID NO: 1879433
ucaguuacugcaggaauca

SEQ ID NO: 1906769 - RNA, 19 nt, Artificial Sequence
  Description of Artificial Sequence: Synthetic oligonucleotide
  Antisense strand to SEQ ID NO: 1906768
ugauuccugcaguaacuga

SEQ ID NO: 1906770 - RNA, 19 nt, Artificial Sequence
  Description of Artificial Sequence: Synthetic oligonucleotide
  Sense strand starting at position 2077 of SEQ ID NO: 1879433
ugauuuggucaucguaaug

SEQ ID NO: 1906771 - RNA, 19 nt, Artificial Sequence
  Description of Artificial Sequence: Synthetic oligonucleotide
  Antisense strand to SEQ ID NO: 1906770
cauuacgaugaccaaauca

SEQ ID NO: 1906772 - RNA, 19 nt, Artificial Sequence
  Description of Artificial Sequence: Synthetic oligonucleotide
  Sense strand starting at position 2203 of SEQ ID NO: 1879433
agugaaaugcacugaugga

SEQ ID NO: 1906773 - RNA, 19 nt, Artificial Sequence
  Description of Artificial Sequence: Synthetic oligonucleotide
  Antisense strand to SEQ ID NO: 1906772
uccaucagugcauuucacu

SEQ ID NO: 1906774 - RNA, 19 nt, Artificial Sequence
  Description of Artificial Sequence: Synthetic oligonucleotide
  Sense strand starting at position 2317 of SEQ ID NO: 1879433
cuugaauucucauuggauc

SEQ ID NO: 1906775 - RNA, 19 nt, Artificial Sequence
  Description of Artificial Sequence: Synthetic oligonucleotide
  Antisense strand to SEQ ID NO: 1906774
gauccaaugagaauucaag

SEQ ID NO: 1906776 - RNA, 19 nt, Artificial Sequence
  Description of Artificial Sequence: Synthetic oligonucleotide
  Sense strand starting at position 2446 of SEQ ID NO: 1879433
uuugcagauuuaucuguau

SEQ ID NO: 1906777 - RNA, 19 nt, Artificial Sequence
  Description of Artificial Sequence: Synthetic oligonucleotide
  Antisense strand to SEQ ID NO: 1906776
auacagauaaaucugcaaa

SEQ ID NO: 1906778 - RNA, 19 nt, Artificial Sequence
  Description of Artificial Sequence: Synthetic oligonucleotide
  Sense strand starting at position 2520 of SEQ ID NO: 1879433
augugcagccuguaaauuu

SEQ ID NO: 1906779 - RNA, 19 nt, Artificial Sequence
  Description of Artificial Sequence: Synthetic oligonucleotide
  Antisense strand to SEQ ID NO: 1906778
aaauuuacaggcugcacau

SEQ ID NO: 1906780 - RNA, 19 nt, Artificial Sequence
  Description of Artificial Sequence: Synthetic oligonucleotide
  Sense strand starting at position 2546 of SEQ ID NO: 1879433
gcuuaaggaucaccacgaa

SEQ ID NO: 1906781 - RNA, 19 nt, Artificial Sequence
  Description of Artificial Sequence: Synthetic oligonucleotide
  Antisense strand to SEQ ID NO: 1906780
uucguggugauccuuaagc

SEQ ID NO: 1906782 - RNA, 19 nt, Artificial Sequence
  Description of Artificial Sequence: Synthetic oligonucleotide
  Sense strand starting at position 2676 of SEQ ID NO: 1879433
ccaggaacugcugauuauu

SEQ ID NO: 1906783 - RNA, 19 nt, Artificial Sequence
  Description of Artificial Sequence: Synthetic oligonucleotide
  Antisense strand to SEQ ID NO: 1906782
aauaaucagcaguuccugg

SEQ ID NO: 1906784 - RNA, 19 nt, Artificial Sequence
  Description of Artificial Sequence: Synthetic oligonucleotide
  Sense strand starting at position 2726 of SEQ ID NO: 1879433
uuaccuugauuuggaagau

SEQ ID NO: 1906785 - RNA, 19 nt, Artificial Sequence
  Description of Artificial Sequence: Synthetic oligonucleotide
  Antisense strand to SEQ ID NO: 1906784
aucuuccaaaucaagguaa

SEQ ID NO: 1906786 - RNA, 19 nt, Artificial Sequence
  Description of Artificial Sequence: Synthetic oligonucleotide
  Sense strand starting at position 2817 of SEQ ID NO: 1879433
aguuauucucuuuaucugu

SEQ ID NO: 1906787 - RNA, 19 nt, Artificial Sequence
  Description of Artificial Sequence: Synthetic oligonucleotide
  Antisense strand to SEQ ID NO: 1906786
acagauaaagagaauaacu

SEQ ID NO: 1906788 - RNA, 19 nt, Artificial Sequence
  Description of Artificial Sequence: Synthetic oligonucleotide
  Sense strand starting at position 2925 of SEQ ID NO: 1879433
agauccauauggccauauu

SEQ ID NO: 1906789 - RNA, 19 nt, Artificial Sequence
  Description of Artificial Sequence: Synthetic oligonucleotide
  Antisense strand to SEQ ID NO: 1906788
aauauggccauauggaucu

SEQ ID NO: 1906790 - RNA, 19 nt, Artificial Sequence
  Description of Artificial Sequence: Synthetic oligonucleotide
  Sense strand starting at position 2935 of SEQ ID NO: 1879433
ggccauauuuauuaauuag

SEQ ID NO: 1906791 - RNA, 19 nt, Artificial Sequence
  Description of Artificial Sequence: Synthetic oligonucleotide
  Antisense strand to SEQ ID NO: 1906790
cuaauuaauaaauauggcc

SEQ ID NO: 1906792 - RNA, 19 nt, Artificial Sequence
  Description of Artificial Sequence: Synthetic oligonucleotide
  Sense strand starting at position 3126 of SEQ ID NO: 1879433
acacauuccugugccauuu

SEQ ID NO: 1906793 - RNA, 19 nt, Artificial Sequence
  Description of Artificial Sequence: Synthetic oligonucleotide
  Antisense strand to SEQ ID NO: 1906792
aaauggcacaggaaugugu

SEQ ID NO: 1906794 - RNA, 19 nt, Artificial Sequence
  Description of Artificial Sequence: Synthetic oligonucleotide
  Sense strand starting at position 3203 of SEQ ID NO: 1879433
uugcaaggucuggaaaguu

SEQ ID NO: 1906795 - RNA, 19 nt, Artificial Sequence
  Description of Artificial Sequence: Synthetic oligonucleotide
  Antisense strand to SEQ ID NO: 1906794
aacuuuccagaccuugcaa

SEQ ID NO: 1906796 - RNA, 19 nt, Artificial Sequence
  Description of Artificial Sequence: Synthetic oligonucleotide
  Sense strand starting at position 3230 of SEQ ID NO: 1879433
ggauauucagaagguuguu

SEQ ID NO: 1906797 - RNA, 19 nt, Artificial Sequence
  Description of Artificial Sequence: Synthetic oligonucleotide
  Antisense strand to SEQ ID NO: 1906796
aacaaccuucugaauaucc

SEQ ID NO: 1906798 - RNA, 19 nt, Artificial Sequence
  Description of Artificial Sequence: Synthetic oligonucleotide
  Sense strand starting at position 3287 of SEQ ID NO: 1879433
gaaggaagacuuuguugca

SEQ ID NO: 1906799 - RNA, 19 nt, Artificial Sequence
  Description of Artificial Sequence: Synthetic oligonucleotide
  Antisense strand to SEQ ID NO: 1906798
ugcaacaaagucuuccuuc

SEQ ID NO: 1906800 - RNA, 19 nt, Artificial Sequence
  Description of Artificial Sequence: Synthetic oligonucleotide
  Sense strand starting at position 3288 of SEQ ID NO: 1879433
aaggaagacuuuguugcaa

SEQ ID NO: 1906801 - RNA, 19 nt, Artificial Sequence
  Description of Artificial Sequence: Synthetic oligonucleotide
  Antisense strand to SEQ ID NO: 1906800
uugcaacaaagucuuccuu

SEQ ID NO: 1906802 - RNA, 19 nt, Artificial Sequence
  Description of Artificial Sequence: Synthetic oligonucleotide
  Sense strand starting at position 3363 of SEQ ID NO: 1879433
ggaagaggacugugaguuu

SEQ ID NO: 1906803 - RNA, 19 nt, Artificial Sequence
  Description of Artificial Sequence: Synthetic oligonucleotide
  Antisense strand to SEQ ID NO: 1906802
aaacucacaguccucuucc

SEQ ID NO: 1906804 - RNA, 19 nt, Artificial Sequence
  Description of Artificial Sequence: Synthetic oligonucleotide
  Sense strand starting at position 3459 of SEQ ID NO: 1879433
aggcauaguauuugucagu

SEQ ID NO: 1906805 - RNA, 19 nt, Artificial Sequence
  Description of Artificial Sequence: Synthetic oligonucleotide
  Antisense strand to SEQ ID NO: 1906804
acugacaaauacuaugccu

SEQ ID NO: 1906806 - RNA, 19 nt, Artificial Sequence
  Description of Artificial Sequence: Synthetic oligonucleotide
  Sense strand starting at position 3460 of SEQ ID NO: 1879433
ggcauaguauuugucagua

SEQ ID NO: 1906807 - RNA, 19 nt, Artificial Sequence
  Description of Artificial Sequence: Synthetic oligonucleotide
  Antisense strand to SEQ ID NO: 1906806
uacugacaaauacuaugcc

SEQ ID NO: 1906808 - RNA, 19 nt, Artificial Sequence
  Description of Artificial Sequence: Synthetic oligonucleotide
  Sense strand starting at position 3494 of SEQ ID NO: 1879433
gaauuagcuggugaacagu

SEQ ID NO: 1906809 - RNA, 19 nt, Artificial Sequence
  Description of Artificial Sequence: Synthetic oligonucleotide
  Antisense strand to SEQ ID NO: 1906808
acuguucaccagcuaauuc

SEQ ID NO: 1906810 - RNA, 19 nt, Artificial Sequence
  Description of Artificial Sequence: Synthetic oligonucleotide
  Sense strand starting at position 3504 of SEQ ID NO: 1879433
gugaacaguuaauuggaca

SEQ ID NO: 1906811 - RNA, 19 nt, Artificial Sequence
  Description of Artificial Sequence: Synthetic oligonucleotide
  Antisense strand to SEQ ID NO: 1906810
uguccaauuaacuguucac

SEQ ID NO: 1906812 - RNA, 19 nt, Artificial Sequence
  Description of Artificial Sequence: Synthetic oligonucleotide
  Sense strand starting at position 3563 of SEQ ID NO: 1879433
cugauuaucuugguucuga

SEQ ID NO: 1906813 - RNA, 19 nt, Artificial Sequence
  Description of Artificial Sequence: Synthetic oligonucleotide
  Antisense strand to SEQ ID NO: 1906812
ucagaaccaagauaaucag

SEQ ID NO: 1906814 - RNA, 19 nt, Artificial Sequence
  Description of Artificial Sequence: Synthetic oligonucleotide
  Sense strand starting at position 3564 of SEQ ID NO: 1879433
ugauuaucuugguucugau

SEQ ID NO: 1906815 - RNA, 19 nt, Artificial Sequence
  Description of Artificial Sequence: Synthetic oligonucleotide
  Antisense strand to SEQ ID NO: 1906814
aucagaaccaagauaauca

SEQ ID NO: 1906816 - RNA, 19 nt, Artificial Sequence
  Description of Artificial Sequence: Synthetic oligonucleotide
  Sense strand starting at position 3752 of SEQ ID NO: 1879433
uauaguuguguugagaaac

SEQ ID NO: 1906817 - RNA, 19 nt, Artificial Sequence
  Description of Artificial Sequence: Synthetic oligonucleotide
  Antisense strand to SEQ ID NO: 1906816
guuucucaacacaacuaua

SEQ ID NO: 1906818 - RNA, 19 nt, Artificial Sequence
  Description of Artificial Sequence: Synthetic oligonucleotide
  Sense strand starting at position 3833 of SEQ ID NO: 1879433
augccaaaccugcauguau

SEQ ID NO: 1906819 - RNA, 19 nt, Artificial Sequence
  Description of Artificial Sequence: Synthetic oligonucleotide
  Antisense strand to SEQ ID NO: 1906818
auacaugcagguuuggcau

SEQ ID NO: 1906820 - RNA, 19 nt, Artificial Sequence
  Description of Artificial Sequence: Synthetic oligonucleotide
  Sense strand starting at position 3842 of SEQ ID NO: 1879433
cugcauguaucgguaauuu

SEQ ID NO: 1906821 - RNA, 19 nt, Artificial Sequence
  Description of Artificial Sequence: Synthetic oligonucleotide
  Antisense strand to SEQ ID NO: 1906820
aaauuaccgauacaugcag

SEQ ID NO: 1906822 - RNA, 19 nt, Artificial Sequence
  Description of Artificial Sequence: Synthetic oligonucleotide
  Sense strand starting at position 3920 of SEQ ID NO: 1879433
guuccuggucucuacaaca

SEQ ID NO: 1906823 - RNA, 19 nt, Artificial Sequence
  Description of Artificial Sequence: Synthetic oligonucleotide
  Antisense strand to SEQ ID NO: 1906822
uguuguagagaccaggaac

SEQ ID NO: 1906824 - RNA, 19 nt, Artificial Sequence
  Description of Artificial Sequence: Synthetic oligonucleotide
  Sense strand starting at position 236 of SEQ ID NO: 1879434
ccaacaugcccuuagugaa

SEQ ID NO: 1906825 - RNA, 19 nt, Artificial Sequence
  Description of Artificial Sequence: Synthetic oligonucleotide
  Antisense strand to SEQ ID NO: 1906824
uucacuaagggcauguugg

SEQ ID NO: 1906826 - RNA, 19 nt, Artificial Sequence
  Description of Artificial Sequence: Synthetic oligonucleotide
  Sense strand starting at position 270 of SEQ ID NO: 1879434
aaauguugauggcuauaaa

SEQ ID NO: 1906827 - RNA, 19 nt, Artificial Sequence
  Description of Artificial Sequence: Synthetic oligonucleotide
  Antisense strand to SEQ ID NO: 1906826
uuuauagccaucaacauuu

SEQ ID NO: 1906828 - RNA, 19 nt, Artificial Sequence
  Description of Artificial Sequence: Synthetic oligonucleotide
  Sense strand starting at position 273 of SEQ ID NO: 1879434
uguugauggcuauaaagac

SEQ ID NO: 1906829 - RNA, 19 nt, Artificial Sequence
  Description of Artificial Sequence: Synthetic oligonucleotide
  Antisense strand to SEQ ID NO: 1906828
gucuuuauagccaucaaca

SEQ ID NO: 1906830 - RNA, 19 nt, Artificial Sequence
  Description of Artificial Sequence: Synthetic oligonucleotide
  Sense strand starting at position 526 of SEQ ID NO: 1879434
uaaauugcaguaggauaau

SEQ ID NO: 1906831 - RNA, 19 nt, Artificial Sequence
  Description of Artificial Sequence: Synthetic oligonucleotide
  Antisense strand to SEQ ID NO: 1906830
auuauccuacugcaauuua

SEQ ID NO: 1906832 - RNA, 19 nt, Artificial Sequence
  Description of Artificial Sequence: Synthetic oligonucleotide
  Sense strand starting at position 870 of SEQ ID NO: 1879434
acaauaugccauuguggau

SEQ ID NO: 1906833 - RNA, 19 nt, Artificial Sequence
  Description of Artificial Sequence: Synthetic oligonucleotide
  Antisense strand to SEQ ID NO: 1906832
auccacaauggcauauugu

SEQ ID NO: 1906834 - RNA, 19 nt, Artificial Sequence
  Description of Artificial Sequence: Synthetic oligonucleotide
  Sense strand starting at position 898 of SEQ ID NO: 1879434
uuguaucuggugcaauaau

SEQ ID NO: 1906835 - RNA, 19 nt, Artificial Sequence
  Description of Artificial Sequence: Synthetic oligonucleotide
  Antisense strand to SEQ ID NO: 1906834
auuauugcaccagauacaa

SEQ ID NO: 1906836 - RNA, 19 nt, Artificial Sequence
  Description of Artificial Sequence: Synthetic oligonucleotide
  Sense strand starting at position 957 of SEQ ID NO: 1879434
uuaauauaccugcgaaaug

SEQ ID NO: 1906837 - RNA, 19 nt, Artificial Sequence
  Description of Artificial Sequence: Synthetic oligonucleotide
  Antisense strand to SEQ ID NO: 1906836
cauuucgcagguauauuaa

SEQ ID NO: 1906838 - RNA, 19 nt, Artificial Sequence
  Description of Artificial Sequence: Synthetic oligonucleotide
  Sense strand starting at position 962 of SEQ ID NO: 1879434
auaccugcgaaaugugaaa

SEQ ID NO: 1906839 - RNA, 19 nt, Artificial Sequence
  Description of Artificial Sequence: Synthetic oligonucleotide
  Antisense strand to SEQ ID NO: 1906838
uuucacauuucgcagguau

SEQ ID NO: 1906840 - RNA, 19 nt, Artificial Sequence
  Description of Artificial Sequence: Synthetic oligonucleotide
  Sense strand starting at position 1304 of SEQ ID NO: 1879434
cccagcucgugauuuacau

SEQ ID NO: 1906841 - RNA, 19 nt, Artificial Sequence
  Description of Artificial Sequence: Synthetic oligonucleotide
  Antisense strand to SEQ ID NO: 1906840
auguaaaucacgagcuggg

SEQ ID NO: 1906842 - RNA, 19 nt, Artificial Sequence
  Description of Artificial Sequence: Synthetic oligonucleotide
  Sense strand starting at position 1520 of SEQ ID NO: 1879434
gagagugaggcggauaauu

SEQ ID NO: 1906843 - RNA, 19 nt, Artificial Sequence
  Description of Artificial Sequence: Synthetic oligonucleotide
  Antisense strand to SEQ ID NO: 1906842
aauuauccgccucacucuc

SEQ ID NO: 1906844 - RNA, 19 nt, Artificial Sequence
  Description of Artificial Sequence: Synthetic oligonucleotide
  Sense strand starting at position 1522 of SEQ ID NO: 1879434
gagugaggcggauaauucu

SEQ ID NO: 1906845 - RNA, 19 nt, Artificial Sequence
  Description of Artificial Sequence: Synthetic oligonucleotide
  Antisense strand to SEQ ID NO: 1906844
agaauuauccgccucacuc

SEQ ID NO: 1906846 - RNA, 19 nt, Artificial Sequence
  Description of Artificial Sequence: Synthetic oligonucleotide
  Sense strand starting at position 1662 of SEQ ID NO: 1879434
uaaggagaguacuccgagu

SEQ ID NO: 1906847 - RNA, 19 nt, Artificial Sequence
  Description of Artificial Sequence: Synthetic oligonucleotide
  Antisense strand to SEQ ID NO: 1906846
acucggaguacucuccuua

SEQ ID NO: 1906848 - RNA, 19 nt, Artificial Sequence
  Description of Artificial Sequence: Synthetic oligonucleotide
  Sense strand starting at position 1664 of SEQ ID NO: 1879434
aggagaguacuccgaguag

SEQ ID NO: 1906849 - RNA, 19 nt, Artificial Sequence
  Description of Artificial Sequence: Synthetic oligonucleotide
  Antisense strand to SEQ ID NO: 1906848
cuacucggaguacucuccu

SEQ ID NO: 1906850 - RNA, 19 nt, Artificial Sequence
  Description of Artificial Sequence: Synthetic oligonucleotide
  Sense strand starting at position 1753 of SEQ ID NO: 1879434
ggcaguucccuugggaaac

SEQ ID NO: 1906851 - RNA, 19 nt, Artificial Sequence
  Description of Artificial Sequence: Synthetic oligonucleotide
  Antisense strand to SEQ ID NO: 1906850
guuucccaagggaacugcc

SEQ ID NO: 1906852 - RNA, 19 nt, Artificial Sequence
  Description of Artificial Sequence: Synthetic oligonucleotide
  Sense strand starting at position 1910 of SEQ ID NO: 1879434
gcuaaucuuaccgaucgau

SEQ ID NO: 1906853 - RNA, 19 nt, Artificial Sequence
  Description of Artificial Sequence: Synthetic oligonucleotide
  Antisense strand to SEQ ID NO: 1906852
aucgaucgguaagauuagc

SEQ ID NO: 1906854 - RNA, 19 nt, Artificial Sequence
  Description of Artificial Sequence: Synthetic oligonucleotide
  Sense strand starting at position 2013 of SEQ ID NO: 1879434
ucaguuacugcaggaauca

SEQ ID NO: 1906855 - RNA, 19 nt, Artificial Sequence
  Description of Artificial Sequence: Synthetic oligonucleotide
  Antisense strand to SEQ ID NO: 1906854
ugauuccugcaguaacuga

SEQ ID NO: 1906856 - RNA, 19 nt, Artificial Sequence
  Description of Artificial Sequence: Synthetic oligonucleotide
  Sense strand starting at position 2368 of SEQ ID NO: 1879434
ugauuuggucaucguaaug

SEQ ID NO: 1906857 - RNA, 19 nt, Artificial Sequence
  Description of Artificial Sequence: Synthetic oligonucleotide
  Antisense strand to SEQ ID NO: 1906856
cauuacgaugaccaaauca

SEQ ID NO: 1906858 - RNA, 19 nt, Artificial Sequence
  Description of Artificial Sequence: Synthetic oligonucleotide
  Sense strand starting at position 2494 of SEQ ID NO: 1879434
agugaaaugcacugaugga

SEQ ID NO: 1906859 - RNA, 19 nt, Artificial Sequence
  Description of Artificial Sequence: Synthetic oligonucleotide
  Antisense strand to SEQ ID NO: 1906858
uccaucagugcauuucacu

SEQ ID NO: 1906860 - RNA, 19 nt, Artificial Sequence
  Description of Artificial Sequence: Synthetic oligonucleotide
  Sense strand starting at position 2608 of SEQ ID NO: 1879434
cuugaauucucauuggauc

SEQ ID NO: 1906861 - RNA, 19 nt, Artificial Sequence
  Description of Artificial Sequence: Synthetic oligonucleotide
  Antisense strand to SEQ ID NO: 1906860
gauccaaugagaauucaag

SEQ ID NO: 1906862 - RNA, 19 nt, Artificial Sequence
  Description of Artificial Sequence: Synthetic oligonucleotide
  Sense strand starting at position 2737 of SEQ ID NO: 1879434
uuugcagauuuaucuguau

SEQ ID NO: 1906863 - RNA, 19 nt, Artificial Sequence
  Description of Artificial Sequence: Synthetic oligonucleotide
  Antisense strand to SEQ ID NO: 1906862
auacagauaaaucugcaaa

SEQ ID NO: 1906864 - RNA, 19 nt, Artificial Sequence
  Description of Artificial Sequence: Synthetic oligonucleotide
  Sense strand starting at position 2811 of SEQ ID NO: 1879434
augugcagccuguaaauuu

SEQ ID NO: 1906865 - RNA, 19 nt, Artificial Sequence
  Description of Artificial Sequence: Synthetic oligonucleotide
  Antisense strand to SEQ ID NO: 1906864
aaauuuacaggcugcacau

SEQ ID NO: 1906866 - RNA, 19 nt, Artificial Sequence
  Description of Artificial Sequence: Synthetic oligonucleotide
  Sense strand starting at position 2837 of SEQ ID NO: 1879434
gcuuaaggaucaccacgaa

SEQ ID NO: 1906867 - RNA, 19 nt, Artificial Sequence
  Description of Artificial Sequence: Synthetic oligonucleotide
  Antisense strand to SEQ ID NO: 1906866
uucguggugauccuuaagc

SEQ ID NO: 1906868 - RNA, 19 nt, Artificial Sequence
  Description of Artificial Sequence: Synthetic oligonucleotide
  Sense strand starting at position 2967 of SEQ ID NO: 1879434
ccaggaacugcugauuauu

SEQ ID NO: 1906869 - RNA, 19 nt, Artificial Sequence
  Description of Artificial Sequence: Synthetic oligonucleotide
  Antisense strand to SEQ ID NO: 1906868
aauaaucagcaguuccugg

SEQ ID NO: 1906870 - RNA, 19 nt, Artificial Sequence
  Description of Artificial Sequence: Synthetic oligonucleotide
  Sense strand starting at position 3017 of SEQ ID NO: 1879434
uuaccuugauuuggaagau

SEQ ID NO: 1906871 - RNA, 19 nt, Artificial Sequence
  Description of Artificial Sequence: Synthetic oligonucleotide
  Antisense strand to SEQ ID NO: 1906870
aucuuccaaaucaagguaa

SEQ ID NO: 1906872 - RNA, 19 nt, Artificial Sequence
  Description of Artificial Sequence: Synthetic oligonucleotide
  Sense strand starting at position 3108 of SEQ ID NO: 1879434
aguuauucucuuuaucugu

SEQ ID NO: 1906873 - RNA, 19 nt, Artificial Sequence
  Description of Artificial Sequence: Synthetic oligonucleotide
  Antisense strand to SEQ ID NO: 1906872
acagauaaagagaauaacu

SEQ ID NO: 1906874 - RNA, 19 nt, Artificial Sequence
  Description of Artificial Sequence: Synthetic oligonucleotide
  Sense strand starting at position 3216 of SEQ ID NO: 1879434
agauccauauggccauauu

SEQ ID NO: 1906875 - RNA, 19 nt, Artificial Sequence
  Description of Artificial Sequence: Synthetic oligonucleotide
  Antisense strand to SEQ ID NO: 1906874
aauauggccauauggaucu

SEQ ID NO: 1906876 - RNA, 19 nt, Artificial Sequence
  Description of Artificial Sequence: Synthetic oligonucleotide
  Sense strand starting at position 3226 of SEQ ID NO: 1879434
ggccauauuuauuaauuag

SEQ ID NO: 1906877 - RNA, 19 nt, Artificial Sequence
  Description of Artificial Sequence: Synthetic oligonucleotide
  Antisense strand to SEQ ID NO: 1906876
cuaauuaauaaauauggcc

SEQ ID NO: 1906878 - RNA, 19 nt, Artificial Sequence
  Description of Artificial Sequence: Synthetic oligonucleotide
  Sense strand starting at position 3417 of SEQ ID NO: 1879434
acacauuccugugccauuu

SEQ ID NO: 1906879 - RNA, 19 nt, Artificial Sequence
  Description of Artificial Sequence: Synthetic oligonucleotide
  Antisense strand to SEQ ID NO: 1906878
aaauggcacaggaaugugu

SEQ ID NO: 1906880 - RNA, 19 nt, Artificial Sequence
  Description of Artificial Sequence: Synthetic oligonucleotide
  Sense strand starting at position 3494 of SEQ ID NO: 1879434
uugcaaggucuggaaaguu

SEQ ID NO: 1906881 - RNA, 19 nt, Artificial Sequence
  Description of Artificial Sequence: Synthetic oligonucleotide
  Antisense strand to SEQ ID NO: 1906880
aacuuuccagaccuugcaa

SEQ ID NO: 1906882 - RNA, 19 nt, Artificial Sequence
  Description of Artificial Sequence: Synthetic oligonucleotide
  Sense strand starting at position 3521 of SEQ ID NO: 1879434
ggauauucagaagguuguu

SEQ ID NO: 1906883 - RNA, 19 nt, Artificial Sequence
  Description of Artificial Sequence: Synthetic oligonucleotide
  Antisense strand to SEQ ID NO: 1906882
aacaaccuucugaauaucc

SEQ ID NO: 1906884 - RNA, 19 nt, Artificial Sequence
  Description of Artificial Sequence: Synthetic oligonucleotide
  Sense strand starting at position 3578 of SEQ ID NO: 1879434
gaaggaagacuuuguugca

SEQ ID NO: 1906885 - RNA, 19 nt, Artificial Sequence
  Description of Artificial Sequence: Synthetic oligonucleotide
  Antisense strand to SEQ ID NO: 1906884
ugcaacaaagucuuccuuc

SEQ ID NO: 1906886 - RNA, 19 nt, Artificial Sequence
  Description of Artificial Sequence: Synthetic oligonucleotide
  Sense strand starting at position 3579 of SEQ ID NO: 1879434
aaggaagacuuuguugcaa

SEQ ID NO: 1906887 - RNA, 19 nt, Artificial Sequence
  Description of Artificial Sequence: Synthetic oligonucleotide
  Antisense strand to SEQ ID NO: 1906886
uugcaacaaagucuuccuu

SEQ ID NO: 1906888 - RNA, 19 nt, Artificial Sequence
  Description of Artificial Sequence: Synthetic oligonucleotide
  Sense strand starting at position 3654 of SEQ ID NO: 1879434
ggaagaggacugugaguuu

SEQ ID NO: 1906889 - RNA, 19 nt, Artificial Sequence
  Description of Artificial Sequence: Synthetic oligonucleotide
  Antisense strand to SEQ ID NO: 1906888
aaacucacaguccucuucc

SEQ ID NO: 1906890 - RNA, 19 nt, Artificial Sequence
  Description of Artificial Sequence: Synthetic oligonucleotide
  Sense strand starting at position 3750 of SEQ ID NO: 1879434
aggcauaguauuugucagu

SEQ ID NO: 1906891 - RNA, 19 nt, Artificial Sequence
  Description of Artificial Sequence: Synthetic oligonucleotide
  Antisense strand to SEQ ID NO: 1906890
acugacaaauacuaugccu

SEQ ID NO: 1906892 - RNA, 19 nt, Artificial Sequence
  Description of Artificial Sequence: Synthetic oligonucleotide
  Sense strand starting at position 3751 of SEQ ID NO: 1879434
ggcauaguauuugucagua

SEQ ID NO: 1906893 - RNA, 19 nt, Artificial Sequence
  Description of Artificial Sequence: Synthetic oligonucleotide
  Antisense strand to SEQ ID NO: 1906892
uacugacaaauacuaugcc

SEQ ID NO: 1906894 - RNA, 19 nt, Artificial Sequence
  Description of Artificial Sequence: Synthetic oligonucleotide
  Sense strand starting at position 3785 of SEQ ID NO: 1879434
gaauuagcuggugaacagu

SEQ ID NO: 1906895 - RNA, 19 nt, Artificial Sequence
  Description of Artificial Sequence: Synthetic oligonucleotide
  Antisense strand to SEQ ID NO: 1906894
acuguucaccagcuaauuc

SEQ ID NO: 1906896 - RNA, 19 nt, Artificial Sequence
  Description of Artificial Sequence: Synthetic oligonucleotide
  Sense strand starting at position 3795 of SEQ ID NO: 1879434
gugaacaguuaauuggaca

SEQ ID NO: 1906897 - RNA, 19 nt, Artificial Sequence
  Description of Artificial Sequence: Synthetic oligonucleotide
  Antisense strand to SEQ ID NO: 1906896
uguccaauuaacuguucac

SEQ ID NO: 1906898 - RNA, 19 nt, Artificial Sequence
  Description of Artificial Sequence: Synthetic oligonucleotide
  Sense strand starting at position 3854 of SEQ ID NO: 1879434
cugauuaucuugguucuga

SEQ ID NO: 1906899 - RNA, 19 nt, Artificial Sequence
  Description of Artificial Sequence: Synthetic oligonucleotide
  Antisense strand to SEQ ID NO: 1906898
ucagaaccaagauaaucag

SEQ ID NO: 1906900 - RNA, 19 nt, Artificial Sequence
  Description of Artificial Sequence: Synthetic oligonucleotide
  Sense strand starting at position 3855 of SEQ ID NO: 1879434
ugauuaucuugguucugau

SEQ ID NO: 1906901 - RNA, 19 nt, Artificial Sequence
  Description of Artificial Sequence: Synthetic oligonucleotide
  Antisense strand to SEQ ID NO: 1906900
aucagaaccaagauaauca

SEQ ID NO: 1906902 - RNA, 19 nt, Artificial Sequence
  Description of Artificial Sequence: Synthetic oligonucleotide
  Sense strand starting at position 3951 of SEQ ID NO: 1879434
guguuuaauaggcauguua

SEQ ID NO: 1906903 - RNA, 19 nt, Artificial Sequence
  Description of Artificial Sequence: Synthetic oligonucleotide
  Antisense strand to SEQ ID NO: 1906902
uaacaugccuauuaaacac

SEQ ID NO: 1906904 - RNA, 19 nt, Artificial Sequence
  Description of Artificial Sequence: Synthetic oligonucleotide
  Sense strand starting at position 132 of SEQ ID NO: 1879435
cucuucucauuuguguuau

SEQ ID NO: 1906905 - RNA, 19 nt, Artificial Sequence
  Description of Artificial Sequence: Synthetic oligonucleotide
  Antisense strand to SEQ ID NO: 1906904
auaacacaaaugagaagag

SEQ ID NO: 1906906 - RNA, 19 nt, Artificial Sequence
  Description of Artificial Sequence: Synthetic oligonucleotide
  Sense strand starting at position 248 of SEQ ID NO: 1879435
guucuaagggcuuauagaa

SEQ ID NO: 1906907 - RNA, 19 nt, Artificial Sequence
  Description of Artificial Sequence: Synthetic oligonucleotide
  Antisense strand to SEQ ID NO: 1906906
uucuauaagcccuuagaac

SEQ ID NO: 1906908 - RNA, 19 nt, Artificial Sequence
  Description of Artificial Sequence: Synthetic oligonucleotide
  Sense strand starting at position 273 of SEQ ID NO: 1879435
ugucaaugaaugcaggauu

SEQ ID NO: 1906909 - RNA, 19 nt, Artificial Sequence
  Description of Artificial Sequence: Synthetic oligonucleotide
  Antisense strand to SEQ ID NO: 1906908
aauccugcauucauugaca

SEQ ID NO: 1906910 - RNA, 19 nt, Artificial Sequence
  Description of Artificial Sequence: Synthetic oligonucleotide
  Sense strand starting at position 337 of SEQ ID NO: 1879435
cuuuacugguaccugaauu

SEQ ID NO: 1906911 - RNA, 19 nt, Artificial Sequence
  Description of Artificial Sequence: Synthetic oligonucleotide
  Antisense strand to SEQ ID NO: 1906910
aauucagguaccaguaaag

SEQ ID NO: 1906912 - RNA, 19 nt, Artificial Sequence
  Description of Artificial Sequence: Synthetic oligonucleotide
  Sense strand starting at position 913 of SEQ ID NO: 1879435
uauaauaaacucugggagu

SEQ ID NO: 1906913 - RNA, 19 nt, Artificial Sequence
  Description of Artificial Sequence: Synthetic oligonucleotide
  Antisense strand to SEQ ID NO: 1906912
acucccagaguuuauuaua

SEQ ID NO: 1906914 - RNA, 19 nt, Artificial Sequence
  Description of Artificial Sequence: Synthetic oligonucleotide
  Sense strand starting at position 915 of SEQ ID NO: 1879435
uaauaaacucugggagugu

SEQ ID NO: 1906915 - RNA, 19 nt, Artificial Sequence
  Description of Artificial Sequence: Synthetic oligonucleotide
  Antisense strand to SEQ ID NO: 1906914
acacucccagaguuuauua

SEQ ID NO: 1906916 - RNA, 19 nt, Artificial Sequence
  Description of Artificial Sequence: Synthetic oligonucleotide
  Sense strand starting at position 924 of SEQ ID NO: 1879435
cugggaguguuuccuuaga

SEQ ID NO: 1906917 - RNA, 19 nt, Artificial Sequence
  Description of Artificial Sequence: Synthetic oligonucleotide
  Antisense strand to SEQ ID NO: 1906916
ucuaaggaaacacucccag

SEQ ID NO: 1906918 - RNA, 19 nt, Artificial Sequence
  Description of Artificial Sequence: Synthetic oligonucleotide
  Sense strand starting at position 1003 of SEQ ID NO: 1879435
acuuguaaauaggcaagua

SEQ ID NO: 1906919 - RNA, 19 nt, Artificial Sequence
  Description of Artificial Sequence: Synthetic oligonucleotide
  Antisense strand to SEQ ID NO: 1906918
uacuugccuauuuacaagu

SEQ ID NO: 1906920 - RNA, 19 nt, Artificial Sequence
  Description of Artificial Sequence: Synthetic oligonucleotide
  Sense strand starting at position 1083 of SEQ ID NO: 1879435
gugucuagucaagaaacuc

SEQ ID NO: 1906921 - RNA, 19 nt, Artificial Sequence
  Description of Artificial Sequence: Synthetic oligonucleotide
  Antisense strand to SEQ ID NO: 1906920
gaguuucuugacuagacac

SEQ ID NO: 1906922 - RNA, 19 nt, Artificial Sequence
  Description of Artificial Sequence: Synthetic oligonucleotide
  Sense strand starting at position 1139 of SEQ ID NO: 1879435
gggaguaggauugguuuga

SEQ ID NO: 1906923 - RNA, 19 nt, Artificial Sequence
  Description of Artificial Sequence: Synthetic oligonucleotide
  Antisense strand to SEQ ID NO: 1906922
ucaaaccaauccuacuccc

SEQ ID NO: 1906924 - RNA, 19 nt, Artificial Sequence
  Description of Artificial Sequence: Synthetic oligonucleotide
  Sense strand starting at position 1149 of SEQ ID NO: 1879435
uugguuugaggguaguaga

SEQ ID NO: 1906925 - RNA, 19 nt, Artificial Sequence
  Description of Artificial Sequence: Synthetic oligonucleotide
  Antisense strand to SEQ ID NO: 1906924
ucuacuacccucaaaccaa

SEQ ID NO: 1906926 - RNA, 19 nt, Artificial Sequence
  Description of Artificial Sequence: Synthetic oligonucleotide
  Sense strand starting at position 1202 of SEQ ID NO: 1879435
gauguaugaugguuaauau

SEQ ID NO: 1906927 - RNA, 19 nt, Artificial Sequence
  Description of Artificial Sequence: Synthetic oligonucleotide
  Antisense strand to SEQ ID NO: 1906926
auauuaaccaucauacauc

SEQ ID NO: 1906928 - RNA, 19 nt, Artificial Sequence
  Description of Artificial Sequence: Synthetic oligonucleotide
  Sense strand starting at position 1252 of SEQ ID NO: 1879435
aaacuauuguuccuggaug

SEQ ID NO: 1906929 - RNA, 19 nt, Artificial Sequence
  Description of Artificial Sequence: Synthetic oligonucleotide
  Antisense strand to SEQ ID NO: 1906928
cauccaggaacaauaguuu

SEQ ID NO: 1906930 - RNA, 19 nt, Artificial Sequence
  Description of Artificial Sequence: Synthetic oligonucleotide
  Sense strand starting at position 1281 of SEQ ID NO: 1879435
gguguugccaaagauauua

SEQ ID NO: 1906931 - RNA, 19 nt, Artificial Sequence
  Description of Artificial Sequence: Synthetic oligonucleotide
  Antisense strand to SEQ ID NO: 1906930
uaauaucuuuggcaacacc

SEQ ID NO: 1906932 - RNA, 19 nt, Artificial Sequence
  Description of Artificial Sequence: Synthetic oligonucleotide
  Sense strand starting at position 2019 of SEQ ID NO: 1879435
guaccagcucacuaaguau

SEQ ID NO: 1906933 - RNA, 19 nt, Artificial Sequence
  Description of Artificial Sequence: Synthetic oligonucleotide
  Antisense strand to SEQ ID NO: 1906932
auacuuagugagcugguac

SEQ ID NO: 1906934 - RNA, 19 nt, Artificial Sequence
  Description of Artificial Sequence: Synthetic oligonucleotide
  Sense strand starting at position 2195 of SEQ ID NO: 1879435
ugaggagugugccugaaga

SEQ ID NO: 1906935 - RNA, 19 nt, Artificial Sequence
  Description of Artificial Sequence: Synthetic oligonucleotide
  Antisense strand to SEQ ID NO: 1906934
ucuucaggcacacuccuca

SEQ ID NO: 1906936 - RNA, 19 nt, Artificial Sequence
  Description of Artificial Sequence: Synthetic oligonucleotide
  Sense strand starting at position 2197 of SEQ ID NO: 1879435
aggagugugccugaagagu

SEQ ID NO: 1906937 - RNA, 19 nt, Artificial Sequence
  Description of Artificial Sequence: Synthetic oligonucleotide
  Antisense strand to SEQ ID NO: 1906936
acucuucaggcacacuccu

SEQ ID NO: 1906938 - RNA, 19 nt, Artificial Sequence
  Description of Artificial Sequence: Synthetic oligonucleotide
  Sense strand starting at position 2210 of SEQ ID NO: 1879435
aagagucaggucuggcaga

SEQ ID NO: 1906939 - RNA, 19 nt, Artificial Sequence
  Description of Artificial Sequence: Synthetic oligonucleotide
  Antisense strand to SEQ ID NO: 1906938
ucugccagaccugacucuu

SEQ ID NO: 1906940 - RNA, 19 nt, Artificial Sequence
  Description of Artificial Sequence: Synthetic oligonucleotide
  Sense strand starting at position 2301 of SEQ ID NO: 1879435
aagugaaucccuuggguca

SEQ ID NO: 1906941 - RNA, 19 nt, Artificial Sequence
  Description of Artificial Sequence: Synthetic oligonucleotide
  Antisense strand to SEQ ID NO: 1906940
ugacccaagggauucacuu

SEQ ID NO: 1906942 - RNA, 19 nt, Artificial Sequence
  Description of Artificial Sequence: Synthetic oligonucleotide
  Sense strand starting at position 2302 of SEQ ID NO: 1879435
agugaaucccuugggucau

SEQ ID NO: 1906943 - RNA, 19 nt, Artificial Sequence
  Description of Artificial Sequence: Synthetic oligonucleotide
  Antisense strand to SEQ ID NO: 1906942
augacccaagggauucacu

SEQ ID NO: 1906944 - RNA, 19 nt, Artificial Sequence
  Description of Artificial Sequence: Synthetic oligonucleotide
  Sense strand starting at position 2314 of SEQ ID NO: 1879435
gggucauucccuugauuau

SEQ ID NO: 1906945 - RNA, 19 nt, Artificial Sequence
  Description of Artificial Sequence: Synthetic oligonucleotide
  Antisense strand to SEQ ID NO: 1906944
auaaucaagggaaugaccc

SEQ ID NO: 1906946 - RNA, 19 nt, Artificial Sequence
  Description of Artificial Sequence: Synthetic oligonucleotide
  Sense strand starting at position 2315 of SEQ ID NO: 1879435
ggucauucccuugauuauu

SEQ ID NO: 1906947 - RNA, 19 nt, Artificial Sequence
  Description of Artificial Sequence: Synthetic oligonucleotide
  Antisense strand to SEQ ID NO: 1906946
aauaaucaagggaaugacc

SEQ ID NO: 1906948 - RNA, 19 nt, Artificial Sequence
  Description of Artificial Sequence: Synthetic oligonucleotide
  Sense strand starting at position 2320 of SEQ ID NO: 1879435
uucccuugauuauugugaa

SEQ ID NO: 1906949 - RNA, 19 nt, Artificial Sequence
  Description of Artificial Sequence: Synthetic oligonucleotide
  Antisense strand to SEQ ID NO: 1906948
uucacaauaaucaagggaa

SEQ ID NO: 1906950 - RNA, 19 nt, Artificial Sequence
  Description of Artificial Sequence: Synthetic oligonucleotide
  Sense strand starting at position 2350 of SEQ ID NO: 1879435
gcaggacagaaaugucaca

SEQ ID NO: 1906951 - RNA, 19 nt, Artificial Sequence
  Description of Artificial Sequence: Synthetic oligonucleotide
  Antisense strand to SEQ ID NO: 1906950
ugugacauuucuguccugc

SEQ ID NO: 1906952 - RNA, 19 nt, Artificial Sequence
  Description of Artificial Sequence: Synthetic oligonucleotide
  Sense strand starting at position 2424 of SEQ ID NO: 1879435
aaggacaagugcucagaau

SEQ ID NO: 1906953 - RNA, 19 nt, Artificial Sequence
  Description of Artificial Sequence: Synthetic oligonucleotide
  Antisense strand to SEQ ID NO: 1906952
auucugagcacuuguccuu

SEQ ID NO: 1906954 - RNA, 19 nt, Artificial Sequence
  Description of Artificial Sequence: Synthetic oligonucleotide
  Sense strand starting at position 2435 of SEQ ID NO: 1879435
cucagaauugcaugacuug

SEQ ID NO: 1906955 - RNA, 19 nt, Artificial Sequence
  Description of Artificial Sequence: Synthetic oligonucleotide
  Antisense strand to SEQ ID NO: 1906954
caagucaugcaauucugag

SEQ ID NO: 1906956 - RNA, 19 nt, Artificial Sequence
  Description of Artificial Sequence: Synthetic oligonucleotide
  Sense strand starting at position 2467 of SEQ ID NO: 1879435
cuauucugucuuggauaau

SEQ ID NO: 1906957 - RNA, 19 nt, Artificial Sequence
  Description of Artificial Sequence: Synthetic oligonucleotide
  Antisense strand to SEQ ID NO: 1906956
auuauccaagacagaauag

SEQ ID NO: 1906958 - RNA, 19 nt, Artificial Sequence
  Description of Artificial Sequence: Synthetic oligonucleotide
  Sense strand starting at position 2470 of SEQ ID NO: 1879435
uucugucuuggauaauuac

SEQ ID NO: 1906959 - RNA, 19 nt, Artificial Sequence
  Description of Artificial Sequence: Synthetic oligonucleotide
  Antisense strand to SEQ ID NO: 1906958
guaauuauccaagacagaa

SEQ ID NO: 1906960 - RNA, 19 nt, Artificial Sequence
  Description of Artificial Sequence: Synthetic oligonucleotide
  Sense strand starting at position 2527 of SEQ ID NO: 1879435
uuaauucucccgcaaagau

SEQ ID NO: 1906961 - RNA, 19 nt, Artificial Sequence
  Description of Artificial Sequence: Synthetic oligonucleotide
  Antisense strand to SEQ ID NO: 1906960
aucuuugcgggagaauuaa

SEQ ID NO: 1906962 - RNA, 19 nt, Artificial Sequence
  Description of Artificial Sequence: Synthetic oligonucleotide
  Sense strand starting at position 2536 of SEQ ID NO: 1879435
ccgcaaagauucucuuaag

SEQ ID NO: 1906963 - RNA, 19 nt, Artificial Sequence
  Description of Artificial Sequence: Synthetic oligonucleotide
  Antisense strand to SEQ ID NO: 1906962
cuuaagagaaucuuugcgg

SEQ ID NO: 1906964 - RNA, 19 nt, Artificial Sequence
  Description of Artificial Sequence: Synthetic oligonucleotide
  Sense strand starting at position 2575 of SEQ ID NO: 1879435
acuggaguucuuugaguua

SEQ ID NO: 1906965 - RNA, 19 nt, Artificial Sequence
  Description of Artificial Sequence: Synthetic oligonucleotide
  Antisense strand to SEQ ID NO: 1906964
uaacucaaagaacuccagu

SEQ ID NO: 1906966 - RNA, 19 nt, Artificial Sequence
  Description of Artificial Sequence: Synthetic oligonucleotide
  Sense strand starting at position 2730 of SEQ ID NO: 1879435
agguauuagcaccaucuua

SEQ ID NO: 1906967 - RNA, 19 nt, Artificial Sequence
  Description of Artificial Sequence: Synthetic oligonucleotide
  Antisense strand to SEQ ID NO: 1906966
uaagauggugcuaauaccu

SEQ ID NO: 1906968 - RNA, 19 nt, Artificial Sequence
  Description of Artificial Sequence: Synthetic oligonucleotide
  Sense strand starting at position 2878 of SEQ ID NO: 1879435
gcucaugagguccaaaguu

SEQ ID NO: 1906969 - RNA, 19 nt, Artificial Sequence
  Description of Artificial Sequence: Synthetic oligonucleotide
  Antisense strand to SEQ ID NO: 1906968
aacuuuggaccucaugagc

SEQ ID NO: 1906970 - RNA, 19 nt, Artificial Sequence
  Description of Artificial Sequence: Synthetic oligonucleotide
  Sense strand starting at position 2922 of SEQ ID NO: 1879435
uguuguaaccuggagcauu

SEQ ID NO: 1906971 - RNA, 19 nt, Artificial Sequence
  Description of Artificial Sequence: Synthetic oligonucleotide
  Antisense strand to SEQ ID NO: 1906970
aaugcuccagguuacaaca

SEQ ID NO: 1906972 - RNA, 19 nt, Artificial Sequence
  Description of Artificial Sequence: Synthetic oligonucleotide
  Sense strand starting at position 3139 of SEQ ID NO: 1879435
gggcguguagccuuguaca

SEQ ID NO: 1906973 - RNA, 19 nt, Artificial Sequence
  Description of Artificial Sequence: Synthetic oligonucleotide
  Antisense strand to SEQ ID NO: 1906972
uguacaaggcuacacgccc

SEQ ID NO: 1906974 - RNA, 19 nt, Artificial Sequence
  Description of Artificial Sequence: Synthetic oligonucleotide
  Sense strand starting at position 3141 of SEQ ID NO: 1879435
gcguguagccuuguacacu

SEQ ID NO: 1906975 - RNA, 19 nt, Artificial Sequence
  Description of Artificial Sequence: Synthetic oligonucleotide
  Antisense strand to SEQ ID NO: 1906974
aguguacaaggcuacacgc

SEQ ID NO: 1906976 - RNA, 19 nt, Artificial Sequence
  Description of Artificial Sequence: Synthetic oligonucleotide
  Sense strand starting at position 3714 of SEQ ID NO: 1879435
ggaagaaucuuaguuucuc

SEQ ID NO: 1906977 - RNA, 19 nt, Artificial Sequence
  Description of Artificial Sequence: Synthetic oligonucleotide
  Antisense strand to SEQ ID NO: 1906976
gagaaacuaagauucuucc

SEQ ID NO: 1906978 - RNA, 19 nt, Artificial Sequence
  Description of Artificial Sequence: Synthetic oligonucleotide
  Sense strand starting at position 3733 of SEQ ID NO: 1879435
ccaagaaugugacucucuu

SEQ ID NO: 1906979 - RNA, 19 nt, Artificial Sequence
  Description of Artificial Sequence: Synthetic oligonucleotide
  Antisense strand to SEQ ID NO: 1906978
aagagagucacauucuugg

SEQ ID NO: 1906980 - RNA, 19 nt, Artificial Sequence
  Description of Artificial Sequence: Synthetic oligonucleotide
  Sense strand starting at position 3737 of SEQ ID NO: 1879435
gaaugugacucucuuuaag

SEQ ID NO: 1906981 - RNA, 19 nt, Artificial Sequence
  Description of Artificial Sequence: Synthetic oligonucleotide
  Antisense strand to SEQ ID NO: 1906980
cuuaaagagagucacauuc

SEQ ID NO: 1906982 - RNA, 19 nt, Artificial Sequence
  Description of Artificial Sequence: Synthetic oligonucleotide
  Sense strand starting at position 3755 of SEQ ID NO: 1879435
gugucuuaccuacacucaa

SEQ ID NO: 1906983 - RNA, 19 nt, Artificial Sequence
  Description of Artificial Sequence: Synthetic oligonucleotide
  Antisense strand to SEQ ID NO: 1906982
uugaguguagguaagacac

SEQ ID NO: 1906984 - RNA, 19 nt, Artificial Sequence
  Description of Artificial Sequence: Synthetic oligonucleotide
  Sense strand starting at position 259 of SEQ ID NO: 1879436
gucugaaacuucuugagcu

SEQ ID NO: 1906985 - RNA, 19 nt, Artificial Sequence
  Description of Artificial Sequence: Synthetic oligonucleotide
  Antisense strand to SEQ ID NO: 1906984
agcucaagaaguuucagac

SEQ ID NO: 1906986 - RNA, 19 nt, Artificial Sequence
  Description of Artificial Sequence: Synthetic oligonucleotide
  Sense strand starting at position 261 of SEQ ID NO: 1879436
cugaaacuucuugagcuca

SEQ ID NO: 1906987 - RNA, 19 nt, Artificial Sequence
  Description of Artificial Sequence: Synthetic oligonucleotide
  Antisense strand to SEQ ID NO: 1906986
ugagcucaagaaguuucag

SEQ ID NO: 1906988 - RNA, 19 nt, Artificial Sequence
  Description of Artificial Sequence: Synthetic oligonucleotide
  Sense strand starting at position 657 of SEQ ID NO: 1879436
aagugcaaugaguguggaa

SEQ ID NO: 1906989 - RNA, 19 nt, Artificial Sequence
  Description of Artificial Sequence: Synthetic oligonucleotide
  Antisense strand to SEQ ID NO: 1906988
uuccacacucauugcacuu

SEQ ID NO: 1906990 - RNA, 19 nt, Artificial Sequence
  Description of Artificial Sequence: Synthetic oligonucleotide
  Sense strand starting at position 763 of SEQ ID NO: 1879436
ggagaauacuuucuggcug

SEQ ID NO: 1906991 - RNA, 19 nt, Artificial Sequence
  Description of Artificial Sequence: Synthetic oligonucleotide
  Antisense strand to SEQ ID NO: 1906990
cagccagaaaguauucucc

SEQ ID NO: 1906992 - RNA, 19 nt, Artificial Sequence
  Description of Artificial Sequence: Synthetic oligonucleotide
  Sense strand starting at position 806 of SEQ ID NO: 1879436
agaauaaacguuugugaaa

SEQ ID NO: 1906993 - RNA, 19 nt, Artificial Sequence
  Description of Artificial Sequence: Synthetic oligonucleotide
  Antisense strand to SEQ ID NO: 1906992
uuucacaaacguuuauucu

SEQ ID NO: 1906994 - RNA, 19 nt, Artificial Sequence
  Description of Artificial Sequence: Synthetic oligonucleotide
  Sense strand starting at position 1449 of SEQ ID NO: 1879436
aagggaaguccuuggguaa

SEQ ID NO: 1906995 - RNA, 19 nt, Artificial Sequence
  Description of Artificial Sequence: Synthetic oligonucleotide
  Antisense strand to SEQ ID NO: 1906994
uuacccaaggacuucccuu

SEQ ID NO: 1906996 - RNA, 19 nt, Artificial Sequence
  Description of Artificial Sequence: Synthetic oligonucleotide
  Sense strand starting at position 1452 of SEQ ID NO: 1879436
ggaaguccuuggguaacaa

SEQ ID NO: 1906997 - RNA, 19 nt, Artificial Sequence
  Description of Artificial Sequence: Synthetic oligonucleotide
  Antisense strand to SEQ ID NO: 1906996
uuguuacccaaggacuucc

SEQ ID NO: 1906998 - RNA, 19 nt, Artificial Sequence
  Description of Artificial Sequence: Synthetic oligonucleotide
  Sense strand starting at position 1556 of SEQ ID NO: 1879436
ugcugagcucauggaaaca

SEQ ID NO: 1906999 - RNA, 19 nt, Artificial Sequence
  Description of Artificial Sequence: Synthetic oligonucleotide
  Antisense strand to SEQ ID NO: 1906998
uguuuccaugagcucagca

SEQ ID NO: 1907000 - RNA, 19 nt, Artificial Sequence
  Description of Artificial Sequence: Synthetic oligonucleotide
  Sense strand starting at position 1587 of SEQ ID NO: 1879436
ccucucauugauugguuua

SEQ ID NO: 1907001 - RNA, 19 nt, Artificial Sequence
  Description of Artificial Sequence: Synthetic oligonucleotide
  Antisense strand to SEQ ID NO: 1907000
uaaaccaaucaaugagagg

SEQ ID NO: 1907002 - RNA, 19 nt, Artificial Sequence
  Description of Artificial Sequence: Synthetic oligonucleotide
  Sense strand starting at position 1589 of SEQ ID NO: 1879436
ucucauugauugguuuaaa

SEQ ID NO: 1907003 - RNA, 19 nt, Artificial Sequence
  Description of Artificial Sequence: Synthetic oligonucleotide
  Antisense strand to SEQ ID NO: 1907002
uuuaaaccaaucaaugaga

SEQ ID NO: 1907004 - RNA, 19 nt, Artificial Sequence
  Description of Artificial Sequence: Synthetic oligonucleotide
  Sense strand starting at position 2030 of SEQ ID NO: 1879436
gugugaaguccugacuucu

SEQ ID NO: 1907005 - RNA, 19 nt, Artificial Sequence
  Description of Artificial Sequence: Synthetic oligonucleotide
  Antisense strand to SEQ ID NO: 1907004
agaagucaggacuucacac

SEQ ID NO: 1907006 - RNA, 19 nt, Artificial Sequence
  Description of Artificial Sequence: Synthetic oligonucleotide
  Sense strand starting at position 2036 of SEQ ID NO: 1879436
aguccugacuucucagcua

SEQ ID NO: 1907007 - RNA, 19 nt, Artificial Sequence
  Description of Artificial Sequence: Synthetic oligonucleotide
  Antisense strand to SEQ ID NO: 1907006
uagcugagaagucaggacu

SEQ ID NO: 1907008 - RNA, 19 nt, Artificial Sequence
  Description of Artificial Sequence: Synthetic oligonucleotide
  Sense strand starting at position 2065 of SEQ ID NO: 1879436
ccucuaagccucgauguuu

SEQ ID NO: 1907009 - RNA, 19 nt, Artificial Sequence
  Description of Artificial Sequence: Synthetic oligonucleotide
  Antisense strand to SEQ ID NO: 1907008
aaacaucgaggcuuagagg

SEQ ID NO: 1907010 - RNA, 19 nt, Artificial Sequence
  Description of Artificial Sequence: Synthetic oligonucleotide
  Sense strand starting at position 2101 of SEQ ID NO: 1879436
guggcaaacugcuuauaga

SEQ ID NO: 1907011 - RNA, 19 nt, Artificial Sequence
  Description of Artificial Sequence: Synthetic oligonucleotide
  Antisense strand to SEQ ID NO: 1907010
ucuauaagcaguuugccac

SEQ ID NO: 1907012 - RNA, 19 nt, Artificial Sequence
  Description of Artificial Sequence: Synthetic oligonucleotide
  Sense strand starting at position 2102 of SEQ ID NO: 1879436
uggcaaacugcuuauagag

SEQ ID NO: 1907013 - RNA, 19 nt, Artificial Sequence
  Description of Artificial Sequence: Synthetic oligonucleotide
  Antisense strand to SEQ ID NO: 1907012
cucuauaagcaguuugcca

SEQ ID NO: 1907014 - RNA, 19 nt, Artificial Sequence
  Description of Artificial Sequence: Synthetic oligonucleotide
  Sense strand starting at position 2133 of SEQ ID NO: 1879436
ucaaacgagauaugguuau

SEQ ID NO: 1907015 - RNA, 19 nt, Artificial Sequence
  Description of Artificial Sequence: Synthetic oligonucleotide
  Antisense strand to SEQ ID NO: 1907014
auaaccauaucucguuuga

SEQ ID NO: 1907016 - RNA, 19 nt, Artificial Sequence
  Description of Artificial Sequence: Synthetic oligonucleotide
  Sense strand starting at position 2180 of SEQ ID NO: 1879436
ggacacacgaguugcuauu

SEQ ID NO: 1907017 - RNA, 19 nt, Artificial Sequence
  Description of Artificial Sequence: Synthetic oligonucleotide
  Antisense strand to SEQ ID NO: 1907016
aauagcaacucgugugucc

SEQ ID NO: 1907018 - RNA, 19 nt, Artificial Sequence
  Description of Artificial Sequence: Synthetic oligonucleotide
  Sense strand starting at position 2235 of SEQ ID NO: 1879436
agcugcaaucucuacaagu

SEQ ID NO: 1907019 - RNA, 19 nt, Artificial Sequence
  Description of Artificial Sequence: Synthetic oligonucleotide
  Antisense strand to SEQ ID NO: 1907018
acuuguagagauugcagcu

SEQ ID NO: 1907020 - RNA, 19 nt, Artificial Sequence
  Description of Artificial Sequence: Synthetic oligonucleotide
  Sense strand starting at position 2329 of SEQ ID NO: 1879436
gggcuuacuuacucaaccu

SEQ ID NO: 1907021 - RNA, 19 nt, Artificial Sequence
  Description of Artificial Sequence: Synthetic oligonucleotide
  Antisense strand to SEQ ID NO: 1907020
agguugaguaaguaagccc

SEQ ID NO: 1907022 - RNA, 19 nt, Artificial Sequence
  Description of Artificial Sequence: Synthetic oligonucleotide
  Sense strand starting at position 2370 of SEQ ID NO: 1879436
uugcuuaagagguguggaa

SEQ ID NO: 1907023 - RNA, 19 nt, Artificial Sequence
  Description of Artificial Sequence: Synthetic oligonucleotide
  Antisense strand to SEQ ID NO: 1907022
uuccacaccucuuaagcaa

SEQ ID NO: 1907024 - RNA, 19 nt, Artificial Sequence
  Description of Artificial Sequence: Synthetic oligonucleotide
  Sense strand starting at position 2372 of SEQ ID NO: 1879436
gcuuaagagguguggaaag

SEQ ID NO: 1907025 - RNA, 19 nt, Artificial Sequence
  Description of Artificial Sequence: Synthetic oligonucleotide
  Antisense strand to SEQ ID NO: 1907024
cuuuccacaccucuuaagc

SEQ ID NO: 1907026 - RNA, 19 nt, Artificial Sequence
  Description of Artificial Sequence: Synthetic oligonucleotide
  Sense strand starting at position 2374 of SEQ ID NO: 1879436
uuaagagguguggaaaguu

SEQ ID NO: 1907027 - RNA, 19 nt, Artificial Sequence
  Description of Artificial Sequence: Synthetic oligonucleotide
  Antisense strand to SEQ ID NO: 1907026
aacuuuccacaccucuuaa

SEQ ID NO: 1907028 - RNA, 19 nt, Artificial Sequence
  Description of Artificial Sequence: Synthetic oligonucleotide
  Sense strand starting at position 2383 of SEQ ID NO: 1879436
guggaaaguuuccuccagu

SEQ ID NO: 1907029 - RNA, 19 nt, Artificial Sequence
  Description of Artificial Sequence: Synthetic oligonucleotide
  Antisense strand to SEQ ID NO: 1907028
acuggaggaaacuuuccac

SEQ ID NO: 1907030 - RNA, 19 nt, Artificial Sequence
  Description of Artificial Sequence: Synthetic oligonucleotide
  Sense strand starting at position 2384 of SEQ ID NO: 1879436
uggaaaguuuccuccaguu

SEQ ID NO: 1907031 - RNA, 19 nt, Artificial Sequence
  Description of Artificial Sequence: Synthetic oligonucleotide
  Antisense strand to SEQ ID NO: 1907030
aacuggaggaaacuuucca

SEQ ID NO: 1907032 - RNA, 19 nt, Artificial Sequence
  Description of Artificial Sequence: Synthetic oligonucleotide
  Sense strand starting at position 2629 of SEQ ID NO: 1879436
aucacucucuggcuauaga

SEQ ID NO: 1907033 - RNA, 19 nt, Artificial Sequence
  Description of Artificial Sequence: Synthetic oligonucleotide
  Antisense strand to SEQ ID NO: 1907032
ucuauagccagagagugau

SEQ ID NO: 1907034 - RNA, 19 nt, Artificial Sequence
  Description of Artificial Sequence: Synthetic oligonucleotide
  Sense strand starting at position 2783 of SEQ ID NO: 1879436
gaggaagauuugcagagaa

SEQ ID NO: 1907035 - RNA, 19 nt, Artificial Sequence
  Description of Artificial Sequence: Synthetic oligonucleotide
  Antisense strand to SEQ ID NO: 1907034
uucucugcaaaucuuccuc

SEQ ID NO: 1907036 - RNA, 19 nt, Artificial Sequence
  Description of Artificial Sequence: Synthetic oligonucleotide
  Sense strand starting at position 2803 of SEQ ID NO: 1879436
gagugugacagucauaagu

SEQ ID NO: 1907037 - RNA, 19 nt, Artificial Sequence
  Description of Artificial Sequence: Synthetic oligonucleotide
  Antisense strand to SEQ ID NO: 1907036
acuuaugacugucacacuc

SEQ ID NO: 1907038 - RNA, 19 nt, Artificial Sequence
  Description of Artificial Sequence: Synthetic oligonucleotide
  Sense strand starting at position 2988 of SEQ ID NO: 1879436
cugggagguccuggccaaa

SEQ ID NO: 1907039 - RNA, 19 nt, Artificial Sequence
  Description of Artificial Sequence: Synthetic oligonucleotide
  Antisense strand to SEQ ID NO: 1907038
uuuggccaggaccucccag

SEQ ID NO: 1907040 - RNA, 19 nt, Artificial Sequence
  Description of Artificial Sequence: Synthetic oligonucleotide
  Sense strand starting at position 3046 of SEQ ID NO: 1879436
gauccaggguagcuuuauu

SEQ ID NO: 1907041 - RNA, 19 nt, Artificial Sequence
  Description of Artificial Sequence: Synthetic oligonucleotide
  Antisense strand to SEQ ID NO: 1907040
aauaaagcuacccuggauc

SEQ ID NO: 1907042 - RNA, 19 nt, Artificial Sequence
  Description of Artificial Sequence: Synthetic oligonucleotide
  Sense strand starting at position 3056 of SEQ ID NO: 1879436
agcuuuauuccugacuuag

SEQ ID NO: 1907043 - RNA, 19 nt, Artificial Sequence
  Description of Artificial Sequence: Synthetic oligonucleotide
  Antisense strand to SEQ ID NO: 1907042
cuaagucaggaauaaagcu

SEQ ID NO: 1907044 - RNA, 19 nt, Artificial Sequence
  Description of Artificial Sequence: Synthetic oligonucleotide
  Sense strand starting at position 3201 of SEQ ID NO: 1879436
ucaccagaguggucuucuu

SEQ ID NO: 1907045 - RNA, 19 nt, Artificial Sequence
  Description of Artificial Sequence: Synthetic oligonucleotide
  Antisense strand to SEQ ID NO: 1907044
aagaagaccacucugguga

SEQ ID NO: 1907046 - RNA, 19 nt, Artificial Sequence
  Description of Artificial Sequence: Synthetic oligonucleotide
  Sense strand starting at position 3310 of SEQ ID NO: 1879436
cuaauauucgcugugcuuc

SEQ ID NO: 1907047 - RNA, 19 nt, Artificial Sequence
  Description of Artificial Sequence: Synthetic oligonucleotide
  Antisense strand to SEQ ID NO: 1907046
gaagcacagcgaauauuag

SEQ ID NO: 1907048 - RNA, 19 nt, Artificial Sequence
  Description of Artificial Sequence: Synthetic oligonucleotide
  Sense strand starting at position 3411 of SEQ ID NO: 1879436
acacuuagggcucaguauu

SEQ ID NO: 1907049 - RNA, 19 nt, Artificial Sequence
  Description of Artificial Sequence: Synthetic oligonucleotide
  Antisense strand to SEQ ID NO: 1907048
aauacugagcccuaagugu

SEQ ID NO: 1907050 - RNA, 19 nt, Artificial Sequence
  Description of Artificial Sequence: Synthetic oligonucleotide
  Sense strand starting at position 3457 of SEQ ID NO: 1879436
gaggcuuccuaguuuaauu

SEQ ID NO: 1907051 - RNA, 19 nt, Artificial Sequence
  Description of Artificial Sequence: Synthetic oligonucleotide
  Antisense strand to SEQ ID NO: 1907050
aauuaaacuaggaagccuc

SEQ ID NO: 1907052 - RNA, 19 nt, Artificial Sequence
  Description of Artificial Sequence: Synthetic oligonucleotide
  Sense strand starting at position 3504 of SEQ ID NO: 1879436
cccugauuccgacaccuuu

SEQ ID NO: 1907053 - RNA, 19 nt, Artificial Sequence
  Description of Artificial Sequence: Synthetic oligonucleotide
  Antisense strand to SEQ ID NO: 1907052
aaaggugucggaaucaggg

SEQ ID NO: 1907054 - RNA, 19 nt, Artificial Sequence
  Description of Artificial Sequence: Synthetic oligonucleotide
  Sense strand starting at position 3653 of SEQ ID NO: 1879436
ggguaauaggcaugaucaa

SEQ ID NO: 1907055 - RNA, 19 nt, Artificial Sequence
  Description of Artificial Sequence: Synthetic oligonucleotide
  Antisense strand to SEQ ID NO: 1907054
uugaucaugccuauuaccc

SEQ ID NO: 1907056 - RNA, 19 nt, Artificial Sequence
  Description of Artificial Sequence: Synthetic oligonucleotide
  Sense strand starting at position 3755 of SEQ ID NO: 1879436
aguuccuuccuguggacua

SEQ ID NO: 1907057 - RNA, 19 nt, Artificial Sequence
  Description of Artificial Sequence: Synthetic oligonucleotide
  Antisense strand to SEQ ID NO: 1907056
uaguccacaggaaggaacu

SEQ ID NO: 1907058 - RNA, 19 nt, Artificial Sequence
  Description of Artificial Sequence: Synthetic oligonucleotide
  Sense strand starting at position 3757 of SEQ ID NO: 1879436
uuccuuccuguggacuaaa

SEQ ID NO: 1907059 - RNA, 19 nt, Artificial Sequence
  Description of Artificial Sequence: Synthetic oligonucleotide
  Antisense strand to SEQ ID NO: 1907058
uuuaguccacaggaaggaa

SEQ ID NO: 1907060 - RNA, 19 nt, Artificial Sequence
  Description of Artificial Sequence: Synthetic oligonucleotide
  Sense strand starting at position 3814 of SEQ ID NO: 1879436
agagccauuugggaguauu

SEQ ID NO: 1907061 - RNA, 19 nt, Artificial Sequence
  Description of Artificial Sequence: Synthetic oligonucleotide
  Antisense strand to SEQ ID NO: 1907060
aauacucccaaauggcucu

SEQ ID NO: 1907062 - RNA, 19 nt, Artificial Sequence
  Description of Artificial Sequence: Synthetic oligonucleotide
  Sense strand starting at position 3882 of SEQ ID NO: 1879436
caaggugucccugacuuga

SEQ ID NO: 1907063 - RNA, 19 nt, Artificial Sequence
  Description of Artificial Sequence: Synthetic oligonucleotide
  Antisense strand to SEQ ID NO: 1907062
ucaagucagggacaccuug

SEQ ID NO: 1907064 - RNA, 19 nt, Artificial Sequence
  Description of Artificial Sequence: Synthetic oligonucleotide
  Sense strand starting at position 166 of SEQ ID NO: 1879437
cugugauagagugggaguu

SEQ ID NO: 1907065 - RNA, 19 nt, Artificial Sequence
  Description of Artificial Sequence: Synthetic oligonucleotide
  Antisense strand to SEQ ID NO: 1907064
aacucccacucuaucacag

SEQ ID NO: 1907066 - RNA, 19 nt, Artificial Sequence
  Description of Artificial Sequence: Synthetic oligonucleotide
  Sense strand starting at position 375 of SEQ ID NO: 1879437
gggacuggaugauaccaaa

SEQ ID NO: 1907067 - RNA, 19 nt, Artificial Sequence
  Description of Artificial Sequence: Synthetic oligonucleotide
  Antisense strand to SEQ ID NO: 1907066
uuugguaucauccaguccc

SEQ ID NO: 1907068 - RNA, 19 nt, Artificial Sequence
  Description of Artificial Sequence: Synthetic oligonucleotide
  Sense strand starting at position 426 of SEQ ID NO: 1879437
uuguguuucugccuggaca

SEQ ID NO: 1907069 - RNA, 19 nt, Artificial Sequence
  Description of Artificial Sequence: Synthetic oligonucleotide
  Antisense strand to SEQ ID NO: 1907068
uguccaggcagaaacacaa

SEQ ID NO: 1907070 - RNA, 19 nt, Artificial Sequence
  Description of Artificial Sequence: Synthetic oligonucleotide
  Sense strand starting at position 429 of SEQ ID NO: 1879437
uguuucugccuggacagua

SEQ ID NO: 1907071 - RNA, 19 nt, Artificial Sequence
  Description of Artificial Sequence: Synthetic oligonucleotide
  Antisense strand to SEQ ID NO: 1907070
uacuguccaggcagaaaca

SEQ ID NO: 1907072 - RNA, 19 nt, Artificial Sequence
  Description of Artificial Sequence: Synthetic oligonucleotide
  Sense strand starting at position 807 of SEQ ID NO: 1879437
gucugaaacuucuugagcu

SEQ ID NO: 1907073 - RNA, 19 nt, Artificial Sequence
  Description of Artificial Sequence: Synthetic oligonucleotide
  Antisense strand to SEQ ID NO: 1907072
agcucaagaaguuucagac

SEQ ID NO: 1907074 - RNA, 19 nt, Artificial Sequence
  Description of Artificial Sequence: Synthetic oligonucleotide
  Sense strand starting at position 809 of SEQ ID NO: 1879437
cugaaacuucuugagcuca

SEQ ID NO: 1907075 - RNA, 19 nt, Artificial Sequence
  Description of Artificial Sequence: Synthetic oligonucleotide
  Antisense strand to SEQ ID NO: 1907074
ugagcucaagaaguuucag

SEQ ID NO: 1907076 - RNA, 19 nt, Artificial Sequence
  Description of Artificial Sequence: Synthetic oligonucleotide
  Sense strand starting at position 1205 of SEQ ID NO: 1879437
aagugcaaugaguguggaa

SEQ ID NO: 1907077 - RNA, 19 nt, Artificial Sequence
  Description of Artificial Sequence: Synthetic oligonucleotide
  Antisense strand to SEQ ID NO: 1907076
uuccacacucauugcacuu

SEQ ID NO: 1907078 - RNA, 19 nt, Artificial Sequence
  Description of Artificial Sequence: Synthetic oligonucleotide
  Sense strand starting at position 1311 of SEQ ID NO: 1879437
ggagaauacuuucuggcug

SEQ ID NO: 1907079 - RNA, 19 nt, Artificial Sequence
  Description of Artificial Sequence: Synthetic oligonucleotide
  Antisense strand to SEQ ID NO: 1907078
cagccagaaaguauucucc

SEQ ID NO: 1907080 - RNA, 19 nt, Artificial Sequence
  Description of Artificial Sequence: Synthetic oligonucleotide
  Sense strand starting at position 1354 of SEQ ID NO: 1879437
agaauaaacguuugugaaa

SEQ ID NO: 1907081 - RNA, 19 nt, Artificial Sequence
  Description of Artificial Sequence: Synthetic oligonucleotide
  Antisense strand to SEQ ID NO: 1907080
uuucacaaacguuuauucu

SEQ ID NO: 1907082 - RNA, 19 nt, Artificial Sequence
  Description of Artificial Sequence: Synthetic oligonucleotide
  Sense strand starting at position 1997 of SEQ ID NO: 1879437
aagggaaguccuuggguaa

SEQ ID NO: 1907083 - RNA, 19 nt, Artificial Sequence
  Description of Artificial Sequence: Synthetic oligonucleotide
  Antisense strand to SEQ ID NO: 1907082
uuacccaaggacuucccuu

SEQ ID NO: 1907084 - RNA, 19 nt, Artificial Sequence
  Description of Artificial Sequence: Synthetic oligonucleotide
  Sense strand starting at position 2000 of SEQ ID NO: 1879437
ggaaguccuuggguaacaa

SEQ ID NO: 1907085 - RNA, 19 nt, Artificial Sequence
  Description of Artificial Sequence: Synthetic oligonucleotide
  Antisense strand to SEQ ID NO: 1907084
uuguuacccaaggacuucc

SEQ ID NO: 1907086 - RNA, 19 nt, Artificial Sequence
  Description of Artificial Sequence: Synthetic oligonucleotide
  Sense strand starting at position 2104 of SEQ ID NO: 1879437
ugcugagcucauggaaaca

SEQ ID NO: 1907087 - RNA, 19 nt, Artificial Sequence
  Description of Artificial Sequence: Synthetic oligonucleotide
  Antisense strand to SEQ ID NO: 1907086
uguuuccaugagcucagca

SEQ ID NO: 1907088 - RNA, 19 nt, Artificial Sequence
  Description of Artificial Sequence: Synthetic oligonucleotide
  Sense strand starting at position 2135 of SEQ ID NO: 1879437
ccucucauugauugguuua

SEQ ID NO: 1907089 - RNA, 19 nt, Artificial Sequence
  Description of Artificial Sequence: Synthetic oligonucleotide
  Antisense strand to SEQ ID NO: 1907088
uaaaccaaucaaugagagg

SEQ ID NO: 1907090 - RNA, 19 nt, Artificial Sequence
  Description of Artificial Sequence: Synthetic oligonucleotide
  Sense strand starting at position 2137 of SEQ ID NO: 1879437
ucucauugauugguuuaaa

SEQ ID NO: 1907091 - RNA, 19 nt, Artificial Sequence
  Description of Artificial Sequence: Synthetic oligonucleotide
  Antisense strand to SEQ ID NO: 1907090
uuuaaaccaaucaaugaga

SEQ ID NO: 1907092 - RNA, 19 nt, Artificial Sequence
  Description of Artificial Sequence: Synthetic oligonucleotide
  Sense strand starting at position 2578 of SEQ ID NO: 1879437
gugugaaguccugacuucu

SEQ ID NO: 1907093 - RNA, 19 nt, Artificial Sequence
  Description of Artificial Sequence: Synthetic oligonucleotide
  Antisense strand to SEQ ID NO: 1907092
agaagucaggacuucacac

SEQ ID NO: 1907094 - RNA, 19 nt, Artificial Sequence
  Description of Artificial Sequence: Synthetic oligonucleotide
  Sense strand starting at position 2584 of SEQ ID NO: 1879437
aguccugacuucucagcua

SEQ ID NO: 1907095 - RNA, 19 nt, Artificial Sequence
  Description of Artificial Sequence: Synthetic oligonucleotide
  Antisense strand to SEQ ID NO: 1907094
uagcugagaagucaggacu

SEQ ID NO: 1907096 - RNA, 19 nt, Artificial Sequence
  Description of Artificial Sequence: Synthetic oligonucleotide
  Sense strand starting at position 2613 of SEQ ID NO: 1879437
ccucuaagccucgauguuu

SEQ ID NO: 1907097 - RNA, 19 nt, Artificial Sequence
  Description of Artificial Sequence: Synthetic oligonucleotide
  Antisense strand to SEQ ID NO: 1907096
aaacaucgaggcuuagagg

SEQ ID NO: 1907098 - RNA, 19 nt, Artificial Sequence
  Description of Artificial Sequence: Synthetic oligonucleotide
  Sense strand starting at position 2649 of SEQ ID NO: 1879437
guggcaaacugcuuauaga

SEQ ID NO: 1907099 - RNA, 19 nt, Artificial Sequence
  Description of Artificial Sequence: Synthetic oligonucleotide
  Antisense strand to SEQ ID NO: 1907098
ucuauaagcaguuugccac

SEQ ID NO: 1907100 - RNA, 19 nt, Artificial Sequence
  Description of Artificial Sequence: Synthetic oligonucleotide
  Sense strand starting at position 2650 of SEQ ID NO: 1879437
uggcaaacugcuuauagag

SEQ ID NO: 1907101 - RNA, 19 nt, Artificial Sequence
  Description of Artificial Sequence: Synthetic oligonucleotide
  Antisense strand to SEQ ID NO: 1907100
cucuauaagcaguuugcca

SEQ ID NO: 1907102 - RNA, 19 nt, Artificial Sequence
  Description of Artificial Sequence: Synthetic oligonucleotide
  Sense strand starting at position 2681 of SEQ ID NO: 1879437
ucaaacgagauaugguuau

SEQ ID NO: 1907103 - RNA, 19 nt, Artificial Sequence
  Description of Artificial Sequence: Synthetic oligonucleotide
  Antisense strand to SEQ ID NO: 1907102
auaaccauaucucguuuga

SEQ ID NO: 1907104 - RNA, 19 nt, Artificial Sequence
  Description of Artificial Sequence: Synthetic oligonucleotide
  Sense strand starting at position 2728 of SEQ ID NO: 1879437
ggacacacgaguugcuauu

SEQ ID NO: 1907105 - RNA, 19 nt, Artificial Sequence
  Description of Artificial Sequence: Synthetic oligonucleotide
  Antisense strand to SEQ ID NO: 1907104
aauagcaacucgugugucc

SEQ ID NO: 1907106 - RNA, 19 nt, Artificial Sequence
  Description of Artificial Sequence: Synthetic oligonucleotide
  Sense strand starting at position 2783 of SEQ ID NO: 1879437
agcugcaaucucuacaagu

SEQ ID NO: 1907107 - RNA, 19 nt, Artificial Sequence
  Description of Artificial Sequence: Synthetic oligonucleotide
  Antisense strand to SEQ ID NO: 1907106
acuuguagagauugcagcu

SEQ ID NO: 1907108 - RNA, 19 nt, Artificial Sequence
  Description of Artificial Sequence: Synthetic oligonucleotide
  Sense strand starting at position 2877 of SEQ ID NO: 1879437
gggcuuacuuacucaaccu

SEQ ID NO: 1907109 - RNA, 19 nt, Artificial Sequence
  Description of Artificial Sequence: Synthetic oligonucleotide
  Antisense strand to SEQ ID NO: 1907108
agguugaguaaguaagccc

SEQ ID NO: 1907110 - RNA, 19 nt, Artificial Sequence
  Description of Artificial Sequence: Synthetic oligonucleotide
  Sense strand starting at position 2918 of SEQ ID NO: 1879437
uugcuuaagagguguggaa

SEQ ID NO: 1907111 - RNA, 19 nt, Artificial Sequence
  Description of Artificial Sequence: Synthetic oligonucleotide
  Antisense strand to SEQ ID NO: 1907110
uuccacaccucuuaagcaa

SEQ ID NO: 1907112 - RNA, 19 nt, Artificial Sequence
  Description of Artificial Sequence: Synthetic oligonucleotide
  Sense strand starting at position 2920 of SEQ ID NO: 1879437
gcuuaagagguguggaaag

SEQ ID NO: 1907113 - RNA, 19 nt, Artificial Sequence
  Description of Artificial Sequence: Synthetic oligonucleotide
  Antisense strand to SEQ ID NO: 1907112
cuuuccacaccucuuaagc

SEQ ID NO: 1907114 - RNA, 19 nt, Artificial Sequence
  Description of Artificial Sequence: Synthetic oligonucleotide
  Sense strand starting at position 2922 of SEQ ID NO: 1879437
uuaagagguguggaaaguu

SEQ ID NO: 1907115 - RNA, 19 nt, Artificial Sequence
  Description of Artificial Sequence: Synthetic oligonucleotide
  Antisense strand to SEQ ID NO: 1907114
aacuuuccacaccucuuaa

SEQ ID NO: 1907116 - RNA, 19 nt, Artificial Sequence
  Description of Artificial Sequence: Synthetic oligonucleotide
  Sense strand starting at position 2931 of SEQ ID NO: 1879437
guggaaaguuuccuccagu

SEQ ID NO: 1907117 - RNA, 19 nt, Artificial Sequence
  Description of Artificial Sequence: Synthetic oligonucleotide
  Antisense strand to SEQ ID NO: 1907116
acuggaggaaacuuuccac

SEQ ID NO: 1907118 - RNA, 19 nt, Artificial Sequence
  Description of Artificial Sequence: Synthetic oligonucleotide
  Sense strand starting at position 2932 of SEQ ID NO: 1879437
uggaaaguuuccuccaguu

SEQ ID NO: 1907119 - RNA, 19 nt, Artificial Sequence
  Description of Artificial Sequence: Synthetic oligonucleotide
  Antisense strand to SEQ ID NO: 1907118
aacuggaggaaacuuucca

SEQ ID NO: 1907120 - RNA, 19 nt, Artificial Sequence
  Description of Artificial Sequence: Synthetic oligonucleotide
  Sense strand starting at position 3177 of SEQ ID NO: 1879437
aucacucucuggcuauaga

SEQ ID NO: 1907121 - RNA, 19 nt, Artificial Sequence
  Description of Artificial Sequence: Synthetic oligonucleotide
  Antisense strand to SEQ ID NO: 1907120
ucuauagccagagagugau

SEQ ID NO: 1907122 - RNA, 19 nt, Artificial Sequence
  Description of Artificial Sequence: Synthetic oligonucleotide
  Sense strand starting at position 3331 of SEQ ID NO: 1879437
gaggaagauuugcagagaa

SEQ ID NO: 1907123 - RNA, 19 nt, Artificial Sequence
  Description of Artificial Sequence: Synthetic oligonucleotide
  Antisense strand to SEQ ID NO: 1907122
uucucugcaaaucuuccuc

SEQ ID NO: 1907124 - RNA, 19 nt, Artificial Sequence
  Description of Artificial Sequence: Synthetic oligonucleotide
  Sense strand starting at position 3351 of SEQ ID NO: 1879437
gagugugacagucauaagu

SEQ ID NO: 1907125 - RNA, 19 nt, Artificial Sequence
  Description of Artificial Sequence: Synthetic oligonucleotide
  Antisense strand to SEQ ID NO: 1907124
acuuaugacugucacacuc

SEQ ID NO: 1907126 - RNA, 19 nt, Artificial Sequence
  Description of Artificial Sequence: Synthetic oligonucleotide
  Sense strand starting at position 3536 of SEQ ID NO: 1879437
cugggagguccuggccaaa

SEQ ID NO: 1907127 - RNA, 19 nt, Artificial Sequence
  Description of Artificial Sequence: Synthetic oligonucleotide
  Antisense strand to SEQ ID NO: 1907126
uuuggccaggaccucccag

SEQ ID NO: 1907128 - RNA, 19 nt, Artificial Sequence
  Description of Artificial Sequence: Synthetic oligonucleotide
  Sense strand starting at position 3594 of SEQ ID NO: 1879437
gauccaggguagcuuuauu

SEQ ID NO: 1907129 - RNA, 19 nt, Artificial Sequence
  Description of Artificial Sequence: Synthetic oligonucleotide
  Antisense strand to SEQ ID NO: 1907128
aauaaagcuacccuggauc

SEQ ID NO: 1907130 - RNA, 19 nt, Artificial Sequence
  Description of Artificial Sequence: Synthetic oligonucleotide
  Sense strand starting at position 3602 of SEQ ID NO: 1879437
guagcuuuauuccugacuu

SEQ ID NO: 1907131 - RNA, 19 nt, Artificial Sequence
  Description of Artificial Sequence: Synthetic oligonucleotide
  Antisense strand to SEQ ID NO: 1907130
aagucaggaauaaagcuac

SEQ ID NO: 1907132 - RNA, 19 nt, Artificial Sequence
  Description of Artificial Sequence: Synthetic oligonucleotide
  Sense strand starting at position 3604 of SEQ ID NO: 1879437
agcuuuauuccugacuuag

SEQ ID NO: 1907133 - RNA, 19 nt, Artificial Sequence
  Description of Artificial Sequence: Synthetic oligonucleotide
  Antisense strand to SEQ ID NO: 1907132
cuaagucaggaauaaagcu

SEQ ID NO: 1907134 - RNA, 19 nt, Artificial Sequence
  Description of Artificial Sequence: Synthetic oligonucleotide
  Sense strand starting at position 3749 of SEQ ID NO: 1879437
ucaccagaguggucuucuu

SEQ ID NO: 1907135 - RNA, 19 nt, Artificial Sequence
  Description of Artificial Sequence: Synthetic oligonucleotide
  Antisense strand to SEQ ID NO: 1907134
aagaagaccacucugguga

SEQ ID NO: 1907136 - RNA, 19 nt, Artificial Sequence
  Description of Artificial Sequence: Synthetic oligonucleotide
  Sense strand starting at position 3858 of SEQ ID NO: 1879437
cuaauauucgcugugcuuc

SEQ ID NO: 1907137 - RNA, 19 nt, Artificial Sequence
  Description of Artificial Sequence: Synthetic oligonucleotide
  Antisense strand to SEQ ID NO: 1907136
gaagcacagcgaauauuag

SEQ ID NO: 1907138 - RNA, 19 nt, Artificial Sequence
  Description of Artificial Sequence: Synthetic oligonucleotide
  Sense strand starting at position 3908 of SEQ ID NO: 1879437
ugauaucuaucacauugga

SEQ ID NO: 1907139 - RNA, 19 nt, Artificial Sequence
  Description of Artificial Sequence: Synthetic oligonucleotide
  Antisense strand to SEQ ID NO: 1907138
uccaaugugauagauauca

SEQ ID NO: 1907140 - RNA, 19 nt, Artificial Sequence
  Description of Artificial Sequence: Synthetic oligonucleotide
  Sense strand starting at position 3959 of SEQ ID NO: 1879437
acacuuagggcucaguauu

SEQ ID NO: 1907141 - RNA, 19 nt, Artificial Sequence
  Description of Artificial Sequence: Synthetic oligonucleotide
  Antisense strand to SEQ ID NO: 1907140
aauacugagcccuaagugu

SEQ ID NO: 1907142 - RNA, 19 nt, Artificial Sequence
  Description of Artificial Sequence: Synthetic oligonucleotide
  Sense strand starting at position 3967 of SEQ ID NO: 1879437
ggcucaguauuguuauuau

SEQ ID NO: 1907143 - RNA, 19 nt, Artificial Sequence
  Description of Artificial Sequence: Synthetic oligonucleotide
  Antisense strand to SEQ ID NO: 1907142
auaauaacaauacugagcc

SEQ ID NO: 1907144 - RNA, 19 nt, Artificial Sequence
  Description of Artificial Sequence: Synthetic oligonucleotide
  Sense strand starting at position 169 of SEQ ID NO: 1879438
uagcuauuccaaggaggca

SEQ ID NO: 1907145 - RNA, 19 nt, Artificial Sequence
  Description of Artificial Sequence: Synthetic oligonucleotide
  Antisense strand to SEQ ID NO: 1907144
ugccuccuuggaauagcua

SEQ ID NO: 1907146 - RNA, 19 nt, Artificial Sequence
  Description of Artificial Sequence: Synthetic oligonucleotide
  Sense strand starting at position 498 of SEQ ID NO: 1879438
aacuauugggauugcuuga

SEQ ID NO: 1907147 - RNA, 19 nt, Artificial Sequence
  Description of Artificial Sequence: Synthetic oligonucleotide
  Antisense strand to SEQ ID NO: 1907146
ucaagcaaucccaauaguu

SEQ ID NO: 1907148 - RNA, 19 nt, Artificial Sequence
  Description of Artificial Sequence: Synthetic oligonucleotide
  Sense strand starting at position 645 of SEQ ID NO: 1879438
aagcaagaagauuguuuga

SEQ ID NO: 1907149 - RNA, 19 nt, Artificial Sequence
  Description of Artificial Sequence: Synthetic oligonucleotide
  Antisense strand to SEQ ID NO: 1907148
ucaaacaaucuucuugcuu

SEQ ID NO: 1907150 - RNA, 19 nt, Artificial Sequence
  Description of Artificial Sequence: Synthetic oligonucleotide
  Sense strand starting at position 788 of SEQ ID NO: 1879438
aucagaugaaauggucagu

SEQ ID NO: 1907151 - RNA, 19 nt, Artificial Sequence
  Description of Artificial Sequence: Synthetic oligonucleotide
  Antisense strand to SEQ ID NO: 1907150
acugaccauuucaucugau

SEQ ID NO: 1907152 - RNA, 19 nt, Artificial Sequence
  Description of Artificial Sequence: Synthetic oligonucleotide
  Sense strand starting at position 791 of SEQ ID NO: 1879438
agaugaaauggucagugua

SEQ ID NO: 1907153 - RNA, 19 nt, Artificial Sequence
  Description of Artificial Sequence: Synthetic oligonucleotide
  Antisense strand to SEQ ID NO: 1907152
uacacugaccauuucaucu

SEQ ID NO: 1907154 - RNA, 19 nt, Artificial Sequence
  Description of Artificial Sequence: Synthetic oligonucleotide
  Sense strand starting at position 793 of SEQ ID NO: 1879438
augaaauggucaguguauu

SEQ ID NO: 1907155 - RNA, 19 nt, Artificial Sequence
  Description of Artificial Sequence: Synthetic oligonucleotide
  Antisense strand to SEQ ID NO: 1907154
aauacacugaccauuucau

SEQ ID NO: 1907156 - RNA, 19 nt, Artificial Sequence
  Description of Artificial Sequence: Synthetic oligonucleotide
  Sense strand starting at position 794 of SEQ ID NO: 1879438
ugaaauggucaguguauua

SEQ ID NO: 1907157 - RNA, 19 nt, Artificial Sequence
  Description of Artificial Sequence: Synthetic oligonucleotide
  Antisense strand to SEQ ID NO: 1907156
uaauacacugaccauuuca

SEQ ID NO: 1907158 - RNA, 19 nt, Artificial Sequence
  Description of Artificial Sequence: Synthetic oligonucleotide
  Sense strand starting at position 825 of SEQ ID NO: 1879438
uggauucgacccuaaagcu

SEQ ID NO: 1907159 - RNA, 19 nt, Artificial Sequence
  Description of Artificial Sequence: Synthetic oligonucleotide
  Antisense strand to SEQ ID NO: 1907158
agcuuuagggucgaaucca

SEQ ID NO: 1907160 - RNA, 19 nt, Artificial Sequence
  Description of Artificial Sequence: Synthetic oligonucleotide
  Sense strand starting at position 1020 of SEQ ID NO: 1879438
uaaaguacgccugggaaga

SEQ ID NO: 1907161 - RNA, 19 nt, Artificial Sequence
  Description of Artificial Sequence: Synthetic oligonucleotide
  Antisense strand to SEQ ID NO: 1907160
ucuucccaggcguacuuua

SEQ ID NO: 1907162 - RNA, 19 nt, Artificial Sequence
  Description of Artificial Sequence: Synthetic oligonucleotide
  Sense strand starting at position 1320 of SEQ ID NO: 1879438
caagauaauccacgaggcu

SEQ ID NO: 1907163 - RNA, 19 nt, Artificial Sequence
  Description of Artificial Sequence: Synthetic oligonucleotide
  Antisense strand to SEQ ID NO: 1907162
agccucguggauuaucuug

SEQ ID NO: 1907164 - RNA, 19 nt, Artificial Sequence
  Description of Artificial Sequence: Synthetic oligonucleotide
  Sense strand starting at position 1321 of SEQ ID NO: 1879438
aagauaauccacgaggcuu

SEQ ID NO: 1907165 - RNA, 19 nt, Artificial Sequence
  Description of Artificial Sequence: Synthetic oligonucleotide
  Antisense strand to SEQ ID NO: 1907164
aagccucguggauuaucuu

SEQ ID NO: 1907166 - RNA, 19 nt, Artificial Sequence
  Description of Artificial Sequence: Synthetic oligonucleotide
  Sense strand starting at position 1332 of SEQ ID NO: 1879438
cgaggcuuccaggagauga

SEQ ID NO: 1907167 - RNA, 19 nt, Artificial Sequence
  Description of Artificial Sequence: Synthetic oligonucleotide
  Antisense strand to SEQ ID NO: 1907166
ucaucuccuggaagccucg

SEQ ID NO: 1907168 - RNA, 19 nt, Artificial Sequence
  Description of Artificial Sequence: Synthetic oligonucleotide
  Sense strand starting at position 1346 of SEQ ID NO: 1879438
gaugaaggaugcucaguaa

SEQ ID NO: 1907169 - RNA, 19 nt, Artificial Sequence
  Description of Artificial Sequence: Synthetic oligonucleotide
  Antisense strand to SEQ ID NO: 1907168
uuacugagcauccuucauc

SEQ ID NO: 1907170 - RNA, 19 nt, Artificial Sequence
  Description of Artificial Sequence: Synthetic oligonucleotide
  Sense strand starting at position 1349 of SEQ ID NO: 1879438
gaaggaugcucaguaaaua

SEQ ID NO: 1907171 - RNA, 19 nt, Artificial Sequence
  Description of Artificial Sequence: Synthetic oligonucleotide
  Antisense strand to SEQ ID NO: 1907170
uauuuacugagcauccuuc

SEQ ID NO: 1907172 - RNA, 19 nt, Artificial Sequence
  Description of Artificial Sequence: Synthetic oligonucleotide
  Sense strand starting at position 1457 of SEQ ID NO: 1879438
gccugacccuuauuccaga

SEQ ID NO: 1907173 - RNA, 19 nt, Artificial Sequence
  Description of Artificial Sequence: Synthetic oligonucleotide
  Antisense strand to SEQ ID NO: 1907172
ucuggaauaagggucaggc

SEQ ID NO: 1907174 - RNA, 19 nt, Artificial Sequence
  Description of Artificial Sequence: Synthetic oligonucleotide
  Sense strand starting at position 1515 of SEQ ID NO: 1879438
cgccgacugcucuuacuua

SEQ ID NO: 1907175 - RNA, 19 nt, Artificial Sequence
  Description of Artificial Sequence: Synthetic oligonucleotide
  Antisense strand to SEQ ID NO: 1907174
uaaguaagagcagucggcg

SEQ ID NO: 1907176 - RNA, 19 nt, Artificial Sequence
  Description of Artificial Sequence: Synthetic oligonucleotide
  Sense strand starting at position 2074 of SEQ ID NO: 1879438
cuguguuuccuacaauucu

SEQ ID NO: 1907177 - RNA, 19 nt, Artificial Sequence
  Description of Artificial Sequence: Synthetic oligonucleotide
  Antisense strand to SEQ ID NO: 1907176
agaauuguaggaaacacag

SEQ ID NO: 1907178 - RNA, 19 nt, Artificial Sequence
  Description of Artificial Sequence: Synthetic oligonucleotide
  Sense strand starting at position 2132 of SEQ ID NO: 1879438
aaaugaguccugugaucca

SEQ ID NO: 1907179 - RNA, 19 nt, Artificial Sequence
  Description of Artificial Sequence: Synthetic oligonucleotide
  Antisense strand to SEQ ID NO: 1907178
uggaucacaggacucauuu

SEQ ID NO: 1907180 - RNA, 19 nt, Artificial Sequence
  Description of Artificial Sequence: Synthetic oligonucleotide
  Sense strand starting at position 2135 of SEQ ID NO: 1879438
ugaguccugugauccaaau

SEQ ID NO: 1907181 - RNA, 19 nt, Artificial Sequence
  Description of Artificial Sequence: Synthetic oligonucleotide
  Antisense strand to SEQ ID NO: 1907180
auuuggaucacaggacuca

SEQ ID NO: 1907182 - RNA, 19 nt, Artificial Sequence
  Description of Artificial Sequence: Synthetic oligonucleotide
  Sense strand starting at position 2171 of SEQ ID NO: 1879438
caggcaaugugagccaaau

SEQ ID NO: 1907183 - RNA, 19 nt, Artificial Sequence
  Description of Artificial Sequence: Synthetic oligonucleotide
  Antisense strand to SEQ ID NO: 1907182
auuuggcucacauugccug

SEQ ID NO: 1907184 - RNA, 19 nt, Artificial Sequence
  Description of Artificial Sequence: Synthetic oligonucleotide
  Sense strand starting at position 2173 of SEQ ID NO: 1879438
ggcaaugugagccaaauag

SEQ ID NO: 1907185 - RNA, 19 nt, Artificial Sequence
  Description of Artificial Sequence: Synthetic oligonucleotide
  Antisense strand to SEQ ID NO: 1907184
cuauuuggcucacauugcc

SEQ ID NO: 1907186 - RNA, 19 nt, Artificial Sequence
  Description of Artificial Sequence: Synthetic oligonucleotide
  Sense strand starting at position 2270 of SEQ ID NO: 1879438
uagugugaacucuaguucu

SEQ ID NO: 1907187 - RNA, 19 nt, Artificial Sequence
  Description of Artificial Sequence: Synthetic oligonucleotide
  Antisense strand to SEQ ID NO: 1907186
agaacuagaguucacacua

SEQ ID NO: 1907188 - RNA, 19 nt, Artificial Sequence
  Description of Artificial Sequence: Synthetic oligonucleotide
  Sense strand starting at position 2278 of SEQ ID NO: 1879438
acucuaguucugggauaca

SEQ ID NO: 1907189 - RNA, 19 nt, Artificial Sequence
  Description of Artificial Sequence: Synthetic oligonucleotide
  Antisense strand to SEQ ID NO: 1907188
uguaucccagaacuagagu

SEQ ID NO: 1907190 - RNA, 19 nt, Artificial Sequence
  Description of Artificial Sequence: Synthetic oligonucleotide
  Sense strand starting at position 2281 of SEQ ID NO: 1879438
cuaguucugggauacaguu

SEQ ID NO: 1907191 - RNA, 19 nt, Artificial Sequence
  Description of Artificial Sequence: Synthetic oligonucleotide
  Antisense strand to SEQ ID NO: 1907190
aacuguaucccagaacuag

SEQ ID NO: 1907192 - RNA, 19 nt, Artificial Sequence
  Description of Artificial Sequence: Synthetic oligonucleotide
  Sense strand starting at position 2346 of SEQ ID NO: 1879438
uucuuaggucaauacagua

SEQ ID NO: 1907193 - RNA, 19 nt, Artificial Sequence
  Description of Artificial Sequence: Synthetic oligonucleotide
  Antisense strand to SEQ ID NO: 1907192
uacuguauugaccuaagaa

SEQ ID NO: 1907194 - RNA, 19 nt, Artificial Sequence
  Description of Artificial Sequence: Synthetic oligonucleotide
  Sense strand starting at position 2380 of SEQ ID NO: 1879438
agugauuucuaccaauuga

SEQ ID NO: 1907195 - RNA, 19 nt, Artificial Sequence
  Description of Artificial Sequence: Synthetic oligonucleotide
  Antisense strand to SEQ ID NO: 1907194
ucaauugguagaaaucacu

SEQ ID NO: 1907196 - RNA, 19 nt, Artificial Sequence
  Description of Artificial Sequence: Synthetic oligonucleotide
  Sense strand starting at position 2720 of SEQ ID NO: 1879438
cugcaucagcugcagaaau

SEQ ID NO: 1907197 - RNA, 19 nt, Artificial Sequence
  Description of Artificial Sequence: Synthetic oligonucleotide
  Antisense strand to SEQ ID NO: 1907196
auuucugcagcugaugcag

SEQ ID NO: 1907198 - RNA, 19 nt, Artificial Sequence
  Description of Artificial Sequence: Synthetic oligonucleotide
  Sense strand starting at position 2722 of SEQ ID NO: 1879438
gcaucagcugcagaaauca

SEQ ID NO: 1907199 - RNA, 19 nt, Artificial Sequence
  Description of Artificial Sequence: Synthetic oligonucleotide
  Antisense strand to SEQ ID NO: 1907198
ugauuucugcagcugaugc

SEQ ID NO: 1907200 - RNA, 19 nt, Artificial Sequence
  Description of Artificial Sequence: Synthetic oligonucleotide
  Sense strand starting at position 2860 of SEQ ID NO: 1879438
acaauuaggccuugcaaga

SEQ ID NO: 1907201 - RNA, 19 nt, Artificial Sequence
  Description of Artificial Sequence: Synthetic oligonucleotide
  Antisense strand to SEQ ID NO: 1907200
ucuugcaaggccuaauugu

SEQ ID NO: 1907202 - RNA, 19 nt, Artificial Sequence
  Description of Artificial Sequence: Synthetic oligonucleotide
  Sense strand starting at position 2958 of SEQ ID NO: 1879438
augacugugcugugaggaa

SEQ ID NO: 1907203 - RNA, 19 nt, Artificial Sequence
  Description of Artificial Sequence: Synthetic oligonucleotide
  Antisense strand to SEQ ID NO: 1907202
uuccucacagcacagucau

SEQ ID NO: 1907204 - RNA, 19 nt, Artificial Sequence
  Description of Artificial Sequence: Synthetic oligonucleotide
  Sense strand starting at position 3193 of SEQ ID NO: 1879438
cucuuagaauacgucaauu

SEQ ID NO: 1907205 - RNA, 19 nt, Artificial Sequence
  Description of Artificial Sequence: Synthetic oligonucleotide
  Antisense strand to SEQ ID NO: 1907204
aauugacguauucuaagag

SEQ ID NO: 1907206 - RNA, 19 nt, Artificial Sequence
  Description of Artificial Sequence: Synthetic oligonucleotide
  Sense strand starting at position 3294 of SEQ ID NO: 1879438
ugaccuuacgguuaucaug

SEQ ID NO: 1907207 - RNA, 19 nt, Artificial Sequence
  Description of Artificial Sequence: Synthetic oligonucleotide
  Antisense strand to SEQ ID NO: 1907206
caugauaaccguaagguca

SEQ ID NO: 1907208 - RNA, 19 nt, Artificial Sequence
  Description of Artificial Sequence: Synthetic oligonucleotide
  Sense strand starting at position 3296 of SEQ ID NO: 1879438
accuuacgguuaucaugaa

SEQ ID NO: 1907209 - RNA, 19 nt, Artificial Sequence
  Description of Artificial Sequence: Synthetic oligonucleotide
  Antisense strand to SEQ ID NO: 1907208
uucaugauaaccguaaggu

SEQ ID NO: 1907210 - RNA, 19 nt, Artificial Sequence
  Description of Artificial Sequence: Synthetic oligonucleotide
  Sense strand starting at position 3324 of SEQ ID NO: 1879438
gugucaagacagcauuaca

SEQ ID NO: 1907211 - RNA, 19 nt, Artificial Sequence
  Description of Artificial Sequence: Synthetic oligonucleotide
  Antisense strand to SEQ ID NO: 1907210
uguaaugcugucuugacac

SEQ ID NO: 1907212 - RNA, 19 nt, Artificial Sequence
  Description of Artificial Sequence: Synthetic oligonucleotide
  Sense strand starting at position 3369 of SEQ ID NO: 1879438
uguacuuuaugucucagaa

SEQ ID NO: 1907213 - RNA, 19 nt, Artificial Sequence
  Description of Artificial Sequence: Synthetic oligonucleotide
  Antisense strand to SEQ ID NO: 1907212
uucugagacauaaaguaca

SEQ ID NO: 1907214 - RNA, 19 nt, Artificial Sequence
  Description of Artificial Sequence: Synthetic oligonucleotide
  Sense strand starting at position 3432 of SEQ ID NO: 1879438
ugaauaaugucaucccagu

SEQ ID NO: 1907215 - RNA, 19 nt, Artificial Sequence
  Description of Artificial Sequence: Synthetic oligonucleotide
  Antisense strand to SEQ ID NO: 1907214
acugggaugacauuauuca

SEQ ID NO: 1907216 - RNA, 19 nt, Artificial Sequence
  Description of Artificial Sequence: Synthetic oligonucleotide
  Sense strand starting at position 3488 of SEQ ID NO: 1879438
aaacaauccuaggcagagu

SEQ ID NO: 1907217 - RNA, 19 nt, Artificial Sequence
  Description of Artificial Sequence: Synthetic oligonucleotide
  Antisense strand to SEQ ID NO: 1907216
acucugccuaggauuguuu

SEQ ID NO: 1907218 - RNA, 19 nt, Artificial Sequence
  Description of Artificial Sequence: Synthetic oligonucleotide
  Sense strand starting at position 3496 of SEQ ID NO: 1879438
cuaggcagagucugaguaa

SEQ ID NO: 1907219 - RNA, 19 nt, Artificial Sequence
  Description of Artificial Sequence: Synthetic oligonucleotide
  Antisense strand to SEQ ID NO: 1907218
uuacucagacucugccuag

SEQ ID NO: 1907220 - RNA, 19 nt, Artificial Sequence
  Description of Artificial Sequence: Synthetic oligonucleotide
  Sense strand starting at position 3508 of SEQ ID NO: 1879438
ugaguaauccugcacaucu

SEQ ID NO: 1907221 - RNA, 19 nt, Artificial Sequence
  Description of Artificial Sequence: Synthetic oligonucleotide
  Antisense strand to SEQ ID NO: 1907220
agaugugcaggauuacuca

SEQ ID NO: 1907222 - RNA, 19 nt, Artificial Sequence
  Description of Artificial Sequence: Synthetic oligonucleotide
  Sense strand starting at position 3510 of SEQ ID NO: 1879438
aguaauccugcacaucuga

SEQ ID NO: 1907223 - RNA, 19 nt, Artificial Sequence
  Description of Artificial Sequence: Synthetic oligonucleotide
  Antisense strand to SEQ ID NO: 1907222
ucagaugugcaggauuacu

SEQ ID NO: 1907224 - RNA, 19 nt, Artificial Sequence
  Description of Artificial Sequence: Synthetic oligonucleotide
  Sense strand starting at position 170 of SEQ ID NO: 1879439
uggaguuagccaggaaaug

SEQ ID NO: 1907225 - RNA, 19 nt, Artificial Sequence
  Description of Artificial Sequence: Synthetic oligonucleotide
  Antisense strand to SEQ ID NO: 1907224
cauuuccuggcuaacucca

SEQ ID NO: 1907226 - RNA, 19 nt, Artificial Sequence
  Description of Artificial Sequence: Synthetic oligonucleotide
  Sense strand starting at position 171 of SEQ ID NO: 1879439
ggaguuagccaggaaaugu

SEQ ID NO: 1907227 - RNA, 19 nt, Artificial Sequence
  Description of Artificial Sequence: Synthetic oligonucleotide
  Antisense strand to SEQ ID NO: 1907226
acauuuccuggcuaacucc

SEQ ID NO: 1907228 - RNA, 19 nt, Artificial Sequence
  Description of Artificial Sequence: Synthetic oligonucleotide
  Sense strand starting at position 230 of SEQ ID NO: 1879439
auauacuucuagguuagca

SEQ ID NO: 1907229 - RNA, 19 nt, Artificial Sequence
  Description of Artificial Sequence: Synthetic oligonucleotide
  Antisense strand to SEQ ID NO: 1907228
ugcuaaccuagaaguauau

SEQ ID NO: 1907230 - RNA, 19 nt, Artificial Sequence
  Description of Artificial Sequence: Synthetic oligonucleotide
  Sense strand starting at position 232 of SEQ ID NO: 1879439
auacuucuagguuagcaaa

SEQ ID NO: 1907231 - RNA, 19 nt, Artificial Sequence
  Description of Artificial Sequence: Synthetic oligonucleotide
  Antisense strand to SEQ ID NO: 1907230
uuugcuaaccuagaaguau

SEQ ID NO: 1907232 - RNA, 19 nt, Artificial Sequence
  Description of Artificial Sequence: Synthetic oligonucleotide
  Sense strand starting at position 298 of SEQ ID NO: 1879439
guacucacucagugacacu

SEQ ID NO: 1907233 - RNA, 19 nt, Artificial Sequence
  Description of Artificial Sequence: Synthetic oligonucleotide
  Antisense strand to SEQ ID NO: 1907232
agugucacugagugaguac

SEQ ID NO: 1907234 - RNA, 19 nt, Artificial Sequence
  Description of Artificial Sequence: Synthetic oligonucleotide
  Sense strand starting at position 343 of SEQ ID NO: 1879439
agaacuaggucacuacuuu

SEQ ID NO: 1907235 - RNA, 19 nt, Artificial Sequence
  Description of Artificial Sequence: Synthetic oligonucleotide
  Antisense strand to SEQ ID NO: 1907234
aaaguagugaccuaguucu

SEQ ID NO: 1907236 - RNA, 19 nt, Artificial Sequence
  Description of Artificial Sequence: Synthetic oligonucleotide
  Sense strand starting at position 349 of SEQ ID NO: 1879439
aggucacuacuuugggaau

SEQ ID NO: 1907237 - RNA, 19 nt, Artificial Sequence
  Description of Artificial Sequence: Synthetic oligonucleotide
  Antisense strand to SEQ ID NO: 1907236
auucccaaaguagugaccu

SEQ ID NO: 1907238 - RNA, 19 nt, Artificial Sequence
  Description of Artificial Sequence: Synthetic oligonucleotide
  Sense strand starting at position 361 of SEQ ID NO: 1879439
ugggaauggaauugugagu

SEQ ID NO: 1907239 - RNA, 19 nt, Artificial Sequence
  Description of Artificial Sequence: Synthetic oligonucleotide
  Antisense strand to SEQ ID NO: 1907238
acucacaauuccauuccca

SEQ ID NO: 1907240 - RNA, 19 nt, Artificial Sequence
  Description of Artificial Sequence: Synthetic oligonucleotide
  Sense strand starting at position 440 of SEQ ID NO: 1879439
agucaucaguaugccauaa

SEQ ID NO: 1907241 - RNA, 19 nt, Artificial Sequence
  Description of Artificial Sequence: Synthetic oligonucleotide
  Antisense strand to SEQ ID NO: 1907240
uuauggcauacugaugacu

SEQ ID NO: 1907242 - RNA, 19 nt, Artificial Sequence
  Description of Artificial Sequence: Synthetic oligonucleotide
  Sense strand starting at position 444 of SEQ ID NO: 1879439
aucaguaugccauaagagu

SEQ ID NO: 1907243 - RNA, 19 nt, Artificial Sequence
  Description of Artificial Sequence: Synthetic oligonucleotide
  Antisense strand to SEQ ID NO: 1907242
acucuuauggcauacugau

SEQ ID NO: 1907244 - RNA, 19 nt, Artificial Sequence
  Description of Artificial Sequence: Synthetic oligonucleotide
  Sense strand starting at position 451 of SEQ ID NO: 1879439
ugccauaagaguuagagca

SEQ ID NO: 1907245 - RNA, 19 nt, Artificial Sequence
  Description of Artificial Sequence: Synthetic oligonucleotide
  Antisense strand to SEQ ID NO: 1907244
ugcucuaacucuuauggca

SEQ ID NO: 1907246 - RNA, 19 nt, Artificial Sequence
  Description of Artificial Sequence: Synthetic oligonucleotide
  Sense strand starting at position 464 of SEQ ID NO: 1879439
agagcauucugaccauaaa

SEQ ID NO: 1907247 - RNA, 19 nt, Artificial Sequence
  Description of Artificial Sequence: Synthetic oligonucleotide
  Antisense strand to SEQ ID NO: 1907246
uuuauggucagaaugcucu

SEQ ID NO: 1907248 - RNA, 19 nt, Artificial Sequence
  Description of Artificial Sequence: Synthetic oligonucleotide
  Sense strand starting at position 1033 of SEQ ID NO: 1879439
agauuccagaaguguaaga

SEQ ID NO: 1907249 - RNA, 19 nt, Artificial Sequence
  Description of Artificial Sequence: Synthetic oligonucleotide
  Antisense strand to SEQ ID NO: 1907248
ucuuacacuucuggaaucu

SEQ ID NO: 1907250 - RNA, 19 nt, Artificial Sequence
  Description of Artificial Sequence: Synthetic oligonucleotide
  Sense strand starting at position 1348 of SEQ ID NO: 1879439
aagacagaguuugcaaaua

SEQ ID NO: 1907251 - RNA, 19 nt, Artificial Sequence
  Description of Artificial Sequence: Synthetic oligonucleotide
  Antisense strand to SEQ ID NO: 1907250
uauuugcaaacucugucuu

SEQ ID NO: 1907252 - RNA, 19 nt, Artificial Sequence
  Description of Artificial Sequence: Synthetic oligonucleotide
  Sense strand starting at position 1370 of SEQ ID NO: 1879439
gaaugcugggcucaauguu

SEQ ID NO: 1907253 - RNA, 19 nt, Artificial Sequence
  Description of Artificial Sequence: Synthetic oligonucleotide
  Antisense strand to SEQ ID NO: 1907252
aacauugagcccagcauuc

SEQ ID NO: 1907254 - RNA, 19 nt, Artificial Sequence
  Description of Artificial Sequence: Synthetic oligonucleotide
  Sense strand starting at position 1721 of SEQ ID NO: 1879439
aaauacuguuuguugcaga

SEQ ID NO: 1907255 - RNA, 19 nt, Artificial Sequence
  Description of Artificial Sequence: Synthetic oligonucleotide
  Antisense strand to SEQ ID NO: 1907254
ucugcaacaaacaguauuu

SEQ ID NO: 1907256 - RNA, 19 nt, Artificial Sequence
  Description of Artificial Sequence: Synthetic oligonucleotide
  Sense strand starting at position 1729 of SEQ ID NO: 1879439
uuuguugcagaguggaaau

SEQ ID NO: 1907257 - RNA, 19 nt, Artificial Sequence
  Description of Artificial Sequence: Synthetic oligonucleotide
  Antisense strand to SEQ ID NO: 1907256
auuuccacucugcaacaaa

SEQ ID NO: 1907258 - RNA, 19 nt, Artificial Sequence
  Description of Artificial Sequence: Synthetic oligonucleotide
  Sense strand starting at position 1747 of SEQ ID NO: 1879439
ugcauccuagauuggauua

SEQ ID NO: 1907259 - RNA, 19 nt, Artificial Sequence
  Description of Artificial Sequence: Synthetic oligonucleotide
  Antisense strand to SEQ ID NO: 1907258
uaauccaaucuaggaugca

SEQ ID NO: 1907260 - RNA, 19 nt, Artificial Sequence
  Description of Artificial Sequence: Synthetic oligonucleotide
  Sense strand starting at position 1808 of SEQ ID NO: 1879439
uagacauccugguuuguaa

SEQ ID NO: 1907261 - RNA, 19 nt, Artificial Sequence
  Description of Artificial Sequence: Synthetic oligonucleotide
  Antisense strand to SEQ ID NO: 1907260
uuacaaaccaggaugucua

SEQ ID NO: 1907262 - RNA, 19 nt, Artificial Sequence
  Description of Artificial Sequence: Synthetic oligonucleotide
  Sense strand starting at position 1810 of SEQ ID NO: 1879439
gacauccugguuuguaaua

SEQ ID NO: 1907263 - RNA, 19 nt, Artificial Sequence
  Description of Artificial Sequence: Synthetic oligonucleotide
  Antisense strand to SEQ ID NO: 1907262
uauuacaaaccaggauguc

SEQ ID NO: 1907264 - RNA, 19 nt, Artificial Sequence
  Description of Artificial Sequence: Synthetic oligonucleotide
  Sense strand starting at position 1811 of SEQ ID NO: 1879439
acauccugguuuguaauau

SEQ ID NO: 1907265 - RNA, 19 nt, Artificial Sequence
  Description of Artificial Sequence: Synthetic oligonucleotide
  Antisense strand to SEQ ID NO: 1907264
auauuacaaaccaggaugu

SEQ ID NO: 1907266 - RNA, 19 nt, Artificial Sequence
  Description of Artificial Sequence: Synthetic oligonucleotide
  Sense strand starting at position 1984 of SEQ ID NO: 1879439
cucaauugcccuugagacu

SEQ ID NO: 1907267 - RNA, 19 nt, Artificial Sequence
  Description of Artificial Sequence: Synthetic oligonucleotide
  Antisense strand to SEQ ID NO: 1907266
agucucaagggcaauugag

SEQ ID NO: 1907268 - RNA, 19 nt, Artificial Sequence
  Description of Artificial Sequence: Synthetic oligonucleotide
  Sense strand starting at position 2047 of SEQ ID NO: 1879439
ugugcuuagguugaagaca

SEQ ID NO: 1907269 - RNA, 19 nt, Artificial Sequence
  Description of Artificial Sequence: Synthetic oligonucleotide
  Antisense strand to SEQ ID NO: 1907268
ugucuucaaccuaagcaca

SEQ ID NO: 1907270 - RNA, 19 nt, Artificial Sequence
  Description of Artificial Sequence: Synthetic oligonucleotide
  Sense strand starting at position 2105 of SEQ ID NO: 1879439
ucaugccugguuuauaaga

SEQ ID NO: 1907271 - RNA, 19 nt, Artificial Sequence
  Description of Artificial Sequence: Synthetic oligonucleotide
  Antisense strand to SEQ ID NO: 1907270
ucuuauaaaccaggcauga

SEQ ID NO: 1907272 - RNA, 19 nt, Artificial Sequence
  Description of Artificial Sequence: Synthetic oligonucleotide
  Sense strand starting at position 2155 of SEQ ID NO: 1879439
guccuaucacuuuacaggu

SEQ ID NO: 1907273 - RNA, 19 nt, Artificial Sequence
  Description of Artificial Sequence: Synthetic oligonucleotide
  Antisense strand to SEQ ID NO: 1907272
accuguaaagugauaggac

SEQ ID NO: 1907274 - RNA, 19 nt, Artificial Sequence
  Description of Artificial Sequence: Synthetic oligonucleotide
  Sense strand starting at position 2188 of SEQ ID NO: 1879439
uuugaagucuauuccaaag

SEQ ID NO: 1907275 - RNA, 19 nt, Artificial Sequence
  Description of Artificial Sequence: Synthetic oligonucleotide
  Antisense strand to SEQ ID NO: 1907274
cuuuggaauagacuucaaa

SEQ ID NO: 1907276 - RNA, 19 nt, Artificial Sequence
  Description of Artificial Sequence: Synthetic oligonucleotide
  Sense strand starting at position 2205 of SEQ ID NO: 1879439
agacaucaguuaucccaca

SEQ ID NO: 1907277 - RNA, 19 nt, Artificial Sequence
  Description of Artificial Sequence: Synthetic oligonucleotide
  Antisense strand to SEQ ID NO: 1907276
ugugggauaacugaugucu

SEQ ID NO: 1907278 - RNA, 19 nt, Artificial Sequence
  Description of Artificial Sequence: Synthetic oligonucleotide
  Sense strand starting at position 2255 of SEQ ID NO: 1879439
guuaaacuacucugagcua

SEQ ID NO: 1907279 - RNA, 19 nt, Artificial Sequence
  Description of Artificial Sequence: Synthetic oligonucleotide
  Antisense strand to SEQ ID NO: 1907278
uagcucagaguaguuuaac

SEQ ID NO: 1907280 - RNA, 19 nt, Artificial Sequence
  Description of Artificial Sequence: Synthetic oligonucleotide
  Sense strand starting at position 2282 of SEQ ID NO: 1879439
ugcauucuucucuaauggu

SEQ ID NO: 1907281 - RNA, 19 nt, Artificial Sequence
  Description of Artificial Sequence: Synthetic oligonucleotide
  Antisense strand to SEQ ID NO: 1907280
accauuagagaagaaugca

SEQ ID NO: 1907282 - RNA, 19 nt, Artificial Sequence
  Description of Artificial Sequence: Synthetic oligonucleotide
  Sense strand starting at position 2290 of SEQ ID NO: 1879439
ucucuaaugguguaaauaa

SEQ ID NO: 1907283 - RNA, 19 nt, Artificial Sequence
  Description of Artificial Sequence: Synthetic oligonucleotide
  Antisense strand to SEQ ID NO: 1907282
uuauuuacaccauuagaga

SEQ ID NO: 1907284 - RNA, 19 nt, Artificial Sequence
  Description of Artificial Sequence: Synthetic oligonucleotide
  Sense strand starting at position 2344 of SEQ ID NO: 1879439
gccauauuucucuggccua

SEQ ID NO: 1907285 - RNA, 19 nt, Artificial Sequence
  Description of Artificial Sequence: Synthetic oligonucleotide
  Antisense strand to SEQ ID NO: 1907284
uaggccagagaaauauggc

SEQ ID NO: 1907286 - RNA, 19 nt, Artificial Sequence
  Description of Artificial Sequence: Synthetic oligonucleotide
  Sense strand starting at position 2391 of SEQ ID NO: 1879439
gugugcgugguucuuuaaa

SEQ ID NO: 1907287 - RNA, 19 nt, Artificial Sequence
  Description of Artificial Sequence: Synthetic oligonucleotide
  Antisense strand to SEQ ID NO: 1907286
uuuaaagaaccacgcacac

SEQ ID NO: 1907288 - RNA, 19 nt, Artificial Sequence
  Description of Artificial Sequence: Synthetic oligonucleotide
  Sense strand starting at position 2580 of SEQ ID NO: 1879439
ucucuugacucaguucuca

SEQ ID NO: 1907289 - RNA, 19 nt, Artificial Sequence
  Description of Artificial Sequence: Synthetic oligonucleotide
  Antisense strand to SEQ ID NO: 1907288
ugagaacugagucaagaga

SEQ ID NO: 1907290 - RNA, 19 nt, Artificial Sequence
  Description of Artificial Sequence: Synthetic oligonucleotide
  Sense strand starting at position 2750 of SEQ ID NO: 1879439
auggcaauuucuguagucu

SEQ ID NO: 1907291 - RNA, 19 nt, Artificial Sequence
  Description of Artificial Sequence: Synthetic oligonucleotide
  Antisense strand to SEQ ID NO: 1907290
agacuacagaaauugccau

SEQ ID NO: 1907292 - RNA, 19 nt, Artificial Sequence
  Description of Artificial Sequence: Synthetic oligonucleotide
  Sense strand starting at position 2762 of SEQ ID NO: 1879439
guagucucaggucaugaaa

SEQ ID NO: 1907293 - RNA, 19 nt, Artificial Sequence
  Description of Artificial Sequence: Synthetic oligonucleotide
  Antisense strand to SEQ ID NO: 1907292
uuucaugaccugagacuac

SEQ ID NO: 1907294 - RNA, 19 nt, Artificial Sequence
  Description of Artificial Sequence: Synthetic oligonucleotide
  Sense strand starting at position 2950 of SEQ ID NO: 1879439
cuaucuguugccuaaugau

SEQ ID NO: 1907295 - RNA, 19 nt, Artificial Sequence
  Description of Artificial Sequence: Synthetic oligonucleotide
  Antisense strand to SEQ ID NO: 1907294
aucauuaggcaacagauag

SEQ ID NO: 1907296 - RNA, 19 nt, Artificial Sequence
  Description of Artificial Sequence: Synthetic oligonucleotide
  Sense strand starting at position 3185 of SEQ ID NO: 1879439
aaagcauaucaggguacaa

SEQ ID NO: 1907297 - RNA, 19 nt, Artificial Sequence
  Description of Artificial Sequence: Synthetic oligonucleotide
  Antisense strand to SEQ ID NO: 1907296
uuguacccugauaugcuuu

SEQ ID NO: 1907298 - RNA, 19 nt, Artificial Sequence
  Description of Artificial Sequence: Synthetic oligonucleotide
  Sense strand starting at position 3324 of SEQ ID NO: 1879439
cuccuaacaucuguggaca

SEQ ID NO: 1907299 - RNA, 19 nt, Artificial Sequence
  Description of Artificial Sequence: Synthetic oligonucleotide
  Antisense strand to SEQ ID NO: 1907298
uguccacagauguuaggag

SEQ ID NO: 1907300 - RNA, 19 nt, Artificial Sequence
  Description of Artificial Sequence: Synthetic oligonucleotide
  Sense strand starting at position 3325 of SEQ ID NO: 1879439
uccuaacaucuguggacau

SEQ ID NO: 1907301 - RNA, 19 nt, Artificial Sequence
  Description of Artificial Sequence: Synthetic oligonucleotide
  Antisense strand to SEQ ID NO: 1907300
auguccacagauguuagga

SEQ ID NO: 1907302 - RNA, 19 nt, Artificial Sequence
  Description of Artificial Sequence: Synthetic oligonucleotide
  Sense strand starting at position 3369 of SEQ ID NO: 1879439
auuauaucaugcuucugga

SEQ ID NO: 1907303 - RNA, 19 nt, Artificial Sequence
  Description of Artificial Sequence: Synthetic oligonucleotide
  Antisense strand to SEQ ID NO: 1907302
uccagaagcaugauauaau

SEQ ID NO: 1907304 - RNA, 19 nt, Artificial Sequence
  Description of Artificial Sequence: Synthetic oligonucleotide
  Sense strand starting at position 108 of SEQ ID NO: 1879440
cuuacaaucuguuacagga

SEQ ID NO: 1907305 - RNA, 19 nt, Artificial Sequence
  Description of Artificial Sequence: Synthetic oligonucleotide
  Antisense strand to SEQ ID NO: 1907304
uccuguaacagauuguaag

SEQ ID NO: 1907306 - RNA, 19 nt, Artificial Sequence
  Description of Artificial Sequence: Synthetic oligonucleotide
  Sense strand starting at position 421 of SEQ ID NO: 1879440
cgagacucgucucaauaau

SEQ ID NO: 1907307 - RNA, 19 nt, Artificial Sequence
  Description of Artificial Sequence: Synthetic oligonucleotide
  Antisense strand to SEQ ID NO: 1907306
auuauugagacgagucucg

SEQ ID NO: 1907308 - RNA, 19 nt, Artificial Sequence
  Description of Artificial Sequence: Synthetic oligonucleotide
  Sense strand starting at position 534 of SEQ ID NO: 1879440
gagaauuucuaugggcaga

SEQ ID NO: 1907309 - RNA, 19 nt, Artificial Sequence
  Description of Artificial Sequence: Synthetic oligonucleotide
  Antisense strand to SEQ ID NO: 1907308
ucugcccauagaaauucuc

SEQ ID NO: 1907310 - RNA, 19 nt, Artificial Sequence
  Description of Artificial Sequence: Synthetic oligonucleotide
  Sense strand starting at position 539 of SEQ ID NO: 1879440
uuucuaugggcagagcaaa

SEQ ID NO: 1907311 - RNA, 19 nt, Artificial Sequence
  Description of Artificial Sequence: Synthetic oligonucleotide
  Antisense strand to SEQ ID NO: 1907310
uuugcucugcccauagaaa

SEQ ID NO: 1907312 - RNA, 19 nt, Artificial Sequence
  Description of Artificial Sequence: Synthetic oligonucleotide
  Sense strand starting at position 550 of SEQ ID NO: 1879440
agagcaaagucauggguca

SEQ ID NO: 1907313 - RNA, 19 nt, Artificial Sequence
  Description of Artificial Sequence: Synthetic oligonucleotide
  Antisense strand to SEQ ID NO: 1907312
ugacccaugacuuugcucu

SEQ ID NO: 1907314 - RNA, 19 nt, Artificial Sequence
  Description of Artificial Sequence: Synthetic oligonucleotide
  Sense strand starting at position 557 of SEQ ID NO: 1879440
agucaugggucacgggaau

SEQ ID NO: 1907315 - RNA, 19 nt, Artificial Sequence
  Description of Artificial Sequence: Synthetic oligonucleotide
  Antisense strand to SEQ ID NO: 1907314
auucccgugacccaugacu

SEQ ID NO: 1907316 - RNA, 19 nt, Artificial Sequence
  Description of Artificial Sequence: Synthetic oligonucleotide
  Sense strand starting at position 632 of SEQ ID NO: 1879440
guuuaaagauuagaagguu

SEQ ID NO: 1907317 - RNA, 19 nt, Artificial Sequence
  Description of Artificial Sequence: Synthetic oligonucleotide
  Antisense strand to SEQ ID NO: 1907316
aaccuucuaaucuuuaaac

SEQ ID NO: 1907318 - RNA, 19 nt, Artificial Sequence
  Description of Artificial Sequence: Synthetic oligonucleotide
  Sense strand starting at position 717 of SEQ ID NO: 1879440
ggguauaucuugcccagag

SEQ ID NO: 1907319 - RNA, 19 nt, Artificial Sequence
  Description of Artificial Sequence: Synthetic oligonucleotide
  Antisense strand to SEQ ID NO: 1907318
cucugggcaagauauaccc

SEQ ID NO: 1907320 - RNA, 19 nt, Artificial Sequence
  Description of Artificial Sequence: Synthetic oligonucleotide
  Sense strand starting at position 718 of SEQ ID NO: 1879440
gguauaucuugcccagaga

SEQ ID NO: 1907321 - RNA, 19 nt, Artificial Sequence
  Description of Artificial Sequence: Synthetic oligonucleotide
  Antisense strand to SEQ ID NO: 1907320
ucucugggcaagauauacc

SEQ ID NO: 1907322 - RNA, 19 nt, Artificial Sequence
  Description of Artificial Sequence: Synthetic oligonucleotide
  Sense strand starting at position 719 of SEQ ID NO: 1879440
guauaucuugcccagagag

SEQ ID NO: 1907323 - RNA, 19 nt, Artificial Sequence
  Description of Artificial Sequence: Synthetic oligonucleotide
  Antisense strand to SEQ ID NO: 1907322
cucucugggcaagauauac

SEQ ID NO: 1907324 - RNA, 19 nt, Artificial Sequence
  Description of Artificial Sequence: Synthetic oligonucleotide
  Sense strand starting at position 795 of SEQ ID NO: 1879440
agcauuuccugugaggaug

SEQ ID NO: 1907325 - RNA, 19 nt, Artificial Sequence
  Description of Artificial Sequence: Synthetic oligonucleotide
  Antisense strand to SEQ ID NO: 1907324
cauccucacaggaaaugcu

SEQ ID NO: 1907326 - RNA, 19 nt, Artificial Sequence
  Description of Artificial Sequence: Synthetic oligonucleotide
  Sense strand starting at position 797 of SEQ ID NO: 1879440
cauuuccugugaggaugaa

SEQ ID NO: 1907327 - RNA, 19 nt, Artificial Sequence
  Description of Artificial Sequence: Synthetic oligonucleotide
  Antisense strand to SEQ ID NO: 1907326
uucauccucacaggaaaug

SEQ ID NO: 1907328 - RNA, 19 nt, Artificial Sequence
  Description of Artificial Sequence: Synthetic oligonucleotide
  Sense strand starting at position 1017 of SEQ ID NO: 1879440
cgggcuguuacccaacuaa

SEQ ID NO: 1907329 - RNA, 19 nt, Artificial Sequence
  Description of Artificial Sequence: Synthetic oligonucleotide
  Antisense strand to SEQ ID NO: 1907328
uuaguuggguaacagcccg

SEQ ID NO: 1907330 - RNA, 19 nt, Artificial Sequence
  Description of Artificial Sequence: Synthetic oligonucleotide
  Sense strand starting at position 1361 of SEQ ID NO: 1879440
cccuuaguuucuggaagag

SEQ ID NO: 1907331 - RNA, 19 nt, Artificial Sequence
  Description of Artificial Sequence: Synthetic oligonucleotide
  Antisense strand to SEQ ID NO: 1907330
cucuuccagaaacuaaggg

SEQ ID NO: 1907332 - RNA, 19 nt, Artificial Sequence
  Description of Artificial Sequence: Synthetic oligonucleotide
  Sense strand starting at position 1974 of SEQ ID NO: 1879440
gggcccugccaugaacauu

SEQ ID NO: 1907333 - RNA, 19 nt, Artificial Sequence
  Description of Artificial Sequence: Synthetic oligonucleotide
  Antisense strand to SEQ ID NO: 1907332
aauguucauggcagggccc

SEQ ID NO: 1907334 - RNA, 19 nt, Artificial Sequence
  Description of Artificial Sequence: Synthetic oligonucleotide
  Sense strand starting at position 2248 of SEQ ID NO: 1879440
gacugagucaggcgcaaau

SEQ ID NO: 1907335 - RNA, 19 nt, Artificial Sequence
  Description of Artificial Sequence: Synthetic oligonucleotide
  Antisense strand to SEQ ID NO: 1907334
auuugcgccugacucaguc

SEQ ID NO: 1907336 - RNA, 19 nt, Artificial Sequence
  Description of Artificial Sequence: Synthetic oligonucleotide
  Sense strand starting at position 2250 of SEQ ID NO: 1879440
cugagucaggcgcaaauua

SEQ ID NO: 1907337 - RNA, 19 nt, Artificial Sequence
  Description of Artificial Sequence: Synthetic oligonucleotide
  Antisense strand to SEQ ID NO: 1907336
uaauuugcgccugacucag

SEQ ID NO: 1907338 - RNA, 19 nt, Artificial Sequence
  Description of Artificial Sequence: Synthetic oligonucleotide
  Sense strand starting at position 2556 of SEQ ID NO: 1879440
guggcacucgccuauggua

SEQ ID NO: 1907339 - RNA, 19 nt, Artificial Sequence
  Description of Artificial Sequence: Synthetic oligonucleotide
  Antisense strand to SEQ ID NO: 1907338
uaccauaggcgagugccac

SEQ ID NO: 1907340 - RNA, 19 nt, Artificial Sequence
  Description of Artificial Sequence: Synthetic oligonucleotide
  Sense strand starting at position 3334 of SEQ ID NO: 1879440
ggagcaacuuacccacauu

SEQ ID NO: 1907341 - RNA, 19 nt, Artificial Sequence
  Description of Artificial Sequence: Synthetic oligonucleotide
  Antisense strand to SEQ ID NO: 1907340
aauguggguaaguugcucc

SEQ ID NO: 1907342 - RNA, 19 nt, Artificial Sequence
  Description of Artificial Sequence: Synthetic oligonucleotide
  Sense strand starting at position 3359 of SEQ ID NO: 1879440
acacuaguauggcuacaaa

SEQ ID NO: 1907343 - RNA, 19 nt, Artificial Sequence
  Description of Artificial Sequence: Synthetic oligonucleotide
  Antisense strand to SEQ ID NO: 1907342
uuuguagccauacuagugu

SEQ ID NO: 1907344 - RNA, 19 nt, Artificial Sequence
  Description of Artificial Sequence: Synthetic oligonucleotide
  Sense strand starting at position 3564 of SEQ ID NO: 1879440
accugagguuccucgucua

SEQ ID NO: 1907345 - RNA, 19 nt, Artificial Sequence
  Description of Artificial Sequence: Synthetic oligonucleotide
  Antisense strand to SEQ ID NO: 1907344
uagacgaggaaccucaggu

SEQ ID NO: 1907346 - RNA, 19 nt, Artificial Sequence
  Description of Artificial Sequence: Synthetic oligonucleotide
  Sense strand starting at position 3661 of SEQ ID NO: 1879440
aaaggucucucaugagaga

SEQ ID NO: 1907347 - RNA, 19 nt, Artificial Sequence
  Description of Artificial Sequence: Synthetic oligonucleotide
  Antisense strand to SEQ ID NO: 1907346
ucucucaugagagaccuuu

SEQ ID NO: 1907348 - RNA, 19 nt, Artificial Sequence
  Description of Artificial Sequence: Synthetic oligonucleotide
  Sense strand starting at position 3792 of SEQ ID NO: 1879440
gugugacguuuacauaaca

SEQ ID NO: 1907349 - RNA, 19 nt, Artificial Sequence
  Description of Artificial Sequence: Synthetic oligonucleotide
  Antisense strand to SEQ ID NO: 1907348
uguuauguaaacgucacac

SEQ ID NO: 1907350 - RNA, 19 nt, Artificial Sequence
  Description of Artificial Sequence: Synthetic oligonucleotide
  Sense strand starting at position 3946 of SEQ ID NO: 1879440
augcguagucccaggugua

SEQ ID NO: 1907351 - RNA, 19 nt, Artificial Sequence
  Description of Artificial Sequence: Synthetic oligonucleotide
  Antisense strand to SEQ ID NO: 1907350
uacaccugggacuacgcau

SEQ ID NO: 1907352 - RNA, 19 nt, Artificial Sequence
  Description of Artificial Sequence: Synthetic oligonucleotide
  Sense strand starting at position 55 of SEQ ID NO: 1879441
cugguuacucuaugaccuu

SEQ ID NO: 1907353 - RNA, 19 nt, Artificial Sequence
  Description of Artificial Sequence: Synthetic oligonucleotide
  Antisense strand to SEQ ID NO: 1907352
aaggucauagaguaaccag

SEQ ID NO: 1907354 - RNA, 19 nt, Artificial Sequence
  Description of Artificial Sequence: Synthetic oligonucleotide
  Sense strand starting at position 61 of SEQ ID NO: 1879441
acucuaugaccuugucuca

SEQ ID NO: 1907355 - RNA, 19 nt, Artificial Sequence
  Description of Artificial Sequence: Synthetic oligonucleotide
  Antisense strand to SEQ ID NO: 1907354
ugagacaaggucauagagu

SEQ ID NO: 1907356 - RNA, 19 nt, Artificial Sequence
  Description of Artificial Sequence: Synthetic oligonucleotide
  Sense strand starting at position 395 of SEQ ID NO: 1879441
ugugucugcagcuuagagu

SEQ ID NO: 1907357 - RNA, 19 nt, Artificial Sequence
  Description of Artificial Sequence: Synthetic oligonucleotide
  Antisense strand to SEQ ID NO: 1907356
acucuaagcugcagacaca

SEQ ID NO: 1907358 - RNA, 19 nt, Artificial Sequence
  Description of Artificial Sequence: Synthetic oligonucleotide
  Sense strand starting at position 408 of SEQ ID NO: 1879441
uagaguaacgucugacaca

SEQ ID NO: 1907359 - RNA, 19 nt, Artificial Sequence
  Description of Artificial Sequence: Synthetic oligonucleotide
  Antisense strand to SEQ ID NO: 1907358
ugugucagacguuacucua

SEQ ID NO: 1907360 - RNA, 19 nt, Artificial Sequence
  Description of Artificial Sequence: Synthetic oligonucleotide
  Sense strand starting at position 426 of SEQ ID NO: 1879441
acaguaggugcucacuuau

SEQ ID NO: 1907361 - RNA, 19 nt, Artificial Sequence
  Description of Artificial Sequence: Synthetic oligonucleotide
  Antisense strand to SEQ ID NO: 1907360
auaagugagcaccuacugu

SEQ ID NO: 1907362 - RNA, 19 nt, Artificial Sequence
  Description of Artificial Sequence: Synthetic oligonucleotide
  Sense strand starting at position 822 of SEQ ID NO: 1879441
ggcccaugucgacagaucu

SEQ ID NO: 1907363 - RNA, 19 nt, Artificial Sequence
  Description of Artificial Sequence: Synthetic oligonucleotide
  Antisense strand to SEQ ID NO: 1907362
agaucugucgacaugggcc

SEQ ID NO: 1907364 - RNA, 19 nt, Artificial Sequence
  Description of Artificial Sequence: Synthetic oligonucleotide
  Sense strand starting at position 828 of SEQ ID NO: 1879441
ugucgacagaucugagauc

SEQ ID NO: 1907365 - RNA, 19 nt, Artificial Sequence
  Description of Artificial Sequence: Synthetic oligonucleotide
  Antisense strand to SEQ ID NO: 1907364
gaucucagaucugucgaca

SEQ ID NO: 1907366 - RNA, 19 nt, Artificial Sequence
  Description of Artificial Sequence: Synthetic oligonucleotide
  Sense strand starting at position 1008 of SEQ ID NO: 1879441
gugagucucuaauuccaga

SEQ ID NO: 1907367 - RNA, 19 nt, Artificial Sequence
  Description of Artificial Sequence: Synthetic oligonucleotide
  Antisense strand to SEQ ID NO: 1907366
ucuggaauuagagacucac

SEQ ID NO: 1907368 - RNA, 19 nt, Artificial Sequence
  Description of Artificial Sequence: Synthetic oligonucleotide
  Sense strand starting at position 1117 of SEQ ID NO: 1879441
agccuauuagaaggauaau

SEQ ID NO: 1907369 - RNA, 19 nt, Artificial Sequence
  Description of Artificial Sequence: Synthetic oligonucleotide
  Antisense strand to SEQ ID NO: 1907368
auuauccuucuaauaggcu

SEQ ID NO: 1907370 - RNA, 19 nt, Artificial Sequence
  Description of Artificial Sequence: Synthetic oligonucleotide
  Sense strand starting at position 1553 of SEQ ID NO: 1879441
ggcuuaauuugagaaguga

SEQ ID NO: 1907371 - RNA, 19 nt, Artificial Sequence
  Description of Artificial Sequence: Synthetic oligonucleotide
  Antisense strand to SEQ ID NO: 1907370
ucacuucucaaauuaagcc

SEQ ID NO: 1907372 - RNA, 19 nt, Artificial Sequence
  Description of Artificial Sequence: Synthetic oligonucleotide
  Sense strand starting at position 1622 of SEQ ID NO: 1879441
accacagugcuagaguaaa

SEQ ID NO: 1907373 - RNA, 19 nt, Artificial Sequence
  Description of Artificial Sequence: Synthetic oligonucleotide
  Antisense strand to SEQ ID NO: 1907372
uuuacucuagcacuguggu

SEQ ID NO: 1907374 - RNA, 19 nt, Artificial Sequence
  Description of Artificial Sequence: Synthetic oligonucleotide
  Sense strand starting at position 1820 of SEQ ID NO: 1879441
aaccuuaauggugguaaau

SEQ ID NO: 1907375 - RNA, 19 nt, Artificial Sequence
  Description of Artificial Sequence: Synthetic oligonucleotide
  Antisense strand to SEQ ID NO: 1907374
auuuaccaccauuaagguu

SEQ ID NO: 1907376 - RNA, 19 nt, Artificial Sequence
  Description of Artificial Sequence: Synthetic oligonucleotide
  Sense strand starting at position 2019 of SEQ ID NO: 1879441
ugaauagagugguccuuag

SEQ ID NO: 1907377 - RNA, 19 nt, Artificial Sequence
  Description of Artificial Sequence: Synthetic oligonucleotide
  Antisense strand to SEQ ID NO: 1907376
cuaaggaccacucuauuca

SEQ ID NO: 1907378 - RNA, 19 nt, Artificial Sequence
  Description of Artificial Sequence: Synthetic oligonucleotide
  Sense strand starting at position 2159 of SEQ ID NO: 1879441
ucuagucuggaguaugauc

SEQ ID NO: 1907379 - RNA, 19 nt, Artificial Sequence
  Description of Artificial Sequence: Synthetic oligonucleotide
  Antisense strand to SEQ ID NO: 1907378
gaucauacuccagacuaga

SEQ ID NO: 1907380 - RNA, 19 nt, Artificial Sequence
  Description of Artificial Sequence: Synthetic oligonucleotide
  Sense strand starting at position 2161 of SEQ ID NO: 1879441
uagucuggaguaugaucau

SEQ ID NO: 1907381 - RNA, 19 nt, Artificial Sequence
  Description of Artificial Sequence: Synthetic oligonucleotide
  Antisense strand to SEQ ID NO: 1907380
augaucauacuccagacua

SEQ ID NO: 1907382 - RNA, 19 nt, Artificial Sequence
  Description of Artificial Sequence: Synthetic oligonucleotide
  Sense strand starting at position 2164 of SEQ ID NO: 1879441
ucuggaguaugaucauguu

SEQ ID NO: 1907383 - RNA, 19 nt, Artificial Sequence
  Description of Artificial Sequence: Synthetic oligonucleotide
  Antisense strand to SEQ ID NO: 1907382
aacaugaucauacuccaga

SEQ ID NO: 1907384 - RNA, 19 nt, Artificial Sequence
  Description of Artificial Sequence: Synthetic oligonucleotide
  Sense strand starting at position 2172 of SEQ ID NO: 1879441
augaucauguugucuauua

SEQ ID NO: 1907385 - RNA, 19 nt, Artificial Sequence
  Description of Artificial Sequence: Synthetic oligonucleotide
  Antisense strand to SEQ ID NO: 1907384
uaauagacaacaugaucau

SEQ ID NO: 1907386 - RNA, 19 nt, Artificial Sequence
  Description of Artificial Sequence: Synthetic oligonucleotide
  Sense strand starting at position 2173 of SEQ ID NO: 1879441
ugaucauguugucuauuaa

SEQ ID NO: 1907387 - RNA, 19 nt, Artificial Sequence
  Description of Artificial Sequence: Synthetic oligonucleotide
  Antisense strand to SEQ ID NO: 1907386
uuaauagacaacaugauca

SEQ ID NO: 1907388 - RNA, 19 nt, Artificial Sequence
  Description of Artificial Sequence: Synthetic oligonucleotide
  Sense strand starting at position 2249 of SEQ ID NO: 1879441
gugacaaugugaucaccuu

SEQ ID NO: 1907389 - RNA, 19 nt, Artificial Sequence
  Description of Artificial Sequence: Synthetic oligonucleotide
  Antisense strand to SEQ ID NO: 1907388
aaggugaucacauugucac

SEQ ID NO: 1907390 - RNA, 19 nt, Artificial Sequence
  Description of Artificial Sequence: Synthetic oligonucleotide
  Sense strand starting at position 2269 of SEQ ID NO: 1879441
cugaauguucuagagcuaa

SEQ ID NO: 1907391 - RNA, 19 nt, Artificial Sequence
  Description of Artificial Sequence: Synthetic oligonucleotide
  Antisense strand to SEQ ID NO: 1907390
uuagcucuagaacauucag

SEQ ID NO: 1907392 - RNA, 19 nt, Artificial Sequence
  Description of Artificial Sequence: Synthetic oligonucleotide
  Sense strand starting at position 2280 of SEQ ID NO: 1879441
agagcuaaccagugggaca

SEQ ID NO: 1907393 - RNA, 19 nt, Artificial Sequence
  Description of Artificial Sequence: Synthetic oligonucleotide
  Antisense strand to SEQ ID NO: 1907392
ugucccacugguuagcucu

SEQ ID NO: 1907394 - RNA, 19 nt, Artificial Sequence
  Description of Artificial Sequence: Synthetic oligonucleotide
  Sense strand starting at position 2306 of SEQ ID NO: 1879441
agggcuuccuuaucaggau

SEQ ID NO: 1907395 - RNA, 19 nt, Artificial Sequence
  Description of Artificial Sequence: Synthetic oligonucleotide
  Antisense strand to SEQ ID NO: 1907394
auccugauaaggaagcccu

SEQ ID NO: 1907396 - RNA, 19 nt, Artificial Sequence
  Description of Artificial Sequence: Synthetic oligonucleotide
  Sense strand starting at position 2408 of SEQ ID NO: 1879441
acacucaaacuguguaacu

SEQ ID NO: 1907397 - RNA, 19 nt, Artificial Sequence
  Description of Artificial Sequence: Synthetic oligonucleotide
  Antisense strand to SEQ ID NO: 1907396
aguuacacaguuugagugu

SEQ ID NO: 1907398 - RNA, 19 nt, Artificial Sequence
  Description of Artificial Sequence: Synthetic oligonucleotide
  Sense strand starting at position 2419 of SEQ ID NO: 1879441
guguaacuuggagggaauu

SEQ ID NO: 1907399 - RNA, 19 nt, Artificial Sequence
  Description of Artificial Sequence: Synthetic oligonucleotide
  Antisense strand to SEQ ID NO: 1907398
aauucccuccaaguuacac

SEQ ID NO: 1907400 - RNA, 19 nt, Artificial Sequence
  Description of Artificial Sequence: Synthetic oligonucleotide
  Sense strand starting at position 2534 of SEQ ID NO: 1879441
ggagcaguuccuggaacaa

SEQ ID NO: 1907401 - RNA, 19 nt, Artificial Sequence
  Description of Artificial Sequence: Synthetic oligonucleotide
  Antisense strand to SEQ ID NO: 1907400
uuguuccaggaacugcucc

SEQ ID NO: 1907402 - RNA, 19 nt, Artificial Sequence
  Description of Artificial Sequence: Synthetic oligonucleotide
  Sense strand starting at position 2863 of SEQ ID NO: 1879441
gcugguugacaauaacuau

SEQ ID NO: 1907403 - RNA, 19 nt, Artificial Sequence
  Description of Artificial Sequence: Synthetic oligonucleotide
  Antisense strand to SEQ ID NO: 1907402
auaguuauugucaaccagc

SEQ ID NO: 1907404 - RNA, 19 nt, Artificial Sequence
  Description of Artificial Sequence: Synthetic oligonucleotide
  Sense strand starting at position 2892 of SEQ ID NO: 1879441
ucgauugugguagacaacu

SEQ ID NO: 1907405 - RNA, 19 nt, Artificial Sequence
  Description of Artificial Sequence: Synthetic oligonucleotide
  Antisense strand to SEQ ID NO: 1907404
aguugucuaccacaaucga

SEQ ID NO: 1907406 - RNA, 19 nt, Artificial Sequence
  Description of Artificial Sequence: Synthetic oligonucleotide
  Sense strand starting at position 2911 of SEQ ID NO: 1879441
gccauugacuacucaggau

SEQ ID NO: 1907407 - RNA, 19 nt, Artificial Sequence
  Description of Artificial Sequence: Synthetic oligonucleotide
  Antisense strand to SEQ ID NO: 1907406
auccugaguagucaauggc

SEQ ID NO: 1907408 - RNA, 19 nt, Artificial Sequence
  Description of Artificial Sequence: Synthetic oligonucleotide
  Sense strand starting at position 3092 of SEQ ID NO: 1879441
gauggcugugguuacagau

SEQ ID NO: 1907409 - RNA, 19 nt, Artificial Sequence
  Description of Artificial Sequence: Synthetic oligonucleotide
  Antisense strand to SEQ ID NO: 1907408
aucuguaaccacagccauc

SEQ ID NO: 1907410 - RNA, 19 nt, Artificial Sequence
  Description of Artificial Sequence: Synthetic oligonucleotide
  Sense strand starting at position 3151 of SEQ ID NO: 1879441
aaugauaaccgaggagcua

SEQ ID NO: 1907411 - RNA, 19 nt, Artificial Sequence
  Description of Artificial Sequence: Synthetic oligonucleotide
  Antisense strand to SEQ ID NO: 1907410
uagcuccucgguuaucauu

SEQ ID NO: 1907412 - RNA, 19 nt, Artificial Sequence
  Description of Artificial Sequence: Synthetic oligonucleotide
  Sense strand starting at position 3163 of SEQ ID NO: 1879441
ggagcuagguccucaauca

SEQ ID NO: 1907413 - RNA, 19 nt, Artificial Sequence
  Description of Artificial Sequence: Synthetic oligonucleotide
  Antisense strand to SEQ ID NO: 1907412
ugauugaggaccuagcucc

SEQ ID NO: 1907414 - RNA, 19 nt, Artificial Sequence
  Description of Artificial Sequence: Synthetic oligonucleotide
  Sense strand starting at position 3164 of SEQ ID NO: 1879441
gagcuagguccucaaucau

SEQ ID NO: 1907415 - RNA, 19 nt, Artificial Sequence
  Description of Artificial Sequence: Synthetic oligonucleotide
  Antisense strand to SEQ ID NO: 1907414
augauugaggaccuagcuc

SEQ ID NO: 1907416 - RNA, 19 nt, Artificial Sequence
  Description of Artificial Sequence: Synthetic oligonucleotide
  Sense strand starting at position 3189 of SEQ ID NO: 1879441
aggguagggacaugaguau

SEQ ID NO: 1907417 - RNA, 19 nt, Artificial Sequence
  Description of Artificial Sequence: Synthetic oligonucleotide
  Antisense strand to SEQ ID NO: 1907416
auacucaugucccuacccu

SEQ ID NO: 1907418 - RNA, 19 nt, Artificial Sequence
  Description of Artificial Sequence: Synthetic oligonucleotide
  Sense strand starting at position 3236 of SEQ ID NO: 1879441
auaagcauuguuuagcaua

SEQ ID NO: 1907419 - RNA, 19 nt, Artificial Sequence
  Description of Artificial Sequence: Synthetic oligonucleotide
  Antisense strand to SEQ ID NO: 1907418
uaugcuaaacaaugcuuau

SEQ ID NO: 1907420 - RNA, 19 nt, Artificial Sequence
  Description of Artificial Sequence: Synthetic oligonucleotide
  Sense strand starting at position 3389 of SEQ ID NO: 1879441
gucuaauuauagcugauaa

SEQ ID NO: 1907421 - RNA, 19 nt, Artificial Sequence
  Description of Artificial Sequence: Synthetic oligonucleotide
  Antisense strand to SEQ ID NO: 1907420
uuaucagcuauaauuagac

SEQ ID NO: 1907422 - RNA, 19 nt, Artificial Sequence
  Description of Artificial Sequence: Synthetic oligonucleotide
  Sense strand starting at position 3402 of SEQ ID NO: 1879441
ugauaaggcuccuccugau

SEQ ID NO: 1907423 - RNA, 19 nt, Artificial Sequence
  Description of Artificial Sequence: Synthetic oligonucleotide
  Antisense strand to SEQ ID NO: 1907422
aucaggaggagccuuauca

SEQ ID NO: 1907424 - RNA, 19 nt, Artificial Sequence
  Description of Artificial Sequence: Synthetic oligonucleotide
  Sense strand starting at position 3478 of SEQ ID NO: 1879441
aggaaacucuacuuaguuc

SEQ ID NO: 1907425 - RNA, 19 nt, Artificial Sequence
  Description of Artificial Sequence: Synthetic oligonucleotide
  Antisense strand to SEQ ID NO: 1907424
gaacuaaguagaguuuccu

SEQ ID NO: 1907426 - RNA, 19 nt, Artificial Sequence
  Description of Artificial Sequence: Synthetic oligonucleotide
  Sense strand starting at position 3664 of SEQ ID NO: 1879441
agauauaguggucaguguu

SEQ ID NO: 1907427 - RNA, 19 nt, Artificial Sequence
  Description of Artificial Sequence: Synthetic oligonucleotide
  Antisense strand to SEQ ID NO: 1907426
aacacugaccacuauaucu

SEQ ID NO: 1907428 - RNA, 19 nt, Artificial Sequence
  Description of Artificial Sequence: Synthetic oligonucleotide
  Sense strand starting at position 3718 of SEQ ID NO: 1879441
gaguuuccacgaggaaauc

SEQ ID NO: 1907429 - RNA, 19 nt, Artificial Sequence
  Description of Artificial Sequence: Synthetic oligonucleotide
  Antisense strand to SEQ ID NO: 1907428
gauuuccucguggaaacuc

SEQ ID NO: 1907430 - RNA, 19 nt, Artificial Sequence
  Description of Artificial Sequence: Synthetic oligonucleotide
  Sense strand starting at position 3848 of SEQ ID NO: 1879441
gacucaugagguugggacu

SEQ ID NO: 1907431 - RNA, 19 nt, Artificial Sequence
  Description of Artificial Sequence: Synthetic oligonucleotide
  Antisense strand to SEQ ID NO: 1907430
agucccaaccucaugaguc

SEQ ID NO: 1907432 - RNA, 19 nt, Artificial Sequence
  Description of Artificial Sequence: Synthetic oligonucleotide
  Sense strand starting at position 58 of SEQ ID NO: 1879442
uccaguccuguuuaaauag

SEQ ID NO: 1907433 - RNA, 19 nt, Artificial Sequence
  Description of Artificial Sequence: Synthetic oligonucleotide
  Antisense strand to SEQ ID NO: 1907432
cuauuuaaacaggacugga

SEQ ID NO: 1907434 - RNA, 19 nt, Artificial Sequence
  Description of Artificial Sequence: Synthetic oligonucleotide
  Sense strand starting at position 76 of SEQ ID NO: 1879442
gcaauacuuccggacacaa

SEQ ID NO: 1907435 - RNA, 19 nt, Artificial Sequence
  Description of Artificial Sequence: Synthetic oligonucleotide
  Antisense strand to SEQ ID NO: 1907434
uuguguccggaaguauugc

SEQ ID NO: 1907436 - RNA, 19 nt, Artificial Sequence
  Description of Artificial Sequence: Synthetic oligonucleotide
  Sense strand starting at position 107 of SEQ ID NO: 1879442
ucaauagggcuuugguuaa

SEQ ID NO: 1907437 - RNA, 19 nt, Artificial Sequence
  Description of Artificial Sequence: Synthetic oligonucleotide
  Antisense strand to SEQ ID NO: 1907436
uuaaccaaagcccuauuga

SEQ ID NO: 1907438 - RNA, 19 nt, Artificial Sequence
  Description of Artificial Sequence: Synthetic oligonucleotide
  Sense strand starting at position 138 of SEQ ID NO: 1879442
uggaauacgaaguagugau

SEQ ID NO: 1907439 - RNA, 19 nt, Artificial Sequence
  Description of Artificial Sequence: Synthetic oligonucleotide
  Antisense strand to SEQ ID NO: 1907438
aucacuacuucguauucca

SEQ ID NO: 1907440 - RNA, 19 nt, Artificial Sequence
  Description of Artificial Sequence: Synthetic oligonucleotide
  Sense strand starting at position 226 of SEQ ID NO: 1879442
guucgaugugauuacauau

SEQ ID NO: 1907441 - RNA, 19 nt, Artificial Sequence
  Description of Artificial Sequence: Synthetic oligonucleotide
  Antisense strand to SEQ ID NO: 1907440
auauguaaucacaucgaac

SEQ ID NO: 1907442 - RNA, 19 nt, Artificial Sequence
  Description of Artificial Sequence: Synthetic oligonucleotide
  Sense strand starting at position 563 of SEQ ID NO: 1879442
gaaagaccuggccaguuau

SEQ ID NO: 1907443 - RNA, 19 nt, Artificial Sequence
  Description of Artificial Sequence: Synthetic oligonucleotide
  Antisense strand to SEQ ID NO: 1907442
auaacuggccaggucuuuc

SEQ ID NO: 1907444 - RNA, 19 nt, Artificial Sequence
  Description of Artificial Sequence: Synthetic oligonucleotide
  Sense strand starting at position 636 of SEQ ID NO: 1879442
uugggcagugauuauuaaa

SEQ ID NO: 1907445 - RNA, 19 nt, Artificial Sequence
  Description of Artificial Sequence: Synthetic oligonucleotide
  Antisense strand to SEQ ID NO: 1907444
uuuaauaaucacugcccaa

SEQ ID NO: 1907446 - RNA, 19 nt, Artificial Sequence
  Description of Artificial Sequence: Synthetic oligonucleotide
  Sense strand starting at position 1029 of SEQ ID NO: 1879442
uggucugaaucuuccagga

SEQ ID NO: 1907447 - RNA, 19 nt, Artificial Sequence
  Description of Artificial Sequence: Synthetic oligonucleotide
  Antisense strand to SEQ ID NO: 1907446
uccuggaagauucagacca

SEQ ID NO: 1907448 - RNA, 19 nt, Artificial Sequence
  Description of Artificial Sequence: Synthetic oligonucleotide
  Sense strand starting at position 1110 of SEQ ID NO: 1879442
guagcaaguguguuugugu

SEQ ID NO: 1907449 - RNA, 19 nt, Artificial Sequence
  Description of Artificial Sequence: Synthetic oligonucleotide
  Antisense strand to SEQ ID NO: 1907448
acacaaacacacuugcuac

SEQ ID NO: 1907450 - RNA, 19 nt, Artificial Sequence
  Description of Artificial Sequence: Synthetic oligonucleotide
  Sense strand starting at position 1140 of SEQ ID NO: 1879442
guguuugagaggcagcaaa

SEQ ID NO: 1907451 - RNA, 19 nt, Artificial Sequence
  Description of Artificial Sequence: Synthetic oligonucleotide
  Antisense strand to SEQ ID NO: 1907450
uuugcugccucucaaacac

SEQ ID NO: 1907452 - RNA, 19 nt, Artificial Sequence
  Description of Artificial Sequence: Synthetic oligonucleotide
  Sense strand starting at position 1341 of SEQ ID NO: 1879442
ucaguaacuagauggugau

SEQ ID NO: 1907453 - RNA, 19 nt, Artificial Sequence
  Description of Artificial Sequence: Synthetic oligonucleotide
  Antisense strand to SEQ ID NO: 1907452
aucaccaucuaguuacuga

SEQ ID NO: 1907454 - RNA, 19 nt, Artificial Sequence
  Description of Artificial Sequence: Synthetic oligonucleotide
  Sense strand starting at position 1353 of SEQ ID NO: 1879442
uggugaugcagguaaguga

SEQ ID NO: 1907455 - RNA, 19 nt, Artificial Sequence
  Description of Artificial Sequence: Synthetic oligonucleotide
  Antisense strand to SEQ ID NO: 1907454
ucacuuaccugcaucacca

SEQ ID NO: 1907456 - RNA, 19 nt, Artificial Sequence
  Description of Artificial Sequence: Synthetic oligonucleotide
  Sense strand starting at position 1375 of SEQ ID NO: 1879442
ucccguugaguggauuaaa

SEQ ID NO: 1907457 - RNA, 19 nt, Artificial Sequence
  Description of Artificial Sequence: Synthetic oligonucleotide
  Antisense strand to SEQ ID NO: 1907456
uuuaauccacucaacggga

SEQ ID NO: 1907458 - RNA, 19 nt, Artificial Sequence
  Description of Artificial Sequence: Synthetic oligonucleotide
  Sense strand starting at position 1378 of SEQ ID NO: 1879442
cguugaguggauuaaauuc

SEQ ID NO: 1907459 - RNA, 19 nt, Artificial Sequence
  Description of Artificial Sequence: Synthetic oligonucleotide
  Antisense strand to SEQ ID NO: 1907458
gaauuuaauccacucaacg

SEQ ID NO: 1907460 - RNA, 19 nt, Artificial Sequence
  Description of Artificial Sequence: Synthetic oligonucleotide
  Sense strand starting at position 1385 of SEQ ID NO: 1879442
uggauuaaauuccuagucu

SEQ ID NO: 1907461 - RNA, 19 nt, Artificial Sequence
  Description of Artificial Sequence: Synthetic oligonucleotide
  Antisense strand to SEQ ID NO: 1907460
agacuaggaauuuaaucca

SEQ ID NO: 1907462 - RNA, 19 nt, Artificial Sequence
  Description of Artificial Sequence: Synthetic oligonucleotide
  Sense strand starting at position 1413 of SEQ ID NO: 1879442
gguguugaccuagaaugac

SEQ ID NO: 1907463 - RNA, 19 nt, Artificial Sequence
  Description of Artificial Sequence: Synthetic oligonucleotide
  Antisense strand to SEQ ID NO: 1907462
gucauucuaggucaacacc

SEQ ID NO: 1907464 - RNA, 19 nt, Artificial Sequence
  Description of Artificial Sequence: Synthetic oligonucleotide
  Sense strand starting at position 1633 of SEQ ID NO: 1879442
ugcgguaugcuguccaaua

SEQ ID NO: 1907465 - RNA, 19 nt, Artificial Sequence
  Description of Artificial Sequence: Synthetic oligonucleotide
  Antisense strand to SEQ ID NO: 1907464
uauuggacagcauaccgca

SEQ ID NO: 1907466 - RNA, 19 nt, Artificial Sequence
  Description of Artificial Sequence: Synthetic oligonucleotide
  Sense strand starting at position 1645 of SEQ ID NO: 1879442
uccaauauguauguauaca

SEQ ID NO: 1907467 - RNA, 19 nt, Artificial Sequence
  Description of Artificial Sequence: Synthetic oligonucleotide
  Antisense strand to SEQ ID NO: 1907466
uguauacauacauauugga

SEQ ID NO: 1907468 - RNA, 19 nt, Artificial Sequence
  Description of Artificial Sequence: Synthetic oligonucleotide
  Sense strand starting at position 1888 of SEQ ID NO: 1879442
ggcugauccaagggaagua

SEQ ID NO: 1907469 - RNA, 19 nt, Artificial Sequence
  Description of Artificial Sequence: Synthetic oligonucleotide
  Antisense strand to SEQ ID NO: 1907468
uacuucccuuggaucagcc

SEQ ID NO: 1907470 - RNA, 19 nt, Artificial Sequence
  Description of Artificial Sequence: Synthetic oligonucleotide
  Sense strand starting at position 1914 of SEQ ID NO: 1879442
guggcaugucgagacaaac

SEQ ID NO: 1907471 - RNA, 19 nt, Artificial Sequence
  Description of Artificial Sequence: Synthetic oligonucleotide
  Antisense strand to SEQ ID NO: 1907470
guuugucucgacaugccac

SEQ ID NO: 1907472 - RNA, 19 nt, Artificial Sequence
  Description of Artificial Sequence: Synthetic oligonucleotide
  Sense strand starting at position 1958 of SEQ ID NO: 1879442
ucuguuugacuacaagcaa

SEQ ID NO: 1907473 - RNA, 19 nt, Artificial Sequence
  Description of Artificial Sequence: Synthetic oligonucleotide
  Antisense strand to SEQ ID NO: 1907472
uugcuuguagucaaacaga

SEQ ID NO: 1907474 - RNA, 19 nt, Artificial Sequence
  Description of Artificial Sequence: Synthetic oligonucleotide
  Sense strand starting at position 2031 of SEQ ID NO: 1879442
uguacaucacaaggauagu

SEQ ID NO: 1907475 - RNA, 19 nt, Artificial Sequence
  Description of Artificial Sequence: Synthetic oligonucleotide
  Antisense strand to SEQ ID NO: 1907474
acuauccuugugauguaca

SEQ ID NO: 1907476 - RNA, 19 nt, Artificial Sequence
  Description of Artificial Sequence: Synthetic oligonucleotide
  Sense strand starting at position 2055 of SEQ ID NO: 1879442
aagugaugacugugaccaa

SEQ ID NO: 1907477 - RNA, 19 nt, Artificial Sequence
  Description of Artificial Sequence: Synthetic oligonucleotide
  Antisense strand to SEQ ID NO: 1907476
uuggucacagucaucacuu

SEQ ID NO: 1907478 - RNA, 19 nt, Artificial Sequence
  Description of Artificial Sequence: Synthetic oligonucleotide
  Sense strand starting at position 2058 of SEQ ID NO: 1879442
ugaugacugugaccaaacu

SEQ ID NO: 1907479 - RNA, 19 nt, Artificial Sequence
  Description of Artificial Sequence: Synthetic oligonucleotide
  Antisense strand to SEQ ID NO: 1907478
aguuuggucacagucauca

SEQ ID NO: 1907480 - RNA, 19 nt, Artificial Sequence
  Description of Artificial Sequence: Synthetic oligonucleotide
  Sense strand starting at position 2635 of SEQ ID NO: 1879442
caauucuuaccguggaaca

SEQ ID NO: 1907481 - RNA, 19 nt, Artificial Sequence
  Description of Artificial Sequence: Synthetic oligonucleotide
  Antisense strand to SEQ ID NO: 1907480
uguuccacgguaagaauug

SEQ ID NO: 1907482 - RNA, 19 nt, Artificial Sequence
  Description of Artificial Sequence: Synthetic oligonucleotide
  Sense strand starting at position 2739 of SEQ ID NO: 1879442
gcgcccuuuaaguuguauu

SEQ ID NO: 1907483 - RNA, 19 nt, Artificial Sequence
  Description of Artificial Sequence: Synthetic oligonucleotide
  Antisense strand to SEQ ID NO: 1907482
aauacaacuuaaagggcgc

SEQ ID NO: 1907484 - RNA, 19 nt, Artificial Sequence
  Description of Artificial Sequence: Synthetic oligonucleotide
  Sense strand starting at position 2749 of SEQ ID NO: 1879442
aguuguauuucuucgggua

SEQ ID NO: 1907485 - RNA, 19 nt, Artificial Sequence
  Description of Artificial Sequence: Synthetic oligonucleotide
  Antisense strand to SEQ ID NO: 1907484
uacccgaagaaauacaacu

SEQ ID NO: 1907486 - RNA, 19 nt, Artificial Sequence
  Description of Artificial Sequence: Synthetic oligonucleotide
  Sense strand starting at position 2750 of SEQ ID NO: 1879442
guuguauuucuucggguaa

SEQ ID NO: 1907487 - RNA, 19 nt, Artificial Sequence
  Description of Artificial Sequence: Synthetic oligonucleotide
  Antisense strand to SEQ ID NO: 1907486
uuacccgaagaaauacaac

SEQ ID NO: 1907488 - RNA, 19 nt, Artificial Sequence
  Description of Artificial Sequence: Synthetic oligonucleotide
  Sense strand starting at position 2789 of SEQ ID NO: 1879442
uggagauuguccuuuagaa

SEQ ID NO: 1907489 - RNA, 19 nt, Artificial Sequence
  Description of Artificial Sequence: Synthetic oligonucleotide
  Antisense strand to SEQ ID NO: 1907488
uucuaaaggacaaucucca

SEQ ID NO: 1907490 - RNA, 19 nt, Artificial Sequence
  Description of Artificial Sequence: Synthetic oligonucleotide
  Sense strand starting at position 2994 of SEQ ID NO: 1879442
uuuggagcucuccaagaau

SEQ ID NO: 1907491 - RNA, 19 nt, Artificial Sequence
  Description of Artificial Sequence: Synthetic oligonucleotide
  Antisense strand to SEQ ID NO: 1907490
auucuuggagagcuccaaa

SEQ ID NO: 1907492 - RNA, 19 nt, Artificial Sequence
  Description of Artificial Sequence: Synthetic oligonucleotide
  Sense strand starting at position 3029 of SEQ ID NO: 1879442
aaugauugugcuuaguaga

SEQ ID NO: 1907493 - RNA, 19 nt, Artificial Sequence
  Description of Artificial Sequence: Synthetic oligonucleotide
  Antisense strand to SEQ ID NO: 1907492
ucuacuaagcacaaucauu

SEQ ID NO: 1907494 - RNA, 19 nt, Artificial Sequence
  Description of Artificial Sequence: Synthetic oligonucleotide
  Sense strand starting at position 3067 of SEQ ID NO: 1879442
gaaugaguauuuggaggag

SEQ ID NO: 1907495 - RNA, 19 nt, Artificial Sequence
  Description of Artificial Sequence: Synthetic oligonucleotide
  Antisense strand to SEQ ID NO: 1907494
cuccuccaaauacucauuc

SEQ ID NO: 1907496 - RNA, 19 nt, Artificial Sequence
  Description of Artificial Sequence: Synthetic oligonucleotide
  Sense strand starting at position 3217 of SEQ ID NO: 1879442
uccaaauucuuguuaugag

SEQ ID NO: 1907497 - RNA, 19 nt, Artificial Sequence
  Description of Artificial Sequence: Synthetic oligonucleotide
  Antisense strand to SEQ ID NO: 1907496
cucauaacaagaauuugga

SEQ ID NO: 1907498 - RNA, 19 nt, Artificial Sequence
  Description of Artificial Sequence: Synthetic oligonucleotide
  Sense strand starting at position 3279 of SEQ ID NO: 1879442
uguaguaaucucuguaaag

SEQ ID NO: 1907499 - RNA, 19 nt, Artificial Sequence
  Description of Artificial Sequence: Synthetic oligonucleotide
  Antisense strand to SEQ ID NO: 1907498
cuuuacagagauuacuaca

SEQ ID NO: 1907500 - RNA, 19 nt, Artificial Sequence
  Description of Artificial Sequence: Synthetic oligonucleotide
  Sense strand starting at position 3845 of SEQ ID NO: 1879442
gugcuucuccaagaugaua

SEQ ID NO: 1907501 - RNA, 19 nt, Artificial Sequence
  Description of Artificial Sequence: Synthetic oligonucleotide
  Antisense strand to SEQ ID NO: 1907500
uaucaucuuggagaagcac

SEQ ID NO: 1907502 - RNA, 19 nt, Artificial Sequence
  Description of Artificial Sequence: Synthetic oligonucleotide
  Sense strand starting at position 3907 of SEQ ID NO: 1879442
guguuuggugcucugcaua

SEQ ID NO: 1907503 - RNA, 19 nt, Artificial Sequence
  Description of Artificial Sequence: Synthetic oligonucleotide
  Antisense strand to SEQ ID NO: 1907502
uaugcagagcaccaaacac

SEQ ID NO: 1907504 - RNA, 19 nt, Artificial Sequence
  Description of Artificial Sequence: Synthetic oligonucleotide
  Sense strand starting at position 3941 of SEQ ID NO: 1879442
gugagugaccaucaggguu

SEQ ID NO: 1907505 - RNA, 19 nt, Artificial Sequence
  Description of Artificial Sequence: Synthetic oligonucleotide
  Antisense strand to SEQ ID NO: 1907504
aacccugauggucacucac

SEQ ID NO: 1907506 - RNA, 19 nt, Artificial Sequence
  Description of Artificial Sequence: Synthetic oligonucleotide
  Sense strand starting at position 3947 of SEQ ID NO: 1879442
gaccaucaggguugaucua

SEQ ID NO: 1907507 - RNA, 19 nt, Artificial Sequence
  Description of Artificial Sequence: Synthetic oligonucleotide
  Antisense strand to SEQ ID NO: 1907506
uagaucaacccugaugguc

SEQ ID NO: 1907508 - RNA, 19 nt, Artificial Sequence
  Description of Artificial Sequence: Synthetic oligonucleotide
  Sense strand starting at position 3958 of SEQ ID NO: 1879442
uugaucuaagauugucagu

SEQ ID NO: 1907509 - RNA, 19 nt, Artificial Sequence
  Description of Artificial Sequence: Synthetic oligonucleotide
  Antisense strand to SEQ ID NO: 1907508
acugacaaucuuagaucaa

SEQ ID NO: 1907510 - RNA, 19 nt, Artificial Sequence
  Description of Artificial Sequence: Synthetic oligonucleotide
  Sense strand starting at position 3960 of SEQ ID NO: 1879442
gaucuaagauugucaguua

SEQ ID NO: 1907511 - RNA, 19 nt, Artificial Sequence
  Description of Artificial Sequence: Synthetic oligonucleotide
  Antisense strand to SEQ ID NO: 1907510
uaacugacaaucuuagauc

SEQ ID NO: 1907512 - RNA, 19 nt, Artificial Sequence
  Description of Artificial Sequence: Synthetic oligonucleotide
  Sense strand starting at position 133 of SEQ ID NO: 1879443
cuguguauaguaugagaca

SEQ ID NO: 1907513 - RNA, 19 nt, Artificial Sequence
  Description of Artificial Sequence: Synthetic oligonucleotide
  Antisense strand to SEQ ID NO: 1907512
ugucucauacuauacacag

SEQ ID NO: 1907514 - RNA, 19 nt, Artificial Sequence
  Description of Artificial Sequence: Synthetic oligonucleotide
  Sense strand starting at position 215 of SEQ ID NO: 1879443
uucccugcuccagaauaga

SEQ ID NO: 1907515 - RNA, 19 nt, Artificial Sequence
  Description of Artificial Sequence: Synthetic oligonucleotide
  Antisense strand to SEQ ID NO: 1907514
ucuauucuggagcagggaa

SEQ ID NO: 1907516 - RNA, 19 nt, Artificial Sequence
  Description of Artificial Sequence: Synthetic oligonucleotide
  Sense strand starting at position 293 of SEQ ID NO: 1879443
guuucugacuuagcaauaa

SEQ ID NO: 1907517 - RNA, 19 nt, Artificial Sequence
  Description of Artificial Sequence: Synthetic oligonucleotide
  Antisense strand to SEQ ID NO: 1907516
uuauugcuaagucagaaac

SEQ ID NO: 1907518 - RNA, 19 nt, Artificial Sequence
  Description of Artificial Sequence: Synthetic oligonucleotide
  Sense strand starting at position 369 of SEQ ID NO: 1879443
acgucugaguucuuaggaa

SEQ ID NO: 1907519 - RNA, 19 nt, Artificial Sequence
  Description of Artificial Sequence: Synthetic oligonucleotide
  Antisense strand to SEQ ID NO: 1907518
uuccuaagaacucagacgu

SEQ ID NO: 1907520 - RNA, 19 nt, Artificial Sequence
  Description of Artificial Sequence: Synthetic oligonucleotide
  Sense strand starting at position 373 of SEQ ID NO: 1879443
cugaguucuuaggaauuug

SEQ ID NO: 1907521 - RNA, 19 nt, Artificial Sequence
  Description of Artificial Sequence: Synthetic oligonucleotide
  Antisense strand to SEQ ID NO: 1907520
caaauuccuaagaacucag

SEQ ID NO: 1907522 - RNA, 19 nt, Artificial Sequence
  Description of Artificial Sequence: Synthetic oligonucleotide
  Sense strand starting at position 590 of SEQ ID NO: 1879443
guguauuucugacuuuauu

SEQ ID NO: 1907523 - RNA, 19 nt, Artificial Sequence
  Description of Artificial Sequence: Synthetic oligonucleotide
  Antisense strand to SEQ ID NO: 1907522
aauaaagucagaaauacac

SEQ ID NO: 1907524 - RNA, 19 nt, Artificial Sequence
  Description of Artificial Sequence: Synthetic oligonucleotide
  Sense strand starting at position 990 of SEQ ID NO: 1879443
gagccaaacugguucuaaa

SEQ ID NO: 1907525 - RNA, 19 nt, Artificial Sequence
  Description of Artificial Sequence: Synthetic oligonucleotide
  Antisense strand to SEQ ID NO: 1907524
uuuagaaccaguuuggcuc

SEQ ID NO: 1907526 - RNA, 19 nt, Artificial Sequence
  Description of Artificial Sequence: Synthetic oligonucleotide
  Sense strand starting at position 1116 of SEQ ID NO: 1879443
guuggauugauagagcuua

SEQ ID NO: 1907527 - RNA, 19 nt, Artificial Sequence
  Description of Artificial Sequence: Synthetic oligonucleotide
  Antisense strand to SEQ ID NO: 1907526
uaagcucuaucaauccaac

SEQ ID NO: 1907528 - RNA, 19 nt, Artificial Sequence
  Description of Artificial Sequence: Synthetic oligonucleotide
  Sense strand starting at position 1163 of SEQ ID NO: 1879443
gaaugugagaaaugugguu

SEQ ID NO: 1907529 - RNA, 19 nt, Artificial Sequence
  Description of Artificial Sequence: Synthetic oligonucleotide
  Antisense strand to SEQ ID NO: 1907528
aaccacauuucucacauuc

SEQ ID NO: 1907530 - RNA, 19 nt, Artificial Sequence
  Description of Artificial Sequence: Synthetic oligonucleotide
  Sense strand starting at position 1239 of SEQ ID NO: 1879443
aguggugguugaccuaauu

SEQ ID NO: 1907531 - RNA, 19 nt, Artificial Sequence
  Description of Artificial Sequence: Synthetic oligonucleotide
  Antisense strand to SEQ ID NO: 1907530
aauuaggucaaccaccacu

SEQ ID NO: 1907532 - RNA, 19 nt, Artificial Sequence
  Description of Artificial Sequence: Synthetic oligonucleotide
  Sense strand starting at position 1298 of SEQ ID NO: 1879443
cuccauaaauguguuaucu

SEQ ID NO: 1907533 - RNA, 19 nt, Artificial Sequence
  Description of Artificial Sequence: Synthetic oligonucleotide
  Antisense strand to SEQ ID NO: 1907532
agauaacacauuuauggag

SEQ ID NO: 1907534 - RNA, 19 nt, Artificial Sequence
  Description of Artificial Sequence: Synthetic oligonucleotide
  Sense strand starting at position 1446 of SEQ ID NO: 1879443
ggagaacuuacugguucua

SEQ ID NO: 1907535 - RNA, 19 nt, Artificial Sequence
  Description of Artificial Sequence: Synthetic oligonucleotide
  Antisense strand to SEQ ID NO: 1907534
uagaaccaguaaguucucc

SEQ ID NO: 1907536 - RNA, 19 nt, Artificial Sequence
  Description of Artificial Sequence: Synthetic oligonucleotide
  Sense strand starting at position 1448 of SEQ ID NO: 1879443
agaacuuacugguucuauu

SEQ ID NO: 1907537 - RNA, 19 nt, Artificial Sequence
  Description of Artificial Sequence: Synthetic oligonucleotide
  Antisense strand to SEQ ID NO: 1907536
aauagaaccaguaaguucu

SEQ ID NO: 1907538 - RNA, 19 nt, Artificial Sequence
  Description of Artificial Sequence: Synthetic oligonucleotide
  Sense strand starting at position 2001 of SEQ ID NO: 1879443
aguaaacugucagucuaca

SEQ ID NO: 1907539 - RNA, 19 nt, Artificial Sequence
  Description of Artificial Sequence: Synthetic oligonucleotide
  Antisense strand to SEQ ID NO: 1907538
uguagacugacaguuuacu

SEQ ID NO: 1907540 - RNA, 19 nt, Artificial Sequence
  Description of Artificial Sequence: Synthetic oligonucleotide
  Sense strand starting at position 2323 of SEQ ID NO: 1879443
cuguaugcuuccuuuauuu

SEQ ID NO: 1907541 - RNA, 19 nt, Artificial Sequence
  Description of Artificial Sequence: Synthetic oligonucleotide
  Antisense strand to SEQ ID NO: 1907540
aaauaaaggaagcauacag

SEQ ID NO: 1907542 - RNA, 19 nt, Artificial Sequence
  Description of Artificial Sequence: Synthetic oligonucleotide
  Sense strand starting at position 2325 of SEQ ID NO: 1879443
guaugcuuccuuuauuucu

SEQ ID NO: 1907543 - RNA, 19 nt, Artificial Sequence
  Description of Artificial Sequence: Synthetic oligonucleotide
  Antisense strand to SEQ ID NO: 1907542
agaaauaaaggaagcauac

SEQ ID NO: 1907544 - RNA, 19 nt, Artificial Sequence
  Description of Artificial Sequence: Synthetic oligonucleotide
  Sense strand starting at position 2341 of SEQ ID NO: 1879443
ucuuaaauuggaugucuau

SEQ ID NO: 1907545 - RNA, 19 nt, Artificial Sequence
  Description of Artificial Sequence: Synthetic oligonucleotide
  Antisense strand to SEQ ID NO: 1907544
auagacauccaauuuaaga

SEQ ID NO: 1907546 - RNA, 19 nt, Artificial Sequence
  Description of Artificial Sequence: Synthetic oligonucleotide
  Sense strand starting at position 2348 of SEQ ID NO: 1879443
uuggaugucuaucuugaau

SEQ ID NO: 1907547 - RNA, 19 nt, Artificial Sequence
  Description of Artificial Sequence: Synthetic oligonucleotide
  Antisense strand to SEQ ID NO: 1907546
auucaagauagacauccaa

SEQ ID NO: 1907548 - RNA, 19 nt, Artificial Sequence
  Description of Artificial Sequence: Synthetic oligonucleotide
  Sense strand starting at position 2483 of SEQ ID NO: 1879443
cuugacucaugaguuauau

SEQ ID NO: 1907549 - RNA, 19 nt, Artificial Sequence
  Description of Artificial Sequence: Synthetic oligonucleotide
  Antisense strand to SEQ ID NO: 1907548
auauaacucaugagucaag

SEQ ID NO: 1907550 - RNA, 19 nt, Artificial Sequence
  Description of Artificial Sequence: Synthetic oligonucleotide
  Sense strand starting at position 2620 of SEQ ID NO: 1879443
cuuuaaggcuuugugauua

SEQ ID NO: 1907551 - RNA, 19 nt, Artificial Sequence
  Description of Artificial Sequence: Synthetic oligonucleotide
  Antisense strand to SEQ ID NO: 1907550
uaaucacaaagccuuaaag

SEQ ID NO: 1907552 - RNA, 19 nt, Artificial Sequence
  Description of Artificial Sequence: Synthetic oligonucleotide
  Sense strand starting at position 2658 of SEQ ID NO: 1879443
ucauguaagcuuugaacuu

SEQ ID NO: 1907553 - RNA, 19 nt, Artificial Sequence
  Description of Artificial Sequence: Synthetic oligonucleotide
  Antisense strand to SEQ ID NO: 1907552
aaguucaaagcuuacauga

SEQ ID NO: 1907554 - RNA, 19 nt, Artificial Sequence
  Description of Artificial Sequence: Synthetic oligonucleotide
  Sense strand starting at position 2990 of SEQ ID NO: 1879443
agacacuauugaguuuaau

SEQ ID NO: 1907555 - RNA, 19 nt, Artificial Sequence
  Description of Artificial Sequence: Synthetic oligonucleotide
  Antisense strand to SEQ ID NO: 1907554
auuaaacucaauagugucu

SEQ ID NO: 1907556 - RNA, 19 nt, Artificial Sequence
  Description of Artificial Sequence: Synthetic oligonucleotide
  Sense strand starting at position 3273 of SEQ ID NO: 1879443
uccuguaaugauuaucgua

SEQ ID NO: 1907557 - RNA, 19 nt, Artificial Sequence
  Description of Artificial Sequence: Synthetic oligonucleotide
  Antisense strand to SEQ ID NO: 1907556
uacgauaaucauuacagga

SEQ ID NO: 1907558 - RNA, 19 nt, Artificial Sequence
  Description of Artificial Sequence: Synthetic oligonucleotide
  Sense strand starting at position 3275 of SEQ ID NO: 1879443
cuguaaugauuaucguaag

SEQ ID NO: 1907559 - RNA, 19 nt, Artificial Sequence
  Description of Artificial Sequence: Synthetic oligonucleotide
  Antisense strand to SEQ ID NO: 1907558
cuuacgauaaucauuacag

SEQ ID NO: 1907560 - RNA, 19 nt, Artificial Sequence
  Description of Artificial Sequence: Synthetic oligonucleotide
  Sense strand starting at position 3323 of SEQ ID NO: 1879443
gauugagucuuauucuguu

SEQ ID NO: 1907561 - RNA, 19 nt, Artificial Sequence
  Description of Artificial Sequence: Synthetic oligonucleotide
  Antisense strand to SEQ ID NO: 1907560
aacagaauaagacucaauc

SEQ ID NO: 1907562 - RNA, 19 nt, Artificial Sequence
  Description of Artificial Sequence: Synthetic oligonucleotide
  Sense strand starting at position 3434 of SEQ ID NO: 1879443
gcuuaaauaguguagauca

SEQ ID NO: 1907563 - RNA, 19 nt, Artificial Sequence
  Description of Artificial Sequence: Synthetic oligonucleotide
  Antisense strand to SEQ ID NO: 1907562
ugaucuacacuauuuaagc

SEQ ID NO: 1907564 - RNA, 19 nt, Artificial Sequence
  Description of Artificial Sequence: Synthetic oligonucleotide
  Sense strand starting at position 3439 of SEQ ID NO: 1879443
aauaguguagaucaagguu

SEQ ID NO: 1907565 - RNA, 19 nt, Artificial Sequence
  Description of Artificial Sequence: Synthetic oligonucleotide
  Antisense strand to SEQ ID NO: 1907564
aaccuugaucuacacuauu

SEQ ID NO: 1907566 - RNA, 19 nt, Artificial Sequence
  Description of Artificial Sequence: Synthetic oligonucleotide
  Sense strand starting at position 3442 of SEQ ID NO: 1879443
aguguagaucaagguuaau

SEQ ID NO: 1907567 - RNA, 19 nt, Artificial Sequence
  Description of Artificial Sequence: Synthetic oligonucleotide
  Antisense strand to SEQ ID NO: 1907566
auuaaccuugaucuacacu

SEQ ID NO: 1907568 - RNA, 19 nt, Artificial Sequence
  Description of Artificial Sequence: Synthetic oligonucleotide
  Sense strand starting at position 3453 of SEQ ID NO: 1879443
agguuaaucuaugcuuuaa

SEQ ID NO: 1907569 - RNA, 19 nt, Artificial Sequence
  Description of Artificial Sequence: Synthetic oligonucleotide
  Antisense strand to SEQ ID NO: 1907568
uuaaagcauagauuaaccu

SEQ ID NO: 1907570 - RNA, 19 nt, Artificial Sequence
  Description of Artificial Sequence: Synthetic oligonucleotide
  Sense strand starting at position 3584 of SEQ ID NO: 1879443
auauguauauuugaccuga

SEQ ID NO: 1907571 - RNA, 19 nt, Artificial Sequence
  Description of Artificial Sequence: Synthetic oligonucleotide
  Antisense strand to SEQ ID NO: 1907570
ucaggucaaauauacauau

SEQ ID NO: 1907572 - RNA, 19 nt, Artificial Sequence
  Description of Artificial Sequence: Synthetic oligonucleotide
  Sense strand starting at position 3598 of SEQ ID NO: 1879443
ccugauaauugacuuguuu

SEQ ID NO: 1907573 - RNA, 19 nt, Artificial Sequence
  Description of Artificial Sequence: Synthetic oligonucleotide
  Antisense strand to SEQ ID NO: 1907572
aaacaagucaauuaucagg

SEQ ID NO: 1907574 - RNA, 19 nt, Artificial Sequence
  Description of Artificial Sequence: Synthetic oligonucleotide
  Sense strand starting at position 3659 of SEQ ID NO: 1879443
gccaaugaggguugauaau

SEQ ID NO: 1907575 - RNA, 19 nt, Artificial Sequence
  Description of Artificial Sequence: Synthetic oligonucleotide
  Antisense strand to SEQ ID NO: 1907574
auuaucaacccucauuggc

SEQ ID NO: 1907576 - RNA, 19 nt, Artificial Sequence
  Description of Artificial Sequence: Synthetic oligonucleotide
  Sense strand starting at position 3778 of SEQ ID NO: 1879443
gcuuaaugauugucucaga

SEQ ID NO: 1907577 - RNA, 19 nt, Artificial Sequence
  Description of Artificial Sequence: Synthetic oligonucleotide
  Antisense strand to SEQ ID NO: 1907576
ucugagacaaucauuaagc

SEQ ID NO: 1907578 - RNA, 19 nt, Artificial Sequence
  Description of Artificial Sequence: Synthetic oligonucleotide
  Sense strand starting at position 3779 of SEQ ID NO: 1879443
cuuaaugauugucucagau

SEQ ID NO: 1907579 - RNA, 19 nt, Artificial Sequence
  Description of Artificial Sequence: Synthetic oligonucleotide
  Antisense strand to SEQ ID NO: 1907578
aucugagacaaucauuaag

SEQ ID NO: 1907580 - RNA, 19 nt, Artificial Sequence
  Description of Artificial Sequence: Synthetic oligonucleotide
  Sense strand starting at position 3788 of SEQ ID NO: 1879443
ugucucagauaucucgaaa

SEQ ID NO: 1907581 - RNA, 19 nt, Artificial Sequence
  Description of Artificial Sequence: Synthetic oligonucleotide
  Antisense strand to SEQ ID NO: 1907580
uuucgagauaucugagaca

SEQ ID NO: 1907582 - RNA, 19 nt, Artificial Sequence
  Description of Artificial Sequence: Synthetic oligonucleotide
  Sense strand starting at position 3820 of SEQ ID NO: 1879443
ggaugaaguucugcacuag

SEQ ID NO: 1907583 - RNA, 19 nt, Artificial Sequence
  Description of Artificial Sequence: Synthetic oligonucleotide
  Antisense strand to SEQ ID NO: 1907582
cuagugcagaacuucaucc

SEQ ID NO: 1907584 - RNA, 19 nt, Artificial Sequence
  Description of Artificial Sequence: Synthetic oligonucleotide
  Sense strand starting at position 3824 of SEQ ID NO: 1879443
gaaguucugcacuagguaa

SEQ ID NO: 1907585 - RNA, 19 nt, Artificial Sequence
  Description of Artificial Sequence: Synthetic oligonucleotide
  Antisense strand to SEQ ID NO: 1907584
uuaccuagugcagaacuuc

SEQ ID NO: 1907586 - RNA, 19 nt, Artificial Sequence
  Description of Artificial Sequence: Synthetic oligonucleotide
  Sense strand starting at position 3878 of SEQ ID NO: 1879443
gguguuuagcgugcaaauu

SEQ ID NO: 1907587 - RNA, 19 nt, Artificial Sequence
  Description of Artificial Sequence: Synthetic oligonucleotide
  Antisense strand to SEQ ID NO: 1907586
aauuugcacgcuaaacacc

SEQ ID NO: 1907588 - RNA, 19 nt, Artificial Sequence
  Description of Artificial Sequence: Synthetic oligonucleotide
  Sense strand starting at position 3918 of SEQ ID NO: 1879443
acaucaguuuguguuuaaa

SEQ ID NO: 1907589 - RNA, 19 nt, Artificial Sequence
  Description of Artificial Sequence: Synthetic oligonucleotide
  Antisense strand to SEQ ID NO: 1907588
uuuaaacacaaacugaugu

SEQ ID NO: 1907590 - RNA, 19 nt, Artificial Sequence
  Description of Artificial Sequence: Synthetic oligonucleotide
  Sense strand starting at position 3959 of SEQ ID NO: 1879443
gcaagacaucccuaaaguu

SEQ ID NO: 1907591 - RNA, 19 nt, Artificial Sequence
  Description of Artificial Sequence: Synthetic oligonucleotide
  Antisense strand to SEQ ID NO: 1907590
aacuuuagggaugucuugc

SEQ ID NO: 1907592 - RNA, 19 nt, Artificial Sequence
  Description of Artificial Sequence: Synthetic oligonucleotide
  Sense strand starting at position 18 of SEQ ID NO: 1879444
ucuuuaugagacugagcga

SEQ ID NO: 1907593 - RNA, 19 nt, Artificial Sequence
  Description of Artificial Sequence: Synthetic oligonucleotide
  Antisense strand to SEQ ID NO: 1907592
ucgcucagucucauaaaga

SEQ ID NO: 1907594 - RNA, 19 nt, Artificial Sequence
  Description of Artificial Sequence: Synthetic oligonucleotide
  Sense strand starting at position 61 of SEQ ID NO: 1879444
uguccacuccuugaucuua

SEQ ID NO: 1907595 - RNA, 19 nt, Artificial Sequence
  Description of Artificial Sequence: Synthetic oligonucleotide
  Antisense strand to SEQ ID NO: 1907594
uaagaucaaggaguggaca

SEQ ID NO: 1907596 - RNA, 19 nt, Artificial Sequence
  Description of Artificial Sequence: Synthetic oligonucleotide
  Sense strand starting at position 252 of SEQ ID NO: 1879444
gaaauaguauaauuggcua

SEQ ID NO: 1907597 - RNA, 19 nt, Artificial Sequence
  Description of Artificial Sequence: Synthetic oligonucleotide
  Antisense strand to SEQ ID NO: 1907596
uagccaauuauacuauuuc

SEQ ID NO: 1907598 - RNA, 19 nt, Artificial Sequence
  Description of Artificial Sequence: Synthetic oligonucleotide
  Sense strand starting at position 315 of SEQ ID NO: 1879444
ggauaacaauagcuuaagu

SEQ ID NO: 1907599 - RNA, 19 nt, Artificial Sequence
  Description of Artificial Sequence: Synthetic oligonucleotide
  Antisense strand to SEQ ID NO: 1907598
acuuaagcuauuguuaucc

SEQ ID NO: 1907600 - RNA, 19 nt, Artificial Sequence
  Description of Artificial Sequence: Synthetic oligonucleotide
  Sense strand starting at position 358 of SEQ ID NO: 1879444
guuugaucuuaucugaucu

SEQ ID NO: 1907601 - RNA, 19 nt, Artificial Sequence
  Description of Artificial Sequence: Synthetic oligonucleotide
  Antisense strand to SEQ ID NO: 1907600
agaucagauaagaucaaac

SEQ ID NO: 1907602 - RNA, 19 nt, Artificial Sequence
  Description of Artificial Sequence: Synthetic oligonucleotide
  Sense strand starting at position 413 of SEQ ID NO: 1879444
agaagaacuuaauacuaga

SEQ ID NO: 1907603 - RNA, 19 nt, Artificial Sequence
  Description of Artificial Sequence: Synthetic oligonucleotide
  Antisense strand to SEQ ID NO: 1907602
ucuaguauuaaguucuucu

SEQ ID NO: 1907604 - RNA, 19 nt, Artificial Sequence
  Description of Artificial Sequence: Synthetic oligonucleotide
  Sense strand starting at position 479 of SEQ ID NO: 1879444
ugcuauaauuucuuguaug

SEQ ID NO: 1907605 - RNA, 19 nt, Artificial Sequence
  Description of Artificial Sequence: Synthetic oligonucleotide
  Antisense strand to SEQ ID NO: 1907604
cauacaagaaauuauagca

SEQ ID NO: 1907606 - RNA, 19 nt, Artificial Sequence
  Description of Artificial Sequence: Synthetic oligonucleotide
  Sense strand starting at position 568 of SEQ ID NO: 1879444
augaaagaguuaucuaccu

SEQ ID NO: 1907607 - RNA, 19 nt, Artificial Sequence
  Description of Artificial Sequence: Synthetic oligonucleotide
  Antisense strand to SEQ ID NO: 1907606
agguagauaacucuuucau

SEQ ID NO: 1907608 - RNA, 19 nt, Artificial Sequence
  Description of Artificial Sequence: Synthetic oligonucleotide
  Sense strand starting at position 573 of SEQ ID NO: 1879444
agaguuaucuaccuugcaa

SEQ ID NO: 1907609 - RNA, 19 nt, Artificial Sequence
  Description of Artificial Sequence: Synthetic oligonucleotide
  Antisense strand to SEQ ID NO: 1907608
uugcaagguagauaacucu

SEQ ID NO: 1907610 - RNA, 19 nt, Artificial Sequence
  Description of Artificial Sequence: Synthetic oligonucleotide
  Sense strand starting at position 661 of SEQ ID NO: 1879444
gcucuuucuggugaccaca

SEQ ID NO: 1907611 - RNA, 19 nt, Artificial Sequence
  Description of Artificial Sequence: Synthetic oligonucleotide
  Antisense strand to SEQ ID NO: 1907610
uguggucaccagaaagagc

SEQ ID NO: 1907612 - RNA, 19 nt, Artificial Sequence
  Description of Artificial Sequence: Synthetic oligonucleotide
  Sense strand starting at position 678 of SEQ ID NO: 1879444
cacccuuagggugaguuua

SEQ ID NO: 1907613 - RNA, 19 nt, Artificial Sequence
  Description of Artificial Sequence: Synthetic oligonucleotide
  Antisense strand to SEQ ID NO: 1907612
uaaacucacccuaagggug

SEQ ID NO: 1907614 - RNA, 19 nt, Artificial Sequence
  Description of Artificial Sequence: Synthetic oligonucleotide
  Sense strand starting at position 897 of SEQ ID NO: 1879444
ugcaaaguggguuauuaga

SEQ ID NO: 1907615 - RNA, 19 nt, Artificial Sequence
  Description of Artificial Sequence: Synthetic oligonucleotide
  Antisense strand to SEQ ID NO: 1907614
ucuaauaacccacuuugca

SEQ ID NO: 1907616 - RNA, 19 nt, Artificial Sequence
  Description of Artificial Sequence: Synthetic oligonucleotide
  Sense strand starting at position 1007 of SEQ ID NO: 1879444
gccagcuccuauuugcaua

SEQ ID NO: 1907617 - RNA, 19 nt, Artificial Sequence
  Description of Artificial Sequence: Synthetic oligonucleotide
  Antisense strand to SEQ ID NO: 1907616
uaugcaaauaggagcuggc

SEQ ID NO: 1907618 - RNA, 19 nt, Artificial Sequence
  Description of Artificial Sequence: Synthetic oligonucleotide
  Sense strand starting at position 1029 of SEQ ID NO: 1879444
aaaucucgacuuuguagau

SEQ ID NO: 1907619 - RNA, 19 nt, Artificial Sequence
  Description of Artificial Sequence: Synthetic oligonucleotide
  Antisense strand to SEQ ID NO: 1907618
aucuacaaagucgagauuu

SEQ ID NO: 1907620 - RNA, 19 nt, Artificial Sequence
  Description of Artificial Sequence: Synthetic oligonucleotide
  Sense strand starting at position 1030 of SEQ ID NO: 1879444
aaucucgacuuuguagauu

SEQ ID NO: 1907621 - RNA, 19 nt, Artificial Sequence
  Description of Artificial Sequence: Synthetic oligonucleotide
  Antisense strand to SEQ ID NO: 1907620
aaucuacaaagucgagauu

SEQ ID NO: 1907622 - RNA, 19 nt, Artificial Sequence
  Description of Artificial Sequence: Synthetic oligonucleotide
  Sense strand starting at position 1195 of SEQ ID NO: 1879444
agggaauucuuagcuugua

SEQ ID NO: 1907623 - RNA, 19 nt, Artificial Sequence
  Description of Artificial Sequence: Synthetic oligonucleotide
  Antisense strand to SEQ ID NO: 1907622
uacaagcuaagaauucccu

SEQ ID NO: 1907624 - RNA, 19 nt, Artificial Sequence
  Description of Artificial Sequence: Synthetic oligonucleotide
  Sense strand starting at position 1196 of SEQ ID NO: 1879444
gggaauucuuagcuuguaa

SEQ ID NO: 1907625 - RNA, 19 nt, Artificial Sequence
  Description of Artificial Sequence: Synthetic oligonucleotide
  Antisense strand to SEQ ID NO: 1907624
uuacaagcuaagaauuccc

SEQ ID NO: 1907626 - RNA, 19 nt, Artificial Sequence
  Description of Artificial Sequence: Synthetic oligonucleotide
  Sense strand starting at position 1198 of SEQ ID NO: 1879444
gaauucuuagcuuguaaag

SEQ ID NO: 1907627 - RNA, 19 nt, Artificial Sequence
  Description of Artificial Sequence: Synthetic oligonucleotide
  Antisense strand to SEQ ID NO: 1907626
cuuuacaagcuaagaauuc

SEQ ID NO: 1907628 - RNA, 19 nt, Artificial Sequence
  Description of Artificial Sequence: Synthetic oligonucleotide
  Sense strand starting at position 1444 of SEQ ID NO: 1879444
aguucucagcacuaugaga

SEQ ID NO: 1907629 - RNA, 19 nt, Artificial Sequence
  Description of Artificial Sequence: Synthetic oligonucleotide
  Antisense strand to SEQ ID NO: 1907628
ucucauagugcugagaacu

SEQ ID NO: 1907630 - RNA, 19 nt, Artificial Sequence
  Description of Artificial Sequence: Synthetic oligonucleotide
  Sense strand starting at position 1452 of SEQ ID NO: 1879444
gcacuaugagaaggcuuau

SEQ ID NO: 1907631 - RNA, 19 nt, Artificial Sequence
  Description of Artificial Sequence: Synthetic oligonucleotide
  Antisense strand to SEQ ID NO: 1907630
auaagccuucucauagugc

SEQ ID NO: 1907632 - RNA, 19 nt, Artificial Sequence
  Description of Artificial Sequence: Synthetic oligonucleotide
  Sense strand starting at position 1603 of SEQ ID NO: 1879444
gguaccuaugcacaacaau

SEQ ID NO: 1907633 - RNA, 19 nt, Artificial Sequence
  Description of Artificial Sequence: Synthetic oligonucleotide
  Antisense strand to SEQ ID NO: 1907632
auuguugugcauagguacc

SEQ ID NO: 1907634 - RNA, 19 nt, Artificial Sequence
  Description of Artificial Sequence: Synthetic oligonucleotide
  Sense strand starting at position 1657 of SEQ ID NO: 1879444
acaauuguugcauggaaua

SEQ ID NO: 1907635 - RNA, 19 nt, Artificial Sequence
  Description of Artificial Sequence: Synthetic oligonucleotide
  Antisense strand to SEQ ID NO: 1907634
uauuccaugcaacaauugu

SEQ ID NO: 1907636 - RNA, 19 nt, Artificial Sequence
  Description of Artificial Sequence: Synthetic oligonucleotide
  Sense strand starting at position 1723 of SEQ ID NO: 1879444
gcuaaaugaguugaucuag

SEQ ID NO: 1907637 - RNA, 19 nt, Artificial Sequence
  Description of Artificial Sequence: Synthetic oligonucleotide
  Antisense strand to SEQ ID NO: 1907636
cuagaucaacucauuuagc

SEQ ID NO: 1907638 - RNA, 19 nt, Artificial Sequence
  Description of Artificial Sequence: Synthetic oligonucleotide
  Sense strand starting at position 1891 of SEQ ID NO: 1879444
cuuugugguaugcauugaa

SEQ ID NO: 1907639 - RNA, 19 nt, Artificial Sequence
  Description of Artificial Sequence: Synthetic oligonucleotide
  Antisense strand to SEQ ID NO: 1907638
uucaaugcauaccacaaag

SEQ ID NO: 1907640 - RNA, 19 nt, Artificial Sequence
  Description of Artificial Sequence: Synthetic oligonucleotide
  Sense strand starting at position 1895 of SEQ ID NO: 1879444
gugguaugcauugaauauu

SEQ ID NO: 1907641 - RNA, 19 nt, Artificial Sequence
  Description of Artificial Sequence: Synthetic oligonucleotide
  Antisense strand to SEQ ID NO: 1907640
aauauucaaugcauaccac

SEQ ID NO: 1907642 - RNA, 19 nt, Artificial Sequence
  Description of Artificial Sequence: Synthetic oligonucleotide
  Sense strand starting at position 2137 of SEQ ID NO: 1879444
uaggucacgcuugacaaua

SEQ ID NO: 1907643 - RNA, 19 nt, Artificial Sequence
  Description of Artificial Sequence: Synthetic oligonucleotide
  Antisense strand to SEQ ID NO: 1907642
uauugucaagcgugaccua

SEQ ID NO: 1907644 - RNA, 19 nt, Artificial Sequence
  Description of Artificial Sequence: Synthetic oligonucleotide
  Sense strand starting at position 2466 of SEQ ID NO: 1879444
cuaguaauguaucugacag

SEQ ID NO: 1907645 - RNA, 19 nt, Artificial Sequence
  Description of Artificial Sequence: Synthetic oligonucleotide
  Antisense strand to SEQ ID NO: 1907644
cugucagauacauuacuag

SEQ ID NO: 1907646 - RNA, 19 nt, Artificial Sequence
  Description of Artificial Sequence: Synthetic oligonucleotide
  Sense strand starting at position 2692 of SEQ ID NO: 1879444
gguguuaaaugggcacaca

SEQ ID NO: 1907647 - RNA, 19 nt, Artificial Sequence
  Description of Artificial Sequence: Synthetic oligonucleotide
  Antisense strand to SEQ ID NO: 1907646
ugugugcccauuuaacacc

SEQ ID NO: 1907648 - RNA, 19 nt, Artificial Sequence
  Description of Artificial Sequence: Synthetic oligonucleotide
  Sense strand starting at position 2743 of SEQ ID NO: 1879444
ugccaagaucaauguaauc

SEQ ID NO: 1907649 - RNA, 19 nt, Artificial Sequence
  Description of Artificial Sequence: Synthetic oligonucleotide
  Antisense strand to SEQ ID NO: 1907648
gauuacauugaucuuggca

SEQ ID NO: 1907650 - RNA, 19 nt, Artificial Sequence
  Description of Artificial Sequence: Synthetic oligonucleotide
  Sense strand starting at position 2855 of SEQ ID NO: 1879444
aagugaauaccguaguaaa

SEQ ID NO: 1907651 - RNA, 19 nt, Artificial Sequence
  Description of Artificial Sequence: Synthetic oligonucleotide
  Antisense strand to SEQ ID NO: 1907650
uuuacuacgguauucacuu

SEQ ID NO: 1907652 - RNA, 19 nt, Artificial Sequence
  Description of Artificial Sequence: Synthetic oligonucleotide
  Sense strand starting at position 3149 of SEQ ID NO: 1879444
ucuggugucaaggauuaca

SEQ ID NO: 1907653 - RNA, 19 nt, Artificial Sequence
  Description of Artificial Sequence: Synthetic oligonucleotide
  Antisense strand to SEQ ID NO: 1907652
uguaauccuugacaccaga

SEQ ID NO: 1907654 - RNA, 19 nt, Artificial Sequence
  Description of Artificial Sequence: Synthetic oligonucleotide
  Sense strand starting at position 3260 of SEQ ID NO: 1879444
uuacucacagccugagaua

SEQ ID NO: 1907655 - RNA, 19 nt, Artificial Sequence
  Description of Artificial Sequence: Synthetic oligonucleotide
  Antisense strand to SEQ ID NO: 1907654
uaucucaggcugugaguaa

SEQ ID NO: 1907656 - RNA, 19 nt, Artificial Sequence
  Description of Artificial Sequence: Synthetic oligonucleotide
  Sense strand starting at position 3316 of SEQ ID NO: 1879444
agaaacaagcuauguaaga

SEQ ID NO: 1907657 - RNA, 19 nt, Artificial Sequence
  Description of Artificial Sequence: Synthetic oligonucleotide
  Antisense strand to SEQ ID NO: 1907656
ucuuacauagcuuguuucu

SEQ ID NO: 1907658 - RNA, 19 nt, Artificial Sequence
  Description of Artificial Sequence: Synthetic oligonucleotide
  Sense strand starting at position 3536 of SEQ ID NO: 1879444
cuaauuggauucccugagu

SEQ ID NO: 1907659 - RNA, 19 nt, Artificial Sequence
  Description of Artificial Sequence: Synthetic oligonucleotide
  Antisense strand to SEQ ID NO: 1907658
acucagggaauccaauuag

SEQ ID NO: 1907660 - RNA, 19 nt, Artificial Sequence
  Description of Artificial Sequence: Synthetic oligonucleotide
  Sense strand starting at position 3539 of SEQ ID NO: 1879444
auuggauucccugagucuu

SEQ ID NO: 1907661 - RNA, 19 nt, Artificial Sequence
  Description of Artificial Sequence: Synthetic oligonucleotide
  Antisense strand to SEQ ID NO: 1907660
aagacucagggaauccaau

SEQ ID NO: 1907662 - RNA, 19 nt, Artificial Sequence
  Description of Artificial Sequence: Synthetic oligonucleotide
  Sense strand starting at position 3557 of SEQ ID NO: 1879444
uggaguuuccuucaugggu

SEQ ID NO: 1907663 - RNA, 19 nt, Artificial Sequence
  Description of Artificial Sequence: Synthetic oligonucleotide
  Antisense strand to SEQ ID NO: 1907662
acccaugaaggaaacucca

SEQ ID NO: 1907664 - RNA, 19 nt, Artificial Sequence
  Description of Artificial Sequence: Synthetic oligonucleotide
  Sense strand starting at position 3596 of SEQ ID NO: 1879444
cauuaugaacauugugaug

SEQ ID NO: 1907665 - RNA, 19 nt, Artificial Sequence
  Description of Artificial Sequence: Synthetic oligonucleotide
  Antisense strand to SEQ ID NO: 1907664
caucacaauguucauaaug

SEQ ID NO: 1907666 - RNA, 19 nt, Artificial Sequence
  Description of Artificial Sequence: Synthetic oligonucleotide
  Sense strand starting at position 3605 of SEQ ID NO: 1879444
cauugugaugcacaugaua

SEQ ID NO: 1907667 - RNA, 19 nt, Artificial Sequence
  Description of Artificial Sequence: Synthetic oligonucleotide
  Antisense strand to SEQ ID NO: 1907666
uaucaugugcaucacaaug

SEQ ID NO: 1907668 - RNA, 19 nt, Artificial Sequence
  Description of Artificial Sequence: Synthetic oligonucleotide
  Sense strand starting at position 3686 of SEQ ID NO: 1879444
cgucgaagcauucuagcua

SEQ ID NO: 1907669 - RNA, 19 nt, Artificial Sequence
  Description of Artificial Sequence: Synthetic oligonucleotide
  Antisense strand to SEQ ID NO: 1907668
uagcuagaaugcuucgacg

SEQ ID NO: 1907670 - RNA, 19 nt, Artificial Sequence
  Description of Artificial Sequence: Synthetic oligonucleotide
  Sense strand starting at position 3846 of SEQ ID NO: 1879444
gugugaggccaggaaacau

SEQ ID NO: 1907671 - RNA, 19 nt, Artificial Sequence
  Description of Artificial Sequence: Synthetic oligonucleotide
  Antisense strand to SEQ ID NO: 1907670
auguuuccuggccucacac

SEQ ID NO: 1907672 - RNA, 19 nt, Artificial Sequence
  Description of Artificial Sequence: Synthetic oligonucleotide
  Sense strand starting at position 158 of SEQ ID NO: 1879445
aguucucagcacuaugaga

SEQ ID NO: 1907673 - RNA, 19 nt, Artificial Sequence
  Description of Artificial Sequence: Synthetic oligonucleotide
  Antisense strand to SEQ ID NO: 1907672
ucucauagugcugagaacu

SEQ ID NO: 1907674 - RNA, 19 nt, Artificial Sequence
  Description of Artificial Sequence: Synthetic oligonucleotide
  Sense strand starting at position 166 of SEQ ID NO: 1879445
gcacuaugagaaggcuuau

SEQ ID NO: 1907675 - RNA, 19 nt, Artificial Sequence
  Description of Artificial Sequence: Synthetic oligonucleotide
  Antisense strand to SEQ ID NO: 1907674
auaagccuucucauagugc

SEQ ID NO: 1907676 - RNA, 19 nt, Artificial Sequence
  Description of Artificial Sequence: Synthetic oligonucleotide
  Sense strand starting at position 317 of SEQ ID NO: 1879445
gguaccuaugcacaacaau

SEQ ID NO: 1907677 - RNA, 19 nt, Artificial Sequence
  Description of Artificial Sequence: Synthetic oligonucleotide
  Antisense strand to SEQ ID NO: 1907676
auuguugugcauagguacc

SEQ ID NO: 1907678 - RNA, 19 nt, Artificial Sequence
  Description of Artificial Sequence: Synthetic oligonucleotide
  Sense strand starting at position 371 of SEQ ID NO: 1879445
acaauuguugcauggaaua

SEQ ID NO: 1907679 - RNA, 19 nt, Artificial Sequence
  Description of Artificial Sequence: Synthetic oligonucleotide
  Antisense strand to SEQ ID NO: 1907678
uauuccaugcaacaauugu

SEQ ID NO: 1907680 - RNA, 19 nt, Artificial Sequence
  Description of Artificial Sequence: Synthetic oligonucleotide
  Sense strand starting at position 437 of SEQ ID NO: 1879445
gcuaaaugaguugaucuag

SEQ ID NO: 1907681 - RNA, 19 nt, Artificial Sequence
  Description of Artificial Sequence: Synthetic oligonucleotide
  Antisense strand to SEQ ID NO: 1907680
cuagaucaacucauuuagc

SEQ ID NO: 1907682 - RNA, 19 nt, Artificial Sequence
  Description of Artificial Sequence: Synthetic oligonucleotide
  Sense strand starting at position 564 of SEQ ID NO: 1879445
ggaugcaagucuuuaacuu

SEQ ID NO: 1907683 - RNA, 19 nt, Artificial Sequence
  Description of Artificial Sequence: Synthetic oligonucleotide
  Antisense strand to SEQ ID NO: 1907682
aaguuaaagacuugcaucc

SEQ ID NO: 1907684 - RNA, 19 nt, Artificial Sequence
  Description of Artificial Sequence: Synthetic oligonucleotide
  Sense strand starting at position 605 of SEQ ID NO: 1879445
cuuugugguaugcauugaa

SEQ ID NO: 1907685 - RNA, 19 nt, Artificial Sequence
  Description of Artificial Sequence: Synthetic oligonucleotide
  Antisense strand to SEQ ID NO: 1907684
uucaaugcauaccacaaag

SEQ ID NO: 1907686 - RNA, 19 nt, Artificial Sequence
  Description of Artificial Sequence: Synthetic oligonucleotide
  Sense strand starting at position 609 of SEQ ID NO: 1879445
gugguaugcauugaauauu

SEQ ID NO: 1907687 - RNA, 19 nt, Artificial Sequence
  Description of Artificial Sequence: Synthetic oligonucleotide
  Antisense strand to SEQ ID NO: 1907686
aauauucaaugcauaccac

SEQ ID NO: 1907688 - RNA, 19 nt, Artificial Sequence
  Description of Artificial Sequence: Synthetic oligonucleotide
  Sense strand starting at position 851 of SEQ ID NO: 1879445
uaggucacgcuugacaaua

SEQ ID NO: 1907689 - RNA, 19 nt, Artificial Sequence
  Description of Artificial Sequence: Synthetic oligonucleotide
  Antisense strand to SEQ ID NO: 1907688
uauugucaagcgugaccua

SEQ ID NO: 1907690 - RNA, 19 nt, Artificial Sequence
  Description of Artificial Sequence: Synthetic oligonucleotide
  Sense strand starting at position 1078 of SEQ ID NO: 1879445
ccuaauggucugcaugcaa

SEQ ID NO: 1907691 - RNA, 19 nt, Artificial Sequence
  Description of Artificial Sequence: Synthetic oligonucleotide
  Antisense strand to SEQ ID NO: 1907690
uugcaugcagaccauuagg

SEQ ID NO: 1907692 - RNA, 19 nt, Artificial Sequence
  Description of Artificial Sequence: Synthetic oligonucleotide
  Sense strand starting at position 1180 of SEQ ID NO: 1879445
cuaguaauguaucugacag

SEQ ID NO: 1907693 - RNA, 19 nt, Artificial Sequence
  Description of Artificial Sequence: Synthetic oligonucleotide
  Antisense strand to SEQ ID NO: 1907692
cugucagauacauuacuag

SEQ ID NO: 1907694 - RNA, 19 nt, Artificial Sequence
  Description of Artificial Sequence: Synthetic oligonucleotide
  Sense strand starting at position 1406 of SEQ ID NO: 1879445
gguguuaaaugggcacaca

SEQ ID NO: 1907695 - RNA, 19 nt, Artificial Sequence
  Description of Artificial Sequence: Synthetic oligonucleotide
  Antisense strand to SEQ ID NO: 1907694
ugugugcccauuuaacacc

SEQ ID NO: 1907696 - RNA, 19 nt, Artificial Sequence
  Description of Artificial Sequence: Synthetic oligonucleotide
  Sense strand starting at position 1457 of SEQ ID NO: 1879445
ugccaagaucaauguaauc

SEQ ID NO: 1907697 - RNA, 19 nt, Artificial Sequence
  Description of Artificial Sequence: Synthetic oligonucleotide
  Antisense strand to SEQ ID NO: 1907696
gauuacauugaucuuggca

SEQ ID NO: 1907698 - RNA, 19 nt, Artificial Sequence
  Description of Artificial Sequence: Synthetic oligonucleotide
  Sense strand starting at position 1569 of SEQ ID NO: 1879445
aagugaauaccguaguaaa

SEQ ID NO: 1907699 - RNA, 19 nt, Artificial Sequence
  Description of Artificial Sequence: Synthetic oligonucleotide
  Antisense strand to SEQ ID NO: 1907698
uuuacuacgguauucacuu

SEQ ID NO: 1907700 - RNA, 19 nt, Artificial Sequence
  Description of Artificial Sequence: Synthetic oligonucleotide
  Sense strand starting at position 1863 of SEQ ID NO: 1879445
ucuggugucaaggauuaca

SEQ ID NO: 1907701 - RNA, 19 nt, Artificial Sequence
  Description of Artificial Sequence: Synthetic oligonucleotide
  Antisense strand to SEQ ID NO: 1907700
uguaauccuugacaccaga

SEQ ID NO: 1907702 - RNA, 19 nt, Artificial Sequence
  Description of Artificial Sequence: Synthetic oligonucleotide
  Sense strand starting at position 1974 of SEQ ID NO: 1879445
uuacucacagccugagaua

SEQ ID NO: 1907703 - RNA, 19 nt, Artificial Sequence
  Description of Artificial Sequence: Synthetic oligonucleotide
  Antisense strand to SEQ ID NO: 1907702
uaucucaggcugugaguaa

SEQ ID NO: 1907704 - RNA, 19 nt, Artificial Sequence
  Description of Artificial Sequence: Synthetic oligonucleotide
  Sense strand starting at position 2030 of SEQ ID NO: 1879445
agaaacaagcuauguaaga

SEQ ID NO: 1907705 - RNA, 19 nt, Artificial Sequence
  Description of Artificial Sequence: Synthetic oligonucleotide
  Antisense strand to SEQ ID NO: 1907704
ucuuacauagcuuguuucu

SEQ ID NO: 1907706 - RNA, 19 nt, Artificial Sequence
  Description of Artificial Sequence: Synthetic oligonucleotide
  Sense strand starting at position 2238 of SEQ ID NO: 1879445
ugugaaagcuuucuaauug

SEQ ID NO: 1907707 - RNA, 19 nt, Artificial Sequence
  Description of Artificial Sequence: Synthetic oligonucleotide
  Antisense strand to SEQ ID NO: 1907706
caauuagaaagcuuucaca

SEQ ID NO: 1907708 - RNA, 19 nt, Artificial Sequence
  Description of Artificial Sequence: Synthetic oligonucleotide
  Sense strand starting at position 2250 of SEQ ID NO: 1879445
cuaauuggauucccugagu

SEQ ID NO: 1907709 - RNA, 19 nt, Artificial Sequence
  Description of Artificial Sequence: Synthetic oligonucleotide
  Antisense strand to SEQ ID NO: 1907708
acucagggaauccaauuag

SEQ ID NO: 1907710 - RNA, 19 nt, Artificial Sequence
  Description of Artificial Sequence: Synthetic oligonucleotide
  Sense strand starting at position 2253 of SEQ ID NO: 1879445
auuggauucccugagucuu

SEQ ID NO: 1907711 - RNA, 19 nt, Artificial Sequence
  Description of Artificial Sequence: Synthetic oligonucleotide
  Antisense strand to SEQ ID NO: 1907710
aagacucagggaauccaau

SEQ ID NO: 1907712 - RNA, 19 nt, Artificial Sequence
  Description of Artificial Sequence: Synthetic oligonucleotide
  Sense strand starting at position 2271 of SEQ ID NO: 1879445
uggaguuuccuucaugggu

SEQ ID NO: 1907713 - RNA, 19 nt, Artificial Sequence
  Description of Artificial Sequence: Synthetic oligonucleotide
  Antisense strand to SEQ ID NO: 1907712
acccaugaaggaaacucca

SEQ ID NO: 1907714 - RNA, 19 nt, Artificial Sequence
  Description of Artificial Sequence: Synthetic oligonucleotide
  Sense strand starting at position 2310 of SEQ ID NO: 1879445
cauuaugaacauugugaug

SEQ ID NO: 1907715 - RNA, 19 nt, Artificial Sequence
  Description of Artificial Sequence: Synthetic oligonucleotide
  Antisense strand to SEQ ID NO: 1907714
caucacaauguucauaaug

SEQ ID NO: 1907716 - RNA, 19 nt, Artificial Sequence
  Description of Artificial Sequence: Synthetic oligonucleotide
  Sense strand starting at position 2319 of SEQ ID NO: 1879445
cauugugaugcacaugaua

SEQ ID NO: 1907717 - RNA, 19 nt, Artificial Sequence
  Description of Artificial Sequence: Synthetic oligonucleotide
  Antisense strand to SEQ ID NO: 1907716
uaucaugugcaucacaaug

SEQ ID NO: 1907718 - RNA, 19 nt, Artificial Sequence
  Description of Artificial Sequence: Synthetic oligonucleotide
  Sense strand starting at position 2366 of SEQ ID NO: 1879445
caccauugcccagguuaga

SEQ ID NO: 1907719 - RNA, 19 nt, Artificial Sequence
  Description of Artificial Sequence: Synthetic oligonucleotide
  Antisense strand to SEQ ID NO: 1907718
ucuaaccugggcaauggug

SEQ ID NO: 1907720 - RNA, 19 nt, Artificial Sequence
  Description of Artificial Sequence: Synthetic oligonucleotide
  Sense strand starting at position 2400 of SEQ ID NO: 1879445
cgucgaagcauucuagcua

SEQ ID NO: 1907721 - RNA, 19 nt, Artificial Sequence
  Description of Artificial Sequence: Synthetic oligonucleotide
  Antisense strand to SEQ ID NO: 1907720
uagcuagaaugcuucgacg

SEQ ID NO: 1907722 - RNA, 19 nt, Artificial Sequence
  Description of Artificial Sequence: Synthetic oligonucleotide
  Sense strand starting at position 2560 of SEQ ID NO: 1879445
gugugaggccaggaaacau

SEQ ID NO: 1907723 - RNA, 19 nt, Artificial Sequence
  Description of Artificial Sequence: Synthetic oligonucleotide
  Antisense strand to SEQ ID NO: 1907722
auguuuccuggccucacac

SEQ ID NO: 1907724 - RNA, 19 nt, Artificial Sequence
  Description of Artificial Sequence: Synthetic oligonucleotide
  Sense strand starting at position 2852 of SEQ ID NO: 1879445
cuagaagccucagcuacau

SEQ ID NO: 1907725 - RNA, 19 nt, Artificial Sequence
  Description of Artificial Sequence: Synthetic oligonucleotide
  Antisense strand to SEQ ID NO: 1907724
auguagcugaggcuucuag

SEQ ID NO: 1907726 - RNA, 19 nt, Artificial Sequence
  Description of Artificial Sequence: Synthetic oligonucleotide
  Sense strand starting at position 2868 of SEQ ID NO: 1879445
cauuauaguggaugugaau

SEQ ID NO: 1907727 - RNA, 19 nt, Artificial Sequence
  Description of Artificial Sequence: Synthetic oligonucleotide
  Antisense strand to SEQ ID NO: 1907726
auucacauccacuauaaug

SEQ ID NO: 1907728 - RNA, 19 nt, Artificial Sequence
  Description of Artificial Sequence: Synthetic oligonucleotide
  Sense strand starting at position 3009 of SEQ ID NO: 1879445
gggacaguguacuucuuua

SEQ ID NO: 1907729 - RNA, 19 nt, Artificial Sequence
  Description of Artificial Sequence: Synthetic oligonucleotide
  Antisense strand to SEQ ID NO: 1907728
uaaagaaguacacuguccc

SEQ ID NO: 1907730 - RNA, 19 nt, Artificial Sequence
  Description of Artificial Sequence: Synthetic oligonucleotide
  Sense strand starting at position 3013 of SEQ ID NO: 1879445
caguguacuucuuuaaagg

SEQ ID NO: 1907731 - RNA, 19 nt, Artificial Sequence
  Description of Artificial Sequence: Synthetic oligonucleotide
  Antisense strand to SEQ ID NO: 1907730
ccuuuaaagaaguacacug

SEQ ID NO: 1907732 - RNA, 19 nt, Artificial Sequence
  Description of Artificial Sequence: Synthetic oligonucleotide
  Sense strand starting at position 3014 of SEQ ID NO: 1879445
aguguacuucuuuaaagga

SEQ ID NO: 1907733 - RNA, 19 nt, Artificial Sequence
  Description of Artificial Sequence: Synthetic oligonucleotide
  Antisense strand to SEQ ID NO: 1907732
uccuuuaaagaaguacacu

SEQ ID NO: 1907734 - RNA, 19 nt, Artificial Sequence
  Description of Artificial Sequence: Synthetic oligonucleotide
  Sense strand starting at position 3089 of SEQ ID NO: 1879445
uugguuagugucuaacacu

SEQ ID NO: 1907735 - RNA, 19 nt, Artificial Sequence
  Description of Artificial Sequence: Synthetic oligonucleotide
  Antisense strand to SEQ ID NO: 1907734
aguguuagacacuaaccaa

SEQ ID NO: 1907736 - RNA, 19 nt, Artificial Sequence
  Description of Artificial Sequence: Synthetic oligonucleotide
  Sense strand starting at position 3095 of SEQ ID NO: 1879445
agugucuaacacuggaaua

SEQ ID NO: 1907737 - RNA, 19 nt, Artificial Sequence
  Description of Artificial Sequence: Synthetic oligonucleotide
  Antisense strand to SEQ ID NO: 1907736
uauuccaguguuagacacu

SEQ ID NO: 1907738 - RNA, 19 nt, Artificial Sequence
  Description of Artificial Sequence: Synthetic oligonucleotide
  Sense strand starting at position 3150 of SEQ ID NO: 1879445
ugcuuaucacaagagugca

SEQ ID NO: 1907739 - RNA, 19 nt, Artificial Sequence
  Description of Artificial Sequence: Synthetic oligonucleotide
  Antisense strand to SEQ ID NO: 1907738
ugcacucuugugauaagca

SEQ ID NO: 1907740 - RNA, 19 nt, Artificial Sequence
  Description of Artificial Sequence: Synthetic oligonucleotide
  Sense strand starting at position 3224 of SEQ ID NO: 1879445
caauuaaguuaugcagagu

SEQ ID NO: 1907741 - RNA, 19 nt, Artificial Sequence
  Description of Artificial Sequence: Synthetic oligonucleotide
  Antisense strand to SEQ ID NO: 1907740
acucugcauaacuuaauug

SEQ ID NO: 1907742 - RNA, 19 nt, Artificial Sequence
  Description of Artificial Sequence: Synthetic oligonucleotide
  Sense strand starting at position 3247 of SEQ ID NO: 1879445
ggcacauaacuggagcuaa

SEQ ID NO: 1907743 - RNA, 19 nt, Artificial Sequence
  Description of Artificial Sequence: Synthetic oligonucleotide
  Antisense strand to SEQ ID NO: 1907742
uuagcuccaguuaugugcc

SEQ ID NO: 1907744 - RNA, 19 nt, Artificial Sequence
  Description of Artificial Sequence: Synthetic oligonucleotide
  Sense strand starting at position 3451 of SEQ ID NO: 1879445
aaagcauugucucuggaau

SEQ ID NO: 1907745 - RNA, 19 nt, Artificial Sequence
  Description of Artificial Sequence: Synthetic oligonucleotide
  Antisense strand to SEQ ID NO: 1907744
auuccagagacaaugcuuu

SEQ ID NO: 1907746 - RNA, 19 nt, Artificial Sequence
  Description of Artificial Sequence: Synthetic oligonucleotide
  Sense strand starting at position 3452 of SEQ ID NO: 1879445
aagcauugucucuggaauu

SEQ ID NO: 1907747 - RNA, 19 nt, Artificial Sequence
  Description of Artificial Sequence: Synthetic oligonucleotide
  Antisense strand to SEQ ID NO: 1907746
aauuccagagacaaugcuu

SEQ ID NO: 1907748 - RNA, 19 nt, Artificial Sequence
  Description of Artificial Sequence: Synthetic oligonucleotide
  Sense strand starting at position 3562 of SEQ ID NO: 1879445
accuuacaaguugauguaa

SEQ ID NO: 1907749 - RNA, 19 nt, Artificial Sequence
  Description of Artificial Sequence: Synthetic oligonucleotide
  Antisense strand to SEQ ID NO: 1907748
uuacaucaacuuguaaggu

SEQ ID NO: 1907750 - RNA, 19 nt, Artificial Sequence
  Description of Artificial Sequence: Synthetic oligonucleotide
  Sense strand starting at position 3599 of SEQ ID NO: 1879445
gccacugugacagagguuu

SEQ ID NO: 1907751 - RNA, 19 nt, Artificial Sequence
  Description of Artificial Sequence: Synthetic oligonucleotide
  Antisense strand to SEQ ID NO: 1907750
aaaccucugucacaguggc

SEQ ID NO: 1907752 - RNA, 19 nt, Artificial Sequence
  Description of Artificial Sequence: Synthetic oligonucleotide
  Sense strand starting at position 22 of SEQ ID NO: 1879446
gccucaguaguggagagua

SEQ ID NO: 1907753 - RNA, 19 nt, Artificial Sequence
  Description of Artificial Sequence: Synthetic oligonucleotide
  Antisense strand to SEQ ID NO: 1907752
uacucuccacuacugaggc

SEQ ID NO: 1907754 - RNA, 19 nt, Artificial Sequence
  Description of Artificial Sequence: Synthetic oligonucleotide
  Sense strand starting at position 24 of SEQ ID NO: 1879446
cucaguaguggagaguauu

SEQ ID NO: 1907755 - RNA, 19 nt, Artificial Sequence
  Description of Artificial Sequence: Synthetic oligonucleotide
  Antisense strand to SEQ ID NO: 1907754
aauacucuccacuacugag

SEQ ID NO: 1907756 - RNA, 19 nt, Artificial Sequence
  Description of Artificial Sequence: Synthetic oligonucleotide
  Sense strand starting at position 490 of SEQ ID NO: 1879446
cugcaucucuucuugagaa

SEQ ID NO: 1907757 - RNA, 19 nt, Artificial Sequence
  Description of Artificial Sequence: Synthetic oligonucleotide
  Antisense strand to SEQ ID NO: 1907756
uucucaagaagagaugcag

SEQ ID NO: 1907758 - RNA, 19 nt, Artificial Sequence
  Description of Artificial Sequence: Synthetic oligonucleotide
  Sense strand starting at position 492 of SEQ ID NO: 1879446
gcaucucuucuugagaaac

SEQ ID NO: 1907759 - RNA, 19 nt, Artificial Sequence
  Description of Artificial Sequence: Synthetic oligonucleotide
  Antisense strand to SEQ ID NO: 1907758
guuucucaagaagagaugc

SEQ ID NO: 1907760 - RNA, 19 nt, Artificial Sequence
  Description of Artificial Sequence: Synthetic oligonucleotide
  Sense strand starting at position 1163 of SEQ ID NO: 1879446
gguggaguggccuaaccaa

SEQ ID NO: 1907761 - RNA, 19 nt, Artificial Sequence
  Description of Artificial Sequence: Synthetic oligonucleotide
  Antisense strand to SEQ ID NO: 1907760
uugguuaggccacuccacc

SEQ ID NO: 1907762 - RNA, 19 nt, Artificial Sequence
  Description of Artificial Sequence: Synthetic oligonucleotide
  Sense strand starting at position 1211 of SEQ ID NO: 1879446
cgacuagaauuaguuucuu

SEQ ID NO: 1907763 - RNA, 19 nt, Artificial Sequence
  Description of Artificial Sequence: Synthetic oligonucleotide
  Antisense strand to SEQ ID NO: 1907762
aagaaacuaauucuagucg

SEQ ID NO: 1907764 - RNA, 19 nt, Artificial Sequence
  Description of Artificial Sequence: Synthetic oligonucleotide
  Sense strand starting at position 1251 of SEQ ID NO: 1879446
accuaugagcucuaguuga

SEQ ID NO: 1907765 - RNA, 19 nt, Artificial Sequence
  Description of Artificial Sequence: Synthetic oligonucleotide
  Antisense strand to SEQ ID NO: 1907764
ucaacuagagcucauaggu

SEQ ID NO: 1907766 - RNA, 19 nt, Artificial Sequence
  Description of Artificial Sequence: Synthetic oligonucleotide
  Sense strand starting at position 1256 of SEQ ID NO: 1879446
ugagcucuaguugaaaggu

SEQ ID NO: 1907767 - RNA, 19 nt, Artificial Sequence
  Description of Artificial Sequence: Synthetic oligonucleotide
  Antisense strand to SEQ ID NO: 1907766
accuuucaacuagagcuca

SEQ ID NO: 1907768 - RNA, 19 nt, Artificial Sequence
  Description of Artificial Sequence: Synthetic oligonucleotide
  Sense strand starting at position 1265 of SEQ ID NO: 1879446
guugaaaggucuuuacauc

SEQ ID NO: 1907769 - RNA, 19 nt, Artificial Sequence
  Description of Artificial Sequence: Synthetic oligonucleotide
  Antisense strand to SEQ ID NO: 1907768
gauguaaagaccuuucaac

SEQ ID NO: 1907770 - RNA, 19 nt, Artificial Sequence
  Description of Artificial Sequence: Synthetic oligonucleotide
  Sense strand starting at position 1417 of SEQ ID NO: 1879446
guaugauuagaagggugga

SEQ ID NO: 1907771 - RNA, 19 nt, Artificial Sequence
  Description of Artificial Sequence: Synthetic oligonucleotide
  Antisense strand to SEQ ID NO: 1907770
uccacccuucuaaucauac

SEQ ID NO: 1907772 - RNA, 19 nt, Artificial Sequence
  Description of Artificial Sequence: Synthetic oligonucleotide
  Sense strand starting at position 1554 of SEQ ID NO: 1879446
gagucagguauagauguaa

SEQ ID NO: 1907773 - RNA, 19 nt, Artificial Sequence
  Description of Artificial Sequence: Synthetic oligonucleotide
  Antisense strand to SEQ ID NO: 1907772
uuacaucuauaccugacuc

SEQ ID NO: 1907774 - RNA, 19 nt, Artificial Sequence
  Description of Artificial Sequence: Synthetic oligonucleotide
  Sense strand starting at position 1592 of SEQ ID NO: 1879446
ccuguugggucacuggaaa

SEQ ID NO: 1907775 - RNA, 19 nt, Artificial Sequence
  Description of Artificial Sequence: Synthetic oligonucleotide
  Antisense strand to SEQ ID NO: 1907774
uuuccagugacccaacagg

SEQ ID NO: 1907776 - RNA, 19 nt, Artificial Sequence
  Description of Artificial Sequence: Synthetic oligonucleotide
  Sense strand starting at position 1599 of SEQ ID NO: 1879446
ggucacuggaaauaugcua

SEQ ID NO: 1907777 - RNA, 19 nt, Artificial Sequence
  Description of Artificial Sequence: Synthetic oligonucleotide
  Antisense strand to SEQ ID NO: 1907776
uagcauauuuccagugacc

SEQ ID NO: 1907778 - RNA, 19 nt, Artificial Sequence
  Description of Artificial Sequence: Synthetic oligonucleotide
  Sense strand starting at position 1620 of SEQ ID NO: 1879446
uggauuacaccuuagucuu

SEQ ID NO: 1907779 - RNA, 19 nt, Artificial Sequence
  Description of Artificial Sequence: Synthetic oligonucleotide
  Antisense strand to SEQ ID NO: 1907778
aagacuaagguguaaucca

SEQ ID NO: 1907780 - RNA, 19 nt, Artificial Sequence
  Description of Artificial Sequence: Synthetic oligonucleotide
  Sense strand starting at position 2104 of SEQ ID NO: 1879446
aucacugucccuuaugauu

SEQ ID NO: 1907781 - RNA, 19 nt, Artificial Sequence
  Description of Artificial Sequence: Synthetic oligonucleotide
  Antisense strand to SEQ ID NO: 1907780
aaucauaagggacagugau

SEQ ID NO: 1907782 - RNA, 19 nt, Artificial Sequence
  Description of Artificial Sequence: Synthetic oligonucleotide
  Sense strand starting at position 2249 of SEQ ID NO: 1879446
uagggacugacgugucaua

SEQ ID NO: 1907783 - RNA, 19 nt, Artificial Sequence
  Description of Artificial Sequence: Synthetic oligonucleotide
  Antisense strand to SEQ ID NO: 1907782
uaugacacgucagucccua

SEQ ID NO: 1907784 - RNA, 19 nt, Artificial Sequence
  Description of Artificial Sequence: Synthetic oligonucleotide
  Sense strand starting at position 2261 of SEQ ID NO: 1879446
ugucauagccaguaaaugu

SEQ ID NO: 1907785 - RNA, 19 nt, Artificial Sequence
  Description of Artificial Sequence: Synthetic oligonucleotide
  Antisense strand to SEQ ID NO: 1907784
acauuuacuggcuaugaca

SEQ ID NO: 1907786 - RNA, 19 nt, Artificial Sequence
  Description of Artificial Sequence: Synthetic oligonucleotide
  Sense strand starting at position 2269 of SEQ ID NO: 1879446
ccaguaaauguugguugga

SEQ ID NO: 1907787 - RNA, 19 nt, Artificial Sequence
  Description of Artificial Sequence: Synthetic oligonucleotide
  Antisense strand to SEQ ID NO: 1907786
uccaaccaacauuuacugg

SEQ ID NO: 1907788 - RNA, 19 nt, Artificial Sequence
  Description of Artificial Sequence: Synthetic oligonucleotide
  Sense strand starting at position 2270 of SEQ ID NO: 1879446
caguaaauguugguuggau

SEQ ID NO: 1907789 - RNA, 19 nt, Artificial Sequence
  Description of Artificial Sequence: Synthetic oligonucleotide
  Antisense strand to SEQ ID NO: 1907788
auccaaccaacauuuacug

SEQ ID NO: 1907790 - RNA, 19 nt, Artificial Sequence
  Description of Artificial Sequence: Synthetic oligonucleotide
  Sense strand starting at position 2271 of SEQ ID NO: 1879446
aguaaauguugguuggauu

SEQ ID NO: 1907791 - RNA, 19 nt, Artificial Sequence
  Description of Artificial Sequence: Synthetic oligonucleotide
  Antisense strand to SEQ ID NO: 1907790
aauccaaccaacauuuacu

SEQ ID NO: 1907792 - RNA, 19 nt, Artificial Sequence
  Description of Artificial Sequence: Synthetic oligonucleotide
  Sense strand starting at position 2272 of SEQ ID NO: 1879446
guaaauguugguuggauug

SEQ ID NO: 1907793 - RNA, 19 nt, Artificial Sequence
  Description of Artificial Sequence: Synthetic oligonucleotide
  Antisense strand to SEQ ID NO: 1907792
caauccaaccaacauuuac

SEQ ID NO: 1907794 - RNA, 19 nt, Artificial Sequence
  Description of Artificial Sequence: Synthetic oligonucleotide
  Sense strand starting at position 2339 of SEQ ID NO: 1879446
ugaagucuugcagauacau

SEQ ID NO: 1907795 - RNA, 19 nt, Artificial Sequence
  Description of Artificial Sequence: Synthetic oligonucleotide
  Antisense strand to SEQ ID NO: 1907794
auguaucugcaagacuuca

SEQ ID NO: 1907796 - RNA, 19 nt, Artificial Sequence
  Description of Artificial Sequence: Synthetic oligonucleotide
  Sense strand starting at position 2449 of SEQ ID NO: 1879446
gacauauggccauauggcu

SEQ ID NO: 1907797 - RNA, 19 nt, Artificial Sequence
  Description of Artificial Sequence: Synthetic oligonucleotide
  Antisense strand to SEQ ID NO: 1907796
agccauauggccauauguc

SEQ ID NO: 1907798 - RNA, 19 nt, Artificial Sequence
  Description of Artificial Sequence: Synthetic oligonucleotide
  Sense strand starting at position 2703 of SEQ ID NO: 1879446
ggguguuauuuggcccuuu

SEQ ID NO: 1907799 - RNA, 19 nt, Artificial Sequence
  Description of Artificial Sequence: Synthetic oligonucleotide
  Antisense strand to SEQ ID NO: 1907798
aaagggccaaauaacaccc

SEQ ID NO: 1907800 - RNA, 19 nt, Artificial Sequence
  Description of Artificial Sequence: Synthetic oligonucleotide
  Sense strand starting at position 2790 of SEQ ID NO: 1879446
agaacuagauucuccuagu

SEQ ID NO: 1907801 - RNA, 19 nt, Artificial Sequence
  Description of Artificial Sequence: Synthetic oligonucleotide
  Antisense strand to SEQ ID NO: 1907800
acuaggagaaucuaguucu

SEQ ID NO: 1907802 - RNA, 19 nt, Artificial Sequence
  Description of Artificial Sequence: Synthetic oligonucleotide
  Sense strand starting at position 2791 of SEQ ID NO: 1879446
gaacuagauucuccuagug

SEQ ID NO: 1907803 - RNA, 19 nt, Artificial Sequence
  Description of Artificial Sequence: Synthetic oligonucleotide
  Antisense strand to SEQ ID NO: 1907802
cacuaggagaaucuaguuc

SEQ ID NO: 1907804 - RNA, 19 nt, Artificial Sequence
  Description of Artificial Sequence: Synthetic oligonucleotide
  Sense strand starting at position 2800 of SEQ ID NO: 1879446
ucuccuaguguuuacauua

SEQ ID NO: 1907805 - RNA, 19 nt, Artificial Sequence
  Description of Artificial Sequence: Synthetic oligonucleotide
  Antisense strand to SEQ ID NO: 1907804
uaauguaaacacuaggaga

SEQ ID NO: 1907806 - RNA, 19 nt, Artificial Sequence
  Description of Artificial Sequence: Synthetic oligonucleotide
  Sense strand starting at position 2812 of SEQ ID NO: 1879446
uacauuagguucuuaggaa

SEQ ID NO: 1907807 - RNA, 19 nt, Artificial Sequence
  Description of Artificial Sequence: Synthetic oligonucleotide
  Antisense strand to SEQ ID NO: 1907806
uuccuaagaaccuaaugua

SEQ ID NO: 1907808 - RNA, 19 nt, Artificial Sequence
  Description of Artificial Sequence: Synthetic oligonucleotide
  Sense strand starting at position 2884 of SEQ ID NO: 1879446
gaguuaaaccaauguggau

SEQ ID NO: 1907809 - RNA, 19 nt, Artificial Sequence
  Description of Artificial Sequence: Synthetic oligonucleotide
  Antisense strand to SEQ ID NO: 1907808
auccacauugguuuaacuc

SEQ ID NO: 1907810 - RNA, 19 nt, Artificial Sequence
  Description of Artificial Sequence: Synthetic oligonucleotide
  Sense strand starting at position 2937 of SEQ ID NO: 1879446
ucuuucuaagcuggagaaa

SEQ ID NO: 1907811 - RNA, 19 nt, Artificial Sequence
  Description of Artificial Sequence: Synthetic oligonucleotide
  Antisense strand to SEQ ID NO: 1907810
uuucuccagcuuagaaaga

SEQ ID NO: 1907812 - RNA, 19 nt, Artificial Sequence
  Description of Artificial Sequence: Synthetic oligonucleotide
  Sense strand starting at position 3074 of SEQ ID NO: 1879446
uugaaaggaugucucaaca

SEQ ID NO: 1907813 - RNA, 19 nt, Artificial Sequence
  Description of Artificial Sequence: Synthetic oligonucleotide
  Antisense strand to SEQ ID NO: 1907812
uguugagacauccuuucaa

SEQ ID NO: 1907814 - RNA, 19 nt, Artificial Sequence
  Description of Artificial Sequence: Synthetic oligonucleotide
  Sense strand starting at position 3185 of SEQ ID NO: 1879446
cuuacaaguuuggcuaaua

SEQ ID NO: 1907815 - RNA, 19 nt, Artificial Sequence
  Description of Artificial Sequence: Synthetic oligonucleotide
  Antisense strand to SEQ ID NO: 1907814
uauuagccaaacuuguaag

SEQ ID NO: 1907816 - RNA, 19 nt, Artificial Sequence
  Description of Artificial Sequence: Synthetic oligonucleotide
  Sense strand starting at position 3225 of SEQ ID NO: 1879446
uuggauuaacccugacauu

SEQ ID NO: 1907817 - RNA, 19 nt, Artificial Sequence
  Description of Artificial Sequence: Synthetic oligonucleotide
  Antisense strand to SEQ ID NO: 1907816
aaugucaggguuaauccaa

SEQ ID NO: 1907818 - RNA, 19 nt, Artificial Sequence
  Description of Artificial Sequence: Synthetic oligonucleotide
  Sense strand starting at position 3366 of SEQ ID NO: 1879446
ccagcuguacgcuuuagua

SEQ ID NO: 1907819 - RNA, 19 nt, Artificial Sequence
  Description of Artificial Sequence: Synthetic oligonucleotide
  Antisense strand to SEQ ID NO: 1907818
uacuaaagcguacagcugg

SEQ ID NO: 1907820 - RNA, 19 nt, Artificial Sequence
  Description of Artificial Sequence: Synthetic oligonucleotide
  Sense strand starting at position 3462 of SEQ ID NO: 1879446
cagauaauugaccgugggu

SEQ ID NO: 1907821 - RNA, 19 nt, Artificial Sequence
  Description of Artificial Sequence: Synthetic oligonucleotide
  Antisense strand to SEQ ID NO: 1907820
acccacggucaauuaucug

SEQ ID NO: 1907822 - RNA, 19 nt, Artificial Sequence
  Description of Artificial Sequence: Synthetic oligonucleotide
  Sense strand starting at position 3740 of SEQ ID NO: 1879446
ccuugaauuuaggagacuu

SEQ ID NO: 1907823 - RNA, 19 nt, Artificial Sequence
  Description of Artificial Sequence: Synthetic oligonucleotide
  Antisense strand to SEQ ID NO: 1907822
aagucuccuaaauucaagg

SEQ ID NO: 1907824 - RNA, 19 nt, Artificial Sequence
  Description of Artificial Sequence: Synthetic oligonucleotide
  Sense strand starting at position 3810 of SEQ ID NO: 1879446
gaggaaauauaaguagugu

SEQ ID NO: 1907825 - RNA, 19 nt, Artificial Sequence
  Description of Artificial Sequence: Synthetic oligonucleotide
  Antisense strand to SEQ ID NO: 1907824
acacuacuuauauuuccuc

SEQ ID NO: 1907826 - RNA, 19 nt, Artificial Sequence
  Description of Artificial Sequence: Synthetic oligonucleotide
  Sense strand starting at position 3818 of SEQ ID NO: 1879446
auaaguaguguuggagaac

SEQ ID NO: 1907827 - RNA, 19 nt, Artificial Sequence
  Description of Artificial Sequence: Synthetic oligonucleotide
  Antisense strand to SEQ ID NO: 1907826
guucuccaacacuacuuau

SEQ ID NO: 1907828 - RNA, 19 nt, Artificial Sequence
  Description of Artificial Sequence: Synthetic oligonucleotide
  Sense strand starting at position 3821 of SEQ ID NO: 1879446
aguaguguuggagaacaau

SEQ ID NO: 1907829 - RNA, 19 nt, Artificial Sequence
  Description of Artificial Sequence: Synthetic oligonucleotide
  Antisense strand to SEQ ID NO: 1907828
auuguucuccaacacuacu

SEQ ID NO: 1907830 - RNA, 19 nt, Artificial Sequence
  Description of Artificial Sequence: Synthetic oligonucleotide
  Sense strand starting at position 3941 of SEQ ID NO: 1879446
cugaacuuagugugaacau

SEQ ID NO: 1907831 - RNA, 19 nt, Artificial Sequence
  Description of Artificial Sequence: Synthetic oligonucleotide
  Antisense strand to SEQ ID NO: 1907830
auguucacacuaaguucag

SEQ ID NO: 1907832 - RNA, 19 nt, Artificial Sequence
  Description of Artificial Sequence: Synthetic oligonucleotide
  Sense strand starting at position 183 of SEQ ID NO: 1879447
uuacuagcugagcaguaua

SEQ ID NO: 1907833 - RNA, 19 nt, Artificial Sequence
  Description of Artificial Sequence: Synthetic oligonucleotide
  Antisense strand to SEQ ID NO: 1907832
uauacugcucagcuaguaa

SEQ ID NO: 1907834 - RNA, 19 nt, Artificial Sequence
  Description of Artificial Sequence: Synthetic oligonucleotide
  Sense strand starting at position 216 of SEQ ID NO: 1879447
aaugucagccuaggagaua

SEQ ID NO: 1907835 - RNA, 19 nt, Artificial Sequence
  Description of Artificial Sequence: Synthetic oligonucleotide
  Antisense strand to SEQ ID NO: 1907834
uaucuccuaggcugacauu

SEQ ID NO: 1907836 - RNA, 19 nt, Artificial Sequence
  Description of Artificial Sequence: Synthetic oligonucleotide
  Sense strand starting at position 279 of SEQ ID NO: 1879447
gccagccuaguugaugaaa

SEQ ID NO: 1907837 - RNA, 19 nt, Artificial Sequence
  Description of Artificial Sequence: Synthetic oligonucleotide
  Antisense strand to SEQ ID NO: 1907836
uuucaucaacuaggcuggc

SEQ ID NO: 1907838 - RNA, 19 nt, Artificial Sequence
  Description of Artificial Sequence: Synthetic oligonucleotide
  Sense strand starting at position 315 of SEQ ID NO: 1879447
caguguuagcaggaacauc

SEQ ID NO: 1907839 - RNA, 19 nt, Artificial Sequence
  Description of Artificial Sequence: Synthetic oligonucleotide
  Antisense strand to SEQ ID NO: 1907838
gauguuccugcuaacacug

SEQ ID NO: 1907840 - RNA, 19 nt, Artificial Sequence
  Description of Artificial Sequence: Synthetic oligonucleotide
  Sense strand starting at position 323 of SEQ ID NO: 1879447
gcaggaacaucuucccaaa

SEQ ID NO: 1907841 - RNA, 19 nt, Artificial Sequence
  Description of Artificial Sequence: Synthetic oligonucleotide
  Antisense strand to SEQ ID NO: 1907840
uuugggaagauguuccugc

SEQ ID NO: 1907842 - RNA, 19 nt, Artificial Sequence
  Description of Artificial Sequence: Synthetic oligonucleotide
  Sense strand starting at position 358 of SEQ ID NO: 1879447
guaauaacaucagugucau

SEQ ID NO: 1907843 - RNA, 19 nt, Artificial Sequence
  Description of Artificial Sequence: Synthetic oligonucleotide
  Antisense strand to SEQ ID NO: 1907842
augacacugauguuauuac

SEQ ID NO: 1907844 - RNA, 19 nt, Artificial Sequence
  Description of Artificial Sequence: Synthetic oligonucleotide
  Sense strand starting at position 421 of SEQ ID NO: 1879447
cuguuacacuaauuaaagu

SEQ ID NO: 1907845 - RNA, 19 nt, Artificial Sequence
  Description of Artificial Sequence: Synthetic oligonucleotide
  Antisense strand to SEQ ID NO: 1907844
acuuuaauuaguguaacag

SEQ ID NO: 1907846 - RNA, 19 nt, Artificial Sequence
  Description of Artificial Sequence: Synthetic oligonucleotide
  Sense strand starting at position 469 of SEQ ID NO: 1879447
aagugaagccaguguauuu

SEQ ID NO: 1907847 - RNA, 19 nt, Artificial Sequence
  Description of Artificial Sequence: Synthetic oligonucleotide
  Antisense strand to SEQ ID NO: 1907846
aaauacacuggcuucacuu

SEQ ID NO: 1907848 - RNA, 19 nt, Artificial Sequence
  Description of Artificial Sequence: Synthetic oligonucleotide
  Sense strand starting at position 665 of SEQ ID NO: 1879447
gaguacggacucugagaga

SEQ ID NO: 1907849 - RNA, 19 nt, Artificial Sequence
  Description of Artificial Sequence: Synthetic oligonucleotide
  Antisense strand to SEQ ID NO: 1907848
ucucucagaguccguacuc

SEQ ID NO: 1907850 - RNA, 19 nt, Artificial Sequence
  Description of Artificial Sequence: Synthetic oligonucleotide
  Sense strand starting at position 702 of SEQ ID NO: 1879447
uuugcucugucauuugcaa

SEQ ID NO: 1907851 - RNA, 19 nt, Artificial Sequence
  Description of Artificial Sequence: Synthetic oligonucleotide
  Antisense strand to SEQ ID NO: 1907850
uugcaaaugacagagcaaa

SEQ ID NO: 1907852 - RNA, 19 nt, Artificial Sequence
  Description of Artificial Sequence: Synthetic oligonucleotide
  Sense strand starting at position 725 of SEQ ID NO: 1879447
ugugacuuugaguaaacuu

SEQ ID NO: 1907853 - RNA, 19 nt, Artificial Sequence
  Description of Artificial Sequence: Synthetic oligonucleotide
  Antisense strand to SEQ ID NO: 1907852
aaguuuacucaaagucaca

SEQ ID NO: 1907854 - RNA, 19 nt, Artificial Sequence
  Description of Artificial Sequence: Synthetic oligonucleotide
  Sense strand starting at position 796 of SEQ ID NO: 1879447
agauauugugaggguuaga

SEQ ID NO: 1907855 - RNA, 19 nt, Artificial Sequence
  Description of Artificial Sequence: Synthetic oligonucleotide
  Antisense strand to SEQ ID NO: 1907854
ucuaacccucacaauaucu

SEQ ID NO: 1907856 - RNA, 19 nt, Artificial Sequence
  Description of Artificial Sequence: Synthetic oligonucleotide
  Sense strand starting at position 944 of SEQ ID NO: 1879447
ggcguuauaggacauaaga

SEQ ID NO: 1907857 - RNA, 19 nt, Artificial Sequence
  Description of Artificial Sequence: Synthetic oligonucleotide
  Antisense strand to SEQ ID NO: 1907856
ucuuauguccuauaacgcc

SEQ ID NO: 1907858 - RNA, 19 nt, Artificial Sequence
  Description of Artificial Sequence: Synthetic oligonucleotide
  Sense strand starting at position 1001 of SEQ ID NO: 1879447
ugaauaaacuuccuguuug

SEQ ID NO: 1907859 - RNA, 19 nt, Artificial Sequence
  Description of Artificial Sequence: Synthetic oligonucleotide
  Antisense strand to SEQ ID NO: 1907858
caaacaggaaguuuauuca

SEQ ID NO: 1907860 - RNA, 19 nt, Artificial Sequence
  Description of Artificial Sequence: Synthetic oligonucleotide
  Sense strand starting at position 1005 of SEQ ID NO: 1879447
uaaacuuccuguuugagga

SEQ ID NO: 1907861 - RNA, 19 nt, Artificial Sequence
  Description of Artificial Sequence: Synthetic oligonucleotide
  Antisense strand to SEQ ID NO: 1907860
uccucaaacaggaaguuua

SEQ ID NO: 1907862 - RNA, 19 nt, Artificial Sequence
  Description of Artificial Sequence: Synthetic oligonucleotide
  Sense strand starting at position 1050 of SEQ ID NO: 1879447
ucucacuaugccugggaua

SEQ ID NO: 1907863 - RNA, 19 nt, Artificial Sequence
  Description of Artificial Sequence: Synthetic oligonucleotide
  Antisense strand to SEQ ID NO: 1907862
uaucccaggcauagugaga

SEQ ID NO: 1907864 - RNA, 19 nt, Artificial Sequence
  Description of Artificial Sequence: Synthetic oligonucleotide
  Sense strand starting at position 1055 of SEQ ID NO: 1879447
cuaugccugggauaggauu

SEQ ID NO: 1907865 - RNA, 19 nt, Artificial Sequence
  Description of Artificial Sequence: Synthetic oligonucleotide
  Antisense strand to SEQ ID NO: 1907864
aauccuaucccaggcauag

SEQ ID NO: 1907866 - RNA, 19 nt, Artificial Sequence
  Description of Artificial Sequence: Synthetic oligonucleotide
  Sense strand starting at position 1061 of SEQ ID NO: 1879447
cugggauaggauugccaca

SEQ ID NO: 1907867 - RNA, 19 nt, Artificial Sequence
  Description of Artificial Sequence: Synthetic oligonucleotide
  Antisense strand to SEQ ID NO: 1907866
uguggcaauccuaucccag

SEQ ID NO: 1907868 - RNA, 19 nt, Artificial Sequence
  Description of Artificial Sequence: Synthetic oligonucleotide
  Sense strand starting at position 1176 of SEQ ID NO: 1879447
ugcacauggcaugagauaa

SEQ ID NO: 1907869 - RNA, 19 nt, Artificial Sequence
  Description of Artificial Sequence: Synthetic oligonucleotide
  Antisense strand to SEQ ID NO: 1907868
uuaucucaugccaugugca

SEQ ID NO: 1907870 - RNA, 19 nt, Artificial Sequence
  Description of Artificial Sequence: Synthetic oligonucleotide
  Sense strand starting at position 1274 of SEQ ID NO: 1879447
guacuuauggugcaaauau

SEQ ID NO: 1907871 - RNA, 19 nt, Artificial Sequence
  Description of Artificial Sequence: Synthetic oligonucleotide
  Antisense strand to SEQ ID NO: 1907870
auauuugcaccauaaguac

SEQ ID NO: 1907872 - RNA, 19 nt, Artificial Sequence
  Description of Artificial Sequence: Synthetic oligonucleotide
  Sense strand starting at position 1320 of SEQ ID NO: 1879447
auccuaguauugucagaca

SEQ ID NO: 1907873 - RNA, 19 nt, Artificial Sequence
  Description of Artificial Sequence: Synthetic oligonucleotide
  Antisense strand to SEQ ID NO: 1907872
ugucugacaauacuaggau

SEQ ID NO: 1907874 - RNA, 19 nt, Artificial Sequence
  Description of Artificial Sequence: Synthetic oligonucleotide
  Sense strand starting at position 1325 of SEQ ID NO: 1879447
aguauugucagacaaugua

SEQ ID NO: 1907875 - RNA, 19 nt, Artificial Sequence
  Description of Artificial Sequence: Synthetic oligonucleotide
  Antisense strand to SEQ ID NO: 1907874
uacauugucugacaauacu

SEQ ID NO: 1907876 - RNA, 19 nt, Artificial Sequence
  Description of Artificial Sequence: Synthetic oligonucleotide
  Sense strand starting at position 1433 of SEQ ID NO: 1879447
acuugaagauacuuguuga

SEQ ID NO: 1907877 - RNA, 19 nt, Artificial Sequence
  Description of Artificial Sequence: Synthetic oligonucleotide
  Antisense strand to SEQ ID NO: 1907876
ucaacaaguaucuucaagu

SEQ ID NO: 1907878 - RNA, 19 nt, Artificial Sequence
  Description of Artificial Sequence: Synthetic oligonucleotide
  Sense strand starting at position 1436 of SEQ ID NO: 1879447
ugaagauacuuguugauca

SEQ ID NO: 1907879 - RNA, 19 nt, Artificial Sequence
  Description of Artificial Sequence: Synthetic oligonucleotide
  Antisense strand to SEQ ID NO: 1907878
ugaucaacaaguaucuuca

SEQ ID NO: 1907880 - RNA, 19 nt, Artificial Sequence
  Description of Artificial Sequence: Synthetic oligonucleotide
  Sense strand starting at position 1465 of SEQ ID NO: 1879447
gauuucucauuguaaugga

SEQ ID NO: 1907881 - RNA, 19 nt, Artificial Sequence
  Description of Artificial Sequence: Synthetic oligonucleotide
  Antisense strand to SEQ ID NO: 1907880
uccauuacaaugagaaauc

SEQ ID NO: 1907882 - RNA, 19 nt, Artificial Sequence
  Description of Artificial Sequence: Synthetic oligonucleotide
  Sense strand starting at position 1804 of SEQ ID NO: 1879447
gacagagaugccuggaguu

SEQ ID NO: 1907883 - RNA, 19 nt, Artificial Sequence
  Description of Artificial Sequence: Synthetic oligonucleotide
  Antisense strand to SEQ ID NO: 1907882
aacuccaggcaucucuguc

SEQ ID NO: 1907884 - RNA, 19 nt, Artificial Sequence
  Description of Artificial Sequence: Synthetic oligonucleotide
  Sense strand starting at position 1927 of SEQ ID NO: 1879447
uuaacaguccuuugaggaa

SEQ ID NO: 1907885 - RNA, 19 nt, Artificial Sequence
  Description of Artificial Sequence: Synthetic oligonucleotide
  Antisense strand to SEQ ID NO: 1907884
uuccucaaaggacuguuaa

SEQ ID NO: 1907886 - RNA, 19 nt, Artificial Sequence
  Description of Artificial Sequence: Synthetic oligonucleotide
  Sense strand starting at position 1931 of SEQ ID NO: 1879447
caguccuuugaggaaaggu

SEQ ID NO: 1907887 - RNA, 19 nt, Artificial Sequence
  Description of Artificial Sequence: Synthetic oligonucleotide
  Antisense strand to SEQ ID NO: 1907886
accuuuccucaaaggacug

SEQ ID NO: 1907888 - RNA, 19 nt, Artificial Sequence
  Description of Artificial Sequence: Synthetic oligonucleotide
  Sense strand starting at position 1992 of SEQ ID NO: 1879447
ggaagaaagugguucagua

SEQ ID NO: 1907889 - RNA, 19 nt, Artificial Sequence
  Description of Artificial Sequence: Synthetic oligonucleotide
  Antisense strand to SEQ ID NO: 1907888
uacugaaccacuuucuucc

SEQ ID NO: 1907890 - RNA, 19 nt, Artificial Sequence
  Description of Artificial Sequence: Synthetic oligonucleotide
  Sense strand starting at position 1996 of SEQ ID NO: 1879447
gaaagugguucaguagaag

SEQ ID NO: 1907891 - RNA, 19 nt, Artificial Sequence
  Description of Artificial Sequence: Synthetic oligonucleotide
  Antisense strand to SEQ ID NO: 1907890
cuucuacugaaccacuuuc

SEQ ID NO: 1907892 - RNA, 19 nt, Artificial Sequence
  Description of Artificial Sequence: Synthetic oligonucleotide
  Sense strand starting at position 2070 of SEQ ID NO: 1879447
aaaggucuuaugugaugag

SEQ ID NO: 1907893 - RNA, 19 nt, Artificial Sequence
  Description of Artificial Sequence: Synthetic oligonucleotide
  Antisense strand to SEQ ID NO: 1907892
cucaucacauaagaccuuu

SEQ ID NO: 1907894 - RNA, 19 nt, Artificial Sequence
  Description of Artificial Sequence: Synthetic oligonucleotide
  Sense strand starting at position 2074 of SEQ ID NO: 1879447
gucuuaugugaugaggagu

SEQ ID NO: 1907895 - RNA, 19 nt, Artificial Sequence
  Description of Artificial Sequence: Synthetic oligonucleotide
  Antisense strand to SEQ ID NO: 1907894
acuccucaucacauaagac

SEQ ID NO: 1907896 - RNA, 19 nt, Artificial Sequence
  Description of Artificial Sequence: Synthetic oligonucleotide
  Sense strand starting at position 2116 of SEQ ID NO: 1879447
aggacccauugauaaauuu

SEQ ID NO: 1907897 - RNA, 19 nt, Artificial Sequence
  Description of Artificial Sequence: Synthetic oligonucleotide
  Antisense strand to SEQ ID NO: 1907896
aaauuuaucaauggguccu

SEQ ID NO: 1907898 - RNA, 19 nt, Artificial Sequence
  Description of Artificial Sequence: Synthetic oligonucleotide
  Sense strand starting at position 2860 of SEQ ID NO: 1879447
cugucauuggcuggagaaa

SEQ ID NO: 1907899 - RNA, 19 nt, Artificial Sequence
  Description of Artificial Sequence: Synthetic oligonucleotide
  Antisense strand to SEQ ID NO: 1907898
uuucuccagccaaugacag

SEQ ID NO: 1907900 - RNA, 19 nt, Artificial Sequence
  Description of Artificial Sequence: Synthetic oligonucleotide
  Sense strand starting at position 2881 of SEQ ID NO: 1879447
ggaauaaccuuggcuguua

SEQ ID NO: 1907901 - RNA, 19 nt, Artificial Sequence
  Description of Artificial Sequence: Synthetic oligonucleotide
  Antisense strand to SEQ ID NO: 1907900
uaacagccaagguuauucc

SEQ ID NO: 1907902 - RNA, 19 nt, Artificial Sequence
  Description of Artificial Sequence: Synthetic oligonucleotide
  Sense strand starting at position 2955 of SEQ ID NO: 1879447
uuuccuugacucuaguaga

SEQ ID NO: 1907903 - RNA, 19 nt, Artificial Sequence
  Description of Artificial Sequence: Synthetic oligonucleotide
  Antisense strand to SEQ ID NO: 1907902
ucuacuagagucaaggaaa

SEQ ID NO: 1907904 - RNA, 19 nt, Artificial Sequence
  Description of Artificial Sequence: Synthetic oligonucleotide
  Sense strand starting at position 3060 of SEQ ID NO: 1879447
ugggaacuguccucuaggu

SEQ ID NO: 1907905 - RNA, 19 nt, Artificial Sequence
  Description of Artificial Sequence: Synthetic oligonucleotide
  Antisense strand to SEQ ID NO: 1907904
accuagaggacaguuccca

SEQ ID NO: 1907906 - RNA, 19 nt, Artificial Sequence
  Description of Artificial Sequence: Synthetic oligonucleotide
  Sense strand starting at position 3062 of SEQ ID NO: 1879447
ggaacuguccucuagguag

SEQ ID NO: 1907907 - RNA, 19 nt, Artificial Sequence
  Description of Artificial Sequence: Synthetic oligonucleotide
  Antisense strand to SEQ ID NO: 1907906
cuaccuagaggacaguucc

SEQ ID NO: 1907908 - RNA, 19 nt, Artificial Sequence
  Description of Artificial Sequence: Synthetic oligonucleotide
  Sense strand starting at position 3200 of SEQ ID NO: 1879447
guuccucuguuauuuacau

SEQ ID NO: 1907909 - RNA, 19 nt, Artificial Sequence
  Description of Artificial Sequence: Synthetic oligonucleotide
  Antisense strand to SEQ ID NO: 1907908
auguaaauaacagaggaac

SEQ ID NO: 1907910 - RNA, 19 nt, Artificial Sequence
  Description of Artificial Sequence: Synthetic oligonucleotide
  Sense strand starting at position 3435 of SEQ ID NO: 1879447
agagacuuguaccugguuu

SEQ ID NO: 1907911 - RNA, 19 nt, Artificial Sequence
  Description of Artificial Sequence: Synthetic oligonucleotide
  Antisense strand to SEQ ID NO: 1907910
aaaccagguacaagucucu

SEQ ID NO: 1907912 - RNA, 19 nt, Artificial Sequence
  Description of Artificial Sequence: Synthetic oligonucleotide
  Sense strand starting at position 327 of SEQ ID NO: 1879448
cucuccacuuguuuagaua

SEQ ID NO: 1907913 - RNA, 19 nt, Artificial Sequence
  Description of Artificial Sequence: Synthetic oligonucleotide
  Antisense strand to SEQ ID NO: 1907912
uaucuaaacaaguggagag

SEQ ID NO: 1907914 - RNA, 19 nt, Artificial Sequence
  Description of Artificial Sequence: Synthetic oligonucleotide
  Sense strand starting at position 330 of SEQ ID NO: 1879448
uccacuuguuuagauacua

SEQ ID NO: 1907915 - RNA, 19 nt, Artificial Sequence
  Description of Artificial Sequence: Synthetic oligonucleotide
  Antisense strand to SEQ ID NO: 1907914
uaguaucuaaacaagugga

SEQ ID NO: 1907916 - RNA, 19 nt, Artificial Sequence
  Description of Artificial Sequence: Synthetic oligonucleotide
  Sense strand starting at position 335 of SEQ ID NO: 1879448
uuguuuagauacuagcaga

SEQ ID NO: 1907917 - RNA, 19 nt, Artificial Sequence
  Description of Artificial Sequence: Synthetic oligonucleotide
  Antisense strand to SEQ ID NO: 1907916
ucugcuaguaucuaaacaa

SEQ ID NO: 1907918 - RNA, 19 nt, Artificial Sequence
  Description of Artificial Sequence: Synthetic oligonucleotide
  Sense strand starting at position 338 of SEQ ID NO: 1879448
uuuagauacuagcagaguu

SEQ ID NO: 1907919 - RNA, 19 nt, Artificial Sequence
  Description of Artificial Sequence: Synthetic oligonucleotide
  Antisense strand to SEQ ID NO: 1907918
aacucugcuaguaucuaaa

SEQ ID NO: 1907920 - RNA, 19 nt, Artificial Sequence
  Description of Artificial Sequence: Synthetic oligonucleotide
  Sense strand starting at position 408 of SEQ ID NO: 1879448
ggguucugggagugugaga

SEQ ID NO: 1907921 - RNA, 19 nt, Artificial Sequence
  Description of Artificial Sequence: Synthetic oligonucleotide
  Antisense strand to SEQ ID NO: 1907920
ucucacacucccagaaccc

SEQ ID NO: 1907922 - RNA, 19 nt, Artificial Sequence
  Description of Artificial Sequence: Synthetic oligonucleotide
  Sense strand starting at position 425 of SEQ ID NO: 1879448
gacagauauccauguaguc

SEQ ID NO: 1907923 - RNA, 19 nt, Artificial Sequence
  Description of Artificial Sequence: Synthetic oligonucleotide
  Antisense strand to SEQ ID NO: 1907922
gacuacauggauaucuguc

SEQ ID NO: 1907924 - RNA, 19 nt, Artificial Sequence
  Description of Artificial Sequence: Synthetic oligonucleotide
  Sense strand starting at position 446 of SEQ ID NO: 1879448
gagcaagcuugagguaugu

SEQ ID NO: 1907925 - RNA, 19 nt, Artificial Sequence
  Description of Artificial Sequence: Synthetic oligonucleotide
  Antisense strand to SEQ ID NO: 1907924
acauaccucaagcuugcuc

SEQ ID NO: 1907926 - RNA, 19 nt, Artificial Sequence
  Description of Artificial Sequence: Synthetic oligonucleotide
  Sense strand starting at position 448 of SEQ ID NO: 1879448
gcaagcuugagguaugugu

SEQ ID NO: 1907927 - RNA, 19 nt, Artificial Sequence
  Description of Artificial Sequence: Synthetic oligonucleotide
  Antisense strand to SEQ ID NO: 1907926
acacauaccucaagcuugc

SEQ ID NO: 1907928 - RNA, 19 nt, Artificial Sequence
  Description of Artificial Sequence: Synthetic oligonucleotide
  Sense strand starting at position 462 of SEQ ID NO: 1879448
uguguaggguugccagaua

SEQ ID NO: 1907929 - RNA, 19 nt, Artificial Sequence
  Description of Artificial Sequence: Synthetic oligonucleotide
  Antisense strand to SEQ ID NO: 1907928
uaucuggcaacccuacaca

SEQ ID NO: 1907930 - RNA, 19 nt, Artificial Sequence
  Description of Artificial Sequence: Synthetic oligonucleotide
  Sense strand starting at position 504 of SEQ ID NO: 1879448
acccuagguaugugaguuu

SEQ ID NO: 1907931 - RNA, 19 nt, Artificial Sequence
  Description of Artificial Sequence: Synthetic oligonucleotide
  Antisense strand to SEQ ID NO: 1907930
aaacucacauaccuagggu

SEQ ID NO: 1907932 - RNA, 19 nt, Artificial Sequence
  Description of Artificial Sequence: Synthetic oligonucleotide
  Sense strand starting at position 511 of SEQ ID NO: 1879448
guaugugaguuuccuugga

SEQ ID NO: 1907933 - RNA, 19 nt, Artificial Sequence
  Description of Artificial Sequence: Synthetic oligonucleotide
  Antisense strand to SEQ ID NO: 1907932
uccaaggaaacucacauac

SEQ ID NO: 1907934 - RNA, 19 nt, Artificial Sequence
  Description of Artificial Sequence: Synthetic oligonucleotide
  Sense strand starting at position 513 of SEQ ID NO: 1879448
augugaguuuccuuggacu

SEQ ID NO: 1907935 - RNA, 19 nt, Artificial Sequence
  Description of Artificial Sequence: Synthetic oligonucleotide
  Antisense strand to SEQ ID NO: 1907934
aguccaaggaaacucacau

SEQ ID NO: 1907936 - RNA, 19 nt, Artificial Sequence
  Description of Artificial Sequence: Synthetic oligonucleotide
  Sense strand starting at position 515 of SEQ ID NO: 1879448
gugaguuuccuuggacuca

SEQ ID NO: 1907937 - RNA, 19 nt, Artificial Sequence
  Description of Artificial Sequence: Synthetic oligonucleotide
  Antisense strand to SEQ ID NO: 1907936
ugaguccaaggaaacucac

SEQ ID NO: 1907938 - RNA, 19 nt, Artificial Sequence
  Description of Artificial Sequence: Synthetic oligonucleotide
  Sense strand starting at position 516 of SEQ ID NO: 1879448
ugaguuuccuuggacucau

SEQ ID NO: 1907939 - RNA, 19 nt, Artificial Sequence
  Description of Artificial Sequence: Synthetic oligonucleotide
  Antisense strand to SEQ ID NO: 1907938
augaguccaaggaaacuca

SEQ ID NO: 1907940 - RNA, 19 nt, Artificial Sequence
  Description of Artificial Sequence: Synthetic oligonucleotide
  Sense strand starting at position 527 of SEQ ID NO: 1879448
ggacucaugcaagaagcuu

SEQ ID NO: 1907941 - RNA, 19 nt, Artificial Sequence
  Description of Artificial Sequence: Synthetic oligonucleotide
  Antisense strand to SEQ ID NO: 1907940
aagcuucuugcaugagucc

SEQ ID NO: 1907942 - RNA, 19 nt, Artificial Sequence
  Description of Artificial Sequence: Synthetic oligonucleotide
  Sense strand starting at position 572 of SEQ ID NO: 1879448
gucugucacccaggaaauu

SEQ ID NO: 1907943 - RNA, 19 nt, Artificial Sequence
  Description of Artificial Sequence: Synthetic oligonucleotide
  Antisense strand to SEQ ID NO: 1907942
aauuuccugggugacagac

SEQ ID NO: 1907944 - RNA, 19 nt, Artificial Sequence
  Description of Artificial Sequence: Synthetic oligonucleotide
  Sense strand starting at position 602 of SEQ ID NO: 1879448
gcuacuagucccuguccaa

SEQ ID NO: 1907945 - RNA, 19 nt, Artificial Sequence
  Description of Artificial Sequence: Synthetic oligonucleotide
  Antisense strand to SEQ ID NO: 1907944
uuggacagggacuaguagc

SEQ ID NO: 1907946 - RNA, 19 nt, Artificial Sequence
  Description of Artificial Sequence: Synthetic oligonucleotide
  Sense strand starting at position 614 of SEQ ID NO: 1879448
uguccaauuugcuguccau

SEQ ID NO: 1907947 - RNA, 19 nt, Artificial Sequence
  Description of Artificial Sequence: Synthetic oligonucleotide
  Antisense strand to SEQ ID NO: 1907946
auggacagcaaauuggaca

SEQ ID NO: 1907948 - RNA, 19 nt, Artificial Sequence
  Description of Artificial Sequence: Synthetic oligonucleotide
  Sense strand starting at position 631 of SEQ ID NO: 1879448
augguuugaggacgagauu

SEQ ID NO: 1907949 - RNA, 19 nt, Artificial Sequence
  Description of Artificial Sequence: Synthetic oligonucleotide
  Antisense strand to SEQ ID NO: 1907948
aaucucguccucaaaccau

SEQ ID NO: 1907950 - RNA, 19 nt, Artificial Sequence
  Description of Artificial Sequence: Synthetic oligonucleotide
  Sense strand starting at position 663 of SEQ ID NO: 1879448
augacaguuuaugcuggaa

SEQ ID NO: 1907951 - RNA, 19 nt, Artificial Sequence
  Description of Artificial Sequence: Synthetic oligonucleotide
  Antisense strand to SEQ ID NO: 1907950
uuccagcauaaacugucau

SEQ ID NO: 1907952 - RNA, 19 nt, Artificial Sequence
  Description of Artificial Sequence: Synthetic oligonucleotide
  Sense strand starting at position 665 of SEQ ID NO: 1879448
gacaguuuaugcuggaaca

SEQ ID NO: 1907953 - RNA, 19 nt, Artificial Sequence
  Description of Artificial Sequence: Synthetic oligonucleotide
  Antisense strand to SEQ ID NO: 1907952
uguuccagcauaaacuguc

SEQ ID NO: 1907954 - RNA, 19 nt, Artificial Sequence
  Description of Artificial Sequence: Synthetic oligonucleotide
  Sense strand starting at position 308 of SEQ ID NO: 1879449
cccagcgaucugggaagaa

SEQ ID NO: 1907955 - RNA, 19 nt, Artificial Sequence
  Description of Artificial Sequence: Synthetic oligonucleotide
  Antisense strand to SEQ ID NO: 1907954
uucuucccagaucgcuggg

SEQ ID NO: 1907956 - RNA, 19 nt, Artificial Sequence
  Description of Artificial Sequence: Synthetic oligonucleotide
  Sense strand starting at position 355 of SEQ ID NO: 1879449
uuuauagagacuugagguu

SEQ ID NO: 1907957 - RNA, 19 nt, Artificial Sequence
  Description of Artificial Sequence: Synthetic oligonucleotide
  Antisense strand to SEQ ID NO: 1907956
aaccucaagucucuauaaa

SEQ ID NO: 1907958 - RNA, 19 nt, Artificial Sequence
  Description of Artificial Sequence: Synthetic oligonucleotide
  Sense strand starting at position 950 of SEQ ID NO: 1879449
gggagugucucuuccugaa

SEQ ID NO: 1907959 - RNA, 19 nt, Artificial Sequence
  Description of Artificial Sequence: Synthetic oligonucleotide
  Antisense strand to SEQ ID NO: 1907958
uucaggaagagacacuccc

SEQ ID NO: 1907960 - RNA, 19 nt, Artificial Sequence
  Description of Artificial Sequence: Synthetic oligonucleotide
  Sense strand starting at position 954 of SEQ ID NO: 1879449
gugucucuuccugaaguga

SEQ ID NO: 1907961 - RNA, 19 nt, Artificial Sequence
  Description of Artificial Sequence: Synthetic oligonucleotide
  Antisense strand to SEQ ID NO: 1907960
ucacuucaggaagagacac

SEQ ID NO: 1907962 - RNA, 19 nt, Artificial Sequence
  Description of Artificial Sequence: Synthetic oligonucleotide
  Sense strand starting at position 1052 of SEQ ID NO: 1879449
ccaucucuguucuugagua

SEQ ID NO: 1907963 - RNA, 19 nt, Artificial Sequence
  Description of Artificial Sequence: Synthetic oligonucleotide
  Antisense strand to SEQ ID NO: 1907962
uacucaagaacagagaugg

SEQ ID NO: 1907964 - RNA, 19 nt, Artificial Sequence
  Description of Artificial Sequence: Synthetic oligonucleotide
  Sense strand starting at position 1054 of SEQ ID NO: 1879449
aucucuguucuugaguaca

SEQ ID NO: 1907965 - RNA, 19 nt, Artificial Sequence
  Description of Artificial Sequence: Synthetic oligonucleotide
  Antisense strand to SEQ ID NO: 1907964
uguacucaagaacagagau

SEQ ID NO: 1907966 - RNA, 19 nt, Artificial Sequence
  Description of Artificial Sequence: Synthetic oligonucleotide
  Sense strand starting at position 1057 of SEQ ID NO: 1879449
ucuguucuugaguacauca

SEQ ID NO: 1907967 - RNA, 19 nt, Artificial Sequence
  Description of Artificial Sequence: Synthetic oligonucleotide
  Antisense strand to SEQ ID NO: 1907966
ugauguacucaagaacaga

SEQ ID NO: 1907968 - RNA, 19 nt, Artificial Sequence
  Description of Artificial Sequence: Synthetic oligonucleotide
  Sense strand starting at position 1059 of SEQ ID NO: 1879449
uguucuugaguacaucaga

SEQ ID NO: 1907969 - RNA, 19 nt, Artificial Sequence
  Description of Artificial Sequence: Synthetic oligonucleotide
  Antisense strand to SEQ ID NO: 1907968
ucugauguacucaagaaca

SEQ ID NO: 1907970 - RNA, 19 nt, Artificial Sequence
  Description of Artificial Sequence: Synthetic oligonucleotide
  Sense strand starting at position 1251 of SEQ ID NO: 1879449
gcaauacuccagggagacu

SEQ ID NO: 1907971 - RNA, 19 nt, Artificial Sequence
  Description of Artificial Sequence: Synthetic oligonucleotide
  Antisense strand to SEQ ID NO: 1907970
agucucccuggaguauugc

SEQ ID NO: 1907972 - RNA, 19 nt, Artificial Sequence
  Description of Artificial Sequence: Synthetic oligonucleotide
  Sense strand starting at position 1277 of SEQ ID NO: 1879449
acucuagggcuuugggaaa

SEQ ID NO: 1907973 - RNA, 19 nt, Artificial Sequence
  Description of Artificial Sequence: Synthetic oligonucleotide
  Antisense strand to SEQ ID NO: 1907972
uuucccaaagcccuagagu

SEQ ID NO: 1907974 - RNA, 19 nt, Artificial Sequence
  Description of Artificial Sequence: Synthetic oligonucleotide
  Sense strand starting at position 1284 of SEQ ID NO: 1879449
ggcuuugggaaaugcucaa

SEQ ID NO: 1907975 - RNA, 19 nt, Artificial Sequence
  Description of Artificial Sequence: Synthetic oligonucleotide
  Antisense strand to SEQ ID NO: 1907974
uugagcauuucccaaagcc

SEQ ID NO: 1907976 - RNA, 19 nt, Artificial Sequence
  Description of Artificial Sequence: Synthetic oligonucleotide
  Sense strand starting at position 1469 of SEQ ID NO: 1879449
gaaucugggcuccggaaga

SEQ ID NO: 1907977 - RNA, 19 nt, Artificial Sequence
  Description of Artificial Sequence: Synthetic oligonucleotide
  Antisense strand to SEQ ID NO: 1907976
ucuuccggagcccagauuc

SEQ ID NO: 1907978 - RNA, 19 nt, Artificial Sequence
  Description of Artificial Sequence: Synthetic oligonucleotide
  Sense strand starting at position 1719 of SEQ ID NO: 1879449
cuucucuguuugcuagaaa

SEQ ID NO: 1907979 - RNA, 19 nt, Artificial Sequence
  Description of Artificial Sequence: Synthetic oligonucleotide
  Antisense strand to SEQ ID NO: 1907978
uuucuagcaaacagagaag

SEQ ID NO: 1907980 - RNA, 19 nt, Artificial Sequence
  Description of Artificial Sequence: Synthetic oligonucleotide
  Sense strand starting at position 1761 of SEQ ID NO: 1879449
guaugaauuucccaggaau

SEQ ID NO: 1907981 - RNA, 19 nt, Artificial Sequence
  Description of Artificial Sequence: Synthetic oligonucleotide
  Antisense strand to SEQ ID NO: 1907980
auuccugggaaauucauac

SEQ ID NO: 1907982 - RNA, 19 nt, Artificial Sequence
  Description of Artificial Sequence: Synthetic oligonucleotide
  Sense strand starting at position 1774 of SEQ ID NO: 1879449
aggaaucggagcugaugua

SEQ ID NO: 1907983 - RNA, 19 nt, Artificial Sequence
  Description of Artificial Sequence: Synthetic oligonucleotide
  Antisense strand to SEQ ID NO: 1907982
uacaucagcuccgauuccu

SEQ ID NO: 1907984 - RNA, 19 nt, Artificial Sequence
  Description of Artificial Sequence: Synthetic oligonucleotide
  Sense strand starting at position 1775 of SEQ ID NO: 1879449
ggaaucggagcugauguaa

SEQ ID NO: 1907985 - RNA, 19 nt, Artificial Sequence
  Description of Artificial Sequence: Synthetic oligonucleotide
  Antisense strand to SEQ ID NO: 1907984
uuacaucagcuccgauucc

SEQ ID NO: 1907986 - RNA, 19 nt, Artificial Sequence
  Description of Artificial Sequence: Synthetic oligonucleotide
  Sense strand starting at position 1937 of SEQ ID NO: 1879449
auguuucccgugcagagaa

SEQ ID NO: 1907987 - RNA, 19 nt, Artificial Sequence
  Description of Artificial Sequence: Synthetic oligonucleotide
  Antisense strand to SEQ ID NO: 1907986
uucucugcacgggaaacau

SEQ ID NO: 1907988 - RNA, 19 nt, Artificial Sequence
  Description of Artificial Sequence: Synthetic oligonucleotide
  Sense strand starting at position 2109 of SEQ ID NO: 1879449
ccucacuuggccugguaaa

SEQ ID NO: 1907989 - RNA, 19 nt, Artificial Sequence
  Description of Artificial Sequence: Synthetic oligonucleotide
  Antisense strand to SEQ ID NO: 1907988
uuuaccaggccaagugagg

SEQ ID NO: 1907990 - RNA, 19 nt, Artificial Sequence
  Description of Artificial Sequence: Synthetic oligonucleotide
  Sense strand starting at position 2110 of SEQ ID NO: 1879449
cucacuuggccugguaaau

SEQ ID NO: 1907991 - RNA, 19 nt, Artificial Sequence
  Description of Artificial Sequence: Synthetic oligonucleotide
  Antisense strand to SEQ ID NO: 1907990
auuuaccaggccaagugag

SEQ ID NO: 1907992 - RNA, 19 nt, Artificial Sequence
  Description of Artificial Sequence: Synthetic oligonucleotide
  Sense strand starting at position 2255 of SEQ ID NO: 1879449
gggagugugacuuguccac

SEQ ID NO: 1907993 - RNA, 19 nt, Artificial Sequence
  Description of Artificial Sequence: Synthetic oligonucleotide
  Antisense strand to SEQ ID NO: 1907992
guggacaagucacacuccc

SEQ ID NO: 1907994 - RNA, 19 nt, Artificial Sequence
  Description of Artificial Sequence: Synthetic oligonucleotide
  Sense strand starting at position 2259 of SEQ ID NO: 1879449
gugugacuuguccaccuga

SEQ ID NO: 1907995 - RNA, 19 nt, Artificial Sequence
  Description of Artificial Sequence: Synthetic oligonucleotide
  Antisense strand to SEQ ID NO: 1907994
ucagguggacaagucacac

SEQ ID NO: 1907996 - RNA, 19 nt, Artificial Sequence
  Description of Artificial Sequence: Synthetic oligonucleotide
  Sense strand starting at position 2323 of SEQ ID NO: 1879449
uuccaagagccugaacuuu

SEQ ID NO: 1907997 - RNA, 19 nt, Artificial Sequence
  Description of Artificial Sequence: Synthetic oligonucleotide
  Antisense strand to SEQ ID NO: 1907996
aaaguucaggcucuuggaa

SEQ ID NO: 1907998 - RNA, 19 nt, Artificial Sequence
  Description of Artificial Sequence: Synthetic oligonucleotide
  Sense strand starting at position 2374 of SEQ ID NO: 1879449
cgacacuacugaucuaagu

SEQ ID NO: 1907999 - RNA, 19 nt, Artificial Sequence
  Description of Artificial Sequence: Synthetic oligonucleotide
  Antisense strand to SEQ ID NO: 1907998
acuuagaucaguagugucg

SEQ ID NO: 1908000 - RNA, 19 nt, Artificial Sequence
  Description of Artificial Sequence: Synthetic oligonucleotide
  Sense strand starting at position 2383 of SEQ ID NO: 1879449
ugaucuaaguagcuuauua

SEQ ID NO: 1908001 - RNA, 19 nt, Artificial Sequence
  Description of Artificial Sequence: Synthetic oligonucleotide
  Antisense strand to SEQ ID NO: 1908000
uaauaagcuacuuagauca

SEQ ID NO: 1908002 - RNA, 19 nt, Artificial Sequence
  Description of Artificial Sequence: Synthetic oligonucleotide
  Sense strand starting at position 3077 of SEQ ID NO: 1879449
uggccugaggccuauacuu

SEQ ID NO: 1908003 - RNA, 19 nt, Artificial Sequence
  Description of Artificial Sequence: Synthetic oligonucleotide
  Antisense strand to SEQ ID NO: 1908002
aaguauaggccucaggcca

SEQ ID NO: 1908004 - RNA, 19 nt, Artificial Sequence
  Description of Artificial Sequence: Synthetic oligonucleotide
  Sense strand starting at position 3079 of SEQ ID NO: 1879449
gccugaggccuauacuuua

SEQ ID NO: 1908005 - RNA, 19 nt, Artificial Sequence
  Description of Artificial Sequence: Synthetic oligonucleotide
  Antisense strand to SEQ ID NO: 1908004
uaaaguauaggccucaggc

SEQ ID NO: 1908006 - RNA, 19 nt, Artificial Sequence
  Description of Artificial Sequence: Synthetic oligonucleotide
  Sense strand starting at position 3082 of SEQ ID NO: 1879449
ugaggccuauacuuuaaga

SEQ ID NO: 1908007 - RNA, 19 nt, Artificial Sequence
  Description of Artificial Sequence: Synthetic oligonucleotide
  Antisense strand to SEQ ID NO: 1908006
ucuuaaaguauaggccuca

SEQ ID NO: 1908008 - RNA, 19 nt, Artificial Sequence
  Description of Artificial Sequence: Synthetic oligonucleotide
  Sense strand starting at position 3104 of SEQ ID NO: 1879449
uuuggacucgaugauguuu

SEQ ID NO: 1908009 - RNA, 19 nt, Artificial Sequence
  Description of Artificial Sequence: Synthetic oligonucleotide
  Antisense strand to SEQ ID NO: 1908008
aaacaucaucgaguccaaa

SEQ ID NO: 1908010 - RNA, 19 nt, Artificial Sequence
  Description of Artificial Sequence: Synthetic oligonucleotide
  Sense strand starting at position 3204 of SEQ ID NO: 1879449
auacgagaggccgauguuu

SEQ ID NO: 1908011 - RNA, 19 nt, Artificial Sequence
  Description of Artificial Sequence: Synthetic oligonucleotide
  Antisense strand to SEQ ID NO: 1908010
aaacaucggccucucguau

SEQ ID NO: 1908012 - RNA, 19 nt, Artificial Sequence
  Description of Artificial Sequence: Synthetic oligonucleotide
  Sense strand starting at position 3242 of SEQ ID NO: 1879449
cccugucaucaaugcagaa

SEQ ID NO: 1908013 - RNA, 19 nt, Artificial Sequence
  Description of Artificial Sequence: Synthetic oligonucleotide
  Antisense strand to SEQ ID NO: 1908012
uucugcauugaugacaggg

SEQ ID NO: 1908014 - RNA, 19 nt, Artificial Sequence
  Description of Artificial Sequence: Synthetic oligonucleotide
  Sense strand starting at position 3306 of SEQ ID NO: 1879449
agggauuccugaccucuca

SEQ ID NO: 1908015 - RNA, 19 nt, Artificial Sequence
  Description of Artificial Sequence: Synthetic oligonucleotide
  Antisense strand to SEQ ID NO: 1908014
ugagaggucaggaaucccu

SEQ ID NO: 1908016 - RNA, 19 nt, Artificial Sequence
  Description of Artificial Sequence: Synthetic oligonucleotide
  Sense strand starting at position 3373 of SEQ ID NO: 1879449
gcccgaauccuccaacagu

SEQ ID NO: 1908017 - RNA, 19 nt, Artificial Sequence
  Description of Artificial Sequence: Synthetic oligonucleotide
  Antisense strand to SEQ ID NO: 1908016
acuguuggaggauucgggc

SEQ ID NO: 1908018 - RNA, 19 nt, Artificial Sequence
  Description of Artificial Sequence: Synthetic oligonucleotide
  Sense strand starting at position 3632 of SEQ ID NO: 1879449
agcacccagucaucaagaa

SEQ ID NO: 1908019 - RNA, 19 nt, Artificial Sequence
  Description of Artificial Sequence: Synthetic oligonucleotide
  Antisense strand to SEQ ID NO: 1908018
uucuugaugacugggugcu

SEQ ID NO: 1908020 - RNA, 19 nt, Artificial Sequence
  Description of Artificial Sequence: Synthetic oligonucleotide
  Sense strand starting at position 3633 of SEQ ID NO: 1879449
gcacccagucaucaagaaa

SEQ ID NO: 1908021 - RNA, 19 nt, Artificial Sequence
  Description of Artificial Sequence: Synthetic oligonucleotide
  Antisense strand to SEQ ID NO: 1908020
uuucuugaugacugggugc

SEQ ID NO: 1908022 - RNA, 19 nt, Artificial Sequence
  Description of Artificial Sequence: Synthetic oligonucleotide
  Sense strand starting at position 3731 of SEQ ID NO: 1879449
uggcauggcuucuuaggau

SEQ ID NO: 1908023 - RNA, 19 nt, Artificial Sequence
  Description of Artificial Sequence: Synthetic oligonucleotide
  Antisense strand to SEQ ID NO: 1908022
auccuaagaagccaugcca

SEQ ID NO: 1908024 - RNA, 19 nt, Artificial Sequence
  Description of Artificial Sequence: Synthetic oligonucleotide
  Sense strand starting at position 3820 of SEQ ID NO: 1879449
cuggcaucuuuguccaaca

SEQ ID NO: 1908025 - RNA, 19 nt, Artificial Sequence
  Description of Artificial Sequence: Synthetic oligonucleotide
  Antisense strand to SEQ ID NO: 1908024
uguuggacaaagaugccag

SEQ ID NO: 1908026 - RNA, 19 nt, Artificial Sequence
  Description of Artificial Sequence: Synthetic oligonucleotide
  Sense strand starting at position 3821 of SEQ ID NO: 1879449
uggcaucuuuguccaacaa

SEQ ID NO: 1908027 - RNA, 19 nt, Artificial Sequence
  Description of Artificial Sequence: Synthetic oligonucleotide
  Antisense strand to SEQ ID NO: 1908026
uuguuggacaaagaugcca

SEQ ID NO: 1908028 - RNA, 19 nt, Artificial Sequence
  Description of Artificial Sequence: Synthetic oligonucleotide
  Sense strand starting at position 3822 of SEQ ID NO: 1879449
ggcaucuuuguccaacaaa

SEQ ID NO: 1908029 - RNA, 19 nt, Artificial Sequence
  Description of Artificial Sequence: Synthetic oligonucleotide
  Antisense strand to SEQ ID NO: 1908028
uuuguuggacaaagaugcc

SEQ ID NO: 1908030 - RNA, 19 nt, Artificial Sequence
  Description of Artificial Sequence: Synthetic oligonucleotide
  Sense strand starting at position 3836 of SEQ ID NO: 1879449
acaaaucuggugugaaugu

SEQ ID NO: 1908031 - RNA, 19 nt, Artificial Sequence
  Description of Artificial Sequence: Synthetic oligonucleotide
  Antisense strand to SEQ ID NO: 1908030
acauucacaccagauuugu

SEQ ID NO: 1908032 - RNA, 19 nt, Artificial Sequence
  Description of Artificial Sequence: Synthetic oligonucleotide
  Sense strand starting at position 3846 of SEQ ID NO: 1879449
ugugaaugugccuacagag

SEQ ID NO: 1908033 - RNA, 19 nt, Artificial Sequence
  Description of Artificial Sequence: Synthetic oligonucleotide
  Antisense strand to SEQ ID NO: 1908032
cucuguaggcacauucaca

SEQ ID NO: 1908034 - RNA, 19 nt, Artificial Sequence
  Description of Artificial Sequence: Synthetic oligonucleotide
  Sense strand starting at position 134 of SEQ ID NO: 1879450
gggugucugugcccagaau

SEQ ID NO: 1908035 - RNA, 19 nt, Artificial Sequence
  Description of Artificial Sequence: Synthetic oligonucleotide
  Antisense strand to SEQ ID NO: 1908034
auucugggcacagacaccc

SEQ ID NO: 1908036 - RNA, 19 nt, Artificial Sequence
  Description of Artificial Sequence: Synthetic oligonucleotide
  Sense strand starting at position 135 of SEQ ID NO: 1879450
ggugucugugcccagaauu

SEQ ID NO: 1908037 - RNA, 19 nt, Artificial Sequence
  Description of Artificial Sequence: Synthetic oligonucleotide
  Antisense strand to SEQ ID NO: 1908036
aauucugggcacagacacc

SEQ ID NO: 1908038 - RNA, 19 nt, Artificial Sequence
  Description of Artificial Sequence: Synthetic oligonucleotide
  Sense strand starting at position 223 of SEQ ID NO: 1879450
gaauuuagcugagaaacag

SEQ ID NO: 1908039 - RNA, 19 nt, Artificial Sequence
  Description of Artificial Sequence: Synthetic oligonucleotide
  Antisense strand to SEQ ID NO: 1908038
cuguuucucagcuaaauuc

SEQ ID NO: 1908040 - RNA, 19 nt, Artificial Sequence
  Description of Artificial Sequence: Synthetic oligonucleotide
  Sense strand starting at position 241 of SEQ ID NO: 1879450
ggagcauucccagggugag

SEQ ID NO: 1908041 - RNA, 19 nt, Artificial Sequence
  Description of Artificial Sequence: Synthetic oligonucleotide
  Antisense strand to SEQ ID NO: 1908040
cucacccugggaaugcucc

SEQ ID NO: 1908042 - RNA, 19 nt, Artificial Sequence
  Description of Artificial Sequence: Synthetic oligonucleotide
  Sense strand starting at position 316 of SEQ ID NO: 1879450
cuugaauucugaucucguu

SEQ ID NO: 1908043 - RNA, 19 nt, Artificial Sequence
  Description of Artificial Sequence: Synthetic oligonucleotide
  Antisense strand to SEQ ID NO: 1908042
aacgagaucagaauucaag

SEQ ID NO: 1908044 - RNA, 19 nt, Artificial Sequence
  Description of Artificial Sequence: Synthetic oligonucleotide
  Sense strand starting at position 328 of SEQ ID NO: 1879450
ucucguuucugccuaagac

SEQ ID NO: 1908045 - RNA, 19 nt, Artificial Sequence
  Description of Artificial Sequence: Synthetic oligonucleotide
  Antisense strand to SEQ ID NO: 1908044
gucuuaggcagaaacgaga

SEQ ID NO: 1908046 - RNA, 19 nt, Artificial Sequence
  Description of Artificial Sequence: Synthetic oligonucleotide
  Sense strand starting at position 414 of SEQ ID NO: 1879450
ccgcauucaguucgaagga

SEQ ID NO: 1908047 - RNA, 19 nt, Artificial Sequence
  Description of Artificial Sequence: Synthetic oligonucleotide
  Antisense strand to SEQ ID NO: 1908046
uccuucgaacugaaugcgg

SEQ ID NO: 1908048 - RNA, 19 nt, Artificial Sequence
  Description of Artificial Sequence: Synthetic oligonucleotide
  Sense strand starting at position 660 of SEQ ID NO: 1879450
auaugcaagccaugaauua

SEQ ID NO: 1908049 - RNA, 19 nt, Artificial Sequence
  Description of Artificial Sequence: Synthetic oligonucleotide
  Antisense strand to SEQ ID NO: 1908048
uaauucauggcuugcauau

SEQ ID NO: 1908050 - RNA, 19 nt, Artificial Sequence
  Description of Artificial Sequence: Synthetic oligonucleotide
  Sense strand starting at position 746 of SEQ ID NO: 1879450
cgccuauuuacggagcgau

SEQ ID NO: 1908051 - RNA, 19 nt, Artificial Sequence
  Description of Artificial Sequence: Synthetic oligonucleotide
  Antisense strand to SEQ ID NO: 1908050
aucgcuccguaaauaggcg

SEQ ID NO: 1908052 - RNA, 19 nt, Artificial Sequence
  Description of Artificial Sequence: Synthetic oligonucleotide
  Sense strand starting at position 749 of SEQ ID NO: 1879450
cuauuuacggagcgaucua

SEQ ID NO: 1908053 - RNA, 19 nt, Artificial Sequence
  Description of Artificial Sequence: Synthetic oligonucleotide
  Antisense strand to SEQ ID NO: 1908052
uagaucgcuccguaaauag

SEQ ID NO: 1908054 - RNA, 19 nt, Artificial Sequence
  Description of Artificial Sequence: Synthetic oligonucleotide
  Sense strand starting at position 1182 of SEQ ID NO: 1879450
cggcuuuguccagggugga

SEQ ID NO: 1908055 - RNA, 19 nt, Artificial Sequence
  Description of Artificial Sequence: Synthetic oligonucleotide
  Antisense strand to SEQ ID NO: 1908054
uccacccuggacaaagccg

SEQ ID NO: 1908056 - RNA, 19 nt, Artificial Sequence
  Description of Artificial Sequence: Synthetic oligonucleotide
  Sense strand starting at position 1219 of SEQ ID NO: 1879450
acagcaugaccacgaguaa

SEQ ID NO: 1908057 - RNA, 19 nt, Artificial Sequence
  Description of Artificial Sequence: Synthetic oligonucleotide
  Antisense strand to SEQ ID NO: 1908056
uuacucguggucaugcugu

SEQ ID NO: 1908058 - RNA, 19 nt, Artificial Sequence
  Description of Artificial Sequence: Synthetic oligonucleotide
  Sense strand starting at position 1220 of SEQ ID NO: 1879450
cagcaugaccacgaguaaa

SEQ ID NO: 1908059 - RNA, 19 nt, Artificial Sequence
  Description of Artificial Sequence: Synthetic oligonucleotide
  Antisense strand to SEQ ID NO: 1908058
uuuacucguggucaugcug

SEQ ID NO: 1908060 - RNA, 19 nt, Artificial Sequence
  Description of Artificial Sequence: Synthetic oligonucleotide
  Sense strand starting at position 1263 of SEQ ID NO: 1879450
caaagugauguggagcuua

SEQ ID NO: 1908061 - RNA, 19 nt, Artificial Sequence
  Description of Artificial Sequence: Synthetic oligonucleotide
  Antisense strand to SEQ ID NO: 1908060
uaagcuccacaucacuuug

SEQ ID NO: 1908062 - RNA, 19 nt, Artificial Sequence
  Description of Artificial Sequence: Synthetic oligonucleotide
  Sense strand starting at position 1383 of SEQ ID NO: 1879450
gcuguucccuccucuggaa

SEQ ID NO: 1908063 - RNA, 19 nt, Artificial Sequence
  Description of Artificial Sequence: Synthetic oligonucleotide
  Antisense strand to SEQ ID NO: 1908062
uuccagaggagggaacagc

SEQ ID NO: 1908064 - RNA, 19 nt, Artificial Sequence
  Description of Artificial Sequence: Synthetic oligonucleotide
  Sense strand starting at position 1385 of SEQ ID NO: 1879450
uguucccuccucuggaaau

SEQ ID NO: 1908065 - RNA, 19 nt, Artificial Sequence
  Description of Artificial Sequence: Synthetic oligonucleotide
  Antisense strand to SEQ ID NO: 1908064
auuuccagaggagggaaca

SEQ ID NO: 1908066 - RNA, 19 nt, Artificial Sequence
  Description of Artificial Sequence: Synthetic oligonucleotide
  Sense strand starting at position 1835 of SEQ ID NO: 1879450
gccagaccuuguccauguu

SEQ ID NO: 1908067 - RNA, 19 nt, Artificial Sequence
  Description of Artificial Sequence: Synthetic oligonucleotide
  Antisense strand to SEQ ID NO: 1908066
aacauggacaaggucuggc

SEQ ID NO: 1908068 - RNA, 19 nt, Artificial Sequence
  Description of Artificial Sequence: Synthetic oligonucleotide
  Sense strand starting at position 1845 of SEQ ID NO: 1879450
guccauguugcucaguauu

SEQ ID NO: 1908069 - RNA, 19 nt, Artificial Sequence
  Description of Artificial Sequence: Synthetic oligonucleotide
  Antisense strand to SEQ ID NO: 1908068
aauacugagcaacauggac

SEQ ID NO: 1908070 - RNA, 19 nt, Artificial Sequence
  Description of Artificial Sequence: Synthetic oligonucleotide
  Sense strand starting at position 1847 of SEQ ID NO: 1879450
ccauguugcucaguauugu

SEQ ID NO: 1908071 - RNA, 19 nt, Artificial Sequence
  Description of Artificial Sequence: Synthetic oligonucleotide
  Antisense strand to SEQ ID NO: 1908070
acaauacugagcaacaugg

SEQ ID NO: 1908072 - RNA, 19 nt, Artificial Sequence
  Description of Artificial Sequence: Synthetic oligonucleotide
  Sense strand starting at position 1856 of SEQ ID NO: 1879450
ucaguauugugcccuugga

SEQ ID NO: 1908073 - RNA, 19 nt, Artificial Sequence
  Description of Artificial Sequence: Synthetic oligonucleotide
  Antisense strand to SEQ ID NO: 1908072
uccaagggcacaauacuga

SEQ ID NO: 1908074 - RNA, 19 nt, Artificial Sequence
  Description of Artificial Sequence: Synthetic oligonucleotide
  Sense strand starting at position 1873 of SEQ ID NO: 1879450
gaagaagguccuugaaugu

SEQ ID NO: 1908075 - RNA, 19 nt, Artificial Sequence
  Description of Artificial Sequence: Synthetic oligonucleotide
  Antisense strand to SEQ ID NO: 1908074
acauucaaggaccuucuuc

SEQ ID NO: 1908076 - RNA, 19 nt, Artificial Sequence
  Description of Artificial Sequence: Synthetic oligonucleotide
  Sense strand starting at position 1880 of SEQ ID NO: 1879450
guccuugaauguuuccuga

SEQ ID NO: 1908077 - RNA, 19 nt, Artificial Sequence
  Description of Artificial Sequence: Synthetic oligonucleotide
  Antisense strand to SEQ ID NO: 1908076
ucaggaaacauucaaggac

SEQ ID NO: 1908078 - RNA, 19 nt, Artificial Sequence
  Description of Artificial Sequence: Synthetic oligonucleotide
  Sense strand starting at position 1882 of SEQ ID NO: 1879450
ccuugaauguuuccugaaa

SEQ ID NO: 1908079 - RNA, 19 nt, Artificial Sequence
  Description of Artificial Sequence: Synthetic oligonucleotide
  Antisense strand to SEQ ID NO: 1908078
uuucaggaaacauucaagg

SEQ ID NO: 1908080 - RNA, 19 nt, Artificial Sequence
  Description of Artificial Sequence: Synthetic oligonucleotide
  Sense strand starting at position 1932 of SEQ ID NO: 1879450
acacauuggccuggacaga

SEQ ID NO: 1908081 - RNA, 19 nt, Artificial Sequence
  Description of Artificial Sequence: Synthetic oligonucleotide
  Antisense strand to SEQ ID NO: 1908080
ucuguccaggccaaugugu

SEQ ID NO: 1908082 - RNA, 19 nt, Artificial Sequence
  Description of Artificial Sequence: Synthetic oligonucleotide
  Sense strand starting at position 2009 of SEQ ID NO: 1879450
gauggaaggcuuuaggcaa

SEQ ID NO: 1908083 - RNA, 19 nt, Artificial Sequence
  Description of Artificial Sequence: Synthetic oligonucleotide
  Antisense strand to SEQ ID NO: 1908082
uugccuaaagccuuccauc

SEQ ID NO: 1908084 - RNA, 19 nt, Artificial Sequence
  Description of Artificial Sequence: Synthetic oligonucleotide
  Sense strand starting at position 2121 of SEQ ID NO: 1879450
gauggagaguugucaucag

SEQ ID NO: 1908085 - RNA, 19 nt, Artificial Sequence
  Description of Artificial Sequence: Synthetic oligonucleotide
  Antisense strand to SEQ ID NO: 1908084
cugaugacaacucuccauc

SEQ ID NO: 1908086 - RNA, 19 nt, Artificial Sequence
  Description of Artificial Sequence: Synthetic oligonucleotide
  Sense strand starting at position 2194 of SEQ ID NO: 1879450
ccugaaauccuaggucucu

SEQ ID NO: 1908087 - RNA, 19 nt, Artificial Sequence
  Description of Artificial Sequence: Synthetic oligonucleotide
  Antisense strand to SEQ ID NO: 1908086
agagaccuaggauuucagg

SEQ ID NO: 1908088 - RNA, 19 nt, Artificial Sequence
  Description of Artificial Sequence: Synthetic oligonucleotide
  Sense strand starting at position 2195 of SEQ ID NO: 1879450
cugaaauccuaggucucuu

SEQ ID NO: 1908089 - RNA, 19 nt, Artificial Sequence
  Description of Artificial Sequence: Synthetic oligonucleotide
  Antisense strand to SEQ ID NO: 1908088
aagagaccuaggauuucag

SEQ ID NO: 1908090 - RNA, 19 nt, Artificial Sequence
  Description of Artificial Sequence: Synthetic oligonucleotide
  Sense strand starting at position 2279 of SEQ ID NO: 1879450
gugagaagauucucaucuu

SEQ ID NO: 1908091 - RNA, 19 nt, Artificial Sequence
  Description of Artificial Sequence: Synthetic oligonucleotide
  Antisense strand to SEQ ID NO: 1908090
aagaugagaaucuucucac

SEQ ID NO: 1908092 - RNA, 19 nt, Artificial Sequence
  Description of Artificial Sequence: Synthetic oligonucleotide
  Sense strand starting at position 2280 of SEQ ID NO: 1879450
ugagaagauucucaucuug

SEQ ID NO: 1908093 - RNA, 19 nt, Artificial Sequence
  Description of Artificial Sequence: Synthetic oligonucleotide
  Antisense strand to SEQ ID NO: 1908092
caagaugagaaucuucuca

SEQ ID NO: 1908094 - RNA, 19 nt, Artificial Sequence
  Description of Artificial Sequence: Synthetic oligonucleotide
  Sense strand starting at position 2288 of SEQ ID NO: 1879450
uucucaucuugggaaucaa

SEQ ID NO: 1908095 - RNA, 19 nt, Artificial Sequence
  Description of Artificial Sequence: Synthetic oligonucleotide
  Antisense strand to SEQ ID NO: 1908094
uugauucccaagaugagaa

SEQ ID NO: 1908096 - RNA, 19 nt, Artificial Sequence
  Description of Artificial Sequence: Synthetic oligonucleotide
  Sense strand starting at position 2441 of SEQ ID NO: 1879450
gcaacagacuuugucucua

SEQ ID NO: 1908097 - RNA, 19 nt, Artificial Sequence
  Description of Artificial Sequence: Synthetic oligonucleotide
  Antisense strand to SEQ ID NO: 1908096
uagagacaaagucuguugc

SEQ ID NO: 1908098 - RNA, 19 nt, Artificial Sequence
  Description of Artificial Sequence: Synthetic oligonucleotide
  Sense strand starting at position 2880 of SEQ ID NO: 1879450
ggcgucuguccagcuugau

SEQ ID NO: 1908099 - RNA, 19 nt, Artificial Sequence
  Description of Artificial Sequence: Synthetic oligonucleotide
  Antisense strand to SEQ ID NO: 1908098
aucaagcuggacagacgcc

SEQ ID NO: 1908100 - RNA, 19 nt, Artificial Sequence
  Description of Artificial Sequence: Synthetic oligonucleotide
  Sense strand starting at position 3036 of SEQ ID NO: 1879450
cuugguccgcuauaaacau

SEQ ID NO: 1908101 - RNA, 19 nt, Artificial Sequence
  Description of Artificial Sequence: Synthetic oligonucleotide
  Antisense strand to SEQ ID NO: 1908100
auguuuauagcggaccaag

SEQ ID NO: 1908102 - RNA, 19 nt, Artificial Sequence
  Description of Artificial Sequence: Synthetic oligonucleotide
  Sense strand starting at position 3258 of SEQ ID NO: 1879450
cggagcugccucuaggaua

SEQ ID NO: 1908103 - RNA, 19 nt, Artificial Sequence
  Description of Artificial Sequence: Synthetic oligonucleotide
  Antisense strand to SEQ ID NO: 1908102
uauccuagaggcagcuccg

SEQ ID NO: 1908104 - RNA, 19 nt, Artificial Sequence
  Description of Artificial Sequence: Synthetic oligonucleotide
  Sense strand starting at position 3278 of SEQ ID NO: 1879450
ggauaugguccugggaaca

SEQ ID NO: 1908105 - RNA, 19 nt, Artificial Sequence
  Description of Artificial Sequence: Synthetic oligonucleotide
  Antisense strand to SEQ ID NO: 1908104
uguucccaggaccauaucc

SEQ ID NO: 1908106 - RNA, 19 nt, Artificial Sequence
  Description of Artificial Sequence: Synthetic oligonucleotide
  Sense strand starting at position 3604 of SEQ ID NO: 1879450
ucaugugaucgucacacaa

SEQ ID NO: 1908107 - RNA, 19 nt, Artificial Sequence
  Description of Artificial Sequence: Synthetic oligonucleotide
  Antisense strand to SEQ ID NO: 1908106
uugugugacgaucacauga

SEQ ID NO: 1908108 - RNA, 19 nt, Artificial Sequence
  Description of Artificial Sequence: Synthetic oligonucleotide
  Sense strand starting at position 3795 of SEQ ID NO: 1879450
aaugcucuuggcugggaga

SEQ ID NO: 1908109 - RNA, 19 nt, Artificial Sequence
  Description of Artificial Sequence: Synthetic oligonucleotide
  Antisense strand to SEQ ID NO: 1908108
ucucccagccaagagcauu

SEQ ID NO: 1908110 - RNA, 19 nt, Artificial Sequence
  Description of Artificial Sequence: Synthetic oligonucleotide
  Sense strand starting at position 3896 of SEQ ID NO: 1879450
aaggcugaucgggagaagu

SEQ ID NO: 1908111 - RNA, 19 nt, Artificial Sequence
  Description of Artificial Sequence: Synthetic oligonucleotide
  Antisense strand to SEQ ID NO: 1908110
acuucucccgaucagccuu

SEQ ID NO: 1908112 - RNA, 19 nt, Artificial Sequence
  Description of Artificial Sequence: Synthetic oligonucleotide
  Sense strand starting at position 3947 of SEQ ID NO: 1879450
uugcuuuccagucagggaa

SEQ ID NO: 1908113 - RNA, 19 nt, Artificial Sequence
  Description of Artificial Sequence: Synthetic oligonucleotide
  Antisense strand to SEQ ID NO: 1908112
uucccugacuggaaagcaa

SEQ ID NO: 1908114 - RNA, 19 nt, Artificial Sequence
  Description of Artificial Sequence: Synthetic oligonucleotide
  Sense strand starting at position 234 of SEQ ID NO: 1879451
ggaguuugcaccuagccga

SEQ ID NO: 1908115 - RNA, 19 nt, Artificial Sequence
  Description of Artificial Sequence: Synthetic oligonucleotide
  Antisense strand to SEQ ID NO: 1908114
ucggcuaggugcaaacucc

SEQ ID NO: 1908116 - RNA, 19 nt, Artificial Sequence
  Description of Artificial Sequence: Synthetic oligonucleotide
  Sense strand starting at position 411 of SEQ ID NO: 1879451
accauuguguuuguuauuu

SEQ ID NO: 1908117 - RNA, 19 nt, Artificial Sequence
  Description of Artificial Sequence: Synthetic oligonucleotide
  Antisense strand to SEQ ID NO: 1908116
aaauaacaaacacaauggu

SEQ ID NO: 1908118 - RNA, 19 nt, Artificial Sequence
  Description of Artificial Sequence: Synthetic oligonucleotide
  Sense strand starting at position 415 of SEQ ID NO: 1879451
uuguguuuguuauuuccca

SEQ ID NO: 1908119 - RNA, 19 nt, Artificial Sequence
  Description of Artificial Sequence: Synthetic oligonucleotide
  Antisense strand to SEQ ID NO: 1908118
ugggaaauaacaaacacaa

SEQ ID NO: 1908120 - RNA, 19 nt, Artificial Sequence
  Description of Artificial Sequence: Synthetic oligonucleotide
  Sense strand starting at position 503 of SEQ ID NO: 1879451
aucauuagucacugagaua

SEQ ID NO: 1908121 - RNA, 19 nt, Artificial Sequence
  Description of Artificial Sequence: Synthetic oligonucleotide
  Antisense strand to SEQ ID NO: 1908120
uaucucagugacuaaugau

SEQ ID NO: 1908122 - RNA, 19 nt, Artificial Sequence
  Description of Artificial Sequence: Synthetic oligonucleotide
  Sense strand starting at position 531 of SEQ ID NO: 1879451
aguucuguuacccagggaa

SEQ ID NO: 1908123 - RNA, 19 nt, Artificial Sequence
  Description of Artificial Sequence: Synthetic oligonucleotide
  Antisense strand to SEQ ID NO: 1908122
uucccuggguaacagaacu

SEQ ID NO: 1908124 - RNA, 19 nt, Artificial Sequence
  Description of Artificial Sequence: Synthetic oligonucleotide
  Sense strand starting at position 566 of SEQ ID NO: 1879451
guguaggugggagaugauu

SEQ ID NO: 1908125 - RNA, 19 nt, Artificial Sequence
  Description of Artificial Sequence: Synthetic oligonucleotide
  Antisense strand to SEQ ID NO: 1908124
aaucaucucccaccuacac

SEQ ID NO: 1908126 - RNA, 19 nt, Artificial Sequence
  Description of Artificial Sequence: Synthetic oligonucleotide
  Sense strand starting at position 568 of SEQ ID NO: 1879451
guaggugggagaugauuaa

SEQ ID NO: 1908127 - RNA, 19 nt, Artificial Sequence
  Description of Artificial Sequence: Synthetic oligonucleotide
  Antisense strand to SEQ ID NO: 1908126
uuaaucaucucccaccuac

SEQ ID NO: 1908128 - RNA, 19 nt, Artificial Sequence
  Description of Artificial Sequence: Synthetic oligonucleotide
  Sense strand starting at position 585 of SEQ ID NO: 1879451
aaucucuccgugcacgaua

SEQ ID NO: 1908129 - RNA, 19 nt, Artificial Sequence
  Description of Artificial Sequence: Synthetic oligonucleotide
  Antisense strand to SEQ ID NO: 1908128
uaucgugcacggagagauu

SEQ ID NO: 1908130 - RNA, 19 nt, Artificial Sequence
  Description of Artificial Sequence: Synthetic oligonucleotide
  Sense strand starting at position 622 of SEQ ID NO: 1879451
ccggaauuagucuguuuau

SEQ ID NO: 1908131 - RNA, 19 nt, Artificial Sequence
  Description of Artificial Sequence: Synthetic oligonucleotide
  Antisense strand to SEQ ID NO: 1908130
auaaacagacuaauuccgg

SEQ ID NO: 1908132 - RNA, 19 nt, Artificial Sequence
  Description of Artificial Sequence: Synthetic oligonucleotide
  Sense strand starting at position 623 of SEQ ID NO: 1879451
cggaauuagucuguuuaug

SEQ ID NO: 1908133 - RNA, 19 nt, Artificial Sequence
  Description of Artificial Sequence: Synthetic oligonucleotide
  Antisense strand to SEQ ID NO: 1908132
cauaaacagacuaauuccg

SEQ ID NO: 1908134 - RNA, 19 nt, Artificial Sequence
  Description of Artificial Sequence: Synthetic oligonucleotide
  Sense strand starting at position 625 of SEQ ID NO: 1879451
gaauuagucuguuuaugua

SEQ ID NO: 1908135 - RNA, 19 nt, Artificial Sequence
  Description of Artificial Sequence: Synthetic oligonucleotide
  Antisense strand to SEQ ID NO: 1908134
uacauaaacagacuaauuc

SEQ ID NO: 1908136 - RNA, 19 nt, Artificial Sequence
  Description of Artificial Sequence: Synthetic oligonucleotide
  Sense strand starting at position 660 of SEQ ID NO: 1879451
aagaguagaugggauuuaa

SEQ ID NO: 1908137 - RNA, 19 nt, Artificial Sequence
  Description of Artificial Sequence: Synthetic oligonucleotide
  Antisense strand to SEQ ID NO: 1908136
uuaaaucccaucuacucuu

SEQ ID NO: 1908138 - RNA, 19 nt, Artificial Sequence
  Description of Artificial Sequence: Synthetic oligonucleotide
  Sense strand starting at position 719 of SEQ ID NO: 1879451
cugaauguuguagaacauu

SEQ ID NO: 1908139 - RNA, 19 nt, Artificial Sequence
  Description of Artificial Sequence: Synthetic oligonucleotide
  Antisense strand to SEQ ID NO: 1908138
aauguucuacaacauucag

SEQ ID NO: 1908140 - RNA, 19 nt, Artificial Sequence
  Description of Artificial Sequence: Synthetic oligonucleotide
  Sense strand starting at position 771 of SEQ ID NO: 1879451
agaaguuaccaauguuaac

SEQ ID NO: 1908141 - RNA, 19 nt, Artificial Sequence
  Description of Artificial Sequence: Synthetic oligonucleotide
  Antisense strand to SEQ ID NO: 1908140
guuaacauugguaacuucu

SEQ ID NO: 1908142 - RNA, 19 nt, Artificial Sequence
  Description of Artificial Sequence: Synthetic oligonucleotide
  Sense strand starting at position 850 of SEQ ID NO: 1879451
uagucaagccaguaugagu

SEQ ID NO: 1908143 - RNA, 19 nt, Artificial Sequence
  Description of Artificial Sequence: Synthetic oligonucleotide
  Antisense strand to SEQ ID NO: 1908142
acucauacuggcuugacua

SEQ ID NO: 1908144 - RNA, 19 nt, Artificial Sequence
  Description of Artificial Sequence: Synthetic oligonucleotide
  Sense strand starting at position 1068 of SEQ ID NO: 1879451
uauagaugauaggcagauu

SEQ ID NO: 1908145 - RNA, 19 nt, Artificial Sequence
  Description of Artificial Sequence: Synthetic oligonucleotide
  Antisense strand to SEQ ID NO: 1908144
aaucugccuaucaucuaua

SEQ ID NO: 1908146 - RNA, 19 nt, Artificial Sequence
  Description of Artificial Sequence: Synthetic oligonucleotide
  Sense strand starting at position 1099 of SEQ ID NO: 1879451
aaauuugcauuagaggagu

SEQ ID NO: 1908147 - RNA, 19 nt, Artificial Sequence
  Description of Artificial Sequence: Synthetic oligonucleotide
  Antisense strand to SEQ ID NO: 1908146
acuccucuaaugcaaauuu

SEQ ID NO: 1908148 - RNA, 19 nt, Artificial Sequence
  Description of Artificial Sequence: Synthetic oligonucleotide
  Sense strand starting at position 1105 of SEQ ID NO: 1879451
gcauuagaggaguaaggcu

SEQ ID NO: 1908149 - RNA, 19 nt, Artificial Sequence
  Description of Artificial Sequence: Synthetic oligonucleotide
  Antisense strand to SEQ ID NO: 1908148
agccuuacuccucuaaugc

SEQ ID NO: 1908150 - RNA, 19 nt, Artificial Sequence
  Description of Artificial Sequence: Synthetic oligonucleotide
  Sense strand starting at position 1984 of SEQ ID NO: 1879451
cggagaggacgcugagaau

SEQ ID NO: 1908151 - RNA, 19 nt, Artificial Sequence
  Description of Artificial Sequence: Synthetic oligonucleotide
  Antisense strand to SEQ ID NO: 1908150
auucucagcguccucuccg

SEQ ID NO: 1908152 - RNA, 19 nt, Artificial Sequence
  Description of Artificial Sequence: Synthetic oligonucleotide
  Sense strand starting at position 2477 of SEQ ID NO: 1879451
ggcaaugcugucgaggagu

SEQ ID NO: 1908153 - RNA, 19 nt, Artificial Sequence
  Description of Artificial Sequence: Synthetic oligonucleotide
  Antisense strand to SEQ ID NO: 1908152
acuccucgacagcauugcc

SEQ ID NO: 1908154 - RNA, 19 nt, Artificial Sequence
  Description of Artificial Sequence: Synthetic oligonucleotide
  Sense strand starting at position 2479 of SEQ ID NO: 1879451
caaugcugucgaggaguca

SEQ ID NO: 1908155 - RNA, 19 nt, Artificial Sequence
  Description of Artificial Sequence: Synthetic oligonucleotide
  Antisense strand to SEQ ID NO: 1908154
ugacuccucgacagcauug

SEQ ID NO: 1908156 - RNA, 19 nt, Artificial Sequence
  Description of Artificial Sequence: Synthetic oligonucleotide
  Sense strand starting at position 2590 of SEQ ID NO: 1879451
ugcuucuugguuugauaaa

SEQ ID NO: 1908157 - RNA, 19 nt, Artificial Sequence
  Description of Artificial Sequence: Synthetic oligonucleotide
  Antisense strand to SEQ ID NO: 1908156
uuuaucaaaccaagaagca

SEQ ID NO: 1908158 - RNA, 19 nt, Artificial Sequence
  Description of Artificial Sequence: Synthetic oligonucleotide
  Sense strand starting at position 2601 of SEQ ID NO: 1879451
uugauaaacugcucugguu

SEQ ID NO: 1908159 - RNA, 19 nt, Artificial Sequence
  Description of Artificial Sequence: Synthetic oligonucleotide
  Antisense strand to SEQ ID NO: 1908158
aaccagagcaguuuaucaa

SEQ ID NO: 1908160 - RNA, 19 nt, Artificial Sequence
  Description of Artificial Sequence: Synthetic oligonucleotide
  Sense strand starting at position 2609 of SEQ ID NO: 1879451
cugcucugguucccaagaa

SEQ ID NO: 1908161 - RNA, 19 nt, Artificial Sequence
  Description of Artificial Sequence: Synthetic oligonucleotide
  Antisense strand to SEQ ID NO: 1908160
uucuugggaaccagagcag

SEQ ID NO: 1908162 - RNA, 19 nt, Artificial Sequence
  Description of Artificial Sequence: Synthetic oligonucleotide
  Sense strand starting at position 2613 of SEQ ID NO: 1879451
ucugguucccaagaaagcu

SEQ ID NO: 1908163 - RNA, 19 nt, Artificial Sequence
  Description of Artificial Sequence: Synthetic oligonucleotide
  Antisense strand to SEQ ID NO: 1908162
agcuuucuugggaaccaga

SEQ ID NO: 1908164 - RNA, 19 nt, Artificial Sequence
  Description of Artificial Sequence: Synthetic oligonucleotide
  Sense strand starting at position 3067 of SEQ ID NO: 1879451
ucaucauaugauggaacuu

SEQ ID NO: 1908165 - RNA, 19 nt, Artificial Sequence
  Description of Artificial Sequence: Synthetic oligonucleotide
  Antisense strand to SEQ ID NO: 1908164
aaguuccaucauaugauga

SEQ ID NO: 1908166 - RNA, 19 nt, Artificial Sequence
  Description of Artificial Sequence: Synthetic oligonucleotide
  Sense strand starting at position 3113 of SEQ ID NO: 1879451
ugcuucuuccugcugaguu

SEQ ID NO: 1908167 - RNA, 19 nt, Artificial Sequence
  Description of Artificial Sequence: Synthetic oligonucleotide
  Antisense strand to SEQ ID NO: 1908166
aacucagcaggaagaagca

SEQ ID NO: 1908168 - RNA, 19 nt, Artificial Sequence
  Description of Artificial Sequence: Synthetic oligonucleotide
  Sense strand starting at position 3288 of SEQ ID NO: 1879451
ucauguuucugauuugcca

SEQ ID NO: 1908169 - RNA, 19 nt, Artificial Sequence
  Description of Artificial Sequence: Synthetic oligonucleotide
  Antisense strand to SEQ ID NO: 1908168
uggcaaaucagaaacauga

SEQ ID NO: 1908170 - RNA, 19 nt, Artificial Sequence
  Description of Artificial Sequence: Synthetic oligonucleotide
  Sense strand starting at position 3292 of SEQ ID NO: 1879451
guuucugauuugccaaugu

SEQ ID NO: 1908171 - RNA, 19 nt, Artificial Sequence
  Description of Artificial Sequence: Synthetic oligonucleotide
  Antisense strand to SEQ ID NO: 1908170
acauuggcaaaucagaaac

SEQ ID NO: 1908172 - RNA, 19 nt, Artificial Sequence
  Description of Artificial Sequence: Synthetic oligonucleotide
  Sense strand starting at position 3418 of SEQ ID NO: 1879451
ugacacucuuccuuaugga

SEQ ID NO: 1908173 - RNA, 19 nt, Artificial Sequence
  Description of Artificial Sequence: Synthetic oligonucleotide
  Antisense strand to SEQ ID NO: 1908172
uccauaaggaagaguguca

SEQ ID NO: 1908174 - RNA, 19 nt, Artificial Sequence
  Description of Artificial Sequence: Synthetic oligonucleotide
  Sense strand starting at position 3459 of SEQ ID NO: 1879451
gcaggaugugguuagaguu

SEQ ID NO: 1908175 - RNA, 19 nt, Artificial Sequence
  Description of Artificial Sequence: Synthetic oligonucleotide
  Antisense strand to SEQ ID NO: 1908174
aacucuaaccacauccugc

SEQ ID NO: 1908176 - RNA, 19 nt, Artificial Sequence
  Description of Artificial Sequence: Synthetic oligonucleotide
  Sense strand starting at position 3466 of SEQ ID NO: 1879451
gugguuagaguuuggauua

SEQ ID NO: 1908177 - RNA, 19 nt, Artificial Sequence
  Description of Artificial Sequence: Synthetic oligonucleotide
  Antisense strand to SEQ ID NO: 1908176
uaauccaaacucuaaccac

SEQ ID NO: 1908178 - RNA, 19 nt, Artificial Sequence
  Description of Artificial Sequence: Synthetic oligonucleotide
  Sense strand starting at position 3496 of SEQ ID NO: 1879451
uugggagugguguaucuac

SEQ ID NO: 1908179 - RNA, 19 nt, Artificial Sequence
  Description of Artificial Sequence: Synthetic oligonucleotide
  Antisense strand to SEQ ID NO: 1908178
guagauacaccacucccaa

SEQ ID NO: 1908180 - RNA, 19 nt, Artificial Sequence
  Description of Artificial Sequence: Synthetic oligonucleotide
  Sense strand starting at position 3645 of SEQ ID NO: 1879451
ucaucugcagccugauaga

SEQ ID NO: 1908181 - RNA, 19 nt, Artificial Sequence
  Description of Artificial Sequence: Synthetic oligonucleotide
  Antisense strand to SEQ ID NO: 1908180
ucuaucaggcugcagauga

SEQ ID NO: 1908182 - RNA, 19 nt, Artificial Sequence
  Description of Artificial Sequence: Synthetic oligonucleotide
  Sense strand starting at position 3741 of SEQ ID NO: 1879451
agucaaauucuccaauguu

SEQ ID NO: 1908183 - RNA, 19 nt, Artificial Sequence
  Description of Artificial Sequence: Synthetic oligonucleotide
  Antisense strand to SEQ ID NO: 1908182
aacauuggagaauuugacu

SEQ ID NO: 1908184 - RNA, 19 nt, Artificial Sequence
  Description of Artificial Sequence: Synthetic oligonucleotide
  Sense strand starting at position 3801 of SEQ ID NO: 1879451
cucagcaaugcuuaguaga

SEQ ID NO: 1908185 - RNA, 19 nt, Artificial Sequence
  Description of Artificial Sequence: Synthetic oligonucleotide
  Antisense strand to SEQ ID NO: 1908184
ucuacuaagcauugcugag

SEQ ID NO: 1908186 - RNA, 19 nt, Artificial Sequence
  Description of Artificial Sequence: Synthetic oligonucleotide
  Sense strand starting at position 3806 of SEQ ID NO: 1879451
caaugcuuaguagaguaua

SEQ ID NO: 1908187 - RNA, 19 nt, Artificial Sequence
  Description of Artificial Sequence: Synthetic oligonucleotide
  Antisense strand to SEQ ID NO: 1908186
uauacucuacuaagcauug

SEQ ID NO: 1908188 - RNA, 19 nt, Artificial Sequence
  Description of Artificial Sequence: Synthetic oligonucleotide
  Sense strand starting at position 3892 of SEQ ID NO: 1879451
gaaguauuggguuggugua

SEQ ID NO: 1908189 - RNA, 19 nt, Artificial Sequence
  Description of Artificial Sequence: Synthetic oligonucleotide
  Antisense strand to SEQ ID NO: 1908188
uacaccaacccaauacuuc

SEQ ID NO: 1908190 - RNA, 19 nt, Artificial Sequence
  Description of Artificial Sequence: Synthetic oligonucleotide
  Sense strand starting at position 3893 of SEQ ID NO: 1879451
aaguauuggguugguguaa

SEQ ID NO: 1908191 - RNA, 19 nt, Artificial Sequence
  Description of Artificial Sequence: Synthetic oligonucleotide
  Antisense strand to SEQ ID NO: 1908190
uuacaccaacccaauacuu

SEQ ID NO: 1908192 - RNA, 19 nt, Artificial Sequence
  Description of Artificial Sequence: Synthetic oligonucleotide
  Sense strand starting at position 3894 of SEQ ID NO: 1879451
aguauuggguugguguaaa

SEQ ID NO: 1908193 - RNA, 19 nt, Artificial Sequence
  Description of Artificial Sequence: Synthetic oligonucleotide
  Antisense strand to SEQ ID NO: 1908192
uuuacaccaacccaauacu

SEQ ID NO: 1908194 - RNA, 19 nt, Artificial Sequence
  Description of Artificial Sequence: Synthetic oligonucleotide
  Sense strand starting at position 276 of SEQ ID NO: 1879452
ugugguaucccaugauaua

SEQ ID NO: 1908195 - RNA, 19 nt, Artificial Sequence
  Description of Artificial Sequence: Synthetic oligonucleotide
  Antisense strand to SEQ ID NO: 1908194
uauaucaugggauaccaca

SEQ ID NO: 1908196 - RNA, 19 nt, Artificial Sequence
  Description of Artificial Sequence: Synthetic oligonucleotide
  Sense strand starting at position 277 of SEQ ID NO: 1879452
gugguaucccaugauauag

SEQ ID NO: 1908197 - RNA, 19 nt, Artificial Sequence
  Description of Artificial Sequence: Synthetic oligonucleotide
  Antisense strand to SEQ ID NO: 1908196
cuauaucaugggauaccac

SEQ ID NO: 1908198 - RNA, 19 nt, Artificial Sequence
  Description of Artificial Sequence: Synthetic oligonucleotide
  Sense strand starting at position 292 of SEQ ID NO: 1879452
auagauguacuguaguuua

SEQ ID NO: 1908199 - RNA, 19 nt, Artificial Sequence
  Description of Artificial Sequence: Synthetic oligonucleotide
  Antisense strand to SEQ ID NO: 1908198
uaaacuacaguacaucuau

SEQ ID NO: 1908200 - RNA, 19 nt, Artificial Sequence
  Description of Artificial Sequence: Synthetic oligonucleotide
  Sense strand starting at position 372 of SEQ ID NO: 1879452
guaaauguccuuuauaucg

SEQ ID NO: 1908201 - RNA, 19 nt, Artificial Sequence
  Description of Artificial Sequence: Synthetic oligonucleotide
  Antisense strand to SEQ ID NO: 1908200
cgauauaaaggacauuuac

SEQ ID NO: 1908202 - RNA, 19 nt, Artificial Sequence
  Description of Artificial Sequence: Synthetic oligonucleotide
  Sense strand starting at position 392 of SEQ ID NO: 1879452
ucuugauauccugguuaag

SEQ ID NO: 1908203 - RNA, 19 nt, Artificial Sequence
  Description of Artificial Sequence: Synthetic oligonucleotide
  Antisense strand to SEQ ID NO: 1908202
cuuaaccaggauaucaaga

SEQ ID NO: 1908204 - RNA, 19 nt, Artificial Sequence
  Description of Artificial Sequence: Synthetic oligonucleotide
  Sense strand starting at position 394 of SEQ ID NO: 1879452
uugauauccugguuaagua

SEQ ID NO: 1908205 - RNA, 19 nt, Artificial Sequence
  Description of Artificial Sequence: Synthetic oligonucleotide
  Antisense strand to SEQ ID NO: 1908204
uacuuaaccaggauaucaa

SEQ ID NO: 1908206 - RNA, 19 nt, Artificial Sequence
  Description of Artificial Sequence: Synthetic oligonucleotide
  Sense strand starting at position 395 of SEQ ID NO: 1879452
ugauauccugguuaaguaa

SEQ ID NO: 1908207 - RNA, 19 nt, Artificial Sequence
  Description of Artificial Sequence: Synthetic oligonucleotide
  Antisense strand to SEQ ID NO: 1908206
uuacuuaaccaggauauca

SEQ ID NO: 1908208 - RNA, 19 nt, Artificial Sequence
  Description of Artificial Sequence: Synthetic oligonucleotide
  Sense strand starting at position 476 of SEQ ID NO: 1879452
gugggaacuuggccugaca

SEQ ID NO: 1908209 - RNA, 19 nt, Artificial Sequence
  Description of Artificial Sequence: Synthetic oligonucleotide
  Antisense strand to SEQ ID NO: 1908208
ugucaggccaaguucccac

SEQ ID NO: 1908210 - RNA, 19 nt, Artificial Sequence
  Description of Artificial Sequence: Synthetic oligonucleotide
  Sense strand starting at position 479 of SEQ ID NO: 1879452
ggaacuuggccugacaagu

SEQ ID NO: 1908211 - RNA, 19 nt, Artificial Sequence
  Description of Artificial Sequence: Synthetic oligonucleotide
  Antisense strand to SEQ ID NO: 1908210
acuugucaggccaaguucc

SEQ ID NO: 1908212 - RNA, 19 nt, Artificial Sequence
  Description of Artificial Sequence: Synthetic oligonucleotide
  Sense strand starting at position 567 of SEQ ID NO: 1879452
aggguggugcauugggaaa

SEQ ID NO: 1908213 - RNA, 19 nt, Artificial Sequence
  Description of Artificial Sequence: Synthetic oligonucleotide
  Antisense strand to SEQ ID NO: 1908212
uuucccaaugcaccacccu

SEQ ID NO: 1908214 - RNA, 19 nt, Artificial Sequence
  Description of Artificial Sequence: Synthetic oligonucleotide
  Sense strand starting at position 710 of SEQ ID NO: 1879452
uggguuaugaagcagguaa

SEQ ID NO: 1908215 - RNA, 19 nt, Artificial Sequence
  Description of Artificial Sequence: Synthetic oligonucleotide
  Antisense strand to SEQ ID NO: 1908214
uuaccugcuucauaaccca

SEQ ID NO: 1908216 - RNA, 19 nt, Artificial Sequence
  Description of Artificial Sequence: Synthetic oligonucleotide
  Sense strand starting at position 825 of SEQ ID NO: 1879452
ugagaauaccucugauguu

SEQ ID NO: 1908217 - RNA, 19 nt, Artificial Sequence
  Description of Artificial Sequence: Synthetic oligonucleotide
  Antisense strand to SEQ ID NO: 1908216
aacaucagagguauucuca

SEQ ID NO: 1908218 - RNA, 19 nt, Artificial Sequence
  Description of Artificial Sequence: Synthetic oligonucleotide
  Sense strand starting at position 837 of SEQ ID NO: 1879452
ugauguugugguuacaauc

SEQ ID NO: 1908219 - RNA, 19 nt, Artificial Sequence
  Description of Artificial Sequence: Synthetic oligonucleotide
  Antisense strand to SEQ ID NO: 1908218
gauuguaaccacaacauca

SEQ ID NO: 1908220 - RNA, 19 nt, Artificial Sequence
  Description of Artificial Sequence: Synthetic oligonucleotide
  Sense strand starting at position 863 of SEQ ID NO: 1879452
gagcuucugugcucaauuu

SEQ ID NO: 1908221 - RNA, 19 nt, Artificial Sequence
  Description of Artificial Sequence: Synthetic oligonucleotide
  Antisense strand to SEQ ID NO: 1908220
aaauugagcacagaagcuc

SEQ ID NO: 1908222 - RNA, 19 nt, Artificial Sequence
  Description of Artificial Sequence: Synthetic oligonucleotide
  Sense strand starting at position 864 of SEQ ID NO: 1879452
agcuucugugcucaauuua

SEQ ID NO: 1908223 - RNA, 19 nt, Artificial Sequence
  Description of Artificial Sequence: Synthetic oligonucleotide
  Antisense strand to SEQ ID NO: 1908222
uaaauugagcacagaagcu

SEQ ID NO: 1908224 - RNA, 19 nt, Artificial Sequence
  Description of Artificial Sequence: Synthetic oligonucleotide
  Sense strand starting at position 879 of SEQ ID NO: 1879452
uuuauacuucccuggagag

SEQ ID NO: 1908225 - RNA, 19 nt, Artificial Sequence
  Description of Artificial Sequence: Synthetic oligonucleotide
  Antisense strand to SEQ ID NO: 1908224
cucuccagggaaguauaaa

SEQ ID NO: 1908226 - RNA, 19 nt, Artificial Sequence
  Description of Artificial Sequence: Synthetic oligonucleotide
  Sense strand starting at position 907 of SEQ ID NO: 1879452
cucaguaaugcugaauuau

SEQ ID NO: 1908227 - RNA, 19 nt, Artificial Sequence
  Description of Artificial Sequence: Synthetic oligonucleotide
  Antisense strand to SEQ ID NO: 1908226
auaauucagcauuacugag

SEQ ID NO: 1908228 - RNA, 19 nt, Artificial Sequence
  Description of Artificial Sequence: Synthetic oligonucleotide
  Sense strand starting at position 1005 of SEQ ID NO: 1879452
ucaaucaaaugauaggaaa

SEQ ID NO: 1908229 - RNA, 19 nt, Artificial Sequence
  Description of Artificial Sequence: Synthetic oligonucleotide
  Antisense strand to SEQ ID NO: 1908228
uuuccuaucauuugauuga

SEQ ID NO: 1908230 - RNA, 19 nt, Artificial Sequence
  Description of Artificial Sequence: Synthetic oligonucleotide
  Sense strand starting at position 1020 of SEQ ID NO: 1879452
gaaagcaaucugcauagua

SEQ ID NO: 1908231 - RNA, 19 nt, Artificial Sequence
  Description of Artificial Sequence: Synthetic oligonucleotide
  Antisense strand to SEQ ID NO: 1908230
uacuaugcagauugcuuuc

SEQ ID NO: 1908232 - RNA, 19 nt, Artificial Sequence
  Description of Artificial Sequence: Synthetic oligonucleotide
  Sense strand starting at position 1130 of SEQ ID NO: 1879452
ucuaaaucacagggagguu

SEQ ID NO: 1908233 - RNA, 19 nt, Artificial Sequence
  Description of Artificial Sequence: Synthetic oligonucleotide
  Antisense strand to SEQ ID NO: 1908232
aaccucccugugauuuaga

SEQ ID NO: 1908234 - RNA, 19 nt, Artificial Sequence
  Description of Artificial Sequence: Synthetic oligonucleotide
  Sense strand starting at position 1186 of SEQ ID NO: 1879452
uauaguggucacugggaca

SEQ ID NO: 1908235 - RNA, 19 nt, Artificial Sequence
  Description of Artificial Sequence: Synthetic oligonucleotide
  Antisense strand to SEQ ID NO: 1908234
ugucccagugaccacuaua

SEQ ID NO: 1908236 - RNA, 19 nt, Artificial Sequence
  Description of Artificial Sequence: Synthetic oligonucleotide
  Sense strand starting at position 1290 of SEQ ID NO: 1879452
ugggacugguuguuaagga

SEQ ID NO: 1908237 - RNA, 19 nt, Artificial Sequence
  Description of Artificial Sequence: Synthetic oligonucleotide
  Antisense strand to SEQ ID NO: 1908236
uccuuaacaaccaguccca

SEQ ID NO: 1908238 - RNA, 19 nt, Artificial Sequence
  Description of Artificial Sequence: Synthetic oligonucleotide
  Sense strand starting at position 1306 of SEQ ID NO: 1879452
ggacuuuaugaagguacca

SEQ ID NO: 1908239 - RNA, 19 nt, Artificial Sequence
  Description of Artificial Sequence: Synthetic oligonucleotide
  Antisense strand to SEQ ID NO: 1908238
ugguaccuucauaaagucc

SEQ ID NO: 1908240 - RNA, 19 nt, Artificial Sequence
  Description of Artificial Sequence: Synthetic oligonucleotide
  Sense strand starting at position 1381 of SEQ ID NO: 1879452
auauaauagccagaguucu

SEQ ID NO: 1908241 - RNA, 19 nt, Artificial Sequence
  Description of Artificial Sequence: Synthetic oligonucleotide
  Antisense strand to SEQ ID NO: 1908240
agaacucuggcuauuauau

SEQ ID NO: 1908242 - RNA, 19 nt, Artificial Sequence
  Description of Artificial Sequence: Synthetic oligonucleotide
  Sense strand starting at position 1449 of SEQ ID NO: 1879452
gugcuaaugggucacacuu

SEQ ID NO: 1908243 - RNA, 19 nt, Artificial Sequence
  Description of Artificial Sequence: Synthetic oligonucleotide
  Antisense strand to SEQ ID NO: 1908242
aagugugacccauuagcac

SEQ ID NO: 1908244 - RNA, 19 nt, Artificial Sequence
  Description of Artificial Sequence: Synthetic oligonucleotide
  Sense strand starting at position 1478 of SEQ ID NO: 1879452
agaguuguucgggaaggga

SEQ ID NO: 1908245 - RNA, 19 nt, Artificial Sequence
  Description of Artificial Sequence: Synthetic oligonucleotide
  Antisense strand to SEQ ID NO: 1908244
ucccuucccgaacaacucu

SEQ ID NO: 1908246 - RNA, 19 nt, Artificial Sequence
  Description of Artificial Sequence: Synthetic oligonucleotide
  Sense strand starting at position 1522 of SEQ ID NO: 1879452
gagagugucuacccacaga

SEQ ID NO: 1908247 - RNA, 19 nt, Artificial Sequence
  Description of Artificial Sequence: Synthetic oligonucleotide
  Antisense strand to SEQ ID NO: 1908246
ucuguggguagacacucuc

SEQ ID NO: 1908248 - RNA, 19 nt, Artificial Sequence
  Description of Artificial Sequence: Synthetic oligonucleotide
  Sense strand starting at position 1693 of SEQ ID NO: 1879452
ugaaauagauccgcacuca

SEQ ID NO: 1908249 - RNA, 19 nt, Artificial Sequence
  Description of Artificial Sequence: Synthetic oligonucleotide
  Antisense strand to SEQ ID NO: 1908248
ugagugcggaucuauuuca

SEQ ID NO: 1908250 - RNA, 19 nt, Artificial Sequence
  Description of Artificial Sequence: Synthetic oligonucleotide
  Sense strand starting at position 1794 of SEQ ID NO: 1879452
ccaaguuguucccuaggag

SEQ ID NO: 1908251 - RNA, 19 nt, Artificial Sequence
  Description of Artificial Sequence: Synthetic oligonucleotide
  Antisense strand to SEQ ID NO: 1908250
cuccuagggaacaacuugg

SEQ ID NO: 1908252 - RNA, 19 nt, Artificial Sequence
  Description of Artificial Sequence: Synthetic oligonucleotide
  Sense strand starting at position 1945 of SEQ ID NO: 1879452
cuguuuacucuugacaagu

SEQ ID NO: 1908253 - RNA, 19 nt, Artificial Sequence
  Description of Artificial Sequence: Synthetic oligonucleotide
  Antisense strand to SEQ ID NO: 1908252
acuugucaagaguaaacag

SEQ ID NO: 1908254 - RNA, 19 nt, Artificial Sequence
  Description of Artificial Sequence: Synthetic oligonucleotide
  Sense strand starting at position 1980 of SEQ ID NO: 1879452
gguuucagagaauggcuuu

SEQ ID NO: 1908255 - RNA, 19 nt, Artificial Sequence
  Description of Artificial Sequence: Synthetic oligonucleotide
  Antisense strand to SEQ ID NO: 1908254
aaagccauucucugaaacc

SEQ ID NO: 1908256 - RNA, 19 nt, Artificial Sequence
  Description of Artificial Sequence: Synthetic oligonucleotide
  Sense strand starting at position 2046 of SEQ ID NO: 1879452
cugauugguccuuaugcag

SEQ ID NO: 1908257 - RNA, 19 nt, Artificial Sequence
  Description of Artificial Sequence: Synthetic oligonucleotide
  Antisense strand to SEQ ID NO: 1908256
cugcauaaggaccaaucag

SEQ ID NO: 1908258 - RNA, 19 nt, Artificial Sequence
  Description of Artificial Sequence: Synthetic oligonucleotide
  Sense strand starting at position 2139 of SEQ ID NO: 1879452
cagggauuccagugaacua

SEQ ID NO: 1908259 - RNA, 19 nt, Artificial Sequence
  Description of Artificial Sequence: Synthetic oligonucleotide
  Antisense strand to SEQ ID NO: 1908258
uaguucacuggaaucccug

SEQ ID NO: 1908260 - RNA, 19 nt, Artificial Sequence
  Description of Artificial Sequence: Synthetic oligonucleotide
  Sense strand starting at position 2195 of SEQ ID NO: 1879452
ugcgcuuuagugcuggauu

SEQ ID NO: 1908261 - RNA, 19 nt, Artificial Sequence
  Description of Artificial Sequence: Synthetic oligonucleotide
  Antisense strand to SEQ ID NO: 1908260
aauccagcacuaaagcgca

SEQ ID NO: 1908262 - RNA, 19 nt, Artificial Sequence
  Description of Artificial Sequence: Synthetic oligonucleotide
  Sense strand starting at position 2346 of SEQ ID NO: 1879452
caaauuuggugacauaaag

SEQ ID NO: 1908263 - RNA, 19 nt, Artificial Sequence
  Description of Artificial Sequence: Synthetic oligonucleotide
  Antisense strand to SEQ ID NO: 1908262
cuuuaugucaccaaauuug

SEQ ID NO: 1908264 - RNA, 19 nt, Artificial Sequence
  Description of Artificial Sequence: Synthetic oligonucleotide
  Sense strand starting at position 2404 of SEQ ID NO: 1879452
gucugaaaucagcaccacu

SEQ ID NO: 1908265 - RNA, 19 nt, Artificial Sequence
  Description of Artificial Sequence: Synthetic oligonucleotide
  Antisense strand to SEQ ID NO: 1908264
aguggugcugauuucagac

SEQ ID NO: 1908266 - RNA, 19 nt, Artificial Sequence
  Description of Artificial Sequence: Synthetic oligonucleotide
  Sense strand starting at position 2535 of SEQ ID NO: 1879452
gcugcauugcucccaucuu

SEQ ID NO: 1908267 - RNA, 19 nt, Artificial Sequence
  Description of Artificial Sequence: Synthetic oligonucleotide
  Antisense strand to SEQ ID NO: 1908266
aagaugggagcaaugcagc

SEQ ID NO: 1908268 - RNA, 19 nt, Artificial Sequence
  Description of Artificial Sequence: Synthetic oligonucleotide
  Sense strand starting at position 3252 of SEQ ID NO: 1879452
gaaagauuagccuguguga

SEQ ID NO: 1908269 - RNA, 19 nt, Artificial Sequence
  Description of Artificial Sequence: Synthetic oligonucleotide
  Antisense strand to SEQ ID NO: 1908268
ucacacaggcuaaucuuuc

SEQ ID NO: 1908270 - RNA, 19 nt, Artificial Sequence
  Description of Artificial Sequence: Synthetic oligonucleotide
  Sense strand starting at position 3268 of SEQ ID NO: 1879452
ugaacucauugguccagua

SEQ ID NO: 1908271 - RNA, 19 nt, Artificial Sequence
  Description of Artificial Sequence: Synthetic oligonucleotide
  Antisense strand to SEQ ID NO: 1908270
uacuggaccaaugaguuca

SEQ ID NO: 1908272 - RNA, 19 nt, Artificial Sequence
  Description of Artificial Sequence: Synthetic oligonucleotide
  Sense strand starting at position 3953 of SEQ ID NO: 1879452
cauaauggucaugggcaua

SEQ ID NO: 1908273 - RNA, 19 nt, Artificial Sequence
  Description of Artificial Sequence: Synthetic oligonucleotide
  Antisense strand to SEQ ID NO: 1908272
uaugcccaugaccauuaug

SEQ ID NO: 1908274 - RNA, 19 nt, Artificial Sequence
  Description of Artificial Sequence: Synthetic oligonucleotide
  Sense strand starting at position 37 of SEQ ID NO: 1879453
aucuguuucccuuagguca

SEQ ID NO: 1908275 - RNA, 19 nt, Artificial Sequence
  Description of Artificial Sequence: Synthetic oligonucleotide
  Antisense strand to SEQ ID NO: 1908274
ugaccuaagggaaacagau

SEQ ID NO: 1908276 - RNA, 19 nt, Artificial Sequence
  Description of Artificial Sequence: Synthetic oligonucleotide
  Sense strand starting at position 127 of SEQ ID NO: 1879453
caguguuuccaggaaaugc

SEQ ID NO: 1908277 - RNA, 19 nt, Artificial Sequence
  Description of Artificial Sequence: Synthetic oligonucleotide
  Antisense strand to SEQ ID NO: 1908276
gcauuuccuggaaacacug

SEQ ID NO: 1908278 - RNA, 19 nt, Artificial Sequence
  Description of Artificial Sequence: Synthetic oligonucleotide
  Sense strand starting at position 256 of SEQ ID NO: 1879453
aguggugcccuggacauau

SEQ ID NO: 1908279 - RNA, 19 nt, Artificial Sequence
  Description of Artificial Sequence: Synthetic oligonucleotide
  Antisense strand to SEQ ID NO: 1908278
auauguccagggcaccacu

SEQ ID NO: 1908280 - RNA, 19 nt, Artificial Sequence
  Description of Artificial Sequence: Synthetic oligonucleotide
  Sense strand starting at position 371 of SEQ ID NO: 1879453
gcacucucuccagggagau

SEQ ID NO: 1908281 - RNA, 19 nt, Artificial Sequence
  Description of Artificial Sequence: Synthetic oligonucleotide
  Antisense strand to SEQ ID NO: 1908280
aucucccuggagagagugc

SEQ ID NO: 1908282 - RNA, 19 nt, Artificial Sequence
  Description of Artificial Sequence: Synthetic oligonucleotide
  Sense strand starting at position 372 of SEQ ID NO: 1879453
cacucucuccagggagaua

SEQ ID NO: 1908283 - RNA, 19 nt, Artificial Sequence
  Description of Artificial Sequence: Synthetic oligonucleotide
  Antisense strand to SEQ ID NO: 1908282
uaucucccuggagagagug

SEQ ID NO: 1908284 - RNA, 19 nt, Artificial Sequence
  Description of Artificial Sequence: Synthetic oligonucleotide
  Sense strand starting at position 479 of SEQ ID NO: 1879453
ugguuaaauuaacuuagga

SEQ ID NO: 1908285 - RNA, 19 nt, Artificial Sequence
  Description of Artificial Sequence: Synthetic oligonucleotide
  Antisense strand to SEQ ID NO: 1908284
uccuaaguuaauuuaacca

SEQ ID NO: 1908286 - RNA, 19 nt, Artificial Sequence
  Description of Artificial Sequence: Synthetic oligonucleotide
  Sense strand starting at position 504 of SEQ ID NO: 1879453
gaggaacccuccuuaaagu

SEQ ID NO: 1908287 - RNA, 19 nt, Artificial Sequence
  Description of Artificial Sequence: Synthetic oligonucleotide
  Antisense strand to SEQ ID NO: 1908286
acuuuaaggaggguuccuc

SEQ ID NO: 1908288 - RNA, 19 nt, Artificial Sequence
  Description of Artificial Sequence: Synthetic oligonucleotide
  Sense strand starting at position 578 of SEQ ID NO: 1879453
uuugaacuuccuuggaauu

SEQ ID NO: 1908289 - RNA, 19 nt, Artificial Sequence
  Description of Artificial Sequence: Synthetic oligonucleotide
  Antisense strand to SEQ ID NO: 1908288
aauuccaaggaaguucaaa

SEQ ID NO: 1908290 - RNA, 19 nt, Artificial Sequence
  Description of Artificial Sequence: Synthetic oligonucleotide
  Sense strand starting at position 1193 of SEQ ID NO: 1879453
uuugaaugccagugauacc

SEQ ID NO: 1908291 - RNA, 19 nt, Artificial Sequence
  Description of Artificial Sequence: Synthetic oligonucleotide
  Antisense strand to SEQ ID NO: 1908290
gguaucacuggcauucaaa

SEQ ID NO: 1908292 - RNA, 19 nt, Artificial Sequence
  Description of Artificial Sequence: Synthetic oligonucleotide
  Sense strand starting at position 1335 of SEQ ID NO: 1879453
ucuguugagcuccaaacuu

SEQ ID NO: 1908293 - RNA, 19 nt, Artificial Sequence
  Description of Artificial Sequence: Synthetic oligonucleotide
  Antisense strand to SEQ ID NO: 1908292
aaguuuggagcucaacaga

SEQ ID NO: 1908294 - RNA, 19 nt, Artificial Sequence
  Description of Artificial Sequence: Synthetic oligonucleotide
  Sense strand starting at position 1525 of SEQ ID NO: 1879453
acccuuaagcuugaugaac

SEQ ID NO: 1908295 - RNA, 19 nt, Artificial Sequence
  Description of Artificial Sequence: Synthetic oligonucleotide
  Antisense strand to SEQ ID NO: 1908294
guucaucaagcuuaagggu

SEQ ID NO: 1908296 - RNA, 19 nt, Artificial Sequence
  Description of Artificial Sequence: Synthetic oligonucleotide
  Sense strand starting at position 1584 of SEQ ID NO: 1879453
uuauacuuauggucaugau

SEQ ID NO: 1908297 - RNA, 19 nt, Artificial Sequence
  Description of Artificial Sequence: Synthetic oligonucleotide
  Antisense strand to SEQ ID NO: 1908296
aucaugaccauaaguauaa

SEQ ID NO: 1908298 - RNA, 19 nt, Artificial Sequence
  Description of Artificial Sequence: Synthetic oligonucleotide
  Sense strand starting at position 1706 of SEQ ID NO: 1879453
gagucacagcaauauguga

SEQ ID NO: 1908299 - RNA, 19 nt, Artificial Sequence
  Description of Artificial Sequence: Synthetic oligonucleotide
  Antisense strand to SEQ ID NO: 1908298
ucacauauugcugugacuc

SEQ ID NO: 1908300 - RNA, 19 nt, Artificial Sequence
  Description of Artificial Sequence: Synthetic oligonucleotide
  Sense strand starting at position 1760 of SEQ ID NO: 1879453
aagacuuggugcucaggau

SEQ ID NO: 1908301 - RNA, 19 nt, Artificial Sequence
  Description of Artificial Sequence: Synthetic oligonucleotide
  Antisense strand to SEQ ID NO: 1908300
auccugagcaccaagucuu

SEQ ID NO: 1908302 - RNA, 19 nt, Artificial Sequence
  Description of Artificial Sequence: Synthetic oligonucleotide
  Sense strand starting at position 1761 of SEQ ID NO: 1879453
agacuuggugcucaggauu

SEQ ID NO: 1908303 - RNA, 19 nt, Artificial Sequence
  Description of Artificial Sequence: Synthetic oligonucleotide
  Antisense strand to SEQ ID NO: 1908302
aauccugagcaccaagucu

SEQ ID NO: 1908304 - RNA, 19 nt, Artificial Sequence
  Description of Artificial Sequence: Synthetic oligonucleotide
  Sense strand starting at position 1900 of SEQ ID NO: 1879453
ggauaaacuuaccuaguca

SEQ ID NO: 1908305 - RNA, 19 nt, Artificial Sequence
  Description of Artificial Sequence: Synthetic oligonucleotide
  Antisense strand to SEQ ID NO: 1908304
ugacuagguaaguuuaucc

SEQ ID NO: 1908306 - RNA, 19 nt, Artificial Sequence
  Description of Artificial Sequence: Synthetic oligonucleotide
  Sense strand starting at position 1958 of SEQ ID NO: 1879453
ucacucuuagcaggcagaa

SEQ ID NO: 1908307 - RNA, 19 nt, Artificial Sequence
  Description of Artificial Sequence: Synthetic oligonucleotide
  Antisense strand to SEQ ID NO: 1908306
uucugccugcuaagaguga

SEQ ID NO: 1908308 - RNA, 19 nt, Artificial Sequence
  Description of Artificial Sequence: Synthetic oligonucleotide
  Sense strand starting at position 1976 of SEQ ID NO: 1879453
auguguaagacucagaggu

SEQ ID NO: 1908309 - RNA, 19 nt, Artificial Sequence
  Description of Artificial Sequence: Synthetic oligonucleotide
  Antisense strand to SEQ ID NO: 1908308
accucugagucuuacacau

SEQ ID NO: 1908310 - RNA, 19 nt, Artificial Sequence
  Description of Artificial Sequence: Synthetic oligonucleotide
  Sense strand starting at position 1980 of SEQ ID NO: 1879453
guaagacucagaggucauu

SEQ ID NO: 1908311 - RNA, 19 nt, Artificial Sequence
  Description of Artificial Sequence: Synthetic oligonucleotide
  Antisense strand to SEQ ID NO: 1908310
aaugaccucugagucuuac

SEQ ID NO: 1908312 - RNA, 19 nt, Artificial Sequence
  Description of Artificial Sequence: Synthetic oligonucleotide
  Sense strand starting at position 2016 of SEQ ID NO: 1879453
gaccuuugcuggguuaaca

SEQ ID NO: 1908313 - RNA, 19 nt, Artificial Sequence
  Description of Artificial Sequence: Synthetic oligonucleotide
  Antisense strand to SEQ ID NO: 1908312
uguuaacccagcaaagguc

SEQ ID NO: 1908314 - RNA, 19 nt, Artificial Sequence
  Description of Artificial Sequence: Synthetic oligonucleotide
  Sense strand starting at position 2047 of SEQ ID NO: 1879453
aggucugcugacuagacua

SEQ ID NO: 1908315 - RNA, 19 nt, Artificial Sequence
  Description of Artificial Sequence: Synthetic oligonucleotide
  Antisense strand to SEQ ID NO: 1908314
uagucuagucagcagaccu

SEQ ID NO: 1908316 - RNA, 19 nt, Artificial Sequence
  Description of Artificial Sequence: Synthetic oligonucleotide
  Sense strand starting at position 2049 of SEQ ID NO: 1879453
gucugcugacuagacuauu

SEQ ID NO: 1908317 - RNA, 19 nt, Artificial Sequence
  Description of Artificial Sequence: Synthetic oligonucleotide
  Antisense strand to SEQ ID NO: 1908316
aauagucuagucagcagac

SEQ ID NO: 1908318 - RNA, 19 nt, Artificial Sequence
  Description of Artificial Sequence: Synthetic oligonucleotide
  Sense strand starting at position 2116 of SEQ ID NO: 1879453
cgcuaucugagccagagau

SEQ ID NO: 1908319 - RNA, 19 nt, Artificial Sequence
  Description of Artificial Sequence: Synthetic oligonucleotide
  Antisense strand to SEQ ID NO: 1908318
aucucuggcucagauagcg

SEQ ID NO: 1908320 - RNA, 19 nt, Artificial Sequence
  Description of Artificial Sequence: Synthetic oligonucleotide
  Sense strand starting at position 2120 of SEQ ID NO: 1879453
aucugagccagagauuguu

SEQ ID NO: 1908321 - RNA, 19 nt, Artificial Sequence
  Description of Artificial Sequence: Synthetic oligonucleotide
  Antisense strand to SEQ ID NO: 1908320
aacaaucucuggcucagau

SEQ ID NO: 1908322 - RNA, 19 nt, Artificial Sequence
  Description of Artificial Sequence: Synthetic oligonucleotide
  Sense strand starting at position 2252 of SEQ ID NO: 1879453
agcaguucuccauauggaa

SEQ ID NO: 1908323 - RNA, 19 nt, Artificial Sequence
  Description of Artificial Sequence: Synthetic oligonucleotide
  Antisense strand to SEQ ID NO: 1908322
uuccauauggagaacugcu

SEQ ID NO: 1908324 - RNA, 19 nt, Artificial Sequence
  Description of Artificial Sequence: Synthetic oligonucleotide
  Sense strand starting at position 2299 of SEQ ID NO: 1879453
aggauaugcaguuaaagca

SEQ ID NO: 1908325 - RNA, 19 nt, Artificial Sequence
  Description of Artificial Sequence: Synthetic oligonucleotide
  Antisense strand to SEQ ID NO: 1908324
ugcuuuaacugcauauccu

SEQ ID NO: 1908326 - RNA, 19 nt, Artificial Sequence
  Description of Artificial Sequence: Synthetic oligonucleotide
  Sense strand starting at position 2374 of SEQ ID NO: 1879453
gggaacacucugggucaca

SEQ ID NO: 1908327 - RNA, 19 nt, Artificial Sequence
  Description of Artificial Sequence: Synthetic oligonucleotide
  Antisense strand to SEQ ID NO: 1908326
ugugacccagaguguuccc

SEQ ID NO: 1908328 - RNA, 19 nt, Artificial Sequence
  Description of Artificial Sequence: Synthetic oligonucleotide
  Sense strand starting at position 2554 of SEQ ID NO: 1879453
ucauaccucugaucuugua

SEQ ID NO: 1908329 - RNA, 19 nt, Artificial Sequence
  Description of Artificial Sequence: Synthetic oligonucleotide
  Antisense strand to SEQ ID NO: 1908328
uacaagaucagagguauga

SEQ ID NO: 1908330 - RNA, 19 nt, Artificial Sequence
  Description of Artificial Sequence: Synthetic oligonucleotide
  Sense strand starting at position 2744 of SEQ ID NO: 1879453
uuaguuucugagggcaaug

SEQ ID NO: 1908331 - RNA, 19 nt, Artificial Sequence
  Description of Artificial Sequence: Synthetic oligonucleotide
  Antisense strand to SEQ ID NO: 1908330
cauugcccucagaaacuaa

SEQ ID NO: 1908332 - RNA, 19 nt, Artificial Sequence
  Description of Artificial Sequence: Synthetic oligonucleotide
  Sense strand starting at position 2767 of SEQ ID NO: 1879453
agucaccuuccauguuaga

SEQ ID NO: 1908333 - RNA, 19 nt, Artificial Sequence
  Description of Artificial Sequence: Synthetic oligonucleotide
  Antisense strand to SEQ ID NO: 1908332
ucuaacauggaaggugacu

SEQ ID NO: 1908334 - RNA, 19 nt, Artificial Sequence
  Description of Artificial Sequence: Synthetic oligonucleotide
  Sense strand starting at position 2860 of SEQ ID NO: 1879453
caauucugagagcagaguu

SEQ ID NO: 1908335 - RNA, 19 nt, Artificial Sequence
  Description of Artificial Sequence: Synthetic oligonucleotide
  Antisense strand to SEQ ID NO: 1908334
aacucugcucucagaauug

SEQ ID NO: 1908336 - RNA, 19 nt, Artificial Sequence
  Description of Artificial Sequence: Synthetic oligonucleotide
  Sense strand starting at position 3047 of SEQ ID NO: 1879453
acacuuacuuaucuuggua

SEQ ID NO: 1908337 - RNA, 19 nt, Artificial Sequence
  Description of Artificial Sequence: Synthetic oligonucleotide
  Antisense strand to SEQ ID NO: 1908336
uaccaagauaaguaagugu

SEQ ID NO: 1908338 - RNA, 19 nt, Artificial Sequence
  Description of Artificial Sequence: Synthetic oligonucleotide
  Sense strand starting at position 3050 of SEQ ID NO: 1879453
cuuacuuaucuugguagau

SEQ ID NO: 1908339 - RNA, 19 nt, Artificial Sequence
  Description of Artificial Sequence: Synthetic oligonucleotide
  Antisense strand to SEQ ID NO: 1908338
aucuaccaagauaaguaag

SEQ ID NO: 1908340 - RNA, 19 nt, Artificial Sequence
  Description of Artificial Sequence: Synthetic oligonucleotide
  Sense strand starting at position 3051 of SEQ ID NO: 1879453
uuacuuaucuugguagaug

SEQ ID NO: 1908341 - RNA, 19 nt, Artificial Sequence
  Description of Artificial Sequence: Synthetic oligonucleotide
  Antisense strand to SEQ ID NO: 1908340
caucuaccaagauaaguaa

SEQ ID NO: 1908342 - RNA, 19 nt, Artificial Sequence
  Description of Artificial Sequence: Synthetic oligonucleotide
  Sense strand starting at position 3096 of SEQ ID NO: 1879453
gccuuucugggacauaaca

SEQ ID NO: 1908343 - RNA, 19 nt, Artificial Sequence
  Description of Artificial Sequence: Synthetic oligonucleotide
  Antisense strand to SEQ ID NO: 1908342
uguuaugucccagaaaggc

SEQ ID NO: 1908344 - RNA, 19 nt, Artificial Sequence
  Description of Artificial Sequence: Synthetic oligonucleotide
  Sense strand starting at position 3121 of SEQ ID NO: 1879453
ggauguuguguggaucauu

SEQ ID NO: 1908345 - RNA, 19 nt, Artificial Sequence
  Description of Artificial Sequence: Synthetic oligonucleotide
  Antisense strand to SEQ ID NO: 1908344
aaugauccacacaacaucc

SEQ ID NO: 1908346 - RNA, 19 nt, Artificial Sequence
  Description of Artificial Sequence: Synthetic oligonucleotide
  Sense strand starting at position 3270 of SEQ ID NO: 1879453
gcccacugccuauauagaa

SEQ ID NO: 1908347 - RNA, 19 nt, Artificial Sequence
  Description of Artificial Sequence: Synthetic oligonucleotide
  Antisense strand to SEQ ID NO: 1908346
uucuauauaggcagugggc

SEQ ID NO: 1908348 - RNA, 19 nt, Artificial Sequence
  Description of Artificial Sequence: Synthetic oligonucleotide
  Sense strand starting at position 3536 of SEQ ID NO: 1879453
gagccaugguagucagaaa

SEQ ID NO: 1908349 - RNA, 19 nt, Artificial Sequence
  Description of Artificial Sequence: Synthetic oligonucleotide
  Antisense strand to SEQ ID NO: 1908348
uuucugacuaccauggcuc

SEQ ID NO: 1908350 - RNA, 19 nt, Artificial Sequence
  Description of Artificial Sequence: Synthetic oligonucleotide
  Sense strand starting at position 3537 of SEQ ID NO: 1879453
agccaugguagucagaaau

SEQ ID NO: 1908351 - RNA, 19 nt, Artificial Sequence
  Description of Artificial Sequence: Synthetic oligonucleotide
  Antisense strand to SEQ ID NO: 1908350
auuucugacuaccauggcu

SEQ ID NO: 1908352 - RNA, 19 nt, Artificial Sequence
  Description of Artificial Sequence: Synthetic oligonucleotide
  Sense strand starting at position 3658 of SEQ ID NO: 1879453
agaauaauggcuuguaauu

SEQ ID NO: 1908353 - RNA, 19 nt, Artificial Sequence
  Description of Artificial Sequence: Synthetic oligonucleotide
  Antisense strand to SEQ ID NO: 1908352
aauuacaagccauuauucu

SEQ ID NO: 1908354 - RNA, 19 nt, Artificial Sequence
  Description of Artificial Sequence: Synthetic oligonucleotide
  Sense strand starting at position 182 of SEQ ID NO: 1879454
augagaaucuagcccuaaa

SEQ ID NO: 1908355 - RNA, 19 nt, Artificial Sequence
  Description of Artificial Sequence: Synthetic oligonucleotide
  Antisense strand to SEQ ID NO: 1908354
uuuagggcuagauucucau

SEQ ID NO: 1908356 - RNA, 19 nt, Artificial Sequence
  Description of Artificial Sequence: Synthetic oligonucleotide
  Sense strand starting at position 258 of SEQ ID NO: 1879454
gagcuauuucuuugcugac

SEQ ID NO: 1908357 - RNA, 19 nt, Artificial Sequence
  Description of Artificial Sequence: Synthetic oligonucleotide
  Antisense strand to SEQ ID NO: 1908356
gucagcaaagaaauagcuc

SEQ ID NO: 1908358 - RNA, 19 nt, Artificial Sequence
  Description of Artificial Sequence: Synthetic oligonucleotide
  Sense strand starting at position 1000 of SEQ ID NO: 1879454
agacuucuguuauuagauu

SEQ ID NO: 1908359 - RNA, 19 nt, Artificial Sequence
  Description of Artificial Sequence: Synthetic oligonucleotide
  Antisense strand to SEQ ID NO: 1908358
aaucuaauaacagaagucu

SEQ ID NO: 1908360 - RNA, 19 nt, Artificial Sequence
  Description of Artificial Sequence: Synthetic oligonucleotide
  Sense strand starting at position 1057 of SEQ ID NO: 1879454
guuucuaaagacugacuca

SEQ ID NO: 1908361 - RNA, 19 nt, Artificial Sequence
  Description of Artificial Sequence: Synthetic oligonucleotide
  Antisense strand to SEQ ID NO: 1908360
ugagucagucuuuagaaac

SEQ ID NO: 1908362 - RNA, 19 nt, Artificial Sequence
  Description of Artificial Sequence: Synthetic oligonucleotide
  Sense strand starting at position 1087 of SEQ ID NO: 1879454
ugaguuuaccaacagcaaa

SEQ ID NO: 1908363 - RNA, 19 nt, Artificial Sequence
  Description of Artificial Sequence: Synthetic oligonucleotide
  Antisense strand to SEQ ID NO: 1908362
uuugcuguugguaaacuca

SEQ ID NO: 1908364 - RNA, 19 nt, Artificial Sequence
  Description of Artificial Sequence: Synthetic oligonucleotide
  Sense strand starting at position 1273 of SEQ ID NO: 1879454
cugugucuugcugucugua

SEQ ID NO: 1908365 - RNA, 19 nt, Artificial Sequence
  Description of Artificial Sequence: Synthetic oligonucleotide
  Antisense strand to SEQ ID NO: 1908364
uacagacagcaagacacag

SEQ ID NO: 1908366 - RNA, 19 nt, Artificial Sequence
  Description of Artificial Sequence: Synthetic oligonucleotide
  Sense strand starting at position 1319 of SEQ ID NO: 1879454
gcuugaguagacugguaaa

SEQ ID NO: 1908367 - RNA, 19 nt, Artificial Sequence
  Description of Artificial Sequence: Synthetic oligonucleotide
  Antisense strand to SEQ ID NO: 1908366
uuuaccagucuacucaagc

SEQ ID NO: 1908368 - RNA, 19 nt, Artificial Sequence
  Description of Artificial Sequence: Synthetic oligonucleotide
  Sense strand starting at position 1422 of SEQ ID NO: 1879454
ggucacagcucuuuguaau

SEQ ID NO: 1908369 - RNA, 19 nt, Artificial Sequence
  Description of Artificial Sequence: Synthetic oligonucleotide
  Antisense strand to SEQ ID NO: 1908368
auuacaaagagcugugacc

SEQ ID NO: 1908370 - RNA, 19 nt, Artificial Sequence
  Description of Artificial Sequence: Synthetic oligonucleotide
  Sense strand starting at position 1985 of SEQ ID NO: 1879454
gagucaguaaccggaagaa

SEQ ID NO: 1908371 - RNA, 19 nt, Artificial Sequence
  Description of Artificial Sequence: Synthetic oligonucleotide
  Antisense strand to SEQ ID NO: 1908370
uucuuccgguuacugacuc

SEQ ID NO: 1908372 - RNA, 19 nt, Artificial Sequence
  Description of Artificial Sequence: Synthetic oligonucleotide
  Sense strand starting at position 2265 of SEQ ID NO: 1879454
uauacuuugugaucgucau

SEQ ID NO: 1908373 - RNA, 19 nt, Artificial Sequence
  Description of Artificial Sequence: Synthetic oligonucleotide
  Antisense strand to SEQ ID NO: 1908372
augacgaucacaaaguaua

SEQ ID NO: 1908374 - RNA, 19 nt, Artificial Sequence
  Description of Artificial Sequence: Synthetic oligonucleotide
  Sense strand starting at position 2271 of SEQ ID NO: 1879454
uugugaucgucauuugggu

SEQ ID NO: 1908375 - RNA, 19 nt, Artificial Sequence
  Description of Artificial Sequence: Synthetic oligonucleotide
  Antisense strand to SEQ ID NO: 1908374
acccaaaugacgaucacaa

SEQ ID NO: 1908376 - RNA, 19 nt, Artificial Sequence
  Description of Artificial Sequence: Synthetic oligonucleotide
  Sense strand starting at position 2273 of SEQ ID NO: 1879454
gugaucgucauuuggguga

SEQ ID NO: 1908377 - RNA, 19 nt, Artificial Sequence
  Description of Artificial Sequence: Synthetic oligonucleotide
  Antisense strand to SEQ ID NO: 1908376
ucacccaaaugacgaucac

SEQ ID NO: 1908378 - RNA, 19 nt, Artificial Sequence
  Description of Artificial Sequence: Synthetic oligonucleotide
  Sense strand starting at position 2339 of SEQ ID NO: 1879454
uagaguaagucugcagaau

SEQ ID NO: 1908379 - RNA, 19 nt, Artificial Sequence
  Description of Artificial Sequence: Synthetic oligonucleotide
  Antisense strand to SEQ ID NO: 1908378
auucugcagacuuacucua

SEQ ID NO: 1908380 - RNA, 19 nt, Artificial Sequence
  Description of Artificial Sequence: Synthetic oligonucleotide
  Sense strand starting at position 2340 of SEQ ID NO: 1879454
agaguaagucugcagaauu

SEQ ID NO: 1908381 - RNA, 19 nt, Artificial Sequence
  Description of Artificial Sequence: Synthetic oligonucleotide
  Antisense strand to SEQ ID NO: 1908380
aauucugcagacuuacucu

SEQ ID NO: 1908382 - RNA, 19 nt, Artificial Sequence
  Description of Artificial Sequence: Synthetic oligonucleotide
  Sense strand starting at position 2393 of SEQ ID NO: 1879454
accugaucuggccaaucau

SEQ ID NO: 1908383 - RNA, 19 nt, Artificial Sequence
  Description of Artificial Sequence: Synthetic oligonucleotide
  Antisense strand to SEQ ID NO: 1908382
augauuggccagaucaggu

SEQ ID NO: 1908384 - RNA, 19 nt, Artificial Sequence
  Description of Artificial Sequence: Synthetic oligonucleotide
  Sense strand starting at position 2803 of SEQ ID NO: 1879454
uguaguagauuucuuggca

SEQ ID NO: 1908385 - RNA, 19 nt, Artificial Sequence
  Description of Artificial Sequence: Synthetic oligonucleotide
  Antisense strand to SEQ ID NO: 1908384
ugccaagaaaucuacuaca

SEQ ID NO: 1908386 - RNA, 19 nt, Artificial Sequence
  Description of Artificial Sequence: Synthetic oligonucleotide
  Sense strand starting at position 2804 of SEQ ID NO: 1879454
guaguagauuucuuggcac

SEQ ID NO: 1908387 - RNA, 19 nt, Artificial Sequence
  Description of Artificial Sequence: Synthetic oligonucleotide
  Antisense strand to SEQ ID NO: 1908386
gugccaagaaaucuacuac

SEQ ID NO: 1908388 - RNA, 19 nt, Artificial Sequence
  Description of Artificial Sequence: Synthetic oligonucleotide
  Sense strand starting at position 3002 of SEQ ID NO: 1879454
caaguaugagauuguacua

SEQ ID NO: 1908389 - RNA, 19 nt, Artificial Sequence
  Description of Artificial Sequence: Synthetic oligonucleotide
  Antisense strand to SEQ ID NO: 1908388
uaguacaaucucauacuug

SEQ ID NO: 1908390 - RNA, 19 nt, Artificial Sequence
  Description of Artificial Sequence: Synthetic oligonucleotide
  Sense strand starting at position 3053 of SEQ ID NO: 1879454
uuacuauguccugggaauu

SEQ ID NO: 1908391 - RNA, 19 nt, Artificial Sequence
  Description of Artificial Sequence: Synthetic oligonucleotide
  Antisense strand to SEQ ID NO: 1908390
aauucccaggacauaguaa

SEQ ID NO: 1908392 - RNA, 19 nt, Artificial Sequence
  Description of Artificial Sequence: Synthetic oligonucleotide
  Sense strand starting at position 3081 of SEQ ID NO: 1879454
uguagaauauucuucugca

SEQ ID NO: 1908393 - RNA, 19 nt, Artificial Sequence
  Description of Artificial Sequence: Synthetic oligonucleotide
  Antisense strand to SEQ ID NO: 1908392
ugcagaagaauauucuaca

SEQ ID NO: 1908394 - RNA, 19 nt, Artificial Sequence
  Description of Artificial Sequence: Synthetic oligonucleotide
  Sense strand starting at position 3082 of SEQ ID NO: 1879454
guagaauauucuucugcac

SEQ ID NO: 1908395 - RNA, 19 nt, Artificial Sequence
  Description of Artificial Sequence: Synthetic oligonucleotide
  Antisense strand to SEQ ID NO: 1908394
gugcagaagaauauucuac

SEQ ID NO: 1908396 - RNA, 19 nt, Artificial Sequence
  Description of Artificial Sequence: Synthetic oligonucleotide
  Sense strand starting at position 3127 of SEQ ID NO: 1879454
guaugcaugcacuacaauu

SEQ ID NO: 1908397 - RNA, 19 nt, Artificial Sequence
  Description of Artificial Sequence: Synthetic oligonucleotide
  Antisense strand to SEQ ID NO: 1908396
aauuguagugcaugcauac

SEQ ID NO: 1908398 - RNA, 19 nt, Artificial Sequence
  Description of Artificial Sequence: Synthetic oligonucleotide
  Sense strand starting at position 3153 of SEQ ID NO: 1879454
cacauaggguguuucuaau

SEQ ID NO: 1908399 - RNA, 19 nt, Artificial Sequence
  Description of Artificial Sequence: Synthetic oligonucleotide
  Antisense strand to SEQ ID NO: 1908398
auuagaaacacccuaugug

SEQ ID NO: 1908400 - RNA, 19 nt, Artificial Sequence
  Description of Artificial Sequence: Synthetic oligonucleotide
  Sense strand starting at position 3328 of SEQ ID NO: 1879454
guauacuguugaucaaaug

SEQ ID NO: 1908401 - RNA, 19 nt, Artificial Sequence
  Description of Artificial Sequence: Synthetic oligonucleotide
  Antisense strand to SEQ ID NO: 1908400
cauuugaucaacaguauac

SEQ ID NO: 1908402 - RNA, 19 nt, Artificial Sequence
  Description of Artificial Sequence: Synthetic oligonucleotide
  Sense strand starting at position 3337 of SEQ ID NO: 1879454
ugaucaaauguuggaaugu

SEQ ID NO: 1908403 - RNA, 19 nt, Artificial Sequence
  Description of Artificial Sequence: Synthetic oligonucleotide
  Antisense strand to SEQ ID NO: 1908402
acauuccaacauuugauca

SEQ ID NO: 1908404 - RNA, 19 nt, Artificial Sequence
  Description of Artificial Sequence: Synthetic oligonucleotide
  Sense strand starting at position 3405 of SEQ ID NO: 1879454
ucuccuuaucauggucauu

SEQ ID NO: 1908405 - RNA, 19 nt, Artificial Sequence
  Description of Artificial Sequence: Synthetic oligonucleotide
  Antisense strand to SEQ ID NO: 1908404
aaugaccaugauaaggaga

SEQ ID NO: 1908406 - RNA, 19 nt, Artificial Sequence
  Description of Artificial Sequence: Synthetic oligonucleotide
  Sense strand starting at position 3408 of SEQ ID NO: 1879454
ccuuaucauggucauuaca

SEQ ID NO: 1908407 - RNA, 19 nt, Artificial Sequence
  Description of Artificial Sequence: Synthetic oligonucleotide
  Antisense strand to SEQ ID NO: 1908406
uguaaugaccaugauaagg

SEQ ID NO: 1908408 - RNA, 19 nt, Artificial Sequence
  Description of Artificial Sequence: Synthetic oligonucleotide
  Sense strand starting at position 3419 of SEQ ID NO: 1879454
ucauuacauucguuuacua

SEQ ID NO: 1908409 - RNA, 19 nt, Artificial Sequence
  Description of Artificial Sequence: Synthetic oligonucleotide
  Antisense strand to SEQ ID NO: 1908408
uaguaaacgaauguaauga

SEQ ID NO: 1908410 - RNA, 19 nt, Artificial Sequence
  Description of Artificial Sequence: Synthetic oligonucleotide
  Sense strand starting at position 3421 of SEQ ID NO: 1879454
auuacauucguuuacuacu

SEQ ID NO: 1908411 - RNA, 19 nt, Artificial Sequence
  Description of Artificial Sequence: Synthetic oligonucleotide
  Antisense strand to SEQ ID NO: 1908410
aguaguaaacgaauguaau

SEQ ID NO: 1908412 - RNA, 19 nt, Artificial Sequence
  Description of Artificial Sequence: Synthetic oligonucleotide
  Sense strand starting at position 3432 of SEQ ID NO: 1879454
uuacuacuugcaugaguau

SEQ ID NO: 1908413 - RNA, 19 nt, Artificial Sequence
  Description of Artificial Sequence: Synthetic oligonucleotide
  Antisense strand to SEQ ID NO: 1908412
auacucaugcaaguaguaa

SEQ ID NO: 1908414 - RNA, 19 nt, Artificial Sequence
  Description of Artificial Sequence: Synthetic oligonucleotide
  Sense strand starting at position 3435 of SEQ ID NO: 1879454
cuacuugcaugaguauuaa

SEQ ID NO: 1908415 - RNA, 19 nt, Artificial Sequence
  Description of Artificial Sequence: Synthetic oligonucleotide
  Antisense strand to SEQ ID NO: 1908414
uuaauacucaugcaaguag

SEQ ID NO: 1908416 - RNA, 19 nt, Artificial Sequence
  Description of Artificial Sequence: Synthetic oligonucleotide
  Sense strand starting at position 3459 of SEQ ID NO: 1879454
agugauaaaucguuccaaa

SEQ ID NO: 1908417 - RNA, 19 nt, Artificial Sequence
  Description of Artificial Sequence: Synthetic oligonucleotide
  Antisense strand to SEQ ID NO: 1908416
uuuggaacgauuuaucacu

SEQ ID NO: 1908418 - RNA, 19 nt, Artificial Sequence
  Description of Artificial Sequence: Synthetic oligonucleotide
  Sense strand starting at position 3507 of SEQ ID NO: 1879454
guaauaacgaguuauugcu

SEQ ID NO: 1908419 - RNA, 19 nt, Artificial Sequence
  Description of Artificial Sequence: Synthetic oligonucleotide
  Antisense strand to SEQ ID NO: 1908418
agcaauaacucguuauuac

SEQ ID NO: 1908420 - RNA, 19 nt, Artificial Sequence
  Description of Artificial Sequence: Synthetic oligonucleotide
  Sense strand starting at position 3550 of SEQ ID NO: 1879454
guagccauucuauagguaa

SEQ ID NO: 1908421 - RNA, 19 nt, Artificial Sequence
  Description of Artificial Sequence: Synthetic oligonucleotide
  Antisense strand to SEQ ID NO: 1908420
uuaccuauagaauggcuac

SEQ ID NO: 1908422 - RNA, 19 nt, Artificial Sequence
  Description of Artificial Sequence: Synthetic oligonucleotide
  Sense strand starting at position 3553 of SEQ ID NO: 1879454
gccauucuauagguaauau

SEQ ID NO: 1908423 - RNA, 19 nt, Artificial Sequence
  Description of Artificial Sequence: Synthetic oligonucleotide
  Antisense strand to SEQ ID NO: 1908422
auauuaccuauagaauggc

SEQ ID NO: 1908424 - RNA, 19 nt, Artificial Sequence
  Description of Artificial Sequence: Synthetic oligonucleotide
  Sense strand starting at position 3589 of SEQ ID NO: 1879454
agaugauauaagugagcca

SEQ ID NO: 1908425 - RNA, 19 nt, Artificial Sequence
  Description of Artificial Sequence: Synthetic oligonucleotide
  Antisense strand to SEQ ID NO: 1908424
uggcucacuuauaucaucu

SEQ ID NO: 1908426 - RNA, 19 nt, Artificial Sequence
  Description of Artificial Sequence: Synthetic oligonucleotide
  Sense strand starting at position 3592 of SEQ ID NO: 1879454
ugauauaagugagccacaa

SEQ ID NO: 1908427 - RNA, 19 nt, Artificial Sequence
  Description of Artificial Sequence: Synthetic oligonucleotide
  Antisense strand to SEQ ID NO: 1908426
uuguggcucacuuauauca

SEQ ID NO: 1908428 - RNA, 19 nt, Artificial Sequence
  Description of Artificial Sequence: Synthetic oligonucleotide
  Sense strand starting at position 3767 of SEQ ID NO: 1879454
uguuccagugcuuacauau

SEQ ID NO: 1908429 - RNA, 19 nt, Artificial Sequence
  Description of Artificial Sequence: Synthetic oligonucleotide
  Antisense strand to SEQ ID NO: 1908428
auauguaagcacuggaaca

SEQ ID NO: 1908430 - RNA, 19 nt, Artificial Sequence
  Description of Artificial Sequence: Synthetic oligonucleotide
  Sense strand starting at position 3866 of SEQ ID NO: 1879454
caguaauugguguguccag

SEQ ID NO: 1908431 - RNA, 19 nt, Artificial Sequence
  Description of Artificial Sequence: Synthetic oligonucleotide
  Antisense strand to SEQ ID NO: 1908430
cuggacacaccaauuacug

SEQ ID NO: 1908432 - RNA, 19 nt, Artificial Sequence
  Description of Artificial Sequence: Synthetic oligonucleotide
  Sense strand starting at position 3867 of SEQ ID NO: 1879454
aguaauugguguguccaga

SEQ ID NO: 1908433 - RNA, 19 nt, Artificial Sequence
  Description of Artificial Sequence: Synthetic oligonucleotide
  Antisense strand to SEQ ID NO: 1908432
ucuggacacaccaauuacu

SEQ ID NO: 1908434 - RNA, 19 nt, Artificial Sequence
  Description of Artificial Sequence: Synthetic oligonucleotide
  Sense strand starting at position 277 of SEQ ID NO: 1879455
cagaaauagguguggcaaa

SEQ ID NO: 1908435 - RNA, 19 nt, Artificial Sequence
  Description of Artificial Sequence: Synthetic oligonucleotide
  Antisense strand to SEQ ID NO: 1908434
uuugccacaccuauuucug

SEQ ID NO: 1908436 - RNA, 19 nt, Artificial Sequence
  Description of Artificial Sequence: Synthetic oligonucleotide
  Sense strand starting at position 431 of SEQ ID NO: 1879455
ggaggagugguguaaucug

SEQ ID NO: 1908437 - RNA, 19 nt, Artificial Sequence
  Description of Artificial Sequence: Synthetic oligonucleotide
  Antisense strand to SEQ ID NO: 1908436
cagauuacaccacuccucc

SEQ ID NO: 1908438 - RNA, 19 nt, Artificial Sequence
  Description of Artificial Sequence: Synthetic oligonucleotide
  Sense strand starting at position 490 of SEQ ID NO: 1879455
aagugucaguagguggaaa

SEQ ID NO: 1908439 - RNA, 19 nt, Artificial Sequence
  Description of Artificial Sequence: Synthetic oligonucleotide
  Antisense strand to SEQ ID NO: 1908438
uuuccaccuacugacacuu

SEQ ID NO: 1908440 - RNA, 19 nt, Artificial Sequence
  Description of Artificial Sequence: Synthetic oligonucleotide
  Sense strand starting at position 508 of SEQ ID NO: 1879455
aggaguugaaacuguguca

SEQ ID NO: 1908441 - RNA, 19 nt, Artificial Sequence
  Description of Artificial Sequence: Synthetic oligonucleotide
  Antisense strand to SEQ ID NO: 1908440
ugacacaguuucaacuccu

SEQ ID NO: 1908442 - RNA, 19 nt, Artificial Sequence
  Description of Artificial Sequence: Synthetic oligonucleotide
  Sense strand starting at position 511 of SEQ ID NO: 1879455
aguugaaacugugucauua

SEQ ID NO: 1908443 - RNA, 19 nt, Artificial Sequence
  Description of Artificial Sequence: Synthetic oligonucleotide
  Antisense strand to SEQ ID NO: 1908442
uaaugacacaguuucaacu

SEQ ID NO: 1908444 - RNA, 19 nt, Artificial Sequence
  Description of Artificial Sequence: Synthetic oligonucleotide
  Sense strand starting at position 530 of SEQ ID NO: 1879455
agaagacauuaccugguuu

SEQ ID NO: 1908445 - RNA, 19 nt, Artificial Sequence
  Description of Artificial Sequence: Synthetic oligonucleotide
  Antisense strand to SEQ ID NO: 1908444
aaaccagguaaugucuucu

SEQ ID NO: 1908446 - RNA, 19 nt, Artificial Sequence
  Description of Artificial Sequence: Synthetic oligonucleotide
  Sense strand starting at position 532 of SEQ ID NO: 1879455
aagacauuaccugguuuag

SEQ ID NO: 1908447 - RNA, 19 nt, Artificial Sequence
  Description of Artificial Sequence: Synthetic oligonucleotide
  Antisense strand to SEQ ID NO: 1908446
cuaaaccagguaaugucuu

SEQ ID NO: 1908448 - RNA, 19 nt, Artificial Sequence
  Description of Artificial Sequence: Synthetic oligonucleotide
  Sense strand starting at position 534 of SEQ ID NO: 1879455
gacauuaccugguuuagga

SEQ ID NO: 1908449 - RNA, 19 nt, Artificial Sequence
  Description of Artificial Sequence: Synthetic oligonucleotide
  Antisense strand to SEQ ID NO: 1908448
uccuaaaccagguaauguc

SEQ ID NO: 1908450 - RNA, 19 nt, Artificial Sequence
  Description of Artificial Sequence: Synthetic oligonucleotide
  Sense strand starting at position 549 of SEQ ID NO: 1879455
aggaaagaugacggucauu

SEQ ID NO: 1908451 - RNA, 19 nt, Artificial Sequence
  Description of Artificial Sequence: Synthetic oligonucleotide
  Antisense strand to SEQ ID NO: 1908450
aaugaccgucaucuuuccu

SEQ ID NO: 1908452 - RNA, 19 nt, Artificial Sequence
  Description of Artificial Sequence: Synthetic oligonucleotide
  Sense strand starting at position 773 of SEQ ID NO: 1879455
gugggugugcaagagguaa

SEQ ID NO: 1908453 - RNA, 19 nt, Artificial Sequence
  Description of Artificial Sequence: Synthetic oligonucleotide
  Antisense strand to SEQ ID NO: 1908452
uuaccucuugcacacccac

SEQ ID NO: 1908454 - RNA, 19 nt, Artificial Sequence
  Description of Artificial Sequence: Synthetic oligonucleotide
  Sense strand starting at position 777 of SEQ ID NO: 1879455
gugugcaagagguaaauaa

SEQ ID NO: 1908455 - RNA, 19 nt, Artificial Sequence
  Description of Artificial Sequence: Synthetic oligonucleotide
  Antisense strand to SEQ ID NO: 1908454
uuauuuaccucuugcacac

SEQ ID NO: 1908456 - RNA, 19 nt, Artificial Sequence
  Description of Artificial Sequence: Synthetic oligonucleotide
  Sense strand starting at position 806 of SEQ ID NO: 1879455
uagacauguuaaguuugaa

SEQ ID NO: 1908457 - RNA, 19 nt, Artificial Sequence
  Description of Artificial Sequence: Synthetic oligonucleotide
  Antisense strand to SEQ ID NO: 1908456
uucaaacuuaacaugucua

SEQ ID NO: 1908458 - RNA, 19 nt, Artificial Sequence
  Description of Artificial Sequence: Synthetic oligonucleotide
  Sense strand starting at position 890 of SEQ ID NO: 1879455
gguaaccuuuaguuacuga

SEQ ID NO: 1908459 - RNA, 19 nt, Artificial Sequence
  Description of Artificial Sequence: Synthetic oligonucleotide
  Antisense strand to SEQ ID NO: 1908458
ucaguaacuaaagguuacc

SEQ ID NO: 1908460 - RNA, 19 nt, Artificial Sequence
  Description of Artificial Sequence: Synthetic oligonucleotide
  Sense strand starting at position 900 of SEQ ID NO: 1879455
aguuacugagcuuaaugua

SEQ ID NO: 1908461 - RNA, 19 nt, Artificial Sequence
  Description of Artificial Sequence: Synthetic oligonucleotide
  Antisense strand to SEQ ID NO: 1908460
uacauuaagcucaguaacu

SEQ ID NO: 1908462 - RNA, 19 nt, Artificial Sequence
  Description of Artificial Sequence: Synthetic oligonucleotide
  Sense strand starting at position 954 of SEQ ID NO: 1879455
uugauaggaggguguugua

SEQ ID NO: 1908463 - RNA, 19 nt, Artificial Sequence
  Description of Artificial Sequence: Synthetic oligonucleotide
  Antisense strand to SEQ ID NO: 1908462
uacaacacccuccuaucaa

SEQ ID NO: 1908464 - RNA, 19 nt, Artificial Sequence
  Description of Artificial Sequence: Synthetic oligonucleotide
  Sense strand starting at position 970 of SEQ ID NO: 1879455
guauccgcauuucuauaua

SEQ ID NO: 1908465 - RNA, 19 nt, Artificial Sequence
  Description of Artificial Sequence: Synthetic oligonucleotide
  Antisense strand to SEQ ID NO: 1908464
uauauagaaaugcggauac

SEQ ID NO: 1908466 - RNA, 19 nt, Artificial Sequence
  Description of Artificial Sequence: Synthetic oligonucleotide
  Sense strand starting at position 2125 of SEQ ID NO: 1879455
guuuaucacagauaguguu

SEQ ID NO: 1908467 - RNA, 19 nt, Artificial Sequence
  Description of Artificial Sequence: Synthetic oligonucleotide
  Antisense strand to SEQ ID NO: 1908466
aacacuaucugugauaaac

SEQ ID NO: 1908468 - RNA, 19 nt, Artificial Sequence
  Description of Artificial Sequence: Synthetic oligonucleotide
  Sense strand starting at position 2442 of SEQ ID NO: 1879455
gcaauaaaucuagguuuga

SEQ ID NO: 1908469 - RNA, 19 nt, Artificial Sequence
  Description of Artificial Sequence: Synthetic oligonucleotide
  Antisense strand to SEQ ID NO: 1908468
ucaaaccuagauuuauugc

SEQ ID NO: 1908470 - RNA, 19 nt, Artificial Sequence
  Description of Artificial Sequence: Synthetic oligonucleotide
  Sense strand starting at position 2443 of SEQ ID NO: 1879455
caauaaaucuagguuugag

SEQ ID NO: 1908471 - RNA, 19 nt, Artificial Sequence
  Description of Artificial Sequence: Synthetic oligonucleotide
  Antisense strand to SEQ ID NO: 1908470
cucaaaccuagauuuauug

SEQ ID NO: 1908472 - RNA, 19 nt, Artificial Sequence
  Description of Artificial Sequence: Synthetic oligonucleotide
  Sense strand starting at position 2446 of SEQ ID NO: 1879455
uaaaucuagguuugaggau

SEQ ID NO: 1908473 - RNA, 19 nt, Artificial Sequence
  Description of Artificial Sequence: Synthetic oligonucleotide
  Antisense strand to SEQ ID NO: 1908472
auccucaaaccuagauuua

SEQ ID NO: 1908474 - RNA, 19 nt, Artificial Sequence
  Description of Artificial Sequence: Synthetic oligonucleotide
  Sense strand starting at position 2459 of SEQ ID NO: 1879455
gaggauauuugguacauaa

SEQ ID NO: 1908475 - RNA, 19 nt, Artificial Sequence
  Description of Artificial Sequence: Synthetic oligonucleotide
  Antisense strand to SEQ ID NO: 1908474
uuauguaccaaauauccuc

SEQ ID NO: 1908476 - RNA, 19 nt, Artificial Sequence
  Description of Artificial Sequence: Synthetic oligonucleotide
  Sense strand starting at position 2556 of SEQ ID NO: 1879455
gcuaguauuccacauacua

SEQ ID NO: 1908477 - RNA, 19 nt, Artificial Sequence
  Description of Artificial Sequence: Synthetic oligonucleotide
  Antisense strand to SEQ ID NO: 1908476
uaguauguggaauacuagc

SEQ ID NO: 1908478 - RNA, 19 nt, Artificial Sequence
  Description of Artificial Sequence: Synthetic oligonucleotide
  Sense strand starting at position 2733 of SEQ ID NO: 1879455
uuucuuacccauugggauc

SEQ ID NO: 1908479 - RNA, 19 nt, Artificial Sequence
  Description of Artificial Sequence: Synthetic oligonucleotide
  Antisense strand to SEQ ID NO: 1908478
gaucccaauggguaagaaa

SEQ ID NO: 1908480 - RNA, 19 nt, Artificial Sequence
  Description of Artificial Sequence: Synthetic oligonucleotide
  Sense strand starting at position 2832 of SEQ ID NO: 1879455
uuggcauauuccucaggau

SEQ ID NO: 1908481 - RNA, 19 nt, Artificial Sequence
  Description of Artificial Sequence: Synthetic oligonucleotide
  Antisense strand to SEQ ID NO: 1908480
auccugaggaauaugccaa

SEQ ID NO: 1908482 - RNA, 19 nt, Artificial Sequence
  Description of Artificial Sequence: Synthetic oligonucleotide
  Sense strand starting at position 2833 of SEQ ID NO: 1879455
uggcauauuccucaggauc

SEQ ID NO: 1908483 - RNA, 19 nt, Artificial Sequence
  Description of Artificial Sequence: Synthetic oligonucleotide
  Antisense strand to SEQ ID NO: 1908482
gauccugaggaauaugcca

SEQ ID NO: 1908484 - RNA, 19 nt, Artificial Sequence
  Description of Artificial Sequence: Synthetic oligonucleotide
  Sense strand starting at position 3045 of SEQ ID NO: 1879455
uuuggugggcgcuuguaau

SEQ ID NO: 1908485 - RNA, 19 nt, Artificial Sequence
  Description of Artificial Sequence: Synthetic oligonucleotide
  Antisense strand to SEQ ID NO: 1908484
auuacaagcgcccaccaaa

SEQ ID NO: 1908486 - RNA, 19 nt, Artificial Sequence
  Description of Artificial Sequence: Synthetic oligonucleotide
  Sense strand starting at position 3409 of SEQ ID NO: 1879455
ucaauuguguacucauaaa

SEQ ID NO: 1908487 - RNA, 19 nt, Artificial Sequence
  Description of Artificial Sequence: Synthetic oligonucleotide
  Antisense strand to SEQ ID NO: 1908486
uuuaugaguacacaauuga

SEQ ID NO: 1908488 - RNA, 19 nt, Artificial Sequence
  Description of Artificial Sequence: Synthetic oligonucleotide
  Sense strand starting at position 3450 of SEQ ID NO: 1879455
ugagacauuucccaauaug

SEQ ID NO: 1908489 - RNA, 19 nt, Artificial Sequence
  Description of Artificial Sequence: Synthetic oligonucleotide
  Antisense strand to SEQ ID NO: 1908488
cauauugggaaaugucuca

SEQ ID NO: 1908490 - RNA, 19 nt, Artificial Sequence
  Description of Artificial Sequence: Synthetic oligonucleotide
  Sense strand starting at position 3465 of SEQ ID NO: 1879455
uaugucagauaagugaauu

SEQ ID NO: 1908491 - RNA, 19 nt, Artificial Sequence
  Description of Artificial Sequence: Synthetic oligonucleotide
  Antisense strand to SEQ ID NO: 1908490
aauucacuuaucugacaua

SEQ ID NO: 1908492 - RNA, 19 nt, Artificial Sequence
  Description of Artificial Sequence: Synthetic oligonucleotide
  Sense strand starting at position 3548 of SEQ ID NO: 1879455
acuccuuggguuuagugau

SEQ ID NO: 1908493 - RNA, 19 nt, Artificial Sequence
  Description of Artificial Sequence: Synthetic oligonucleotide
  Antisense strand to SEQ ID NO: 1908492
aucacuaaacccaaggagu

SEQ ID NO: 1908494 - RNA, 19 nt, Artificial Sequence
  Description of Artificial Sequence: Synthetic oligonucleotide
  Sense strand starting at position 3580 of SEQ ID NO: 1879455
accucuaggucaucugaua

SEQ ID NO: 1908495 - RNA, 19 nt, Artificial Sequence
  Description of Artificial Sequence: Synthetic oligonucleotide
  Antisense strand to SEQ ID NO: 1908494
uaucagaugaccuagaggu

SEQ ID NO: 1908496 - RNA, 19 nt, Artificial Sequence
  Description of Artificial Sequence: Synthetic oligonucleotide
  Sense strand starting at position 3686 of SEQ ID NO: 1879455
agccuuuaugcaugaagau

SEQ ID NO: 1908497 - RNA, 19 nt, Artificial Sequence
  Description of Artificial Sequence: Synthetic oligonucleotide
  Antisense strand to SEQ ID NO: 1908496
aucuucaugcauaaaggcu

SEQ ID NO: 1908498 - RNA, 19 nt, Artificial Sequence
  Description of Artificial Sequence: Synthetic oligonucleotide
  Sense strand starting at position 3687 of SEQ ID NO: 1879455
gccuuuaugcaugaagaua

SEQ ID NO: 1908499 - RNA, 19 nt, Artificial Sequence
  Description of Artificial Sequence: Synthetic oligonucleotide
  Antisense strand to SEQ ID NO: 1908498
uaucuucaugcauaaaggc

SEQ ID NO: 1908500 - RNA, 19 nt, Artificial Sequence
  Description of Artificial Sequence: Synthetic oligonucleotide
  Sense strand starting at position 3804 of SEQ ID NO: 1879455
uagagagcuggcuaauucu

SEQ ID NO: 1908501 - RNA, 19 nt, Artificial Sequence
  Description of Artificial Sequence: Synthetic oligonucleotide
  Antisense strand to SEQ ID NO: 1908500
agaauuagccagcucucua

SEQ ID NO: 1908502 - RNA, 19 nt, Artificial Sequence
  Description of Artificial Sequence: Synthetic oligonucleotide
  Sense strand starting at position 3807 of SEQ ID NO: 1879455
agagcuggcuaauucuaaa

SEQ ID NO: 1908503 - RNA, 19 nt, Artificial Sequence
  Description of Artificial Sequence: Synthetic oligonucleotide
  Antisense strand to SEQ ID NO: 1908502
uuuagaauuagccagcucu

SEQ ID NO: 1908504 - RNA, 19 nt, Artificial Sequence
  Description of Artificial Sequence: Synthetic oligonucleotide
  Sense strand starting at position 3837 of SEQ ID NO: 1879455
auauuugacucugaaauag

SEQ ID NO: 1908505 - RNA, 19 nt, Artificial Sequence
  Description of Artificial Sequence: Synthetic oligonucleotide
  Antisense strand to SEQ ID NO: 1908504
cuauuucagagucaaauau

SEQ ID NO: 1908506 - RNA, 19 nt, Artificial Sequence
  Description of Artificial Sequence: Synthetic oligonucleotide
  Sense strand starting at position 3859 of SEQ ID NO: 1879455
acaugugaacuguggucaa

SEQ ID NO: 1908507 - RNA, 19 nt, Artificial Sequence
  Description of Artificial Sequence: Synthetic oligonucleotide
  Antisense strand to SEQ ID NO: 1908506
uugaccacaguucacaugu

SEQ ID NO: 1908508 - RNA, 19 nt, Artificial Sequence
  Description of Artificial Sequence: Synthetic oligonucleotide
  Sense strand starting at position 3862 of SEQ ID NO: 1879455
ugugaacuguggucaaaua

SEQ ID NO: 1908509 - RNA, 19 nt, Artificial Sequence
  Description of Artificial Sequence: Synthetic oligonucleotide
  Antisense strand to SEQ ID NO: 1908508
uauuugaccacaguucaca

SEQ ID NO: 1908510 - RNA, 19 nt, Artificial Sequence
  Description of Artificial Sequence: Synthetic oligonucleotide
  Sense strand starting at position 3863 of SEQ ID NO: 1879455
gugaacuguggucaaauaa

SEQ ID NO: 1908511 - RNA, 19 nt, Artificial Sequence
  Description of Artificial Sequence: Synthetic oligonucleotide
  Antisense strand to SEQ ID NO: 1908510
uuauuugaccacaguucac

SEQ ID NO: 1908512 - RNA, 19 nt, Artificial Sequence
  Description of Artificial Sequence: Synthetic oligonucleotide
  Sense strand starting at position 3892 of SEQ ID NO: 1879455
ggaacauguuuauuaaauc

SEQ ID NO: 1908513 - RNA, 19 nt, Artificial Sequence
  Description of Artificial Sequence: Synthetic oligonucleotide
  Antisense strand to SEQ ID NO: 1908512
gauuuaauaaacauguucc

SEQ ID NO: 1908514 - RNA, 19 nt, Artificial Sequence
  Description of Artificial Sequence: Synthetic oligonucleotide
  Sense strand starting at position 124 of SEQ ID NO: 1879456
aucuguggcagguguuuau

SEQ ID NO: 1908515 - RNA, 19 nt, Artificial Sequence
  Description of Artificial Sequence: Synthetic oligonucleotide
  Antisense strand to SEQ ID NO: 1908514
auaaacaccugccacagau

SEQ ID NO: 1908516 - RNA, 19 nt, Artificial Sequence
  Description of Artificial Sequence: Synthetic oligonucleotide
  Sense strand starting at position 168 of SEQ ID NO: 1879456
ucagaacacgcugagacau

SEQ ID NO: 1908517 - RNA, 19 nt, Artificial Sequence
  Description of Artificial Sequence: Synthetic oligonucleotide
  Antisense strand to SEQ ID NO: 1908516
augucucagcguguucuga

SEQ ID NO: 1908518 - RNA, 19 nt, Artificial Sequence
  Description of Artificial Sequence: Synthetic oligonucleotide
  Sense strand starting at position 176 of SEQ ID NO: 1879456
cgcugagacauuggcaauu

SEQ ID NO: 1908519 - RNA, 19 nt, Artificial Sequence
  Description of Artificial Sequence: Synthetic oligonucleotide
  Antisense strand to SEQ ID NO: 1908518
aauugccaaugucucagcg

SEQ ID NO: 1908520 - RNA, 19 nt, Artificial Sequence
  Description of Artificial Sequence: Synthetic oligonucleotide
  Sense strand starting at position 211 of SEQ ID NO: 1879456
cgguguggcuuugcuuuau

SEQ ID NO: 1908521 - RNA, 19 nt, Artificial Sequence
  Description of Artificial Sequence: Synthetic oligonucleotide
  Antisense strand to SEQ ID NO: 1908520
auaaagcaaagccacaccg

SEQ ID NO: 1908522 - RNA, 19 nt, Artificial Sequence
  Description of Artificial Sequence: Synthetic oligonucleotide
  Sense strand starting at position 617 of SEQ ID NO: 1879456
agagucucguggaaaugga

SEQ ID NO: 1908523 - RNA, 19 nt, Artificial Sequence
  Description of Artificial Sequence: Synthetic oligonucleotide
  Antisense strand to SEQ ID NO: 1908522
uccauuuccacgagacucu

SEQ ID NO: 1908524 - RNA, 19 nt, Artificial Sequence
  Description of Artificial Sequence: Synthetic oligonucleotide
  Sense strand starting at position 685 of SEQ ID NO: 1879456
uuccuuaucagggaugcga

SEQ ID NO: 1908525 - RNA, 19 nt, Artificial Sequence
  Description of Artificial Sequence: Synthetic oligonucleotide
  Antisense strand to SEQ ID NO: 1908524
ucgcaucccugauaaggaa

SEQ ID NO: 1908526 - RNA, 19 nt, Artificial Sequence
  Description of Artificial Sequence: Synthetic oligonucleotide
  Sense strand starting at position 855 of SEQ ID NO: 1879456
cuucuccuccgguaagagu

SEQ ID NO: 1908527 - RNA, 19 nt, Artificial Sequence
  Description of Artificial Sequence: Synthetic oligonucleotide
  Antisense strand to SEQ ID NO: 1908526
acucuuaccggaggagaag

SEQ ID NO: 1908528 - RNA, 19 nt, Artificial Sequence
  Description of Artificial Sequence: Synthetic oligonucleotide
  Sense strand starting at position 864 of SEQ ID NO: 1879456
cgguaagagucuuugccag

SEQ ID NO: 1908529 - RNA, 19 nt, Artificial Sequence
  Description of Artificial Sequence: Synthetic oligonucleotide
  Antisense strand to SEQ ID NO: 1908528
cuggcaaagacucuuaccg

SEQ ID NO: 1908530 - RNA, 19 nt, Artificial Sequence
  Description of Artificial Sequence: Synthetic oligonucleotide
  Sense strand starting at position 866 of SEQ ID NO: 1879456
guaagagucuuugccagca

SEQ ID NO: 1908531 - RNA, 19 nt, Artificial Sequence
  Description of Artificial Sequence: Synthetic oligonucleotide
  Antisense strand to SEQ ID NO: 1908530
ugcuggcaaagacucuuac

SEQ ID NO: 1908532 - RNA, 19 nt, Artificial Sequence
  Description of Artificial Sequence: Synthetic oligonucleotide
  Sense strand starting at position 929 of SEQ ID NO: 1879456
guaaccaagcucugagcaa

SEQ ID NO: 1908533 - RNA, 19 nt, Artificial Sequence
  Description of Artificial Sequence: Synthetic oligonucleotide
  Antisense strand to SEQ ID NO: 1908532
uugcucagagcuugguuac

SEQ ID NO: 1908534 - RNA, 19 nt, Artificial Sequence
  Description of Artificial Sequence: Synthetic oligonucleotide
  Sense strand starting at position 942 of SEQ ID NO: 1879456
gagcaauggcagugagugu

SEQ ID NO: 1908535 - RNA, 19 nt, Artificial Sequence
  Description of Artificial Sequence: Synthetic oligonucleotide
  Antisense strand to SEQ ID NO: 1908534
acacucacugccauugcuc

SEQ ID NO: 1908536 - RNA, 19 nt, Artificial Sequence
  Description of Artificial Sequence: Synthetic oligonucleotide
  Sense strand starting at position 968 of SEQ ID NO: 1879456
ccagcaagcuucuuuagaa

SEQ ID NO: 1908537 - RNA, 19 nt, Artificial Sequence
  Description of Artificial Sequence: Synthetic oligonucleotide
  Antisense strand to SEQ ID NO: 1908536
uucuaaagaagcuugcugg

SEQ ID NO: 1908538 - RNA, 19 nt, Artificial Sequence
  Description of Artificial Sequence: Synthetic oligonucleotide
  Sense strand starting at position 1023 of SEQ ID NO: 1879456
gguugcuucgcauucuuua

SEQ ID NO: 1908539 - RNA, 19 nt, Artificial Sequence
  Description of Artificial Sequence: Synthetic oligonucleotide
  Antisense strand to SEQ ID NO: 1908538
uaaagaaugcgaagcaacc

SEQ ID NO: 1908540 - RNA, 19 nt, Artificial Sequence
  Description of Artificial Sequence: Synthetic oligonucleotide
  Sense strand starting at position 1216 of SEQ ID NO: 1879456
auccaauguccacaguuaa

SEQ ID NO: 1908541 - RNA, 19 nt, Artificial Sequence
  Description of Artificial Sequence: Synthetic oligonucleotide
  Antisense strand to SEQ ID NO: 1908540
uuaacuguggacauuggau

SEQ ID NO: 1908542 - RNA, 19 nt, Artificial Sequence
  Description of Artificial Sequence: Synthetic oligonucleotide
  Sense strand starting at position 1242 of SEQ ID NO: 1879456
gcuucugaaccugguauga

SEQ ID NO: 1908543 - RNA, 19 nt, Artificial Sequence
  Description of Artificial Sequence: Synthetic oligonucleotide
  Antisense strand to SEQ ID NO: 1908542
ucauaccagguucagaagc

SEQ ID NO: 1908544 - RNA, 19 nt, Artificial Sequence
  Description of Artificial Sequence: Synthetic oligonucleotide
  Sense strand starting at position 1482 of SEQ ID NO: 1879456
cugguucugcauuaauaau

SEQ ID NO: 1908545 - RNA, 19 nt, Artificial Sequence
  Description of Artificial Sequence: Synthetic oligonucleotide
  Antisense strand to SEQ ID NO: 1908544
auuauuaaugcagaaccag

SEQ ID NO: 1908546 - RNA, 19 nt, Artificial Sequence
  Description of Artificial Sequence: Synthetic oligonucleotide
  Sense strand starting at position 1579 of SEQ ID NO: 1879456
ccuuucuccuagcuggaau

SEQ ID NO: 1908547 - RNA, 19 nt, Artificial Sequence
  Description of Artificial Sequence: Synthetic oligonucleotide
  Antisense strand to SEQ ID NO: 1908546
auuccagcuaggagaaagg

SEQ ID NO: 1908548 - RNA, 19 nt, Artificial Sequence
  Description of Artificial Sequence: Synthetic oligonucleotide
  Sense strand starting at position 1654 of SEQ ID NO: 1879456
agaugacaguggcagaaua

SEQ ID NO: 1908549 - RNA, 19 nt, Artificial Sequence
  Description of Artificial Sequence: Synthetic oligonucleotide
  Antisense strand to SEQ ID NO: 1908548
uauucugccacugucaucu

SEQ ID NO: 1908550 - RNA, 19 nt, Artificial Sequence
  Description of Artificial Sequence: Synthetic oligonucleotide
  Sense strand starting at position 1731 of SEQ ID NO: 1879456
cucuuaugggagcgagaag

SEQ ID NO: 1908551 - RNA, 19 nt, Artificial Sequence
  Description of Artificial Sequence: Synthetic oligonucleotide
  Antisense strand to SEQ ID NO: 1908550
cuucucgcucccauaagag

SEQ ID NO: 1908552 - RNA, 19 nt, Artificial Sequence
  Description of Artificial Sequence: Synthetic oligonucleotide
  Sense strand starting at position 1732 of SEQ ID NO: 1879456
ucuuaugggagcgagaagu

SEQ ID NO: 1908553 - RNA, 19 nt, Artificial Sequence
  Description of Artificial Sequence: Synthetic oligonucleotide
  Antisense strand to SEQ ID NO: 1908552
acuucucgcucccauaaga

SEQ ID NO: 1908554 - RNA, 19 nt, Artificial Sequence
  Description of Artificial Sequence: Synthetic oligonucleotide
  Sense strand starting at position 1742 of SEQ ID NO: 1879456
gcgagaagucaccguggcu

SEQ ID NO: 1908555 - RNA, 19 nt, Artificial Sequence
  Description of Artificial Sequence: Synthetic oligonucleotide
  Antisense strand to SEQ ID NO: 1908554
agccacggugacuucucgc

SEQ ID NO: 1908556 - RNA, 19 nt, Artificial Sequence
  Description of Artificial Sequence: Synthetic oligonucleotide
  Sense strand starting at position 1772 of SEQ ID NO: 1879456
acucuaguguuguuugcua

SEQ ID NO: 1908557 - RNA, 19 nt, Artificial Sequence
  Description of Artificial Sequence: Synthetic oligonucleotide
  Antisense strand to SEQ ID NO: 1908556
uagcaaacaacacuagagu

SEQ ID NO: 1908558 - RNA, 19 nt, Artificial Sequence
  Description of Artificial Sequence: Synthetic oligonucleotide
  Sense strand starting at position 1774 of SEQ ID NO: 1879456
ucuaguguuguuugcuaaa

SEQ ID NO: 1908559 - RNA, 19 nt, Artificial Sequence
  Description of Artificial Sequence: Synthetic oligonucleotide
  Antisense strand to SEQ ID NO: 1908558
uuuagcaaacaacacuaga

SEQ ID NO: 1908560 - RNA, 19 nt, Artificial Sequence
  Description of Artificial Sequence: Synthetic oligonucleotide
  Sense strand starting at position 1962 of SEQ ID NO: 1879456
gguguuccuagugggcaua

SEQ ID NO: 1908561 - RNA, 19 nt, Artificial Sequence
  Description of Artificial Sequence: Synthetic oligonucleotide
  Antisense strand to SEQ ID NO: 1908560
uaugcccacuaggaacacc

SEQ ID NO: 1908562 - RNA, 19 nt, Artificial Sequence
  Description of Artificial Sequence: Synthetic oligonucleotide
  Sense strand starting at position 2014 of SEQ ID NO: 1879456
uggagcuuccaccauggau

SEQ ID NO: 1908563 - RNA, 19 nt, Artificial Sequence
  Description of Artificial Sequence: Synthetic oligonucleotide
  Antisense strand to SEQ ID NO: 1908562
auccaugguggaagcucca

SEQ ID NO: 1908564 - RNA, 19 nt, Artificial Sequence
  Description of Artificial Sequence: Synthetic oligonucleotide
  Sense strand starting at position 2026 of SEQ ID NO: 1879456
cauggaugugcaugucuca

SEQ ID NO: 1908565 - RNA, 19 nt, Artificial Sequence
  Description of Artificial Sequence: Synthetic oligonucleotide
  Antisense strand to SEQ ID NO: 1908564
ugagacaugcacauccaug

SEQ ID NO: 1908566 - RNA, 19 nt, Artificial Sequence
  Description of Artificial Sequence: Synthetic oligonucleotide
  Sense strand starting at position 2054 of SEQ ID NO: 1879456
ucaggagaguccucggaag

SEQ ID NO: 1908567 - RNA, 19 nt, Artificial Sequence
  Description of Artificial Sequence: Synthetic oligonucleotide
  Antisense strand to SEQ ID NO: 1908566
cuuccgaggacucuccuga

SEQ ID NO: 1908568 - RNA, 19 nt, Artificial Sequence
  Description of Artificial Sequence: Synthetic oligonucleotide
  Sense strand starting at position 2057 of SEQ ID NO: 1879456
ggagaguccucggaaggga

SEQ ID NO: 1908569 - RNA, 19 nt, Artificial Sequence
  Description of Artificial Sequence: Synthetic oligonucleotide
  Antisense strand to SEQ ID NO: 1908568
ucccuuccgaggacucucc

SEQ ID NO: 1908570 - RNA, 19 nt, Artificial Sequence
  Description of Artificial Sequence: Synthetic oligonucleotide
  Sense strand starting at position 2123 of SEQ ID NO: 1879456
aggccucauguuggauuau

SEQ ID NO: 1908571 - RNA, 19 nt, Artificial Sequence
  Description of Artificial Sequence: Synthetic oligonucleotide
  Antisense strand to SEQ ID NO: 1908570
auaauccaacaugaggccu

SEQ ID NO: 1908572 - RNA, 19 nt, Artificial Sequence
  Description of Artificial Sequence: Synthetic oligonucleotide
  Sense strand starting at position 2190 of SEQ ID NO: 1879456
uggcugucuggguaggaga

SEQ ID NO: 1908573 - RNA, 19 nt, Artificial Sequence
  Description of Artificial Sequence: Synthetic oligonucleotide
  Antisense strand to SEQ ID NO: 1908572
ucuccuacccagacagcca

SEQ ID NO: 1908574 - RNA, 19 nt, Artificial Sequence
  Description of Artificial Sequence: Synthetic oligonucleotide
  Sense strand starting at position 2576 of SEQ ID NO: 1879456
aggaaaugauuccuagugu

SEQ ID NO: 1908575 - RNA, 19 nt, Artificial Sequence
  Description of Artificial Sequence: Synthetic oligonucleotide
  Antisense strand to SEQ ID NO: 1908574
acacuaggaaucauuuccu

SEQ ID NO: 1908576 - RNA, 19 nt, Artificial Sequence
  Description of Artificial Sequence: Synthetic oligonucleotide
  Sense strand starting at position 2577 of SEQ ID NO: 1879456
ggaaaugauuccuagugua

SEQ ID NO: 1908577 - RNA, 19 nt, Artificial Sequence
  Description of Artificial Sequence: Synthetic oligonucleotide
  Antisense strand to SEQ ID NO: 1908576
uacacuaggaaucauuucc

SEQ ID NO: 1908578 - RNA, 19 nt, Artificial Sequence
  Description of Artificial Sequence: Synthetic oligonucleotide
  Sense strand starting at position 2915 of SEQ ID NO: 1879456
agccaugauuacuuuaguu

SEQ ID NO: 1908579 - RNA, 19 nt, Artificial Sequence
  Description of Artificial Sequence: Synthetic oligonucleotide
  Antisense strand to SEQ ID NO: 1908578
aacuaaaguaaucauggcu

SEQ ID NO: 1908580 - RNA, 19 nt, Artificial Sequence
  Description of Artificial Sequence: Synthetic oligonucleotide
  Sense strand starting at position 2980 of SEQ ID NO: 1879456
agaaaugauuccguuuccu

SEQ ID NO: 1908581 - RNA, 19 nt, Artificial Sequence
  Description of Artificial Sequence: Synthetic oligonucleotide
  Antisense strand to SEQ ID NO: 1908580
aggaaacggaaucauuucu

SEQ ID NO: 1908582 - RNA, 19 nt, Artificial Sequence
  Description of Artificial Sequence: Synthetic oligonucleotide
  Sense strand starting at position 3217 of SEQ ID NO: 1879456
ugucaacuccugcauggaa

SEQ ID NO: 1908583 - RNA, 19 nt, Artificial Sequence
  Description of Artificial Sequence: Synthetic oligonucleotide
  Antisense strand to SEQ ID NO: 1908582
uuccaugcaggaguugaca

SEQ ID NO: 1908584 - RNA, 19 nt, Artificial Sequence
  Description of Artificial Sequence: Synthetic oligonucleotide
  Sense strand starting at position 3254 of SEQ ID NO: 1879456
ggaucaugguugggaagca

SEQ ID NO: 1908585 - RNA, 19 nt, Artificial Sequence
  Description of Artificial Sequence: Synthetic oligonucleotide
  Antisense strand to SEQ ID NO: 1908584
ugcuucccaaccaugaucc

SEQ ID NO: 1908586 - RNA, 19 nt, Artificial Sequence
  Description of Artificial Sequence: Synthetic oligonucleotide
  Sense strand starting at position 3269 of SEQ ID NO: 1879456
agcagcaagcccgauaaau

SEQ ID NO: 1908587 - RNA, 19 nt, Artificial Sequence
  Description of Artificial Sequence: Synthetic oligonucleotide
  Antisense strand to SEQ ID NO: 1908586
auuuaucgggcuugcugcu

SEQ ID NO: 1908588 - RNA, 19 nt, Artificial Sequence
  Description of Artificial Sequence: Synthetic oligonucleotide
  Sense strand starting at position 3278 of SEQ ID NO: 1879456
cccgauaaaucaguccuaa

SEQ ID NO: 1908589 - RNA, 19 nt, Artificial Sequence
  Description of Artificial Sequence: Synthetic oligonucleotide
  Antisense strand to SEQ ID NO: 1908588
uuaggacugauuuaucggg

SEQ ID NO: 1908590 - RNA, 19 nt, Artificial Sequence
  Description of Artificial Sequence: Synthetic oligonucleotide
  Sense strand starting at position 3299 of SEQ ID NO: 1879456
gggauuacggauuacguaa

SEQ ID NO: 1908591 - RNA, 19 nt, Artificial Sequence
  Description of Artificial Sequence: Synthetic oligonucleotide
  Antisense strand to SEQ ID NO: 1908590
uuacguaauccguaauccc

SEQ ID NO: 1908592 - RNA, 19 nt, Artificial Sequence
  Description of Artificial Sequence: Synthetic oligonucleotide
  Sense strand starting at position 3481 of SEQ ID NO: 1879456
gggcgagguguuaggguua

SEQ ID NO: 1908593 - RNA, 19 nt, Artificial Sequence
  Description of Artificial Sequence: Synthetic oligonucleotide
  Antisense strand to SEQ ID NO: 1908592
uaacccuaacaccucgccc

SEQ ID NO: 1908594 - RNA, 19 nt, Artificial Sequence
  Description of Artificial Sequence: Synthetic oligonucleotide
  Sense strand starting at position 23 of SEQ ID NO: 1879457
gagggugagguauguauga

SEQ ID NO: 1908595 - RNA, 19 nt, Artificial Sequence
  Description of Artificial Sequence: Synthetic oligonucleotide
  Antisense strand to SEQ ID NO: 1908594
ucauacauaccucacccuc

SEQ ID NO: 1908596 - RNA, 19 nt, Artificial Sequence
  Description of Artificial Sequence: Synthetic oligonucleotide
  Sense strand starting at position 25 of SEQ ID NO: 1879457
gggugagguauguaugaua

SEQ ID NO: 1908597 - RNA, 19 nt, Artificial Sequence
  Description of Artificial Sequence: Synthetic oligonucleotide
  Antisense strand to SEQ ID NO: 1908596
uaucauacauaccucaccc

SEQ ID NO: 1908598 - RNA, 19 nt, Artificial Sequence
  Description of Artificial Sequence: Synthetic oligonucleotide
  Sense strand starting at position 424 of SEQ ID NO: 1879457
uaugcaguuccauaguuag

SEQ ID NO: 1908599 - RNA, 19 nt, Artificial Sequence
  Description of Artificial Sequence: Synthetic oligonucleotide
  Antisense strand to SEQ ID NO: 1908598
cuaacuauggaacugcaua

SEQ ID NO: 1908600 - RNA, 19 nt, Artificial Sequence
  Description of Artificial Sequence: Synthetic oligonucleotide
  Sense strand starting at position 431 of SEQ ID NO: 1879457
uuccauaguuaguuacaua

SEQ ID NO: 1908601 - RNA, 19 nt, Artificial Sequence
  Description of Artificial Sequence: Synthetic oligonucleotide
  Antisense strand to SEQ ID NO: 1908600
uauguaacuaacuauggaa

SEQ ID NO: 1908602 - RNA, 19 nt, Artificial Sequence
  Description of Artificial Sequence: Synthetic oligonucleotide
  Sense strand starting at position 737 of SEQ ID NO: 1879457
aagagaugaugcuucggga

SEQ ID NO: 1908603 - RNA, 19 nt, Artificial Sequence
  Description of Artificial Sequence: Synthetic oligonucleotide
  Antisense strand to SEQ ID NO: 1908602
ucccgaagcaucaucucuu

SEQ ID NO: 1908604 - RNA, 19 nt, Artificial Sequence
  Description of Artificial Sequence: Synthetic oligonucleotide
  Sense strand starting at position 754 of SEQ ID NO: 1879457
gagcuacugggcuaugauu

SEQ ID NO: 1908605 - RNA, 19 nt, Artificial Sequence
  Description of Artificial Sequence: Synthetic oligonucleotide
  Antisense strand to SEQ ID NO: 1908604
aaucauagcccaguagcuc

SEQ ID NO: 1908606 - RNA, 19 nt, Artificial Sequence
  Description of Artificial Sequence: Synthetic oligonucleotide
  Sense strand starting at position 835 of SEQ ID NO: 1879457
aaagaaaccucgcugagau

SEQ ID NO: 1908607 - RNA, 19 nt, Artificial Sequence
  Description of Artificial Sequence: Synthetic oligonucleotide
  Antisense strand to SEQ ID NO: 1908606
aucucagcgagguuucuuu

SEQ ID NO: 1908608 - RNA, 19 nt, Artificial Sequence
  Description of Artificial Sequence: Synthetic oligonucleotide
  Sense strand starting at position 836 of SEQ ID NO: 1879457
aagaaaccucgcugagauu

SEQ ID NO: 1908609 - RNA, 19 nt, Artificial Sequence
  Description of Artificial Sequence: Synthetic oligonucleotide
  Antisense strand to SEQ ID NO: 1908608
aaucucagcgagguuucuu

SEQ ID NO: 1908610 - RNA, 19 nt, Artificial Sequence
  Description of Artificial Sequence: Synthetic oligonucleotide
  Sense strand starting at position 906 of SEQ ID NO: 1879457
aaggaauucgagggaugca

SEQ ID NO: 1908611 - RNA, 19 nt, Artificial Sequence
  Description of Artificial Sequence: Synthetic oligonucleotide
  Antisense strand to SEQ ID NO: 1908610
ugcaucccucgaauuccuu

SEQ ID NO: 1908612 - RNA, 19 nt, Artificial Sequence
  Description of Artificial Sequence: Synthetic oligonucleotide
  Sense strand starting at position 1024 of SEQ ID NO: 1879457
cguugugcggguuucuuaa

SEQ ID NO: 1908613 - RNA, 19 nt, Artificial Sequence
  Description of Artificial Sequence: Synthetic oligonucleotide
  Antisense strand to SEQ ID NO: 1908612
uuaagaaacccgcacaacg

SEQ ID NO: 1908614 - RNA, 19 nt, Artificial Sequence
  Description of Artificial Sequence: Synthetic oligonucleotide
  Sense strand starting at position 1053 of SEQ ID NO: 1879457
uggugccucggaagaguuu

SEQ ID NO: 1908615 - RNA, 19 nt, Artificial Sequence
  Description of Artificial Sequence: Synthetic oligonucleotide
  Antisense strand to SEQ ID NO: 1908614
aaacucuuccgaggcacca

SEQ ID NO: 1908616 - RNA, 19 nt, Artificial Sequence
  Description of Artificial Sequence: Synthetic oligonucleotide
  Sense strand starting at position 1060 of SEQ ID NO: 1879457
ucggaagaguuucuggaag

SEQ ID NO: 1908617 - RNA, 19 nt, Artificial Sequence
  Description of Artificial Sequence: Synthetic oligonucleotide
  Antisense strand to SEQ ID NO: 1908616
cuuccagaaacucuuccga

SEQ ID NO: 1908618 - RNA, 19 nt, Artificial Sequence
  Description of Artificial Sequence: Synthetic oligonucleotide
  Sense strand starting at position 1259 of SEQ ID NO: 1879457
ucucgaauggucucgugca

SEQ ID NO: 1908619 - RNA, 19 nt, Artificial Sequence
  Description of Artificial Sequence: Synthetic oligonucleotide
  Antisense strand to SEQ ID NO: 1908618
ugcacgagaccauucgaga

SEQ ID NO: 1908620 - RNA, 19 nt, Artificial Sequence
  Description of Artificial Sequence: Synthetic oligonucleotide
  Sense strand starting at position 2161 of SEQ ID NO: 1879457
ggugaaccuugauuccauc

SEQ ID NO: 1908621 - RNA, 19 nt, Artificial Sequence
  Description of Artificial Sequence: Synthetic oligonucleotide
  Antisense strand to SEQ ID NO: 1908620
gauggaaucaagguucacc

SEQ ID NO: 1908622 - RNA, 19 nt, Artificial Sequence
  Description of Artificial Sequence: Synthetic oligonucleotide
  Sense strand starting at position 2458 of SEQ ID NO: 1879457
ggagcuguaccucaauuac

SEQ ID NO: 1908623 - RNA, 19 nt, Artificial Sequence
  Description of Artificial Sequence: Synthetic oligonucleotide
  Antisense strand to SEQ ID NO: 1908622
guaauugagguacagcucc

SEQ ID NO: 1908624 - RNA, 19 nt, Artificial Sequence
  Description of Artificial Sequence: Synthetic oligonucleotide
  Sense strand starting at position 2709 of SEQ ID NO: 1879457
auaugugaauaugcuacau

SEQ ID NO: 1908625 - RNA, 19 nt, Artificial Sequence
  Description of Artificial Sequence: Synthetic oligonucleotide
  Antisense strand to SEQ ID NO: 1908624
auguagcauauucacauau

SEQ ID NO: 1908626 - RNA, 19 nt, Artificial Sequence
  Description of Artificial Sequence: Synthetic oligonucleotide
  Sense strand starting at position 2794 of SEQ ID NO: 1879457
ugacaaaguauuggagguu

SEQ ID NO: 1908627 - RNA, 19 nt, Artificial Sequence
  Description of Artificial Sequence: Synthetic oligonucleotide
  Antisense strand to SEQ ID NO: 1908626
aaccuccaauacuuuguca

SEQ ID NO: 1908628 - RNA, 19 nt, Artificial Sequence
  Description of Artificial Sequence: Synthetic oligonucleotide
  Sense strand starting at position 2918 of SEQ ID NO: 1879457
guguaaauugaauguuaag

SEQ ID NO: 1908629 - RNA, 19 nt, Artificial Sequence
  Description of Artificial Sequence: Synthetic oligonucleotide
  Antisense strand to SEQ ID NO: 1908628
cuuaacauucaauuuacac

SEQ ID NO: 1908630 - RNA, 19 nt, Artificial Sequence
  Description of Artificial Sequence: Synthetic oligonucleotide
  Sense strand starting at position 2927 of SEQ ID NO: 1879457
gaauguuaagaaugucugu

SEQ ID NO: 1908631 - RNA, 19 nt, Artificial Sequence
  Description of Artificial Sequence: Synthetic oligonucleotide
  Antisense strand to SEQ ID NO: 1908630
acagacauucuuaacauuc

SEQ ID NO: 1908632 - RNA, 19 nt, Artificial Sequence
  Description of Artificial Sequence: Synthetic oligonucleotide
  Sense strand starting at position 2932 of SEQ ID NO: 1879457
uuaagaaugucuguugaau

SEQ ID NO: 1908633 - RNA, 19 nt, Artificial Sequence
  Description of Artificial Sequence: Synthetic oligonucleotide
  Antisense strand to SEQ ID NO: 1908632
auucaacagacauucuuaa

SEQ ID NO: 1908634 - RNA, 19 nt, Artificial Sequence
  Description of Artificial Sequence: Synthetic oligonucleotide
  Sense strand starting at position 2943 of SEQ ID NO: 1879457
uguugaauccauuaaguuu

SEQ ID NO: 1908635 - RNA, 19 nt, Artificial Sequence
  Description of Artificial Sequence: Synthetic oligonucleotide
  Antisense strand to SEQ ID NO: 1908634
aaacuuaauggauucaaca

SEQ ID NO: 1908636 - RNA, 19 nt, Artificial Sequence
  Description of Artificial Sequence: Synthetic oligonucleotide
  Sense strand starting at position 3130 of SEQ ID NO: 1879457
cugucauaaugguuugaaa

SEQ ID NO: 1908637 - RNA, 19 nt, Artificial Sequence
  Description of Artificial Sequence: Synthetic oligonucleotide
  Antisense strand to SEQ ID NO: 1908636
uuucaaaccauuaugacag

SEQ ID NO: 1908638 - RNA, 19 nt, Artificial Sequence
  Description of Artificial Sequence: Synthetic oligonucleotide
  Sense strand starting at position 3132 of SEQ ID NO: 1879457
gucauaaugguuugaaaug

SEQ ID NO: 1908639 - RNA, 19 nt, Artificial Sequence
  Description of Artificial Sequence: Synthetic oligonucleotide
  Antisense strand to SEQ ID NO: 1908638
cauuucaaaccauuaugac

SEQ ID NO: 1908640 - RNA, 19 nt, Artificial Sequence
  Description of Artificial Sequence: Synthetic oligonucleotide
  Sense strand starting at position 3359 of SEQ ID NO: 1879457
ggguuucccauguacaguu

SEQ ID NO: 1908641 - RNA, 19 nt, Artificial Sequence
  Description of Artificial Sequence: Synthetic oligonucleotide
  Antisense strand to SEQ ID NO: 1908640
aacuguacaugggaaaccc

SEQ ID NO: 1908642 - RNA, 19 nt, Artificial Sequence
  Description of Artificial Sequence: Synthetic oligonucleotide
  Sense strand starting at position 3462 of SEQ ID NO: 1879457
uggucauagcuauaaucaa

SEQ ID NO: 1908643 - RNA, 19 nt, Artificial Sequence
  Description of Artificial Sequence: Synthetic oligonucleotide
  Antisense strand to SEQ ID NO: 1908642
uugauuauagcuaugacca

SEQ ID NO: 1908644 - RNA, 19 nt, Artificial Sequence
  Description of Artificial Sequence: Synthetic oligonucleotide
  Sense strand starting at position 3566 of SEQ ID NO: 1879457
guggcaggugcuaguuaga

SEQ ID NO: 1908645 - RNA, 19 nt, Artificial Sequence
  Description of Artificial Sequence: Synthetic oligonucleotide
  Antisense strand to SEQ ID NO: 1908644
ucuaacuagcaccugccac

SEQ ID NO: 1908646 - RNA, 19 nt, Artificial Sequence
  Description of Artificial Sequence: Synthetic oligonucleotide
  Sense strand starting at position 3573 of SEQ ID NO: 1879457
gugcuaguuagagacgaga

SEQ ID NO: 1908647 - RNA, 19 nt, Artificial Sequence
  Description of Artificial Sequence: Synthetic oligonucleotide
  Antisense strand to SEQ ID NO: 1908646
ucucgucucuaacuagcac

SEQ ID NO: 1908648 - RNA, 19 nt, Artificial Sequence
  Description of Artificial Sequence: Synthetic oligonucleotide
  Sense strand starting at position 3600 of SEQ ID NO: 1879457
acccaaugauuuggaugau

SEQ ID NO: 1908649 - RNA, 19 nt, Artificial Sequence
  Description of Artificial Sequence: Synthetic oligonucleotide
  Antisense strand to SEQ ID NO: 1908648
aucauccaaaucauugggu

SEQ ID NO: 1908650 - RNA, 19 nt, Artificial Sequence
  Description of Artificial Sequence: Synthetic oligonucleotide
  Sense strand starting at position 3601 of SEQ ID NO: 1879457
cccaaugauuuggaugauu

SEQ ID NO: 1908651 - RNA, 19 nt, Artificial Sequence
  Description of Artificial Sequence: Synthetic oligonucleotide
  Antisense strand to SEQ ID NO: 1908650
aaucauccaaaucauuggg

SEQ ID NO: 1908652 - RNA, 19 nt, Artificial Sequence
  Description of Artificial Sequence: Synthetic oligonucleotide
  Sense strand starting at position 3609 of SEQ ID NO: 1879457
uuuggaugauucuccacuu

SEQ ID NO: 1908653 - RNA, 19 nt, Artificial Sequence
  Description of Artificial Sequence: Synthetic oligonucleotide
  Antisense strand to SEQ ID NO: 1908652
aaguggagaaucauccaaa

SEQ ID NO: 1908654 - RNA, 19 nt, Artificial Sequence
  Description of Artificial Sequence: Synthetic oligonucleotide
  Sense strand starting at position 3610 of SEQ ID NO: 1879457
uuggaugauucuccacuua

SEQ ID NO: 1908655 - RNA, 19 nt, Artificial Sequence
  Description of Artificial Sequence: Synthetic oligonucleotide
  Antisense strand to SEQ ID NO: 1908654
uaaguggagaaucauccaa

SEQ ID NO: 1908656 - RNA, 19 nt, Artificial Sequence
  Description of Artificial Sequence: Synthetic oligonucleotide
  Sense strand starting at position 3670 of SEQ ID NO: 1879457
uuuagugccuacucuauuu

SEQ ID NO: 1908657 - RNA, 19 nt, Artificial Sequence
  Description of Artificial Sequence: Synthetic oligonucleotide
  Antisense strand to SEQ ID NO: 1908656
aaauagaguaggcacuaaa

SEQ ID NO: 1908658 - RNA, 19 nt, Artificial Sequence
  Description of Artificial Sequence: Synthetic oligonucleotide
  Sense strand starting at position 3688 of SEQ ID NO: 1879457
uuggguaccgaauagucau

SEQ ID NO: 1908659 - RNA, 19 nt, Artificial Sequence
  Description of Artificial Sequence: Synthetic oligonucleotide
  Antisense strand to SEQ ID NO: 1908658
augacuauucgguacccaa

SEQ ID NO: 1908660 - RNA, 19 nt, Artificial Sequence
  Description of Artificial Sequence: Synthetic oligonucleotide
  Sense strand starting at position 3821 of SEQ ID NO: 1879457
auggcauuuguaugccuau

SEQ ID NO: 1908661 - RNA, 19 nt, Artificial Sequence
  Description of Artificial Sequence: Synthetic oligonucleotide
  Antisense strand to SEQ ID NO: 1908660
auaggcauacaaaugccau

SEQ ID NO: 1908662 - RNA, 19 nt, Artificial Sequence
  Description of Artificial Sequence: Synthetic oligonucleotide
  Sense strand starting at position 3822 of SEQ ID NO: 1879457
uggcauuuguaugccuaua

SEQ ID NO: 1908663 - RNA, 19 nt, Artificial Sequence
  Description of Artificial Sequence: Synthetic oligonucleotide
  Antisense strand to SEQ ID NO: 1908662
uauaggcauacaaaugcca

SEQ ID NO: 1908664 - RNA, 19 nt, Artificial Sequence
  Description of Artificial Sequence: Synthetic oligonucleotide
  Sense strand starting at position 3879 of SEQ ID NO: 1879457
caaagagcuuguucucuga

SEQ ID NO: 1908665 - RNA, 19 nt, Artificial Sequence
  Description of Artificial Sequence: Synthetic oligonucleotide
  Antisense strand to SEQ ID NO: 1908664
ucagagaacaagcucuuug

SEQ ID NO: 1908666 - RNA, 19 nt, Artificial Sequence
  Description of Artificial Sequence: Synthetic oligonucleotide
  Sense strand starting at position 3881 of SEQ ID NO: 1879457
aagagcuuguucucugaaa

SEQ ID NO: 1908667 - RNA, 19 nt, Artificial Sequence
  Description of Artificial Sequence: Synthetic oligonucleotide
  Antisense strand to SEQ ID NO: 1908666
uuucagagaacaagcucuu

SEQ ID NO: 1908668 - RNA, 19 nt, Artificial Sequence
  Description of Artificial Sequence: Synthetic oligonucleotide
  Sense strand starting at position 3882 of SEQ ID NO: 1879457
agagcuuguucucugaaag

SEQ ID NO: 1908669 - RNA, 19 nt, Artificial Sequence
  Description of Artificial Sequence: Synthetic oligonucleotide
  Antisense strand to SEQ ID NO: 1908668
cuuucagagaacaagcucu

SEQ ID NO: 1908670 - RNA, 19 nt, Artificial Sequence
  Description of Artificial Sequence: Synthetic oligonucleotide
  Sense strand starting at position 3883 of SEQ ID NO: 1879457
gagcuuguucucugaaaga

SEQ ID NO: 1908671 - RNA, 19 nt, Artificial Sequence
  Description of Artificial Sequence: Synthetic oligonucleotide
  Antisense strand to SEQ ID NO: 1908670
ucuuucagagaacaagcuc

SEQ ID NO: 1908672 - RNA, 19 nt, Artificial Sequence
  Description of Artificial Sequence: Synthetic oligonucleotide
  Sense strand starting at position 3919 of SEQ ID NO: 1879457
ucaggcaggcauugagaau

SEQ ID NO: 1908673 - RNA, 19 nt, Artificial Sequence
  Description of Artificial Sequence: Synthetic oligonucleotide
  Antisense strand to SEQ ID NO: 1908672
auucucaaugccugccuga

SEQ ID NO: 1908674 - RNA, 19 nt, Artificial Sequence
  Description of Artificial Sequence: Synthetic oligonucleotide
  Sense strand starting at position 39 of SEQ ID NO: 1879458
cggcaucgaugacuccaua

SEQ ID NO: 1908675 - RNA, 19 nt, Artificial Sequence
  Description of Artificial Sequence: Synthetic oligonucleotide
  Antisense strand to SEQ ID NO: 1908674
uauggagucaucgaugccg

SEQ ID NO: 1908676 - RNA, 19 nt, Artificial Sequence
  Description of Artificial Sequence: Synthetic oligonucleotide
  Sense strand starting at position 270 of SEQ ID NO: 1879458
ggccuucgcaaagggaauu

SEQ ID NO: 1908677 - RNA, 19 nt, Artificial Sequence
  Description of Artificial Sequence: Synthetic oligonucleotide
  Antisense strand to SEQ ID NO: 1908676
aauucccuuugcgaaggcc

SEQ ID NO: 1908678 - RNA, 19 nt, Artificial Sequence
  Description of Artificial Sequence: Synthetic oligonucleotide
  Sense strand starting at position 360 of SEQ ID NO: 1879458
ugcagaugugcggugguua

SEQ ID NO: 1908679 - RNA, 19 nt, Artificial Sequence
  Description of Artificial Sequence: Synthetic oligonucleotide
  Antisense strand to SEQ ID NO: 1908678
uaaccaccgcacaucugca

SEQ ID NO: 1908680 - RNA, 19 nt, Artificial Sequence
  Description of Artificial Sequence: Synthetic oligonucleotide
  Sense strand starting at position 392 of SEQ ID NO: 1879458
gcgugucaucccuaucaag

SEQ ID NO: 1908681 - RNA, 19 nt, Artificial Sequence
  Description of Artificial Sequence: Synthetic oligonucleotide
  Antisense strand to SEQ ID NO: 1908680
cuugauagggaugacacgc

SEQ ID NO: 1908682 - RNA, 19 nt, Artificial Sequence
  Description of Artificial Sequence: Synthetic oligonucleotide
  Sense strand starting at position 401 of SEQ ID NO: 1879458
cccuaucaagugugagaaa

SEQ ID NO: 1908683 - RNA, 19 nt, Artificial Sequence
  Description of Artificial Sequence: Synthetic oligonucleotide
  Antisense strand to SEQ ID NO: 1908682
uuucucacacuugauaggg

SEQ ID NO: 1908684 - RNA, 19 nt, Artificial Sequence
  Description of Artificial Sequence: Synthetic oligonucleotide
  Sense strand starting at position 438 of SEQ ID NO: 1879458
uaacuaguguuccugagga

SEQ ID NO: 1908685 - RNA, 19 nt, Artificial Sequence
  Description of Artificial Sequence: Synthetic oligonucleotide
  Antisense strand to SEQ ID NO: 1908684
uccucaggaacacuaguua

SEQ ID NO: 1908686 - RNA, 19 nt, Artificial Sequence
  Description of Artificial Sequence: Synthetic oligonucleotide
  Sense strand starting at position 476 of SEQ ID NO: 1879458
gcagaugcucaagaccuaa

SEQ ID NO: 1908687 - RNA, 19 nt, Artificial Sequence
  Description of Artificial Sequence: Synthetic oligonucleotide
  Antisense strand to SEQ ID NO: 1908686
uuaggucuugagcaucugc

SEQ ID NO: 1908688 - RNA, 19 nt, Artificial Sequence
  Description of Artificial Sequence: Synthetic oligonucleotide
  Sense strand starting at position 501 of SEQ ID NO: 1879458
gugggagcugcacauagau

SEQ ID NO: 1908689 - RNA, 19 nt, Artificial Sequence
  Description of Artificial Sequence: Synthetic oligonucleotide
  Antisense strand to SEQ ID NO: 1908688
aucuaugugcagcucccac

SEQ ID NO: 1908690 - RNA, 19 nt, Artificial Sequence
  Description of Artificial Sequence: Synthetic oligonucleotide
  Sense strand starting at position 507 of SEQ ID NO: 1879458
gcugcacauagauggauau

SEQ ID NO: 1908691 - RNA, 19 nt, Artificial Sequence
  Description of Artificial Sequence: Synthetic oligonucleotide
  Antisense strand to SEQ ID NO: 1908690
auauccaucuaugugcagc

SEQ ID NO: 1908692 - RNA, 19 nt, Artificial Sequence
  Description of Artificial Sequence: Synthetic oligonucleotide
  Sense strand starting at position 508 of SEQ ID NO: 1879458
cugcacauagauggauaua

SEQ ID NO: 1908693 - RNA, 19 nt, Artificial Sequence
  Description of Artificial Sequence: Synthetic oligonucleotide
  Antisense strand to SEQ ID NO: 1908692
uauauccaucuaugugcag

SEQ ID NO: 1908694 - RNA, 19 nt, Artificial Sequence
  Description of Artificial Sequence: Synthetic oligonucleotide
  Sense strand starting at position 741 of SEQ ID NO: 1879458
ugggcuugcaauugugauu

SEQ ID NO: 1908695 - RNA, 19 nt, Artificial Sequence
  Description of Artificial Sequence: Synthetic oligonucleotide
  Antisense strand to SEQ ID NO: 1908694
aaucacaauugcaagccca

SEQ ID NO: 1908696 - RNA, 19 nt, Artificial Sequence
  Description of Artificial Sequence: Synthetic oligonucleotide
  Sense strand starting at position 748 of SEQ ID NO: 1879458
gcaauugugauuggcugga

SEQ ID NO: 1908697 - RNA, 19 nt, Artificial Sequence
  Description of Artificial Sequence: Synthetic oligonucleotide
  Antisense strand to SEQ ID NO: 1908696
uccagccaaucacaauugc

SEQ ID NO: 1908698 - RNA, 19 nt, Artificial Sequence
  Description of Artificial Sequence: Synthetic oligonucleotide
  Sense strand starting at position 750 of SEQ ID NO: 1879458
aauugugauuggcuggaau

SEQ ID NO: 1908699 - RNA, 19 nt, Artificial Sequence
  Description of Artificial Sequence: Synthetic oligonucleotide
  Antisense strand to SEQ ID NO: 1908698
auuccagccaaucacaauu

SEQ ID NO: 1908700 - RNA, 19 nt, Artificial Sequence
  Description of Artificial Sequence: Synthetic oligonucleotide
  Sense strand starting at position 844 of SEQ ID NO: 1879458
ggcuguggccuccggagaa

SEQ ID NO: 1908701 - RNA, 19 nt, Artificial Sequence
  Description of Artificial Sequence: Synthetic oligonucleotide
  Antisense strand to SEQ ID NO: 1908700
uucuccggaggccacagcc

SEQ ID NO: 1908702 - RNA, 19 nt, Artificial Sequence
  Description of Artificial Sequence: Synthetic oligonucleotide
  Sense strand starting at position 1174 of SEQ ID NO: 1879458
gucagugacuuguuccacu

SEQ ID NO: 1908703 - RNA, 19 nt, Artificial Sequence
  Description of Artificial Sequence: Synthetic oligonucleotide
  Antisense strand to SEQ ID NO: 1908702
aguggaacaagucacugac

SEQ ID NO: 1908704 - RNA, 19 nt, Artificial Sequence
  Description of Artificial Sequence: Synthetic oligonucleotide
  Sense strand starting at position 2441 of SEQ ID NO: 1879458
gcugcugucuguucagaag

SEQ ID NO: 1908705 - RNA, 19 nt, Artificial Sequence
  Description of Artificial Sequence: Synthetic oligonucleotide
  Antisense strand to SEQ ID NO: 1908704
cuucugaacagacagcagc

SEQ ID NO: 1908706 - RNA, 19 nt, Artificial Sequence
  Description of Artificial Sequence: Synthetic oligonucleotide
  Sense strand starting at position 2484 of SEQ ID NO: 1879458
ggaaucaaucagugcacuu

SEQ ID NO: 1908707 - RNA, 19 nt, Artificial Sequence
  Description of Artificial Sequence: Synthetic oligonucleotide
  Antisense strand to SEQ ID NO: 1908706
aagugcacugauugauucc

SEQ ID NO: 1908708 - RNA, 19 nt, Artificial Sequence
  Description of Artificial Sequence: Synthetic oligonucleotide
  Sense strand starting at position 2856 of SEQ ID NO: 1879458
acgaggaggucugagaagu

SEQ ID NO: 1908709 - RNA, 19 nt, Artificial Sequence
  Description of Artificial Sequence: Synthetic oligonucleotide
  Antisense strand to SEQ ID NO: 1908708
acuucucagaccuccucgu

SEQ ID NO: 1908710 - RNA, 19 nt, Artificial Sequence
  Description of Artificial Sequence: Synthetic oligonucleotide
  Sense strand starting at position 2943 of SEQ ID NO: 1879458
guaugaaacaugcaucgaa

SEQ ID NO: 1908711 - RNA, 19 nt, Artificial Sequence
  Description of Artificial Sequence: Synthetic oligonucleotide
  Antisense strand to SEQ ID NO: 1908710
uucgaugcauguuucauac

SEQ ID NO: 1908712 - RNA, 19 nt, Artificial Sequence
  Description of Artificial Sequence: Synthetic oligonucleotide
  Sense strand starting at position 2946 of SEQ ID NO: 1879458
ugaaacaugcaucgaaauu

SEQ ID NO: 1908713 - RNA, 19 nt, Artificial Sequence
  Description of Artificial Sequence: Synthetic oligonucleotide
  Antisense strand to SEQ ID NO: 1908712
aauuucgaugcauguuuca

SEQ ID NO: 1908714 - RNA, 19 nt, Artificial Sequence
  Description of Artificial Sequence: Synthetic oligonucleotide
  Sense strand starting at position 2981 of SEQ ID NO: 1879458
caagcucauucuguggaaa

SEQ ID NO: 1908715 - RNA, 19 nt, Artificial Sequence
  Description of Artificial Sequence: Synthetic oligonucleotide
  Antisense strand to SEQ ID NO: 1908714
uuuccacagaaugagcuug

SEQ ID NO: 1908716 - RNA, 19 nt, Artificial Sequence
  Description of Artificial Sequence: Synthetic oligonucleotide
  Sense strand starting at position 2982 of SEQ ID NO: 1879458
aagcucauucuguggaaau

SEQ ID NO: 1908717 - RNA, 19 nt, Artificial Sequence
  Description of Artificial Sequence: Synthetic oligonucleotide
  Antisense strand to SEQ ID NO: 1908716
auuuccacagaaugagcuu

SEQ ID NO: 1908718 - RNA, 19 nt, Artificial Sequence
  Description of Artificial Sequence: Synthetic oligonucleotide
  Sense strand starting at position 2995 of SEQ ID NO: 1879458
ggaaauuccggcuggccau

SEQ ID NO: 1908719 - RNA, 19 nt, Artificial Sequence
  Description of Artificial Sequence: Synthetic oligonucleotide
  Antisense strand to SEQ ID NO: 1908718
auggccagccggaauuucc

SEQ ID NO: 1908720 - RNA, 19 nt, Artificial Sequence
  Description of Artificial Sequence: Synthetic oligonucleotide
  Sense strand starting at position 2996 of SEQ ID NO: 1879458
gaaauuccggcuggccaua

SEQ ID NO: 1908721 - RNA, 19 nt, Artificial Sequence
  Description of Artificial Sequence: Synthetic oligonucleotide
  Antisense strand to SEQ ID NO: 1908720
uauggccagccggaauuuc

SEQ ID NO: 1908722 - RNA, 19 nt, Artificial Sequence
  Description of Artificial Sequence: Synthetic oligonucleotide
  Sense strand starting at position 3325 of SEQ ID NO: 1879458
agucauuggucuuuggugu

SEQ ID NO: 1908723 - RNA, 19 nt, Artificial Sequence
  Description of Artificial Sequence: Synthetic oligonucleotide
  Antisense strand to SEQ ID NO: 1908722
acaccaaagaccaaugacu

SEQ ID NO: 1908724 - RNA, 19 nt, Artificial Sequence
  Description of Artificial Sequence: Synthetic oligonucleotide
  Sense strand starting at position 3331 of SEQ ID NO: 1879458
uggucuuuggugugagguu

SEQ ID NO: 1908725 - RNA, 19 nt, Artificial Sequence
  Description of Artificial Sequence: Synthetic oligonucleotide
  Antisense strand to SEQ ID NO: 1908724
aaccucacaccaaagacca

SEQ ID NO: 1908726 - RNA, 19 nt, Artificial Sequence
  Description of Artificial Sequence: Synthetic oligonucleotide
  Sense strand starting at position 3441 of SEQ ID NO: 1879458
caguuugucacuuggaggu

SEQ ID NO: 1908727 - RNA, 19 nt, Artificial Sequence
  Description of Artificial Sequence: Synthetic oligonucleotide
  Antisense strand to SEQ ID NO: 1908726
accuccaagugacaaacug

SEQ ID NO: 1908728 - RNA, 19 nt, Artificial Sequence
  Description of Artificial Sequence: Synthetic oligonucleotide
  Sense strand starting at position 3445 of SEQ ID NO: 1879458
uugucacuuggaggugauu

SEQ ID NO: 1908729 - RNA, 19 nt, Artificial Sequence
  Description of Artificial Sequence: Synthetic oligonucleotide
  Antisense strand to SEQ ID NO: 1908728
aaucaccuccaagugacaa

SEQ ID NO: 1908730 - RNA, 19 nt, Artificial Sequence
  Description of Artificial Sequence: Synthetic oligonucleotide
  Sense strand starting at position 3565 of SEQ ID NO: 1879458
aaguauauguguccuggaa

SEQ ID NO: 1908731 - RNA, 19 nt, Artificial Sequence
  Description of Artificial Sequence: Synthetic oligonucleotide
  Antisense strand to SEQ ID NO: 1908730
uuccaggacacauauacuu

SEQ ID NO: 1908732 - RNA, 19 nt, Artificial Sequence
  Description of Artificial Sequence: Synthetic oligonucleotide
  Sense strand starting at position 3588 of SEQ ID NO: 1879458
ugugcaggcaacugaaaua

SEQ ID NO: 1908733 - RNA, 19 nt, Artificial Sequence
  Description of Artificial Sequence: Synthetic oligonucleotide
  Antisense strand to SEQ ID NO: 1908732
uauuucaguugccugcaca

SEQ ID NO: 1908734 - RNA, 19 nt, Artificial Sequence
  Description of Artificial Sequence: Synthetic oligonucleotide
  Sense strand starting at position 3601 of SEQ ID NO: 1879458
gaaauagugcuaugggcau

SEQ ID NO: 1908735 - RNA, 19 nt, Artificial Sequence
  Description of Artificial Sequence: Synthetic oligonucleotide
  Antisense strand to SEQ ID NO: 1908734
augcccauagcacuauuuc

SEQ ID NO: 1908736 - RNA, 19 nt, Artificial Sequence
  Description of Artificial Sequence: Synthetic oligonucleotide
  Sense strand starting at position 3624 of SEQ ID NO: 1879458
guuuaugauguaugcugua

SEQ ID NO: 1908737 - RNA, 19 nt, Artificial Sequence
  Description of Artificial Sequence: Synthetic oligonucleotide
  Antisense strand to SEQ ID NO: 1908736
uacagcauacaucauaaac

SEQ ID NO: 1908738 - RNA, 19 nt, Artificial Sequence
  Description of Artificial Sequence: Synthetic oligonucleotide
  Sense strand starting at position 3629 of SEQ ID NO: 1879458
ugauguaugcuguagcauc

SEQ ID NO: 1908739 - RNA, 19 nt, Artificial Sequence
  Description of Artificial Sequence: Synthetic oligonucleotide
  Antisense strand to SEQ ID NO: 1908738
gaugcuacagcauacauca

SEQ ID NO: 1908740 - RNA, 19 nt, Artificial Sequence
  Description of Artificial Sequence: Synthetic oligonucleotide
  Sense strand starting at position 3670 of SEQ ID NO: 1879458
cgagacuuacgguagauag

SEQ ID NO: 1908741 - RNA, 19 nt, Artificial Sequence
  Description of Artificial Sequence: Synthetic oligonucleotide
  Antisense strand to SEQ ID NO: 1908740
cuaucuaccguaagucucg

SEQ ID NO: 1908742 - RNA, 19 nt, Artificial Sequence
  Description of Artificial Sequence: Synthetic oligonucleotide
  Sense strand starting at position 3681 of SEQ ID NO: 1879458
guagauagguguuucuaca

SEQ ID NO: 1908743 - RNA, 19 nt, Artificial Sequence
  Description of Artificial Sequence: Synthetic oligonucleotide
  Antisense strand to SEQ ID NO: 1908742
uguagaaacaccuaucuac

SEQ ID NO: 1908744 - RNA, 19 nt, Artificial Sequence
  Description of Artificial Sequence: Synthetic oligonucleotide
  Sense strand starting at position 3688 of SEQ ID NO: 1879458
gguguuucuacauagagua

SEQ ID NO: 1908745 - RNA, 19 nt, Artificial Sequence
  Description of Artificial Sequence: Synthetic oligonucleotide
  Antisense strand to SEQ ID NO: 1908744
uacucuauguagaaacacc

SEQ ID NO: 1908746 - RNA, 19 nt, Artificial Sequence
  Description of Artificial Sequence: Synthetic oligonucleotide
  Sense strand starting at position 3737 of SEQ ID NO: 1879458
ccagacucaugcuuaguua

SEQ ID NO: 1908747 - RNA, 19 nt, Artificial Sequence
  Description of Artificial Sequence: Synthetic oligonucleotide
  Antisense strand to SEQ ID NO: 1908746
uaacuaagcaugagucugg

SEQ ID NO: 1908748 - RNA, 19 nt, Artificial Sequence
  Description of Artificial Sequence: Synthetic oligonucleotide
  Sense strand starting at position 3746 of SEQ ID NO: 1879458
ugcuuaguuaggcaucagu

SEQ ID NO: 1908749 - RNA, 19 nt, Artificial Sequence
  Description of Artificial Sequence: Synthetic oligonucleotide
  Antisense strand to SEQ ID NO: 1908748
acugaugccuaacuaagca

SEQ ID NO: 1908750 - RNA, 19 nt, Artificial Sequence
  Description of Artificial Sequence: Synthetic oligonucleotide
  Sense strand starting at position 3759 of SEQ ID NO: 1879458
aucaguguggcagauuaga

SEQ ID NO: 1908751 - RNA, 19 nt, Artificial Sequence
  Description of Artificial Sequence: Synthetic oligonucleotide
  Antisense strand to SEQ ID NO: 1908750
ucuaaucugccacacugau

SEQ ID NO: 1908752 - RNA, 19 nt, Artificial Sequence
  Description of Artificial Sequence: Synthetic oligonucleotide
  Sense strand starting at position 3772 of SEQ ID NO: 1879458
auuagaaucuaagaggagu

SEQ ID NO: 1908753 - RNA, 19 nt, Artificial Sequence
  Description of Artificial Sequence: Synthetic oligonucleotide
  Antisense strand to SEQ ID NO: 1908752
acuccucuuagauucuaau

SEQ ID NO: 1908754 - RNA, 19 nt, Artificial Sequence
  Description of Artificial Sequence: Synthetic oligonucleotide
  Sense strand starting at position 196 of SEQ ID NO: 1879459
ugacuucuagggugcauaa

SEQ ID NO: 1908755 - RNA, 19 nt, Artificial Sequence
  Description of Artificial Sequence: Synthetic oligonucleotide
  Antisense strand to SEQ ID NO: 1908754
uuaugcacccuagaaguca

SEQ ID NO: 1908756 - RNA, 19 nt, Artificial Sequence
  Description of Artificial Sequence: Synthetic oligonucleotide
  Sense strand starting at position 450 of SEQ ID NO: 1879459
gcuucugcucuugugagca

SEQ ID NO: 1908757 - RNA, 19 nt, Artificial Sequence
  Description of Artificial Sequence: Synthetic oligonucleotide
  Antisense strand to SEQ ID NO: 1908756
ugcucacaagagcagaagc

SEQ ID NO: 1908758 - RNA, 19 nt, Artificial Sequence
  Description of Artificial Sequence: Synthetic oligonucleotide
  Sense strand starting at position 660 of SEQ ID NO: 1879459
agagaaauaugauuggugu

SEQ ID NO: 1908759 - RNA, 19 nt, Artificial Sequence
  Description of Artificial Sequence: Synthetic oligonucleotide
  Antisense strand to SEQ ID NO: 1908758
acaccaaucauauuucucu

SEQ ID NO: 1908760 - RNA, 19 nt, Artificial Sequence
  Description of Artificial Sequence: Synthetic oligonucleotide
  Sense strand starting at position 661 of SEQ ID NO: 1879459
gagaaauaugauuggugua

SEQ ID NO: 1908761 - RNA, 19 nt, Artificial Sequence
  Description of Artificial Sequence: Synthetic oligonucleotide
  Antisense strand to SEQ ID NO: 1908760
uacaccaaucauauuucuc

SEQ ID NO: 1908762 - RNA, 19 nt, Artificial Sequence
  Description of Artificial Sequence: Synthetic oligonucleotide
  Sense strand starting at position 662 of SEQ ID NO: 1879459
agaaauaugauugguguag

SEQ ID NO: 1908763 - RNA, 19 nt, Artificial Sequence
  Description of Artificial Sequence: Synthetic oligonucleotide
  Antisense strand to SEQ ID NO: 1908762
cuacaccaaucauauuucu

SEQ ID NO: 1908764 - RNA, 19 nt, Artificial Sequence
  Description of Artificial Sequence: Synthetic oligonucleotide
  Sense strand starting at position 666 of SEQ ID NO: 1879459
auaugauugguguagcuca

SEQ ID NO: 1908765 - RNA, 19 nt, Artificial Sequence
  Description of Artificial Sequence: Synthetic oligonucleotide
  Antisense strand to SEQ ID NO: 1908764
ugagcuacaccaaucauau

SEQ ID NO: 1908766 - RNA, 19 nt, Artificial Sequence
  Description of Artificial Sequence: Synthetic oligonucleotide
  Sense strand starting at position 834 of SEQ ID NO: 1879459
guuaguaaggguuaacauu

SEQ ID NO: 1908767 - RNA, 19 nt, Artificial Sequence
  Description of Artificial Sequence: Synthetic oligonucleotide
  Antisense strand to SEQ ID NO: 1908766
aauguuaacccuuacuaac

SEQ ID NO: 1908768 - RNA, 19 nt, Artificial Sequence
  Description of Artificial Sequence: Synthetic oligonucleotide
  Sense strand starting at position 889 of SEQ ID NO: 1879459
acuagccauguguagaauu

SEQ ID NO: 1908769 - RNA, 19 nt, Artificial Sequence
  Description of Artificial Sequence: Synthetic oligonucleotide
  Antisense strand to SEQ ID NO: 1908768
aauucuacacauggcuagu

SEQ ID NO: 1908770 - RNA, 19 nt, Artificial Sequence
  Description of Artificial Sequence: Synthetic oligonucleotide
  Sense strand starting at position 941 of SEQ ID NO: 1879459
ucaguucuaguuuacacua

SEQ ID NO: 1908771 - RNA, 19 nt, Artificial Sequence
  Description of Artificial Sequence: Synthetic oligonucleotide
  Antisense strand to SEQ ID NO: 1908770
uaguguaaacuagaacuga

SEQ ID NO: 1908772 - RNA, 19 nt, Artificial Sequence
  Description of Artificial Sequence: Synthetic oligonucleotide
  Sense strand starting at position 1012 of SEQ ID NO: 1879459
gaacguucccaucacugga

SEQ ID NO: 1908773 - RNA, 19 nt, Artificial Sequence
  Description of Artificial Sequence: Synthetic oligonucleotide
  Antisense strand to SEQ ID NO: 1908772
uccagugaugggaacguuc

SEQ ID NO: 1908774 - RNA, 19 nt, Artificial Sequence
  Description of Artificial Sequence: Synthetic oligonucleotide
  Sense strand starting at position 1015 of SEQ ID NO: 1879459
cguucccaucacuggagaa

SEQ ID NO: 1908775 - RNA, 19 nt, Artificial Sequence
  Description of Artificial Sequence: Synthetic oligonucleotide
  Antisense strand to SEQ ID NO: 1908774
uucuccagugaugggaacg

SEQ ID NO: 1908776 - RNA, 19 nt, Artificial Sequence
  Description of Artificial Sequence: Synthetic oligonucleotide
  Sense strand starting at position 1031 of SEQ ID NO: 1879459
gaaaguucugguggacauc

SEQ ID NO: 1908777 - RNA, 19 nt, Artificial Sequence
  Description of Artificial Sequence: Synthetic oligonucleotide
  Antisense strand to SEQ ID NO: 1908776
gauguccaccagaacuuuc

SEQ ID NO: 1908778 - RNA, 19 nt, Artificial Sequence
  Description of Artificial Sequence: Synthetic oligonucleotide
  Sense strand starting at position 1098 of SEQ ID NO: 1879459
agaugaugauaacagagaa

SEQ ID NO: 1908779 - RNA, 19 nt, Artificial Sequence
  Description of Artificial Sequence: Synthetic oligonucleotide
  Antisense strand to SEQ ID NO: 1908778
uucucuguuaucaucaucu

SEQ ID NO: 1908780 - RNA, 19 nt, Artificial Sequence
  Description of Artificial Sequence: Synthetic oligonucleotide
  Sense strand starting at position 1160 of SEQ ID NO: 1879459
uucuuagaguccuuggaga

SEQ ID NO: 1908781 - RNA, 19 nt, Artificial Sequence
  Description of Artificial Sequence: Synthetic oligonucleotide
  Antisense strand to SEQ ID NO: 1908780
ucuccaaggacucuaagaa

SEQ ID NO: 1908782 - RNA, 19 nt, Artificial Sequence
  Description of Artificial Sequence: Synthetic oligonucleotide
  Sense strand starting at position 1162 of SEQ ID NO: 1879459
cuuagaguccuuggagaag

SEQ ID NO: 1908783 - RNA, 19 nt, Artificial Sequence
  Description of Artificial Sequence: Synthetic oligonucleotide
  Antisense strand to SEQ ID NO: 1908782
cuucuccaaggacucuaag

SEQ ID NO: 1908784 - RNA, 19 nt, Artificial Sequence
  Description of Artificial Sequence: Synthetic oligonucleotide
  Sense strand starting at position 1187 of SEQ ID NO: 1879459
aggcaaagcagauguaauu

SEQ ID NO: 1908785 - RNA, 19 nt, Artificial Sequence
  Description of Artificial Sequence: Synthetic oligonucleotide
  Antisense strand to SEQ ID NO: 1908784
aauuacaucugcuuugccu

SEQ ID NO: 1908786 - RNA, 19 nt, Artificial Sequence
  Description of Artificial Sequence: Synthetic oligonucleotide
  Sense strand starting at position 1214 of SEQ ID NO: 1879459
guacuagaugcuuauugag

SEQ ID NO: 1908787 - RNA, 19 nt, Artificial Sequence
  Description of Artificial Sequence: Synthetic oligonucleotide
  Antisense strand to SEQ ID NO: 1908786
cucaauaagcaucuaguac

SEQ ID NO: 1908788 - RNA, 19 nt, Artificial Sequence
  Description of Artificial Sequence: Synthetic oligonucleotide
  Sense strand starting at position 1299 of SEQ ID NO: 1879459
gacucuggaucggcaagau

SEQ ID NO: 1908789 - RNA, 19 nt, Artificial Sequence
  Description of Artificial Sequence: Synthetic oligonucleotide
  Antisense strand to SEQ ID NO: 1908788
aucuugccgauccagaguc

SEQ ID NO: 1908790 - RNA, 19 nt, Artificial Sequence
  Description of Artificial Sequence: Synthetic oligonucleotide
  Sense strand starting at position 1309 of SEQ ID NO: 1879459
cggcaagaucugcagaaac

SEQ ID NO: 1908791 - RNA, 19 nt, Artificial Sequence
  Description of Artificial Sequence: Synthetic oligonucleotide
  Antisense strand to SEQ ID NO: 1908790
guuucugcagaucuugccg

SEQ ID NO: 1908792 - RNA, 19 nt, Artificial Sequence
  Description of Artificial Sequence: Synthetic oligonucleotide
  Sense strand starting at position 1392 of SEQ ID NO: 1879459
uagaguuaaagcuguggga

SEQ ID NO: 1908793 - RNA, 19 nt, Artificial Sequence
  Description of Artificial Sequence: Synthetic oligonucleotide
  Antisense strand to SEQ ID NO: 1908792
ucccacagcuuuaacucua

SEQ ID NO: 1908794 - RNA, 19 nt, Artificial Sequence
  Description of Artificial Sequence: Synthetic oligonucleotide
  Sense strand starting at position 1844 of SEQ ID NO: 1879459
gggcuaucacuacacuauu

SEQ ID NO: 1908795 - RNA, 19 nt, Artificial Sequence
  Description of Artificial Sequence: Synthetic oligonucleotide
  Antisense strand to SEQ ID NO: 1908794
aauaguguagugauagccc

SEQ ID NO: 1908796 - RNA, 19 nt, Artificial Sequence
  Description of Artificial Sequence: Synthetic oligonucleotide
  Sense strand starting at position 1873 of SEQ ID NO: 1879459
cugauagaagugcaucgaa

SEQ ID NO: 1908797 - RNA, 19 nt, Artificial Sequence
  Description of Artificial Sequence: Synthetic oligonucleotide
  Antisense strand to SEQ ID NO: 1908796
uucgaugcacuucuaucag

SEQ ID NO: 1908798 - RNA, 19 nt, Artificial Sequence
  Description of Artificial Sequence: Synthetic oligonucleotide
  Sense strand starting at position 1876 of SEQ ID NO: 1879459
auagaagugcaucgaauug

SEQ ID NO: 1908799 - RNA, 19 nt, Artificial Sequence
  Description of Artificial Sequence: Synthetic oligonucleotide
  Antisense strand to SEQ ID NO: 1908798
caauucgaugcacuucuau

SEQ ID NO: 1908800 - RNA, 19 nt, Artificial Sequence
  Description of Artificial Sequence: Synthetic oligonucleotide
  Sense strand starting at position 1888 of SEQ ID NO: 1879459
cgaauugaggcacgacaga

SEQ ID NO: 1908801 - RNA, 19 nt, Artificial Sequence
  Description of Artificial Sequence: Synthetic oligonucleotide
  Antisense strand to SEQ ID NO: 1908800
ucugucgugccucaauucg

SEQ ID NO: 1908802 - RNA, 19 nt, Artificial Sequence
  Description of Artificial Sequence: Synthetic oligonucleotide
  Sense strand starting at position 1951 of SEQ ID NO: 1879459
ugaguagagagaugcauua

SEQ ID NO: 1908803 - RNA, 19 nt, Artificial Sequence
  Description of Artificial Sequence: Synthetic oligonucleotide
  Antisense strand to SEQ ID NO: 1908802
uaaugcaucucucuacuca

SEQ ID NO: 1908804 - RNA, 19 nt, Artificial Sequence
  Description of Artificial Sequence: Synthetic oligonucleotide
  Sense strand starting at position 2065 of SEQ ID NO: 1879459
gggagucugagcuagguuu

SEQ ID NO: 1908805 - RNA, 19 nt, Artificial Sequence
  Description of Artificial Sequence: Synthetic oligonucleotide
  Antisense strand to SEQ ID NO: 1908804
aaaccuagcucagacuccc

SEQ ID NO: 1908806 - RNA, 19 nt, Artificial Sequence
  Description of Artificial Sequence: Synthetic oligonucleotide
  Sense strand starting at position 2702 of SEQ ID NO: 1879459
ccuuuccuagaauggcaua

SEQ ID NO: 1908807 - RNA, 19 nt, Artificial Sequence
  Description of Artificial Sequence: Synthetic oligonucleotide
  Antisense strand to SEQ ID NO: 1908806
uaugccauucuaggaaagg

SEQ ID NO: 1908808 - RNA, 19 nt, Artificial Sequence
  Description of Artificial Sequence: Synthetic oligonucleotide
  Sense strand starting at position 2707 of SEQ ID NO: 1879459
ccuagaauggcauauguua

SEQ ID NO: 1908809 - RNA, 19 nt, Artificial Sequence
  Description of Artificial Sequence: Synthetic oligonucleotide
  Antisense strand to SEQ ID NO: 1908808
uaacauaugccauucuagg

SEQ ID NO: 1908810 - RNA, 19 nt, Artificial Sequence
  Description of Artificial Sequence: Synthetic oligonucleotide
  Sense strand starting at position 2827 of SEQ ID NO: 1879459
ugaauugcugaauaagguu

SEQ ID NO: 1908811 - RNA, 19 nt, Artificial Sequence
  Description of Artificial Sequence: Synthetic oligonucleotide
  Antisense strand to SEQ ID NO: 1908810
aaccuuauucagcaauuca

SEQ ID NO: 1908812 - RNA, 19 nt, Artificial Sequence
  Description of Artificial Sequence: Synthetic oligonucleotide
  Sense strand starting at position 3009 of SEQ ID NO: 1879459
uuccgagagucacucagau

SEQ ID NO: 1908813 - RNA, 19 nt, Artificial Sequence
  Description of Artificial Sequence: Synthetic oligonucleotide
  Antisense strand to SEQ ID NO: 1908812
aucugagugacucucggaa

SEQ ID NO: 1908814 - RNA, 19 nt, Artificial Sequence
  Description of Artificial Sequence: Synthetic oligonucleotide
  Sense strand starting at position 3011 of SEQ ID NO: 1879459
ccgagagucacucagaugu

SEQ ID NO: 1908815 - RNA, 19 nt, Artificial Sequence
  Description of Artificial Sequence: Synthetic oligonucleotide
  Antisense strand to SEQ ID NO: 1908814
acaucugagugacucucgg

SEQ ID NO: 1908816 - RNA, 19 nt, Artificial Sequence
  Description of Artificial Sequence: Synthetic oligonucleotide
  Sense strand starting at position 3025 of SEQ ID NO: 1879459
gaugucaucugccuaagga

SEQ ID NO: 1908817 - RNA, 19 nt, Artificial Sequence
  Description of Artificial Sequence: Synthetic oligonucleotide
  Antisense strand to SEQ ID NO: 1908816
uccuuaggcagaugacauc

SEQ ID NO: 1908818 - RNA, 19 nt, Artificial Sequence
  Description of Artificial Sequence: Synthetic oligonucleotide
  Sense strand starting at position 3026 of SEQ ID NO: 1879459
augucaucugccuaaggaa

SEQ ID NO: 1908819 - RNA, 19 nt, Artificial Sequence
  Description of Artificial Sequence: Synthetic oligonucleotide
  Antisense strand to SEQ ID NO: 1908818
uuccuuaggcagaugacau

SEQ ID NO: 1908820 - RNA, 19 nt, Artificial Sequence
  Description of Artificial Sequence: Synthetic oligonucleotide
  Sense strand starting at position 3141 of SEQ ID NO: 1879459
gguugugugguuucuuugu

SEQ ID NO: 1908821 - RNA, 19 nt, Artificial Sequence
  Description of Artificial Sequence: Synthetic oligonucleotide
  Antisense strand to SEQ ID NO: 1908820
acaaagaaaccacacaacc

SEQ ID NO: 1908822 - RNA, 19 nt, Artificial Sequence
  Description of Artificial Sequence: Synthetic oligonucleotide
  Sense strand starting at position 3192 of SEQ ID NO: 1879459
augucuuaccucuagugag

SEQ ID NO: 1908823 - RNA, 19 nt, Artificial Sequence
  Description of Artificial Sequence: Synthetic oligonucleotide
  Antisense strand to SEQ ID NO: 1908822
cucacuagagguaagacau

SEQ ID NO: 1908824 - RNA, 19 nt, Artificial Sequence
  Description of Artificial Sequence: Synthetic oligonucleotide
  Sense strand starting at position 3444 of SEQ ID NO: 1879459
agaugccacuuaguaaaua

SEQ ID NO: 1908825 - RNA, 19 nt, Artificial Sequence
  Description of Artificial Sequence: Synthetic oligonucleotide
  Antisense strand to SEQ ID NO: 1908824
uauuuacuaaguggcaucu

SEQ ID NO: 1908826 - RNA, 19 nt, Artificial Sequence
  Description of Artificial Sequence: Synthetic oligonucleotide
  Sense strand starting at position 3835 of SEQ ID NO: 1879459
guugguugauaccugacua

SEQ ID NO: 1908827 - RNA, 19 nt, Artificial Sequence
  Description of Artificial Sequence: Synthetic oligonucleotide
  Antisense strand to SEQ ID NO: 1908826
uagucagguaucaaccaac

SEQ ID NO: 1908828 - RNA, 19 nt, Artificial Sequence
  Description of Artificial Sequence: Synthetic oligonucleotide
  Sense strand starting at position 3836 of SEQ ID NO: 1879459
uugguugauaccugacuag

SEQ ID NO: 1908829 - RNA, 19 nt, Artificial Sequence
  Description of Artificial Sequence: Synthetic oligonucleotide
  Antisense strand to SEQ ID NO: 1908828
cuagucagguaucaaccaa

SEQ ID NO: 1908830 - RNA, 19 nt, Artificial Sequence
  Description of Artificial Sequence: Synthetic oligonucleotide
  Sense strand starting at position 3839 of SEQ ID NO: 1879459
guugauaccugacuagaug

SEQ ID NO: 1908831 - RNA, 19 nt, Artificial Sequence
  Description of Artificial Sequence: Synthetic oligonucleotide
  Antisense strand to SEQ ID NO: 1908830
caucuagucagguaucaac

SEQ ID NO: 1908832 - RNA, 19 nt, Artificial Sequence
  Description of Artificial Sequence: Synthetic oligonucleotide
  Sense strand starting at position 3928 of SEQ ID NO: 1879459
ugcgauuacucagcaauuu

SEQ ID NO: 1908833 - RNA, 19 nt, Artificial Sequence
  Description of Artificial Sequence: Synthetic oligonucleotide
  Antisense strand to SEQ ID NO: 1908832
aaauugcugaguaaucgca

SEQ ID NO: 1908834 - RNA, 19 nt, Artificial Sequence
  Description of Artificial Sequence: Synthetic oligonucleotide
  Sense strand starting at position 74 of SEQ ID NO: 1879460
uugggcucugcauaugauu

SEQ ID NO: 1908835 - RNA, 19 nt, Artificial Sequence
  Description of Artificial Sequence: Synthetic oligonucleotide
  Antisense strand to SEQ ID NO: 1908834
aaucauaugcagagcccaa

SEQ ID NO: 1908836 - RNA, 19 nt, Artificial Sequence
  Description of Artificial Sequence: Synthetic oligonucleotide
  Sense strand starting at position 208 of SEQ ID NO: 1879460
cagugugauuccucagcag

SEQ ID NO: 1908837 - RNA, 19 nt, Artificial Sequence
  Description of Artificial Sequence: Synthetic oligonucleotide
  Antisense strand to SEQ ID NO: 1908836
cugcugaggaaucacacug

SEQ ID NO: 1908838 - RNA, 19 nt, Artificial Sequence
  Description of Artificial Sequence: Synthetic oligonucleotide
  Sense strand starting at position 211 of SEQ ID NO: 1879460
ugugauuccucagcagcca

SEQ ID NO: 1908839 - RNA, 19 nt, Artificial Sequence
  Description of Artificial Sequence: Synthetic oligonucleotide
  Antisense strand to SEQ ID NO: 1908838
uggcugcugaggaaucaca

SEQ ID NO: 1908840 - RNA, 19 nt, Artificial Sequence
  Description of Artificial Sequence: Synthetic oligonucleotide
  Sense strand starting at position 496 of SEQ ID NO: 1879460
agaagucagugcugacaga

SEQ ID NO: 1908841 - RNA, 19 nt, Artificial Sequence
  Description of Artificial Sequence: Synthetic oligonucleotide
  Antisense strand to SEQ ID NO: 1908840
ucugucagcacugacuucu

SEQ ID NO: 1908842 - RNA, 19 nt, Artificial Sequence
  Description of Artificial Sequence: Synthetic oligonucleotide
  Sense strand starting at position 728 of SEQ ID NO: 1879460
gguacccuccgcuguguua

SEQ ID NO: 1908843 - RNA, 19 nt, Artificial Sequence
  Description of Artificial Sequence: Synthetic oligonucleotide
  Antisense strand to SEQ ID NO: 1908842
uaacacagcggaggguacc

SEQ ID NO: 1908844 - RNA, 19 nt, Artificial Sequence
  Description of Artificial Sequence: Synthetic oligonucleotide
  Sense strand starting at position 885 of SEQ ID NO: 1879460
augaguggucaguggagca

SEQ ID NO: 1908845 - RNA, 19 nt, Artificial Sequence
  Description of Artificial Sequence: Synthetic oligonucleotide
  Antisense strand to SEQ ID NO: 1908844
ugcuccacugaccacucau

SEQ ID NO: 1908846 - RNA, 19 nt, Artificial Sequence
  Description of Artificial Sequence: Synthetic oligonucleotide
  Sense strand starting at position 931 of SEQ ID NO: 1879460
gucauucucuaccugggau

SEQ ID NO: 1908847 - RNA, 19 nt, Artificial Sequence
  Description of Artificial Sequence: Synthetic oligonucleotide
  Antisense strand to SEQ ID NO: 1908846
aucccagguagagaaugac

SEQ ID NO: 1908848 - RNA, 19 nt, Artificial Sequence
  Description of Artificial Sequence: Synthetic oligonucleotide
  Sense strand starting at position 1109 of SEQ ID NO: 1879460
aggagacugucuccugaga

SEQ ID NO: 1908849 - RNA, 19 nt, Artificial Sequence
  Description of Artificial Sequence: Synthetic oligonucleotide
  Antisense strand to SEQ ID NO: 1908848
ucucaggagacagucuccu

SEQ ID NO: 1908850 - RNA, 19 nt, Artificial Sequence
  Description of Artificial Sequence: Synthetic oligonucleotide
  Sense strand starting at position 1111 of SEQ ID NO: 1879460
gagacugucuccugagacu

SEQ ID NO: 1908851 - RNA, 19 nt, Artificial Sequence
  Description of Artificial Sequence: Synthetic oligonucleotide
  Antisense strand to SEQ ID NO: 1908850
agucucaggagacagucuc

SEQ ID NO: 1908852 - RNA, 19 nt, Artificial Sequence
  Description of Artificial Sequence: Synthetic oligonucleotide
  Sense strand starting at position 1144 of SEQ ID NO: 1879460
cugggcaaugucugcugaa

SEQ ID NO: 1908853 - RNA, 19 nt, Artificial Sequence
  Description of Artificial Sequence: Synthetic oligonucleotide
  Antisense strand to SEQ ID NO: 1908852
uucagcagacauugcccag

SEQ ID NO: 1908854 - RNA, 19 nt, Artificial Sequence
  Description of Artificial Sequence: Synthetic oligonucleotide
  Sense strand starting at position 1145 of SEQ ID NO: 1879460
ugggcaaugucugcugaag

SEQ ID NO: 1908855 - RNA, 19 nt, Artificial Sequence
  Description of Artificial Sequence: Synthetic oligonucleotide
  Antisense strand to SEQ ID NO: 1908854
cuucagcagacauugccca

SEQ ID NO: 1908856 - RNA, 19 nt, Artificial Sequence
  Description of Artificial Sequence: Synthetic oligonucleotide
  Sense strand starting at position 1147 of SEQ ID NO: 1879460
ggcaaugucugcugaagau

SEQ ID NO: 1908857 - RNA, 19 nt, Artificial Sequence
  Description of Artificial Sequence: Synthetic oligonucleotide
  Antisense strand to SEQ ID NO: 1908856
aucuucagcagacauugcc

SEQ ID NO: 1908858 - RNA, 19 nt, Artificial Sequence
  Description of Artificial Sequence: Synthetic oligonucleotide
  Sense strand starting at position 1192 of SEQ ID NO: 1879460
ggaguucucccagaucgug

SEQ ID NO: 1908859 - RNA, 19 nt, Artificial Sequence
  Description of Artificial Sequence: Synthetic oligonucleotide
  Antisense strand to SEQ ID NO: 1908858
cacgaucugggagaacucc

SEQ ID NO: 1908860 - RNA, 19 nt, Artificial Sequence
  Description of Artificial Sequence: Synthetic oligonucleotide
  Sense strand starting at position 1198 of SEQ ID NO: 1879460
cucccagaucgugagcuuu

SEQ ID NO: 1908861 - RNA, 19 nt, Artificial Sequence
  Description of Artificial Sequence: Synthetic oligonucleotide
  Antisense strand to SEQ ID NO: 1908860
aaagcucacgaucugggag

SEQ ID NO: 1908862 - RNA, 19 nt, Artificial Sequence
  Description of Artificial Sequence: Synthetic oligonucleotide
  Sense strand starting at position 1231 of SEQ ID NO: 1879460
agaggauaccuguggucaa

SEQ ID NO: 1908863 - RNA, 19 nt, Artificial Sequence
  Description of Artificial Sequence: Synthetic oligonucleotide
  Antisense strand to SEQ ID NO: 1908862
uugaccacagguauccucu

SEQ ID NO: 1908864 - RNA, 19 nt, Artificial Sequence
  Description of Artificial Sequence: Synthetic oligonucleotide
  Sense strand starting at position 1232 of SEQ ID NO: 1879460
gaggauaccuguggucaaa

SEQ ID NO: 1908865 - RNA, 19 nt, Artificial Sequence
  Description of Artificial Sequence: Synthetic oligonucleotide
  Antisense strand to SEQ ID NO: 1908864
uuugaccacagguauccuc

SEQ ID NO: 1908866 - RNA, 19 nt, Artificial Sequence
  Description of Artificial Sequence: Synthetic oligonucleotide
  Sense strand starting at position 1234 of SEQ ID NO: 1879460
ggauaccuguggucaaacu

SEQ ID NO: 1908867 - RNA, 19 nt, Artificial Sequence
  Description of Artificial Sequence: Synthetic oligonucleotide
  Antisense strand to SEQ ID NO: 1908866
aguuugaccacagguaucc

SEQ ID NO: 1908868 - RNA, 19 nt, Artificial Sequence
  Description of Artificial Sequence: Synthetic oligonucleotide
  Sense strand starting at position 1425 of SEQ ID NO: 1879460
gcaccuaucucgugccaga

SEQ ID NO: 1908869 - RNA, 19 nt, Artificial Sequence
  Description of Artificial Sequence: Synthetic oligonucleotide
  Antisense strand to SEQ ID NO: 1908868
ucuggcacgagauaggugc

SEQ ID NO: 1908870 - RNA, 19 nt, Artificial Sequence
  Description of Artificial Sequence: Synthetic oligonucleotide
  Sense strand starting at position 1428 of SEQ ID NO: 1879460
ccuaucucgugccagacau

SEQ ID NO: 1908871 - RNA, 19 nt, Artificial Sequence
  Description of Artificial Sequence: Synthetic oligonucleotide
  Antisense strand to SEQ ID NO: 1908870
augucuggcacgagauagg

SEQ ID NO: 1908872 - RNA, 19 nt, Artificial Sequence
  Description of Artificial Sequence: Synthetic oligonucleotide
  Sense strand starting at position 1436 of SEQ ID NO: 1879460
gugccagacaugugggauu

SEQ ID NO: 1908873 - RNA, 19 nt, Artificial Sequence
  Description of Artificial Sequence: Synthetic oligonucleotide
  Antisense strand to SEQ ID NO: 1908872
aaucccacaugucuggcac

SEQ ID NO: 1908874 - RNA, 19 nt, Artificial Sequence
  Description of Artificial Sequence: Synthetic oligonucleotide
  Sense strand starting at position 1446 of SEQ ID NO: 1879460
ugugggauugccggugaau

SEQ ID NO: 1908875 - RNA, 19 nt, Artificial Sequence
  Description of Artificial Sequence: Synthetic oligonucleotide
  Antisense strand to SEQ ID NO: 1908874
auucaccggcaaucccaca

SEQ ID NO: 1908876 - RNA, 19 nt, Artificial Sequence
  Description of Artificial Sequence: Synthetic oligonucleotide
  Sense strand starting at position 1448 of SEQ ID NO: 1879460
ugggauugccggugaauua

SEQ ID NO: 1908877 - RNA, 19 nt, Artificial Sequence
  Description of Artificial Sequence: Synthetic oligonucleotide
  Antisense strand to SEQ ID NO: 1908876
uaauucaccggcaauccca

SEQ ID NO: 1908878 - RNA, 19 nt, Artificial Sequence
  Description of Artificial Sequence: Synthetic oligonucleotide
  Sense strand starting at position 1449 of SEQ ID NO: 1879460
gggauugccggugaauuaa

SEQ ID NO: 1908879 - RNA, 19 nt, Artificial Sequence
  Description of Artificial Sequence: Synthetic oligonucleotide
  Antisense strand to SEQ ID NO: 1908878
uuaauucaccggcaauccc

SEQ ID NO: 1908880 - RNA, 19 nt, Artificial Sequence
  Description of Artificial Sequence: Synthetic oligonucleotide
  Sense strand starting at position 2242 of SEQ ID NO: 1879460
ggagaacucuauuccuucu

SEQ ID NO: 1908881 - RNA, 19 nt, Artificial Sequence
  Description of Artificial Sequence: Synthetic oligonucleotide
  Antisense strand to SEQ ID NO: 1908880
agaaggaauagaguucucc

SEQ ID NO: 1908882 - RNA, 19 nt, Artificial Sequence
  Description of Artificial Sequence: Synthetic oligonucleotide
  Sense strand starting at position 2311 of SEQ ID NO: 1879460
gaggaauugucugggaugu

SEQ ID NO: 1908883 - RNA, 19 nt, Artificial Sequence
  Description of Artificial Sequence: Synthetic oligonucleotide
  Antisense strand to SEQ ID NO: 1908882
acaucccagacaauuccuc

SEQ ID NO: 1908884 - RNA, 19 nt, Artificial Sequence
  Description of Artificial Sequence: Synthetic oligonucleotide
  Sense strand starting at position 2312 of SEQ ID NO: 1879460
aggaauugucugggaugug

SEQ ID NO: 1908885 - RNA, 19 nt, Artificial Sequence
  Description of Artificial Sequence: Synthetic oligonucleotide
  Antisense strand to SEQ ID NO: 1908884
cacaucccagacaauuccu

SEQ ID NO: 1908886 - RNA, 19 nt, Artificial Sequence
  Description of Artificial Sequence: Synthetic oligonucleotide
  Sense strand starting at position 2446 of SEQ ID NO: 1879460
gcaggagcaucccugacua

SEQ ID NO: 1908887 - RNA, 19 nt, Artificial Sequence
  Description of Artificial Sequence: Synthetic oligonucleotide
  Antisense strand to SEQ ID NO: 1908886
uagucagggaugcuccugc

SEQ ID NO: 1908888 - RNA, 19 nt, Artificial Sequence
  Description of Artificial Sequence: Synthetic oligonucleotide
  Sense strand starting at position 2564 of SEQ ID NO: 1879460
cuucuugcguccucgaaac

SEQ ID NO: 1908889 - RNA, 19 nt, Artificial Sequence
  Description of Artificial Sequence: Synthetic oligonucleotide
  Antisense strand to SEQ ID NO: 1908888
guuucgaggacgcaagaag

SEQ ID NO: 1908890 - RNA, 19 nt, Artificial Sequence
  Description of Artificial Sequence: Synthetic oligonucleotide
  Sense strand starting at position 3150 of SEQ ID NO: 1879460
gaaguaagcucaggacuga

SEQ ID NO: 1908891 - RNA, 19 nt, Artificial Sequence
  Description of Artificial Sequence: Synthetic oligonucleotide
  Antisense strand to SEQ ID NO: 1908890
ucaguccugagcuuacuuc

SEQ ID NO: 1908892 - RNA, 19 nt, Artificial Sequence
  Description of Artificial Sequence: Synthetic oligonucleotide
  Sense strand starting at position 3301 of SEQ ID NO: 1879460
gggcucaauaaaugguuga

SEQ ID NO: 1908893 - RNA, 19 nt, Artificial Sequence
  Description of Artificial Sequence: Synthetic oligonucleotide
  Antisense strand to SEQ ID NO: 1908892
ucaaccauuuauugagccc

SEQ ID NO: 1908894 - RNA, 19 nt, Artificial Sequence
  Description of Artificial Sequence: Synthetic oligonucleotide
  Sense strand starting at position 3302 of SEQ ID NO: 1879460
ggcucaauaaaugguugau

SEQ ID NO: 1908895 - RNA, 19 nt, Artificial Sequence
  Description of Artificial Sequence: Synthetic oligonucleotide
  Antisense strand to SEQ ID NO: 1908894
aucaaccauuuauugagcc

SEQ ID NO: 1908896 - RNA, 19 nt, Artificial Sequence
  Description of Artificial Sequence: Synthetic oligonucleotide
  Sense strand starting at position 3305 of SEQ ID NO: 1879460
ucaauaaaugguugauuga

SEQ ID NO: 1908897 - RNA, 19 nt, Artificial Sequence
  Description of Artificial Sequence: Synthetic oligonucleotide
  Antisense strand to SEQ ID NO: 1908896
ucaaucaaccauuuauuga

SEQ ID NO: 1908898 - RNA, 19 nt, Artificial Sequence
  Description of Artificial Sequence: Synthetic oligonucleotide
  Sense strand starting at position 3658 of SEQ ID NO: 1879460
ugccucgcucaggaugauu

SEQ ID NO: 1908899 - RNA, 19 nt, Artificial Sequence
  Description of Artificial Sequence: Synthetic oligonucleotide
  Antisense strand to SEQ ID NO: 1908898
aaucauccugagcgaggca

SEQ ID NO: 1908900 - RNA, 19 nt, Artificial Sequence
  Description of Artificial Sequence: Synthetic oligonucleotide
  Sense strand starting at position 3669 of SEQ ID NO: 1879460
ggaugauuccagcgccaga

SEQ ID NO: 1908901 - RNA, 19 nt, Artificial Sequence
  Description of Artificial Sequence: Synthetic oligonucleotide
  Antisense strand to SEQ ID NO: 1908900
ucuggcgcuggaaucaucc

SEQ ID NO: 1908902 - RNA, 19 nt, Artificial Sequence
  Description of Artificial Sequence: Synthetic oligonucleotide
  Sense strand starting at position 3801 of SEQ ID NO: 1879460
ggaggacacgugugagcaa

SEQ ID NO: 1908903 - RNA, 19 nt, Artificial Sequence
  Description of Artificial Sequence: Synthetic oligonucleotide
  Antisense strand to SEQ ID NO: 1908902
uugcucacacguguccucc

SEQ ID NO: 1908904 - RNA, 19 nt, Artificial Sequence
  Description of Artificial Sequence: Synthetic oligonucleotide
  Sense strand starting at position 498 of SEQ ID NO: 1879461
accaguaaguuguccugca

SEQ ID NO: 1908905 - RNA, 19 nt, Artificial Sequence
  Description of Artificial Sequence: Synthetic oligonucleotide
  Antisense strand to SEQ ID NO: 1908904
ugcaggacaacuuacuggu

SEQ ID NO: 1908906 - RNA, 19 nt, Artificial Sequence
  Description of Artificial Sequence: Synthetic oligonucleotide
  Sense strand starting at position 548 of SEQ ID NO: 1879461
acuguaaugucuucuugag

SEQ ID NO: 1908907 - RNA, 19 nt, Artificial Sequence
  Description of Artificial Sequence: Synthetic oligonucleotide
  Antisense strand to SEQ ID NO: 1908906
cucaagaagacauuacagu

SEQ ID NO: 1908908 - RNA, 19 nt, Artificial Sequence
  Description of Artificial Sequence: Synthetic oligonucleotide
  Sense strand starting at position 550 of SEQ ID NO: 1879461
uguaaugucuucuugagag

SEQ ID NO: 1908909 - RNA, 19 nt, Artificial Sequence
  Description of Artificial Sequence: Synthetic oligonucleotide
  Antisense strand to SEQ ID NO: 1908908
cucucaagaagacauuaca

SEQ ID NO: 1908910 - RNA, 19 nt, Artificial Sequence
  Description of Artificial Sequence: Synthetic oligonucleotide
  Sense strand starting at position 552 of SEQ ID NO: 1879461
uaaugucuucuugagagca

SEQ ID NO: 1908911 - RNA, 19 nt, Artificial Sequence
  Description of Artificial Sequence: Synthetic oligonucleotide
  Antisense strand to SEQ ID NO: 1908910
ugcucucaagaagacauua

SEQ ID NO: 1908912 - RNA, 19 nt, Artificial Sequence
  Description of Artificial Sequence: Synthetic oligonucleotide
  Sense strand starting at position 557 of SEQ ID NO: 1879461
ucuucuugagagcagcaua

SEQ ID NO: 1908913 - RNA, 19 nt, Artificial Sequence
  Description of Artificial Sequence: Synthetic oligonucleotide
  Antisense strand to SEQ ID NO: 1908912
uaugcugcucucaagaaga

SEQ ID NO: 1908914 - RNA, 19 nt, Artificial Sequence
  Description of Artificial Sequence: Synthetic oligonucleotide
  Sense strand starting at position 617 of SEQ ID NO: 1879461
gccaguugccaucauaugu

SEQ ID NO: 1908915 - RNA, 19 nt, Artificial Sequence
  Description of Artificial Sequence: Synthetic oligonucleotide
  Antisense strand to SEQ ID NO: 1908914
acauaugauggcaacuggc

SEQ ID NO: 1908916 - RNA, 19 nt, Artificial Sequence
  Description of Artificial Sequence: Synthetic oligonucleotide
  Sense strand starting at position 642 of SEQ ID NO: 1879461
aguaaugaaucugaugaac

SEQ ID NO: 1908917 - RNA, 19 nt, Artificial Sequence
  Description of Artificial Sequence: Synthetic oligonucleotide
  Antisense strand to SEQ ID NO: 1908916
guucaucagauucauuacu

SEQ ID NO: 1908918 - RNA, 19 nt, Artificial Sequence
  Description of Artificial Sequence: Synthetic oligonucleotide
  Sense strand starting at position 682 of SEQ ID NO: 1879461
aacagugucuuguuuaguu

SEQ ID NO: 1908919 - RNA, 19 nt, Artificial Sequence
  Description of Artificial Sequence: Synthetic oligonucleotide
  Antisense strand to SEQ ID NO: 1908918
aacuaaacaagacacuguu

SEQ ID NO: 1908920 - RNA, 19 nt, Artificial Sequence
  Description of Artificial Sequence: Synthetic oligonucleotide
  Sense strand starting at position 937 of SEQ ID NO: 1879461
gccaccaagccuggugaaa

SEQ ID NO: 1908921 - RNA, 19 nt, Artificial Sequence
  Description of Artificial Sequence: Synthetic oligonucleotide
  Antisense strand to SEQ ID NO: 1908920
uuucaccaggcuugguggc

SEQ ID NO: 1908922 - RNA, 19 nt, Artificial Sequence
  Description of Artificial Sequence: Synthetic oligonucleotide
  Sense strand starting at position 997 of SEQ ID NO: 1879461
cuauaaacagugggauguu

SEQ ID NO: 1908923 - RNA, 19 nt, Artificial Sequence
  Description of Artificial Sequence: Synthetic oligonucleotide
  Antisense strand to SEQ ID NO: 1908922
aacaucccacuguuuauag

SEQ ID NO: 1908924 - RNA, 19 nt, Artificial Sequence
  Description of Artificial Sequence: Synthetic oligonucleotide
  Sense strand starting at position 1164 of SEQ ID NO: 1879461
uggguuuacagguaugaug

SEQ ID NO: 1908925 - RNA, 19 nt, Artificial Sequence
  Description of Artificial Sequence: Synthetic oligonucleotide
  Antisense strand to SEQ ID NO: 1908924
caucauaccuguaaaccca

SEQ ID NO: 1908926 - RNA, 19 nt, Artificial Sequence
  Description of Artificial Sequence: Synthetic oligonucleotide
  Sense strand starting at position 1166 of SEQ ID NO: 1879461
gguuuacagguaugaugag

SEQ ID NO: 1908927 - RNA, 19 nt, Artificial Sequence
  Description of Artificial Sequence: Synthetic oligonucleotide
  Antisense strand to SEQ ID NO: 1908926
cucaucauaccuguaaacc

SEQ ID NO: 1908928 - RNA, 19 nt, Artificial Sequence
  Description of Artificial Sequence: Synthetic oligonucleotide
  Sense strand starting at position 1172 of SEQ ID NO: 1879461
cagguaugaugagccacaa

SEQ ID NO: 1908929 - RNA, 19 nt, Artificial Sequence
  Description of Artificial Sequence: Synthetic oligonucleotide
  Antisense strand to SEQ ID NO: 1908928
uuguggcucaucauaccug

SEQ ID NO: 1908930 - RNA, 19 nt, Artificial Sequence
  Description of Artificial Sequence: Synthetic oligonucleotide
  Sense strand starting at position 1242 of SEQ ID NO: 1879461
uugacaccuguugauauua

SEQ ID NO: 1908931 - RNA, 19 nt, Artificial Sequence
  Description of Artificial Sequence: Synthetic oligonucleotide
  Antisense strand to SEQ ID NO: 1908930
uaauaucaacaggugucaa

SEQ ID NO: 1908932 - RNA, 19 nt, Artificial Sequence
  Description of Artificial Sequence: Synthetic oligonucleotide
  Sense strand starting at position 1253 of SEQ ID NO: 1879461
ugauauuacuagucacuau

SEQ ID NO: 1908933 - RNA, 19 nt, Artificial Sequence
  Description of Artificial Sequence: Synthetic oligonucleotide
  Antisense strand to SEQ ID NO: 1908932
auagugacuaguaauauca

SEQ ID NO: 1908934 - RNA, 19 nt, Artificial Sequence
  Description of Artificial Sequence: Synthetic oligonucleotide
  Sense strand starting at position 1291 of SEQ ID NO: 1879461
ugcuuaagaugcucuaaca

SEQ ID NO: 1908935 - RNA, 19 nt, Artificial Sequence
  Description of Artificial Sequence: Synthetic oligonucleotide
  Antisense strand to SEQ ID NO: 1908934
uguuagagcaucuuaagca

SEQ ID NO: 1908936 - RNA, 19 nt, Artificial Sequence
  Description of Artificial Sequence: Synthetic oligonucleotide
  Sense strand starting at position 1361 of SEQ ID NO: 1879461
augggaaccuucuaauaua

SEQ ID NO: 1908937 - RNA, 19 nt, Artificial Sequence
  Description of Artificial Sequence: Synthetic oligonucleotide
  Antisense strand to SEQ ID NO: 1908936
uauauuagaagguucccau

SEQ ID NO: 1908938 - RNA, 19 nt, Artificial Sequence
  Description of Artificial Sequence: Synthetic oligonucleotide
  Sense strand starting at position 1461 of SEQ ID NO: 1879461
cuuaguugccucuaggcaa

SEQ ID NO: 1908939 - RNA, 19 nt, Artificial Sequence
  Description of Artificial Sequence: Synthetic oligonucleotide
  Antisense strand to SEQ ID NO: 1908938
uugccuagaggcaacuaag

SEQ ID NO: 1908940 - RNA, 19 nt, Artificial Sequence
  Description of Artificial Sequence: Synthetic oligonucleotide
  Sense strand starting at position 1476 of SEQ ID NO: 1879461
gcaaguaacuucucugaaa

SEQ ID NO: 1908941 - RNA, 19 nt, Artificial Sequence
  Description of Artificial Sequence: Synthetic oligonucleotide
  Antisense strand to SEQ ID NO: 1908940
uuucagagaaguuacuugc

SEQ ID NO: 1908942 - RNA, 19 nt, Artificial Sequence
  Description of Artificial Sequence: Synthetic oligonucleotide
  Sense strand starting at position 1760 of SEQ ID NO: 1879461
gaagguuucggaggccuca

SEQ ID NO: 1908943 - RNA, 19 nt, Artificial Sequence
  Description of Artificial Sequence: Synthetic oligonucleotide
  Antisense strand to SEQ ID NO: 1908942
ugaggccuccgaaaccuuc

SEQ ID NO: 1908944 - RNA, 19 nt, Artificial Sequence
  Description of Artificial Sequence: Synthetic oligonucleotide
  Sense strand starting at position 1773 of SEQ ID NO: 1879461
gccucagcuacuugagaga

SEQ ID NO: 1908945 - RNA, 19 nt, Artificial Sequence
  Description of Artificial Sequence: Synthetic oligonucleotide
  Antisense strand to SEQ ID NO: 1908944
ucucucaaguagcugaggc

SEQ ID NO: 1908946 - RNA, 19 nt, Artificial Sequence
  Description of Artificial Sequence: Synthetic oligonucleotide
  Sense strand starting at position 1914 of SEQ ID NO: 1879461
uggcuagggucccugugaa

SEQ ID NO: 1908947 - RNA, 19 nt, Artificial Sequence
  Description of Artificial Sequence: Synthetic oligonucleotide
  Antisense strand to SEQ ID NO: 1908946
uucacagggacccuagcca

SEQ ID NO: 1908948 - RNA, 19 nt, Artificial Sequence
  Description of Artificial Sequence: Synthetic oligonucleotide
  Sense strand starting at position 3053 of SEQ ID NO: 1879461
agguaagucgugugugaga

SEQ ID NO: 1908949 - RNA, 19 nt, Artificial Sequence
  Description of Artificial Sequence: Synthetic oligonucleotide
  Antisense strand to SEQ ID NO: 1908948
ucucacacacgacuuaccu

SEQ ID NO: 1908950 - RNA, 19 nt, Artificial Sequence
  Description of Artificial Sequence: Synthetic oligonucleotide
  Sense strand starting at position 3092 of SEQ ID NO: 1879461
aggguagcagucugcuaau

SEQ ID NO: 1908951 - RNA, 19 nt, Artificial Sequence
  Description of Artificial Sequence: Synthetic oligonucleotide
  Antisense strand to SEQ ID NO: 1908950
auuagcagacugcuacccu

SEQ ID NO: 1908952 - RNA, 19 nt, Artificial Sequence
  Description of Artificial Sequence: Synthetic oligonucleotide
  Sense strand starting at position 3300 of SEQ ID NO: 1879461
gaauaagagugaucucacu

SEQ ID NO: 1908953 - RNA, 19 nt, Artificial Sequence
  Description of Artificial Sequence: Synthetic oligonucleotide
  Antisense strand to SEQ ID NO: 1908952
agugagaucacucuuauuc

SEQ ID NO: 1908954 - RNA, 19 nt, Artificial Sequence
  Description of Artificial Sequence: Synthetic oligonucleotide
  Sense strand starting at position 3345 of SEQ ID NO: 1879461
agaauuacuugccugaagu

SEQ ID NO: 1908955 - RNA, 19 nt, Artificial Sequence
  Description of Artificial Sequence: Synthetic oligonucleotide
  Antisense strand to SEQ ID NO: 1908954
acuucaggcaaguaauucu

SEQ ID NO: 1908956 - RNA, 19 nt, Artificial Sequence
  Description of Artificial Sequence: Synthetic oligonucleotide
  Sense strand starting at position 3346 of SEQ ID NO: 1879461
gaauuacuugccugaaguu

SEQ ID NO: 1908957 - RNA, 19 nt, Artificial Sequence
  Description of Artificial Sequence: Synthetic oligonucleotide
  Antisense strand to SEQ ID NO: 1908956
aacuucaggcaaguaauuc

SEQ ID NO: 1908958 - RNA, 19 nt, Artificial Sequence
  Description of Artificial Sequence: Synthetic oligonucleotide
  Sense strand starting at position 3542 of SEQ ID NO: 1879461
guguucaacguugucaagu

SEQ ID NO: 1908959 - RNA, 19 nt, Artificial Sequence
  Description of Artificial Sequence: Synthetic oligonucleotide
  Antisense strand to SEQ ID NO: 1908958
acuugacaacguugaacac

SEQ ID NO: 1908960 - RNA, 19 nt, Artificial Sequence
  Description of Artificial Sequence: Synthetic oligonucleotide
  Sense strand starting at position 3555 of SEQ ID NO: 1879461
ucaaguuuaucguuguuaa

SEQ ID NO: 1908961 - RNA, 19 nt, Artificial Sequence
  Description of Artificial Sequence: Synthetic oligonucleotide
  Antisense strand to SEQ ID NO: 1908960
uuaacaacgauaaacuuga

SEQ ID NO: 1908962 - RNA, 19 nt, Artificial Sequence
  Description of Artificial Sequence: Synthetic oligonucleotide
  Sense strand starting at position 3556 of SEQ ID NO: 1879461
caaguuuaucguuguuaaa

SEQ ID NO: 1908963 - RNA, 19 nt, Artificial Sequence
  Description of Artificial Sequence: Synthetic oligonucleotide
  Antisense strand to SEQ ID NO: 1908962
uuuaacaacgauaaacuug

SEQ ID NO: 1908964 - RNA, 19 nt, Artificial Sequence
  Description of Artificial Sequence: Synthetic oligonucleotide
  Sense strand starting at position 3645 of SEQ ID NO: 1879461
cuguuccauucuguaagaa

SEQ ID NO: 1908965 - RNA, 19 nt, Artificial Sequence
  Description of Artificial Sequence: Synthetic oligonucleotide
  Antisense strand to SEQ ID NO: 1908964
uucuuacagaauggaacag

SEQ ID NO: 1908966 - RNA, 19 nt, Artificial Sequence
  Description of Artificial Sequence: Synthetic oligonucleotide
  Sense strand starting at position 3646 of SEQ ID NO: 1879461
uguuccauucuguaagaau

SEQ ID NO: 1908967 - RNA, 19 nt, Artificial Sequence
  Description of Artificial Sequence: Synthetic oligonucleotide
  Antisense strand to SEQ ID NO: 1908966
auucuuacagaauggaaca

SEQ ID NO: 1908968 - RNA, 19 nt, Artificial Sequence
  Description of Artificial Sequence: Synthetic oligonucleotide
  Sense strand starting at position 3657 of SEQ ID NO: 1879461
guaagaauagggugaacuu

SEQ ID NO: 1908969 - RNA, 19 nt, Artificial Sequence
  Description of Artificial Sequence: Synthetic oligonucleotide
  Antisense strand to SEQ ID NO: 1908968
aaguucacccuauucuuac

SEQ ID NO: 1908970 - RNA, 19 nt, Artificial Sequence
  Description of Artificial Sequence: Synthetic oligonucleotide
  Sense strand starting at position 3721 of SEQ ID NO: 1879461
uuguucuauucuguggaga

SEQ ID NO: 1908971 - RNA, 19 nt, Artificial Sequence
  Description of Artificial Sequence: Synthetic oligonucleotide
  Antisense strand to SEQ ID NO: 1908970
ucuccacagaauagaacaa

SEQ ID NO: 1908972 - RNA, 19 nt, Artificial Sequence
  Description of Artificial Sequence: Synthetic oligonucleotide
  Sense strand starting at position 3722 of SEQ ID NO: 1879461
uguucuauucuguggagau

SEQ ID NO: 1908973 - RNA, 19 nt, Artificial Sequence
  Description of Artificial Sequence: Synthetic oligonucleotide
  Antisense strand to SEQ ID NO: 1908972
aucuccacagaauagaaca

SEQ ID NO: 1908974 - RNA, 19 nt, Artificial Sequence
  Description of Artificial Sequence: Synthetic oligonucleotide
  Sense strand starting at position 3726 of SEQ ID NO: 1879461
cuauucuguggagauaagu

SEQ ID NO: 1908975 - RNA, 19 nt, Artificial Sequence
  Description of Artificial Sequence: Synthetic oligonucleotide
  Antisense strand to SEQ ID NO: 1908974
acuuaucuccacagaauag

SEQ ID NO: 1908976 - RNA, 19 nt, Artificial Sequence
  Description of Artificial Sequence: Synthetic oligonucleotide
  Sense strand starting at position 3748 of SEQ ID NO: 1879461
gaaaucuuugauugaaagu

SEQ ID NO: 1908977 - RNA, 19 nt, Artificial Sequence
  Description of Artificial Sequence: Synthetic oligonucleotide
  Antisense strand to SEQ ID NO: 1908976
acuuucaaucaaagauuuc

SEQ ID NO: 1908978 - RNA, 19 nt, Artificial Sequence
  Description of Artificial Sequence: Synthetic oligonucleotide
  Sense strand starting at position 3759 of SEQ ID NO: 1879461
uugaaaguuuaugcaaguu

SEQ ID NO: 1908979 - RNA, 19 nt, Artificial Sequence
  Description of Artificial Sequence: Synthetic oligonucleotide
  Antisense strand to SEQ ID NO: 1908978
aacuugcauaaacuuucaa

SEQ ID NO: 1908980 - RNA, 19 nt, Artificial Sequence
  Description of Artificial Sequence: Synthetic oligonucleotide
  Sense strand starting at position 3801 of SEQ ID NO: 1879461
cguccuuuccugcugucau

SEQ ID NO: 1908981 - RNA, 19 nt, Artificial Sequence
  Description of Artificial Sequence: Synthetic oligonucleotide
  Antisense strand to SEQ ID NO: 1908980
augacagcaggaaaggacg

SEQ ID NO: 1908982 - RNA, 19 nt, Artificial Sequence
  Description of Artificial Sequence: Synthetic oligonucleotide
  Sense strand starting at position 3931 of SEQ ID NO: 1879461
guauucuggugguuucaga

SEQ ID NO: 1908983 - RNA, 19 nt, Artificial Sequence
  Description of Artificial Sequence: Synthetic oligonucleotide
  Antisense strand to SEQ ID NO: 1908982
ucugaaaccaccagaauac

SEQ ID NO: 1908984 - RNA, 19 nt, Artificial Sequence
  Description of Artificial Sequence: Synthetic oligonucleotide
  Sense strand starting at position 48 of SEQ ID NO: 1879462
uugguuauauguuaaccaa

SEQ ID NO: 1908985 - RNA, 19 nt, Artificial Sequence
  Description of Artificial Sequence: Synthetic oligonucleotide
  Antisense strand to SEQ ID NO: 1908984
uugguuaacauauaaccaa

SEQ ID NO: 1908986 - RNA, 19 nt, Artificial Sequence
  Description of Artificial Sequence: Synthetic oligonucleotide
  Sense strand starting at position 51 of SEQ ID NO: 1879462
guuauauguuaaccaauac

SEQ ID NO: 1908987 - RNA, 19 nt, Artificial Sequence
  Description of Artificial Sequence: Synthetic oligonucleotide
  Antisense strand to SEQ ID NO: 1908986
guauugguuaacauauaac

SEQ ID NO: 1908988 - RNA, 19 nt, Artificial Sequence
  Description of Artificial Sequence: Synthetic oligonucleotide
  Sense strand starting at position 73 of SEQ ID NO: 1879462
ucuugagaauucucgucuu

SEQ ID NO: 1908989 - RNA, 19 nt, Artificial Sequence
  Description of Artificial Sequence: Synthetic oligonucleotide
  Antisense strand to SEQ ID NO: 1908988
aagacgagaauucucaaga

SEQ ID NO: 1908990 - RNA, 19 nt, Artificial Sequence
  Description of Artificial Sequence: Synthetic oligonucleotide
  Sense strand starting at position 76 of SEQ ID NO: 1879462
ugagaauucucgucuucca

SEQ ID NO: 1908991 - RNA, 19 nt, Artificial Sequence
  Description of Artificial Sequence: Synthetic oligonucleotide
  Antisense strand to SEQ ID NO: 1908990
uggaagacgagaauucuca

SEQ ID NO: 1908992 - RNA, 19 nt, Artificial Sequence
  Description of Artificial Sequence: Synthetic oligonucleotide
  Sense strand starting at position 282 of SEQ ID NO: 1879462
uccuauugucuuuaucuga

SEQ ID NO: 1908993 - RNA, 19 nt, Artificial Sequence
  Description of Artificial Sequence: Synthetic oligonucleotide
  Antisense strand to SEQ ID NO: 1908992
ucagauaaagacaauagga

SEQ ID NO: 1908994 - RNA, 19 nt, Artificial Sequence
  Description of Artificial Sequence: Synthetic oligonucleotide
  Sense strand starting at position 533 of SEQ ID NO: 1879462
auagaauucgaguggcugu

SEQ ID NO: 1908995 - RNA, 19 nt, Artificial Sequence
  Description of Artificial Sequence: Synthetic oligonucleotide
  Antisense strand to SEQ ID NO: 1908994
acagccacucgaauucuau

SEQ ID NO: 1908996 - RNA, 19 nt, Artificial Sequence
  Description of Artificial Sequence: Synthetic oligonucleotide
  Sense strand starting at position 534 of SEQ ID NO: 1879462
uagaauucgaguggcuguu

SEQ ID NO: 1908997 - RNA, 19 nt, Artificial Sequence
  Description of Artificial Sequence: Synthetic oligonucleotide
  Antisense strand to SEQ ID NO: 1908996
aacagccacucgaauucua

SEQ ID NO: 1908998 - RNA, 19 nt, Artificial Sequence
  Description of Artificial Sequence: Synthetic oligonucleotide
  Sense strand starting at position 669 of SEQ ID NO: 1879462
gcaggauuccagcaggguu

SEQ ID NO: 1908999 - RNA, 19 nt, Artificial Sequence
  Description of Artificial Sequence: Synthetic oligonucleotide
  Antisense strand to SEQ ID NO: 1908998
aacccugcuggaauccugc

SEQ ID NO: 1909000 - RNA, 19 nt, Artificial Sequence
  Description of Artificial Sequence: Synthetic oligonucleotide
  Sense strand starting at position 1157 of SEQ ID NO: 1879462
cuuguaaucucaguuaccu

SEQ ID NO: 1909001 - RNA, 19 nt, Artificial Sequence
  Description of Artificial Sequence: Synthetic oligonucleotide
  Antisense strand to SEQ ID NO: 1909000
agguaacugagauuacaag

SEQ ID NO: 1909002 - RNA, 19 nt, Artificial Sequence
  Description of Artificial Sequence: Synthetic oligonucleotide
  Sense strand starting at position 1165 of SEQ ID NO: 1879462
cucaguuaccuaggagauc

SEQ ID NO: 1909003 - RNA, 19 nt, Artificial Sequence
  Description of Artificial Sequence: Synthetic oligonucleotide
  Antisense strand to SEQ ID NO: 1909002
gaucuccuagguaacugag

SEQ ID NO: 1909004 - RNA, 19 nt, Artificial Sequence
  Description of Artificial Sequence: Synthetic oligonucleotide
  Sense strand starting at position 1171 of SEQ ID NO: 1879462
uaccuaggagaucgaguau

SEQ ID NO: 1909005 - RNA, 19 nt, Artificial Sequence
  Description of Artificial Sequence: Synthetic oligonucleotide
  Antisense strand to SEQ ID NO: 1909004
auacucgaucuccuaggua

SEQ ID NO: 1909006 - RNA, 19 nt, Artificial Sequence
  Description of Artificial Sequence: Synthetic oligonucleotide
  Sense strand starting at position 1255 of SEQ ID NO: 1879462
cagugaacuguuugcuguu

SEQ ID NO: 1909007 - RNA, 19 nt, Artificial Sequence
  Description of Artificial Sequence: Synthetic oligonucleotide
  Antisense strand to SEQ ID NO: 1909006
aacagcaaacaguucacug

SEQ ID NO: 1909008 - RNA, 19 nt, Artificial Sequence
  Description of Artificial Sequence: Synthetic oligonucleotide
  Sense strand starting at position 1256 of SEQ ID NO: 1879462
agugaacuguuugcuguua

SEQ ID NO: 1909009 - RNA, 19 nt, Artificial Sequence
  Description of Artificial Sequence: Synthetic oligonucleotide
  Antisense strand to SEQ ID NO: 1909008
uaacagcaaacaguucacu

SEQ ID NO: 1909010 - RNA, 19 nt, Artificial Sequence
  Description of Artificial Sequence: Synthetic oligonucleotide
  Sense strand starting at position 1257 of SEQ ID NO: 1879462
gugaacuguuugcuguuaa

SEQ ID NO: 1909011 - RNA, 19 nt, Artificial Sequence
  Description of Artificial Sequence: Synthetic oligonucleotide
  Antisense strand to SEQ ID NO: 1909010
uuaacagcaaacaguucac

SEQ ID NO: 1909012 - RNA, 19 nt, Artificial Sequence
  Description of Artificial Sequence: Synthetic oligonucleotide
  Sense strand starting at position 1258 of SEQ ID NO: 1879462
ugaacuguuugcuguuaau

SEQ ID NO: 1909013 - RNA, 19 nt, Artificial Sequence
  Description of Artificial Sequence: Synthetic oligonucleotide
  Antisense strand to SEQ ID NO: 1909012
auuaacagcaaacaguuca

SEQ ID NO: 1909014 - RNA, 19 nt, Artificial Sequence
  Description of Artificial Sequence: Synthetic oligonucleotide
  Sense strand starting at position 1500 of SEQ ID NO: 1879462
uuugaaaguaagugacaga

SEQ ID NO: 1909015 - RNA, 19 nt, Artificial Sequence
  Description of Artificial Sequence: Synthetic oligonucleotide
  Antisense strand to SEQ ID NO: 1909014
ucugucacuuacuuucaaa

SEQ ID NO: 1909016 - RNA, 19 nt, Artificial Sequence
  Description of Artificial Sequence: Synthetic oligonucleotide
  Sense strand starting at position 1543 of SEQ ID NO: 1879462
uuuauacuaacgcguugua

SEQ ID NO: 1909017 - RNA, 19 nt, Artificial Sequence
  Description of Artificial Sequence: Synthetic oligonucleotide
  Antisense strand to SEQ ID NO: 1909016
uacaacgcguuaguauaaa

SEQ ID NO: 1909018 - RNA, 19 nt, Artificial Sequence
  Description of Artificial Sequence: Synthetic oligonucleotide
  Sense strand starting at position 1546 of SEQ ID NO: 1879462
auacuaacgcguuguauau

SEQ ID NO: 1909019 - RNA, 19 nt, Artificial Sequence
  Description of Artificial Sequence: Synthetic oligonucleotide
  Antisense strand to SEQ ID NO: 1909018
auauacaacgcguuaguau

SEQ ID NO: 1909020 - RNA, 19 nt, Artificial Sequence
  Description of Artificial Sequence: Synthetic oligonucleotide
  Sense strand starting at position 1555 of SEQ ID NO: 1879462
cguuguauaugcuuccaca

SEQ ID NO: 1909021 - RNA, 19 nt, Artificial Sequence
  Description of Artificial Sequence: Synthetic oligonucleotide
  Antisense strand to SEQ ID NO: 1909020
uguggaagcauauacaacg

SEQ ID NO: 1909022 - RNA, 19 nt, Artificial Sequence
  Description of Artificial Sequence: Synthetic oligonucleotide
  Sense strand starting at position 2135 of SEQ ID NO: 1879462
ccucgucugccgcaaugaa

SEQ ID NO: 1909023 - RNA, 19 nt, Artificial Sequence
  Description of Artificial Sequence: Synthetic oligonucleotide
  Antisense strand to SEQ ID NO: 1909022
uucauugcggcagacgagg

SEQ ID NO: 1909024 - RNA, 19 nt, Artificial Sequence
  Description of Artificial Sequence: Synthetic oligonucleotide
  Sense strand starting at position 2147 of SEQ ID NO: 1879462
caaugaagcggguacuuaa

SEQ ID NO: 1909025 - RNA, 19 nt, Artificial Sequence
  Description of Artificial Sequence: Synthetic oligonucleotide
  Antisense strand to SEQ ID NO: 1909024
uuaaguacccgcuucauug

SEQ ID NO: 1909026 - RNA, 19 nt, Artificial Sequence
  Description of Artificial Sequence: Synthetic oligonucleotide
  Sense strand starting at position 2154 of SEQ ID NO: 1879462
gcggguacuuaaucugugu

SEQ ID NO: 1909027 - RNA, 19 nt, Artificial Sequence
  Description of Artificial Sequence: Synthetic oligonucleotide
  Antisense strand to SEQ ID NO: 1909026
acacagauuaaguacccgc

SEQ ID NO: 1909028 - RNA, 19 nt, Artificial Sequence
  Description of Artificial Sequence: Synthetic oligonucleotide
  Sense strand starting at position 2290 of SEQ ID NO: 1879462
ccugguuaucuuuaugaug

SEQ ID NO: 1909029 - RNA, 19 nt, Artificial Sequence
  Description of Artificial Sequence: Synthetic oligonucleotide
  Antisense strand to SEQ ID NO: 1909028
caucauaaagauaaccagg

SEQ ID NO: 1909030 - RNA, 19 nt, Artificial Sequence
  Description of Artificial Sequence: Synthetic oligonucleotide
  Sense strand starting at position 2292 of SEQ ID NO: 1879462
ugguuaucuuuaugaugug

SEQ ID NO: 1909031 - RNA, 19 nt, Artificial Sequence
  Description of Artificial Sequence: Synthetic oligonucleotide
  Antisense strand to SEQ ID NO: 1909030
cacaucauaaagauaacca

SEQ ID NO: 1909032 - RNA, 19 nt, Artificial Sequence
  Description of Artificial Sequence: Synthetic oligonucleotide
  Sense strand starting at position 2295 of SEQ ID NO: 1879462
uuaucuuuaugauguggca

SEQ ID NO: 1909033 - RNA, 19 nt, Artificial Sequence
  Description of Artificial Sequence: Synthetic oligonucleotide
  Antisense strand to SEQ ID NO: 1909032
ugccacaucauaaagauaa

SEQ ID NO: 1909034 - RNA, 19 nt, Artificial Sequence
  Description of Artificial Sequence: Synthetic oligonucleotide
  Sense strand starting at position 2373 of SEQ ID NO: 1879462
agaggugacugugucucaa

SEQ ID NO: 1909035 - RNA, 19 nt, Artificial Sequence
  Description of Artificial Sequence: Synthetic oligonucleotide
  Antisense strand to SEQ ID NO: 1909034
uugagacacagucaccucu

SEQ ID NO: 1909036 - RNA, 19 nt, Artificial Sequence
  Description of Artificial Sequence: Synthetic oligonucleotide
  Sense strand starting at position 2529 of SEQ ID NO: 1879462
ugaagauaaugucaagaau

SEQ ID NO: 1909037 - RNA, 19 nt, Artificial Sequence
  Description of Artificial Sequence: Synthetic oligonucleotide
  Antisense strand to SEQ ID NO: 1909036
auucuugacauuaucuuca

SEQ ID NO: 1909038 - RNA, 19 nt, Artificial Sequence
  Description of Artificial Sequence: Synthetic oligonucleotide
  Sense strand starting at position 2602 of SEQ ID NO: 1879462
guagauguccaagguccau

SEQ ID NO: 1909039 - RNA, 19 nt, Artificial Sequence
  Description of Artificial Sequence: Synthetic oligonucleotide
  Antisense strand to SEQ ID NO: 1909038
auggaccuuggacaucuac

SEQ ID NO: 1909040 - RNA, 19 nt, Artificial Sequence
  Description of Artificial Sequence: Synthetic oligonucleotide
  Sense strand starting at position 2608 of SEQ ID NO: 1879462
guccaagguccauacgauu

SEQ ID NO: 1909041 - RNA, 19 nt, Artificial Sequence
  Description of Artificial Sequence: Synthetic oligonucleotide
  Antisense strand to SEQ ID NO: 1909040
aaucguauggaccuuggac

SEQ ID NO: 1909042 - RNA, 19 nt, Artificial Sequence
  Description of Artificial Sequence: Synthetic oligonucleotide
  Sense strand starting at position 2619 of SEQ ID NO: 1879462
auacgauuagcaugcguau

SEQ ID NO: 1909043 - RNA, 19 nt, Artificial Sequence
  Description of Artificial Sequence: Synthetic oligonucleotide
  Antisense strand to SEQ ID NO: 1909042
auacgcaugcuaaucguau

SEQ ID NO: 1909044 - RNA, 19 nt, Artificial Sequence
  Description of Artificial Sequence: Synthetic oligonucleotide
  Sense strand starting at position 2621 of SEQ ID NO: 1879462
acgauuagcaugcguauca

SEQ ID NO: 1909045 - RNA, 19 nt, Artificial Sequence
  Description of Artificial Sequence: Synthetic oligonucleotide
  Antisense strand to SEQ ID NO: 1909044
ugauacgcaugcuaaucgu

SEQ ID NO: 1909046 - RNA, 19 nt, Artificial Sequence
  Description of Artificial Sequence: Synthetic oligonucleotide
  Sense strand starting at position 2850 of SEQ ID NO: 1879462
ugcaguggccuuuaaugca

SEQ ID NO: 1909047 - RNA, 19 nt, Artificial Sequence
  Description of Artificial Sequence: Synthetic oligonucleotide
  Antisense strand to SEQ ID NO: 1909046
ugcauuaaaggccacugca

SEQ ID NO: 1909048 - RNA, 19 nt, Artificial Sequence
  Description of Artificial Sequence: Synthetic oligonucleotide
  Sense strand starting at position 2902 of SEQ ID NO: 1879462
caaagauaaucagguuuga

SEQ ID NO: 1909049 - RNA, 19 nt, Artificial Sequence
  Description of Artificial Sequence: Synthetic oligonucleotide
  Antisense strand to SEQ ID NO: 1909048
ucaaaccugauuaucuuug

SEQ ID NO: 1909050 - RNA, 19 nt, Artificial Sequence
  Description of Artificial Sequence: Synthetic oligonucleotide
  Sense strand starting at position 2907 of SEQ ID NO: 1879462
auaaucagguuugaaagga

SEQ ID NO: 1909051 - RNA, 19 nt, Artificial Sequence
  Description of Artificial Sequence: Synthetic oligonucleotide
  Antisense strand to SEQ ID NO: 1909050
uccuuucaaaccugauuau

SEQ ID NO: 1909052 - RNA, 19 nt, Artificial Sequence
  Description of Artificial Sequence: Synthetic oligonucleotide
  Sense strand starting at position 2951 of SEQ ID NO: 1879462
guccuagucugcucauuga

SEQ ID NO: 1909053 - RNA, 19 nt, Artificial Sequence
  Description of Artificial Sequence: Synthetic oligonucleotide
  Antisense strand to SEQ ID NO: 1909052
ucaaugagcagacuaggac

SEQ ID NO: 1909054 - RNA, 19 nt, Artificial Sequence
  Description of Artificial Sequence: Synthetic oligonucleotide
  Sense strand starting at position 3050 of SEQ ID NO: 1879462
gcuucauugcgggagacga

SEQ ID NO: 1909055 - RNA, 19 nt, Artificial Sequence
  Description of Artificial Sequence: Synthetic oligonucleotide
  Antisense strand to SEQ ID NO: 1909054
ucgucucccgcaaugaagc

SEQ ID NO: 1909056 - RNA, 19 nt, Artificial Sequence
  Description of Artificial Sequence: Synthetic oligonucleotide
  Sense strand starting at position 3197 of SEQ ID NO: 1879462
cacuguuaacuguacgauu

SEQ ID NO: 1909057 - RNA, 19 nt, Artificial Sequence
  Description of Artificial Sequence: Synthetic oligonucleotide
  Antisense strand to SEQ ID NO: 1909056
aaucguacaguuaacagug

SEQ ID NO: 1909058 - RNA, 19 nt, Artificial Sequence
  Description of Artificial Sequence: Synthetic oligonucleotide
  Sense strand starting at position 3571 of SEQ ID NO: 1879462
guauguaccuucuacagua

SEQ ID NO: 1909059 - RNA, 19 nt, Artificial Sequence
  Description of Artificial Sequence: Synthetic oligonucleotide
  Antisense strand to SEQ ID NO: 1909058
uacuguagaagguacauac

SEQ ID NO: 1909060 - RNA, 19 nt, Artificial Sequence
  Description of Artificial Sequence: Synthetic oligonucleotide
  Sense strand starting at position 3573 of SEQ ID NO: 1879462
auguaccuucuacaguaua

SEQ ID NO: 1909061 - RNA, 19 nt, Artificial Sequence
  Description of Artificial Sequence: Synthetic oligonucleotide
  Antisense strand to SEQ ID NO: 1909060
uauacuguagaagguacau

SEQ ID NO: 1909062 - RNA, 19 nt, Artificial Sequence
  Description of Artificial Sequence: Synthetic oligonucleotide
  Sense strand starting at position 3602 of SEQ ID NO: 1879462
uuaacagauucugucauug

SEQ ID NO: 1909063 - RNA, 19 nt, Artificial Sequence
  Description of Artificial Sequence: Synthetic oligonucleotide
  Antisense strand to SEQ ID NO: 1909062
caaugacagaaucuguuaa

SEQ ID NO: 1909064 - RNA, 19 nt, Artificial Sequence
  Description of Artificial Sequence: Synthetic oligonucleotide
  Sense strand starting at position 755 of SEQ ID NO: 1879463
uagagagucuaacuugagu

SEQ ID NO: 1909065 - RNA, 19 nt, Artificial Sequence
  Description of Artificial Sequence: Synthetic oligonucleotide
  Antisense strand to SEQ ID NO: 1909064
acucaaguuagacucucua

SEQ ID NO: 1909066 - RNA, 19 nt, Artificial Sequence
  Description of Artificial Sequence: Synthetic oligonucleotide
  Sense strand starting at position 760 of SEQ ID NO: 1879463
agucuaacuugaguaaguu

SEQ ID NO: 1909067 - RNA, 19 nt, Artificial Sequence
  Description of Artificial Sequence: Synthetic oligonucleotide
  Antisense strand to SEQ ID NO: 1909066
aacuuacucaaguuagacu

SEQ ID NO: 1909068 - RNA, 19 nt, Artificial Sequence
  Description of Artificial Sequence: Synthetic oligonucleotide
  Sense strand starting at position 761 of SEQ ID NO: 1879463
gucuaacuugaguaaguuu

SEQ ID NO: 1909069 - RNA, 19 nt, Artificial Sequence
  Description of Artificial Sequence: Synthetic oligonucleotide
  Antisense strand to SEQ ID NO: 1909068
aaacuuacucaaguuagac

SEQ ID NO: 1909070 - RNA, 19 nt, Artificial Sequence
  Description of Artificial Sequence: Synthetic oligonucleotide
  Sense strand starting at position 172 of SEQ ID NO: 1879464
aauggauuguugcuagaaa

SEQ ID NO: 1909071 - RNA, 19 nt, Artificial Sequence
  Description of Artificial Sequence: Synthetic oligonucleotide
  Antisense strand to SEQ ID NO: 1909070
uuucuagcaacaauccauu

SEQ ID NO: 1909072 - RNA, 19 nt, Artificial Sequence
  Description of Artificial Sequence: Synthetic oligonucleotide
  Sense strand starting at position 237 of SEQ ID NO: 1879464
cagacagagcuguguuuau

SEQ ID NO: 1909073 - RNA, 19 nt, Artificial Sequence
  Description of Artificial Sequence: Synthetic oligonucleotide
  Antisense strand to SEQ ID NO: 1909072
auaaacacagcucugucug

SEQ ID NO: 1909074 - RNA, 19 nt, Artificial Sequence
  Description of Artificial Sequence: Synthetic oligonucleotide
  Sense strand starting at position 244 of SEQ ID NO: 1879464
agcuguguuuauccaggaa

SEQ ID NO: 1909075 - RNA, 19 nt, Artificial Sequence
  Description of Artificial Sequence: Synthetic oligonucleotide
  Antisense strand to SEQ ID NO: 1909074
uuccuggauaaacacagcu

SEQ ID NO: 1909076 - RNA, 19 nt, Artificial Sequence
  Description of Artificial Sequence: Synthetic oligonucleotide
  Sense strand starting at position 582 of SEQ ID NO: 1879464
ggugguuuccgagggagaa

SEQ ID NO: 1909077 - RNA, 19 nt, Artificial Sequence
  Description of Artificial Sequence: Synthetic oligonucleotide
  Antisense strand to SEQ ID NO: 1909076
uucucccucggaaaccacc

SEQ ID NO: 1909078 - RNA, 19 nt, Artificial Sequence
  Description of Artificial Sequence: Synthetic oligonucleotide
  Sense strand starting at position 583 of SEQ ID NO: 1879464
gugguuuccgagggagaaa

SEQ ID NO: 1909079 - RNA, 19 nt, Artificial Sequence
  Description of Artificial Sequence: Synthetic oligonucleotide
  Antisense strand to SEQ ID NO: 1909078
uuucucccucggaaaccac

SEQ ID NO: 1909080 - RNA, 19 nt, Artificial Sequence
  Description of Artificial Sequence: Synthetic oligonucleotide
  Sense strand starting at position 1060 of SEQ ID NO: 1879464
cuauaaugcgguuauuauc

SEQ ID NO: 1909081 - RNA, 19 nt, Artificial Sequence
  Description of Artificial Sequence: Synthetic oligonucleotide
  Antisense strand to SEQ ID NO: 1909080
gauaauaaccgcauuauag

SEQ ID NO: 1909082 - RNA, 19 nt, Artificial Sequence
  Description of Artificial Sequence: Synthetic oligonucleotide
  Sense strand starting at position 1066 of SEQ ID NO: 1879464
ugcgguuauuauccuauuu

SEQ ID NO: 1909083 - RNA, 19 nt, Artificial Sequence
  Description of Artificial Sequence: Synthetic oligonucleotide
  Antisense strand to SEQ ID NO: 1909082
aaauaggauaauaaccgca

SEQ ID NO: 1909084 - RNA, 19 nt, Artificial Sequence
  Description of Artificial Sequence: Synthetic oligonucleotide
  Sense strand starting at position 1077 of SEQ ID NO: 1879464
uccuauuuguccuaauagu

SEQ ID NO: 1909085 - RNA, 19 nt, Artificial Sequence
  Description of Artificial Sequence: Synthetic oligonucleotide
  Antisense strand to SEQ ID NO: 1909084
acuauuaggacaaauagga

SEQ ID NO: 1909086 - RNA, 19 nt, Artificial Sequence
  Description of Artificial Sequence: Synthetic oligonucleotide
  Sense strand starting at position 1088 of SEQ ID NO: 1879464
cuaauaguacccuaggguu

SEQ ID NO: 1909087 - RNA, 19 nt, Artificial Sequence
  Description of Artificial Sequence: Synthetic oligonucleotide
  Antisense strand to SEQ ID NO: 1909086
aacccuaggguacuauuag

SEQ ID NO: 1909088 - RNA, 19 nt, Artificial Sequence
  Description of Artificial Sequence: Synthetic oligonucleotide
  Sense strand starting at position 1100 of SEQ ID NO: 1879464
uaggguucugguggauacu

SEQ ID NO: 1909089 - RNA, 19 nt, Artificial Sequence
  Description of Artificial Sequence: Synthetic oligonucleotide
  Antisense strand to SEQ ID NO: 1909088
aguauccaccagaacccua

SEQ ID NO: 1909090 - RNA, 19 nt, Artificial Sequence
  Description of Artificial Sequence: Synthetic oligonucleotide
  Sense strand starting at position 1103 of SEQ ID NO: 1879464
gguucugguggauacuaua

SEQ ID NO: 1909091 - RNA, 19 nt, Artificial Sequence
  Description of Artificial Sequence: Synthetic oligonucleotide
  Antisense strand to SEQ ID NO: 1909090
uauaguauccaccagaacc

SEQ ID NO: 1909092 - RNA, 19 nt, Artificial Sequence
  Description of Artificial Sequence: Synthetic oligonucleotide
  Sense strand starting at position 1155 of SEQ ID NO: 1879464
uuuaguaccagugggagaa

SEQ ID NO: 1909093 - RNA, 19 nt, Artificial Sequence
  Description of Artificial Sequence: Synthetic oligonucleotide
  Antisense strand to SEQ ID NO: 1909092
uucucccacugguacuaaa

SEQ ID NO: 1909094 - RNA, 19 nt, Artificial Sequence
  Description of Artificial Sequence: Synthetic oligonucleotide
  Sense strand starting at position 1156 of SEQ ID NO: 1879464
uuaguaccagugggagaau

SEQ ID NO: 1909095 - RNA, 19 nt, Artificial Sequence
  Description of Artificial Sequence: Synthetic oligonucleotide
  Antisense strand to SEQ ID NO: 1909094
auucucccacugguacuaa

SEQ ID NO: 1909096 - RNA, 19 nt, Artificial Sequence
  Description of Artificial Sequence: Synthetic oligonucleotide
  Sense strand starting at position 1165 of SEQ ID NO: 1879464
gugggagaaucuguguacu

SEQ ID NO: 1909097 - RNA, 19 nt, Artificial Sequence
  Description of Artificial Sequence: Synthetic oligonucleotide
  Antisense strand to SEQ ID NO: 1909096
aguacacagauucucccac

SEQ ID NO: 1909098 - RNA, 19 nt, Artificial Sequence
  Description of Artificial Sequence: Synthetic oligonucleotide
  Sense strand starting at position 1171 of SEQ ID NO: 1879464
gaaucuguguacuugguga

SEQ ID NO: 1909099 - RNA, 19 nt, Artificial Sequence
  Description of Artificial Sequence: Synthetic oligonucleotide
  Antisense strand to SEQ ID NO: 1909098
ucaccaaguacacagauuc

SEQ ID NO: 1909100 - RNA, 19 nt, Artificial Sequence
  Description of Artificial Sequence: Synthetic oligonucleotide
  Sense strand starting at position 1188 of SEQ ID NO: 1879464
gacggaggcccguauauga

SEQ ID NO: 1909101 - RNA, 19 nt, Artificial Sequence
  Description of Artificial Sequence: Synthetic oligonucleotide
  Antisense strand to SEQ ID NO: 1909100
ucauauacgggccuccguc

SEQ ID NO: 1909102 - RNA, 19 nt, Artificial Sequence
  Description of Artificial Sequence: Synthetic oligonucleotide
  Sense strand starting at position 2495 of SEQ ID NO: 1879464
ggacuaggucccgggucau

SEQ ID NO: 1909103 - RNA, 19 nt, Artificial Sequence
  Description of Artificial Sequence: Synthetic oligonucleotide
  Antisense strand to SEQ ID NO: 1909102
augacccgggaccuagucc

SEQ ID NO: 1909104 - RNA, 19 nt, Artificial Sequence
  Description of Artificial Sequence: Synthetic oligonucleotide
  Sense strand starting at position 2642 of SEQ ID NO: 1879464
ccuuguccuuagccagaua

SEQ ID NO: 1909105 - RNA, 19 nt, Artificial Sequence
  Description of Artificial Sequence: Synthetic oligonucleotide
  Antisense strand to SEQ ID NO: 1909104
uaucuggcuaaggacaagg

SEQ ID NO: 1909106 - RNA, 19 nt, Artificial Sequence
  Description of Artificial Sequence: Synthetic oligonucleotide
  Sense strand starting at position 2783 of SEQ ID NO: 1879464
gguucucaagcuugaagga

SEQ ID NO: 1909107 - RNA, 19 nt, Artificial Sequence
  Description of Artificial Sequence: Synthetic oligonucleotide
  Antisense strand to SEQ ID NO: 1909106
uccuucaagcuugagaacc

SEQ ID NO: 1909108 - RNA, 19 nt, Artificial Sequence
  Description of Artificial Sequence: Synthetic oligonucleotide
  Sense strand starting at position 2861 of SEQ ID NO: 1879464
gggcuccaucccuaugaga

SEQ ID NO: 1909109 - RNA, 19 nt, Artificial Sequence
  Description of Artificial Sequence: Synthetic oligonucleotide
  Antisense strand to SEQ ID NO: 1909108
ucucauagggauggagccc

SEQ ID NO: 1909110 - RNA, 19 nt, Artificial Sequence
  Description of Artificial Sequence: Synthetic oligonucleotide
  Sense strand starting at position 2863 of SEQ ID NO: 1879464
gcuccaucccuaugagaug

SEQ ID NO: 1909111 - RNA, 19 nt, Artificial Sequence
  Description of Artificial Sequence: Synthetic oligonucleotide
  Antisense strand to SEQ ID NO: 1909110
caucucauagggauggagc

SEQ ID NO: 1909112 - RNA, 19 nt, Artificial Sequence
  Description of Artificial Sequence: Synthetic oligonucleotide
  Sense strand starting at position 2966 of SEQ ID NO: 1879464
gagucacucugacagaaac

SEQ ID NO: 1909113 - RNA, 19 nt, Artificial Sequence
  Description of Artificial Sequence: Synthetic oligonucleotide
  Antisense strand to SEQ ID NO: 1909112
guuucugucagagugacuc

SEQ ID NO: 1909114 - RNA, 19 nt, Artificial Sequence
  Description of Artificial Sequence: Synthetic oligonucleotide
  Sense strand starting at position 3075 of SEQ ID NO: 1879464
agaugaaauuucuggcucu

SEQ ID NO: 1909115 - RNA, 19 nt, Artificial Sequence
  Description of Artificial Sequence: Synthetic oligonucleotide
  Antisense strand to SEQ ID NO: 1909114
agagccagaaauuucaucu

SEQ ID NO: 1909116 - RNA, 19 nt, Artificial Sequence
  Description of Artificial Sequence: Synthetic oligonucleotide
  Sense strand starting at position 3088 of SEQ ID NO: 1879464
ggcucuugagagugaguca

SEQ ID NO: 1909117 - RNA, 19 nt, Artificial Sequence
  Description of Artificial Sequence: Synthetic oligonucleotide
  Antisense strand to SEQ ID NO: 1909116
ugacucacucucaagagcc

SEQ ID NO: 1909118 - RNA, 19 nt, Artificial Sequence
  Description of Artificial Sequence: Synthetic oligonucleotide
  Sense strand starting at position 3125 of SEQ ID NO: 1879464
cagagugcccuuuagucuu

SEQ ID NO: 1909119 - RNA, 19 nt, Artificial Sequence
  Description of Artificial Sequence: Synthetic oligonucleotide
  Antisense strand to SEQ ID NO: 1909118
aagacuaaagggcacucug

SEQ ID NO: 1909120 - RNA, 19 nt, Artificial Sequence
  Description of Artificial Sequence: Synthetic oligonucleotide
  Sense strand starting at position 3232 of SEQ ID NO: 1879464
ccaaaugaaugagauauaa

SEQ ID NO: 1909121 - RNA, 19 nt, Artificial Sequence
  Description of Artificial Sequence: Synthetic oligonucleotide
  Antisense strand to SEQ ID NO: 1909120
uuauaucucauucauuugg

SEQ ID NO: 1909122 - RNA, 19 nt, Artificial Sequence
  Description of Artificial Sequence: Synthetic oligonucleotide
  Sense strand starting at position 3246 of SEQ ID NO: 1879464
uauaaugucccagggauug

SEQ ID NO: 1909123 - RNA, 19 nt, Artificial Sequence
  Description of Artificial Sequence: Synthetic oligonucleotide
  Antisense strand to SEQ ID NO: 1909122
caaucccugggacauuaua

SEQ ID NO: 1909124 - RNA, 19 nt, Artificial Sequence
  Description of Artificial Sequence: Synthetic oligonucleotide
  Sense strand starting at position 3281 of SEQ ID NO: 1879464
guacuaccaaagugugaga

SEQ ID NO: 1909125 - RNA, 19 nt, Artificial Sequence
  Description of Artificial Sequence: Synthetic oligonucleotide
  Antisense strand to SEQ ID NO: 1909124
ucucacacuuugguaguac

SEQ ID NO: 1909126 - RNA, 19 nt, Artificial Sequence
  Description of Artificial Sequence: Synthetic oligonucleotide
  Sense strand starting at position 3295 of SEQ ID NO: 1879464
ugagaacuguucucaggaa

SEQ ID NO: 1909127 - RNA, 19 nt, Artificial Sequence
  Description of Artificial Sequence: Synthetic oligonucleotide
  Antisense strand to SEQ ID NO: 1909126
uuccugagaacaguucuca

SEQ ID NO: 1909128 - RNA, 19 nt, Artificial Sequence
  Description of Artificial Sequence: Synthetic oligonucleotide
  Sense strand starting at position 3296 of SEQ ID NO: 1879464
gagaacuguucucaggaau

SEQ ID NO: 1909129 - RNA, 19 nt, Artificial Sequence
  Description of Artificial Sequence: Synthetic oligonucleotide
  Antisense strand to SEQ ID NO: 1909128
auuccugagaacaguucuc

SEQ ID NO: 1909130 - RNA, 19 nt, Artificial Sequence
  Description of Artificial Sequence: Synthetic oligonucleotide
  Sense strand starting at position 3362 of SEQ ID NO: 1879464
uggauaauuguaggucaca

SEQ ID NO: 1909131 - RNA, 19 nt, Artificial Sequence
  Description of Artificial Sequence: Synthetic oligonucleotide
  Antisense strand to SEQ ID NO: 1909130
ugugaccuacaauuaucca

SEQ ID NO: 1909132 - RNA, 19 nt, Artificial Sequence
  Description of Artificial Sequence: Synthetic oligonucleotide
  Sense strand starting at position 3363 of SEQ ID NO: 1879464
ggauaauuguaggucacau

SEQ ID NO: 1909133 - RNA, 19 nt, Artificial Sequence
  Description of Artificial Sequence: Synthetic oligonucleotide
  Antisense strand to SEQ ID NO: 1909132
augugaccuacaauuaucc

SEQ ID NO: 1909134 - RNA, 19 nt, Artificial Sequence
  Description of Artificial Sequence: Synthetic oligonucleotide
  Sense strand starting at position 3382 of SEQ ID NO: 1879464
uguguuuaccucuaccuga

SEQ ID NO: 1909135 - RNA, 19 nt, Artificial Sequence
  Description of Artificial Sequence: Synthetic oligonucleotide
  Antisense strand to SEQ ID NO: 1909134
ucagguagagguaaacaca

SEQ ID NO: 1909136 - RNA, 19 nt, Artificial Sequence
  Description of Artificial Sequence: Synthetic oligonucleotide
  Sense strand starting at position 3594 of SEQ ID NO: 1879464
cuaagcuugcgggaucuga

SEQ ID NO: 1909137 - RNA, 19 nt, Artificial Sequence
  Description of Artificial Sequence: Synthetic oligonucleotide
  Antisense strand to SEQ ID NO: 1909136
ucagaucccgcaagcuuag

SEQ ID NO: 1909138 - RNA, 19 nt, Artificial Sequence
  Description of Artificial Sequence: Synthetic oligonucleotide
  Sense strand starting at position 3598 of SEQ ID NO: 1879464
gcuugcgggaucugacaaa

SEQ ID NO: 1909139 - RNA, 19 nt, Artificial Sequence
  Description of Artificial Sequence: Synthetic oligonucleotide
  Antisense strand to SEQ ID NO: 1909138
uuugucagaucccgcaagc

SEQ ID NO: 1909140 - RNA, 19 nt, Artificial Sequence
  Description of Artificial Sequence: Synthetic oligonucleotide
  Sense strand starting at position 3821 of SEQ ID NO: 1879464
gagaacucuugcuccaggu

SEQ ID NO: 1909141 - RNA, 19 nt, Artificial Sequence
  Description of Artificial Sequence: Synthetic oligonucleotide
  Antisense strand to SEQ ID NO: 1909140
accuggagcaagaguucuc

SEQ ID NO: 1909142 - RNA, 19 nt, Artificial Sequence
  Description of Artificial Sequence: Synthetic oligonucleotide
  Sense strand starting at position 3848 of SEQ ID NO: 1879464
ggugguggcauugaccaaa

SEQ ID NO: 1909143 - RNA, 19 nt, Artificial Sequence
  Description of Artificial Sequence: Synthetic oligonucleotide
  Antisense strand to SEQ ID NO: 1909142
uuuggucaaugccaccacc

SEQ ID NO: 1909144 - RNA, 19 nt, Artificial Sequence
  Description of Artificial Sequence: Synthetic oligonucleotide
  Sense strand starting at position 3956 of SEQ ID NO: 1879464
cuucuauuaggguguaaau

SEQ ID NO: 1909145 - RNA, 19 nt, Artificial Sequence
  Description of Artificial Sequence: Synthetic oligonucleotide
  Antisense strand to SEQ ID NO: 1909144
auuuacacccuaauagaag

SEQ ID NO: 1909146 - RNA, 19 nt, Artificial Sequence
  Description of Artificial Sequence: Synthetic oligonucleotide
  Sense strand starting at position 3958 of SEQ ID NO: 1879464
ucuauuaggguguaaauac

SEQ ID NO: 1909147 - RNA, 19 nt, Artificial Sequence
  Description of Artificial Sequence: Synthetic oligonucleotide
  Antisense strand to SEQ ID NO: 1909146
guauuuacacccuaauaga

SEQ ID NO: 1909148 - RNA, 19 nt, Artificial Sequence
  Description of Artificial Sequence: Synthetic oligonucleotide
  Sense strand starting at position 3978 of SEQ ID NO: 1879464
auuauuauccaaugggauc

SEQ ID NO: 1909149 - RNA, 19 nt, Artificial Sequence
  Description of Artificial Sequence: Synthetic oligonucleotide
  Antisense strand to SEQ ID NO: 1909148
gaucccauuggauaauaau

SEQ ID NO: 1909150 - RNA, 19 nt, Artificial Sequence
  Description of Artificial Sequence: Synthetic oligonucleotide
  Sense strand starting at position 755 of SEQ ID NO: 1879465
uagagagucuaacuugagu

SEQ ID NO: 1909151 - RNA, 19 nt, Artificial Sequence
  Description of Artificial Sequence: Synthetic oligonucleotide
  Antisense strand to SEQ ID NO: 1909150
acucaaguuagacucucua

SEQ ID NO: 1909152 - RNA, 19 nt, Artificial Sequence
  Description of Artificial Sequence: Synthetic oligonucleotide
  Sense strand starting at position 760 of SEQ ID NO: 1879465
agucuaacuugaguaaguu

SEQ ID NO: 1909153 - RNA, 19 nt, Artificial Sequence
  Description of Artificial Sequence: Synthetic oligonucleotide
  Antisense strand to SEQ ID NO: 1909152
aacuuacucaaguuagacu

SEQ ID NO: 1909154 - RNA, 19 nt, Artificial Sequence
  Description of Artificial Sequence: Synthetic oligonucleotide
  Sense strand starting at position 761 of SEQ ID NO: 1879465
gucuaacuugaguaaguuu

SEQ ID NO: 1909155 - RNA, 19 nt, Artificial Sequence
  Description of Artificial Sequence: Synthetic oligonucleotide
  Antisense strand to SEQ ID NO: 1909154
aaacuuacucaaguuagac

SEQ ID NO: 1909156 - RNA, 19 nt, Artificial Sequence
  Description of Artificial Sequence: Synthetic oligonucleotide
  Sense strand starting at position 276 of SEQ ID NO: 1879466
uggacucacagucaugagu

SEQ ID NO: 1909157 - RNA, 19 nt, Artificial Sequence
  Description of Artificial Sequence: Synthetic oligonucleotide
  Antisense strand to SEQ ID NO: 1909156
acucaugacugugagucca

SEQ ID NO: 1909158 - RNA, 19 nt, Artificial Sequence
  Description of Artificial Sequence: Synthetic oligonucleotide
  Sense strand starting at position 278 of SEQ ID NO: 1879466
gacucacagucaugaguug

SEQ ID NO: 1909159 - RNA, 19 nt, Artificial Sequence
  Description of Artificial Sequence: Synthetic oligonucleotide
  Antisense strand to SEQ ID NO: 1909158
caacucaugacugugaguc

SEQ ID NO: 1909160 - RNA, 19 nt, Artificial Sequence
  Description of Artificial Sequence: Synthetic oligonucleotide
  Sense strand starting at position 1002 of SEQ ID NO: 1879466
aggagcuagguguguagaa

SEQ ID NO: 1909161 - RNA, 19 nt, Artificial Sequence
  Description of Artificial Sequence: Synthetic oligonucleotide
  Antisense strand to SEQ ID NO: 1909160
uucuacacaccuagcuccu

SEQ ID NO: 1909162 - RNA, 19 nt, Artificial Sequence
  Description of Artificial Sequence: Synthetic oligonucleotide
  Sense strand starting at position 1096 of SEQ ID NO: 1879466
ggcagacuuugggacugua

SEQ ID NO: 1909163 - RNA, 19 nt, Artificial Sequence
  Description of Artificial Sequence: Synthetic oligonucleotide
  Antisense strand to SEQ ID NO: 1909162
uacagucccaaagucugcc

SEQ ID NO: 1909164 - RNA, 19 nt, Artificial Sequence
  Description of Artificial Sequence: Synthetic oligonucleotide
  Sense strand starting at position 2480 of SEQ ID NO: 1879466
uacucagaaugcugaaguu

SEQ ID NO: 1909165 - RNA, 19 nt, Artificial Sequence
  Description of Artificial Sequence: Synthetic oligonucleotide
  Antisense strand to SEQ ID NO: 1909164
aacuucagcauucugagua

SEQ ID NO: 1909166 - RNA, 19 nt, Artificial Sequence
  Description of Artificial Sequence: Synthetic oligonucleotide
  Sense strand starting at position 23 of SEQ ID NO: 1879467
cauguugaauuugaugaau

SEQ ID NO: 1909167 - RNA, 19 nt, Artificial Sequence
  Description of Artificial Sequence: Synthetic oligonucleotide
  Antisense strand to SEQ ID NO: 1909166
auucaucaaauucaacaug

SEQ ID NO: 1909168 - RNA, 19 nt, Artificial Sequence
  Description of Artificial Sequence: Synthetic oligonucleotide
  Sense strand starting at position 50 of SEQ ID NO: 1879467
ccaagcacugcuugaaaug

SEQ ID NO: 1909169 - RNA, 19 nt, Artificial Sequence
  Description of Artificial Sequence: Synthetic oligonucleotide
  Antisense strand to SEQ ID NO: 1909168
cauuucaagcagugcuugg

SEQ ID NO: 1909170 - RNA, 19 nt, Artificial Sequence
  Description of Artificial Sequence: Synthetic oligonucleotide
  Sense strand starting at position 197 of SEQ ID NO: 1879467
aggucugauuuccaagauc

SEQ ID NO: 1909171 - RNA, 19 nt, Artificial Sequence
  Description of Artificial Sequence: Synthetic oligonucleotide
  Antisense strand to SEQ ID NO: 1909170
gaucuuggaaaucagaccu

SEQ ID NO: 1909172 - RNA, 19 nt, Artificial Sequence
  Description of Artificial Sequence: Synthetic oligonucleotide
  Sense strand starting at position 225 of SEQ ID NO: 1879467
uuguuaucucagcacuuac

SEQ ID NO: 1909173 - RNA, 19 nt, Artificial Sequence
  Description of Artificial Sequence: Synthetic oligonucleotide
  Antisense strand to SEQ ID NO: 1909172
guaagugcugagauaacaa

SEQ ID NO: 1909174 - RNA, 19 nt, Artificial Sequence
  Description of Artificial Sequence: Synthetic oligonucleotide
  Sense strand starting at position 247 of SEQ ID NO: 1879467
gggugauacaaaggugaau

SEQ ID NO: 1909175 - RNA, 19 nt, Artificial Sequence
  Description of Artificial Sequence: Synthetic oligonucleotide
  Antisense strand to SEQ ID NO: 1909174
auucaccuuuguaucaccc

SEQ ID NO: 1909176 - RNA, 19 nt, Artificial Sequence
  Description of Artificial Sequence: Synthetic oligonucleotide
  Sense strand starting at position 280 of SEQ ID NO: 1879467
gucugaacugcucaaauaa

SEQ ID NO: 1909177 - RNA, 19 nt, Artificial Sequence
  Description of Artificial Sequence: Synthetic oligonucleotide
  Antisense strand to SEQ ID NO: 1909176
uuauuugagcaguucagac

SEQ ID NO: 1909178 - RNA, 19 nt, Artificial Sequence
  Description of Artificial Sequence: Synthetic oligonucleotide
  Sense strand starting at position 440 of SEQ ID NO: 1879467
gcccuuagaagucaggaau

SEQ ID NO: 1909179 - RNA, 19 nt, Artificial Sequence
  Description of Artificial Sequence: Synthetic oligonucleotide
  Antisense strand to SEQ ID NO: 1909178
auuccugacuucuaagggc

SEQ ID NO: 1909180 - RNA, 19 nt, Artificial Sequence
  Description of Artificial Sequence: Synthetic oligonucleotide
  Sense strand starting at position 492 of SEQ ID NO: 1879467
cuaccacaguucuugacau

SEQ ID NO: 1909181 - RNA, 19 nt, Artificial Sequence
  Description of Artificial Sequence: Synthetic oligonucleotide
  Antisense strand to SEQ ID NO: 1909180
augucaagaacugugguag

SEQ ID NO: 1909182 - RNA, 19 nt, Artificial Sequence
  Description of Artificial Sequence: Synthetic oligonucleotide
  Sense strand starting at position 514 of SEQ ID NO: 1879467
guagaagcucaauaauguu

SEQ ID NO: 1909183 - RNA, 19 nt, Artificial Sequence
  Description of Artificial Sequence: Synthetic oligonucleotide
  Antisense strand to SEQ ID NO: 1909182
aacauuauugagcuucuac

SEQ ID NO: 1909184 - RNA, 19 nt, Artificial Sequence
  Description of Artificial Sequence: Synthetic oligonucleotide
  Sense strand starting at position 558 of SEQ ID NO: 1879467
uugcuaagucugggagaca

SEQ ID NO: 1909185 - RNA, 19 nt, Artificial Sequence
  Description of Artificial Sequence: Synthetic oligonucleotide
  Antisense strand to SEQ ID NO: 1909184
ugucucccagacuuagcaa

SEQ ID NO: 1909186 - RNA, 19 nt, Artificial Sequence
  Description of Artificial Sequence: Synthetic oligonucleotide
  Sense strand starting at position 1049 of SEQ ID NO: 1879467
gcugaaaccgucuacaaug

SEQ ID NO: 1909187 - RNA, 19 nt, Artificial Sequence
  Description of Artificial Sequence: Synthetic oligonucleotide
  Antisense strand to SEQ ID NO: 1909186
cauuguagacgguuucagc

SEQ ID NO: 1909188 - RNA, 19 nt, Artificial Sequence
  Description of Artificial Sequence: Synthetic oligonucleotide
  Sense strand starting at position 1219 of SEQ ID NO: 1879467
ggauuuggguaucaaauuc

SEQ ID NO: 1909189 - RNA, 19 nt, Artificial Sequence
  Description of Artificial Sequence: Synthetic oligonucleotide
  Antisense strand to SEQ ID NO: 1909188
gaauuugauacccaaaucc

SEQ ID NO: 1909190 - RNA, 19 nt, Artificial Sequence
  Description of Artificial Sequence: Synthetic oligonucleotide
  Sense strand starting at position 1426 of SEQ ID NO: 1879467
ccacuuugccuagaaaguc

SEQ ID NO: 1909191 - RNA, 19 nt, Artificial Sequence
  Description of Artificial Sequence: Synthetic oligonucleotide
  Antisense strand to SEQ ID NO: 1909190
gacuuucuaggcaaagugg

SEQ ID NO: 1909192 - RNA, 19 nt, Artificial Sequence
  Description of Artificial Sequence: Synthetic oligonucleotide
  Sense strand starting at position 2009 of SEQ ID NO: 1879467
cgagccuuuccggugcuau

SEQ ID NO: 1909193 - RNA, 19 nt, Artificial Sequence
  Description of Artificial Sequence: Synthetic oligonucleotide
  Antisense strand to SEQ ID NO: 1909192
auagcaccggaaaggcucg

SEQ ID NO: 1909194 - RNA, 19 nt, Artificial Sequence
  Description of Artificial Sequence: Synthetic oligonucleotide
  Sense strand starting at position 2259 of SEQ ID NO: 1879467
guauuucucagacguuuga

SEQ ID NO: 1909195 - RNA, 19 nt, Artificial Sequence
  Description of Artificial Sequence: Synthetic oligonucleotide
  Antisense strand to SEQ ID NO: 1909194
ucaaacgucugagaaauac

SEQ ID NO: 1909196 - RNA, 19 nt, Artificial Sequence
  Description of Artificial Sequence: Synthetic oligonucleotide
  Sense strand starting at position 2263 of SEQ ID NO: 1879467
uucucagacguuugaucag

SEQ ID NO: 1909197 - RNA, 19 nt, Artificial Sequence
  Description of Artificial Sequence: Synthetic oligonucleotide
  Antisense strand to SEQ ID NO: 1909196
cugaucaaacgucugagaa

SEQ ID NO: 1909198 - RNA, 19 nt, Artificial Sequence
  Description of Artificial Sequence: Synthetic oligonucleotide
  Sense strand starting at position 2322 of SEQ ID NO: 1879467
gggaaagaucgcgagccuu

SEQ ID NO: 1909199 - RNA, 19 nt, Artificial Sequence
  Description of Artificial Sequence: Synthetic oligonucleotide
  Antisense strand to SEQ ID NO: 1909198
aaggcucgcgaucuuuccc

SEQ ID NO: 1909200 - RNA, 19 nt, Artificial Sequence
  Description of Artificial Sequence: Synthetic oligonucleotide
  Sense strand starting at position 2372 of SEQ ID NO: 1879467
agggaaucucugggcaacu

SEQ ID NO: 1909201 - RNA, 19 nt, Artificial Sequence
  Description of Artificial Sequence: Synthetic oligonucleotide
  Antisense strand to SEQ ID NO: 1909200
aguugcccagagauucccu

SEQ ID NO: 1909202 - RNA, 19 nt, Artificial Sequence
  Description of Artificial Sequence: Synthetic oligonucleotide
  Sense strand starting at position 2539 of SEQ ID NO: 1879467
aguuaacuauggguaaaua

SEQ ID NO: 1909203 - RNA, 19 nt, Artificial Sequence
  Description of Artificial Sequence: Synthetic oligonucleotide
  Antisense strand to SEQ ID NO: 1909202
uauuuacccauaguuaacu

SEQ ID NO: 1909204 - RNA, 19 nt, Artificial Sequence
  Description of Artificial Sequence: Synthetic oligonucleotide
  Sense strand starting at position 2740 of SEQ ID NO: 1879467
ugaguauggcaacacauua

SEQ ID NO: 1909205 - RNA, 19 nt, Artificial Sequence
  Description of Artificial Sequence: Synthetic oligonucleotide
  Antisense strand to SEQ ID NO: 1909204
uaauguguugccauacuca

SEQ ID NO: 1909206 - RNA, 19 nt, Artificial Sequence
  Description of Artificial Sequence: Synthetic oligonucleotide
  Sense strand starting at position 2916 of SEQ ID NO: 1879467
guagcagauacauguuaug

SEQ ID NO: 1909207 - RNA, 19 nt, Artificial Sequence
  Description of Artificial Sequence: Synthetic oligonucleotide
  Antisense strand to SEQ ID NO: 1909206
cauaacauguaucugcuac

SEQ ID NO: 1909208 - RNA, 19 nt, Artificial Sequence
  Description of Artificial Sequence: Synthetic oligonucleotide
  Sense strand starting at position 3060 of SEQ ID NO: 1879467
gagaccucgucccuacaga

SEQ ID NO: 1909209 - RNA, 19 nt, Artificial Sequence
  Description of Artificial Sequence: Synthetic oligonucleotide
  Antisense strand to SEQ ID NO: 1909208
ucuguagggacgaggucuc

SEQ ID NO: 1909210 - RNA, 19 nt, Artificial Sequence
  Description of Artificial Sequence: Synthetic oligonucleotide
  Sense strand starting at position 3061 of SEQ ID NO: 1879467
agaccucgucccuacagaa

SEQ ID NO: 1909211 - RNA, 19 nt, Artificial Sequence
  Description of Artificial Sequence: Synthetic oligonucleotide
  Antisense strand to SEQ ID NO: 1909210
uucuguagggacgaggucu

SEQ ID NO: 1909212 - RNA, 19 nt, Artificial Sequence
  Description of Artificial Sequence: Synthetic oligonucleotide
  Sense strand starting at position 3214 of SEQ ID NO: 1879467
uagugagacuugucuuuaa

SEQ ID NO: 1909213 - RNA, 19 nt, Artificial Sequence
  Description of Artificial Sequence: Synthetic oligonucleotide
  Antisense strand to SEQ ID NO: 1909212
uuaaagacaagucucacua

SEQ ID NO: 1909214 - RNA, 19 nt, Artificial Sequence
  Description of Artificial Sequence: Synthetic oligonucleotide
  Sense strand starting at position 3308 of SEQ ID NO: 1879467
ccuuguggauaguuagaau

SEQ ID NO: 1909215 - RNA, 19 nt, Artificial Sequence
  Description of Artificial Sequence: Synthetic oligonucleotide
  Antisense strand to SEQ ID NO: 1909214
auucuaacuauccacaagg

SEQ ID NO: 1909216 - RNA, 19 nt, Artificial Sequence
  Description of Artificial Sequence: Synthetic oligonucleotide
  Sense strand starting at position 3317 of SEQ ID NO: 1879467
uaguuagaauuuggauaga

SEQ ID NO: 1909217 - RNA, 19 nt, Artificial Sequence
  Description of Artificial Sequence: Synthetic oligonucleotide
  Antisense strand to SEQ ID NO: 1909216
ucuauccaaauucuaacua

SEQ ID NO: 1909218 - RNA, 19 nt, Artificial Sequence
  Description of Artificial Sequence: Synthetic oligonucleotide
  Sense strand starting at position 3411 of SEQ ID NO: 1879467
gcauguuuggaggaugaua

SEQ ID NO: 1909219 - RNA, 19 nt, Artificial Sequence
  Description of Artificial Sequence: Synthetic oligonucleotide
  Antisense strand to SEQ ID NO: 1909218
uaucauccuccaaacaugc

SEQ ID NO: 1909220 - RNA, 19 nt, Artificial Sequence
  Description of Artificial Sequence: Synthetic oligonucleotide
  Sense strand starting at position 3423 of SEQ ID NO: 1879467
gaugauaugucauuaugac

SEQ ID NO: 1909221 - RNA, 19 nt, Artificial Sequence
  Description of Artificial Sequence: Synthetic oligonucleotide
  Antisense strand to SEQ ID NO: 1909220
gucauaaugacauaucauc

SEQ ID NO: 1909222 - RNA, 19 nt, Artificial Sequence
  Description of Artificial Sequence: Synthetic oligonucleotide
  Sense strand starting at position 3479 of SEQ ID NO: 1879467
aguuucaguuggguuagaa

SEQ ID NO: 1909223 - RNA, 19 nt, Artificial Sequence
  Description of Artificial Sequence: Synthetic oligonucleotide
  Antisense strand to SEQ ID NO: 1909222
uucuaacccaacugaaacu

SEQ ID NO: 1909224 - RNA, 19 nt, Artificial Sequence
  Description of Artificial Sequence: Synthetic oligonucleotide
  Sense strand starting at position 3495 of SEQ ID NO: 1879467
gaaaguugaagagguguuu

SEQ ID NO: 1909225 - RNA, 19 nt, Artificial Sequence
  Description of Artificial Sequence: Synthetic oligonucleotide
  Antisense strand to SEQ ID NO: 1909224
aaacaccucuucaacuuuc

SEQ ID NO: 1909226 - RNA, 19 nt, Artificial Sequence
  Description of Artificial Sequence: Synthetic oligonucleotide
  Sense strand starting at position 3535 of SEQ ID NO: 1879467
aaggguuuguuaccuuuga

SEQ ID NO: 1909227 - RNA, 19 nt, Artificial Sequence
  Description of Artificial Sequence: Synthetic oligonucleotide
  Antisense strand to SEQ ID NO: 1909226
ucaaagguaacaaacccuu

SEQ ID NO: 1909228 - RNA, 19 nt, Artificial Sequence
  Description of Artificial Sequence: Synthetic oligonucleotide
  Sense strand starting at position 3536 of SEQ ID NO: 1879467
aggguuuguuaccuuugaa

SEQ ID NO: 1909229 - RNA, 19 nt, Artificial Sequence
  Description of Artificial Sequence: Synthetic oligonucleotide
  Antisense strand to SEQ ID NO: 1909228
uucaaagguaacaaacccu

SEQ ID NO: 1909230 - RNA, 19 nt, Artificial Sequence
  Description of Artificial Sequence: Synthetic oligonucleotide
  Sense strand starting at position 3539 of SEQ ID NO: 1879467
guuuguuaccuuugaaaua

SEQ ID NO: 1909231 - RNA, 19 nt, Artificial Sequence
  Description of Artificial Sequence: Synthetic oligonucleotide
  Antisense strand to SEQ ID NO: 1909230
uauuucaaagguaacaaac

SEQ ID NO: 1909232 - RNA, 19 nt, Artificial Sequence
  Description of Artificial Sequence: Synthetic oligonucleotide
  Sense strand starting at position 3591 of SEQ ID NO: 1879467
cagggugaaugguuccuua

SEQ ID NO: 1909233 - RNA, 19 nt, Artificial Sequence
  Description of Artificial Sequence: Synthetic oligonucleotide
  Antisense strand to SEQ ID NO: 1909232
uaaggaaccauucacccug

SEQ ID NO: 1909234 - RNA, 19 nt, Artificial Sequence
  Description of Artificial Sequence: Synthetic oligonucleotide
  Sense strand starting at position 3594 of SEQ ID NO: 1879467
ggugaaugguuccuuauag

SEQ ID NO: 1909235 - RNA, 19 nt, Artificial Sequence
  Description of Artificial Sequence: Synthetic oligonucleotide
  Antisense strand to SEQ ID NO: 1909234
cuauaaggaaccauucacc

SEQ ID NO: 1909236 - RNA, 19 nt, Artificial Sequence
  Description of Artificial Sequence: Synthetic oligonucleotide
  Sense strand starting at position 3595 of SEQ ID NO: 1879467
gugaaugguuccuuauagg

SEQ ID NO: 1909237 - RNA, 19 nt, Artificial Sequence
  Description of Artificial Sequence: Synthetic oligonucleotide
  Antisense strand to SEQ ID NO: 1909236
ccuauaaggaaccauucac

SEQ ID NO: 1909238 - RNA, 19 nt, Artificial Sequence
  Description of Artificial Sequence: Synthetic oligonucleotide
  Sense strand starting at position 3778 of SEQ ID NO: 1879467
auuugugguuacucguaua

SEQ ID NO: 1909239 - RNA, 19 nt, Artificial Sequence
  Description of Artificial Sequence: Synthetic oligonucleotide
  Antisense strand to SEQ ID NO: 1909238
uauacgaguaaccacaaau

SEQ ID NO: 1909240 - RNA, 19 nt, Artificial Sequence
  Description of Artificial Sequence: Synthetic oligonucleotide
  Sense strand starting at position 3783 of SEQ ID NO: 1879467
ugguuacucguauaaauau

SEQ ID NO: 1909241 - RNA, 19 nt, Artificial Sequence
  Description of Artificial Sequence: Synthetic oligonucleotide
  Antisense strand to SEQ ID NO: 1909240
auauuuauacgaguaacca

SEQ ID NO: 1909242 - RNA, 19 nt, Artificial Sequence
  Description of Artificial Sequence: Synthetic oligonucleotide
  Sense strand starting at position 3828 of SEQ ID NO: 1879467
ugagccucaggaugauaau

SEQ ID NO: 1909243 - RNA, 19 nt, Artificial Sequence
  Description of Artificial Sequence: Synthetic oligonucleotide
  Antisense strand to SEQ ID NO: 1909242
auuaucauccugaggcuca

SEQ ID NO: 1909244 - RNA, 19 nt, Artificial Sequence
  Description of Artificial Sequence: Synthetic oligonucleotide
  Sense strand starting at position 3949 of SEQ ID NO: 1879467
ucagcauaucugggccaaa

SEQ ID NO: 1909245 - RNA, 19 nt, Artificial Sequence
  Description of Artificial Sequence: Synthetic oligonucleotide
  Antisense strand to SEQ ID NO: 1909244
uuuggcccagauaugcuga

SEQ ID NO: 1909246 - RNA, 19 nt, Artificial Sequence
  Description of Artificial Sequence: Synthetic oligonucleotide
  Sense strand starting at position 232 of SEQ ID NO: 1879468
ucauaaagcuaagaaaugu

SEQ ID NO: 1909247 - RNA, 19 nt, Artificial Sequence
  Description of Artificial Sequence: Synthetic oligonucleotide
  Antisense strand to SEQ ID NO: 1909246
acauuucuuagcuuuauga

SEQ ID NO: 1909248 - RNA, 19 nt, Artificial Sequence
  Description of Artificial Sequence: Synthetic oligonucleotide
  Sense strand starting at position 476 of SEQ ID NO: 1879468
ucggcaacaucagacaaau

SEQ ID NO: 1909249 - RNA, 19 nt, Artificial Sequence
  Description of Artificial Sequence: Synthetic oligonucleotide
  Antisense strand to SEQ ID NO: 1909248
auuugucugauguugccga

SEQ ID NO: 1909250 - RNA, 19 nt, Artificial Sequence
  Description of Artificial Sequence: Synthetic oligonucleotide
  Sense strand starting at position 503 of SEQ ID NO: 1879468
gggccuuaucuaugcgcuu

SEQ ID NO: 1909251 - RNA, 19 nt, Artificial Sequence
  Description of Artificial Sequence: Synthetic oligonucleotide
  Antisense strand to SEQ ID NO: 1909250
aagcgcauagauaaggccc

SEQ ID NO: 1909252 - RNA, 19 nt, Artificial Sequence
  Description of Artificial Sequence: Synthetic oligonucleotide
  Sense strand starting at position 504 of SEQ ID NO: 1879468
ggccuuaucuaugcgcuuu

SEQ ID NO: 1909253 - RNA, 19 nt, Artificial Sequence
  Description of Artificial Sequence: Synthetic oligonucleotide
  Antisense strand to SEQ ID NO: 1909252
aaagcgcauagauaaggcc

SEQ ID NO: 1909254 - RNA, 19 nt, Artificial Sequence
  Description of Artificial Sequence: Synthetic oligonucleotide
  Sense strand starting at position 510 of SEQ ID NO: 1879468
aucuaugcgcuuugaaaga

SEQ ID NO: 1909255 - RNA, 19 nt, Artificial Sequence
  Description of Artificial Sequence: Synthetic oligonucleotide
  Antisense strand to SEQ ID NO: 1909254
ucuuucaaagcgcauagau

SEQ ID NO: 1909256 - RNA, 19 nt, Artificial Sequence
  Description of Artificial Sequence: Synthetic oligonucleotide
  Sense strand starting at position 690 of SEQ ID NO: 1879468
gcuaucuaucuagagacau

SEQ ID NO: 1909257 - RNA, 19 nt, Artificial Sequence
  Description of Artificial Sequence: Synthetic oligonucleotide
  Antisense strand to SEQ ID NO: 1909256
augucucuagauagauagc

SEQ ID NO: 1909258 - RNA, 19 nt, Artificial Sequence
  Description of Artificial Sequence: Synthetic oligonucleotide
  Sense strand starting at position 1182 of SEQ ID NO: 1879468
ggcggagcacuuuauguua

SEQ ID NO: 1909259 - RNA, 19 nt, Artificial Sequence
  Description of Artificial Sequence: Synthetic oligonucleotide
  Antisense strand to SEQ ID NO: 1909258
uaacauaaagugcuccgcc

SEQ ID NO: 1909260 - RNA, 19 nt, Artificial Sequence
  Description of Artificial Sequence: Synthetic oligonucleotide
  Sense strand starting at position 1184 of SEQ ID NO: 1879468
cggagcacuuuauguuauu

SEQ ID NO: 1909261 - RNA, 19 nt, Artificial Sequence
  Description of Artificial Sequence: Synthetic oligonucleotide
  Antisense strand to SEQ ID NO: 1909260
aauaacauaaagugcuccg

SEQ ID NO: 1909262 - RNA, 19 nt, Artificial Sequence
  Description of Artificial Sequence: Synthetic oligonucleotide
  Sense strand starting at position 1185 of SEQ ID NO: 1879468
ggagcacuuuauguuauua

SEQ ID NO: 1909263 - RNA, 19 nt, Artificial Sequence
  Description of Artificial Sequence: Synthetic oligonucleotide
  Antisense strand to SEQ ID NO: 1909262
uaauaacauaaagugcucc

SEQ ID NO: 1909264 - RNA, 19 nt, Artificial Sequence
  Description of Artificial Sequence: Synthetic oligonucleotide
  Sense strand starting at position 1187 of SEQ ID NO: 1879468
agcacuuuauguuauuaag

SEQ ID NO: 1909265 - RNA, 19 nt, Artificial Sequence
  Description of Artificial Sequence: Synthetic oligonucleotide
  Antisense strand to SEQ ID NO: 1909264
cuuaauaacauaaagugcu

SEQ ID NO: 1909266 - RNA, 19 nt, Artificial Sequence
  Description of Artificial Sequence: Synthetic oligonucleotide
  Sense strand starting at position 1261 of SEQ ID NO: 1879468
uggccaaggugagaagauu

SEQ ID NO: 1909267 - RNA, 19 nt, Artificial Sequence
  Description of Artificial Sequence: Synthetic oligonucleotide
  Antisense strand to SEQ ID NO: 1909266
aaucuucucaccuuggcca

SEQ ID NO: 1909268 - RNA, 19 nt, Artificial Sequence
  Description of Artificial Sequence: Synthetic oligonucleotide
  Sense strand starting at position 1856 of SEQ ID NO: 1879468
ggaggucacucuuaccagu

SEQ ID NO: 1909269 - RNA, 19 nt, Artificial Sequence
  Description of Artificial Sequence: Synthetic oligonucleotide
  Antisense strand to SEQ ID NO: 1909268
acugguaagagugaccucc

SEQ ID NO: 1909270 - RNA, 19 nt, Artificial Sequence
  Description of Artificial Sequence: Synthetic oligonucleotide
  Sense strand starting at position 2547 of SEQ ID NO: 1879468
cucugacgguccuuuguaa

SEQ ID NO: 1909271 - RNA, 19 nt, Artificial Sequence
  Description of Artificial Sequence: Synthetic oligonucleotide
  Antisense strand to SEQ ID NO: 1909270
uuacaaaggaccgucagag

SEQ ID NO: 1909272 - RNA, 19 nt, Artificial Sequence
  Description of Artificial Sequence: Synthetic oligonucleotide
  Sense strand starting at position 2554 of SEQ ID NO: 1879468
gguccuuuguaauagcauu

SEQ ID NO: 1909273 - RNA, 19 nt, Artificial Sequence
  Description of Artificial Sequence: Synthetic oligonucleotide
  Antisense strand to SEQ ID NO: 1909272
aaugcuauuacaaaggacc

SEQ ID NO: 1909274 - RNA, 19 nt, Artificial Sequence
  Description of Artificial Sequence: Synthetic oligonucleotide
  Sense strand starting at position 3023 of SEQ ID NO: 1879468
ggagguugauguuacaaug

SEQ ID NO: 1909275 - RNA, 19 nt, Artificial Sequence
  Description of Artificial Sequence: Synthetic oligonucleotide
  Antisense strand to SEQ ID NO: 1909274
cauuguaacaucaaccucc

SEQ ID NO: 1909276 - RNA, 19 nt, Artificial Sequence
  Description of Artificial Sequence: Synthetic oligonucleotide
  Sense strand starting at position 3033 of SEQ ID NO: 1879468
guuacaaugcgcugagauu

SEQ ID NO: 1909277 - RNA, 19 nt, Artificial Sequence
  Description of Artificial Sequence: Synthetic oligonucleotide
  Antisense strand to SEQ ID NO: 1909276
aaucucagcgcauuguaac

SEQ ID NO: 1909278 - RNA, 19 nt, Artificial Sequence
  Description of Artificial Sequence: Synthetic oligonucleotide
  Sense strand starting at position 3322 of SEQ ID NO: 1879468
gcgcuuguagucuccgcaa

SEQ ID NO: 1909279 - RNA, 19 nt, Artificial Sequence
  Description of Artificial Sequence: Synthetic oligonucleotide
  Antisense strand to SEQ ID NO: 1909278
uugcggagacuacaagcgc

SEQ ID NO: 1909280 - RNA, 19 nt, Artificial Sequence
  Description of Artificial Sequence: Synthetic oligonucleotide
  Sense strand starting at position 3324 of SEQ ID NO: 1879468
gcuuguagucuccgcaacu

SEQ ID NO: 1909281 - RNA, 19 nt, Artificial Sequence
  Description of Artificial Sequence: Synthetic oligonucleotide
  Antisense strand to SEQ ID NO: 1909280
aguugcggagacuacaagc

SEQ ID NO: 1909282 - RNA, 19 nt, Artificial Sequence
  Description of Artificial Sequence: Synthetic oligonucleotide
  Sense strand starting at position 3325 of SEQ ID NO: 1879468
cuuguagucuccgcaacuu

SEQ ID NO: 1909283 - RNA, 19 nt, Artificial Sequence
  Description of Artificial Sequence: Synthetic oligonucleotide
  Antisense strand to SEQ ID NO: 1909282
aaguugcggagacuacaag

SEQ ID NO: 1909284 - RNA, 19 nt, Artificial Sequence
  Description of Artificial Sequence: Synthetic oligonucleotide
  Sense strand starting at position 3967 of SEQ ID NO: 1879468
gcuggaguguagucgcgua

SEQ ID NO: 1909285 - RNA, 19 nt, Artificial Sequence
  Description of Artificial Sequence: Synthetic oligonucleotide
  Antisense strand to SEQ ID NO: 1909284
uacgcgacuacacuccagc

SEQ ID NO: 1909286 - RNA, 19 nt, Artificial Sequence
  Description of Artificial Sequence: Synthetic oligonucleotide
  Sense strand starting at position 3969 of SEQ ID NO: 1879468
uggaguguagucgcguaau

SEQ ID NO: 1909287 - RNA, 19 nt, Artificial Sequence
  Description of Artificial Sequence: Synthetic oligonucleotide
  Antisense strand to SEQ ID NO: 1909286
auuacgcgacuacacucca

SEQ ID NO: 1909288 - RNA, 19 nt, Artificial Sequence
  Description of Artificial Sequence: Synthetic oligonucleotide
  Sense strand starting at position 3970 of SEQ ID NO: 1879468
ggaguguagucgcguaauc

SEQ ID NO: 1909289 - RNA, 19 nt, Artificial Sequence
  Description of Artificial Sequence: Synthetic oligonucleotide
  Antisense strand to SEQ ID NO: 1909288
gauuacgcgacuacacucc

SEQ ID NO: 1909290 - RNA, 19 nt, Artificial Sequence
  Description of Artificial Sequence: Synthetic oligonucleotide
  Sense strand starting at position 3971 of SEQ ID NO: 1879468
gaguguagucgcguaaucu

SEQ ID NO: 1909291 - RNA, 19 nt, Artificial Sequence
  Description of Artificial Sequence: Synthetic oligonucleotide
  Antisense strand to SEQ ID NO: 1909290
agauuacgcgacuacacuc

SEQ ID NO: 1909292 - RNA, 19 nt, Artificial Sequence
  Description of Artificial Sequence: Synthetic oligonucleotide
  Sense strand starting at position 3972 of SEQ ID NO: 1879468
aguguagucgcguaaucuc

SEQ ID NO: 1909293 - RNA, 19 nt, Artificial Sequence
  Description of Artificial Sequence: Synthetic oligonucleotide
  Antisense strand to SEQ ID NO: 1909292
gagauuacgcgacuacacu

SEQ ID NO: 1909294 - RNA, 19 nt, Artificial Sequence
  Description of Artificial Sequence: Synthetic oligonucleotide
  Sense strand starting at position 38 of SEQ ID NO: 1879469
agaugaaguucuuccauua

SEQ ID NO: 1909295 - RNA, 19 nt, Artificial Sequence
  Description of Artificial Sequence: Synthetic oligonucleotide
  Antisense strand to SEQ ID NO: 1909294
uaauggaagaacuucaucu

SEQ ID NO: 1909296 - RNA, 19 nt, Artificial Sequence
  Description of Artificial Sequence: Synthetic oligonucleotide
  Sense strand starting at position 73 of SEQ ID NO: 1879469
aggagauucuguuucucag

SEQ ID NO: 1909297 - RNA, 19 nt, Artificial Sequence
  Description of Artificial Sequence: Synthetic oligonucleotide
  Antisense strand to SEQ ID NO: 1909296
cugagaaacagaaucuccu

SEQ ID NO: 1909298 - RNA, 19 nt, Artificial Sequence
  Description of Artificial Sequence: Synthetic oligonucleotide
  Sense strand starting at position 75 of SEQ ID NO: 1879469
gagauucuguuucucagac

SEQ ID NO: 1909299 - RNA, 19 nt, Artificial Sequence
  Description of Artificial Sequence: Synthetic oligonucleotide
  Antisense strand to SEQ ID NO: 1909298
gucugagaaacagaaucuc

SEQ ID NO: 1909300 - RNA, 19 nt, Artificial Sequence
  Description of Artificial Sequence: Synthetic oligonucleotide
  Sense strand starting at position 76 of SEQ ID NO: 1879469
agauucuguuucucagaca

SEQ ID NO: 1909301 - RNA, 19 nt, Artificial Sequence
  Description of Artificial Sequence: Synthetic oligonucleotide
  Antisense strand to SEQ ID NO: 1909300
ugucugagaaacagaaucu

SEQ ID NO: 1909302 - RNA, 19 nt, Artificial Sequence
  Description of Artificial Sequence: Synthetic oligonucleotide
  Sense strand starting at position 143 of SEQ ID NO: 1879469
gugguccaccaguagaaau

SEQ ID NO: 1909303 - RNA, 19 nt, Artificial Sequence
  Description of Artificial Sequence: Synthetic oligonucleotide
  Antisense strand to SEQ ID NO: 1909302
auuucuacugguggaccac

SEQ ID NO: 1909304 - RNA, 19 nt, Artificial Sequence
  Description of Artificial Sequence: Synthetic oligonucleotide
  Sense strand starting at position 394 of SEQ ID NO: 1879469
guaacuuuaaaguagguga

SEQ ID NO: 1909305 - RNA, 19 nt, Artificial Sequence
  Description of Artificial Sequence: Synthetic oligonucleotide
  Antisense strand to SEQ ID NO: 1909304
ucaccuacuuuaaaguuac

SEQ ID NO: 1909306 - RNA, 19 nt, Artificial Sequence
  Description of Artificial Sequence: Synthetic oligonucleotide
  Sense strand starting at position 397 of SEQ ID NO: 1879469
acuuuaaaguaggugaaga

SEQ ID NO: 1909307 - RNA, 19 nt, Artificial Sequence
  Description of Artificial Sequence: Synthetic oligonucleotide
  Antisense strand to SEQ ID NO: 1909306
ucuucaccuacuuuaaagu

SEQ ID NO: 1909308 - RNA, 19 nt, Artificial Sequence
  Description of Artificial Sequence: Synthetic oligonucleotide
  Sense strand starting at position 464 of SEQ ID NO: 1879469
ggagguauuguucaggcua

SEQ ID NO: 1909309 - RNA, 19 nt, Artificial Sequence
  Description of Artificial Sequence: Synthetic oligonucleotide
  Antisense strand to SEQ ID NO: 1909308
uagccugaacaauaccucc

SEQ ID NO: 1909310 - RNA, 19 nt, Artificial Sequence
  Description of Artificial Sequence: Synthetic oligonucleotide
  Sense strand starting at position 494 of SEQ ID NO: 1879469
ggugcugguaaauacaauu

SEQ ID NO: 1909311 - RNA, 19 nt, Artificial Sequence
  Description of Artificial Sequence: Synthetic oligonucleotide
  Antisense strand to SEQ ID NO: 1909310
aauuguauuuaccagcacc

SEQ ID NO: 1909312 - RNA, 19 nt, Artificial Sequence
  Description of Artificial Sequence: Synthetic oligonucleotide
  Sense strand starting at position 600 of SEQ ID NO: 1879469
cgcuaugauuuaguagcaa

SEQ ID NO: 1909313 - RNA, 19 nt, Artificial Sequence
  Description of Artificial Sequence: Synthetic oligonucleotide
  Antisense strand to SEQ ID NO: 1909312
uugcuacuaaaucauagcg

SEQ ID NO: 1909314 - RNA, 19 nt, Artificial Sequence
  Description of Artificial Sequence: Synthetic oligonucleotide
  Sense strand starting at position 754 of SEQ ID NO: 1879469
gggaaaggaaguugugcua

SEQ ID NO: 1909315 - RNA, 19 nt, Artificial Sequence
  Description of Artificial Sequence: Synthetic oligonucleotide
  Antisense strand to SEQ ID NO: 1909314
uagcacaacuuccuuuccc

SEQ ID NO: 1909316 - RNA, 19 nt, Artificial Sequence
  Description of Artificial Sequence: Synthetic oligonucleotide
  Sense strand starting at position 795 of SEQ ID NO: 1879469
gucuuagugaaccagaguu

SEQ ID NO: 1909317 - RNA, 19 nt, Artificial Sequence
  Description of Artificial Sequence: Synthetic oligonucleotide
  Antisense strand to SEQ ID NO: 1909316
aacucugguucacuaagac

SEQ ID NO: 1909318 - RNA, 19 nt, Artificial Sequence
  Description of Artificial Sequence: Synthetic oligonucleotide
  Sense strand starting at position 834 of SEQ ID NO: 1879469
acuggaugccuguaacaac

SEQ ID NO: 1909319 - RNA, 19 nt, Artificial Sequence
  Description of Artificial Sequence: Synthetic oligonucleotide
  Antisense strand to SEQ ID NO: 1909318
guuguuacaggcauccagu

SEQ ID NO: 1909320 - RNA, 19 nt, Artificial Sequence
  Description of Artificial Sequence: Synthetic oligonucleotide
  Sense strand starting at position 1099 of SEQ ID NO: 1879469
ucacacugugguuaggauu

SEQ ID NO: 1909321 - RNA, 19 nt, Artificial Sequence
  Description of Artificial Sequence: Synthetic oligonucleotide
  Antisense strand to SEQ ID NO: 1909320
aauccuaaccacaguguga

SEQ ID NO: 1909322 - RNA, 19 nt, Artificial Sequence
  Description of Artificial Sequence: Synthetic oligonucleotide
  Sense strand starting at position 1297 of SEQ ID NO: 1879469
acugcagagcaucaguaau

SEQ ID NO: 1909323 - RNA, 19 nt, Artificial Sequence
  Description of Artificial Sequence: Synthetic oligonucleotide
  Antisense strand to SEQ ID NO: 1909322
auuacugaugcucugcagu

SEQ ID NO: 1909324 - RNA, 19 nt, Artificial Sequence
  Description of Artificial Sequence: Synthetic oligonucleotide
  Sense strand starting at position 1485 of SEQ ID NO: 1879469
cuguauuaacaccaaacgu

SEQ ID NO: 1909325 - RNA, 19 nt, Artificial Sequence
  Description of Artificial Sequence: Synthetic oligonucleotide
  Antisense strand to SEQ ID NO: 1909324
acguuugguguuaauacag

SEQ ID NO: 1909326 - RNA, 19 nt, Artificial Sequence
  Description of Artificial Sequence: Synthetic oligonucleotide
  Sense strand starting at position 1547 of SEQ ID NO: 1879469
aguuuagucccggucgagu

SEQ ID NO: 1909327 - RNA, 19 nt, Artificial Sequence
  Description of Artificial Sequence: Synthetic oligonucleotide
  Antisense strand to SEQ ID NO: 1909326
acucgaccgggacuaaacu

SEQ ID NO: 1909328 - RNA, 19 nt, Artificial Sequence
  Description of Artificial Sequence: Synthetic oligonucleotide
  Sense strand starting at position 1548 of SEQ ID NO: 1879469
guuuagucccggucgaguu

SEQ ID NO: 1909329 - RNA, 19 nt, Artificial Sequence
  Description of Artificial Sequence: Synthetic oligonucleotide
  Antisense strand to SEQ ID NO: 1909328
aacucgaccgggacuaaac

SEQ ID NO: 1909330 - RNA, 19 nt, Artificial Sequence
  Description of Artificial Sequence: Synthetic oligonucleotide
  Sense strand starting at position 1644 of SEQ ID NO: 1879469
uguaauuucucuuuggcuu

SEQ ID NO: 1909331 - RNA, 19 nt, Artificial Sequence
  Description of Artificial Sequence: Synthetic oligonucleotide
  Antisense strand to SEQ ID NO: 1909330
aagccaaagagaaauuaca

SEQ ID NO: 1909332 - RNA, 19 nt, Artificial Sequence
  Description of Artificial Sequence: Synthetic oligonucleotide
  Sense strand starting at position 1645 of SEQ ID NO: 1879469
guaauuucucuuuggcuuu

SEQ ID NO: 1909333 - RNA, 19 nt, Artificial Sequence
  Description of Artificial Sequence: Synthetic oligonucleotide
  Antisense strand to SEQ ID NO: 1909332
aaagccaaagagaaauuac

SEQ ID NO: 1909334 - RNA, 19 nt, Artificial Sequence
  Description of Artificial Sequence: Synthetic oligonucleotide
  Sense strand starting at position 1830 of SEQ ID NO: 1879469
ccaguuauccuugauaucc

SEQ ID NO: 1909335 - RNA, 19 nt, Artificial Sequence
  Description of Artificial Sequence: Synthetic oligonucleotide
  Antisense strand to SEQ ID NO: 1909334
ggauaucaaggauaacugg

SEQ ID NO: 1909336 - RNA, 19 nt, Artificial Sequence
  Description of Artificial Sequence: Synthetic oligonucleotide
  Sense strand starting at position 2156 of SEQ ID NO: 1879469
uuggauguguaaccuuaga

SEQ ID NO: 1909337 - RNA, 19 nt, Artificial Sequence
  Description of Artificial Sequence: Synthetic oligonucleotide
  Antisense strand to SEQ ID NO: 1909336
ucuaagguuacacauccaa

SEQ ID NO: 1909338 - RNA, 19 nt, Artificial Sequence
  Description of Artificial Sequence: Synthetic oligonucleotide
  Sense strand starting at position 2347 of SEQ ID NO: 1879469
agacuuugcagagguaaug

SEQ ID NO: 1909339 - RNA, 19 nt, Artificial Sequence
  Description of Artificial Sequence: Synthetic oligonucleotide
  Antisense strand to SEQ ID NO: 1909338
cauuaccucugcaaagucu

SEQ ID NO: 1909340 - RNA, 19 nt, Artificial Sequence
  Description of Artificial Sequence: Synthetic oligonucleotide
  Sense strand starting at position 2376 of SEQ ID NO: 1879469
aucaguugaccuugagacu

SEQ ID NO: 1909341 - RNA, 19 nt, Artificial Sequence
  Description of Artificial Sequence: Synthetic oligonucleotide
  Antisense strand to SEQ ID NO: 1909340
agucucaaggucaacugau

SEQ ID NO: 1909342 - RNA, 19 nt, Artificial Sequence
  Description of Artificial Sequence: Synthetic oligonucleotide
  Sense strand starting at position 2397 of SEQ ID NO: 1879469
gugggccugaccuaaugau

SEQ ID NO: 1909343 - RNA, 19 nt, Artificial Sequence
  Description of Artificial Sequence: Synthetic oligonucleotide
  Antisense strand to SEQ ID NO: 1909342
aucauuaggucaggcccac

SEQ ID NO: 1909344 - RNA, 19 nt, Artificial Sequence
  Description of Artificial Sequence: Synthetic oligonucleotide
  Sense strand starting at position 2401 of SEQ ID NO: 1879469
gccugaccuaaugauguga

SEQ ID NO: 1909345 - RNA, 19 nt, Artificial Sequence
  Description of Artificial Sequence: Synthetic oligonucleotide
  Antisense strand to SEQ ID NO: 1909344
ucacaucauuaggucaggc

SEQ ID NO: 1909346 - RNA, 19 nt, Artificial Sequence
  Description of Artificial Sequence: Synthetic oligonucleotide
  Sense strand starting at position 2471 of SEQ ID NO: 1879469
aaaucuguagcaugagaag

SEQ ID NO: 1909347 - RNA, 19 nt, Artificial Sequence
  Description of Artificial Sequence: Synthetic oligonucleotide
  Antisense strand to SEQ ID NO: 1909346
cuucucaugcuacagauuu

SEQ ID NO: 1909348 - RNA, 19 nt, Artificial Sequence
  Description of Artificial Sequence: Synthetic oligonucleotide
  Sense strand starting at position 2742 of SEQ ID NO: 1879469
gaaccauguugagcucaua

SEQ ID NO: 1909349 - RNA, 19 nt, Artificial Sequence
  Description of Artificial Sequence: Synthetic oligonucleotide
  Antisense strand to SEQ ID NO: 1909348
uaugagcucaacaugguuc

SEQ ID NO: 1909350 - RNA, 19 nt, Artificial Sequence
  Description of Artificial Sequence: Synthetic oligonucleotide
  Sense strand starting at position 2745 of SEQ ID NO: 1879469
ccauguugagcucauagga

SEQ ID NO: 1909351 - RNA, 19 nt, Artificial Sequence
  Description of Artificial Sequence: Synthetic oligonucleotide
  Antisense strand to SEQ ID NO: 1909350
uccuaugagcucaacaugg

SEQ ID NO: 1909352 - RNA, 19 nt, Artificial Sequence
  Description of Artificial Sequence: Synthetic oligonucleotide
  Sense strand starting at position 2819 of SEQ ID NO: 1879469
uguggucauuuguuacuca

SEQ ID NO: 1909353 - RNA, 19 nt, Artificial Sequence
  Description of Artificial Sequence: Synthetic oligonucleotide
  Antisense strand to SEQ ID NO: 1909352
ugaguaacaaaugaccaca

SEQ ID NO: 1909354 - RNA, 19 nt, Artificial Sequence
  Description of Artificial Sequence: Synthetic oligonucleotide
  Sense strand starting at position 2966 of SEQ ID NO: 1879469
guguucuccaccuaggaga

SEQ ID NO: 1909355 - RNA, 19 nt, Artificial Sequence
  Description of Artificial Sequence: Synthetic oligonucleotide
  Antisense strand to SEQ ID NO: 1909354
ucuccuagguggagaacac

SEQ ID NO: 1909356 - RNA, 19 nt, Artificial Sequence
  Description of Artificial Sequence: Synthetic oligonucleotide
  Sense strand starting at position 3052 of SEQ ID NO: 1879469
cuguuucucccauauguaa

SEQ ID NO: 1909357 - RNA, 19 nt, Artificial Sequence
  Description of Artificial Sequence: Synthetic oligonucleotide
  Antisense strand to SEQ ID NO: 1909356
uuacauaugggagaaacag

SEQ ID NO: 1909358 - RNA, 19 nt, Artificial Sequence
  Description of Artificial Sequence: Synthetic oligonucleotide
  Sense strand starting at position 3457 of SEQ ID NO: 1879469
cuaugaagacuuugccaaa

SEQ ID NO: 1909359 - RNA, 19 nt, Artificial Sequence
  Description of Artificial Sequence: Synthetic oligonucleotide
  Antisense strand to SEQ ID NO: 1909358
uuuggcaaagucuucauag

SEQ ID NO: 1909360 - RNA, 19 nt, Artificial Sequence
  Description of Artificial Sequence: Synthetic oligonucleotide
  Sense strand starting at position 3630 of SEQ ID NO: 1879469
uguauuuaguucuugguau

SEQ ID NO: 1909361 - RNA, 19 nt, Artificial Sequence
  Description of Artificial Sequence: Synthetic oligonucleotide
  Antisense strand to SEQ ID NO: 1909360
auaccaagaacuaaauaca

SEQ ID NO: 1909362 - RNA, 19 nt, Artificial Sequence
  Description of Artificial Sequence: Synthetic oligonucleotide
  Sense strand starting at position 3632 of SEQ ID NO: 1879469
uauuuaguucuugguaugu

SEQ ID NO: 1909363 - RNA, 19 nt, Artificial Sequence
  Description of Artificial Sequence: Synthetic oligonucleotide
  Antisense strand to SEQ ID NO: 1909362
acauaccaagaacuaaaua

SEQ ID NO: 1909364 - RNA, 19 nt, Artificial Sequence
  Description of Artificial Sequence: Synthetic oligonucleotide
  Sense strand starting at position 3666 of SEQ ID NO: 1879469
gcaccauucuacuuggaag

SEQ ID NO: 1909365 - RNA, 19 nt, Artificial Sequence
  Description of Artificial Sequence: Synthetic oligonucleotide
  Antisense strand to SEQ ID NO: 1909364
cuuccaaguagaauggugc

SEQ ID NO: 1909366 - RNA, 19 nt, Artificial Sequence
  Description of Artificial Sequence: Synthetic oligonucleotide
  Sense strand starting at position 3852 of SEQ ID NO: 1879469
cccuuauguguccaagaaa

SEQ ID NO: 1909367 - RNA, 19 nt, Artificial Sequence
  Description of Artificial Sequence: Synthetic oligonucleotide
  Antisense strand to SEQ ID NO: 1909366
uuucuuggacacauaaggg

SEQ ID NO: 1909368 - RNA, 19 nt, Artificial Sequence
  Description of Artificial Sequence: Synthetic oligonucleotide
  Sense strand starting at position 3855 of SEQ ID NO: 1879469
uuauguguccaagaaacuc

SEQ ID NO: 1909369 - RNA, 19 nt, Artificial Sequence
  Description of Artificial Sequence: Synthetic oligonucleotide
  Antisense strand to SEQ ID NO: 1909368
gaguuucuuggacacauaa

SEQ ID NO: 1909370 - RNA, 19 nt, Artificial Sequence
  Description of Artificial Sequence: Synthetic oligonucleotide
  Sense strand starting at position 3863 of SEQ ID NO: 1879469
ccaagaaacucaucugggu

SEQ ID NO: 1909371 - RNA, 19 nt, Artificial Sequence
  Description of Artificial Sequence: Synthetic oligonucleotide
  Antisense strand to SEQ ID NO: 1909370
acccagaugaguuucuugg

SEQ ID NO: 1909372 - RNA, 19 nt, Artificial Sequence
  Description of Artificial Sequence: Synthetic oligonucleotide
  Sense strand starting at position 3895 of SEQ ID NO: 1879469
ucuguaguucuagaucuac

SEQ ID NO: 1909373 - RNA, 19 nt, Artificial Sequence
  Description of Artificial Sequence: Synthetic oligonucleotide
  Antisense strand to SEQ ID NO: 1909372
guagaucuagaacuacaga

SEQ ID NO: 1909374 - RNA, 19 nt, Artificial Sequence
  Description of Artificial Sequence: Synthetic oligonucleotide
  Sense strand starting at position 137 of SEQ ID NO: 1879470
gcauguuaucauuggguga

SEQ ID NO: 1909375 - RNA, 19 nt, Artificial Sequence
  Description of Artificial Sequence: Synthetic oligonucleotide
  Antisense strand to SEQ ID NO: 1909374
ucacccaaugauaacaugc

SEQ ID NO: 1909376 - RNA, 19 nt, Artificial Sequence
  Description of Artificial Sequence: Synthetic oligonucleotide
  Sense strand starting at position 206 of SEQ ID NO: 1879470
aggagaugauaauaacacu

SEQ ID NO: 1909377 - RNA, 19 nt, Artificial Sequence
  Description of Artificial Sequence: Synthetic oligonucleotide
  Antisense strand to SEQ ID NO: 1909376
aguguuauuaucaucuccu

SEQ ID NO: 1909378 - RNA, 19 nt, Artificial Sequence
  Description of Artificial Sequence: Synthetic oligonucleotide
  Sense strand starting at position 409 of SEQ ID NO: 1879470
ccggcuaauuuagaauuga

SEQ ID NO: 1909379 - RNA, 19 nt, Artificial Sequence
  Description of Artificial Sequence: Synthetic oligonucleotide
  Antisense strand to SEQ ID NO: 1909378
ucaauucuaaauuagccgg

SEQ ID NO: 1909380 - RNA, 19 nt, Artificial Sequence
  Description of Artificial Sequence: Synthetic oligonucleotide
  Sense strand starting at position 435 of SEQ ID NO: 1879470
uauguacaguaucuuagua

SEQ ID NO: 1909381 - RNA, 19 nt, Artificial Sequence
  Description of Artificial Sequence: Synthetic oligonucleotide
  Antisense strand to SEQ ID NO: 1909380
uacuaagauacuguacaua

SEQ ID NO: 1909382 - RNA, 19 nt, Artificial Sequence
  Description of Artificial Sequence: Synthetic oligonucleotide
  Sense strand starting at position 440 of SEQ ID NO: 1879470
acaguaucuuaguacagga

SEQ ID NO: 1909383 - RNA, 19 nt, Artificial Sequence
  Description of Artificial Sequence: Synthetic oligonucleotide
  Antisense strand to SEQ ID NO: 1909382
uccuguacuaagauacugu

SEQ ID NO: 1909384 - RNA, 19 nt, Artificial Sequence
  Description of Artificial Sequence: Synthetic oligonucleotide
  Sense strand starting at position 481 of SEQ ID NO: 1879470
ggcagccauucuuauuuaa

SEQ ID NO: 1909385 - RNA, 19 nt, Artificial Sequence
  Description of Artificial Sequence: Synthetic oligonucleotide
  Antisense strand to SEQ ID NO: 1909384
uuaaauaagaauggcugcc

SEQ ID NO: 1909386 - RNA, 19 nt, Artificial Sequence
  Description of Artificial Sequence: Synthetic oligonucleotide
  Sense strand starting at position 524 of SEQ ID NO: 1879470
gugagacuguguuugcuua

SEQ ID NO: 1909387 - RNA, 19 nt, Artificial Sequence
  Description of Artificial Sequence: Synthetic oligonucleotide
  Antisense strand to SEQ ID NO: 1909386
uaagcaaacacagucucac

SEQ ID NO: 1909388 - RNA, 19 nt, Artificial Sequence
  Description of Artificial Sequence: Synthetic oligonucleotide
  Sense strand starting at position 595 of SEQ ID NO: 1879470
ccaaaugaauguguuguga

SEQ ID NO: 1909389 - RNA, 19 nt, Artificial Sequence
  Description of Artificial Sequence: Synthetic oligonucleotide
  Antisense strand to SEQ ID NO: 1909388
ucacaacacauucauuugg

SEQ ID NO: 1909390 - RNA, 19 nt, Artificial Sequence
  Description of Artificial Sequence: Synthetic oligonucleotide
  Sense strand starting at position 698 of SEQ ID NO: 1879470
ggaaaugugccagacaguc

SEQ ID NO: 1909391 - RNA, 19 nt, Artificial Sequence
  Description of Artificial Sequence: Synthetic oligonucleotide
  Antisense strand to SEQ ID NO: 1909390
gacugucuggcacauuucc

SEQ ID NO: 1909392 - RNA, 19 nt, Artificial Sequence
  Description of Artificial Sequence: Synthetic oligonucleotide
  Sense strand starting at position 706 of SEQ ID NO: 1879470
gccagacagucauuccaag

SEQ ID NO: 1909393 - RNA, 19 nt, Artificial Sequence
  Description of Artificial Sequence: Synthetic oligonucleotide
  Antisense strand to SEQ ID NO: 1909392
cuuggaaugacugucuggc

SEQ ID NO: 1909394 - RNA, 19 nt, Artificial Sequence
  Description of Artificial Sequence: Synthetic oligonucleotide
  Sense strand starting at position 783 of SEQ ID NO: 1879470
gaaacuggcucagaagaga

SEQ ID NO: 1909395 - RNA, 19 nt, Artificial Sequence
  Description of Artificial Sequence: Synthetic oligonucleotide
  Antisense strand to SEQ ID NO: 1909394
ucucuucugagccaguuuc

SEQ ID NO: 1909396 - RNA, 19 nt, Artificial Sequence
  Description of Artificial Sequence: Synthetic oligonucleotide
  Sense strand starting at position 914 of SEQ ID NO: 1879470
ggaguuucuugggcaaaga

SEQ ID NO: 1909397 - RNA, 19 nt, Artificial Sequence
  Description of Artificial Sequence: Synthetic oligonucleotide
  Antisense strand to SEQ ID NO: 1909396
ucuuugcccaagaaacucc

SEQ ID NO: 1909398 - RNA, 19 nt, Artificial Sequence
  Description of Artificial Sequence: Synthetic oligonucleotide
  Sense strand starting at position 915 of SEQ ID NO: 1879470
gaguuucuugggcaaagag

SEQ ID NO: 1909399 - RNA, 19 nt, Artificial Sequence
  Description of Artificial Sequence: Synthetic oligonucleotide
  Antisense strand to SEQ ID NO: 1909398
cucuuugcccaagaaacuc

SEQ ID NO: 1909400 - RNA, 19 nt, Artificial Sequence
  Description of Artificial Sequence: Synthetic oligonucleotide
  Sense strand starting at position 970 of SEQ ID NO: 1879470
ccugacaacuguguagaga

SEQ ID NO: 1909401 - RNA, 19 nt, Artificial Sequence
  Description of Artificial Sequence: Synthetic oligonucleotide
  Antisense strand to SEQ ID NO: 1909400
ucucuacacaguugucagg

SEQ ID NO: 1909402 - RNA, 19 nt, Artificial Sequence
  Description of Artificial Sequence: Synthetic oligonucleotide
  Sense strand starting at position 985 of SEQ ID NO: 1879470
gagacaugucgugagggau

SEQ ID NO: 1909403 - RNA, 19 nt, Artificial Sequence
  Description of Artificial Sequence: Synthetic oligonucleotide
  Antisense strand to SEQ ID NO: 1909402
aucccucacgacaugucuc

SEQ ID NO: 1909404 - RNA, 19 nt, Artificial Sequence
  Description of Artificial Sequence: Synthetic oligonucleotide
  Sense strand starting at position 1011 of SEQ ID NO: 1879470
agcauagugaacuagguuu

SEQ ID NO: 1909405 - RNA, 19 nt, Artificial Sequence
  Description of Artificial Sequence: Synthetic oligonucleotide
  Antisense strand to SEQ ID NO: 1909404
aaaccuaguucacuaugcu

SEQ ID NO: 1909406 - RNA, 19 nt, Artificial Sequence
  Description of Artificial Sequence: Synthetic oligonucleotide
  Sense strand starting at position 1017 of SEQ ID NO: 1879470
gugaacuagguuugugguu

SEQ ID NO: 1909407 - RNA, 19 nt, Artificial Sequence
  Description of Artificial Sequence: Synthetic oligonucleotide
  Antisense strand to SEQ ID NO: 1909406
aaccacaaaccuaguucac

SEQ ID NO: 1909408 - RNA, 19 nt, Artificial Sequence
  Description of Artificial Sequence: Synthetic oligonucleotide
  Sense strand starting at position 1022 of SEQ ID NO: 1879470
cuagguuugugguuuggaa

SEQ ID NO: 1909409 - RNA, 19 nt, Artificial Sequence
  Description of Artificial Sequence: Synthetic oligonucleotide
  Antisense strand to SEQ ID NO: 1909408
uuccaaaccacaaaccuag

SEQ ID NO: 1909410 - RNA, 19 nt, Artificial Sequence
  Description of Artificial Sequence: Synthetic oligonucleotide
  Sense strand starting at position 1024 of SEQ ID NO: 1879470
agguuugugguuuggaauc

SEQ ID NO: 1909411 - RNA, 19 nt, Artificial Sequence
  Description of Artificial Sequence: Synthetic oligonucleotide
  Antisense strand to SEQ ID NO: 1909410
gauuccaaaccacaaaccu

SEQ ID NO: 1909412 - RNA, 19 nt, Artificial Sequence
  Description of Artificial Sequence: Synthetic oligonucleotide
  Sense strand starting at position 1062 of SEQ ID NO: 1879470
caaguuggauuguuuacua

SEQ ID NO: 1909413 - RNA, 19 nt, Artificial Sequence
  Description of Artificial Sequence: Synthetic oligonucleotide
  Antisense strand to SEQ ID NO: 1909412
uaguaaacaauccaacuug

SEQ ID NO: 1909414 - RNA, 19 nt, Artificial Sequence
  Description of Artificial Sequence: Synthetic oligonucleotide
  Sense strand starting at position 1071 of SEQ ID NO: 1879470
uuguuuacuaucuguguga

SEQ ID NO: 1909415 - RNA, 19 nt, Artificial Sequence
  Description of Artificial Sequence: Synthetic oligonucleotide
  Antisense strand to SEQ ID NO: 1909414
ucacacagauaguaaacaa

SEQ ID NO: 1909416 - RNA, 19 nt, Artificial Sequence
  Description of Artificial Sequence: Synthetic oligonucleotide
  Sense strand starting at position 1073 of SEQ ID NO: 1879470
guuuacuaucugugugacu

SEQ ID NO: 1909417 - RNA, 19 nt, Artificial Sequence
  Description of Artificial Sequence: Synthetic oligonucleotide
  Antisense strand to SEQ ID NO: 1909416
agucacacagauaguaaac

SEQ ID NO: 1909418 - RNA, 19 nt, Artificial Sequence
  Description of Artificial Sequence: Synthetic oligonucleotide
  Sense strand starting at position 1074 of SEQ ID NO: 1879470
uuuacuaucugugugacuu

SEQ ID NO: 1909419 - RNA, 19 nt, Artificial Sequence
  Description of Artificial Sequence: Synthetic oligonucleotide
  Antisense strand to SEQ ID NO: 1909418
aagucacacagauaguaaa

SEQ ID NO: 1909420 - RNA, 19 nt, Artificial Sequence
  Description of Artificial Sequence: Synthetic oligonucleotide
  Sense strand starting at position 1211 of SEQ ID NO: 1879470
gcaaaugagaguuguggcu

SEQ ID NO: 1909421 - RNA, 19 nt, Artificial Sequence
  Description of Artificial Sequence: Synthetic oligonucleotide
  Antisense strand to SEQ ID NO: 1909420
agccacaacucucauuugc

SEQ ID NO: 1909422 - RNA, 19 nt, Artificial Sequence
  Description of Artificial Sequence: Synthetic oligonucleotide
  Sense strand starting at position 1217 of SEQ ID NO: 1879470
gagaguuguggcugauauc

SEQ ID NO: 1909423 - RNA, 19 nt, Artificial Sequence
  Description of Artificial Sequence: Synthetic oligonucleotide
  Antisense strand to SEQ ID NO: 1909422
gauaucagccacaacucuc

SEQ ID NO: 1909424 - RNA, 19 nt, Artificial Sequence
  Description of Artificial Sequence: Synthetic oligonucleotide
  Sense strand starting at position 1228 of SEQ ID NO: 1879470
cugauauccgcuuggagag

SEQ ID NO: 1909425 - RNA, 19 nt, Artificial Sequence
  Description of Artificial Sequence: Synthetic oligonucleotide
  Antisense strand to SEQ ID NO: 1909424
cucuccaagcggauaucag

SEQ ID NO: 1909426 - RNA, 19 nt, Artificial Sequence
  Description of Artificial Sequence: Synthetic oligonucleotide
  Sense strand starting at position 1229 of SEQ ID NO: 1879470
ugauauccgcuuggagaga

SEQ ID NO: 1909427 - RNA, 19 nt, Artificial Sequence
  Description of Artificial Sequence: Synthetic oligonucleotide
  Antisense strand to SEQ ID NO: 1909426
ucucuccaagcggauauca

SEQ ID NO: 1909428 - RNA, 19 nt, Artificial Sequence
  Description of Artificial Sequence: Synthetic oligonucleotide
  Sense strand starting at position 1253 of SEQ ID NO: 1879470
gagggugcauccucccauu

SEQ ID NO: 1909429 - RNA, 19 nt, Artificial Sequence
  Description of Artificial Sequence: Synthetic oligonucleotide
  Antisense strand to SEQ ID NO: 1909428
aaugggaggaugcacccuc

SEQ ID NO: 1909430 - RNA, 19 nt, Artificial Sequence
  Description of Artificial Sequence: Synthetic oligonucleotide
  Sense strand starting at position 2698 of SEQ ID NO: 1879470
gcuuguaggguuuagugaa

SEQ ID NO: 1909431 - RNA, 19 nt, Artificial Sequence
  Description of Artificial Sequence: Synthetic oligonucleotide
  Antisense strand to SEQ ID NO: 1909430
uucacuaaacccuacaagc

SEQ ID NO: 1909432 - RNA, 19 nt, Artificial Sequence
  Description of Artificial Sequence: Synthetic oligonucleotide
  Sense strand starting at position 2704 of SEQ ID NO: 1879470
aggguuuagugaagaggau

SEQ ID NO: 1909433 - RNA, 19 nt, Artificial Sequence
  Description of Artificial Sequence: Synthetic oligonucleotide
  Antisense strand to SEQ ID NO: 1909432
auccucuucacuaaacccu

SEQ ID NO: 1909434 - RNA, 19 nt, Artificial Sequence
  Description of Artificial Sequence: Synthetic oligonucleotide
  Sense strand starting at position 2716 of SEQ ID NO: 1879470
agaggauucucucuagccu

SEQ ID NO: 1909435 - RNA, 19 nt, Artificial Sequence
  Description of Artificial Sequence: Synthetic oligonucleotide
  Antisense strand to SEQ ID NO: 1909434
aggcuagagagaauccucu

SEQ ID NO: 1909436 - RNA, 19 nt, Artificial Sequence
  Description of Artificial Sequence: Synthetic oligonucleotide
  Sense strand starting at position 2929 of SEQ ID NO: 1879470
guggaguguccggaggaga

SEQ ID NO: 1909437 - RNA, 19 nt, Artificial Sequence
  Description of Artificial Sequence: Synthetic oligonucleotide
  Antisense strand to SEQ ID NO: 1909436
ucuccuccggacacuccac

SEQ ID NO: 1909438 - RNA, 19 nt, Artificial Sequence
  Description of Artificial Sequence: Synthetic oligonucleotide
  Sense strand starting at position 2931 of SEQ ID NO: 1879470
ggaguguccggaggagaga

SEQ ID NO: 1909439 - RNA, 19 nt, Artificial Sequence
  Description of Artificial Sequence: Synthetic oligonucleotide
  Antisense strand to SEQ ID NO: 1909438
ucucuccuccggacacucc

SEQ ID NO: 1909440 - RNA, 19 nt, Artificial Sequence
  Description of Artificial Sequence: Synthetic oligonucleotide
  Sense strand starting at position 3208 of SEQ ID NO: 1879470
gggaggguccugugagaac

SEQ ID NO: 1909441 - RNA, 19 nt, Artificial Sequence
  Description of Artificial Sequence: Synthetic oligonucleotide
  Antisense strand to SEQ ID NO: 1909440
guucucacaggacccuccc

SEQ ID NO: 1909442 - RNA, 19 nt, Artificial Sequence
  Description of Artificial Sequence: Synthetic oligonucleotide
  Sense strand starting at position 3348 of SEQ ID NO: 1879470
ccaguauucuucuuuaagu

SEQ ID NO: 1909443 - RNA, 19 nt, Artificial Sequence
  Description of Artificial Sequence: Synthetic oligonucleotide
  Antisense strand to SEQ ID NO: 1909442
acuuaaagaagaauacugg

SEQ ID NO: 1909444 - RNA, 19 nt, Artificial Sequence
  Description of Artificial Sequence: Synthetic oligonucleotide
  Sense strand starting at position 3350 of SEQ ID NO: 1879470
aguauucuucuuuaagucu

SEQ ID NO: 1909445 - RNA, 19 nt, Artificial Sequence
  Description of Artificial Sequence: Synthetic oligonucleotide
  Antisense strand to SEQ ID NO: 1909444
agacuuaaagaagaauacu

SEQ ID NO: 1909446 - RNA, 19 nt, Artificial Sequence
  Description of Artificial Sequence: Synthetic oligonucleotide
  Sense strand starting at position 3459 of SEQ ID NO: 1879470
gcugucgauucccucagua

SEQ ID NO: 1909447 - RNA, 19 nt, Artificial Sequence
  Description of Artificial Sequence: Synthetic oligonucleotide
  Antisense strand to SEQ ID NO: 1909446
uacugagggaaucgacagc

SEQ ID NO: 1909448 - RNA, 19 nt, Artificial Sequence
  Description of Artificial Sequence: Synthetic oligonucleotide
  Sense strand starting at position 3461 of SEQ ID NO: 1879470
ugucgauucccucaguacu

SEQ ID NO: 1909449 - RNA, 19 nt, Artificial Sequence
  Description of Artificial Sequence: Synthetic oligonucleotide
  Antisense strand to SEQ ID NO: 1909448
aguacugagggaaucgaca

SEQ ID NO: 1909450 - RNA, 19 nt, Artificial Sequence
  Description of Artificial Sequence: Synthetic oligonucleotide
  Sense strand starting at position 3705 of SEQ ID NO: 1879470
guggguagagcucacugua

SEQ ID NO: 1909451 - RNA, 19 nt, Artificial Sequence
  Description of Artificial Sequence: Synthetic oligonucleotide
  Antisense strand to SEQ ID NO: 1909450
uacagugagcucuacccac

SEQ ID NO: 1909452 - RNA, 19 nt, Artificial Sequence
  Description of Artificial Sequence: Synthetic oligonucleotide
  Sense strand starting at position 3708 of SEQ ID NO: 1879470
gguagagcucacuguagug

SEQ ID NO: 1909453 - RNA, 19 nt, Artificial Sequence
  Description of Artificial Sequence: Synthetic oligonucleotide
  Antisense strand to SEQ ID NO: 1909452
cacuacagugagcucuacc

SEQ ID NO: 1909454 - RNA, 19 nt, Artificial Sequence
  Description of Artificial Sequence: Synthetic oligonucleotide
  Sense strand starting at position 110 of SEQ ID NO: 1879471
gccuuuaauggugacaggu

SEQ ID NO: 1909455 - RNA, 19 nt, Artificial Sequence
  Description of Artificial Sequence: Synthetic oligonucleotide
  Antisense strand to SEQ ID NO: 1909454
accugucaccauuaaaggc

SEQ ID NO: 1909456 - RNA, 19 nt, Artificial Sequence
  Description of Artificial Sequence: Synthetic oligonucleotide
  Sense strand starting at position 112 of SEQ ID NO: 1879471
cuuuaauggugacagguuu

SEQ ID NO: 1909457 - RNA, 19 nt, Artificial Sequence
  Description of Artificial Sequence: Synthetic oligonucleotide
  Antisense strand to SEQ ID NO: 1909456
aaaccugucaccauuaaag

SEQ ID NO: 1909458 - RNA, 19 nt, Artificial Sequence
  Description of Artificial Sequence: Synthetic oligonucleotide
  Sense strand starting at position 123 of SEQ ID NO: 1879471
acagguuuguuugcagaca

SEQ ID NO: 1909459 - RNA, 19 nt, Artificial Sequence
  Description of Artificial Sequence: Synthetic oligonucleotide
  Antisense strand to SEQ ID NO: 1909458
ugucugcaaacaaaccugu

SEQ ID NO: 1909460 - RNA, 19 nt, Artificial Sequence
  Description of Artificial Sequence: Synthetic oligonucleotide
  Sense strand starting at position 124 of SEQ ID NO: 1879471
cagguuuguuugcagacaa

SEQ ID NO: 1909461 - RNA, 19 nt, Artificial Sequence
  Description of Artificial Sequence: Synthetic oligonucleotide
  Antisense strand to SEQ ID NO: 1909460
uugucugcaaacaaaccug

SEQ ID NO: 1909462 - RNA, 19 nt, Artificial Sequence
  Description of Artificial Sequence: Synthetic oligonucleotide
  Sense strand starting at position 788 of SEQ ID NO: 1879471
cagaguuugucugcuucua

SEQ ID NO: 1909463 - RNA, 19 nt, Artificial Sequence
  Description of Artificial Sequence: Synthetic oligonucleotide
  Antisense strand to SEQ ID NO: 1909462
uagaagcagacaaacucug

SEQ ID NO: 1909464 - RNA, 19 nt, Artificial Sequence
  Description of Artificial Sequence: Synthetic oligonucleotide
  Sense strand starting at position 790 of SEQ ID NO: 1879471
gaguuugucugcuucuaga

SEQ ID NO: 1909465 - RNA, 19 nt, Artificial Sequence
  Description of Artificial Sequence: Synthetic oligonucleotide
  Antisense strand to SEQ ID NO: 1909464
ucuagaagcagacaaacuc

SEQ ID NO: 1909466 - RNA, 19 nt, Artificial Sequence
  Description of Artificial Sequence: Synthetic oligonucleotide
  Sense strand starting at position 835 of SEQ ID NO: 1879471
agguuuggccgccagaaga

SEQ ID NO: 1909467 - RNA, 19 nt, Artificial Sequence
  Description of Artificial Sequence: Synthetic oligonucleotide
  Antisense strand to SEQ ID NO: 1909466
ucuucuggcggccaaaccu

SEQ ID NO: 1909468 - RNA, 19 nt, Artificial Sequence
  Description of Artificial Sequence: Synthetic oligonucleotide
  Sense strand starting at position 1004 of SEQ ID NO: 1879471
cugaccauuggcugggaaa

SEQ ID NO: 1909469 - RNA, 19 nt, Artificial Sequence
  Description of Artificial Sequence: Synthetic oligonucleotide
  Antisense strand to SEQ ID NO: 1909468
uuucccagccaauggucag

SEQ ID NO: 1909470 - RNA, 19 nt, Artificial Sequence
  Description of Artificial Sequence: Synthetic oligonucleotide
  Sense strand starting at position 1177 of SEQ ID NO: 1879471
accucauuacuucgucuua

SEQ ID NO: 1909471 - RNA, 19 nt, Artificial Sequence
  Description of Artificial Sequence: Synthetic oligonucleotide
  Antisense strand to SEQ ID NO: 1909470
uaagacgaaguaaugaggu

SEQ ID NO: 1909472 - RNA, 19 nt, Artificial Sequence
  Description of Artificial Sequence: Synthetic oligonucleotide
  Sense strand starting at position 1338 of SEQ ID NO: 1879471
uugcacugucccuagaugu

SEQ ID NO: 1909473 - RNA, 19 nt, Artificial Sequence
  Description of Artificial Sequence: Synthetic oligonucleotide
  Antisense strand to SEQ ID NO: 1909472
acaucuagggacagugcaa

SEQ ID NO: 1909474 - RNA, 19 nt, Artificial Sequence
  Description of Artificial Sequence: Synthetic oligonucleotide
  Sense strand starting at position 1345 of SEQ ID NO: 1879471
gucccuagaugugcaaaga

SEQ ID NO: 1909475 - RNA, 19 nt, Artificial Sequence
  Description of Artificial Sequence: Synthetic oligonucleotide
  Antisense strand to SEQ ID NO: 1909474
ucuuugcacaucuagggac

SEQ ID NO: 1909476 - RNA, 19 nt, Artificial Sequence
  Description of Artificial Sequence: Synthetic oligonucleotide
  Sense strand starting at position 1346 of SEQ ID NO: 1879471
ucccuagaugugcaaagaa

SEQ ID NO: 1909477 - RNA, 19 nt, Artificial Sequence
  Description of Artificial Sequence: Synthetic oligonucleotide
  Antisense strand to SEQ ID NO: 1909476
uucuuugcacaucuaggga

SEQ ID NO: 1909478 - RNA, 19 nt, Artificial Sequence
  Description of Artificial Sequence: Synthetic oligonucleotide
  Sense strand starting at position 1533 of SEQ ID NO: 1879471
aaauacugcuguuggaaua

SEQ ID NO: 1909479 - RNA, 19 nt, Artificial Sequence
  Description of Artificial Sequence: Synthetic oligonucleotide
  Antisense strand to SEQ ID NO: 1909478
uauuccaacagcaguauuu

SEQ ID NO: 1909480 - RNA, 19 nt, Artificial Sequence
  Description of Artificial Sequence: Synthetic oligonucleotide
  Sense strand starting at position 1677 of SEQ ID NO: 1879471
cucccauuggcggaaaguu

SEQ ID NO: 1909481 - RNA, 19 nt, Artificial Sequence
  Description of Artificial Sequence: Synthetic oligonucleotide
  Antisense strand to SEQ ID NO: 1909480
aacuuuccgccaaugggag

SEQ ID NO: 1909482 - RNA, 19 nt, Artificial Sequence
  Description of Artificial Sequence: Synthetic oligonucleotide
  Sense strand starting at position 2313 of SEQ ID NO: 1879471
gggcuuuacucuuaugaaa

SEQ ID NO: 1909483 - RNA, 19 nt, Artificial Sequence
  Description of Artificial Sequence: Synthetic oligonucleotide
  Antisense strand to SEQ ID NO: 1909482
uuucauaagaguaaagccc

SEQ ID NO: 1909484 - RNA, 19 nt, Artificial Sequence
  Description of Artificial Sequence: Synthetic oligonucleotide
  Sense strand starting at position 2315 of SEQ ID NO: 1879471
gcuuuacucuuaugaaaga

SEQ ID NO: 1909485 - RNA, 19 nt, Artificial Sequence
  Description of Artificial Sequence: Synthetic oligonucleotide
  Antisense strand to SEQ ID NO: 1909484
ucuuucauaagaguaaagc

SEQ ID NO: 1909486 - RNA, 19 nt, Artificial Sequence
  Description of Artificial Sequence: Synthetic oligonucleotide
  Sense strand starting at position 2325 of SEQ ID NO: 1879471
uaugaaagagcguggguua

SEQ ID NO: 1909487 - RNA, 19 nt, Artificial Sequence
  Description of Artificial Sequence: Synthetic oligonucleotide
  Antisense strand to SEQ ID NO: 1909486
uaacccacgcucuuucaua

SEQ ID NO: 1909488 - RNA, 19 nt, Artificial Sequence
  Description of Artificial Sequence: Synthetic oligonucleotide
  Sense strand starting at position 2380 of SEQ ID NO: 1879471
ucugucuccugaucucauu

SEQ ID NO: 1909489 - RNA, 19 nt, Artificial Sequence
  Description of Artificial Sequence: Synthetic oligonucleotide
  Antisense strand to SEQ ID NO: 1909488
aaugagaucaggagacaga

SEQ ID NO: 1909490 - RNA, 19 nt, Artificial Sequence
  Description of Artificial Sequence: Synthetic oligonucleotide
  Sense strand starting at position 2471 of SEQ ID NO: 1879471
ccgaaucaccucugggcaa

SEQ ID NO: 1909491 - RNA, 19 nt, Artificial Sequence
  Description of Artificial Sequence: Synthetic oligonucleotide
  Antisense strand to SEQ ID NO: 1909490
uugcccagaggugauucgg

SEQ ID NO: 1909492 - RNA, 19 nt, Artificial Sequence
  Description of Artificial Sequence: Synthetic oligonucleotide
  Sense strand starting at position 2522 of SEQ ID NO: 1879471
ccuguauaaugggcuaaua

SEQ ID NO: 1909493 - RNA, 19 nt, Artificial Sequence
  Description of Artificial Sequence: Synthetic oligonucleotide
  Antisense strand to SEQ ID NO: 1909492
uauuagcccauuauacagg

SEQ ID NO: 1909494 - RNA, 19 nt, Artificial Sequence
  Description of Artificial Sequence: Synthetic oligonucleotide
  Sense strand starting at position 2524 of SEQ ID NO: 1879471
uguauaaugggcuaauaau

SEQ ID NO: 1909495 - RNA, 19 nt, Artificial Sequence
  Description of Artificial Sequence: Synthetic oligonucleotide
  Antisense strand to SEQ ID NO: 1909494
auuauuagcccauuauaca

SEQ ID NO: 1909496 - RNA, 19 nt, Artificial Sequence
  Description of Artificial Sequence: Synthetic oligonucleotide
  Sense strand starting at position 2554 of SEQ ID NO: 1879471
ugggaagucuggcagggua

SEQ ID NO: 1909497 - RNA, 19 nt, Artificial Sequence
  Description of Artificial Sequence: Synthetic oligonucleotide
  Antisense strand to SEQ ID NO: 1909496
uacccugccagacuuccca

SEQ ID NO: 1909498 - RNA, 19 nt, Artificial Sequence
  Description of Artificial Sequence: Synthetic oligonucleotide
  Sense strand starting at position 2575 of SEQ ID NO: 1879471
ugaggucauguaugugaaa

SEQ ID NO: 1909499 - RNA, 19 nt, Artificial Sequence
  Description of Artificial Sequence: Synthetic oligonucleotide
  Antisense strand to SEQ ID NO: 1909498
uuucacauacaugaccuca

SEQ ID NO: 1909500 - RNA, 19 nt, Artificial Sequence
  Description of Artificial Sequence: Synthetic oligonucleotide
  Sense strand starting at position 2576 of SEQ ID NO: 1879471
gaggucauguaugugaaag

SEQ ID NO: 1909501 - RNA, 19 nt, Artificial Sequence
  Description of Artificial Sequence: Synthetic oligonucleotide
  Antisense strand to SEQ ID NO: 1909500
cuuucacauacaugaccuc

SEQ ID NO: 1909502 - RNA, 19 nt, Artificial Sequence
  Description of Artificial Sequence: Synthetic oligonucleotide
  Sense strand starting at position 2577 of SEQ ID NO: 1879471
aggucauguaugugaaaga

SEQ ID NO: 1909503 - RNA, 19 nt, Artificial Sequence
  Description of Artificial Sequence: Synthetic oligonucleotide
  Antisense strand to SEQ ID NO: 1909502
ucuuucacauacaugaccu

SEQ ID NO: 1909504 - RNA, 19 nt, Artificial Sequence
  Description of Artificial Sequence: Synthetic oligonucleotide
  Sense strand starting at position 2578 of SEQ ID NO: 1879471
ggucauguaugugaaagag

SEQ ID NO: 1909505 - RNA, 19 nt, Artificial Sequence
  Description of Artificial Sequence: Synthetic oligonucleotide
  Antisense strand to SEQ ID NO: 1909504
cucuuucacauacaugacc

SEQ ID NO: 1909506 - RNA, 19 nt, Artificial Sequence
  Description of Artificial Sequence: Synthetic oligonucleotide
  Sense strand starting at position 2746 of SEQ ID NO: 1879471
uugagacaaucugugacua

SEQ ID NO: 1909507 - RNA, 19 nt, Artificial Sequence
  Description of Artificial Sequence: Synthetic oligonucleotide
  Antisense strand to SEQ ID NO: 1909506
uagucacagauugucucaa

SEQ ID NO: 1909508 - RNA, 19 nt, Artificial Sequence
  Description of Artificial Sequence: Synthetic oligonucleotide
  Sense strand starting at position 2747 of SEQ ID NO: 1879471
ugagacaaucugugacuau

SEQ ID NO: 1909509 - RNA, 19 nt, Artificial Sequence
  Description of Artificial Sequence: Synthetic oligonucleotide
  Antisense strand to SEQ ID NO: 1909508
auagucacagauugucuca

SEQ ID NO: 1909510 - RNA, 19 nt, Artificial Sequence
  Description of Artificial Sequence: Synthetic oligonucleotide
  Sense strand starting at position 2748 of SEQ ID NO: 1879471
gagacaaucugugacuauu

SEQ ID NO: 1909511 - RNA, 19 nt, Artificial Sequence
  Description of Artificial Sequence: Synthetic oligonucleotide
  Antisense strand to SEQ ID NO: 1909510
aauagucacagauugucuc

SEQ ID NO: 1909512 - RNA, 19 nt, Artificial Sequence
  Description of Artificial Sequence: Synthetic oligonucleotide
  Sense strand starting at position 2846 of SEQ ID NO: 1879471
cuauauagaugagaagauc

SEQ ID NO: 1909513 - RNA, 19 nt, Artificial Sequence
  Description of Artificial Sequence: Synthetic oligonucleotide
  Antisense strand to SEQ ID NO: 1909512
gaucuucucaucuauauag

SEQ ID NO: 1909514 - RNA, 19 nt, Artificial Sequence
  Description of Artificial Sequence: Synthetic oligonucleotide
  Sense strand starting at position 2978 of SEQ ID NO: 1879471
guccuuggacucugaauuc

SEQ ID NO: 1909515 - RNA, 19 nt, Artificial Sequence
  Description of Artificial Sequence: Synthetic oligonucleotide
  Antisense strand to SEQ ID NO: 1909514
gaauucagaguccaaggac

SEQ ID NO: 1909516 - RNA, 19 nt, Artificial Sequence
  Description of Artificial Sequence: Synthetic oligonucleotide
  Sense strand starting at position 3193 of SEQ ID NO: 1879471
cucagcuugcguucuagua

SEQ ID NO: 1909517 - RNA, 19 nt, Artificial Sequence
  Description of Artificial Sequence: Synthetic oligonucleotide
  Antisense strand to SEQ ID NO: 1909516
uacuagaacgcaagcugag

SEQ ID NO: 1909518 - RNA, 19 nt, Artificial Sequence
  Description of Artificial Sequence: Synthetic oligonucleotide
  Sense strand starting at position 3194 of SEQ ID NO: 1879471
ucagcuugcguucuaguaa

SEQ ID NO: 1909519 - RNA, 19 nt, Artificial Sequence
  Description of Artificial Sequence: Synthetic oligonucleotide
  Antisense strand to SEQ ID NO: 1909518
uuacuagaacgcaagcuga

SEQ ID NO: 1909520 - RNA, 19 nt, Artificial Sequence
  Description of Artificial Sequence: Synthetic oligonucleotide
  Sense strand starting at position 3195 of SEQ ID NO: 1879471
cagcuugcguucuaguaag

SEQ ID NO: 1909521 - RNA, 19 nt, Artificial Sequence
  Description of Artificial Sequence: Synthetic oligonucleotide
  Antisense strand to SEQ ID NO: 1909520
cuuacuagaacgcaagcug

SEQ ID NO: 1909522 - RNA, 19 nt, Artificial Sequence
  Description of Artificial Sequence: Synthetic oligonucleotide
  Sense strand starting at position 3222 of SEQ ID NO: 1879471
ggcugagcccaggaaucuu

SEQ ID NO: 1909523 - RNA, 19 nt, Artificial Sequence
  Description of Artificial Sequence: Synthetic oligonucleotide
  Antisense strand to SEQ ID NO: 1909522
aagauuccugggcucagcc

SEQ ID NO: 1909524 - RNA, 19 nt, Artificial Sequence
  Description of Artificial Sequence: Synthetic oligonucleotide
  Sense strand starting at position 3300 of SEQ ID NO: 1879471
agucaugcuucgcuguguu

SEQ ID NO: 1909525 - RNA, 19 nt, Artificial Sequence
  Description of Artificial Sequence: Synthetic oligonucleotide
  Antisense strand to SEQ ID NO: 1909524
aacacagcgaagcaugacu

SEQ ID NO: 1909526 - RNA, 19 nt, Artificial Sequence
  Description of Artificial Sequence: Synthetic oligonucleotide
  Sense strand starting at position 3441 of SEQ ID NO: 1879471
gacugaagacuggguagua

SEQ ID NO: 1909527 - RNA, 19 nt, Artificial Sequence
  Description of Artificial Sequence: Synthetic oligonucleotide
  Antisense strand to SEQ ID NO: 1909526
uacuacccagucuucaguc

SEQ ID NO: 1909528 - RNA, 19 nt, Artificial Sequence
  Description of Artificial Sequence: Synthetic oligonucleotide
  Sense strand starting at position 3442 of SEQ ID NO: 1879471
acugaagacuggguaguau

SEQ ID NO: 1909529 - RNA, 19 nt, Artificial Sequence
  Description of Artificial Sequence: Synthetic oligonucleotide
  Antisense strand to SEQ ID NO: 1909528
auacuacccagucuucagu

SEQ ID NO: 1909530 - RNA, 19 nt, Artificial Sequence
  Description of Artificial Sequence: Synthetic oligonucleotide
  Sense strand starting at position 3608 of SEQ ID NO: 1879471
guggcauaauagcucacua

SEQ ID NO: 1909531 - RNA, 19 nt, Artificial Sequence
  Description of Artificial Sequence: Synthetic oligonucleotide
  Antisense strand to SEQ ID NO: 1909530
uagugagcuauuaugccac

SEQ ID NO: 1909532 - RNA, 19 nt, Artificial Sequence
  Description of Artificial Sequence: Synthetic oligonucleotide
  Sense strand starting at position 3610 of SEQ ID NO: 1879471
ggcauaauagcucacuaca

SEQ ID NO: 1909533 - RNA, 19 nt, Artificial Sequence
  Description of Artificial Sequence: Synthetic oligonucleotide
  Antisense strand to SEQ ID NO: 1909532
uguagugagcuauuaugcc

SEQ ID NO: 1909534 - RNA, 19 nt, Artificial Sequence
  Description of Artificial Sequence: Synthetic oligonucleotide
  Sense strand starting at position 82 of SEQ ID NO: 1879472
ugaggucugaaaggauagu

SEQ ID NO: 1909535 - RNA, 19 nt, Artificial Sequence
  Description of Artificial Sequence: Synthetic oligonucleotide
  Antisense strand to SEQ ID NO: 1909534
acuauccuuucagaccuca

SEQ ID NO: 1909536 - RNA, 19 nt, Artificial Sequence
  Description of Artificial Sequence: Synthetic oligonucleotide
  Sense strand starting at position 276 of SEQ ID NO: 1879472
ucugauuucucagauauga

SEQ ID NO: 1909537 - RNA, 19 nt, Artificial Sequence
  Description of Artificial Sequence: Synthetic oligonucleotide
  Antisense strand to SEQ ID NO: 1909536
ucauaucugagaaaucaga

SEQ ID NO: 1909538 - RNA, 19 nt, Artificial Sequence
  Description of Artificial Sequence: Synthetic oligonucleotide
  Sense strand starting at position 355 of SEQ ID NO: 1879472
gccagaucagcuuaacuca

SEQ ID NO: 1909539 - RNA, 19 nt, Artificial Sequence
  Description of Artificial Sequence: Synthetic oligonucleotide
  Antisense strand to SEQ ID NO: 1909538
ugaguuaagcugaucuggc

SEQ ID NO: 1909540 - RNA, 19 nt, Artificial Sequence
  Description of Artificial Sequence: Synthetic oligonucleotide
  Sense strand starting at position 379 of SEQ ID NO: 1879472
aagguaauucuugguagau

SEQ ID NO: 1909541 - RNA, 19 nt, Artificial Sequence
  Description of Artificial Sequence: Synthetic oligonucleotide
  Antisense strand to SEQ ID NO: 1909540
aucuaccaagaauuaccuu

SEQ ID NO: 1909542 - RNA, 19 nt, Artificial Sequence
  Description of Artificial Sequence: Synthetic oligonucleotide
  Sense strand starting at position 380 of SEQ ID NO: 1879472
agguaauucuugguagauu

SEQ ID NO: 1909543 - RNA, 19 nt, Artificial Sequence
  Description of Artificial Sequence: Synthetic oligonucleotide
  Antisense strand to SEQ ID NO: 1909542
aaucuaccaagaauuaccu

SEQ ID NO: 1909544 - RNA, 19 nt, Artificial Sequence
  Description of Artificial Sequence: Synthetic oligonucleotide
  Sense strand starting at position 688 of SEQ ID NO: 1879472
gacugaauugagugaccca

SEQ ID NO: 1909545 - RNA, 19 nt, Artificial Sequence
  Description of Artificial Sequence: Synthetic oligonucleotide
  Antisense strand to SEQ ID NO: 1909544
ugggucacucaauucaguc

SEQ ID NO: 1909546 - RNA, 19 nt, Artificial Sequence
  Description of Artificial Sequence: Synthetic oligonucleotide
  Sense strand starting at position 776 of SEQ ID NO: 1879472
aucagacuguagucaauua

SEQ ID NO: 1909547 - RNA, 19 nt, Artificial Sequence
  Description of Artificial Sequence: Synthetic oligonucleotide
  Antisense strand to SEQ ID NO: 1909546
uaauugacuacagucugau

SEQ ID NO: 1909548 - RNA, 19 nt, Artificial Sequence
  Description of Artificial Sequence: Synthetic oligonucleotide
  Sense strand starting at position 874 of SEQ ID NO: 1879472
aagacuauggcgugaaaga

SEQ ID NO: 1909549 - RNA, 19 nt, Artificial Sequence
  Description of Artificial Sequence: Synthetic oligonucleotide
  Antisense strand to SEQ ID NO: 1909548
ucuuucacgccauagucuu

SEQ ID NO: 1909550 - RNA, 19 nt, Artificial Sequence
  Description of Artificial Sequence: Synthetic oligonucleotide
  Sense strand starting at position 875 of SEQ ID NO: 1879472
agacuauggcgugaaagau

SEQ ID NO: 1909551 - RNA, 19 nt, Artificial Sequence
  Description of Artificial Sequence: Synthetic oligonucleotide
  Antisense strand to SEQ ID NO: 1909550
aucuuucacgccauagucu

SEQ ID NO: 1909552 - RNA, 19 nt, Artificial Sequence
  Description of Artificial Sequence: Synthetic oligonucleotide
  Sense strand starting at position 916 of SEQ ID NO: 1879472
ugugauuaaauguggagag

SEQ ID NO: 1909553 - RNA, 19 nt, Artificial Sequence
  Description of Artificial Sequence: Synthetic oligonucleotide
  Antisense strand to SEQ ID NO: 1909552
cucuccacauuuaaucaca

SEQ ID NO: 1909554 - RNA, 19 nt, Artificial Sequence
  Description of Artificial Sequence: Synthetic oligonucleotide
  Sense strand starting at position 948 of SEQ ID NO: 1879472
augugucuuaagggauaag

SEQ ID NO: 1909555 - RNA, 19 nt, Artificial Sequence
  Description of Artificial Sequence: Synthetic oligonucleotide
  Antisense strand to SEQ ID NO: 1909554
cuuaucccuuaagacacau

SEQ ID NO: 1909556 - RNA, 19 nt, Artificial Sequence
  Description of Artificial Sequence: Synthetic oligonucleotide
  Sense strand starting at position 951 of SEQ ID NO: 1879472
ugucuuaagggauaagcua

SEQ ID NO: 1909557 - RNA, 19 nt, Artificial Sequence
  Description of Artificial Sequence: Synthetic oligonucleotide
  Antisense strand to SEQ ID NO: 1909556
uagcuuaucccuuaagaca

SEQ ID NO: 1909558 - RNA, 19 nt, Artificial Sequence
  Description of Artificial Sequence: Synthetic oligonucleotide
  Sense strand starting at position 1415 of SEQ ID NO: 1879472
gggcuaagauuacuuuaag

SEQ ID NO: 1909559 - RNA, 19 nt, Artificial Sequence
  Description of Artificial Sequence: Synthetic oligonucleotide
  Antisense strand to SEQ ID NO: 1909558
cuuaaaguaaucuuagccc

SEQ ID NO: 1909560 - RNA, 19 nt, Artificial Sequence
  Description of Artificial Sequence: Synthetic oligonucleotide
  Sense strand starting at position 1441 of SEQ ID NO: 1879472
uaaugaguuguugaauugu

SEQ ID NO: 1909561 - RNA, 19 nt, Artificial Sequence
  Description of Artificial Sequence: Synthetic oligonucleotide
  Antisense strand to SEQ ID NO: 1909560
acaauucaacaacucauua

SEQ ID NO: 1909562 - RNA, 19 nt, Artificial Sequence
  Description of Artificial Sequence: Synthetic oligonucleotide
  Sense strand starting at position 1653 of SEQ ID NO: 1879472
guaggcauaucauuaaaug

SEQ ID NO: 1909563 - RNA, 19 nt, Artificial Sequence
  Description of Artificial Sequence: Synthetic oligonucleotide
  Antisense strand to SEQ ID NO: 1909562
cauuuaaugauaugccuac

SEQ ID NO: 1909564 - RNA, 19 nt, Artificial Sequence
  Description of Artificial Sequence: Synthetic oligonucleotide
  Sense strand starting at position 1662 of SEQ ID NO: 1879472
ucauuaaaugcuggacucu

SEQ ID NO: 1909565 - RNA, 19 nt, Artificial Sequence
  Description of Artificial Sequence: Synthetic oligonucleotide
  Antisense strand to SEQ ID NO: 1909564
agaguccagcauuuaauga

SEQ ID NO: 1909566 - RNA, 19 nt, Artificial Sequence
  Description of Artificial Sequence: Synthetic oligonucleotide
  Sense strand starting at position 1702 of SEQ ID NO: 1879472
cuccaucugggagguauaa

SEQ ID NO: 1909567 - RNA, 19 nt, Artificial Sequence
  Description of Artificial Sequence: Synthetic oligonucleotide
  Antisense strand to SEQ ID NO: 1909566
uuauaccucccagauggag

SEQ ID NO: 1909568 - RNA, 19 nt, Artificial Sequence
  Description of Artificial Sequence: Synthetic oligonucleotide
  Sense strand starting at position 1903 of SEQ ID NO: 1879472
ggcuguguacuacagacaa

SEQ ID NO: 1909569 - RNA, 19 nt, Artificial Sequence
  Description of Artificial Sequence: Synthetic oligonucleotide
  Antisense strand to SEQ ID NO: 1909568
uugucuguaguacacagcc

SEQ ID NO: 1909570 - RNA, 19 nt, Artificial Sequence
  Description of Artificial Sequence: Synthetic oligonucleotide
  Sense strand starting at position 1964 of SEQ ID NO: 1879472
cuuuaugugauguaggcaa

SEQ ID NO: 1909571 - RNA, 19 nt, Artificial Sequence
  Description of Artificial Sequence: Synthetic oligonucleotide
  Antisense strand to SEQ ID NO: 1909570
uugccuacaucacauaaag

SEQ ID NO: 1909572 - RNA, 19 nt, Artificial Sequence
  Description of Artificial Sequence: Synthetic oligonucleotide
  Sense strand starting at position 1968 of SEQ ID NO: 1879472
augugauguaggcaauauu

SEQ ID NO: 1909573 - RNA, 19 nt, Artificial Sequence
  Description of Artificial Sequence: Synthetic oligonucleotide
  Antisense strand to SEQ ID NO: 1909572
aauauugccuacaucacau

SEQ ID NO: 1909574 - RNA, 19 nt, Artificial Sequence
  Description of Artificial Sequence: Synthetic oligonucleotide
  Sense strand starting at position 1971 of SEQ ID NO: 1879472
ugauguaggcaauauucua

SEQ ID NO: 1909575 - RNA, 19 nt, Artificial Sequence
  Description of Artificial Sequence: Synthetic oligonucleotide
  Antisense strand to SEQ ID NO: 1909574
uagaauauugccuacauca

SEQ ID NO: 1909576 - RNA, 19 nt, Artificial Sequence
  Description of Artificial Sequence: Synthetic oligonucleotide
  Sense strand starting at position 2324 of SEQ ID NO: 1879472
guuagauaagcugauuacu

SEQ ID NO: 1909577 - RNA, 19 nt, Artificial Sequence
  Description of Artificial Sequence: Synthetic oligonucleotide
  Antisense strand to SEQ ID NO: 1909576
aguaaucagcuuaucuaac

SEQ ID NO: 1909578 - RNA, 19 nt, Artificial Sequence
  Description of Artificial Sequence: Synthetic oligonucleotide
  Sense strand starting at position 2326 of SEQ ID NO: 1879472
uagauaagcugauuacugu

SEQ ID NO: 1909579 - RNA, 19 nt, Artificial Sequence
  Description of Artificial Sequence: Synthetic oligonucleotide
  Antisense strand to SEQ ID NO: 1909578
acaguaaucagcuuaucua

SEQ ID NO: 1909580 - RNA, 19 nt, Artificial Sequence
  Description of Artificial Sequence: Synthetic oligonucleotide
  Sense strand starting at position 2479 of SEQ ID NO: 1879472
ugagaaguggaguguugau

SEQ ID NO: 1909581 - RNA, 19 nt, Artificial Sequence
  Description of Artificial Sequence: Synthetic oligonucleotide
  Antisense strand to SEQ ID NO: 1909580
aucaacacuccacuucuca

SEQ ID NO: 1909582 - RNA, 19 nt, Artificial Sequence
  Description of Artificial Sequence: Synthetic oligonucleotide
  Sense strand starting at position 2654 of SEQ ID NO: 1879472
ccacauucugauuagguuu

SEQ ID NO: 1909583 - RNA, 19 nt, Artificial Sequence
  Description of Artificial Sequence: Synthetic oligonucleotide
  Antisense strand to SEQ ID NO: 1909582
aaaccuaaucagaaugugg

SEQ ID NO: 1909584 - RNA, 19 nt, Artificial Sequence
  Description of Artificial Sequence: Synthetic oligonucleotide
  Sense strand starting at position 2708 of SEQ ID NO: 1879472
cuacguuagggaggacuau

SEQ ID NO: 1909585 - RNA, 19 nt, Artificial Sequence
  Description of Artificial Sequence: Synthetic oligonucleotide
  Antisense strand to SEQ ID NO: 1909584
auaguccucccuaacguag

SEQ ID NO: 1909586 - RNA, 19 nt, Artificial Sequence
  Description of Artificial Sequence: Synthetic oligonucleotide
  Sense strand starting at position 2720 of SEQ ID NO: 1879472
ggacuauggcgggacaagu

SEQ ID NO: 1909587 - RNA, 19 nt, Artificial Sequence
  Description of Artificial Sequence: Synthetic oligonucleotide
  Antisense strand to SEQ ID NO: 1909586
acuugucccgccauagucc

SEQ ID NO: 1909588 - RNA, 19 nt, Artificial Sequence
  Description of Artificial Sequence: Synthetic oligonucleotide
  Sense strand starting at position 2995 of SEQ ID NO: 1879472
ugauguuggcgugauuuau

SEQ ID NO: 1909589 - RNA, 19 nt, Artificial Sequence
  Description of Artificial Sequence: Synthetic oligonucleotide
  Antisense strand to SEQ ID NO: 1909588
auaaaucacgccaacauca

SEQ ID NO: 1909590 - RNA, 19 nt, Artificial Sequence
  Description of Artificial Sequence: Synthetic oligonucleotide
  Sense strand starting at position 3007 of SEQ ID NO: 1879472
gauuuaugcuggcugcacu

SEQ ID NO: 1909591 - RNA, 19 nt, Artificial Sequence
  Description of Artificial Sequence: Synthetic oligonucleotide
  Antisense strand to SEQ ID NO: 1909590
agugcagccagcauaaauc

SEQ ID NO: 1909592 - RNA, 19 nt, Artificial Sequence
  Description of Artificial Sequence: Synthetic oligonucleotide
  Sense strand starting at position 3076 of SEQ ID NO: 1879472
ugagguucugcuuaauacu

SEQ ID NO: 1909593 - RNA, 19 nt, Artificial Sequence
  Description of Artificial Sequence: Synthetic oligonucleotide
  Antisense strand to SEQ ID NO: 1909592
aguauuaagcagaaccuca

SEQ ID NO: 1909594 - RNA, 19 nt, Artificial Sequence
  Description of Artificial Sequence: Synthetic oligonucleotide
  Sense strand starting at position 3131 of SEQ ID NO: 1879472
gguuuaaugguguaaggau

SEQ ID NO: 1909595 - RNA, 19 nt, Artificial Sequence
  Description of Artificial Sequence: Synthetic oligonucleotide
  Antisense strand to SEQ ID NO: 1909594
auccuuacaccauuaaacc

SEQ ID NO: 1909596 - RNA, 19 nt, Artificial Sequence
  Description of Artificial Sequence: Synthetic oligonucleotide
  Sense strand starting at position 3322 of SEQ ID NO: 1879472
gccauuuguugaguaaacu

SEQ ID NO: 1909597 - RNA, 19 nt, Artificial Sequence
  Description of Artificial Sequence: Synthetic oligonucleotide
  Antisense strand to SEQ ID NO: 1909596
aguuuacucaacaaauggc

SEQ ID NO: 1909598 - RNA, 19 nt, Artificial Sequence
  Description of Artificial Sequence: Synthetic oligonucleotide
  Sense strand starting at position 3567 of SEQ ID NO: 1879472
uuuaucauagcucauugua

SEQ ID NO: 1909599 - RNA, 19 nt, Artificial Sequence
  Description of Artificial Sequence: Synthetic oligonucleotide
  Antisense strand to SEQ ID NO: 1909598
uacaaugagcuaugauaaa

SEQ ID NO: 1909600 - RNA, 19 nt, Artificial Sequence
  Description of Artificial Sequence: Synthetic oligonucleotide
  Sense strand starting at position 3733 of SEQ ID NO: 1879472
ggcuguggcaugugauuua

SEQ ID NO: 1909601 - RNA, 19 nt, Artificial Sequence
  Description of Artificial Sequence: Synthetic oligonucleotide
  Antisense strand to SEQ ID NO: 1909600
uaaaucacaugccacagcc

SEQ ID NO: 1909602 - RNA, 19 nt, Artificial Sequence
  Description of Artificial Sequence: Synthetic oligonucleotide
  Sense strand starting at position 3740 of SEQ ID NO: 1879472
gcaugugauuuagaaggaa

SEQ ID NO: 1909603 - RNA, 19 nt, Artificial Sequence
  Description of Artificial Sequence: Synthetic oligonucleotide
  Antisense strand to SEQ ID NO: 1909602
uuccuucuaaaucacaugc

SEQ ID NO: 1909604 - RNA, 19 nt, Artificial Sequence
  Description of Artificial Sequence: Synthetic oligonucleotide
  Sense strand starting at position 3774 of SEQ ID NO: 1879472
guccucacugcugagacau

SEQ ID NO: 1909605 - RNA, 19 nt, Artificial Sequence
  Description of Artificial Sequence: Synthetic oligonucleotide
  Antisense strand to SEQ ID NO: 1909604
augucucagcagugaggac

SEQ ID NO: 1909606 - RNA, 19 nt, Artificial Sequence
  Description of Artificial Sequence: Synthetic oligonucleotide
  Sense strand starting at position 3784 of SEQ ID NO: 1879472
cugagacaucugggccaca

SEQ ID NO: 1909607 - RNA, 19 nt, Artificial Sequence
  Description of Artificial Sequence: Synthetic oligonucleotide
  Antisense strand to SEQ ID NO: 1909606
uguggcccagaugucucag

SEQ ID NO: 1909608 - RNA, 19 nt, Artificial Sequence
  Description of Artificial Sequence: Synthetic oligonucleotide
  Sense strand starting at position 3785 of SEQ ID NO: 1879472
ugagacaucugggccacau

SEQ ID NO: 1909609 - RNA, 19 nt, Artificial Sequence
  Description of Artificial Sequence: Synthetic oligonucleotide
  Antisense strand to SEQ ID NO: 1909608
auguggcccagaugucuca

SEQ ID NO: 1909610 - RNA, 19 nt, Artificial Sequence
  Description of Artificial Sequence: Synthetic oligonucleotide
  Sense strand starting at position 3934 of SEQ ID NO: 1879472
gggaaauacuugucccuua

SEQ ID NO: 1909611 - RNA, 19 nt, Artificial Sequence
  Description of Artificial Sequence: Synthetic oligonucleotide
  Antisense strand to SEQ ID NO: 1909610
uaagggacaaguauuuccc

SEQ ID NO: 1909612 - RNA, 19 nt, Artificial Sequence
  Description of Artificial Sequence: Synthetic oligonucleotide
  Sense strand starting at position 3935 of SEQ ID NO: 1879472
ggaaauacuugucccuuaa

SEQ ID NO: 1909613 - RNA, 19 nt, Artificial Sequence
  Description of Artificial Sequence: Synthetic oligonucleotide
  Antisense strand to SEQ ID NO: 1909612
uuaagggacaaguauuucc

SEQ ID NO: 1909614 - RNA, 19 nt, Artificial Sequence
  Description of Artificial Sequence: Synthetic oligonucleotide
  Sense strand starting at position 220 of SEQ ID NO: 1879473
gggagugggcaucgaauca

SEQ ID NO: 1909615 - RNA, 19 nt, Artificial Sequence
  Description of Artificial Sequence: Synthetic oligonucleotide
  Antisense strand to SEQ ID NO: 1909614
ugauucgaugcccacuccc

SEQ ID NO: 1909616 - RNA, 19 nt, Artificial Sequence
  Description of Artificial Sequence: Synthetic oligonucleotide
  Sense strand starting at position 583 of SEQ ID NO: 1879473
ccagcuaugugacuauuac

SEQ ID NO: 1909617 - RNA, 19 nt, Artificial Sequence
  Description of Artificial Sequence: Synthetic oligonucleotide
  Antisense strand to SEQ ID NO: 1909616
guaauagucacauagcugg

SEQ ID NO: 1909618 - RNA, 19 nt, Artificial Sequence
  Description of Artificial Sequence: Synthetic oligonucleotide
  Sense strand starting at position 661 of SEQ ID NO: 1879473
ggagauccuagauggaugu

SEQ ID NO: 1909619 - RNA, 19 nt, Artificial Sequence
  Description of Artificial Sequence: Synthetic oligonucleotide
  Antisense strand to SEQ ID NO: 1909618
acauccaucuaggaucucc

SEQ ID NO: 1909620 - RNA, 19 nt, Artificial Sequence
  Description of Artificial Sequence: Synthetic oligonucleotide
  Sense strand starting at position 665 of SEQ ID NO: 1879473
auccuagauggauguguuu

SEQ ID NO: 1909621 - RNA, 19 nt, Artificial Sequence
  Description of Artificial Sequence: Synthetic oligonucleotide
  Antisense strand to SEQ ID NO: 1909620
aaacacauccaucuaggau

SEQ ID NO: 1909622 - RNA, 19 nt, Artificial Sequence
  Description of Artificial Sequence: Synthetic oligonucleotide
  Sense strand starting at position 667 of SEQ ID NO: 1879473
ccuagauggauguguuuga

SEQ ID NO: 1909623 - RNA, 19 nt, Artificial Sequence
  Description of Artificial Sequence: Synthetic oligonucleotide
  Antisense strand to SEQ ID NO: 1909622
ucaaacacauccaucuagg

SEQ ID NO: 1909624 - RNA, 19 nt, Artificial Sequence
  Description of Artificial Sequence: Synthetic oligonucleotide
  Sense strand starting at position 717 of SEQ ID NO: 1879473
agacaugggcucugagaga

SEQ ID NO: 1909625 - RNA, 19 nt, Artificial Sequence
  Description of Artificial Sequence: Synthetic oligonucleotide
  Antisense strand to SEQ ID NO: 1909624
ucucucagagcccaugucu

SEQ ID NO: 1909626 - RNA, 19 nt, Artificial Sequence
  Description of Artificial Sequence: Synthetic oligonucleotide
  Sense strand starting at position 765 of SEQ ID NO: 1879473
aagacagagccgcgauuaa

SEQ ID NO: 1909627 - RNA, 19 nt, Artificial Sequence
  Description of Artificial Sequence: Synthetic oligonucleotide
  Antisense strand to SEQ ID NO: 1909626
uuaaucgcggcucugucuu

SEQ ID NO: 1909628 - RNA, 19 nt, Artificial Sequence
  Description of Artificial Sequence: Synthetic oligonucleotide
  Sense strand starting at position 774 of SEQ ID NO: 1879473
ccgcgauuaauugagacga

SEQ ID NO: 1909629 - RNA, 19 nt, Artificial Sequence
  Description of Artificial Sequence: Synthetic oligonucleotide
  Antisense strand to SEQ ID NO: 1909628
ucgucucaauuaaucgcgg

SEQ ID NO: 1909630 - RNA, 19 nt, Artificial Sequence
  Description of Artificial Sequence: Synthetic oligonucleotide
  Sense strand starting at position 809 of SEQ ID NO: 1879473
gcugguuuggagggaauau

SEQ ID NO: 1909631 - RNA, 19 nt, Artificial Sequence
  Description of Artificial Sequence: Synthetic oligonucleotide
  Antisense strand to SEQ ID NO: 1909630
auauucccuccaaaccagc

SEQ ID NO: 1909632 - RNA, 19 nt, Artificial Sequence
  Description of Artificial Sequence: Synthetic oligonucleotide
  Sense strand starting at position 826 of SEQ ID NO: 1879473
aucagaacguuugcuauuu

SEQ ID NO: 1909633 - RNA, 19 nt, Artificial Sequence
  Description of Artificial Sequence: Synthetic oligonucleotide
  Antisense strand to SEQ ID NO: 1909632
aaauagcaaacguucugau

SEQ ID NO: 1909634 - RNA, 19 nt, Artificial Sequence
  Description of Artificial Sequence: Synthetic oligonucleotide
  Sense strand starting at position 998 of SEQ ID NO: 1879473
cacugaguuccauagugga

SEQ ID NO: 1909635 - RNA, 19 nt, Artificial Sequence
  Description of Artificial Sequence: Synthetic oligonucleotide
  Antisense strand to SEQ ID NO: 1909634
uccacuauggaacucagug

SEQ ID NO: 1909636 - RNA, 19 nt, Artificial Sequence
  Description of Artificial Sequence: Synthetic oligonucleotide
  Sense strand starting at position 1031 of SEQ ID NO: 1879473
ggccuaaagauaggguuau

SEQ ID NO: 1909637 - RNA, 19 nt, Artificial Sequence
  Description of Artificial Sequence: Synthetic oligonucleotide
  Antisense strand to SEQ ID NO: 1909636
auaacccuaucuuuaggcc

SEQ ID NO: 1909638 - RNA, 19 nt, Artificial Sequence
  Description of Artificial Sequence: Synthetic oligonucleotide
  Sense strand starting at position 1240 of SEQ ID NO: 1879473
gcgggagaaucaguucaac

SEQ ID NO: 1909639 - RNA, 19 nt, Artificial Sequence
  Description of Artificial Sequence: Synthetic oligonucleotide
  Antisense strand to SEQ ID NO: 1909638
guugaacugauucucccgc

SEQ ID NO: 1909640 - RNA, 19 nt, Artificial Sequence
  Description of Artificial Sequence: Synthetic oligonucleotide
  Sense strand starting at position 1347 of SEQ ID NO: 1879473
uaaagauaggguugucaga

SEQ ID NO: 1909641 - RNA, 19 nt, Artificial Sequence
  Description of Artificial Sequence: Synthetic oligonucleotide
  Antisense strand to SEQ ID NO: 1909640
ucugacaacccuaucuuua

SEQ ID NO: 1909642 - RNA, 19 nt, Artificial Sequence
  Description of Artificial Sequence: Synthetic oligonucleotide
  Sense strand starting at position 1349 of SEQ ID NO: 1879473
aagauaggguugucagaug

SEQ ID NO: 1909643 - RNA, 19 nt, Artificial Sequence
  Description of Artificial Sequence: Synthetic oligonucleotide
  Antisense strand to SEQ ID NO: 1909642
caucugacaacccuaucuu

SEQ ID NO: 1909644 - RNA, 19 nt, Artificial Sequence
  Description of Artificial Sequence: Synthetic oligonucleotide
  Sense strand starting at position 1370 of SEQ ID NO: 1879473
ccucuucuccagggacaga

SEQ ID NO: 1909645 - RNA, 19 nt, Artificial Sequence
  Description of Artificial Sequence: Synthetic oligonucleotide
  Antisense strand to SEQ ID NO: 1909644
ucugucccuggagaagagg

SEQ ID NO: 1909646 - RNA, 19 nt, Artificial Sequence
  Description of Artificial Sequence: Synthetic oligonucleotide
  Sense strand starting at position 1444 of SEQ ID NO: 1879473
guucuagucugggugauaa

SEQ ID NO: 1909647 - RNA, 19 nt, Artificial Sequence
  Description of Artificial Sequence: Synthetic oligonucleotide
  Antisense strand to SEQ ID NO: 1909646
uuaucacccagacuagaac

SEQ ID NO: 1909648 - RNA, 19 nt, Artificial Sequence
  Description of Artificial Sequence: Synthetic oligonucleotide
  Sense strand starting at position 1572 of SEQ ID NO: 1879473
aggcacaucucaguuacuu

SEQ ID NO: 1909649 - RNA, 19 nt, Artificial Sequence
  Description of Artificial Sequence: Synthetic oligonucleotide
  Antisense strand to SEQ ID NO: 1909648
aaguaacugagaugugccu

SEQ ID NO: 1909650 - RNA, 19 nt, Artificial Sequence
  Description of Artificial Sequence: Synthetic oligonucleotide
  Sense strand starting at position 1645 of SEQ ID NO: 1879473
uggagaagucugugcacau

SEQ ID NO: 1909651 - RNA, 19 nt, Artificial Sequence
  Description of Artificial Sequence: Synthetic oligonucleotide
  Antisense strand to SEQ ID NO: 1909650
augugcacagacuucucca

SEQ ID NO: 1909652 - RNA, 19 nt, Artificial Sequence
  Description of Artificial Sequence: Synthetic oligonucleotide
  Sense strand starting at position 1646 of SEQ ID NO: 1879473
ggagaagucugugcacauc

SEQ ID NO: 1909653 - RNA, 19 nt, Artificial Sequence
  Description of Artificial Sequence: Synthetic oligonucleotide
  Antisense strand to SEQ ID NO: 1909652
gaugugcacagacuucucc

SEQ ID NO: 1909654 - RNA, 19 nt, Artificial Sequence
  Description of Artificial Sequence: Synthetic oligonucleotide
  Sense strand starting at position 1760 of SEQ ID NO: 1879473
cugguucugacgcacuaaa

SEQ ID NO: 1909655 - RNA, 19 nt, Artificial Sequence
  Description of Artificial Sequence: Synthetic oligonucleotide
  Antisense strand to SEQ ID NO: 1909654
uuuagugcgucagaaccag

SEQ ID NO: 1909656 - RNA, 19 nt, Artificial Sequence
  Description of Artificial Sequence: Synthetic oligonucleotide
  Sense strand starting at position 1782 of SEQ ID NO: 1879473
augauaagccuagauugcu

SEQ ID NO: 1909657 - RNA, 19 nt, Artificial Sequence
  Description of Artificial Sequence: Synthetic oligonucleotide
  Antisense strand to SEQ ID NO: 1909656
agcaaucuaggcuuaucau

SEQ ID NO: 1909658 - RNA, 19 nt, Artificial Sequence
  Description of Artificial Sequence: Synthetic oligonucleotide
  Sense strand starting at position 1859 of SEQ ID NO: 1879473
gggaccaucugcuucuuua

SEQ ID NO: 1909659 - RNA, 19 nt, Artificial Sequence
  Description of Artificial Sequence: Synthetic oligonucleotide
  Antisense strand to SEQ ID NO: 1909658
uaaagaagcagaugguccc

SEQ ID NO: 1909660 - RNA, 19 nt, Artificial Sequence
  Description of Artificial Sequence: Synthetic oligonucleotide
  Sense strand starting at position 2056 of SEQ ID NO: 1879473
cggugacauguucagaaug

SEQ ID NO: 1909661 - RNA, 19 nt, Artificial Sequence
  Description of Artificial Sequence: Synthetic oligonucleotide
  Antisense strand to SEQ ID NO: 1909660
cauucugaacaugucaccg

SEQ ID NO: 1909662 - RNA, 19 nt, Artificial Sequence
  Description of Artificial Sequence: Synthetic oligonucleotide
  Sense strand starting at position 2105 of SEQ ID NO: 1879473
gcccuuguuuaauucugaa

SEQ ID NO: 1909663 - RNA, 19 nt, Artificial Sequence
  Description of Artificial Sequence: Synthetic oligonucleotide
  Antisense strand to SEQ ID NO: 1909662
uucagaauuaaacaagggc

SEQ ID NO: 1909664 - RNA, 19 nt, Artificial Sequence
  Description of Artificial Sequence: Synthetic oligonucleotide
  Sense strand starting at position 2698 of SEQ ID NO: 1879473
gagccaugcccagagcuau

SEQ ID NO: 1909665 - RNA, 19 nt, Artificial Sequence
  Description of Artificial Sequence: Synthetic oligonucleotide
  Antisense strand to SEQ ID NO: 1909664
auagcucugggcauggcuc

SEQ ID NO: 1909666 - RNA, 19 nt, Artificial Sequence
  Description of Artificial Sequence: Synthetic oligonucleotide
  Sense strand starting at position 2712 of SEQ ID NO: 1879473
gcuauuguuagggagaaug

SEQ ID NO: 1909667 - RNA, 19 nt, Artificial Sequence
  Description of Artificial Sequence: Synthetic oligonucleotide
  Antisense strand to SEQ ID NO: 1909666
cauucucccuaacaauagc

SEQ ID NO: 1909668 - RNA, 19 nt, Artificial Sequence
  Description of Artificial Sequence: Synthetic oligonucleotide
  Sense strand starting at position 2724 of SEQ ID NO: 1879473
gagaaugacucucuccgga

SEQ ID NO: 1909669 - RNA, 19 nt, Artificial Sequence
  Description of Artificial Sequence: Synthetic oligonucleotide
  Antisense strand to SEQ ID NO: 1909668
uccggagagagucauucuc

SEQ ID NO: 1909670 - RNA, 19 nt, Artificial Sequence
  Description of Artificial Sequence: Synthetic oligonucleotide
  Sense strand starting at position 2726 of SEQ ID NO: 1879473
gaaugacucucuccggaug

SEQ ID NO: 1909671 - RNA, 19 nt, Artificial Sequence
  Description of Artificial Sequence: Synthetic oligonucleotide
  Antisense strand to SEQ ID NO: 1909670
cauccggagagagucauuc

SEQ ID NO: 1909672 - RNA, 19 nt, Artificial Sequence
  Description of Artificial Sequence: Synthetic oligonucleotide
  Sense strand starting at position 2793 of SEQ ID NO: 1879473
gaucuagcuggcugaguaa

SEQ ID NO: 1909673 - RNA, 19 nt, Artificial Sequence
  Description of Artificial Sequence: Synthetic oligonucleotide
  Antisense strand to SEQ ID NO: 1909672
uuacucagccagcuagauc

SEQ ID NO: 1909674 - RNA, 19 nt, Artificial Sequence
  Description of Artificial Sequence: Synthetic oligonucleotide
  Sense strand starting at position 2930 of SEQ ID NO: 1879473
gcagacgucaccuagagua

SEQ ID NO: 1909675 - RNA, 19 nt, Artificial Sequence
  Description of Artificial Sequence: Synthetic oligonucleotide
  Antisense strand to SEQ ID NO: 1909674
uacucuaggugacgucugc

SEQ ID NO: 1909676 - RNA, 19 nt, Artificial Sequence
  Description of Artificial Sequence: Synthetic oligonucleotide
  Sense strand starting at position 2932 of SEQ ID NO: 1879473
agacgucaccuagaguauu

SEQ ID NO: 1909677 - RNA, 19 nt, Artificial Sequence
  Description of Artificial Sequence: Synthetic oligonucleotide
  Antisense strand to SEQ ID NO: 1909676
aauacucuaggugacgucu

SEQ ID NO: 1909678 - RNA, 19 nt, Artificial Sequence
  Description of Artificial Sequence: Synthetic oligonucleotide
  Sense strand starting at position 2957 of SEQ ID NO: 1879473
cugagccugcuguaauaaa

SEQ ID NO: 1909679 - RNA, 19 nt, Artificial Sequence
  Description of Artificial Sequence: Synthetic oligonucleotide
  Antisense strand to SEQ ID NO: 1909678
uuuauuacagcaggcucag

SEQ ID NO: 1909680 - RNA, 19 nt, Artificial Sequence
  Description of Artificial Sequence: Synthetic oligonucleotide
  Sense strand starting at position 2968 of SEQ ID NO: 1879473
guaauaaacuugguagccu

SEQ ID NO: 1909681 - RNA, 19 nt, Artificial Sequence
  Description of Artificial Sequence: Synthetic oligonucleotide
  Antisense strand to SEQ ID NO: 1909680
aggcuaccaaguuuauuac

SEQ ID NO: 1909682 - RNA, 19 nt, Artificial Sequence
  Description of Artificial Sequence: Synthetic oligonucleotide
  Sense strand starting at position 3220 of SEQ ID NO: 1879473
acaccugucaguggagcua

SEQ ID NO: 1909683 - RNA, 19 nt, Artificial Sequence
  Description of Artificial Sequence: Synthetic oligonucleotide
  Antisense strand to SEQ ID NO: 1909682
uagcuccacugacaggugu

SEQ ID NO: 1909684 - RNA, 19 nt, Artificial Sequence
  Description of Artificial Sequence: Synthetic oligonucleotide
  Sense strand starting at position 3816 of SEQ ID NO: 1879473
uugccauggugauucuaaa

SEQ ID NO: 1909685 - RNA, 19 nt, Artificial Sequence
  Description of Artificial Sequence: Synthetic oligonucleotide
  Antisense strand to SEQ ID NO: 1909684
uuuagaaucaccauggcaa

SEQ ID NO: 1909686 - RNA, 19 nt, Artificial Sequence
  Description of Artificial Sequence: Synthetic oligonucleotide
  Sense strand starting at position 3857 of SEQ ID NO: 1879473
uauuguuugcaaggaacua

SEQ ID NO: 1909687 - RNA, 19 nt, Artificial Sequence
  Description of Artificial Sequence: Synthetic oligonucleotide
  Antisense strand to SEQ ID NO: 1909686
uaguuccuugcaaacaaua

SEQ ID NO: 1909688 - RNA, 19 nt, Artificial Sequence
  Description of Artificial Sequence: Synthetic oligonucleotide
  Sense strand starting at position 3911 of SEQ ID NO: 1879473
cagauaggcuguuucuaga

SEQ ID NO: 1909689 - RNA, 19 nt, Artificial Sequence
  Description of Artificial Sequence: Synthetic oligonucleotide
  Antisense strand to SEQ ID NO: 1909688
ucuagaaacagccuaucug

SEQ ID NO: 1909690 - RNA, 19 nt, Artificial Sequence
  Description of Artificial Sequence: Synthetic oligonucleotide
  Sense strand starting at position 3937 of SEQ ID NO: 1879473
cauugcuuggagugagaac

SEQ ID NO: 1909691 - RNA, 19 nt, Artificial Sequence
  Description of Artificial Sequence: Synthetic oligonucleotide
  Antisense strand to SEQ ID NO: 1909690
guucucacuccaagcaaug

SEQ ID NO: 1909692 - RNA, 19 nt, Artificial Sequence
  Description of Artificial Sequence: Synthetic oligonucleotide
  Sense strand starting at position 3938 of SEQ ID NO: 1879473
auugcuuggagugagaacu

SEQ ID NO: 1909693 - RNA, 19 nt, Artificial Sequence
  Description of Artificial Sequence: Synthetic oligonucleotide
  Antisense strand to SEQ ID NO: 1909692
aguucucacuccaagcaau

SEQ ID NO: 1909694 - RNA, 19 nt, Artificial Sequence
  Description of Artificial Sequence: Synthetic oligonucleotide
  Sense strand starting at position 49 of SEQ ID NO: 1879474
ggguauagagcccguuagu

SEQ ID NO: 1909695 - RNA, 19 nt, Artificial Sequence
  Description of Artificial Sequence: Synthetic oligonucleotide
  Antisense strand to SEQ ID NO: 1909694
acuaacgggcucuauaccc

SEQ ID NO: 1909696 - RNA, 19 nt, Artificial Sequence
  Description of Artificial Sequence: Synthetic oligonucleotide
  Sense strand starting at position 52 of SEQ ID NO: 1879474
uauagagcccguuaguauc

SEQ ID NO: 1909697 - RNA, 19 nt, Artificial Sequence
  Description of Artificial Sequence: Synthetic oligonucleotide
  Antisense strand to SEQ ID NO: 1909696
gauacuaacgggcucuaua

SEQ ID NO: 1909698 - RNA, 19 nt, Artificial Sequence
  Description of Artificial Sequence: Synthetic oligonucleotide
  Sense strand starting at position 65 of SEQ ID NO: 1879474
aguaucaaguuuggauuua

SEQ ID NO: 1909699 - RNA, 19 nt, Artificial Sequence
  Description of Artificial Sequence: Synthetic oligonucleotide
  Antisense strand to SEQ ID NO: 1909698
uaaauccaaacuugauacu

SEQ ID NO: 1909700 - RNA, 19 nt, Artificial Sequence
  Description of Artificial Sequence: Synthetic oligonucleotide
  Sense strand starting at position 242 of SEQ ID NO: 1879474
ggaguuugaguccgggcaa

SEQ ID NO: 1909701 - RNA, 19 nt, Artificial Sequence
  Description of Artificial Sequence: Synthetic oligonucleotide
  Antisense strand to SEQ ID NO: 1909700
uugcccggacucaaacucc

SEQ ID NO: 1909702 - RNA, 19 nt, Artificial Sequence
  Description of Artificial Sequence: Synthetic oligonucleotide
  Sense strand starting at position 442 of SEQ ID NO: 1879474
gacagagacugauauauac

SEQ ID NO: 1909703 - RNA, 19 nt, Artificial Sequence
  Description of Artificial Sequence: Synthetic oligonucleotide
  Antisense strand to SEQ ID NO: 1909702
guauauaucagucucuguc

SEQ ID NO: 1909704 - RNA, 19 nt, Artificial Sequence
  Description of Artificial Sequence: Synthetic oligonucleotide
  Sense strand starting at position 817 of SEQ ID NO: 1879474
ugucuuugcagcuugcaga

SEQ ID NO: 1909705 - RNA, 19 nt, Artificial Sequence
  Description of Artificial Sequence: Synthetic oligonucleotide
  Antisense strand to SEQ ID NO: 1909704
ucugcaagcugcaaagaca

SEQ ID NO: 1909706 - RNA, 19 nt, Artificial Sequence
  Description of Artificial Sequence: Synthetic oligonucleotide
  Sense strand starting at position 929 of SEQ ID NO: 1879474
ugcaccuguguccgaauuu

SEQ ID NO: 1909707 - RNA, 19 nt, Artificial Sequence
  Description of Artificial Sequence: Synthetic oligonucleotide
  Antisense strand to SEQ ID NO: 1909706
aaauucggacacaggugca

SEQ ID NO: 1909708 - RNA, 19 nt, Artificial Sequence
  Description of Artificial Sequence: Synthetic oligonucleotide
  Sense strand starting at position 1528 of SEQ ID NO: 1879474
uucugagguccugggcaua

SEQ ID NO: 1909709 - RNA, 19 nt, Artificial Sequence
  Description of Artificial Sequence: Synthetic oligonucleotide
  Antisense strand to SEQ ID NO: 1909708
uaugcccaggaccucagaa

SEQ ID NO: 1909710 - RNA, 19 nt, Artificial Sequence
  Description of Artificial Sequence: Synthetic oligonucleotide
  Sense strand starting at position 1638 of SEQ ID NO: 1879474
uuccuaauaugaucagugu

SEQ ID NO: 1909711 - RNA, 19 nt, Artificial Sequence
  Description of Artificial Sequence: Synthetic oligonucleotide
  Antisense strand to SEQ ID NO: 1909710
acacugaucauauuaggaa

SEQ ID NO: 1909712 - RNA, 19 nt, Artificial Sequence
  Description of Artificial Sequence: Synthetic oligonucleotide
  Sense strand starting at position 1639 of SEQ ID NO: 1879474
uccuaauaugaucagugua

SEQ ID NO: 1909713 - RNA, 19 nt, Artificial Sequence
  Description of Artificial Sequence: Synthetic oligonucleotide
  Antisense strand to SEQ ID NO: 1909712
uacacugaucauauuagga

SEQ ID NO: 1909714 - RNA, 19 nt, Artificial Sequence
  Description of Artificial Sequence: Synthetic oligonucleotide
  Sense strand starting at position 1641 of SEQ ID NO: 1879474
cuaauaugaucaguguaga

SEQ ID NO: 1909715 - RNA, 19 nt, Artificial Sequence
  Description of Artificial Sequence: Synthetic oligonucleotide
  Antisense strand to SEQ ID NO: 1909714
ucuacacugaucauauuag

SEQ ID NO: 1909716 - RNA, 19 nt, Artificial Sequence
  Description of Artificial Sequence: Synthetic oligonucleotide
  Sense strand starting at position 1642 of SEQ ID NO: 1879474
uaauaugaucaguguagau

SEQ ID NO: 1909717 - RNA, 19 nt, Artificial Sequence
  Description of Artificial Sequence: Synthetic oligonucleotide
  Antisense strand to SEQ ID NO: 1909716
aucuacacugaucauauua

SEQ ID NO: 1909718 - RNA, 19 nt, Artificial Sequence
  Description of Artificial Sequence: Synthetic oligonucleotide
  Sense strand starting at position 1684 of SEQ ID NO: 1879474
uugacaucuguccaggcaa

SEQ ID NO: 1909719 - RNA, 19 nt, Artificial Sequence
  Description of Artificial Sequence: Synthetic oligonucleotide
  Antisense strand to SEQ ID NO: 1909718
uugccuggacagaugucaa

SEQ ID NO: 1909720 - RNA, 19 nt, Artificial Sequence
  Description of Artificial Sequence: Synthetic oligonucleotide
  Sense strand starting at position 1686 of SEQ ID NO: 1879474
gacaucuguccaggcaauu

SEQ ID NO: 1909721 - RNA, 19 nt, Artificial Sequence
  Description of Artificial Sequence: Synthetic oligonucleotide
  Antisense strand to SEQ ID NO: 1909720
aauugccuggacagauguc

SEQ ID NO: 1909722 - RNA, 19 nt, Artificial Sequence
  Description of Artificial Sequence: Synthetic oligonucleotide
  Sense strand starting at position 1715 of SEQ ID NO: 1879474
ggaagcuuuccagagcaug

SEQ ID NO: 1909723 - RNA, 19 nt, Artificial Sequence
  Description of Artificial Sequence: Synthetic oligonucleotide
  Antisense strand to SEQ ID NO: 1909722
caugcucuggaaagcuucc

SEQ ID NO: 1909724 - RNA, 19 nt, Artificial Sequence
  Description of Artificial Sequence: Synthetic oligonucleotide
  Sense strand starting at position 1720 of SEQ ID NO: 1879474
cuuuccagagcaugacaua

SEQ ID NO: 1909725 - RNA, 19 nt, Artificial Sequence
  Description of Artificial Sequence: Synthetic oligonucleotide
  Antisense strand to SEQ ID NO: 1909724
uaugucaugcucuggaaag

SEQ ID NO: 1909726 - RNA, 19 nt, Artificial Sequence
  Description of Artificial Sequence: Synthetic oligonucleotide
  Sense strand starting at position 2059 of SEQ ID NO: 1879474
uugugugccaaguauauau

SEQ ID NO: 1909727 - RNA, 19 nt, Artificial Sequence
  Description of Artificial Sequence: Synthetic oligonucleotide
  Antisense strand to SEQ ID NO: 1909726
auauauacuuggcacacaa

SEQ ID NO: 1909728 - RNA, 19 nt, Artificial Sequence
  Description of Artificial Sequence: Synthetic oligonucleotide
  Sense strand starting at position 2070 of SEQ ID NO: 1879474
guauauaucaggcgcugau

SEQ ID NO: 1909729 - RNA, 19 nt, Artificial Sequence
  Description of Artificial Sequence: Synthetic oligonucleotide
  Antisense strand to SEQ ID NO: 1909728
aucagcgccugauauauac

SEQ ID NO: 1909730 - RNA, 19 nt, Artificial Sequence
  Description of Artificial Sequence: Synthetic oligonucleotide
  Sense strand starting at position 2277 of SEQ ID NO: 1879474
ggauuauagcugggauuac

SEQ ID NO: 1909731 - RNA, 19 nt, Artificial Sequence
  Description of Artificial Sequence: Synthetic oligonucleotide
  Antisense strand to SEQ ID NO: 1909730
guaaucccagcuauaaucc

SEQ ID NO: 1909732 - RNA, 19 nt, Artificial Sequence
  Description of Artificial Sequence: Synthetic oligonucleotide
  Sense strand starting at position 2538 of SEQ ID NO: 1879474
uguagaaugcuggaucauc

SEQ ID NO: 1909733 - RNA, 19 nt, Artificial Sequence
  Description of Artificial Sequence: Synthetic oligonucleotide
  Antisense strand to SEQ ID NO: 1909732
gaugauccagcauucuaca

SEQ ID NO: 1909734 - RNA, 19 nt, Artificial Sequence
  Description of Artificial Sequence: Synthetic oligonucleotide
  Sense strand starting at position 2548 of SEQ ID NO: 1879474
uggaucaucauauguguga

SEQ ID NO: 1909735 - RNA, 19 nt, Artificial Sequence
  Description of Artificial Sequence: Synthetic oligonucleotide
  Antisense strand to SEQ ID NO: 1909734
ucacacauaugaugaucca

SEQ ID NO: 1909736 - RNA, 19 nt, Artificial Sequence
  Description of Artificial Sequence: Synthetic oligonucleotide
  Sense strand starting at position 2549 of SEQ ID NO: 1879474
ggaucaucauaugugugaa

SEQ ID NO: 1909737 - RNA, 19 nt, Artificial Sequence
  Description of Artificial Sequence: Synthetic oligonucleotide
  Antisense strand to SEQ ID NO: 1909736
uucacacauaugaugaucc

SEQ ID NO: 1909738 - RNA, 19 nt, Artificial Sequence
  Description of Artificial Sequence: Synthetic oligonucleotide
  Sense strand starting at position 2552 of SEQ ID NO: 1879474
ucaucauaugugugaaugu

SEQ ID NO: 1909739 - RNA, 19 nt, Artificial Sequence
  Description of Artificial Sequence: Synthetic oligonucleotide
  Antisense strand to SEQ ID NO: 1909738
acauucacacauaugauga

SEQ ID NO: 1909740 - RNA, 19 nt, Artificial Sequence
  Description of Artificial Sequence: Synthetic oligonucleotide
  Sense strand starting at position 2604 of SEQ ID NO: 1879474
caagaagugcugggaggau

SEQ ID NO: 1909741 - RNA, 19 nt, Artificial Sequence
  Description of Artificial Sequence: Synthetic oligonucleotide
  Antisense strand to SEQ ID NO: 1909740
auccucccagcacuucuug

SEQ ID NO: 1909742 - RNA, 19 nt, Artificial Sequence
  Description of Artificial Sequence: Synthetic oligonucleotide
  Sense strand starting at position 3002 of SEQ ID NO: 1879474
gggagugggcaucgaauca

SEQ ID NO: 1909743 - RNA, 19 nt, Artificial Sequence
  Description of Artificial Sequence: Synthetic oligonucleotide
  Antisense strand to SEQ ID NO: 1909742
ugauucgaugcccacuccc

SEQ ID NO: 1909744 - RNA, 19 nt, Artificial Sequence
  Description of Artificial Sequence: Synthetic oligonucleotide
  Sense strand starting at position 3200 of SEQ ID NO: 1879474
gagcuuucgggucauggca

SEQ ID NO: 1909745 - RNA, 19 nt, Artificial Sequence
  Description of Artificial Sequence: Synthetic oligonucleotide
  Antisense strand to SEQ ID NO: 1909744
ugccaugacccgaaagcuc

SEQ ID NO: 1909746 - RNA, 19 nt, Artificial Sequence
  Description of Artificial Sequence: Synthetic oligonucleotide
  Sense strand starting at position 3365 of SEQ ID NO: 1879474
ccagcuaugugacuauuac

SEQ ID NO: 1909747 - RNA, 19 nt, Artificial Sequence
  Description of Artificial Sequence: Synthetic oligonucleotide
  Antisense strand to SEQ ID NO: 1909746
guaauagucacauagcugg

SEQ ID NO: 1909748 - RNA, 19 nt, Artificial Sequence
  Description of Artificial Sequence: Synthetic oligonucleotide
  Sense strand starting at position 3443 of SEQ ID NO: 1879474
ggagauccuagauggaugu

SEQ ID NO: 1909749 - RNA, 19 nt, Artificial Sequence
  Description of Artificial Sequence: Synthetic oligonucleotide
  Antisense strand to SEQ ID NO: 1909748
acauccaucuaggaucucc

SEQ ID NO: 1909750 - RNA, 19 nt, Artificial Sequence
  Description of Artificial Sequence: Synthetic oligonucleotide
  Sense strand starting at position 3447 of SEQ ID NO: 1879474
auccuagauggauguguuu

SEQ ID NO: 1909751 - RNA, 19 nt, Artificial Sequence
  Description of Artificial Sequence: Synthetic oligonucleotide
  Antisense strand to SEQ ID NO: 1909750
aaacacauccaucuaggau

SEQ ID NO: 1909752 - RNA, 19 nt, Artificial Sequence
  Description of Artificial Sequence: Synthetic oligonucleotide
  Sense strand starting at position 3449 of SEQ ID NO: 1879474
ccuagauggauguguuuga

SEQ ID NO: 1909753 - RNA, 19 nt, Artificial Sequence
  Description of Artificial Sequence: Synthetic oligonucleotide
  Antisense strand to SEQ ID NO: 1909752
ucaaacacauccaucuagg

SEQ ID NO: 1909754 - RNA, 19 nt, Artificial Sequence
  Description of Artificial Sequence: Synthetic oligonucleotide
  Sense strand starting at position 3477 of SEQ ID NO: 1879474
caacgagauucgcugaugu

SEQ ID NO: 1909755 - RNA, 19 nt, Artificial Sequence
  Description of Artificial Sequence: Synthetic oligonucleotide
  Antisense strand to SEQ ID NO: 1909754
acaucagcgaaucucguug

SEQ ID NO: 1909756 - RNA, 19 nt, Artificial Sequence
  Description of Artificial Sequence: Synthetic oligonucleotide
  Sense strand starting at position 3499 of SEQ ID NO: 1879474
agacaugggcucugagaga

SEQ ID NO: 1909757 - RNA, 19 nt, Artificial Sequence
  Description of Artificial Sequence: Synthetic oligonucleotide
  Antisense strand to SEQ ID NO: 1909756
ucucucagagcccaugucu

SEQ ID NO: 1909758 - RNA, 19 nt, Artificial Sequence
  Description of Artificial Sequence: Synthetic oligonucleotide
  Sense strand starting at position 3525 of SEQ ID NO: 1879474
ggucuucggcuucagcaaa

SEQ ID NO: 1909759 - RNA, 19 nt, Artificial Sequence
  Description of Artificial Sequence: Synthetic oligonucleotide
  Antisense strand to SEQ ID NO: 1909758
uuugcugaagccgaagacc

SEQ ID NO: 1909760 - RNA, 19 nt, Artificial Sequence
  Description of Artificial Sequence: Synthetic oligonucleotide
  Sense strand starting at position 3547 of SEQ ID NO: 1879474
aagacagagccgcgauuaa

SEQ ID NO: 1909761 - RNA, 19 nt, Artificial Sequence
  Description of Artificial Sequence: Synthetic oligonucleotide
  Antisense strand to SEQ ID NO: 1909760
uuaaucgcggcucugucuu

SEQ ID NO: 1909762 - RNA, 19 nt, Artificial Sequence
  Description of Artificial Sequence: Synthetic oligonucleotide
  Sense strand starting at position 3556 of SEQ ID NO: 1879474
ccgcgauuaauugagacga

SEQ ID NO: 1909763 - RNA, 19 nt, Artificial Sequence
  Description of Artificial Sequence: Synthetic oligonucleotide
  Antisense strand to SEQ ID NO: 1909762
ucgucucaauuaaucgcgg

SEQ ID NO: 1909764 - RNA, 19 nt, Artificial Sequence
  Description of Artificial Sequence: Synthetic oligonucleotide
  Sense strand starting at position 3591 of SEQ ID NO: 1879474
gcugguuuggagggaauau

SEQ ID NO: 1909765 - RNA, 19 nt, Artificial Sequence
  Description of Artificial Sequence: Synthetic oligonucleotide
  Antisense strand to SEQ ID NO: 1909764
auauucccuccaaaccagc

SEQ ID NO: 1909766 - RNA, 19 nt, Artificial Sequence
  Description of Artificial Sequence: Synthetic oligonucleotide
  Sense strand starting at position 3600 of SEQ ID NO: 1879474
gagggaauaucagaacguu

SEQ ID NO: 1909767 - RNA, 19 nt, Artificial Sequence
  Description of Artificial Sequence: Synthetic oligonucleotide
  Antisense strand to SEQ ID NO: 1909766
aacguucugauauucccuc

SEQ ID NO: 1909768 - RNA, 19 nt, Artificial Sequence
  Description of Artificial Sequence: Synthetic oligonucleotide
  Sense strand starting at position 3608 of SEQ ID NO: 1879474
aucagaacguuugcuauuu

SEQ ID NO: 1909769 - RNA, 19 nt, Artificial Sequence
  Description of Artificial Sequence: Synthetic oligonucleotide
  Antisense strand to SEQ ID NO: 1909768
aaauagcaaacguucugau

SEQ ID NO: 1909770 - RNA, 19 nt, Artificial Sequence
  Description of Artificial Sequence: Synthetic oligonucleotide
  Sense strand starting at position 3780 of SEQ ID NO: 1879474
cacugaguuccauagugga

SEQ ID NO: 1909771 - RNA, 19 nt, Artificial Sequence
  Description of Artificial Sequence: Synthetic oligonucleotide
  Antisense strand to SEQ ID NO: 1909770
uccacuauggaacucagug

SEQ ID NO: 1909772 - RNA, 19 nt, Artificial Sequence
  Description of Artificial Sequence: Synthetic oligonucleotide
  Sense strand starting at position 3813 of SEQ ID NO: 1879474
ggccuaaagauaggguuau

SEQ ID NO: 1909773 - RNA, 19 nt, Artificial Sequence
  Description of Artificial Sequence: Synthetic oligonucleotide
  Antisense strand to SEQ ID NO: 1909772
auaacccuaucuuuaggcc

SEQ ID NO: 1909774 - RNA, 19 nt, Artificial Sequence
  Description of Artificial Sequence: Synthetic oligonucleotide
  Sense strand starting at position 67 of SEQ ID NO: 1879475
aggcuuuauguagaaguga

SEQ ID NO: 1909775 - RNA, 19 nt, Artificial Sequence
  Description of Artificial Sequence: Synthetic oligonucleotide
  Antisense strand to SEQ ID NO: 1909774
ucacuucuacauaaagccu

SEQ ID NO: 1909776 - RNA, 19 nt, Artificial Sequence
  Description of Artificial Sequence: Synthetic oligonucleotide
  Sense strand starting at position 113 of SEQ ID NO: 1879475
auagccaaagguugagauu

SEQ ID NO: 1909777 - RNA, 19 nt, Artificial Sequence
  Description of Artificial Sequence: Synthetic oligonucleotide
  Antisense strand to SEQ ID NO: 1909776
aaucucaaccuuuggcuau

SEQ ID NO: 1909778 - RNA, 19 nt, Artificial Sequence
  Description of Artificial Sequence: Synthetic oligonucleotide
  Sense strand starting at position 166 of SEQ ID NO: 1879475
uuaugagucucuuugagau

SEQ ID NO: 1909779 - RNA, 19 nt, Artificial Sequence
  Description of Artificial Sequence: Synthetic oligonucleotide
  Antisense strand to SEQ ID NO: 1909778
aucucaaagagacucauaa

SEQ ID NO: 1909780 - RNA, 19 nt, Artificial Sequence
  Description of Artificial Sequence: Synthetic oligonucleotide
  Sense strand starting at position 468 of SEQ ID NO: 1879475
ucugaagaauuugaaguaa

SEQ ID NO: 1909781 - RNA, 19 nt, Artificial Sequence
  Description of Artificial Sequence: Synthetic oligonucleotide
  Antisense strand to SEQ ID NO: 1909780
uuacuucaaauucuucaga

SEQ ID NO: 1909782 - RNA, 19 nt, Artificial Sequence
  Description of Artificial Sequence: Synthetic oligonucleotide
  Sense strand starting at position 562 of SEQ ID NO: 1879475
acaguaucacuuuagucua

SEQ ID NO: 1909783 - RNA, 19 nt, Artificial Sequence
  Description of Artificial Sequence: Synthetic oligonucleotide
  Antisense strand to SEQ ID NO: 1909782
uagacuaaagugauacugu

SEQ ID NO: 1909784 - RNA, 19 nt, Artificial Sequence
  Description of Artificial Sequence: Synthetic oligonucleotide
  Sense strand starting at position 684 of SEQ ID NO: 1879475
uccugauaugagcaucuca

SEQ ID NO: 1909785 - RNA, 19 nt, Artificial Sequence
  Description of Artificial Sequence: Synthetic oligonucleotide
  Antisense strand to SEQ ID NO: 1909784
ugagaugcucauaucagga

SEQ ID NO: 1909786 - RNA, 19 nt, Artificial Sequence
  Description of Artificial Sequence: Synthetic oligonucleotide
  Sense strand starting at position 781 of SEQ ID NO: 1879475
gaaauuccuccguaaguca

SEQ ID NO: 1909787 - RNA, 19 nt, Artificial Sequence
  Description of Artificial Sequence: Synthetic oligonucleotide
  Antisense strand to SEQ ID NO: 1909786
ugacuuacggaggaauuuc

SEQ ID NO: 1909788 - RNA, 19 nt, Artificial Sequence
  Description of Artificial Sequence: Synthetic oligonucleotide
  Sense strand starting at position 891 of SEQ ID NO: 1879475
guuugaagacuugaaguug

SEQ ID NO: 1909789 - RNA, 19 nt, Artificial Sequence
  Description of Artificial Sequence: Synthetic oligonucleotide
  Antisense strand to SEQ ID NO: 1909788
caacuucaagucuucaaac

SEQ ID NO: 1909790 - RNA, 19 nt, Artificial Sequence
  Description of Artificial Sequence: Synthetic oligonucleotide
  Sense strand starting at position 1174 of SEQ ID NO: 1879475
uaucauggcucaguggaaa

SEQ ID NO: 1909791 - RNA, 19 nt, Artificial Sequence
  Description of Artificial Sequence: Synthetic oligonucleotide
  Antisense strand to SEQ ID NO: 1909790
uuuccacugagccaugaua

SEQ ID NO: 1909792 - RNA, 19 nt, Artificial Sequence
  Description of Artificial Sequence: Synthetic oligonucleotide
  Sense strand starting at position 1310 of SEQ ID NO: 1879475
gucuacuuuccauagaugu

SEQ ID NO: 1909793 - RNA, 19 nt, Artificial Sequence
  Description of Artificial Sequence: Synthetic oligonucleotide
  Antisense strand to SEQ ID NO: 1909792
acaucuauggaaaguagac

SEQ ID NO: 1909794 - RNA, 19 nt, Artificial Sequence
  Description of Artificial Sequence: Synthetic oligonucleotide
  Sense strand starting at position 1333 of SEQ ID NO: 1879475
gagauuauagcaggugaac

SEQ ID NO: 1909795 - RNA, 19 nt, Artificial Sequence
  Description of Artificial Sequence: Synthetic oligonucleotide
  Antisense strand to SEQ ID NO: 1909794
guucaccugcuauaaucuc

SEQ ID NO: 1909796 - RNA, 19 nt, Artificial Sequence
  Description of Artificial Sequence: Synthetic oligonucleotide
  Sense strand starting at position 1497 of SEQ ID NO: 1879475
agcucuauugaugaaugca

SEQ ID NO: 1909797 - RNA, 19 nt, Artificial Sequence
  Description of Artificial Sequence: Synthetic oligonucleotide
  Antisense strand to SEQ ID NO: 1909796
ugcauucaucaauagagcu

SEQ ID NO: 1909798 - RNA, 19 nt, Artificial Sequence
  Description of Artificial Sequence: Synthetic oligonucleotide
  Sense strand starting at position 1779 of SEQ ID NO: 1879475
aaggucaguccuggaccua

SEQ ID NO: 1909799 - RNA, 19 nt, Artificial Sequence
  Description of Artificial Sequence: Synthetic oligonucleotide
  Antisense strand to SEQ ID NO: 1909798
uagguccaggacugaccuu

SEQ ID NO: 1909800 - RNA, 19 nt, Artificial Sequence
  Description of Artificial Sequence: Synthetic oligonucleotide
  Sense strand starting at position 1866 of SEQ ID NO: 1879475
uaccuugguggccaaauua

SEQ ID NO: 1909801 - RNA, 19 nt, Artificial Sequence
  Description of Artificial Sequence: Synthetic oligonucleotide
  Antisense strand to SEQ ID NO: 1909800
uaauuuggccaccaaggua

SEQ ID NO: 1909802 - RNA, 19 nt, Artificial Sequence
  Description of Artificial Sequence: Synthetic oligonucleotide
  Sense strand starting at position 2012 of SEQ ID NO: 1879475
aaugaaggcuggcuuaaga

SEQ ID NO: 1909803 - RNA, 19 nt, Artificial Sequence
  Description of Artificial Sequence: Synthetic oligonucleotide
  Antisense strand to SEQ ID NO: 1909802
ucuuaagccagccuucauu

SEQ ID NO: 1909804 - RNA, 19 nt, Artificial Sequence
  Description of Artificial Sequence: Synthetic oligonucleotide
  Sense strand starting at position 2043 of SEQ ID NO: 1879475
auggaauucuacucucuag

SEQ ID NO: 1909805 - RNA, 19 nt, Artificial Sequence
  Description of Artificial Sequence: Synthetic oligonucleotide
  Antisense strand to SEQ ID NO: 1909804
cuagagaguagaauuccau

SEQ ID NO: 1909806 - RNA, 19 nt, Artificial Sequence
  Description of Artificial Sequence: Synthetic oligonucleotide
  Sense strand starting at position 2226 of SEQ ID NO: 1879475
agucaacuugccuaacagu

SEQ ID NO: 1909807 - RNA, 19 nt, Artificial Sequence
  Description of Artificial Sequence: Synthetic oligonucleotide
  Antisense strand to SEQ ID NO: 1909806
acuguuaggcaaguugacu

SEQ ID NO: 1909808 - RNA, 19 nt, Artificial Sequence
  Description of Artificial Sequence: Synthetic oligonucleotide
  Sense strand starting at position 2253 of SEQ ID NO: 1879475
ggaaguaccucucuggcaa

SEQ ID NO: 1909809 - RNA, 19 nt, Artificial Sequence
  Description of Artificial Sequence: Synthetic oligonucleotide
  Antisense strand to SEQ ID NO: 1909808
uugccagagagguacuucc

SEQ ID NO: 1909810 - RNA, 19 nt, Artificial Sequence
  Description of Artificial Sequence: Synthetic oligonucleotide
  Sense strand starting at position 2348 of SEQ ID NO: 1879475
ggauauagaucuccacagu

SEQ ID NO: 1909811 - RNA, 19 nt, Artificial Sequence
  Description of Artificial Sequence: Synthetic oligonucleotide
  Antisense strand to SEQ ID NO: 1909810
acuguggagaucuauaucc

SEQ ID NO: 1909812 - RNA, 19 nt, Artificial Sequence
  Description of Artificial Sequence: Synthetic oligonucleotide
  Sense strand starting at position 2365 of SEQ ID NO: 1879475
gucauuuaucagugcugga

SEQ ID NO: 1909813 - RNA, 19 nt, Artificial Sequence
  Description of Artificial Sequence: Synthetic oligonucleotide
  Antisense strand to SEQ ID NO: 1909812
uccagcacugauaaaugac

SEQ ID NO: 1909814 - RNA, 19 nt, Artificial Sequence
  Description of Artificial Sequence: Synthetic oligonucleotide
  Sense strand starting at position 2431 of SEQ ID NO: 1879475
uguuaucauugaccugauc

SEQ ID NO: 1909815 - RNA, 19 nt, Artificial Sequence
  Description of Artificial Sequence: Synthetic oligonucleotide
  Antisense strand to SEQ ID NO: 1909814
gaucaggucaaugauaaca

SEQ ID NO: 1909816 - RNA, 19 nt, Artificial Sequence
  Description of Artificial Sequence: Synthetic oligonucleotide
  Sense strand starting at position 2443 of SEQ ID NO: 1879475
ccugaucauugaccaggua

SEQ ID NO: 1909817 - RNA, 19 nt, Artificial Sequence
  Description of Artificial Sequence: Synthetic oligonucleotide
  Antisense strand to SEQ ID NO: 1909816
uaccuggucaaugaucagg

SEQ ID NO: 1909818 - RNA, 19 nt, Artificial Sequence
  Description of Artificial Sequence: Synthetic oligonucleotide
  Sense strand starting at position 2481 of SEQ ID NO: 1879475
agcuuucuaggccauggaa

SEQ ID NO: 1909819 - RNA, 19 nt, Artificial Sequence
  Description of Artificial Sequence: Synthetic oligonucleotide
  Antisense strand to SEQ ID NO: 1909818
uuccauggccuagaaagcu

SEQ ID NO: 1909820 - RNA, 19 nt, Artificial Sequence
  Description of Artificial Sequence: Synthetic oligonucleotide
  Sense strand starting at position 2719 of SEQ ID NO: 1879475
uuucuuugucuggaggauu

SEQ ID NO: 1909821 - RNA, 19 nt, Artificial Sequence
  Description of Artificial Sequence: Synthetic oligonucleotide
  Antisense strand to SEQ ID NO: 1909820
aauccuccagacaaagaaa

SEQ ID NO: 1909822 - RNA, 19 nt, Artificial Sequence
  Description of Artificial Sequence: Synthetic oligonucleotide
  Sense strand starting at position 2885 of SEQ ID NO: 1879475
gggaauuggugguuaugga

SEQ ID NO: 1909823 - RNA, 19 nt, Artificial Sequence
  Description of Artificial Sequence: Synthetic oligonucleotide
  Antisense strand to SEQ ID NO: 1909822
uccauaaccaccaauuccc

SEQ ID NO: 1909824 - RNA, 19 nt, Artificial Sequence
  Description of Artificial Sequence: Synthetic oligonucleotide
  Sense strand starting at position 2946 of SEQ ID NO: 1879475
gagaaucauugaguucuaa

SEQ ID NO: 1909825 - RNA, 19 nt, Artificial Sequence
  Description of Artificial Sequence: Synthetic oligonucleotide
  Antisense strand to SEQ ID NO: 1909824
uuagaacucaaugauucuc

SEQ ID NO: 1909826 - RNA, 19 nt, Artificial Sequence
  Description of Artificial Sequence: Synthetic oligonucleotide
  Sense strand starting at position 3323 of SEQ ID NO: 1879475
cuguguuccaaagagguua

SEQ ID NO: 1909827 - RNA, 19 nt, Artificial Sequence
  Description of Artificial Sequence: Synthetic oligonucleotide
  Antisense strand to SEQ ID NO: 1909826
uaaccucuuuggaacacag

SEQ ID NO: 1909828 - RNA, 19 nt, Artificial Sequence
  Description of Artificial Sequence: Synthetic oligonucleotide
  Sense strand starting at position 3366 of SEQ ID NO: 1879475
ugcugaauaucugucagga

SEQ ID NO: 1909829 - RNA, 19 nt, Artificial Sequence
  Description of Artificial Sequence: Synthetic oligonucleotide
  Antisense strand to SEQ ID NO: 1909828
uccugacagauauucagca

SEQ ID NO: 1909830 - RNA, 19 nt, Artificial Sequence
  Description of Artificial Sequence: Synthetic oligonucleotide
  Sense strand starting at position 3480 of SEQ ID NO: 1879475
agaagucucuauguacaug

SEQ ID NO: 1909831 - RNA, 19 nt, Artificial Sequence
  Description of Artificial Sequence: Synthetic oligonucleotide
  Antisense strand to SEQ ID NO: 1909830
cauguacauagagacuucu

SEQ ID NO: 1909832 - RNA, 19 nt, Artificial Sequence
  Description of Artificial Sequence: Synthetic oligonucleotide
  Sense strand starting at position 3496 of SEQ ID NO: 1879475
augcaagagcugugcauuu

SEQ ID NO: 1909833 - RNA, 19 nt, Artificial Sequence
  Description of Artificial Sequence: Synthetic oligonucleotide
  Antisense strand to SEQ ID NO: 1909832
aaaugcacagcucuugcau

SEQ ID NO: 1909834 - RNA, 19 nt, Artificial Sequence
  Description of Artificial Sequence: Synthetic oligonucleotide
  Sense strand starting at position 3549 of SEQ ID NO: 1879475
ugggaaaguuuaucuccaa

SEQ ID NO: 1909835 - RNA, 19 nt, Artificial Sequence
  Description of Artificial Sequence: Synthetic oligonucleotide
  Antisense strand to SEQ ID NO: 1909834
uuggagauaaacuuuccca

SEQ ID NO: 1909836 - RNA, 19 nt, Artificial Sequence
  Description of Artificial Sequence: Synthetic oligonucleotide
  Sense strand starting at position 3550 of SEQ ID NO: 1879475
gggaaaguuuaucuccaac

SEQ ID NO: 1909837 - RNA, 19 nt, Artificial Sequence
  Description of Artificial Sequence: Synthetic oligonucleotide
  Antisense strand to SEQ ID NO: 1909836
guuggagauaaacuuuccc

SEQ ID NO: 1909838 - RNA, 19 nt, Artificial Sequence
  Description of Artificial Sequence: Synthetic oligonucleotide
  Sense strand starting at position 3845 of SEQ ID NO: 1879475
caauuuggguuccagaaag

SEQ ID NO: 1909839 - RNA, 19 nt, Artificial Sequence
  Description of Artificial Sequence: Synthetic oligonucleotide
  Antisense strand to SEQ ID NO: 1909838
cuuucuggaacccaaauug

SEQ ID NO: 1909840 - RNA, 19 nt, Artificial Sequence
  Description of Artificial Sequence: Synthetic oligonucleotide
  Sense strand starting at position 3855 of SEQ ID NO: 1879475
uccagaaaguucucagaca

SEQ ID NO: 1909841 - RNA, 19 nt, Artificial Sequence
  Description of Artificial Sequence: Synthetic oligonucleotide
  Antisense strand to SEQ ID NO: 1909840
ugucugagaacuuucugga

SEQ ID NO: 1909842 - RNA, 19 nt, Artificial Sequence
  Description of Artificial Sequence: Synthetic oligonucleotide
  Sense strand starting at position 3878 of SEQ ID NO: 1879475
ggagucaugcuauagacac

SEQ ID NO: 1909843 - RNA, 19 nt, Artificial Sequence
  Description of Artificial Sequence: Synthetic oligonucleotide
  Antisense strand to SEQ ID NO: 1909842
gugucuauagcaugacucc

SEQ ID NO: 1909844 - RNA, 19 nt, Artificial Sequence
  Description of Artificial Sequence: Synthetic oligonucleotide
  Sense strand starting at position 3945 of SEQ ID NO: 1879475
ggucaugcuagagaaaguu

SEQ ID NO: 1909845 - RNA, 19 nt, Artificial Sequence
  Description of Artificial Sequence: Synthetic oligonucleotide
  Antisense strand to SEQ ID NO: 1909844
aacuuucucuagcaugacc

SEQ ID NO: 1909846 - RNA, 19 nt, Artificial Sequence
  Description of Artificial Sequence: Synthetic oligonucleotide
  Sense strand starting at position 3953 of SEQ ID NO: 1879475
uagagaaaguuuguaauuc

SEQ ID NO: 1909847 - RNA, 19 nt, Artificial Sequence
  Description of Artificial Sequence: Synthetic oligonucleotide
  Antisense strand to SEQ ID NO: 1909846
gaauuacaaacuuucucua

SEQ ID NO: 1909848 - RNA, 19 nt, Artificial Sequence
  Description of Artificial Sequence: Synthetic oligonucleotide
  Sense strand starting at position 3957 of SEQ ID NO: 1879475
gaaaguuuguaauucugga

SEQ ID NO: 1909849 - RNA, 19 nt, Artificial Sequence
  Description of Artificial Sequence: Synthetic oligonucleotide
  Antisense strand to SEQ ID NO: 1909848
uccagaauuacaaacuuuc

SEQ ID NO: 1909850 - RNA, 19 nt, Artificial Sequence
  Description of Artificial Sequence: Synthetic oligonucleotide
  Sense strand starting at position 3962 of SEQ ID NO: 1879475
uuuguaauucuggaauggu

SEQ ID NO: 1909851 - RNA, 19 nt, Artificial Sequence
  Description of Artificial Sequence: Synthetic oligonucleotide
  Antisense strand to SEQ ID NO: 1909850
accauuccagaauuacaaa

SEQ ID NO: 1909852 - RNA, 19 nt, Artificial Sequence
  Description of Artificial Sequence: Synthetic oligonucleotide
  Sense strand starting at position 3971 of SEQ ID NO: 1879475
cuggaaugguugcugagaa

SEQ ID NO: 1909853 - RNA, 19 nt, Artificial Sequence
  Description of Artificial Sequence: Synthetic oligonucleotide
  Antisense strand to SEQ ID NO: 1909852
uucucagcaaccauuccag

SEQ ID NO: 1909854 - RNA, 19 nt, Artificial Sequence
  Description of Artificial Sequence: Synthetic oligonucleotide
  Sense strand starting at position 314 of SEQ ID NO: 1879477
ggagcaucuguggaugaau

SEQ ID NO: 1909855 - RNA, 19 nt, Artificial Sequence
  Description of Artificial Sequence: Synthetic oligonucleotide
  Antisense strand to SEQ ID NO: 1909854
auucauccacagaugcucc

SEQ ID NO: 1909856 - RNA, 19 nt, Artificial Sequence
  Description of Artificial Sequence: Synthetic oligonucleotide
  Sense strand starting at position 632 of SEQ ID NO: 1879477
agccucaugcuagaucuua

SEQ ID NO: 1909857 - RNA, 19 nt, Artificial Sequence
  Description of Artificial Sequence: Synthetic oligonucleotide
  Antisense strand to SEQ ID NO: 1909856
uaagaucuagcaugaggcu

SEQ ID NO: 1909858 - RNA, 19 nt, Artificial Sequence
  Description of Artificial Sequence: Synthetic oligonucleotide
  Sense strand starting at position 739 of SEQ ID NO: 1879477
cuaaaugugccaugauguc

SEQ ID NO: 1909859 - RNA, 19 nt, Artificial Sequence
  Description of Artificial Sequence: Synthetic oligonucleotide
  Antisense strand to SEQ ID NO: 1909858
gacaucauggcacauuuag

SEQ ID NO: 1909860 - RNA, 19 nt, Artificial Sequence
  Description of Artificial Sequence: Synthetic oligonucleotide
  Sense strand starting at position 755 of SEQ ID NO: 1879477
gucagagacagaugucauc

SEQ ID NO: 1909861 - RNA, 19 nt, Artificial Sequence
  Description of Artificial Sequence: Synthetic oligonucleotide
  Antisense strand to SEQ ID NO: 1909860
gaugacaucugucucugac

SEQ ID NO: 1909862 - RNA, 19 nt, Artificial Sequence
  Description of Artificial Sequence: Synthetic oligonucleotide
  Sense strand starting at position 764 of SEQ ID NO: 1879477
agaugucauccucacugua

SEQ ID NO: 1909863 - RNA, 19 nt, Artificial Sequence
  Description of Artificial Sequence: Synthetic oligonucleotide
  Antisense strand to SEQ ID NO: 1909862
uacagugaggaugacaucu

SEQ ID NO: 1909864 - RNA, 19 nt, Artificial Sequence
  Description of Artificial Sequence: Synthetic oligonucleotide
  Sense strand starting at position 811 of SEQ ID NO: 1879477
aagaaugggugcuuguagu

SEQ ID NO: 1909865 - RNA, 19 nt, Artificial Sequence
  Description of Artificial Sequence: Synthetic oligonucleotide
  Antisense strand to SEQ ID NO: 1909864
acuacaagcacccauucuu

SEQ ID NO: 1909866 - RNA, 19 nt, Artificial Sequence
  Description of Artificial Sequence: Synthetic oligonucleotide
  Sense strand starting at position 969 of SEQ ID NO: 1879477
aagcauaggugcuuaauca

SEQ ID NO: 1909867 - RNA, 19 nt, Artificial Sequence
  Description of Artificial Sequence: Synthetic oligonucleotide
  Antisense strand to SEQ ID NO: 1909866
ugauuaagcaccuaugcuu

SEQ ID NO: 1909868 - RNA, 19 nt, Artificial Sequence
  Description of Artificial Sequence: Synthetic oligonucleotide
  Sense strand starting at position 970 of SEQ ID NO: 1879477
agcauaggugcuuaaucaa

SEQ ID NO: 1909869 - RNA, 19 nt, Artificial Sequence
  Description of Artificial Sequence: Synthetic oligonucleotide
  Antisense strand to SEQ ID NO: 1909868
uugauuaagcaccuaugcu

SEQ ID NO: 1909870 - RNA, 19 nt, Artificial Sequence
  Description of Artificial Sequence: Synthetic oligonucleotide
  Sense strand starting at position 1583 of SEQ ID NO: 1879477
gaaagcaucuguuucgaag

SEQ ID NO: 1909871 - RNA, 19 nt, Artificial Sequence
  Description of Artificial Sequence: Synthetic oligonucleotide
  Antisense strand to SEQ ID NO: 1909870
cuucgaaacagaugcuuuc

SEQ ID NO: 1909872 - RNA, 19 nt, Artificial Sequence
  Description of Artificial Sequence: Synthetic oligonucleotide
  Sense strand starting at position 1587 of SEQ ID NO: 1879477
gcaucuguuucgaagggag

SEQ ID NO: 1909873 - RNA, 19 nt, Artificial Sequence
  Description of Artificial Sequence: Synthetic oligonucleotide
  Antisense strand to SEQ ID NO: 1909872
cucccuucgaaacagaugc

SEQ ID NO: 1909874 - RNA, 19 nt, Artificial Sequence
  Description of Artificial Sequence: Synthetic oligonucleotide
  Sense strand starting at position 1589 of SEQ ID NO: 1879477
aucuguuucgaagggagau

SEQ ID NO: 1909875 - RNA, 19 nt, Artificial Sequence
  Description of Artificial Sequence: Synthetic oligonucleotide
  Antisense strand to SEQ ID NO: 1909874
aucucccuucgaaacagau

SEQ ID NO: 1909876 - RNA, 19 nt, Artificial Sequence
  Description of Artificial Sequence: Synthetic oligonucleotide
  Sense strand starting at position 1679 of SEQ ID NO: 1879477
cgaagaacucgccagcaga

SEQ ID NO: 1909877 - RNA, 19 nt, Artificial Sequence
  Description of Artificial Sequence: Synthetic oligonucleotide
  Antisense strand to SEQ ID NO: 1909876
ucugcuggcgaguucuucg

SEQ ID NO: 1909878 - RNA, 19 nt, Artificial Sequence
  Description of Artificial Sequence: Synthetic oligonucleotide
  Sense strand starting at position 1726 of SEQ ID NO: 1879477
gaacucugauucucggaua

SEQ ID NO: 1909879 - RNA, 19 nt, Artificial Sequence
  Description of Artificial Sequence: Synthetic oligonucleotide
  Antisense strand to SEQ ID NO: 1909878
uauccgagaaucagaguuc

SEQ ID NO: 1909880 - RNA, 19 nt, Artificial Sequence
  Description of Artificial Sequence: Synthetic oligonucleotide
  Sense strand starting at position 1785 of SEQ ID NO: 1879477
gcagcaucgcggaggacuu

SEQ ID NO: 1909881 - RNA, 19 nt, Artificial Sequence
  Description of Artificial Sequence: Synthetic oligonucleotide
  Antisense strand to SEQ ID NO: 1909880
aaguccuccgcgaugcugc

SEQ ID NO: 1909882 - RNA, 19 nt, Artificial Sequence
  Description of Artificial Sequence: Synthetic oligonucleotide
  Sense strand starting at position 2248 of SEQ ID NO: 1879477
ucggauuucguguaaggca

SEQ ID NO: 1909883 - RNA, 19 nt, Artificial Sequence
  Description of Artificial Sequence: Synthetic oligonucleotide
  Antisense strand to SEQ ID NO: 1909882
ugccuuacacgaaauccga

SEQ ID NO: 1909884 - RNA, 19 nt, Artificial Sequence
  Description of Artificial Sequence: Synthetic oligonucleotide
  Sense strand starting at position 2331 of SEQ ID NO: 1879477
cagacuggugccgggauaa

SEQ ID NO: 1909885 - RNA, 19 nt, Artificial Sequence
  Description of Artificial Sequence: Synthetic oligonucleotide
  Antisense strand to SEQ ID NO: 1909884
uuaucccggcaccagucug

SEQ ID NO: 1909886 - RNA, 19 nt, Artificial Sequence
  Description of Artificial Sequence: Synthetic oligonucleotide
  Sense strand starting at position 2341 of SEQ ID NO: 1879477
ccgggauaaccugaccuuu

SEQ ID NO: 1909887 - RNA, 19 nt, Artificial Sequence
  Description of Artificial Sequence: Synthetic oligonucleotide
  Antisense strand to SEQ ID NO: 1909886
aaaggucagguuaucccgg

SEQ ID NO: 1909888 - RNA, 19 nt, Artificial Sequence
  Description of Artificial Sequence: Synthetic oligonucleotide
  Sense strand starting at position 2363 of SEQ ID NO: 1879477
agccuuaacuucuucucga

SEQ ID NO: 1909889 - RNA, 19 nt, Artificial Sequence
  Description of Artificial Sequence: Synthetic oligonucleotide
  Antisense strand to SEQ ID NO: 1909888
ucgagaagaaguuaaggcu

SEQ ID NO: 1909890 - RNA, 19 nt, Artificial Sequence
  Description of Artificial Sequence: Synthetic oligonucleotide
  Sense strand starting at position 2466 of SEQ ID NO: 1879477
ucgcuuucugaauaccgua

SEQ ID NO: 1909891 - RNA, 19 nt, Artificial Sequence
  Description of Artificial Sequence: Synthetic oligonucleotide
  Antisense strand to SEQ ID NO: 1909890
uacgguauucagaaagcga

SEQ ID NO: 1909892 - RNA, 19 nt, Artificial Sequence
  Description of Artificial Sequence: Synthetic oligonucleotide
  Sense strand starting at position 2479 of SEQ ID NO: 1879477
accguaacuccuuggaaga

SEQ ID NO: 1909893 - RNA, 19 nt, Artificial Sequence
  Description of Artificial Sequence: Synthetic oligonucleotide
  Antisense strand to SEQ ID NO: 1909892
ucuuccaaggaguuacggu

SEQ ID NO: 1909894 - RNA, 19 nt, Artificial Sequence
  Description of Artificial Sequence: Synthetic oligonucleotide
  Sense strand starting at position 2480 of SEQ ID NO: 1879477
ccguaacuccuuggaagag

SEQ ID NO: 1909895 - RNA, 19 nt, Artificial Sequence
  Description of Artificial Sequence: Synthetic oligonucleotide
  Antisense strand to SEQ ID NO: 1909894
cucuuccaaggaguuacgg

SEQ ID NO: 1909896 - RNA, 19 nt, Artificial Sequence
  Description of Artificial Sequence: Synthetic oligonucleotide
  Sense strand starting at position 2496 of SEQ ID NO: 1879477
gaguguauauauucuuugu

SEQ ID NO: 1909897 - RNA, 19 nt, Artificial Sequence
  Description of Artificial Sequence: Synthetic oligonucleotide
  Antisense strand to SEQ ID NO: 1909896
acaaagaauauauacacuc

SEQ ID NO: 1909898 - RNA, 19 nt, Artificial Sequence
  Description of Artificial Sequence: Synthetic oligonucleotide
  Sense strand starting at position 2499 of SEQ ID NO: 1879477
uguauauauucuuugucca

SEQ ID NO: 1909899 - RNA, 19 nt, Artificial Sequence
  Description of Artificial Sequence: Synthetic oligonucleotide
  Antisense strand to SEQ ID NO: 1909898
uggacaaagaauauauaca

SEQ ID NO: 1909900 - RNA, 19 nt, Artificial Sequence
  Description of Artificial Sequence: Synthetic oligonucleotide
  Sense strand starting at position 2500 of SEQ ID NO: 1879477
guauauauucuuuguccag

SEQ ID NO: 1909901 - RNA, 19 nt, Artificial Sequence
  Description of Artificial Sequence: Synthetic oligonucleotide
  Antisense strand to SEQ ID NO: 1909900
cuggacaaagaauauauac

SEQ ID NO: 1909902 - RNA, 19 nt, Artificial Sequence
  Description of Artificial Sequence: Synthetic oligonucleotide
  Sense strand starting at position 2792 of SEQ ID NO: 1879477
gcuuaaucucuugaugauu

SEQ ID NO: 1909903 - RNA, 19 nt, Artificial Sequence
  Description of Artificial Sequence: Synthetic oligonucleotide
  Antisense strand to SEQ ID NO: 1909902
aaucaucaagagauuaagc

SEQ ID NO: 1909904 - RNA, 19 nt, Artificial Sequence
  Description of Artificial Sequence: Synthetic oligonucleotide
  Sense strand starting at position 2815 of SEQ ID NO: 1879477
cggguuucauggcuuuaaa

SEQ ID NO: 1909905 - RNA, 19 nt, Artificial Sequence
  Description of Artificial Sequence: Synthetic oligonucleotide
  Antisense strand to SEQ ID NO: 1909904
uuuaaagccaugaaacccg

SEQ ID NO: 1909906 - RNA, 19 nt, Artificial Sequence
  Description of Artificial Sequence: Synthetic oligonucleotide
  Sense strand starting at position 2833 of SEQ ID NO: 1879477
agacuaugugcugaugacu

SEQ ID NO: 1909907 - RNA, 19 nt, Artificial Sequence
  Description of Artificial Sequence: Synthetic oligonucleotide
  Antisense strand to SEQ ID NO: 1909906
agucaucagcacauagucu

SEQ ID NO: 1909908 - RNA, 19 nt, Artificial Sequence
  Description of Artificial Sequence: Synthetic oligonucleotide
  Sense strand starting at position 2904 of SEQ ID NO: 1879477
cuucucaggcuguaaacuu

SEQ ID NO: 1909909 - RNA, 19 nt, Artificial Sequence
  Description of Artificial Sequence: Synthetic oligonucleotide
  Antisense strand to SEQ ID NO: 1909908
aaguuuacagccugagaag

SEQ ID NO: 1909910 - RNA, 19 nt, Artificial Sequence
  Description of Artificial Sequence: Synthetic oligonucleotide
  Sense strand starting at position 2941 of SEQ ID NO: 1879477
ucaaaucugucagcagauc

SEQ ID NO: 1909911 - RNA, 19 nt, Artificial Sequence
  Description of Artificial Sequence: Synthetic oligonucleotide
  Antisense strand to SEQ ID NO: 1909910
gaucugcugacagauuuga

SEQ ID NO: 1909912 - RNA, 19 nt, Artificial Sequence
  Description of Artificial Sequence: Synthetic oligonucleotide
  Sense strand starting at position 3081 of SEQ ID NO: 1879477
ucagucuguguuuacauaa

SEQ ID NO: 1909913 - RNA, 19 nt, Artificial Sequence
  Description of Artificial Sequence: Synthetic oligonucleotide
  Antisense strand to SEQ ID NO: 1909912
uuauguaaacacagacuga

SEQ ID NO: 1909914 - RNA, 19 nt, Artificial Sequence
  Description of Artificial Sequence: Synthetic oligonucleotide
  Sense strand starting at position 3222 of SEQ ID NO: 1879477
gccucuguucuagaccuuu

SEQ ID NO: 1909915 - RNA, 19 nt, Artificial Sequence
  Description of Artificial Sequence: Synthetic oligonucleotide
  Antisense strand to SEQ ID NO: 1909914
aaaggucuagaacagaggc

SEQ ID NO: 1909916 - RNA, 19 nt, Artificial Sequence
  Description of Artificial Sequence: Synthetic oligonucleotide
  Sense strand starting at position 3337 of SEQ ID NO: 1879477
ccuggaacuuguccucagu

SEQ ID NO: 1909917 - RNA, 19 nt, Artificial Sequence
  Description of Artificial Sequence: Synthetic oligonucleotide
  Antisense strand to SEQ ID NO: 1909916
acugaggacaaguuccagg

SEQ ID NO: 1909918 - RNA, 19 nt, Artificial Sequence
  Description of Artificial Sequence: Synthetic oligonucleotide
  Sense strand starting at position 3339 of SEQ ID NO: 1879477
uggaacuuguccucaguua

SEQ ID NO: 1909919 - RNA, 19 nt, Artificial Sequence
  Description of Artificial Sequence: Synthetic oligonucleotide
  Antisense strand to SEQ ID NO: 1909918
uaacugaggacaaguucca

SEQ ID NO: 1909920 - RNA, 19 nt, Artificial Sequence
  Description of Artificial Sequence: Synthetic oligonucleotide
  Sense strand starting at position 3340 of SEQ ID NO: 1879477
ggaacuuguccucaguuau

SEQ ID NO: 1909921 - RNA, 19 nt, Artificial Sequence
  Description of Artificial Sequence: Synthetic oligonucleotide
  Antisense strand to SEQ ID NO: 1909920
auaacugaggacaaguucc

SEQ ID NO: 1909922 - RNA, 19 nt, Artificial Sequence
  Description of Artificial Sequence: Synthetic oligonucleotide
  Sense strand starting at position 3383 of SEQ ID NO: 1879477
cuccaagacuuggcucaaa

SEQ ID NO: 1909923 - RNA, 19 nt, Artificial Sequence
  Description of Artificial Sequence: Synthetic oligonucleotide
  Antisense strand to SEQ ID NO: 1909922
uuugagccaagucuuggag

SEQ ID NO: 1909924 - RNA, 19 nt, Artificial Sequence
  Description of Artificial Sequence: Synthetic oligonucleotide
  Sense strand starting at position 3528 of SEQ ID NO: 1879477
ccguuuaauuuaguucuuu

SEQ ID NO: 1909925 - RNA, 19 nt, Artificial Sequence
  Description of Artificial Sequence: Synthetic oligonucleotide
  Antisense strand to SEQ ID NO: 1909924
aaagaacuaaauuaaacgg

SEQ ID NO: 1909926 - RNA, 19 nt, Artificial Sequence
  Description of Artificial Sequence: Synthetic oligonucleotide
  Sense strand starting at position 3621 of SEQ ID NO: 1879477
gagugcguggcacaugaua

SEQ ID NO: 1909927 - RNA, 19 nt, Artificial Sequence
  Description of Artificial Sequence: Synthetic oligonucleotide
  Antisense strand to SEQ ID NO: 1909926
uaucaugugccacgcacuc

SEQ ID NO: 1909928 - RNA, 19 nt, Artificial Sequence
  Description of Artificial Sequence: Synthetic oligonucleotide
  Sense strand starting at position 3633 of SEQ ID NO: 1879477
caugauaggugcucaguac

SEQ ID NO: 1909929 - RNA, 19 nt, Artificial Sequence
  Description of Artificial Sequence: Synthetic oligonucleotide
  Antisense strand to SEQ ID NO: 1909928
guacugagcaccuaucaug

SEQ ID NO: 1909930 - RNA, 19 nt, Artificial Sequence
  Description of Artificial Sequence: Synthetic oligonucleotide
  Sense strand starting at position 3677 of SEQ ID NO: 1879477
ugcagaauccaaggguuaa

SEQ ID NO: 1909931 - RNA, 19 nt, Artificial Sequence
  Description of Artificial Sequence: Synthetic oligonucleotide
  Antisense strand to SEQ ID NO: 1909930
uuaacccuuggauucugca

SEQ ID NO: 1909932 - RNA, 19 nt, Artificial Sequence
  Description of Artificial Sequence: Synthetic oligonucleotide
  Sense strand starting at position 3678 of SEQ ID NO: 1879477
gcagaauccaaggguuaag

SEQ ID NO: 1909933 - RNA, 19 nt, Artificial Sequence
  Description of Artificial Sequence: Synthetic oligonucleotide
  Antisense strand to SEQ ID NO: 1909932
cuuaacccuuggauucugc

SEQ ID NO: 1909934 - RNA, 19 nt, Artificial Sequence
  Description of Artificial Sequence: Synthetic oligonucleotide
  Sense strand starting at position 394 of SEQ ID NO: 1879476
ggagcaucuguggaugaau

SEQ ID NO: 1909935 - RNA, 19 nt, Artificial Sequence
  Description of Artificial Sequence: Synthetic oligonucleotide
  Antisense strand to SEQ ID NO: 1909934
auucauccacagaugcucc

SEQ ID NO: 1909936 - RNA, 19 nt, Artificial Sequence
  Description of Artificial Sequence: Synthetic oligonucleotide
  Sense strand starting at position 712 of SEQ ID NO: 1879476
agccucaugcuagaucuua

SEQ ID NO: 1909937 - RNA, 19 nt, Artificial Sequence
  Description of Artificial Sequence: Synthetic oligonucleotide
  Antisense strand to SEQ ID NO: 1909936
uaagaucuagcaugaggcu

SEQ ID NO: 1909938 - RNA, 19 nt, Artificial Sequence
  Description of Artificial Sequence: Synthetic oligonucleotide
  Sense strand starting at position 819 of SEQ ID NO: 1879476
cuaaaugugccaugauguc

SEQ ID NO: 1909939 - RNA, 19 nt, Artificial Sequence
  Description of Artificial Sequence: Synthetic oligonucleotide
  Antisense strand to SEQ ID NO: 1909938
gacaucauggcacauuuag

SEQ ID NO: 1909940 - RNA, 19 nt, Artificial Sequence
  Description of Artificial Sequence: Synthetic oligonucleotide
  Sense strand starting at position 835 of SEQ ID NO: 1879476
gucagagacagaugucauc

SEQ ID NO: 1909941 - RNA, 19 nt, Artificial Sequence
  Description of Artificial Sequence: Synthetic oligonucleotide
  Antisense strand to SEQ ID NO: 1909940
gaugacaucugucucugac

SEQ ID NO: 1909942 - RNA, 19 nt, Artificial Sequence
  Description of Artificial Sequence: Synthetic oligonucleotide
  Sense strand starting at position 844 of SEQ ID NO: 1879476
agaugucauccucacugua

SEQ ID NO: 1909943 - RNA, 19 nt, Artificial Sequence
  Description of Artificial Sequence: Synthetic oligonucleotide
  Antisense strand to SEQ ID NO: 1909942
uacagugaggaugacaucu

SEQ ID NO: 1909944 - RNA, 19 nt, Artificial Sequence
  Description of Artificial Sequence: Synthetic oligonucleotide
  Sense strand starting at position 891 of SEQ ID NO: 1879476
aagaaugggugcuuguagu

SEQ ID NO: 1909945 - RNA, 19 nt, Artificial Sequence
  Description of Artificial Sequence: Synthetic oligonucleotide
  Antisense strand to SEQ ID NO: 1909944
acuacaagcacccauucuu

SEQ ID NO: 1909946 - RNA, 19 nt, Artificial Sequence
  Description of Artificial Sequence: Synthetic oligonucleotide
  Sense strand starting at position 1049 of SEQ ID NO: 1879476
aagcauaggugcuuaauca

SEQ ID NO: 1909947 - RNA, 19 nt, Artificial Sequence
  Description of Artificial Sequence: Synthetic oligonucleotide
  Antisense strand to SEQ ID NO: 1909946
ugauuaagcaccuaugcuu

SEQ ID NO: 1909948 - RNA, 19 nt, Artificial Sequence
  Description of Artificial Sequence: Synthetic oligonucleotide
  Sense strand starting at position 1050 of SEQ ID NO: 1879476
agcauaggugcuuaaucaa

SEQ ID NO: 1909949 - RNA, 19 nt, Artificial Sequence
  Description of Artificial Sequence: Synthetic oligonucleotide
  Antisense strand to SEQ ID NO: 1909948
uugauuaagcaccuaugcu

SEQ ID NO: 1909950 - RNA, 19 nt, Artificial Sequence
  Description of Artificial Sequence: Synthetic oligonucleotide
  Sense strand starting at position 1663 of SEQ ID NO: 1879476
gaaagcaucuguuucgaag

SEQ ID NO: 1909951 - RNA, 19 nt, Artificial Sequence
  Description of Artificial Sequence: Synthetic oligonucleotide
  Antisense strand to SEQ ID NO: 1909950
cuucgaaacagaugcuuuc

SEQ ID NO: 1909952 - RNA, 19 nt, Artificial Sequence
  Description of Artificial Sequence: Synthetic oligonucleotide
  Sense strand starting at position 1667 of SEQ ID NO: 1879476
gcaucuguuucgaagggag

SEQ ID NO: 1909953 - RNA, 19 nt, Artificial Sequence
  Description of Artificial Sequence: Synthetic oligonucleotide
  Antisense strand to SEQ ID NO: 1909952
cucccuucgaaacagaugc

SEQ ID NO: 1909954 - RNA, 19 nt, Artificial Sequence
  Description of Artificial Sequence: Synthetic oligonucleotide
  Sense strand starting at position 1669 of SEQ ID NO: 1879476
aucuguuucgaagggagau

SEQ ID NO: 1909955 - RNA, 19 nt, Artificial Sequence
  Description of Artificial Sequence: Synthetic oligonucleotide
  Antisense strand to SEQ ID NO: 1909954
aucucccuucgaaacagau

SEQ ID NO: 1909956 - RNA, 19 nt, Artificial Sequence
  Description of Artificial Sequence: Synthetic oligonucleotide
  Sense strand starting at position 1759 of SEQ ID NO: 1879476
cgaagaacucgccagcaga

SEQ ID NO: 1909957 - RNA, 19 nt, Artificial Sequence
  Description of Artificial Sequence: Synthetic oligonucleotide
  Antisense strand to SEQ ID NO: 1909956
ucugcuggcgaguucuucg

SEQ ID NO: 1909958 - RNA, 19 nt, Artificial Sequence
  Description of Artificial Sequence: Synthetic oligonucleotide
  Sense strand starting at position 1806 of SEQ ID NO: 1879476
gaacucugauucucggaua

SEQ ID NO: 1909959 - RNA, 19 nt, Artificial Sequence
  Description of Artificial Sequence: Synthetic oligonucleotide
  Antisense strand to SEQ ID NO: 1909958
uauccgagaaucagaguuc

SEQ ID NO: 1909960 - RNA, 19 nt, Artificial Sequence
  Description of Artificial Sequence: Synthetic oligonucleotide
  Sense strand starting at position 1865 of SEQ ID NO: 1879476
gcagcaucgcggaggacuu

SEQ ID NO: 1909961 - RNA, 19 nt, Artificial Sequence
  Description of Artificial Sequence: Synthetic oligonucleotide
  Antisense strand to SEQ ID NO: 1909960
aaguccuccgcgaugcugc

SEQ ID NO: 1909962 - RNA, 19 nt, Artificial Sequence
  Description of Artificial Sequence: Synthetic oligonucleotide
  Sense strand starting at position 2328 of SEQ ID NO: 1879476
ucggauuucguguaaggca

SEQ ID NO: 1909963 - RNA, 19 nt, Artificial Sequence
  Description of Artificial Sequence: Synthetic oligonucleotide
  Antisense strand to SEQ ID NO: 1909962
ugccuuacacgaaauccga

SEQ ID NO: 1909964 - RNA, 19 nt, Artificial Sequence
  Description of Artificial Sequence: Synthetic oligonucleotide
  Sense strand starting at position 2411 of SEQ ID NO: 1879476
cagacuggugccgggauaa

SEQ ID NO: 1909965 - RNA, 19 nt, Artificial Sequence
  Description of Artificial Sequence: Synthetic oligonucleotide
  Antisense strand to SEQ ID NO: 1909964
uuaucccggcaccagucug

SEQ ID NO: 1909966 - RNA, 19 nt, Artificial Sequence
  Description of Artificial Sequence: Synthetic oligonucleotide
  Sense strand starting at position 2421 of SEQ ID NO: 1879476
ccgggauaaccugaccuuu

SEQ ID NO: 1909967 - RNA, 19 nt, Artificial Sequence
  Description of Artificial Sequence: Synthetic oligonucleotide
  Antisense strand to SEQ ID NO: 1909966
aaaggucagguuaucccgg

SEQ ID NO: 1909968 - RNA, 19 nt, Artificial Sequence
  Description of Artificial Sequence: Synthetic oligonucleotide
  Sense strand starting at position 2443 of SEQ ID NO: 1879476
agccuuaacuucuucucga

SEQ ID NO: 1909969 - RNA, 19 nt, Artificial Sequence
  Description of Artificial Sequence: Synthetic oligonucleotide
  Antisense strand to SEQ ID NO: 1909968
ucgagaagaaguuaaggcu

SEQ ID NO: 1909970 - RNA, 19 nt, Artificial Sequence
  Description of Artificial Sequence: Synthetic oligonucleotide
  Sense strand starting at position 2546 of SEQ ID NO: 1879476
ucgcuuucugaauaccgua

SEQ ID NO: 1909971 - RNA, 19 nt, Artificial Sequence
  Description of Artificial Sequence: Synthetic oligonucleotide
  Antisense strand to SEQ ID NO: 1909970
uacgguauucagaaagcga

SEQ ID NO: 1909972 - RNA, 19 nt, Artificial Sequence
  Description of Artificial Sequence: Synthetic oligonucleotide
  Sense strand starting at position 2559 of SEQ ID NO: 1879476
accguaacuccuuggaaga

SEQ ID NO: 1909973 - RNA, 19 nt, Artificial Sequence
  Description of Artificial Sequence: Synthetic oligonucleotide
  Antisense strand to SEQ ID NO: 1909972
ucuuccaaggaguuacggu

SEQ ID NO: 1909974 - RNA, 19 nt, Artificial Sequence
  Description of Artificial Sequence: Synthetic oligonucleotide
  Sense strand starting at position 2560 of SEQ ID NO: 1879476
ccguaacuccuuggaagag

SEQ ID NO: 1909975 - RNA, 19 nt, Artificial Sequence
  Description of Artificial Sequence: Synthetic oligonucleotide
  Antisense strand to SEQ ID NO: 1909974
cucuuccaaggaguuacgg

SEQ ID NO: 1909976 - RNA, 19 nt, Artificial Sequence
  Description of Artificial Sequence: Synthetic oligonucleotide
  Sense strand starting at position 2576 of SEQ ID NO: 1879476
gaguguauauauucuuugu

SEQ ID NO: 1909977 - RNA, 19 nt, Artificial Sequence
  Description of Artificial Sequence: Synthetic oligonucleotide
  Antisense strand to SEQ ID NO: 1909976
acaaagaauauauacacuc

SEQ ID NO: 1909978 - RNA, 19 nt, Artificial Sequence
  Description of Artificial Sequence: Synthetic oligonucleotide
  Sense strand starting at position 2579 of SEQ ID NO: 1879476
uguauauauucuuugucca

SEQ ID NO: 1909979 - RNA, 19 nt, Artificial Sequence
  Description of Artificial Sequence: Synthetic oligonucleotide
  Antisense strand to SEQ ID NO: 1909978
uggacaaagaauauauaca

SEQ ID NO: 1909980 - RNA, 19 nt, Artificial Sequence
  Description of Artificial Sequence: Synthetic oligonucleotide
  Sense strand starting at position 2580 of SEQ ID NO: 1879476
guauauauucuuuguccag

SEQ ID NO: 1909981 - RNA, 19 nt, Artificial Sequence
  Description of Artificial Sequence: Synthetic oligonucleotide
  Antisense strand to SEQ ID NO: 1909980
cuggacaaagaauauauac

SEQ ID NO: 1909982 - RNA, 19 nt, Artificial Sequence
  Description of Artificial Sequence: Synthetic oligonucleotide
  Sense strand starting at position 2872 of SEQ ID NO: 1879476
gcuuaaucucuugaugauu

SEQ ID NO: 1909983 - RNA, 19 nt, Artificial Sequence
  Description of Artificial Sequence: Synthetic oligonucleotide
  Antisense strand to SEQ ID NO: 1909982
aaucaucaagagauuaagc

SEQ ID NO: 1909984 - RNA, 19 nt, Artificial Sequence
  Description of Artificial Sequence: Synthetic oligonucleotide
  Sense strand starting at position 2895 of SEQ ID NO: 1879476
cggguuucauggcuuuaaa

SEQ ID NO: 1909985 - RNA, 19 nt, Artificial Sequence
  Description of Artificial Sequence: Synthetic oligonucleotide
  Antisense strand to SEQ ID NO: 1909984
uuuaaagccaugaaacccg

SEQ ID NO: 1909986 - RNA, 19 nt, Artificial Sequence
  Description of Artificial Sequence: Synthetic oligonucleotide
  Sense strand starting at position 2913 of SEQ ID NO: 1879476
agacuaugugcugaugacu

SEQ ID NO: 1909987 - RNA, 19 nt, Artificial Sequence
  Description of Artificial Sequence: Synthetic oligonucleotide
  Antisense strand to SEQ ID NO: 1909986
agucaucagcacauagucu

SEQ ID NO: 1909988 - RNA, 19 nt, Artificial Sequence
  Description of Artificial Sequence: Synthetic oligonucleotide
  Sense strand starting at position 2984 of SEQ ID NO: 1879476
cuucucaggcuguaaacuu

SEQ ID NO: 1909989 - RNA, 19 nt, Artificial Sequence
  Description of Artificial Sequence: Synthetic oligonucleotide
  Antisense strand to SEQ ID NO: 1909988
aaguuuacagccugagaag

SEQ ID NO: 1909990 - RNA, 19 nt, Artificial Sequence
  Description of Artificial Sequence: Synthetic oligonucleotide
  Sense strand starting at position 3021 of SEQ ID NO: 1879476
ucaaaucugucagcagauc

SEQ ID NO: 1909991 - RNA, 19 nt, Artificial Sequence
  Description of Artificial Sequence: Synthetic oligonucleotide
  Antisense strand to SEQ ID NO: 1909990
gaucugcugacagauuuga

SEQ ID NO: 1909992 - RNA, 19 nt, Artificial Sequence
  Description of Artificial Sequence: Synthetic oligonucleotide
  Sense strand starting at position 3161 of SEQ ID NO: 1879476
ucagucuguguuuacauaa

SEQ ID NO: 1909993 - RNA, 19 nt, Artificial Sequence
  Description of Artificial Sequence: Synthetic oligonucleotide
  Antisense strand to SEQ ID NO: 1909992
uuauguaaacacagacuga

SEQ ID NO: 1909994 - RNA, 19 nt, Artificial Sequence
  Description of Artificial Sequence: Synthetic oligonucleotide
  Sense strand starting at position 3302 of SEQ ID NO: 1879476
gccucuguucuagaccuuu

SEQ ID NO: 1909995 - RNA, 19 nt, Artificial Sequence
  Description of Artificial Sequence: Synthetic oligonucleotide
  Antisense strand to SEQ ID NO: 1909994
aaaggucuagaacagaggc

SEQ ID NO: 1909996 - RNA, 19 nt, Artificial Sequence
  Description of Artificial Sequence: Synthetic oligonucleotide
  Sense strand starting at position 3417 of SEQ ID NO: 1879476
ccuggaacuuguccucagu

SEQ ID NO: 1909997 - RNA, 19 nt, Artificial Sequence
  Description of Artificial Sequence: Synthetic oligonucleotide
  Antisense strand to SEQ ID NO: 1909996
acugaggacaaguuccagg

SEQ ID NO: 1909998 - RNA, 19 nt, Artificial Sequence
  Description of Artificial Sequence: Synthetic oligonucleotide
  Sense strand starting at position 3419 of SEQ ID NO: 1879476
uggaacuuguccucaguua

SEQ ID NO: 1909999 - RNA, 19 nt, Artificial Sequence
  Description of Artificial Sequence: Synthetic oligonucleotide
  Antisense strand to SEQ ID NO: 1909998
uaacugaggacaaguucca

SEQ ID NO: 1910000 - RNA, 19 nt, Artificial Sequence
  Description of Artificial Sequence: Synthetic oligonucleotide
  Sense strand starting at position 3420 of SEQ ID NO: 1879476
ggaacuuguccucaguuau

SEQ ID NO: 1910001 - RNA, 19 nt, Artificial Sequence
  Description of Artificial Sequence: Synthetic oligonucleotide
  Antisense strand to SEQ ID NO: 1910000
auaacugaggacaaguucc

SEQ ID NO: 1910002 - RNA, 19 nt, Artificial Sequence
  Description of Artificial Sequence: Synthetic oligonucleotide
  Sense strand starting at position 3463 of SEQ ID NO: 1879476
cuccaagacuuggcucaaa

SEQ ID NO: 1910003 - RNA, 19 nt, Artificial Sequence
  Description of Artificial Sequence: Synthetic oligonucleotide
  Antisense strand to SEQ ID NO: 1910002
uuugagccaagucuuggag

SEQ ID NO: 1910004 - RNA, 19 nt, Artificial Sequence
  Description of Artificial Sequence: Synthetic oligonucleotide
  Sense strand starting at position 3608 of SEQ ID NO: 1879476
ccguuuaauuuaguucuuu

SEQ ID NO: 1910005 - RNA, 19 nt, Artificial Sequence
  Description of Artificial Sequence: Synthetic oligonucleotide
  Antisense strand to SEQ ID NO: 1910004
aaagaacuaaauuaaacgg

SEQ ID NO: 1910006 - RNA, 19 nt, Artificial Sequence
  Description of Artificial Sequence: Synthetic oligonucleotide
  Sense strand starting at position 3701 of SEQ ID NO: 1879476
gagugcguggcacaugaua

SEQ ID NO: 1910007 - RNA, 19 nt, Artificial Sequence
  Description of Artificial Sequence: Synthetic oligonucleotide
  Antisense strand to SEQ ID NO: 1910006
uaucaugugccacgcacuc

SEQ ID NO: 1910008 - RNA, 19 nt, Artificial Sequence
  Description of Artificial Sequence: Synthetic oligonucleotide
  Sense strand starting at position 3713 of SEQ ID NO: 1879476
caugauaggugcucaguac

SEQ ID NO: 1910009 - RNA, 19 nt, Artificial Sequence
  Description of Artificial Sequence: Synthetic oligonucleotide
  Antisense strand to SEQ ID NO: 1910008
guacugagcaccuaucaug

SEQ ID NO: 1910010 - RNA, 19 nt, Artificial Sequence
  Description of Artificial Sequence: Synthetic oligonucleotide
  Sense strand starting at position 3757 of SEQ ID NO: 1879476
ugcagaauccaaggguuaa

SEQ ID NO: 1910011 - RNA, 19 nt, Artificial Sequence
  Description of Artificial Sequence: Synthetic oligonucleotide
  Antisense strand to SEQ ID NO: 1910010
uuaacccuuggauucugca

SEQ ID NO: 1910012 - RNA, 19 nt, Artificial Sequence
  Description of Artificial Sequence: Synthetic oligonucleotide
  Sense strand starting at position 3758 of SEQ ID NO: 1879476
gcagaauccaaggguuaag

SEQ ID NO: 1910013 - RNA, 19 nt, Artificial Sequence
  Description of Artificial Sequence: Synthetic oligonucleotide
  Antisense strand to SEQ ID NO: 1910012
cuuaacccuuggauucugc

SEQ ID NO: 1910014 - RNA, 19 nt, Artificial Sequence
  Description of Artificial Sequence: Synthetic oligonucleotide
  Sense strand starting at position 64 of SEQ ID NO: 1879478
aguagagauagugaucagu

SEQ ID NO: 1910015 - RNA, 19 nt, Artificial Sequence
  Description of Artificial Sequence: Synthetic oligonucleotide
  Antisense strand to SEQ ID NO: 1910014
acugaucacuaucucuacu

SEQ ID NO: 1910016 - RNA, 19 nt, Artificial Sequence
  Description of Artificial Sequence: Synthetic oligonucleotide
  Sense strand starting at position 168 of SEQ ID NO: 1879478
ucaucucugugucuuauuu

SEQ ID NO: 1910017 - RNA, 19 nt, Artificial Sequence
  Description of Artificial Sequence: Synthetic oligonucleotide
  Antisense strand to SEQ ID NO: 1910016
aaauaagacacagagauga

SEQ ID NO: 1910018 - RNA, 19 nt, Artificial Sequence
  Description of Artificial Sequence: Synthetic oligonucleotide
  Sense strand starting at position 428 of SEQ ID NO: 1879478
ucaauaaucuguuucugua

SEQ ID NO: 1910019 - RNA, 19 nt, Artificial Sequence
  Description of Artificial Sequence: Synthetic oligonucleotide
  Antisense strand to SEQ ID NO: 1910018
uacagaaacagauuauuga

SEQ ID NO: 1910020 - RNA, 19 nt, Artificial Sequence
  Description of Artificial Sequence: Synthetic oligonucleotide
  Sense strand starting at position 452 of SEQ ID NO: 1879478
ucuccauauuuauagagua

SEQ ID NO: 1910021 - RNA, 19 nt, Artificial Sequence
  Description of Artificial Sequence: Synthetic oligonucleotide
  Antisense strand to SEQ ID NO: 1910020
uacucuauaaauauggaga

SEQ ID NO: 1910022 - RNA, 19 nt, Artificial Sequence
  Description of Artificial Sequence: Synthetic oligonucleotide
  Sense strand starting at position 637 of SEQ ID NO: 1879478
uugugaaguggcuagaaau

SEQ ID NO: 1910023 - RNA, 19 nt, Artificial Sequence
  Description of Artificial Sequence: Synthetic oligonucleotide
  Antisense strand to SEQ ID NO: 1910022
auuucuagccacuucacaa

SEQ ID NO: 1910024 - RNA, 19 nt, Artificial Sequence
  Description of Artificial Sequence: Synthetic oligonucleotide
  Sense strand starting at position 661 of SEQ ID NO: 1879478
ccaguaaucuuacugcaag

SEQ ID NO: 1910025 - RNA, 19 nt, Artificial Sequence
  Description of Artificial Sequence: Synthetic oligonucleotide
  Antisense strand to SEQ ID NO: 1910024
cuugcaguaagauuacugg

SEQ ID NO: 1910026 - RNA, 19 nt, Artificial Sequence
  Description of Artificial Sequence: Synthetic oligonucleotide
  Sense strand starting at position 678 of SEQ ID NO: 1879478
aguccugggucacugaaga

SEQ ID NO: 1910027 - RNA, 19 nt, Artificial Sequence
  Description of Artificial Sequence: Synthetic oligonucleotide
  Antisense strand to SEQ ID NO: 1910026
ucuucagugacccaggacu

SEQ ID NO: 1910028 - RNA, 19 nt, Artificial Sequence
  Description of Artificial Sequence: Synthetic oligonucleotide
  Sense strand starting at position 689 of SEQ ID NO: 1879478
acugaagaacucgguaaau

SEQ ID NO: 1910029 - RNA, 19 nt, Artificial Sequence
  Description of Artificial Sequence: Synthetic oligonucleotide
  Antisense strand to SEQ ID NO: 1910028
auuuaccgaguucuucagu

SEQ ID NO: 1910030 - RNA, 19 nt, Artificial Sequence
  Description of Artificial Sequence: Synthetic oligonucleotide
  Sense strand starting at position 700 of SEQ ID NO: 1879478
cgguaaauaugauuagcau

SEQ ID NO: 1910031 - RNA, 19 nt, Artificial Sequence
  Description of Artificial Sequence: Synthetic oligonucleotide
  Antisense strand to SEQ ID NO: 1910030
augcuaaucauauuuaccg

SEQ ID NO: 1910032 - RNA, 19 nt, Artificial Sequence
  Description of Artificial Sequence: Synthetic oligonucleotide
  Sense strand starting at position 726 of SEQ ID NO: 1879478
ccaacacaucacugugaug

SEQ ID NO: 1910033 - RNA, 19 nt, Artificial Sequence
  Description of Artificial Sequence: Synthetic oligonucleotide
  Antisense strand to SEQ ID NO: 1910032
caucacagugauguguugg

SEQ ID NO: 1910034 - RNA, 19 nt, Artificial Sequence
  Description of Artificial Sequence: Synthetic oligonucleotide
  Sense strand starting at position 749 of SEQ ID NO: 1879478
cgcaaaucacaguauguga

SEQ ID NO: 1910035 - RNA, 19 nt, Artificial Sequence
  Description of Artificial Sequence: Synthetic oligonucleotide
  Antisense strand to SEQ ID NO: 1910034
ucacauacugugauuugcg

SEQ ID NO: 1910036 - RNA, 19 nt, Artificial Sequence
  Description of Artificial Sequence: Synthetic oligonucleotide
  Sense strand starting at position 756 of SEQ ID NO: 1879478
cacaguaugugagucacua

SEQ ID NO: 1910037 - RNA, 19 nt, Artificial Sequence
  Description of Artificial Sequence: Synthetic oligonucleotide
  Antisense strand to SEQ ID NO: 1910036
uagugacucacauacugug

SEQ ID NO: 1910038 - RNA, 19 nt, Artificial Sequence
  Description of Artificial Sequence: Synthetic oligonucleotide
  Sense strand starting at position 764 of SEQ ID NO: 1879478
gugagucacuacucucaac

SEQ ID NO: 1910039 - RNA, 19 nt, Artificial Sequence
  Description of Artificial Sequence: Synthetic oligonucleotide
  Antisense strand to SEQ ID NO: 1910038
guugagaguagugacucac

SEQ ID NO: 1910040 - RNA, 19 nt, Artificial Sequence
  Description of Artificial Sequence: Synthetic oligonucleotide
  Sense strand starting at position 1057 of SEQ ID NO: 1879478
cugacuaguuuaccuacau

SEQ ID NO: 1910041 - RNA, 19 nt, Artificial Sequence
  Description of Artificial Sequence: Synthetic oligonucleotide
  Antisense strand to SEQ ID NO: 1910040
auguagguaaacuagucag

SEQ ID NO: 1910042 - RNA, 19 nt, Artificial Sequence
  Description of Artificial Sequence: Synthetic oligonucleotide
  Sense strand starting at position 1058 of SEQ ID NO: 1879478
ugacuaguuuaccuacauu

SEQ ID NO: 1910043 - RNA, 19 nt, Artificial Sequence
  Description of Artificial Sequence: Synthetic oligonucleotide
  Antisense strand to SEQ ID NO: 1910042
aauguagguaaacuaguca

SEQ ID NO: 1910044 - RNA, 19 nt, Artificial Sequence
  Description of Artificial Sequence: Synthetic oligonucleotide
  Sense strand starting at position 1083 of SEQ ID NO: 1879478
guggcuuucccagaccaga

SEQ ID NO: 1910045 - RNA, 19 nt, Artificial Sequence
  Description of Artificial Sequence: Synthetic oligonucleotide
  Antisense strand to SEQ ID NO: 1910044
ucuggucugggaaagccac

SEQ ID NO: 1910046 - RNA, 19 nt, Artificial Sequence
  Description of Artificial Sequence: Synthetic oligonucleotide
  Sense strand starting at position 1155 of SEQ ID NO: 1879478
uaguucucugaauacgacu

SEQ ID NO: 1910047 - RNA, 19 nt, Artificial Sequence
  Description of Artificial Sequence: Synthetic oligonucleotide
  Antisense strand to SEQ ID NO: 1910046
agucguauucagagaacua

SEQ ID NO: 1910048 - RNA, 19 nt, Artificial Sequence
  Description of Artificial Sequence: Synthetic oligonucleotide
  Sense strand starting at position 1172 of SEQ ID NO: 1879478
cugauugcugucuaacaua

SEQ ID NO: 1910049 - RNA, 19 nt, Artificial Sequence
  Description of Artificial Sequence: Synthetic oligonucleotide
  Antisense strand to SEQ ID NO: 1910048
uauguuagacagcaaucag

SEQ ID NO: 1910050 - RNA, 19 nt, Artificial Sequence
  Description of Artificial Sequence: Synthetic oligonucleotide
  Sense strand starting at position 1347 of SEQ ID NO: 1879478
guaggucucaaagaguaug

SEQ ID NO: 1910051 - RNA, 19 nt, Artificial Sequence
  Description of Artificial Sequence: Synthetic oligonucleotide
  Antisense strand to SEQ ID NO: 1910050
cauacucuuugagaccuac

SEQ ID NO: 1910052 - RNA, 19 nt, Artificial Sequence
  Description of Artificial Sequence: Synthetic oligonucleotide
  Sense strand starting at position 1350 of SEQ ID NO: 1879478
ggucucaaagaguauguuu

SEQ ID NO: 1910053 - RNA, 19 nt, Artificial Sequence
  Description of Artificial Sequence: Synthetic oligonucleotide
  Antisense strand to SEQ ID NO: 1910052
aaacauacucuuugagacc

SEQ ID NO: 1910054 - RNA, 19 nt, Artificial Sequence
  Description of Artificial Sequence: Synthetic oligonucleotide
  Sense strand starting at position 1389 of SEQ ID NO: 1879478
caagauaauuguguugaau

SEQ ID NO: 1910055 - RNA, 19 nt, Artificial Sequence
  Description of Artificial Sequence: Synthetic oligonucleotide
  Antisense strand to SEQ ID NO: 1910054
auucaacacaauuaucuug

SEQ ID NO: 1910056 - RNA, 19 nt, Artificial Sequence
  Description of Artificial Sequence: Synthetic oligonucleotide
  Sense strand starting at position 1467 of SEQ ID NO: 1879478
guuacauuacccuagcacu

SEQ ID NO: 1910057 - RNA, 19 nt, Artificial Sequence
  Description of Artificial Sequence: Synthetic oligonucleotide
  Antisense strand to SEQ ID NO: 1910056
agugcuaggguaauguaac

SEQ ID NO: 1910058 - RNA, 19 nt, Artificial Sequence
  Description of Artificial Sequence: Synthetic oligonucleotide
  Sense strand starting at position 1484 of SEQ ID NO: 1879478
cugacauugguacgggaau

SEQ ID NO: 1910059 - RNA, 19 nt, Artificial Sequence
  Description of Artificial Sequence: Synthetic oligonucleotide
  Antisense strand to SEQ ID NO: 1910058
auucccguaccaaugucag

SEQ ID NO: 1910060 - RNA, 19 nt, Artificial Sequence
  Description of Artificial Sequence: Synthetic oligonucleotide
  Sense strand starting at position 2674 of SEQ ID NO: 1879478
gaggguuuguuguccauuu

SEQ ID NO: 1910061 - RNA, 19 nt, Artificial Sequence
  Description of Artificial Sequence: Synthetic oligonucleotide
  Antisense strand to SEQ ID NO: 1910060
aaauggacaacaaacccuc

SEQ ID NO: 1910062 - RNA, 19 nt, Artificial Sequence
  Description of Artificial Sequence: Synthetic oligonucleotide
  Sense strand starting at position 2675 of SEQ ID NO: 1879478
aggguuuguuguccauuua

SEQ ID NO: 1910063 - RNA, 19 nt, Artificial Sequence
  Description of Artificial Sequence: Synthetic oligonucleotide
  Antisense strand to SEQ ID NO: 1910062
uaaauggacaacaaacccu

SEQ ID NO: 1910064 - RNA, 19 nt, Artificial Sequence
  Description of Artificial Sequence: Synthetic oligonucleotide
  Sense strand starting at position 2687 of SEQ ID NO: 1879478
ccauuuaacucgucuuagu

SEQ ID NO: 1910065 - RNA, 19 nt, Artificial Sequence
  Description of Artificial Sequence: Synthetic oligonucleotide
  Antisense strand to SEQ ID NO: 1910064
acuaagacgaguuaaaugg

SEQ ID NO: 1910066 - RNA, 19 nt, Artificial Sequence
  Description of Artificial Sequence: Synthetic oligonucleotide
  Sense strand starting at position 3007 of SEQ ID NO: 1879478
gccuccaauggccaagaua

SEQ ID NO: 1910067 - RNA, 19 nt, Artificial Sequence
  Description of Artificial Sequence: Synthetic oligonucleotide
  Antisense strand to SEQ ID NO: 1910066
uaucuuggccauuggaggc

SEQ ID NO: 1910068 - RNA, 19 nt, Artificial Sequence
  Description of Artificial Sequence: Synthetic oligonucleotide
  Sense strand starting at position 3015 of SEQ ID NO: 1879478
uggccaagauaugauuuga

SEQ ID NO: 1910069 - RNA, 19 nt, Artificial Sequence
  Description of Artificial Sequence: Synthetic oligonucleotide
  Antisense strand to SEQ ID NO: 1910068
ucaaaucauaucuuggcca

SEQ ID NO: 1910070 - RNA, 19 nt, Artificial Sequence
  Description of Artificial Sequence: Synthetic oligonucleotide
  Sense strand starting at position 3277 of SEQ ID NO: 1879478
ugcugaugauagccaaauu

SEQ ID NO: 1910071 - RNA, 19 nt, Artificial Sequence
  Description of Artificial Sequence: Synthetic oligonucleotide
  Antisense strand to SEQ ID NO: 1910070
aauuuggcuaucaucagca

SEQ ID NO: 1910072 - RNA, 19 nt, Artificial Sequence
  Description of Artificial Sequence: Synthetic oligonucleotide
  Sense strand starting at position 3289 of SEQ ID NO: 1879478
ccaaauugaugaccuguga

SEQ ID NO: 1910073 - RNA, 19 nt, Artificial Sequence
  Description of Artificial Sequence: Synthetic oligonucleotide
  Antisense strand to SEQ ID NO: 1910072
ucacaggucaucaauuugg

SEQ ID NO: 1910074 - RNA, 19 nt, Artificial Sequence
  Description of Artificial Sequence: Synthetic oligonucleotide
  Sense strand starting at position 3296 of SEQ ID NO: 1879478
gaugaccugugaucugacu

SEQ ID NO: 1910075 - RNA, 19 nt, Artificial Sequence
  Description of Artificial Sequence: Synthetic oligonucleotide
  Antisense strand to SEQ ID NO: 1910074
agucagaucacaggucauc

SEQ ID NO: 1910076 - RNA, 19 nt, Artificial Sequence
  Description of Artificial Sequence: Synthetic oligonucleotide
  Sense strand starting at position 3439 of SEQ ID NO: 1879478
guuauauuaugguucugga

SEQ ID NO: 1910077 - RNA, 19 nt, Artificial Sequence
  Description of Artificial Sequence: Synthetic oligonucleotide
  Antisense strand to SEQ ID NO: 1910076
uccagaaccauaauauaac

SEQ ID NO: 1910078 - RNA, 19 nt, Artificial Sequence
  Description of Artificial Sequence: Synthetic oligonucleotide
  Sense strand starting at position 3447 of SEQ ID NO: 1879478
augguucuggaguacuagu

SEQ ID NO: 1910079 - RNA, 19 nt, Artificial Sequence
  Description of Artificial Sequence: Synthetic oligonucleotide
  Antisense strand to SEQ ID NO: 1910078
acuaguacuccagaaccau

SEQ ID NO: 1910080 - RNA, 19 nt, Artificial Sequence
  Description of Artificial Sequence: Synthetic oligonucleotide
  Sense strand starting at position 3558 of SEQ ID NO: 1879478
ugaaauuaaucagugauug

SEQ ID NO: 1910081 - RNA, 19 nt, Artificial Sequence
  Description of Artificial Sequence: Synthetic oligonucleotide
  Antisense strand to SEQ ID NO: 1910080
caaucacugauuaauuuca

SEQ ID NO: 1910082 - RNA, 19 nt, Artificial Sequence
  Description of Artificial Sequence: Synthetic oligonucleotide
  Sense strand starting at position 3562 of SEQ ID NO: 1879478
auuaaucagugauuggaca

SEQ ID NO: 1910083 - RNA, 19 nt, Artificial Sequence
  Description of Artificial Sequence: Synthetic oligonucleotide
  Antisense strand to SEQ ID NO: 1910082
uguccaaucacugauuaau

SEQ ID NO: 1910084 - RNA, 19 nt, Artificial Sequence
  Description of Artificial Sequence: Synthetic oligonucleotide
  Sense strand starting at position 3678 of SEQ ID NO: 1879478
aaaguuaagcuuugugaaa

SEQ ID NO: 1910085 - RNA, 19 nt, Artificial Sequence
  Description of Artificial Sequence: Synthetic oligonucleotide
  Antisense strand to SEQ ID NO: 1910084
uuucacaaagcuuaacuuu

SEQ ID NO: 1910086 - RNA, 19 nt, Artificial Sequence
  Description of Artificial Sequence: Synthetic oligonucleotide
  Sense strand starting at position 3679 of SEQ ID NO: 1879478
aaguuaagcuuugugaaag

SEQ ID NO: 1910087 - RNA, 19 nt, Artificial Sequence
  Description of Artificial Sequence: Synthetic oligonucleotide
  Antisense strand to SEQ ID NO: 1910086
cuuucacaaagcuuaacuu

SEQ ID NO: 1910088 - RNA, 19 nt, Artificial Sequence
  Description of Artificial Sequence: Synthetic oligonucleotide
  Sense strand starting at position 3817 of SEQ ID NO: 1879478
uccagcaauccuugggauu

SEQ ID NO: 1910089 - RNA, 19 nt, Artificial Sequence
  Description of Artificial Sequence: Synthetic oligonucleotide
  Antisense strand to SEQ ID NO: 1910088
aaucccaaggauugcugga

SEQ ID NO: 1910090 - RNA, 19 nt, Artificial Sequence
  Description of Artificial Sequence: Synthetic oligonucleotide
  Sense strand starting at position 3910 of SEQ ID NO: 1879478
gaacucuuagcuuguauag

SEQ ID NO: 1910091 - RNA, 19 nt, Artificial Sequence
  Description of Artificial Sequence: Synthetic oligonucleotide
  Antisense strand to SEQ ID NO: 1910090
cuauacaagcuaagaguuc

SEQ ID NO: 1910092 - RNA, 19 nt, Artificial Sequence
  Description of Artificial Sequence: Synthetic oligonucleotide
  Sense strand starting at position 3948 of SEQ ID NO: 1879478
cguauuuacugugccaaca

SEQ ID NO: 1910093 - RNA, 19 nt, Artificial Sequence
  Description of Artificial Sequence: Synthetic oligonucleotide
  Antisense strand to SEQ ID NO: 1910092
uguuggcacaguaaauacg

SEQ ID NO: 1910094 - RNA, 19 nt, Artificial Sequence
  Description of Artificial Sequence: Synthetic oligonucleotide
  Sense strand starting at position 33 of SEQ ID NO: 1879479
cccuaagauugggaaccaa

SEQ ID NO: 1910095 - RNA, 19 nt, Artificial Sequence
  Description of Artificial Sequence: Synthetic oligonucleotide
  Antisense strand to SEQ ID NO: 1910094
uugguucccaaucuuaggg

SEQ ID NO: 1910096 - RNA, 19 nt, Artificial Sequence
  Description of Artificial Sequence: Synthetic oligonucleotide
  Sense strand starting at position 68 of SEQ ID NO: 1879479
ucaacauuguauugaagau

SEQ ID NO: 1910097 - RNA, 19 nt, Artificial Sequence
  Description of Artificial Sequence: Synthetic oligonucleotide
  Antisense strand to SEQ ID NO: 1910096
aucuucaauacaauguuga

SEQ ID NO: 1910098 - RNA, 19 nt, Artificial Sequence
  Description of Artificial Sequence: Synthetic oligonucleotide
  Sense strand starting at position 342 of SEQ ID NO: 1879479
uucaguguugauggagcaa

SEQ ID NO: 1910099 - RNA, 19 nt, Artificial Sequence
  Description of Artificial Sequence: Synthetic oligonucleotide
  Antisense strand to SEQ ID NO: 1910098
uugcuccaucaacacugaa

SEQ ID NO: 1910100 - RNA, 19 nt, Artificial Sequence
  Description of Artificial Sequence: Synthetic oligonucleotide
  Sense strand starting at position 644 of SEQ ID NO: 1879479
ggaggaacauuauagaaga

SEQ ID NO: 1910101 - RNA, 19 nt, Artificial Sequence
  Description of Artificial Sequence: Synthetic oligonucleotide
  Antisense strand to SEQ ID NO: 1910100
ucuucuauaauguuccucc

SEQ ID NO: 1910102 - RNA, 19 nt, Artificial Sequence
  Description of Artificial Sequence: Synthetic oligonucleotide
  Sense strand starting at position 745 of SEQ ID NO: 1879479
agaagcugacaaugugaaa

SEQ ID NO: 1910103 - RNA, 19 nt, Artificial Sequence
  Description of Artificial Sequence: Synthetic oligonucleotide
  Antisense strand to SEQ ID NO: 1910102
uuucacauugucagcuucu

SEQ ID NO: 1910104 - RNA, 19 nt, Artificial Sequence
  Description of Artificial Sequence: Synthetic oligonucleotide
  Sense strand starting at position 814 of SEQ ID NO: 1879479
gggaguuuguuucucuagu

SEQ ID NO: 1910105 - RNA, 19 nt, Artificial Sequence
  Description of Artificial Sequence: Synthetic oligonucleotide
  Antisense strand to SEQ ID NO: 1910104
acuagagaaacaaacuccc

SEQ ID NO: 1910106 - RNA, 19 nt, Artificial Sequence
  Description of Artificial Sequence: Synthetic oligonucleotide
  Sense strand starting at position 816 of SEQ ID NO: 1879479
gaguuuguuucucuaguuu

SEQ ID NO: 1910107 - RNA, 19 nt, Artificial Sequence
  Description of Artificial Sequence: Synthetic oligonucleotide
  Antisense strand to SEQ ID NO: 1910106
aaacuagagaaacaaacuc

SEQ ID NO: 1910108 - RNA, 19 nt, Artificial Sequence
  Description of Artificial Sequence: Synthetic oligonucleotide
  Sense strand starting at position 859 of SEQ ID NO: 1879479
gucugauaugacugcugaa

SEQ ID NO: 1910109 - RNA, 19 nt, Artificial Sequence
  Description of Artificial Sequence: Synthetic oligonucleotide
  Antisense strand to SEQ ID NO: 1910108
uucagcagucauaucagac

SEQ ID NO: 1910110 - RNA, 19 nt, Artificial Sequence
  Description of Artificial Sequence: Synthetic oligonucleotide
  Sense strand starting at position 880 of SEQ ID NO: 1879479
agcugaguccauugugcaa

SEQ ID NO: 1910111 - RNA, 19 nt, Artificial Sequence
  Description of Artificial Sequence: Synthetic oligonucleotide
  Antisense strand to SEQ ID NO: 1910110
uugcacaauggacucagcu

SEQ ID NO: 1910112 - RNA, 19 nt, Artificial Sequence
  Description of Artificial Sequence: Synthetic oligonucleotide
  Sense strand starting at position 1177 of SEQ ID NO: 1879479
acucuaguccugcacuuau

SEQ ID NO: 1910113 - RNA, 19 nt, Artificial Sequence
  Description of Artificial Sequence: Synthetic oligonucleotide
  Antisense strand to SEQ ID NO: 1910112
auaagugcaggacuagagu

SEQ ID NO: 1910114 - RNA, 19 nt, Artificial Sequence
  Description of Artificial Sequence: Synthetic oligonucleotide
  Sense strand starting at position 1290 of SEQ ID NO: 1879479
uguuguauuucccuccaua

SEQ ID NO: 1910115 - RNA, 19 nt, Artificial Sequence
  Description of Artificial Sequence: Synthetic oligonucleotide
  Antisense strand to SEQ ID NO: 1910114
uauggagggaaauacaaca

SEQ ID NO: 1910116 - RNA, 19 nt, Artificial Sequence
  Description of Artificial Sequence: Synthetic oligonucleotide
  Sense strand starting at position 1344 of SEQ ID NO: 1879479
gcuauuaugacucgugcua

SEQ ID NO: 1910117 - RNA, 19 nt, Artificial Sequence
  Description of Artificial Sequence: Synthetic oligonucleotide
  Antisense strand to SEQ ID NO: 1910116
uagcacgagucauaauagc

SEQ ID NO: 1910118 - RNA, 19 nt, Artificial Sequence
  Description of Artificial Sequence: Synthetic oligonucleotide
  Sense strand starting at position 1357 of SEQ ID NO: 1879479
gugcuaaaguacccuuaga

SEQ ID NO: 1910119 - RNA, 19 nt, Artificial Sequence
  Description of Artificial Sequence: Synthetic oligonucleotide
  Antisense strand to SEQ ID NO: 1910118
ucuaaggguacuuuagcac

SEQ ID NO: 1910120 - RNA, 19 nt, Artificial Sequence
  Description of Artificial Sequence: Synthetic oligonucleotide
  Sense strand starting at position 1362 of SEQ ID NO: 1879479
aaaguacccuuagagaaug

SEQ ID NO: 1910121 - RNA, 19 nt, Artificial Sequence
  Description of Artificial Sequence: Synthetic oligonucleotide
  Antisense strand to SEQ ID NO: 1910120
cauucucuaaggguacuuu

SEQ ID NO: 1910122 - RNA, 19 nt, Artificial Sequence
  Description of Artificial Sequence: Synthetic oligonucleotide
  Sense strand starting at position 1386 of SEQ ID NO: 1879479
aguuaacuuccggacuuaa

SEQ ID NO: 1910123 - RNA, 19 nt, Artificial Sequence
  Description of Artificial Sequence: Synthetic oligonucleotide
  Antisense strand to SEQ ID NO: 1910122
uuaaguccggaaguuaacu

SEQ ID NO: 1910124 - RNA, 19 nt, Artificial Sequence
  Description of Artificial Sequence: Synthetic oligonucleotide
  Sense strand starting at position 1538 of SEQ ID NO: 1879479
uccuccuuauuguugaaga

SEQ ID NO: 1910125 - RNA, 19 nt, Artificial Sequence
  Description of Artificial Sequence: Synthetic oligonucleotide
  Antisense strand to SEQ ID NO: 1910124
ucuucaacaauaaggagga

SEQ ID NO: 1910126 - RNA, 19 nt, Artificial Sequence
  Description of Artificial Sequence: Synthetic oligonucleotide
  Sense strand starting at position 1540 of SEQ ID NO: 1879479
cuccuuauuguugaagaca

SEQ ID NO: 1910127 - RNA, 19 nt, Artificial Sequence
  Description of Artificial Sequence: Synthetic oligonucleotide
  Antisense strand to SEQ ID NO: 1910126
ugucuucaacaauaaggag

SEQ ID NO: 1910128 - RNA, 19 nt, Artificial Sequence
  Description of Artificial Sequence: Synthetic oligonucleotide
  Sense strand starting at position 1563 of SEQ ID NO: 1879479
uuucccauuuauggaagua

SEQ ID NO: 1910129 - RNA, 19 nt, Artificial Sequence
  Description of Artificial Sequence: Synthetic oligonucleotide
  Antisense strand to SEQ ID NO: 1910128
uacuuccauaaaugggaaa

SEQ ID NO: 1910130 - RNA, 19 nt, Artificial Sequence
  Description of Artificial Sequence: Synthetic oligonucleotide
  Sense strand starting at position 1676 of SEQ ID NO: 1879479
agaggauuccuaugccacu

SEQ ID NO: 1910131 - RNA, 19 nt, Artificial Sequence
  Description of Artificial Sequence: Synthetic oligonucleotide
  Antisense strand to SEQ ID NO: 1910130
aguggcauaggaauccucu

SEQ ID NO: 1910132 - RNA, 19 nt, Artificial Sequence
  Description of Artificial Sequence: Synthetic oligonucleotide
  Sense strand starting at position 1820 of SEQ ID NO: 1879479
agcucuaccucaguuacua

SEQ ID NO: 1910133 - RNA, 19 nt, Artificial Sequence
  Description of Artificial Sequence: Synthetic oligonucleotide
  Antisense strand to SEQ ID NO: 1910132
uaguaacugagguagagcu

SEQ ID NO: 1910134 - RNA, 19 nt, Artificial Sequence
  Description of Artificial Sequence: Synthetic oligonucleotide
  Sense strand starting at position 1828 of SEQ ID NO: 1879479
cucaguuacuacgguauuu

SEQ ID NO: 1910135 - RNA, 19 nt, Artificial Sequence
  Description of Artificial Sequence: Synthetic oligonucleotide
  Antisense strand to SEQ ID NO: 1910134
aaauaccguaguaacugag

SEQ ID NO: 1910136 - RNA, 19 nt, Artificial Sequence
  Description of Artificial Sequence: Synthetic oligonucleotide
  Sense strand starting at position 1837 of SEQ ID NO: 1879479
uacgguauuuccugaucuu

SEQ ID NO: 1910137 - RNA, 19 nt, Artificial Sequence
  Description of Artificial Sequence: Synthetic oligonucleotide
  Antisense strand to SEQ ID NO: 1910136
aagaucaggaaauaccgua

SEQ ID NO: 1910138 - RNA, 19 nt, Artificial Sequence
  Description of Artificial Sequence: Synthetic oligonucleotide
  Sense strand starting at position 1863 of SEQ ID NO: 1879479
aggauuacuuccuugaacu

SEQ ID NO: 1910139 - RNA, 19 nt, Artificial Sequence
  Description of Artificial Sequence: Synthetic oligonucleotide
  Antisense strand to SEQ ID NO: 1910138
aguucaaggaaguaauccu

SEQ ID NO: 1910140 - RNA, 19 nt, Artificial Sequence
  Description of Artificial Sequence: Synthetic oligonucleotide
  Sense strand starting at position 1864 of SEQ ID NO: 1879479
ggauuacuuccuugaacug

SEQ ID NO: 1910141 - RNA, 19 nt, Artificial Sequence
  Description of Artificial Sequence: Synthetic oligonucleotide
  Antisense strand to SEQ ID NO: 1910140
caguucaaggaaguaaucc

SEQ ID NO: 1910142 - RNA, 19 nt, Artificial Sequence
  Description of Artificial Sequence: Synthetic oligonucleotide
  Sense strand starting at position 2014 of SEQ ID NO: 1879479
ggccaagaaccuugaaaug

SEQ ID NO: 1910143 - RNA, 19 nt, Artificial Sequence
  Description of Artificial Sequence: Synthetic oligonucleotide
  Antisense strand to SEQ ID NO: 1910142
cauuucaagguucuuggcc

SEQ ID NO: 1910144 - RNA, 19 nt, Artificial Sequence
  Description of Artificial Sequence: Synthetic oligonucleotide
  Sense strand starting at position 2143 of SEQ ID NO: 1879479
ggaucauugccucaugcca

SEQ ID NO: 1910145 - RNA, 19 nt, Artificial Sequence
  Description of Artificial Sequence: Synthetic oligonucleotide
  Antisense strand to SEQ ID NO: 1910144
uggcaugaggcaaugaucc

SEQ ID NO: 1910146 - RNA, 19 nt, Artificial Sequence
  Description of Artificial Sequence: Synthetic oligonucleotide
  Sense strand starting at position 2151 of SEQ ID NO: 1879479
gccucaugccaaggaauga

SEQ ID NO: 1910147 - RNA, 19 nt, Artificial Sequence
  Description of Artificial Sequence: Synthetic oligonucleotide
  Antisense strand to SEQ ID NO: 1910146
ucauuccuuggcaugaggc

SEQ ID NO: 1910148 - RNA, 19 nt, Artificial Sequence
  Description of Artificial Sequence: Synthetic oligonucleotide
  Sense strand starting at position 2238 of SEQ ID NO: 1879479
acacaugugaagugagguu

SEQ ID NO: 1910149 - RNA, 19 nt, Artificial Sequence
  Description of Artificial Sequence: Synthetic oligonucleotide
  Antisense strand to SEQ ID NO: 1910148
aaccucacuucacaugugu

SEQ ID NO: 1910150 - RNA, 19 nt, Artificial Sequence
  Description of Artificial Sequence: Synthetic oligonucleotide
  Sense strand starting at position 2383 of SEQ ID NO: 1879479
ugauuuacauagggcucaa

SEQ ID NO: 1910151 - RNA, 19 nt, Artificial Sequence
  Description of Artificial Sequence: Synthetic oligonucleotide
  Antisense strand to SEQ ID NO: 1910150
uugagcccuauguaaauca

SEQ ID NO: 1910152 - RNA, 19 nt, Artificial Sequence
  Description of Artificial Sequence: Synthetic oligonucleotide
  Sense strand starting at position 2396 of SEQ ID NO: 1879479
gcucaaagauugguugaaa

SEQ ID NO: 1910153 - RNA, 19 nt, Artificial Sequence
  Description of Artificial Sequence: Synthetic oligonucleotide
  Antisense strand to SEQ ID NO: 1910152
uuucaaccaaucuuugagc

SEQ ID NO: 1910154 - RNA, 19 nt, Artificial Sequence
  Description of Artificial Sequence: Synthetic oligonucleotide
  Sense strand starting at position 2397 of SEQ ID NO: 1879479
cucaaagauugguugaaac

SEQ ID NO: 1910155 - RNA, 19 nt, Artificial Sequence
  Description of Artificial Sequence: Synthetic oligonucleotide
  Antisense strand to SEQ ID NO: 1910154
guuucaaccaaucuuugag

SEQ ID NO: 1910156 - RNA, 19 nt, Artificial Sequence
  Description of Artificial Sequence: Synthetic oligonucleotide
  Sense strand starting at position 2995 of SEQ ID NO: 1879479
ggcugcacuucguuaggaa

SEQ ID NO: 1910157 - RNA, 19 nt, Artificial Sequence
  Description of Artificial Sequence: Synthetic oligonucleotide
  Antisense strand to SEQ ID NO: 1910156
uuccuaacgaagugcagcc

SEQ ID NO: 1910158 - RNA, 19 nt, Artificial Sequence
  Description of Artificial Sequence: Synthetic oligonucleotide
  Sense strand starting at position 2996 of SEQ ID NO: 1879479
gcugcacuucguuaggaaa

SEQ ID NO: 1910159 - RNA, 19 nt, Artificial Sequence
  Description of Artificial Sequence: Synthetic oligonucleotide
  Antisense strand to SEQ ID NO: 1910158
uuuccuaacgaagugcagc

SEQ ID NO: 1910160 - RNA, 19 nt, Artificial Sequence
  Description of Artificial Sequence: Synthetic oligonucleotide
  Sense strand starting at position 3245 of SEQ ID NO: 1879479
ggagugcaucgugaagguu

SEQ ID NO: 1910161 - RNA, 19 nt, Artificial Sequence
  Description of Artificial Sequence: Synthetic oligonucleotide
  Antisense strand to SEQ ID NO: 1910160
aaccuucacgaugcacucc

SEQ ID NO: 1910162 - RNA, 19 nt, Artificial Sequence
  Description of Artificial Sequence: Synthetic oligonucleotide
  Sense strand starting at position 3351 of SEQ ID NO: 1879479
agcacuuuguaggaacaga

SEQ ID NO: 1910163 - RNA, 19 nt, Artificial Sequence
  Description of Artificial Sequence: Synthetic oligonucleotide
  Antisense strand to SEQ ID NO: 1910162
ucuguuccuacaaagugcu

SEQ ID NO: 1910164 - RNA, 19 nt, Artificial Sequence
  Description of Artificial Sequence: Synthetic oligonucleotide
  Sense strand starting at position 3407 of SEQ ID NO: 1879479
guaagcggagcugauauua

SEQ ID NO: 1910165 - RNA, 19 nt, Artificial Sequence
  Description of Artificial Sequence: Synthetic oligonucleotide
  Antisense strand to SEQ ID NO: 1910164
uaauaucagcuccgcuuac

SEQ ID NO: 1910166 - RNA, 19 nt, Artificial Sequence
  Description of Artificial Sequence: Synthetic oligonucleotide
  Sense strand starting at position 3917 of SEQ ID NO: 1879479
uagcuacaauguuucgaga

SEQ ID NO: 1910167 - RNA, 19 nt, Artificial Sequence
  Description of Artificial Sequence: Synthetic oligonucleotide
  Antisense strand to SEQ ID NO: 1910166
ucucgaaacauuguagcua

SEQ ID NO: 1910168 - RNA, 19 nt, Artificial Sequence
  Description of Artificial Sequence: Synthetic oligonucleotide
  Sense strand starting at position 3943 of SEQ ID NO: 1879479
aagaguugucuauaagcua

SEQ ID NO: 1910169 - RNA, 19 nt, Artificial Sequence
  Description of Artificial Sequence: Synthetic oligonucleotide
  Antisense strand to SEQ ID NO: 1910168
uagcuuauagacaacucuu

SEQ ID NO: 1910170 - RNA, 19 nt, Artificial Sequence
  Description of Artificial Sequence: Synthetic oligonucleotide
  Sense strand starting at position 3946 of SEQ ID NO: 1879479
aguugucuauaagcuagaa

SEQ ID NO: 1910171 - RNA, 19 nt, Artificial Sequence
  Description of Artificial Sequence: Synthetic oligonucleotide
  Antisense strand to SEQ ID NO: 1910170
uucuagcuuauagacaacu

SEQ ID NO: 1910172 - RNA, 19 nt, Artificial Sequence
  Description of Artificial Sequence: Synthetic oligonucleotide
  Sense strand starting at position 3950 of SEQ ID NO: 1879479
gucuauaagcuagaauggu

SEQ ID NO: 1910173 - RNA, 19 nt, Artificial Sequence
  Description of Artificial Sequence: Synthetic oligonucleotide
  Antisense strand to SEQ ID NO: 1910172
accauucuagcuuauagac

SEQ ID NO: 1910174 - RNA, 19 nt, Artificial Sequence
  Description of Artificial Sequence: Synthetic oligonucleotide
  Sense strand starting at position 35 of SEQ ID NO: 1879480
uucccaagccagggauuau

SEQ ID NO: 1910175 - RNA, 19 nt, Artificial Sequence
  Description of Artificial Sequence: Synthetic oligonucleotide
  Antisense strand to SEQ ID NO: 1910174
auaaucccuggcuugggaa

SEQ ID NO: 1910176 - RNA, 19 nt, Artificial Sequence
  Description of Artificial Sequence: Synthetic oligonucleotide
  Sense strand starting at position 93 of SEQ ID NO: 1879480
agaauaacuuaggaaacca

SEQ ID NO: 1910177 - RNA, 19 nt, Artificial Sequence
  Description of Artificial Sequence: Synthetic oligonucleotide
  Antisense strand to SEQ ID NO: 1910176
ugguuuccuaaguuauucu

SEQ ID NO: 1910178 - RNA, 19 nt, Artificial Sequence
  Description of Artificial Sequence: Synthetic oligonucleotide
  Sense strand starting at position 121 of SEQ ID NO: 1879480
uuaugugucgcggugauac

SEQ ID NO: 1910179 - RNA, 19 nt, Artificial Sequence
  Description of Artificial Sequence: Synthetic oligonucleotide
  Antisense strand to SEQ ID NO: 1910178
guaucaccgcgacacauaa

SEQ ID NO: 1910180 - RNA, 19 nt, Artificial Sequence
  Description of Artificial Sequence: Synthetic oligonucleotide
  Sense strand starting at position 635 of SEQ ID NO: 1879480
cuuacaguucuguaaucuu

SEQ ID NO: 1910181 - RNA, 19 nt, Artificial Sequence
  Description of Artificial Sequence: Synthetic oligonucleotide
  Antisense strand to SEQ ID NO: 1910180
aagauuacagaacuguaag

SEQ ID NO: 1910182 - RNA, 19 nt, Artificial Sequence
  Description of Artificial Sequence: Synthetic oligonucleotide
  Sense strand starting at position 864 of SEQ ID NO: 1879480
gagguaugguguguuagga

SEQ ID NO: 1910183 - RNA, 19 nt, Artificial Sequence
  Description of Artificial Sequence: Synthetic oligonucleotide
  Antisense strand to SEQ ID NO: 1910182
uccuaacacaccauaccuc

SEQ ID NO: 1910184 - RNA, 19 nt, Artificial Sequence
  Description of Artificial Sequence: Synthetic oligonucleotide
  Sense strand starting at position 1000 of SEQ ID NO: 1879480
cuucuaaguccuuaugaag

SEQ ID NO: 1910185 - RNA, 19 nt, Artificial Sequence
  Description of Artificial Sequence: Synthetic oligonucleotide
  Antisense strand to SEQ ID NO: 1910184
cuucauaaggacuuagaag

SEQ ID NO: 1910186 - RNA, 19 nt, Artificial Sequence
  Description of Artificial Sequence: Synthetic oligonucleotide
  Sense strand starting at position 1725 of SEQ ID NO: 1879480
cuuacagaccuauguuaga

SEQ ID NO: 1910187 - RNA, 19 nt, Artificial Sequence
  Description of Artificial Sequence: Synthetic oligonucleotide
  Antisense strand to SEQ ID NO: 1910186
ucuaacauaggucuguaag

SEQ ID NO: 1910188 - RNA, 19 nt, Artificial Sequence
  Description of Artificial Sequence: Synthetic oligonucleotide
  Sense strand starting at position 1770 of SEQ ID NO: 1879480
cgagauagagcacgaagau

SEQ ID NO: 1910189 - RNA, 19 nt, Artificial Sequence
  Description of Artificial Sequence: Synthetic oligonucleotide
  Antisense strand to SEQ ID NO: 1910188
aucuucgugcucuaucucg

SEQ ID NO: 1910190 - RNA, 19 nt, Artificial Sequence
  Description of Artificial Sequence: Synthetic oligonucleotide
  Sense strand starting at position 1782 of SEQ ID NO: 1879480
cgaagaugacaguguauau

SEQ ID NO: 1910191 - RNA, 19 nt, Artificial Sequence
  Description of Artificial Sequence: Synthetic oligonucleotide
  Antisense strand to SEQ ID NO: 1910190
auauacacugucaucuucg

SEQ ID NO: 1910192 - RNA, 19 nt, Artificial Sequence
  Description of Artificial Sequence: Synthetic oligonucleotide
  Sense strand starting at position 1838 of SEQ ID NO: 1879480
aggaguuacuaagaagaau

SEQ ID NO: 1910193 - RNA, 19 nt, Artificial Sequence
  Description of Artificial Sequence: Synthetic oligonucleotide
  Antisense strand to SEQ ID NO: 1910192
auucuucuuaguaacuccu

SEQ ID NO: 1910194 - RNA, 19 nt, Artificial Sequence
  Description of Artificial Sequence: Synthetic oligonucleotide
  Sense strand starting at position 2475 of SEQ ID NO: 1879480
ggccucuuccuugaggguu

SEQ ID NO: 1910195 - RNA, 19 nt, Artificial Sequence
  Description of Artificial Sequence: Synthetic oligonucleotide
  Antisense strand to SEQ ID NO: 1910194
aacccucaaggaagaggcc

SEQ ID NO: 1910196 - RNA, 19 nt, Artificial Sequence
  Description of Artificial Sequence: Synthetic oligonucleotide
  Sense strand starting at position 2604 of SEQ ID NO: 1879480
cuuugcgcgagccuuuaaa

SEQ ID NO: 1910197 - RNA, 19 nt, Artificial Sequence
  Description of Artificial Sequence: Synthetic oligonucleotide
  Antisense strand to SEQ ID NO: 1910196
uuuaaaggcucgcgcaaag

SEQ ID NO: 1910198 - RNA, 19 nt, Artificial Sequence
  Description of Artificial Sequence: Synthetic oligonucleotide
  Sense strand starting at position 2606 of SEQ ID NO: 1879480
uugcgcgagccuuuaaaga

SEQ ID NO: 1910199 - RNA, 19 nt, Artificial Sequence
  Description of Artificial Sequence: Synthetic oligonucleotide
  Antisense strand to SEQ ID NO: 1910198
ucuuuaaaggcucgcgcaa

SEQ ID NO: 1910200 - RNA, 19 nt, Artificial Sequence
  Description of Artificial Sequence: Synthetic oligonucleotide
  Sense strand starting at position 2623 of SEQ ID NO: 1879480
gacucaugccgcgaagaca

SEQ ID NO: 1910201 - RNA, 19 nt, Artificial Sequence
  Description of Artificial Sequence: Synthetic oligonucleotide
  Antisense strand to SEQ ID NO: 1910200
ugucuucgcggcaugaguc

SEQ ID NO: 1910202 - RNA, 19 nt, Artificial Sequence
  Description of Artificial Sequence: Synthetic oligonucleotide
  Sense strand starting at position 2690 of SEQ ID NO: 1879480
ccuguaaccguguuugcuu

SEQ ID NO: 1910203 - RNA, 19 nt, Artificial Sequence
  Description of Artificial Sequence: Synthetic oligonucleotide
  Antisense strand to SEQ ID NO: 1910202
aagcaaacacgguuacagg

SEQ ID NO: 1910204 - RNA, 19 nt, Artificial Sequence
  Description of Artificial Sequence: Synthetic oligonucleotide
  Sense strand starting at position 2762 of SEQ ID NO: 1879480
guuucuguagcagaaauau

SEQ ID NO: 1910205 - RNA, 19 nt, Artificial Sequence
  Description of Artificial Sequence: Synthetic oligonucleotide
  Antisense strand to SEQ ID NO: 1910204
auauuucugcuacagaaac

SEQ ID NO: 1910206 - RNA, 19 nt, Artificial Sequence
  Description of Artificial Sequence: Synthetic oligonucleotide
  Sense strand starting at position 2901 of SEQ ID NO: 1879480
guuuaauaaccuuggagug

SEQ ID NO: 1910207 - RNA, 19 nt, Artificial Sequence
  Description of Artificial Sequence: Synthetic oligonucleotide
  Antisense strand to SEQ ID NO: 1910206
cacuccaagguuauuaaac

SEQ ID NO: 1910208 - RNA, 19 nt, Artificial Sequence
  Description of Artificial Sequence: Synthetic oligonucleotide
  Sense strand starting at position 2902 of SEQ ID NO: 1879480
uuuaauaaccuuggagugu

SEQ ID NO: 1910209 - RNA, 19 nt, Artificial Sequence
  Description of Artificial Sequence: Synthetic oligonucleotide
  Antisense strand to SEQ ID NO: 1910208
acacuccaagguuauuaaa

SEQ ID NO: 1910210 - RNA, 19 nt, Artificial Sequence
  Description of Artificial Sequence: Synthetic oligonucleotide
  Sense strand starting at position 2957 of SEQ ID NO: 1879480
uguuuacucaugggucuga

SEQ ID NO: 1910211 - RNA, 19 nt, Artificial Sequence
  Description of Artificial Sequence: Synthetic oligonucleotide
  Antisense strand to SEQ ID NO: 1910210
ucagacccaugaguaaaca

SEQ ID NO: 1910212 - RNA, 19 nt, Artificial Sequence
  Description of Artificial Sequence: Synthetic oligonucleotide
  Sense strand starting at position 2961 of SEQ ID NO: 1879480
uacucaugggucugagacu

SEQ ID NO: 1910213 - RNA, 19 nt, Artificial Sequence
  Description of Artificial Sequence: Synthetic oligonucleotide
  Antisense strand to SEQ ID NO: 1910212
agucucagacccaugagua

SEQ ID NO: 1910214 - RNA, 19 nt, Artificial Sequence
  Description of Artificial Sequence: Synthetic oligonucleotide
  Sense strand starting at position 3144 of SEQ ID NO: 1879480
aaaggaguuucugcaacuu

SEQ ID NO: 1910215 - RNA, 19 nt, Artificial Sequence
  Description of Artificial Sequence: Synthetic oligonucleotide
  Antisense strand to SEQ ID NO: 1910214
aaguugcagaaacuccuuu

SEQ ID NO: 1910216 - RNA, 19 nt, Artificial Sequence
  Description of Artificial Sequence: Synthetic oligonucleotide
  Sense strand starting at position 3239 of SEQ ID NO: 1879480
ggugacagauucucaccuu

SEQ ID NO: 1910217 - RNA, 19 nt, Artificial Sequence
  Description of Artificial Sequence: Synthetic oligonucleotide
  Antisense strand to SEQ ID NO: 1910216
aaggugagaaucugucacc

SEQ ID NO: 1910218 - RNA, 19 nt, Artificial Sequence
  Description of Artificial Sequence: Synthetic oligonucleotide
  Sense strand starting at position 3300 of SEQ ID NO: 1879480
ugcugauaccuuggcuaag

SEQ ID NO: 1910219 - RNA, 19 nt, Artificial Sequence
  Description of Artificial Sequence: Synthetic oligonucleotide
  Antisense strand to SEQ ID NO: 1910218
cuuagccaagguaucagca

SEQ ID NO: 1910220 - RNA, 19 nt, Artificial Sequence
  Description of Artificial Sequence: Synthetic oligonucleotide
  Sense strand starting at position 3302 of SEQ ID NO: 1879480
cugauaccuuggcuaaguu

SEQ ID NO: 1910221 - RNA, 19 nt, Artificial Sequence
  Description of Artificial Sequence: Synthetic oligonucleotide
  Antisense strand to SEQ ID NO: 1910220
aacuuagccaagguaucag

SEQ ID NO: 1910222 - RNA, 19 nt, Artificial Sequence
  Description of Artificial Sequence: Synthetic oligonucleotide
  Sense strand starting at position 3324 of SEQ ID NO: 1879480
uguauuucuggguggagcu

SEQ ID NO: 1910223 - RNA, 19 nt, Artificial Sequence
  Description of Artificial Sequence: Synthetic oligonucleotide
  Antisense strand to SEQ ID NO: 1910222
agcuccacccagaaauaca

SEQ ID NO: 1910224 - RNA, 19 nt, Artificial Sequence
  Description of Artificial Sequence: Synthetic oligonucleotide
  Sense strand starting at position 3578 of SEQ ID NO: 1879480
ccugccuguggugacaaau

SEQ ID NO: 1910225 - RNA, 19 nt, Artificial Sequence
  Description of Artificial Sequence: Synthetic oligonucleotide
  Antisense strand to SEQ ID NO: 1910224
auuugucaccacaggcagg

SEQ ID NO: 1910226 - RNA, 19 nt, Artificial Sequence
  Description of Artificial Sequence: Synthetic oligonucleotide
  Sense strand starting at position 3597 of SEQ ID NO: 1879480
ugaagauguuacuuuccca

SEQ ID NO: 1910227 - RNA, 19 nt, Artificial Sequence
  Description of Artificial Sequence: Synthetic oligonucleotide
  Antisense strand to SEQ ID NO: 1910226
ugggaaaguaacaucuuca

SEQ ID NO: 1910228 - RNA, 19 nt, Artificial Sequence
  Description of Artificial Sequence: Synthetic oligonucleotide
  Sense strand starting at position 3600 of SEQ ID NO: 1879480
agauguuacuuucccagua

SEQ ID NO: 1910229 - RNA, 19 nt, Artificial Sequence
  Description of Artificial Sequence: Synthetic oligonucleotide
  Antisense strand to SEQ ID NO: 1910228
uacugggaaaguaacaucu

SEQ ID NO: 1910230 - RNA, 19 nt, Artificial Sequence
  Description of Artificial Sequence: Synthetic oligonucleotide
  Sense strand starting at position 3605 of SEQ ID NO: 1879480
uuacuuucccaguagcaca

SEQ ID NO: 1910231 - RNA, 19 nt, Artificial Sequence
  Description of Artificial Sequence: Synthetic oligonucleotide
  Antisense strand to SEQ ID NO: 1910230
ugugcuacugggaaaguaa

SEQ ID NO: 1910232 - RNA, 19 nt, Artificial Sequence
  Description of Artificial Sequence: Synthetic oligonucleotide
  Sense strand starting at position 3629 of SEQ ID NO: 1879480
agauauaagacgugauacc

SEQ ID NO: 1910233 - RNA, 19 nt, Artificial Sequence
  Description of Artificial Sequence: Synthetic oligonucleotide
  Antisense strand to SEQ ID NO: 1910232
gguaucacgucuuauaucu

SEQ ID NO: 1910234 - RNA, 19 nt, Artificial Sequence
  Description of Artificial Sequence: Synthetic oligonucleotide
  Sense strand starting at position 3638 of SEQ ID NO: 1879480
acgugauaccaggagaguu

SEQ ID NO: 1910235 - RNA, 19 nt, Artificial Sequence
  Description of Artificial Sequence: Synthetic oligonucleotide
  Antisense strand to SEQ ID NO: 1910234
aacucuccugguaucacgu

SEQ ID NO: 1910236 - RNA, 19 nt, Artificial Sequence
  Description of Artificial Sequence: Synthetic oligonucleotide
  Sense strand starting at position 3675 of SEQ ID NO: 1879480
cccuaagaaccuugguagu

SEQ ID NO: 1910237 - RNA, 19 nt, Artificial Sequence
  Description of Artificial Sequence: Synthetic oligonucleotide
  Antisense strand to SEQ ID NO: 1910236
acuaccaagguucuuaggg

SEQ ID NO: 1910238 - RNA, 19 nt, Artificial Sequence
  Description of Artificial Sequence: Synthetic oligonucleotide
  Sense strand starting at position 3688 of SEQ ID NO: 1879480
gguagugggccgggauuua

SEQ ID NO: 1910239 - RNA, 19 nt, Artificial Sequence
  Description of Artificial Sequence: Synthetic oligonucleotide
  Antisense strand to SEQ ID NO: 1910238
uaaaucccggcccacuacc

SEQ ID NO: 1910240 - RNA, 19 nt, Artificial Sequence
  Description of Artificial Sequence: Synthetic oligonucleotide
  Sense strand starting at position 3752 of SEQ ID NO: 1879480
aagagauuaguacguguua

SEQ ID NO: 1910241 - RNA, 19 nt, Artificial Sequence
  Description of Artificial Sequence: Synthetic oligonucleotide
  Antisense strand to SEQ ID NO: 1910240
uaacacguacuaaucucuu

SEQ ID NO: 1910242 - RNA, 19 nt, Artificial Sequence
  Description of Artificial Sequence: Synthetic oligonucleotide
  Sense strand starting at position 3753 of SEQ ID NO: 1879480
agagauuaguacguguuag

SEQ ID NO: 1910243 - RNA, 19 nt, Artificial Sequence
  Description of Artificial Sequence: Synthetic oligonucleotide
  Antisense strand to SEQ ID NO: 1910242
cuaacacguacuaaucucu

SEQ ID NO: 1910244 - RNA, 19 nt, Artificial Sequence
  Description of Artificial Sequence: Synthetic oligonucleotide
  Sense strand starting at position 3770 of SEQ ID NO: 1879480
aguagaguucuggagcugu

SEQ ID NO: 1910245 - RNA, 19 nt, Artificial Sequence
  Description of Artificial Sequence: Synthetic oligonucleotide
  Antisense strand to SEQ ID NO: 1910244
acagcuccagaacucuacu

SEQ ID NO: 1910246 - RNA, 19 nt, Artificial Sequence
  Description of Artificial Sequence: Synthetic oligonucleotide
  Sense strand starting at position 3774 of SEQ ID NO: 1879480
gaguucuggagcugugaac

SEQ ID NO: 1910247 - RNA, 19 nt, Artificial Sequence
  Description of Artificial Sequence: Synthetic oligonucleotide
  Antisense strand to SEQ ID NO: 1910246
guucacagcuccagaacuc

SEQ ID NO: 1910248 - RNA, 19 nt, Artificial Sequence
  Description of Artificial Sequence: Synthetic oligonucleotide
  Sense strand starting at position 3841 of SEQ ID NO: 1879480
cccauaaggcaaugugaaa

SEQ ID NO: 1910249 - RNA, 19 nt, Artificial Sequence
  Description of Artificial Sequence: Synthetic oligonucleotide
  Antisense strand to SEQ ID NO: 1910248
uuucacauugccuuauggg

SEQ ID NO: 1910250 - RNA, 19 nt, Artificial Sequence
  Description of Artificial Sequence: Synthetic oligonucleotide
  Sense strand starting at position 3867 of SEQ ID NO: 1879480
gccuuugcauuucuggauu

SEQ ID NO: 1910251 - RNA, 19 nt, Artificial Sequence
  Description of Artificial Sequence: Synthetic oligonucleotide
  Antisense strand to SEQ ID NO: 1910250
aauccagaaaugcaaaggc

SEQ ID NO: 1910252 - RNA, 19 nt, Artificial Sequence
  Description of Artificial Sequence: Synthetic oligonucleotide
  Sense strand starting at position 3892 of SEQ ID NO: 1879480
uguguaaggaagcagagau

SEQ ID NO: 1910253 - RNA, 19 nt, Artificial Sequence
  Description of Artificial Sequence: Synthetic oligonucleotide
  Antisense strand to SEQ ID NO: 1910252
aucucugcuuccuuacaca

SEQ ID NO: 1910254 - RNA, 19 nt, Artificial Sequence
  Description of Artificial Sequence: Synthetic oligonucleotide
  Sense strand starting at position 84 of SEQ ID NO: 1879481
ucauuuaagugucaccaca

SEQ ID NO: 1910255 - RNA, 19 nt, Artificial Sequence
  Description of Artificial Sequence: Synthetic oligonucleotide
  Antisense strand to SEQ ID NO: 1910254
uguggugacacuuaaauga

SEQ ID NO: 1910256 - RNA, 19 nt, Artificial Sequence
  Description of Artificial Sequence: Synthetic oligonucleotide
  Sense strand starting at position 97 of SEQ ID NO: 1879481
accacaguccuaugaggga

SEQ ID NO: 1910257 - RNA, 19 nt, Artificial Sequence
  Description of Artificial Sequence: Synthetic oligonucleotide
  Antisense strand to SEQ ID NO: 1910256
ucccucauaggacuguggu

SEQ ID NO: 1910258 - RNA, 19 nt, Artificial Sequence
  Description of Artificial Sequence: Synthetic oligonucleotide
  Sense strand starting at position 114 of SEQ ID NO: 1879481
gagguacuauuguuaucau

SEQ ID NO: 1910259 - RNA, 19 nt, Artificial Sequence
  Description of Artificial Sequence: Synthetic oligonucleotide
  Antisense strand to SEQ ID NO: 1910258
augauaacaauaguaccuc

SEQ ID NO: 1910260 - RNA, 19 nt, Artificial Sequence
  Description of Artificial Sequence: Synthetic oligonucleotide
  Sense strand starting at position 262 of SEQ ID NO: 1879481
auuauagcaucugugaaau

SEQ ID NO: 1910261 - RNA, 19 nt, Artificial Sequence
  Description of Artificial Sequence: Synthetic oligonucleotide
  Antisense strand to SEQ ID NO: 1910260
auuucacagaugcuauaau

SEQ ID NO: 1910262 - RNA, 19 nt, Artificial Sequence
  Description of Artificial Sequence: Synthetic oligonucleotide
  Sense strand starting at position 274 of SEQ ID NO: 1879481
gugaaauauaaguguuuag

SEQ ID NO: 1910263 - RNA, 19 nt, Artificial Sequence
  Description of Artificial Sequence: Synthetic oligonucleotide
  Antisense strand to SEQ ID NO: 1910262
cuaaacacuuauauuucac

SEQ ID NO: 1910264 - RNA, 19 nt, Artificial Sequence
  Description of Artificial Sequence: Synthetic oligonucleotide
  Sense strand starting at position 297 of SEQ ID NO: 1879481
cagauaauaugaguguguu

SEQ ID NO: 1910265 - RNA, 19 nt, Artificial Sequence
  Description of Artificial Sequence: Synthetic oligonucleotide
  Antisense strand to SEQ ID NO: 1910264
aacacacucauauuaucug

SEQ ID NO: 1910266 - RNA, 19 nt, Artificial Sequence
  Description of Artificial Sequence: Synthetic oligonucleotide
  Sense strand starting at position 298 of SEQ ID NO: 1879481
agauaauaugaguguguuu

SEQ ID NO: 1910267 - RNA, 19 nt, Artificial Sequence
  Description of Artificial Sequence: Synthetic oligonucleotide
  Antisense strand to SEQ ID NO: 1910266
aaacacacucauauuaucu

SEQ ID NO: 1910268 - RNA, 19 nt, Artificial Sequence
  Description of Artificial Sequence: Synthetic oligonucleotide
  Sense strand starting at position 425 of SEQ ID NO: 1879481
uagagacaaugugaaagua

SEQ ID NO: 1910269 - RNA, 19 nt, Artificial Sequence
  Description of Artificial Sequence: Synthetic oligonucleotide
  Antisense strand to SEQ ID NO: 1910268
uacuuucacauugucucua

SEQ ID NO: 1910270 - RNA, 19 nt, Artificial Sequence
  Description of Artificial Sequence: Synthetic oligonucleotide
  Sense strand starting at position 463 of SEQ ID NO: 1879481
agucccaggccucagaauu

SEQ ID NO: 1910271 - RNA, 19 nt, Artificial Sequence
  Description of Artificial Sequence: Synthetic oligonucleotide
  Antisense strand to SEQ ID NO: 1910270
aauucugaggccugggacu

SEQ ID NO: 1910272 - RNA, 19 nt, Artificial Sequence
  Description of Artificial Sequence: Synthetic oligonucleotide
  Sense strand starting at position 556 of SEQ ID NO: 1879481
acgcaagagccauaugagu

SEQ ID NO: 1910273 - RNA, 19 nt, Artificial Sequence
  Description of Artificial Sequence: Synthetic oligonucleotide
  Antisense strand to SEQ ID NO: 1910272
acucauauggcucuugcgu

SEQ ID NO: 1910274 - RNA, 19 nt, Artificial Sequence
  Description of Artificial Sequence: Synthetic oligonucleotide
  Sense strand starting at position 558 of SEQ ID NO: 1879481
gcaagagccauaugaguga

SEQ ID NO: 1910275 - RNA, 19 nt, Artificial Sequence
  Description of Artificial Sequence: Synthetic oligonucleotide
  Antisense strand to SEQ ID NO: 1910274
ucacucauauggcucuugc

SEQ ID NO: 1910276 - RNA, 19 nt, Artificial Sequence
  Description of Artificial Sequence: Synthetic oligonucleotide
  Sense strand starting at position 561 of SEQ ID NO: 1879481
agagccauaugagugacua

SEQ ID NO: 1910277 - RNA, 19 nt, Artificial Sequence
  Description of Artificial Sequence: Synthetic oligonucleotide
  Antisense strand to SEQ ID NO: 1910276
uagucacucauauggcucu

SEQ ID NO: 1910278 - RNA, 19 nt, Artificial Sequence
  Description of Artificial Sequence: Synthetic oligonucleotide
  Sense strand starting at position 562 of SEQ ID NO: 1879481
gagccauaugagugacuaa

SEQ ID NO: 1910279 - RNA, 19 nt, Artificial Sequence
  Description of Artificial Sequence: Synthetic oligonucleotide
  Antisense strand to SEQ ID NO: 1910278
uuagucacucauauggcuc

SEQ ID NO: 1910280 - RNA, 19 nt, Artificial Sequence
  Description of Artificial Sequence: Synthetic oligonucleotide
  Sense strand starting at position 565 of SEQ ID NO: 1879481
ccauaugagugacuaaugu

SEQ ID NO: 1910281 - RNA, 19 nt, Artificial Sequence
  Description of Artificial Sequence: Synthetic oligonucleotide
  Antisense strand to SEQ ID NO: 1910280
acauuagucacucauaugg

SEQ ID NO: 1910282 - RNA, 19 nt, Artificial Sequence
  Description of Artificial Sequence: Synthetic oligonucleotide
  Sense strand starting at position 576 of SEQ ID NO: 1879481
acuaaugucgucugggcaa

SEQ ID NO: 1910283 - RNA, 19 nt, Artificial Sequence
  Description of Artificial Sequence: Synthetic oligonucleotide
  Antisense strand to SEQ ID NO: 1910282
uugcccagacgacauuagu

SEQ ID NO: 1910284 - RNA, 19 nt, Artificial Sequence
  Description of Artificial Sequence: Synthetic oligonucleotide
  Sense strand starting at position 653 of SEQ ID NO: 1879481
guguuuauauuucucguuu

SEQ ID NO: 1910285 - RNA, 19 nt, Artificial Sequence
  Description of Artificial Sequence: Synthetic oligonucleotide
  Antisense strand to SEQ ID NO: 1910284
aaacgagaaauauaaacac

SEQ ID NO: 1910286 - RNA, 19 nt, Artificial Sequence
  Description of Artificial Sequence: Synthetic oligonucleotide
  Sense strand starting at position 685 of SEQ ID NO: 1879481
gccuuugauuuacaagggu

SEQ ID NO: 1910287 - RNA, 19 nt, Artificial Sequence
  Description of Artificial Sequence: Synthetic oligonucleotide
  Antisense strand to SEQ ID NO: 1910286
acccuuguaaaucaaaggc

SEQ ID NO: 1910288 - RNA, 19 nt, Artificial Sequence
  Description of Artificial Sequence: Synthetic oligonucleotide
  Sense strand starting at position 930 of SEQ ID NO: 1879481
aguggagguucuuuaccuu

SEQ ID NO: 1910289 - RNA, 19 nt, Artificial Sequence
  Description of Artificial Sequence: Synthetic oligonucleotide
  Antisense strand to SEQ ID NO: 1910288
aagguaaagaaccuccacu

SEQ ID NO: 1910290 - RNA, 19 nt, Artificial Sequence
  Description of Artificial Sequence: Synthetic oligonucleotide
  Sense strand starting at position 992 of SEQ ID NO: 1879481
ugagacaauuagggagaau

SEQ ID NO: 1910291 - RNA, 19 nt, Artificial Sequence
  Description of Artificial Sequence: Synthetic oligonucleotide
  Antisense strand to SEQ ID NO: 1910290
auucucccuaauugucuca

SEQ ID NO: 1910292 - RNA, 19 nt, Artificial Sequence
  Description of Artificial Sequence: Synthetic oligonucleotide
  Sense strand starting at position 1370 of SEQ ID NO: 1879481
gagagaauuugucaagugg

SEQ ID NO: 1910293 - RNA, 19 nt, Artificial Sequence
  Description of Artificial Sequence: Synthetic oligonucleotide
  Antisense strand to SEQ ID NO: 1910292
ccacuugacaaauucucuc

SEQ ID NO: 1910294 - RNA, 19 nt, Artificial Sequence
  Description of Artificial Sequence: Synthetic oligonucleotide
  Sense strand starting at position 2191 of SEQ ID NO: 1879481
ugacaaaucccguacacca

SEQ ID NO: 1910295 - RNA, 19 nt, Artificial Sequence
  Description of Artificial Sequence: Synthetic oligonucleotide
  Antisense strand to SEQ ID NO: 1910294
ugguguacgggauuuguca

SEQ ID NO: 1910296 - RNA, 19 nt, Artificial Sequence
  Description of Artificial Sequence: Synthetic oligonucleotide
  Sense strand starting at position 2245 of SEQ ID NO: 1879481
gggagauguucugugaacu

SEQ ID NO: 1910297 - RNA, 19 nt, Artificial Sequence
  Description of Artificial Sequence: Synthetic oligonucleotide
  Antisense strand to SEQ ID NO: 1910296
aguucacagaacaucuccc

SEQ ID NO: 1910298 - RNA, 19 nt, Artificial Sequence
  Description of Artificial Sequence: Synthetic oligonucleotide
  Sense strand starting at position 2246 of SEQ ID NO: 1879481
ggagauguucugugaacug

SEQ ID NO: 1910299 - RNA, 19 nt, Artificial Sequence
  Description of Artificial Sequence: Synthetic oligonucleotide
  Antisense strand to SEQ ID NO: 1910298
caguucacagaacaucucc

SEQ ID NO: 1910300 - RNA, 19 nt, Artificial Sequence
  Description of Artificial Sequence: Synthetic oligonucleotide
  Sense strand starting at position 2438 of SEQ ID NO: 1879481
ggcagaagucuccagaauu

SEQ ID NO: 1910301 - RNA, 19 nt, Artificial Sequence
  Description of Artificial Sequence: Synthetic oligonucleotide
  Antisense strand to SEQ ID NO: 1910300
aauucuggagacuucugcc

SEQ ID NO: 1910302 - RNA, 19 nt, Artificial Sequence
  Description of Artificial Sequence: Synthetic oligonucleotide
  Sense strand starting at position 2489 of SEQ ID NO: 1879481
gccugugaccuuuagaugu

SEQ ID NO: 1910303 - RNA, 19 nt, Artificial Sequence
  Description of Artificial Sequence: Synthetic oligonucleotide
  Antisense strand to SEQ ID NO: 1910302
acaucuaaaggucacaggc

SEQ ID NO: 1910304 - RNA, 19 nt, Artificial Sequence
  Description of Artificial Sequence: Synthetic oligonucleotide
  Sense strand starting at position 2500 of SEQ ID NO: 1879481
uuagauguguucccuguuu

SEQ ID NO: 1910305 - RNA, 19 nt, Artificial Sequence
  Description of Artificial Sequence: Synthetic oligonucleotide
  Antisense strand to SEQ ID NO: 1910304
aaacagggaacacaucuaa

SEQ ID NO: 1910306 - RNA, 19 nt, Artificial Sequence
  Description of Artificial Sequence: Synthetic oligonucleotide
  Sense strand starting at position 2513 of SEQ ID NO: 1879481
cuguuucuguaggcauuau

SEQ ID NO: 1910307 - RNA, 19 nt, Artificial Sequence
  Description of Artificial Sequence: Synthetic oligonucleotide
  Antisense strand to SEQ ID NO: 1910306
auaaugccuacagaaacag

SEQ ID NO: 1910308 - RNA, 19 nt, Artificial Sequence
  Description of Artificial Sequence: Synthetic oligonucleotide
  Sense strand starting at position 2517 of SEQ ID NO: 1879481
uucuguaggcauuaugaag

SEQ ID NO: 1910309 - RNA, 19 nt, Artificial Sequence
  Description of Artificial Sequence: Synthetic oligonucleotide
  Antisense strand to SEQ ID NO: 1910308
cuucauaaugccuacagaa

SEQ ID NO: 1910310 - RNA, 19 nt, Artificial Sequence
  Description of Artificial Sequence: Synthetic oligonucleotide
  Sense strand starting at position 2533 of SEQ ID NO: 1879481
aaguuagaugcaggagagu

SEQ ID NO: 1910311 - RNA, 19 nt, Artificial Sequence
  Description of Artificial Sequence: Synthetic oligonucleotide
  Antisense strand to SEQ ID NO: 1910310
acucuccugcaucuaacuu

SEQ ID NO: 1910312 - RNA, 19 nt, Artificial Sequence
  Description of Artificial Sequence: Synthetic oligonucleotide
  Sense strand starting at position 2640 of SEQ ID NO: 1879481
uggagagucucuguuggac

SEQ ID NO: 1910313 - RNA, 19 nt, Artificial Sequence
  Description of Artificial Sequence: Synthetic oligonucleotide
  Antisense strand to SEQ ID NO: 1910312
guccaacagagacucucca

SEQ ID NO: 1910314 - RNA, 19 nt, Artificial Sequence
  Description of Artificial Sequence: Synthetic oligonucleotide
  Sense strand starting at position 2680 of SEQ ID NO: 1879481
ccaguaaagcuguggauuc

SEQ ID NO: 1910315 - RNA, 19 nt, Artificial Sequence
  Description of Artificial Sequence: Synthetic oligonucleotide
  Antisense strand to SEQ ID NO: 1910314
gaauccacagcuuuacugg

SEQ ID NO: 1910316 - RNA, 19 nt, Artificial Sequence
  Description of Artificial Sequence: Synthetic oligonucleotide
  Sense strand starting at position 2690 of SEQ ID NO: 1879481
uguggauucuggagaggga

SEQ ID NO: 1910317 - RNA, 19 nt, Artificial Sequence
  Description of Artificial Sequence: Synthetic oligonucleotide
  Antisense strand to SEQ ID NO: 1910316
ucccucuccagaauccaca

SEQ ID NO: 1910318 - RNA, 19 nt, Artificial Sequence
  Description of Artificial Sequence: Synthetic oligonucleotide
  Sense strand starting at position 2810 of SEQ ID NO: 1879481
uaggguuccugggacauuu

SEQ ID NO: 1910319 - RNA, 19 nt, Artificial Sequence
  Description of Artificial Sequence: Synthetic oligonucleotide
  Antisense strand to SEQ ID NO: 1910318
aaaugucccaggaacccua

SEQ ID NO: 1910320 - RNA, 19 nt, Artificial Sequence
  Description of Artificial Sequence: Synthetic oligonucleotide
  Sense strand starting at position 2938 of SEQ ID NO: 1879481
agaagaaacuuguagaaac

SEQ ID NO: 1910321 - RNA, 19 nt, Artificial Sequence
  Description of Artificial Sequence: Synthetic oligonucleotide
  Antisense strand to SEQ ID NO: 1910320
guuucuacaaguuucuucu

SEQ ID NO: 1910322 - RNA, 19 nt, Artificial Sequence
  Description of Artificial Sequence: Synthetic oligonucleotide
  Sense strand starting at position 2957 of SEQ ID NO: 1879481
ugaggaguugugugaggag

SEQ ID NO: 1910323 - RNA, 19 nt, Artificial Sequence
  Description of Artificial Sequence: Synthetic oligonucleotide
  Antisense strand to SEQ ID NO: 1910322
cuccucacacaacuccuca

SEQ ID NO: 1910324 - RNA, 19 nt, Artificial Sequence
  Description of Artificial Sequence: Synthetic oligonucleotide
  Sense strand starting at position 3085 of SEQ ID NO: 1879481
uaagcaagggagugguaau

SEQ ID NO: 1910325 - RNA, 19 nt, Artificial Sequence
  Description of Artificial Sequence: Synthetic oligonucleotide
  Antisense strand to SEQ ID NO: 1910324
auuaccacucccuugcuua

SEQ ID NO: 1910326 - RNA, 19 nt, Artificial Sequence
  Description of Artificial Sequence: Synthetic oligonucleotide
  Sense strand starting at position 3086 of SEQ ID NO: 1879481
aagcaagggagugguaaua

SEQ ID NO: 1910327 - RNA, 19 nt, Artificial Sequence
  Description of Artificial Sequence: Synthetic oligonucleotide
  Antisense strand to SEQ ID NO: 1910326
uauuaccacucccuugcuu

SEQ ID NO: 1910328 - RNA, 19 nt, Artificial Sequence
  Description of Artificial Sequence: Synthetic oligonucleotide
  Sense strand starting at position 3439 of SEQ ID NO: 1879481
gccagauuucugugguuug

SEQ ID NO: 1910329 - RNA, 19 nt, Artificial Sequence
  Description of Artificial Sequence: Synthetic oligonucleotide
  Antisense strand to SEQ ID NO: 1910328
caaaccacagaaaucuggc

SEQ ID NO: 1910330 - RNA, 19 nt, Artificial Sequence
  Description of Artificial Sequence: Synthetic oligonucleotide
  Sense strand starting at position 3442 of SEQ ID NO: 1879481
agauuucugugguuuguuu

SEQ ID NO: 1910331 - RNA, 19 nt, Artificial Sequence
  Description of Artificial Sequence: Synthetic oligonucleotide
  Antisense strand to SEQ ID NO: 1910330
aaacaaaccacagaaaucu
